United States Patent Application Publication US 2018/0305689 A1 - sequence listing, part 118

SEQ ID NO: 1691879 - RNA, 19 nt, Artificial Sequence
  Description of Artificial Sequence: Synthetic oligonucleotide
  Sense strand starting at position 2544 of SEQ ID NO: 1561701
gugauacauuaacccugau

SEQ ID NO: 1691880 - RNA, 19 nt, Artificial Sequence
  Description of Artificial Sequence: Synthetic oligonucleotide
  Antisense strand to SEQ ID NO: 1691879
aucaggguuaauguaucac

SEQ ID NO: 1691881 - RNA, 19 nt, Artificial Sequence
  Description of Artificial Sequence: Synthetic oligonucleotide
  Sense strand starting at position 2586 of SEQ ID NO: 1561701
acauuaccuuguuuaaagu

SEQ ID NO: 1691882 - RNA, 19 nt, Artificial Sequence
  Description of Artificial Sequence: Synthetic oligonucleotide
  Antisense strand to SEQ ID NO: 1691881
acuuuaaacaagguaaugu

SEQ ID NO: 1691883 - RNA, 19 nt, Artificial Sequence
  Description of Artificial Sequence: Synthetic oligonucleotide
  Sense strand starting at position 2624 of SEQ ID NO: 1561701
agguaaacuuucuuugcuu

SEQ ID NO: 1691884 - RNA, 19 nt, Artificial Sequence
  Description of Artificial Sequence: Synthetic oligonucleotide
  Antisense strand to SEQ ID NO: 1691883
aagcaaagaaaguuuaccu

SEQ ID NO: 1691885 - RNA, 19 nt, Artificial Sequence
  Description of Artificial Sequence: Synthetic oligonucleotide
  Sense strand starting at position 2630 of SEQ ID NO: 1561701
acuuucuuugcuuguucua

SEQ ID NO: 1691886 - RNA, 19 nt, Artificial Sequence
  Description of Artificial Sequence: Synthetic oligonucleotide
  Antisense strand to SEQ ID NO: 1691885
uagaacaagcaaagaaagu

SEQ ID NO: 1691887 - RNA, 19 nt, Artificial Sequence
  Description of Artificial Sequence: Synthetic oligonucleotide
  Sense strand starting at position 2632 of SEQ ID NO: 1561701
uuucuuugcuuguucuaga

SEQ ID NO: 1691888 - RNA, 19 nt, Artificial Sequence
  Description of Artificial Sequence: Synthetic oligonucleotide
  Antisense strand to SEQ ID NO: 1691887
ucuagaacaagcaaagaaa

SEQ ID NO: 1691889 - RNA, 19 nt, Artificial Sequence
  Description of Artificial Sequence: Synthetic oligonucleotide
  Sense strand starting at position 2633 of SEQ ID NO: 1561701
uucuuugcuuguucuagau

SEQ ID NO: 1691890 - RNA, 19 nt, Artificial Sequence
  Description of Artificial Sequence: Synthetic oligonucleotide
  Antisense strand to SEQ ID NO: 1691889
aucuagaacaagcaaagaa

SEQ ID NO: 1691891 - RNA, 19 nt, Artificial Sequence
  Description of Artificial Sequence: Synthetic oligonucleotide
  Sense strand starting at position 2635 of SEQ ID NO: 1561701
cuuugcuuguucuagauau

SEQ ID NO: 1691892 - RNA, 19 nt, Artificial Sequence
  Description of Artificial Sequence: Synthetic oligonucleotide
  Antisense strand to SEQ ID NO: 1691891
auaucuagaacaagcaaag

SEQ ID NO: 1691893 - RNA, 19 nt, Artificial Sequence
  Description of Artificial Sequence: Synthetic oligonucleotide
  Sense strand starting at position 2637 of SEQ ID NO: 1561701
uugcuuguucuagauauug

SEQ ID NO: 1691894 - RNA, 19 nt, Artificial Sequence
  Description of Artificial Sequence: Synthetic oligonucleotide
  Antisense strand to SEQ ID NO: 1691893
caauaucuagaacaagcaa

SEQ ID NO: 1691895 - RNA, 19 nt, Artificial Sequence
  Description of Artificial Sequence: Synthetic oligonucleotide
  Sense strand starting at position 2642 of SEQ ID NO: 1561701
uguucuagauauuggcuua

SEQ ID NO: 1691896 - RNA, 19 nt, Artificial Sequence
  Description of Artificial Sequence: Synthetic oligonucleotide
  Antisense strand to SEQ ID NO: 1691895
uaagccaauaucuagaaca

SEQ ID NO: 1691897 - RNA, 19 nt, Artificial Sequence
  Description of Artificial Sequence: Synthetic oligonucleotide
  Sense strand starting at position 3074 of SEQ ID NO: 1561701
cguugguguggaugugaca

SEQ ID NO: 1691898 - RNA, 19 nt, Artificial Sequence
  Description of Artificial Sequence: Synthetic oligonucleotide
  Antisense strand to SEQ ID NO: 1691897
ugucacauccacaccaacg

SEQ ID NO: 1691899 - RNA, 19 nt, Artificial Sequence
  Description of Artificial Sequence: Synthetic oligonucleotide
  Sense strand starting at position 3352 of SEQ ID NO: 1561701
auguguauaugcguaucua

SEQ ID NO: 1691900 - RNA, 19 nt, Artificial Sequence
  Description of Artificial Sequence: Synthetic oligonucleotide
  Antisense strand to SEQ ID NO: 1691899
uagauacgcauauacacau

SEQ ID NO: 1691901 - RNA, 19 nt, Artificial Sequence
  Description of Artificial Sequence: Synthetic oligonucleotide
  Sense strand starting at position 3353 of SEQ ID NO: 1561701
uguguauaugcguaucuau

SEQ ID NO: 1691902 - RNA, 19 nt, Artificial Sequence
  Description of Artificial Sequence: Synthetic oligonucleotide
  Antisense strand to SEQ ID NO: 1691901
auagauacgcauauacaca

SEQ ID NO: 1691903 - RNA, 19 nt, Artificial Sequence
  Description of Artificial Sequence: Synthetic oligonucleotide
  Sense strand starting at position 3356 of SEQ ID NO: 1561701
guauaugcguaucuauaug

SEQ ID NO: 1691904 - RNA, 19 nt, Artificial Sequence
  Description of Artificial Sequence: Synthetic oligonucleotide
  Antisense strand to SEQ ID NO: 1691903
cauauagauacgcauauac

SEQ ID NO: 1691905 - RNA, 19 nt, Artificial Sequence
  Description of Artificial Sequence: Synthetic oligonucleotide
  Sense strand starting at position 121 of SEQ ID NO: 1561702
auguauuagcuguauuauc

SEQ ID NO: 1691906 - RNA, 19 nt, Artificial Sequence
  Description of Artificial Sequence: Synthetic oligonucleotide
  Antisense strand to SEQ ID NO: 1691905
gauaauacagcuaauacau

SEQ ID NO: 1691907 - RNA, 19 nt, Artificial Sequence
  Description of Artificial Sequence: Synthetic oligonucleotide
  Sense strand starting at position 157 of SEQ ID NO: 1561702
aggaaugauugccauuuaa

SEQ ID NO: 1691908 - RNA, 19 nt, Artificial Sequence
  Description of Artificial Sequence: Synthetic oligonucleotide
  Antisense strand to SEQ ID NO: 1691907
uuaaauggcaaucauuccu

SEQ ID NO: 1691909 - RNA, 19 nt, Artificial Sequence
  Description of Artificial Sequence: Synthetic oligonucleotide
  Sense strand starting at position 238 of SEQ ID NO: 1561702
ccagccugagucuauugua

SEQ ID NO: 1691910 - RNA, 19 nt, Artificial Sequence
  Description of Artificial Sequence: Synthetic oligonucleotide
  Antisense strand to SEQ ID NO: 1691909
uacaauagacucaggcugg

SEQ ID NO: 1691911 - RNA, 19 nt, Artificial Sequence
  Description of Artificial Sequence: Synthetic oligonucleotide
  Sense strand starting at position 301 of SEQ ID NO: 1561702
acauguuucuggucuuaac

SEQ ID NO: 1691912 - RNA, 19 nt, Artificial Sequence
  Description of Artificial Sequence: Synthetic oligonucleotide
  Antisense strand to SEQ ID NO: 1691911
guuaagaccagaaacaugu

SEQ ID NO: 1691913 - RNA, 19 nt, Artificial Sequence
  Description of Artificial Sequence: Synthetic oligonucleotide
  Sense strand starting at position 345 of SEQ ID NO: 1561702
ccgucugucggagaagaaa

SEQ ID NO: 1691914 - RNA, 19 nt, Artificial Sequence
  Description of Artificial Sequence: Synthetic oligonucleotide
  Antisense strand to SEQ ID NO: 1691913
uuucuucuccgacagacgg

SEQ ID NO: 1691915 - RNA, 19 nt, Artificial Sequence
  Description of Artificial Sequence: Synthetic oligonucleotide
  Sense strand starting at position 441 of SEQ ID NO: 1561702
gagagauaugcuuagcaca

SEQ ID NO: 1691916 - RNA, 19 nt, Artificial Sequence
  Description of Artificial Sequence: Synthetic oligonucleotide
  Antisense strand to SEQ ID NO: 1691915
ugugcuaagcauaucucuc

SEQ ID NO: 1691917 - RNA, 19 nt, Artificial Sequence
  Description of Artificial Sequence: Synthetic oligonucleotide
  Sense strand starting at position 471 of SEQ ID NO: 1561702
agagcugagugcucaggaa

SEQ ID NO: 1691918 - RNA, 19 nt, Artificial Sequence
  Description of Artificial Sequence: Synthetic oligonucleotide
  Antisense strand to SEQ ID NO: 1691917
uuccugagcacucagcucu

SEQ ID NO: 1691919 - RNA, 19 nt, Artificial Sequence
  Description of Artificial Sequence: Synthetic oligonucleotide
  Sense strand starting at position 1034 of SEQ ID NO: 1561702
gggacucuguucccaaaca

SEQ ID NO: 1691920 - RNA, 19 nt, Artificial Sequence
  Description of Artificial Sequence: Synthetic oligonucleotide
  Antisense strand to SEQ ID NO: 1691919
uguuugggaacagaguccc

SEQ ID NO: 1691921 - RNA, 19 nt, Artificial Sequence
  Description of Artificial Sequence: Synthetic oligonucleotide
  Sense strand starting at position 1095 of SEQ ID NO: 1561702
uggcuuuauaauuggugau

SEQ ID NO: 1691922 - RNA, 19 nt, Artificial Sequence
  Description of Artificial Sequence: Synthetic oligonucleotide
  Antisense strand to SEQ ID NO: 1691921
aucaccaauuauaaagcca

SEQ ID NO: 1691923 - RNA, 19 nt, Artificial Sequence
  Description of Artificial Sequence: Synthetic oligonucleotide
  Sense strand starting at position 1096 of SEQ ID NO: 1561702
ggcuuuauaauuggugauc

SEQ ID NO: 1691924 - RNA, 19 nt, Artificial Sequence
  Description of Artificial Sequence: Synthetic oligonucleotide
  Antisense strand to SEQ ID NO: 1691923
gaucaccaauuauaaagcc

SEQ ID NO: 1691925 - RNA, 19 nt, Artificial Sequence
  Description of Artificial Sequence: Synthetic oligonucleotide
  Sense strand starting at position 1097 of SEQ ID NO: 1561702
gcuuuauaauuggugauca

SEQ ID NO: 1691926 - RNA, 19 nt, Artificial Sequence
  Description of Artificial Sequence: Synthetic oligonucleotide
  Antisense strand to SEQ ID NO: 1691925
ugaucaccaauuauaaagc

SEQ ID NO: 1691927 - RNA, 19 nt, Artificial Sequence
  Description of Artificial Sequence: Synthetic oligonucleotide
  Sense strand starting at position 1101 of SEQ ID NO: 1561702
uauaauuggugaucauugu

SEQ ID NO: 1691928 - RNA, 19 nt, Artificial Sequence
  Description of Artificial Sequence: Synthetic oligonucleotide
  Antisense strand to SEQ ID NO: 1691927
acaaugaucaccaauuaua

SEQ ID NO: 1691929 - RNA, 19 nt, Artificial Sequence
  Description of Artificial Sequence: Synthetic oligonucleotide
  Sense strand starting at position 1230 of SEQ ID NO: 1561702
acaacaguaguaugaacau

SEQ ID NO: 1691930 - RNA, 19 nt, Artificial Sequence
  Description of Artificial Sequence: Synthetic oligonucleotide
  Antisense strand to SEQ ID NO: 1691929
auguucauacuacuguugu

SEQ ID NO: 1691931 - RNA, 19 nt, Artificial Sequence
  Description of Artificial Sequence: Synthetic oligonucleotide
  Sense strand starting at position 1236 of SEQ ID NO: 1561702
guaguaugaacauguuacu

SEQ ID NO: 1691932 - RNA, 19 nt, Artificial Sequence
  Description of Artificial Sequence: Synthetic oligonucleotide
  Antisense strand to SEQ ID NO: 1691931
aguaacauguucauacuac

SEQ ID NO: 1691933 - RNA, 19 nt, Artificial Sequence
  Description of Artificial Sequence: Synthetic oligonucleotide
  Sense strand starting at position 1335 of SEQ ID NO: 1561702
gugauuccgacagggaagu

SEQ ID NO: 1691934 - RNA, 19 nt, Artificial Sequence
  Description of Artificial Sequence: Synthetic oligonucleotide
  Antisense strand to SEQ ID NO: 1691933
acuucccugucggaaucac

SEQ ID NO: 1691935 - RNA, 19 nt, Artificial Sequence
  Description of Artificial Sequence: Synthetic oligonucleotide
  Sense strand starting at position 1377 of SEQ ID NO: 1561702
uugucauagcaacaagagu

SEQ ID NO: 1691936 - RNA, 19 nt, Artificial Sequence
  Description of Artificial Sequence: Synthetic oligonucleotide
  Antisense strand to SEQ ID NO: 1691935
acucuuguugcuaugacaa

SEQ ID NO: 1691937 - RNA, 19 nt, Artificial Sequence
  Description of Artificial Sequence: Synthetic oligonucleotide
  Sense strand starting at position 1431 of SEQ ID NO: 1561702
gcaugacucagggacaugu

SEQ ID NO: 1691938 - RNA, 19 nt, Artificial Sequence
  Description of Artificial Sequence: Synthetic oligonucleotide
  Antisense strand to SEQ ID NO: 1691937
acaugucccugagucaugc

SEQ ID NO: 1691939 - RNA, 19 nt, Artificial Sequence
  Description of Artificial Sequence: Synthetic oligonucleotide
  Sense strand starting at position 1607 of SEQ ID NO: 1561702
gcucaaggugcagaugaau

SEQ ID NO: 1691940 - RNA, 19 nt, Artificial Sequence
  Description of Artificial Sequence: Synthetic oligonucleotide
  Antisense strand to SEQ ID NO: 1691939
auucaucugcaccuugagc

SEQ ID NO: 1691941 - RNA, 19 nt, Artificial Sequence
  Description of Artificial Sequence: Synthetic oligonucleotide
  Sense strand starting at position 1802 of SEQ ID NO: 1561702
ucuaaauucuggcuuggag

SEQ ID NO: 1691942 - RNA, 19 nt, Artificial Sequence
  Description of Artificial Sequence: Synthetic oligonucleotide
  Antisense strand to SEQ ID NO: 1691941
cuccaagccagaauuuaga

SEQ ID NO: 1691943 - RNA, 19 nt, Artificial Sequence
  Description of Artificial Sequence: Synthetic oligonucleotide
  Sense strand starting at position 1986 of SEQ ID NO: 1561702
aucgaauccuuguucugaa

SEQ ID NO: 1691944 - RNA, 19 nt, Artificial Sequence
  Description of Artificial Sequence: Synthetic oligonucleotide
  Antisense strand to SEQ ID NO: 1691943
uucagaacaaggauucgau

SEQ ID NO: 1691945 - RNA, 19 nt, Artificial Sequence
  Description of Artificial Sequence: Synthetic oligonucleotide
  Sense strand starting at position 1987 of SEQ ID NO: 1561702
ucgaauccuuguucugaac

SEQ ID NO: 1691946 - RNA, 19 nt, Artificial Sequence
  Description of Artificial Sequence: Synthetic oligonucleotide
  Antisense strand to SEQ ID NO: 1691945
guucagaacaaggauucga

SEQ ID NO: 1691947 - RNA, 19 nt, Artificial Sequence
  Description of Artificial Sequence: Synthetic oligonucleotide
  Sense strand starting at position 2102 of SEQ ID NO: 1561702
gaaaguaccuggccagagu

SEQ ID NO: 1691948 - RNA, 19 nt, Artificial Sequence
  Description of Artificial Sequence: Synthetic oligonucleotide
  Antisense strand to SEQ ID NO: 1691947
acucuggccagguacuuuc

SEQ ID NO: 1691949 - RNA, 19 nt, Artificial Sequence
  Description of Artificial Sequence: Synthetic oligonucleotide
  Sense strand starting at position 2441 of SEQ ID NO: 1561702
gguucuauccucuacugga

SEQ ID NO: 1691950 - RNA, 19 nt, Artificial Sequence
  Description of Artificial Sequence: Synthetic oligonucleotide
  Antisense strand to SEQ ID NO: 1691949
uccaguagaggauagaacc

SEQ ID NO: 1691951 - RNA, 19 nt, Artificial Sequence
  Description of Artificial Sequence: Synthetic oligonucleotide
  Sense strand starting at position 2504 of SEQ ID NO: 1561702
ucccucguccuuuacagaa

SEQ ID NO: 1691952 - RNA, 19 nt, Artificial Sequence
  Description of Artificial Sequence: Synthetic oligonucleotide
  Antisense strand to SEQ ID NO: 1691951
uucuguaaaggacgaggga

SEQ ID NO: 1691953 - RNA, 19 nt, Artificial Sequence
  Description of Artificial Sequence: Synthetic oligonucleotide
  Sense strand starting at position 2772 of SEQ ID NO: 1561702
ucuggagauccugguuaaa

SEQ ID NO: 1691954 - RNA, 19 nt, Artificial Sequence
  Description of Artificial Sequence: Synthetic oligonucleotide
  Antisense strand to SEQ ID NO: 1691953
uuuaaccaggaucuccaga

SEQ ID NO: 1691955 - RNA, 19 nt, Artificial Sequence
  Description of Artificial Sequence: Synthetic oligonucleotide
  Sense strand starting at position 2774 of SEQ ID NO: 1561702
uggagauccugguuaaacu

SEQ ID NO: 1691956 - RNA, 19 nt, Artificial Sequence
  Description of Artificial Sequence: Synthetic oligonucleotide
  Antisense strand to SEQ ID NO: 1691955
aguuuaaccaggaucucca

SEQ ID NO: 1691957 - RNA, 19 nt, Artificial Sequence
  Description of Artificial Sequence: Synthetic oligonucleotide
  Sense strand starting at position 2863 of SEQ ID NO: 1561702
gucacuaugugauccugga

SEQ ID NO: 1691958 - RNA, 19 nt, Artificial Sequence
  Description of Artificial Sequence: Synthetic oligonucleotide
  Antisense strand to SEQ ID NO: 1691957
uccaggaucacauagugac

SEQ ID NO: 1691959 - RNA, 19 nt, Artificial Sequence
  Description of Artificial Sequence: Synthetic oligonucleotide
  Sense strand starting at position 2867 of SEQ ID NO: 1561702
cuaugugauccuggagguu

SEQ ID NO: 1691960 - RNA, 19 nt, Artificial Sequence
  Description of Artificial Sequence: Synthetic oligonucleotide
  Antisense strand to SEQ ID NO: 1691959
aaccuccaggaucacauag

SEQ ID NO: 1691961 - RNA, 19 nt, Artificial Sequence
  Description of Artificial Sequence: Synthetic oligonucleotide
  Sense strand starting at position 2959 of SEQ ID NO: 1561702
aaaggugucaccggaaguc

SEQ ID NO: 1691962 - RNA, 19 nt, Artificial Sequence
  Description of Artificial Sequence: Synthetic oligonucleotide
  Antisense strand to SEQ ID NO: 1691961
gacuuccggugacaccuuu

SEQ ID NO: 1691963 - RNA, 19 nt, Artificial Sequence
  Description of Artificial Sequence: Synthetic oligonucleotide
  Sense strand starting at position 3002 of SEQ ID NO: 1561702
uguguauagcauuaucgau

SEQ ID NO: 1691964 - RNA, 19 nt, Artificial Sequence
  Description of Artificial Sequence: Synthetic oligonucleotide
  Antisense strand to SEQ ID NO: 1691963
aucgauaaugcuauacaca

SEQ ID NO: 1691965 - RNA, 19 nt, Artificial Sequence
  Description of Artificial Sequence: Synthetic oligonucleotide
  Sense strand starting at position 3004 of SEQ ID NO: 1561702
uguauagcauuaucgauua

SEQ ID NO: 1691966 - RNA, 19 nt, Artificial Sequence
  Description of Artificial Sequence: Synthetic oligonucleotide
  Antisense strand to SEQ ID NO: 1691965
uaaucgauaaugcuauaca

SEQ ID NO: 1691967 - RNA, 19 nt, Artificial Sequence
  Description of Artificial Sequence: Synthetic oligonucleotide
  Sense strand starting at position 3009 of SEQ ID NO: 1561702
agcauuaucgauuacacua

SEQ ID NO: 1691968 - RNA, 19 nt, Artificial Sequence
  Description of Artificial Sequence: Synthetic oligonucleotide
  Antisense strand to SEQ ID NO: 1691967
uaguguaaucgauaaugcu

SEQ ID NO: 1691969 - RNA, 19 nt, Artificial Sequence
  Description of Artificial Sequence: Synthetic oligonucleotide
  Sense strand starting at position 3036 of SEQ ID NO: 1561702
guuccauggcaggaagagu

SEQ ID NO: 1691970 - RNA, 19 nt, Artificial Sequence
  Description of Artificial Sequence: Synthetic oligonucleotide
  Antisense strand to SEQ ID NO: 1691969
acucuuccugccauggaac

SEQ ID NO: 1691971 - RNA, 19 nt, Artificial Sequence
  Description of Artificial Sequence: Synthetic oligonucleotide
  Sense strand starting at position 3047 of SEQ ID NO: 1561702
ggaagaguuucaguguaca

SEQ ID NO: 1691972 - RNA, 19 nt, Artificial Sequence
  Description of Artificial Sequence: Synthetic oligonucleotide
  Antisense strand to SEQ ID NO: 1691971
uguacacugaaacucuucc

SEQ ID NO: 1691973 - RNA, 19 nt, Artificial Sequence
  Description of Artificial Sequence: Synthetic oligonucleotide
  Sense strand starting at position 3068 of SEQ ID NO: 1561702
guggucaucugagcuagaa

SEQ ID NO: 1691974 - RNA, 19 nt, Artificial Sequence
  Description of Artificial Sequence: Synthetic oligonucleotide
  Antisense strand to SEQ ID NO: 1691973
uucuagcucagaugaccac

SEQ ID NO: 1691975 - RNA, 19 nt, Artificial Sequence
  Description of Artificial Sequence: Synthetic oligonucleotide
  Sense strand starting at position 3070 of SEQ ID NO: 1561702
ggucaucugagcuagaaca

SEQ ID NO: 1691976 - RNA, 19 nt, Artificial Sequence
  Description of Artificial Sequence: Synthetic oligonucleotide
  Antisense strand to SEQ ID NO: 1691975
uguucuagcucagaugacc

SEQ ID NO: 1691977 - RNA, 19 nt, Artificial Sequence
  Description of Artificial Sequence: Synthetic oligonucleotide
  Sense strand starting at position 3072 of SEQ ID NO: 1561702
ucaucugagcuagaacauu

SEQ ID NO: 1691978 - RNA, 19 nt, Artificial Sequence
  Description of Artificial Sequence: Synthetic oligonucleotide
  Antisense strand to SEQ ID NO: 1691977
aauguucuagcucagauga

SEQ ID NO: 1691979 - RNA, 19 nt, Artificial Sequence
  Description of Artificial Sequence: Synthetic oligonucleotide
  Sense strand starting at position 3136 of SEQ ID NO: 1561702
gugggaacaccucacuagu

SEQ ID NO: 1691980 - RNA, 19 nt, Artificial Sequence
  Description of Artificial Sequence: Synthetic oligonucleotide
  Antisense strand to SEQ ID NO: 1691979
acuagugagguguucccac

SEQ ID NO: 1691981 - RNA, 19 nt, Artificial Sequence
  Description of Artificial Sequence: Synthetic oligonucleotide
  Sense strand starting at position 3139 of SEQ ID NO: 1561702
ggaacaccucacuagucuu

SEQ ID NO: 1691982 - RNA, 19 nt, Artificial Sequence
  Description of Artificial Sequence: Synthetic oligonucleotide
  Antisense strand to SEQ ID NO: 1691981
aagacuagugagguguucc

SEQ ID NO: 1691983 - RNA, 19 nt, Artificial Sequence
  Description of Artificial Sequence: Synthetic oligonucleotide
  Sense strand starting at position 3161 of SEQ ID NO: 1561702
uguuuauuugcccauccga

SEQ ID NO: 1691984 - RNA, 19 nt, Artificial Sequence
  Description of Artificial Sequence: Synthetic oligonucleotide
  Antisense strand to SEQ ID NO: 1691983
ucggaugggcaaauaaaca

SEQ ID NO: 1691985 - RNA, 19 nt, Artificial Sequence
  Description of Artificial Sequence: Synthetic oligonucleotide
  Sense strand starting at position 21 of SEQ ID NO: 1561703
agaccuggguggugaagaa

SEQ ID NO: 1691986 - RNA, 19 nt, Artificial Sequence
  Description of Artificial Sequence: Synthetic oligonucleotide
  Antisense strand to SEQ ID NO: 1691985
uucuucaccacccaggucu

SEQ ID NO: 1691987 - RNA, 19 nt, Artificial Sequence
  Description of Artificial Sequence: Synthetic oligonucleotide
  Sense strand starting at position 366 of SEQ ID NO: 1561703
agguuagauguuuguccua

SEQ ID NO: 1691988 - RNA, 19 nt, Artificial Sequence
  Description of Artificial Sequence: Synthetic oligonucleotide
  Antisense strand to SEQ ID NO: 1691987
uaggacaaacaucuaaccu

SEQ ID NO: 1691989 - RNA, 19 nt, Artificial Sequence
  Description of Artificial Sequence: Synthetic oligonucleotide
  Sense strand starting at position 371 of SEQ ID NO: 1561703
agauguuuguccuacccaa

SEQ ID NO: 1691990 - RNA, 19 nt, Artificial Sequence
  Description of Artificial Sequence: Synthetic oligonucleotide
  Antisense strand to SEQ ID NO: 1691989
uuggguaggacaaacaucu

SEQ ID NO: 1691991 - RNA, 19 nt, Artificial Sequence
  Description of Artificial Sequence: Synthetic oligonucleotide
  Sense strand starting at position 503 of SEQ ID NO: 1561703
augagagccgguuguuuaa

SEQ ID NO: 1691992 - RNA, 19 nt, Artificial Sequence
  Description of Artificial Sequence: Synthetic oligonucleotide
  Antisense strand to SEQ ID NO: 1691991
uuaaacaaccggcucucau

SEQ ID NO: 1691993 - RNA, 19 nt, Artificial Sequence
  Description of Artificial Sequence: Synthetic oligonucleotide
  Sense strand starting at position 577 of SEQ ID NO: 1561703
cccgcuuugccuuccauua

SEQ ID NO: 1691994 - RNA, 19 nt, Artificial Sequence
  Description of Artificial Sequence: Synthetic oligonucleotide
  Antisense strand to SEQ ID NO: 1691993
uaauggaaggcaaagcggg

SEQ ID NO: 1691995 - RNA, 19 nt, Artificial Sequence
  Description of Artificial Sequence: Synthetic oligonucleotide
  Sense strand starting at position 578 of SEQ ID NO: 1561703
ccgcuuugccuuccauuau

SEQ ID NO: 1691996 - RNA, 19 nt, Artificial Sequence
  Description of Artificial Sequence: Synthetic oligonucleotide
  Antisense strand to SEQ ID NO: 1691995
auaauggaaggcaaagcgg

SEQ ID NO: 1691997 - RNA, 19 nt, Artificial Sequence
  Description of Artificial Sequence: Synthetic oligonucleotide
  Sense strand starting at position 658 of SEQ ID NO: 1561703
gcaggaccaugagucaauu

SEQ ID NO: 1691998 - RNA, 19 nt, Artificial Sequence
  Description of Artificial Sequence: Synthetic oligonucleotide
  Antisense strand to SEQ ID NO: 1691997
aauugacucaugguccugc

SEQ ID NO: 1691999 - RNA, 19 nt, Artificial Sequence
  Description of Artificial Sequence: Synthetic oligonucleotide
  Sense strand starting at position 852 of SEQ ID NO: 1561703
guaagauacagcuggcuuu

SEQ ID NO: 1692000 - RNA, 19 nt, Artificial Sequence
  Description of Artificial Sequence: Synthetic oligonucleotide
  Antisense strand to SEQ ID NO: 1691999
aaagccagcuguaucuuac

SEQ ID NO: 1692001 - RNA, 19 nt, Artificial Sequence
  Description of Artificial Sequence: Synthetic oligonucleotide
  Sense strand starting at position 985 of SEQ ID NO: 1561703
cuuugauuauauuaggcau

SEQ ID NO: 1692002 - RNA, 19 nt, Artificial Sequence
  Description of Artificial Sequence: Synthetic oligonucleotide
  Antisense strand to SEQ ID NO: 1692001
augccuaauauaaucaaag

SEQ ID NO: 1692003 - RNA, 19 nt, Artificial Sequence
  Description of Artificial Sequence: Synthetic oligonucleotide
  Sense strand starting at position 1044 of SEQ ID NO: 1561703
uguguagguuacuugcaua

SEQ ID NO: 1692004 - RNA, 19 nt, Artificial Sequence
  Description of Artificial Sequence: Synthetic oligonucleotide
  Antisense strand to SEQ ID NO: 1692003
uaugcaaguaaccuacaca

SEQ ID NO: 1692005 - RNA, 19 nt, Artificial Sequence
  Description of Artificial Sequence: Synthetic oligonucleotide
  Sense strand starting at position 1049 of SEQ ID NO: 1561703
agguuacuugcauauacua

SEQ ID NO: 1692006 - RNA, 19 nt, Artificial Sequence
  Description of Artificial Sequence: Synthetic oligonucleotide
  Antisense strand to SEQ ID NO: 1692005
uaguauaugcaaguaaccu

SEQ ID NO: 1692007 - RNA, 19 nt, Artificial Sequence
  Description of Artificial Sequence: Synthetic oligonucleotide
  Sense strand starting at position 1071 of SEQ ID NO: 1561703
cuucuuauacaagggacuu

SEQ ID NO: 1692008 - RNA, 19 nt, Artificial Sequence
  Description of Artificial Sequence: Synthetic oligonucleotide
  Antisense strand to SEQ ID NO: 1692007
aagucccuuguauaagaag

SEQ ID NO: 1692009 - RNA, 19 nt, Artificial Sequence
  Description of Artificial Sequence: Synthetic oligonucleotide
  Sense strand starting at position 1086 of SEQ ID NO: 1561703
acuuaaggauccucggauu

SEQ ID NO: 1692010 - RNA, 19 nt, Artificial Sequence
  Description of Artificial Sequence: Synthetic oligonucleotide
  Antisense strand to SEQ ID NO: 1692009
aauccgaggauccuuaagu

SEQ ID NO: 1692011 - RNA, 19 nt, Artificial Sequence
  Description of Artificial Sequence: Synthetic oligonucleotide
  Sense strand starting at position 1145 of SEQ ID NO: 1561703
ggacaauaguugugaagac

SEQ ID NO: 1692012 - RNA, 19 nt, Artificial Sequence
  Description of Artificial Sequence: Synthetic oligonucleotide
  Antisense strand to SEQ ID NO: 1692011
gucuucacaacuauugucc

SEQ ID NO: 1692013 - RNA, 19 nt, Artificial Sequence
  Description of Artificial Sequence: Synthetic oligonucleotide
  Sense strand starting at position 1146 of SEQ ID NO: 1561703
gacaauaguugugaagaca

SEQ ID NO: 1692014 - RNA, 19 nt, Artificial Sequence
  Description of Artificial Sequence: Synthetic oligonucleotide
  Antisense strand to SEQ ID NO: 1692013
ugucuucacaacuauuguc

SEQ ID NO: 1692015 - RNA, 19 nt, Artificial Sequence
  Description of Artificial Sequence: Synthetic oligonucleotide
  Sense strand starting at position 1209 of SEQ ID NO: 1561703
gugaguugcgggcauucau

SEQ ID NO: 1692016 - RNA, 19 nt, Artificial Sequence
  Description of Artificial Sequence: Synthetic oligonucleotide
  Antisense strand to SEQ ID NO: 1692015
augaaugcccgcaacucac

SEQ ID NO: 1692017 - RNA, 19 nt, Artificial Sequence
  Description of Artificial Sequence: Synthetic oligonucleotide
  Sense strand starting at position 1234 of SEQ ID NO: 1561703
auuagauucucaccgcugu

SEQ ID NO: 1692018 - RNA, 19 nt, Artificial Sequence
  Description of Artificial Sequence: Synthetic oligonucleotide
  Antisense strand to SEQ ID NO: 1692017
acagcggugagaaucuaau

SEQ ID NO: 1692019 - RNA, 19 nt, Artificial Sequence
  Description of Artificial Sequence: Synthetic oligonucleotide
  Sense strand starting at position 1366 of SEQ ID NO: 1561703
cgaagccuguguccucaau

SEQ ID NO: 1692020 - RNA, 19 nt, Artificial Sequence
  Description of Artificial Sequence: Synthetic oligonucleotide
  Antisense strand to SEQ ID NO: 1692019
auugaggacacaggcuucg

SEQ ID NO: 1692021 - RNA, 19 nt, Artificial Sequence
  Description of Artificial Sequence: Synthetic oligonucleotide
  Sense strand starting at position 1488 of SEQ ID NO: 1561703
ccggaauccaggugaucau

SEQ ID NO: 1692022 - RNA, 19 nt, Artificial Sequence
  Description of Artificial Sequence: Synthetic oligonucleotide
  Antisense strand to SEQ ID NO: 1692021
augaucaccuggauuccgg

SEQ ID NO: 1692023 - RNA, 19 nt, Artificial Sequence
  Description of Artificial Sequence: Synthetic oligonucleotide
  Sense strand starting at position 1489 of SEQ ID NO: 1561703
cggaauccaggugaucauu

SEQ ID NO: 1692024 - RNA, 19 nt, Artificial Sequence
  Description of Artificial Sequence: Synthetic oligonucleotide
  Antisense strand to SEQ ID NO: 1692023
aaugaucaccuggauuccg

SEQ ID NO: 1692025 - RNA, 19 nt, Artificial Sequence
  Description of Artificial Sequence: Synthetic oligonucleotide
  Sense strand starting at position 1491 of SEQ ID NO: 1561703
gaauccaggugaucauuga

SEQ ID NO: 1692026 - RNA, 19 nt, Artificial Sequence
  Description of Artificial Sequence: Synthetic oligonucleotide
  Antisense strand to SEQ ID NO: 1692025
ucaaugaucaccuggauuc

SEQ ID NO: 1692027 - RNA, 19 nt, Artificial Sequence
  Description of Artificial Sequence: Synthetic oligonucleotide
  Sense strand starting at position 2115 of SEQ ID NO: 1561703
ggcuauugucuuggaggga

SEQ ID NO: 1692028 - RNA, 19 nt, Artificial Sequence
  Description of Artificial Sequence: Synthetic oligonucleotide
  Antisense strand to SEQ ID NO: 1692027
ucccuccaagacaauagcc

SEQ ID NO: 1692029 - RNA, 19 nt, Artificial Sequence
  Description of Artificial Sequence: Synthetic oligonucleotide
  Sense strand starting at position 2116 of SEQ ID NO: 1561703
gcuauugucuuggagggaa

SEQ ID NO: 1692030 - RNA, 19 nt, Artificial Sequence
  Description of Artificial Sequence: Synthetic oligonucleotide
  Antisense strand to SEQ ID NO: 1692029
uucccuccaagacaauagc

SEQ ID NO: 1692031 - RNA, 19 nt, Artificial Sequence
  Description of Artificial Sequence: Synthetic oligonucleotide
  Sense strand starting at position 2118 of SEQ ID NO: 1561703
uauugucuuggagggaaau

SEQ ID NO: 1692032 - RNA, 19 nt, Artificial Sequence
  Description of Artificial Sequence: Synthetic oligonucleotide
  Antisense strand to SEQ ID NO: 1692031
auuucccuccaagacaaua

SEQ ID NO: 1692033 - RNA, 19 nt, Artificial Sequence
  Description of Artificial Sequence: Synthetic oligonucleotide
  Sense strand starting at position 2142 of SEQ ID NO: 1561703
cugccugcgcugcugaaau

SEQ ID NO: 1692034 - RNA, 19 nt, Artificial Sequence
  Description of Artificial Sequence: Synthetic oligonucleotide
  Antisense strand to SEQ ID NO: 1692033
auuucagcagcgcaggcag

SEQ ID NO: 1692035 - RNA, 19 nt, Artificial Sequence
  Description of Artificial Sequence: Synthetic oligonucleotide
  Sense strand starting at position 2153 of SEQ ID NO: 1561703
gcugaaauguuccugcacu

SEQ ID NO: 1692036 - RNA, 19 nt, Artificial Sequence
  Description of Artificial Sequence: Synthetic oligonucleotide
  Antisense strand to SEQ ID NO: 1692035
agugcaggaacauuucagc

SEQ ID NO: 1692037 - RNA, 19 nt, Artificial Sequence
  Description of Artificial Sequence: Synthetic oligonucleotide
  Sense strand starting at position 2333 of SEQ ID NO: 1561703
uucacauugugggugagaa

SEQ ID NO: 1692038 - RNA, 19 nt, Artificial Sequence
  Description of Artificial Sequence: Synthetic oligonucleotide
  Antisense strand to SEQ ID NO: 1692037
uucucacccacaaugugaa

SEQ ID NO: 1692039 - RNA, 19 nt, Artificial Sequence
  Description of Artificial Sequence: Synthetic oligonucleotide
  Sense strand starting at position 2334 of SEQ ID NO: 1561703
ucacauugugggugagaaa

SEQ ID NO: 1692040 - RNA, 19 nt, Artificial Sequence
  Description of Artificial Sequence: Synthetic oligonucleotide
  Antisense strand to SEQ ID NO: 1692039
uuucucacccacaauguga

SEQ ID NO: 1692041 - RNA, 19 nt, Artificial Sequence
  Description of Artificial Sequence: Synthetic oligonucleotide
  Sense strand starting at position 2487 of SEQ ID NO: 1561703
cgcucagccgggugaaaga

SEQ ID NO: 1692042 - RNA, 19 nt, Artificial Sequence
  Description of Artificial Sequence: Synthetic oligonucleotide
  Antisense strand to SEQ ID NO: 1692041
ucuuucacccggcugagcg

SEQ ID NO: 1692043 - RNA, 19 nt, Artificial Sequence
  Description of Artificial Sequence: Synthetic oligonucleotide
  Sense strand starting at position 2512 of SEQ ID NO: 1561703
agcccuuggcugcagagau

SEQ ID NO: 1692044 - RNA, 19 nt, Artificial Sequence
  Description of Artificial Sequence: Synthetic oligonucleotide
  Antisense strand to SEQ ID NO: 1692043
aucucugcagccaagggcu

SEQ ID NO: 1692045 - RNA, 19 nt, Artificial Sequence
  Description of Artificial Sequence: Synthetic oligonucleotide
  Sense strand starting at position 2558 of SEQ ID NO: 1561703
gagugaucagcaggacaug

SEQ ID NO: 1692046 - RNA, 19 nt, Artificial Sequence
  Description of Artificial Sequence: Synthetic oligonucleotide
  Antisense strand to SEQ ID NO: 1692045
cauguccugcugaucacuc

SEQ ID NO: 1692047 - RNA, 19 nt, Artificial Sequence
  Description of Artificial Sequence: Synthetic oligonucleotide
  Sense strand starting at position 2704 of SEQ ID NO: 1561703
agaagucagcaucgucaaa

SEQ ID NO: 1692048 - RNA, 19 nt, Artificial Sequence
  Description of Artificial Sequence: Synthetic oligonucleotide
  Antisense strand to SEQ ID NO: 1692047
uuugacgaugcugacuucu

SEQ ID NO: 1692049 - RNA, 19 nt, Artificial Sequence
  Description of Artificial Sequence: Synthetic oligonucleotide
  Sense strand starting at position 2706 of SEQ ID NO: 1561703
aagucagcaucgucaaauu

SEQ ID NO: 1692050 - RNA, 19 nt, Artificial Sequence
  Description of Artificial Sequence: Synthetic oligonucleotide
  Antisense strand to SEQ ID NO: 1692049
aauuugacgaugcugacuu

SEQ ID NO: 1692051 - RNA, 19 nt, Artificial Sequence
  Description of Artificial Sequence: Synthetic oligonucleotide
  Sense strand starting at position 2776 of SEQ ID NO: 1561703
cacugagggacucguguua

SEQ ID NO: 1692052 - RNA, 19 nt, Artificial Sequence
  Description of Artificial Sequence: Synthetic oligonucleotide
  Antisense strand to SEQ ID NO: 1692051
uaacacgagucccucagug

SEQ ID NO: 1692053 - RNA, 19 nt, Artificial Sequence
  Description of Artificial Sequence: Synthetic oligonucleotide
  Sense strand starting at position 3373 of SEQ ID NO: 1561703
gugcaugaccucuggagca

SEQ ID NO: 1692054 - RNA, 19 nt, Artificial Sequence
  Description of Artificial Sequence: Synthetic oligonucleotide
  Antisense strand to SEQ ID NO: 1692053
ugcuccagaggucaugcac

SEQ ID NO: 1692055 - RNA, 19 nt, Artificial Sequence
  Description of Artificial Sequence: Synthetic oligonucleotide
  Sense strand starting at position 3521 of SEQ ID NO: 1561703
agccaauuccuggaaggug

SEQ ID NO: 1692056 - RNA, 19 nt, Artificial Sequence
  Description of Artificial Sequence: Synthetic oligonucleotide
  Antisense strand to SEQ ID NO: 1692055
caccuuccaggaauuggcu

SEQ ID NO: 1692057 - RNA, 19 nt, Artificial Sequence
  Description of Artificial Sequence: Synthetic oligonucleotide
  Sense strand starting at position 3682 of SEQ ID NO: 1561703
gcauguguucacugagacg

SEQ ID NO: 1692058 - RNA, 19 nt, Artificial Sequence
  Description of Artificial Sequence: Synthetic oligonucleotide
  Antisense strand to SEQ ID NO: 1692057
cgucucagugaacacaugc

SEQ ID NO: 1692059 - RNA, 19 nt, Artificial Sequence
  Description of Artificial Sequence: Synthetic oligonucleotide
  Sense strand starting at position 3788 of SEQ ID NO: 1561703
ugaauaaguguuuaaagca

SEQ ID NO: 1692060 - RNA, 19 nt, Artificial Sequence
  Description of Artificial Sequence: Synthetic oligonucleotide
  Antisense strand to SEQ ID NO: 1692059
ugcuuuaaacacuuauuca

SEQ ID NO: 1692061 - RNA, 19 nt, Artificial Sequence
  Description of Artificial Sequence: Synthetic oligonucleotide
  Sense strand starting at position 3832 of SEQ ID NO: 1561703
gaaagaguucucugcuggu

SEQ ID NO: 1692062 - RNA, 19 nt, Artificial Sequence
  Description of Artificial Sequence: Synthetic oligonucleotide
  Antisense strand to SEQ ID NO: 1692061
accagcagagaacucuuuc

SEQ ID NO: 1692063 - RNA, 19 nt, Artificial Sequence
  Description of Artificial Sequence: Synthetic oligonucleotide
  Sense strand starting at position 3963 of SEQ ID NO: 1561703
guccacuuuggaugaacau

SEQ ID NO: 1692064 - RNA, 19 nt, Artificial Sequence
  Description of Artificial Sequence: Synthetic oligonucleotide
  Antisense strand to SEQ ID NO: 1692063
auguucauccaaaguggac

SEQ ID NO: 1692065 - RNA, 19 nt, Artificial Sequence
  Description of Artificial Sequence: Synthetic oligonucleotide
  Sense strand starting at position 720 of SEQ ID NO: 1561704
gacgcagggucauuccuua

SEQ ID NO: 1692066 - RNA, 19 nt, Artificial Sequence
  Description of Artificial Sequence: Synthetic oligonucleotide
  Antisense strand to SEQ ID NO: 1692065
uaaggaaugacccugcguc

SEQ ID NO: 1692067 - RNA, 19 nt, Artificial Sequence
  Description of Artificial Sequence: Synthetic oligonucleotide
  Sense strand starting at position 724 of SEQ ID NO: 1561704
cagggucauuccuuacgaa

SEQ ID NO: 1692068 - RNA, 19 nt, Artificial Sequence
  Description of Artificial Sequence: Synthetic oligonucleotide
  Antisense strand to SEQ ID NO: 1692067
uucguaaggaaugacccug

SEQ ID NO: 1692069 - RNA, 19 nt, Artificial Sequence
  Description of Artificial Sequence: Synthetic oligonucleotide
  Sense strand starting at position 725 of SEQ ID NO: 1561704
agggucauuccuuacgaaa

SEQ ID NO: 1692070 - RNA, 19 nt, Artificial Sequence
  Description of Artificial Sequence: Synthetic oligonucleotide
  Antisense strand to SEQ ID NO: 1692069
uuucguaaggaaugacccu

SEQ ID NO: 1692071 - RNA, 19 nt, Artificial Sequence
  Description of Artificial Sequence: Synthetic oligonucleotide
  Sense strand starting at position 810 of SEQ ID NO: 1561704
gcucaacucgcccaggaaa

SEQ ID NO: 1692072 - RNA, 19 nt, Artificial Sequence
  Description of Artificial Sequence: Synthetic oligonucleotide
  Antisense strand to SEQ ID NO: 1692071
uuuccugggcgaguugagc

SEQ ID NO: 1692073 - RNA, 19 nt, Artificial Sequence
  Description of Artificial Sequence: Synthetic oligonucleotide
  Sense strand starting at position 904 of SEQ ID NO: 1561704
ggcacuuguuuauuuccga

SEQ ID NO: 1692074 - RNA, 19 nt, Artificial Sequence
  Description of Artificial Sequence: Synthetic oligonucleotide
  Antisense strand to SEQ ID NO: 1692073
ucggaaauaaacaagugcc

SEQ ID NO: 1692075 - RNA, 19 nt, Artificial Sequence
  Description of Artificial Sequence: Synthetic oligonucleotide
  Sense strand starting at position 909 of SEQ ID NO: 1561704
uuguuuauuuccgagguua

SEQ ID NO: 1692076 - RNA, 19 nt, Artificial Sequence
  Description of Artificial Sequence: Synthetic oligonucleotide
  Antisense strand to SEQ ID NO: 1692075
uaaccucggaaauaaacaa

SEQ ID NO: 1692077 - RNA, 19 nt, Artificial Sequence
  Description of Artificial Sequence: Synthetic oligonucleotide
  Sense strand starting at position 911 of SEQ ID NO: 1561704
guuuauuuccgagguuaca

SEQ ID NO: 1692078 - RNA, 19 nt, Artificial Sequence
  Description of Artificial Sequence: Synthetic oligonucleotide
  Antisense strand to SEQ ID NO: 1692077
uguaaccucggaaauaaac

SEQ ID NO: 1692079 - RNA, 19 nt, Artificial Sequence
  Description of Artificial Sequence: Synthetic oligonucleotide
  Sense strand starting at position 2542 of SEQ ID NO: 1561704
ucaggugucuccuugcuaa

SEQ ID NO: 1692080 - RNA, 19 nt, Artificial Sequence
  Description of Artificial Sequence: Synthetic oligonucleotide
  Antisense strand to SEQ ID NO: 1692079
uuagcaaggagacaccuga

SEQ ID NO: 1692081 - RNA, 19 nt, Artificial Sequence
  Description of Artificial Sequence: Synthetic oligonucleotide
  Sense strand starting at position 2606 of SEQ ID NO: 1561704
agaguuuccaccuggagca

SEQ ID NO: 1692082 - RNA, 19 nt, Artificial Sequence
  Description of Artificial Sequence: Synthetic oligonucleotide
  Antisense strand to SEQ ID NO: 1692081
ugcuccagguggaaacucu

SEQ ID NO: 1692083 - RNA, 19 nt, Artificial Sequence
  Description of Artificial Sequence: Synthetic oligonucleotide
  Sense strand starting at position 2924 of SEQ ID NO: 1561704
cuuuaaggguuaucaggua

SEQ ID NO: 1692084 - RNA, 19 nt, Artificial Sequence
  Description of Artificial Sequence: Synthetic oligonucleotide
  Antisense strand to SEQ ID NO: 1692083
uaccugauaacccuuaaag

SEQ ID NO: 1692085 - RNA, 19 nt, Artificial Sequence
  Description of Artificial Sequence: Synthetic oligonucleotide
  Sense strand starting at position 2965 of SEQ ID NO: 1561704
gugaguaaauguuucugca

SEQ ID NO: 1692086 - RNA, 19 nt, Artificial Sequence
  Description of Artificial Sequence: Synthetic oligonucleotide
  Antisense strand to SEQ ID NO: 1692085
ugcagaaacauuuacucac

SEQ ID NO: 1692087 - RNA, 19 nt, Artificial Sequence
  Description of Artificial Sequence: Synthetic oligonucleotide
  Sense strand starting at position 2969 of SEQ ID NO: 1561704
guaaauguuucugcacuuu

SEQ ID NO: 1692088 - RNA, 19 nt, Artificial Sequence
  Description of Artificial Sequence: Synthetic oligonucleotide
  Antisense strand to SEQ ID NO: 1692087
aaagugcagaaacauuuac

SEQ ID NO: 1692089 - RNA, 19 nt, Artificial Sequence
  Description of Artificial Sequence: Synthetic oligonucleotide
  Sense strand starting at position 3065 of SEQ ID NO: 1561704
gggacucuguguccagaau

SEQ ID NO: 1692090 - RNA, 19 nt, Artificial Sequence
  Description of Artificial Sequence: Synthetic oligonucleotide
  Antisense strand to SEQ ID NO: 1692089
auucuggacacagaguccc

SEQ ID NO: 1692091 - RNA, 19 nt, Artificial Sequence
  Description of Artificial Sequence: Synthetic oligonucleotide
  Sense strand starting at position 3066 of SEQ ID NO: 1561704
ggacucuguguccagaaua

SEQ ID NO: 1692092 - RNA, 19 nt, Artificial Sequence
  Description of Artificial Sequence: Synthetic oligonucleotide
  Antisense strand to SEQ ID NO: 1692091
uauucuggacacagagucc

SEQ ID NO: 1692093 - RNA, 19 nt, Artificial Sequence
  Description of Artificial Sequence: Synthetic oligonucleotide
  Sense strand starting at position 3071 of SEQ ID NO: 1561704
cuguguccagaauacauua

SEQ ID NO: 1692094 - RNA, 19 nt, Artificial Sequence
  Description of Artificial Sequence: Synthetic oligonucleotide
  Antisense strand to SEQ ID NO: 1692093
uaauguauucuggacacag

SEQ ID NO: 1692095 - RNA, 19 nt, Artificial Sequence
  Description of Artificial Sequence: Synthetic oligonucleotide
  Sense strand starting at position 3087 of SEQ ID NO: 1561704
uuaguucugguuuaagaaa

SEQ ID NO: 1692096 - RNA, 19 nt, Artificial Sequence
  Description of Artificial Sequence: Synthetic oligonucleotide
  Antisense strand to SEQ ID NO: 1692095
uuucuuaaaccagaacuaa

SEQ ID NO: 1692097 - RNA, 19 nt, Artificial Sequence
  Description of Artificial Sequence: Synthetic oligonucleotide
  Sense strand starting at position 3099 of SEQ ID NO: 1561704
uaagaaauagguugcaaag

SEQ ID NO: 1692098 - RNA, 19 nt, Artificial Sequence
  Description of Artificial Sequence: Synthetic oligonucleotide
  Antisense strand to SEQ ID NO: 1692097
cuuugcaaccuauuucuua

SEQ ID NO: 1692099 - RNA, 19 nt, Artificial Sequence
  Description of Artificial Sequence: Synthetic oligonucleotide
  Sense strand starting at position 3101 of SEQ ID NO: 1561704
agaaauagguugcaaagga

SEQ ID NO: 1692100 - RNA, 19 nt, Artificial Sequence
  Description of Artificial Sequence: Synthetic oligonucleotide
  Antisense strand to SEQ ID NO: 1692099
uccuuugcaaccuauuucu

SEQ ID NO: 1692101 - RNA, 19 nt, Artificial Sequence
  Description of Artificial Sequence: Synthetic oligonucleotide
  Sense strand starting at position 3123 of SEQ ID NO: 1561704
gguggaagauugagugaca

SEQ ID NO: 1692102 - RNA, 19 nt, Artificial Sequence
  Description of Artificial Sequence: Synthetic oligonucleotide
  Antisense strand to SEQ ID NO: 1692101
ugucacucaaucuuccacc

SEQ ID NO: 1692103 - RNA, 19 nt, Artificial Sequence
  Description of Artificial Sequence: Synthetic oligonucleotide
  Sense strand starting at position 3141 of SEQ ID NO: 1561704
acuguugagcuccaagauc

SEQ ID NO: 1692104 - RNA, 19 nt, Artificial Sequence
  Description of Artificial Sequence: Synthetic oligonucleotide
  Antisense strand to SEQ ID NO: 1692103
gaucuuggagcucaacagu

SEQ ID NO: 1692105 - RNA, 19 nt, Artificial Sequence
  Description of Artificial Sequence: Synthetic oligonucleotide
  Sense strand starting at position 3245 of SEQ ID NO: 1561704
ggguggucucccgguuaga

SEQ ID NO: 1692106 - RNA, 19 nt, Artificial Sequence
  Description of Artificial Sequence: Synthetic oligonucleotide
  Antisense strand to SEQ ID NO: 1692105
ucuaaccgggagaccaccc

SEQ ID NO: 1692107 - RNA, 19 nt, Artificial Sequence
  Description of Artificial Sequence: Synthetic oligonucleotide
  Sense strand starting at position 3256 of SEQ ID NO: 1561704
cgguuagagcucugccuua

SEQ ID NO: 1692108 - RNA, 19 nt, Artificial Sequence
  Description of Artificial Sequence: Synthetic oligonucleotide
  Antisense strand to SEQ ID NO: 1692107
uaaggcagagcucuaaccg

SEQ ID NO: 1692109 - RNA, 19 nt, Artificial Sequence
  Description of Artificial Sequence: Synthetic oligonucleotide
  Sense strand starting at position 3267 of SEQ ID NO: 1561704
cugccuuacgcuuaaggaa

SEQ ID NO: 1692110 - RNA, 19 nt, Artificial Sequence
  Description of Artificial Sequence: Synthetic oligonucleotide
  Antisense strand to SEQ ID NO: 1692109
uuccuuaagcguaaggcag

SEQ ID NO: 1692111 - RNA, 19 nt, Artificial Sequence
  Description of Artificial Sequence: Synthetic oligonucleotide
  Sense strand starting at position 3358 of SEQ ID NO: 1561704
gcaacuuaacuauggaacu

SEQ ID NO: 1692112 - RNA, 19 nt, Artificial Sequence
  Description of Artificial Sequence: Synthetic oligonucleotide
  Antisense strand to SEQ ID NO: 1692111
aguuccauaguuaaguugc

SEQ ID NO: 1692113 - RNA, 19 nt, Artificial Sequence
  Description of Artificial Sequence: Synthetic oligonucleotide
  Sense strand starting at position 3370 of SEQ ID NO: 1561704
uggaacuagucaggagaca

SEQ ID NO: 1692114 - RNA, 19 nt, Artificial Sequence
  Description of Artificial Sequence: Synthetic oligonucleotide
  Antisense strand to SEQ ID NO: 1692113
ugucuccugacuaguucca

SEQ ID NO: 1692115 - RNA, 19 nt, Artificial Sequence
  Description of Artificial Sequence: Synthetic oligonucleotide
  Sense strand starting at position 3417 of SEQ ID NO: 1561704
caguuauggccuuguccca

SEQ ID NO: 1692116 - RNA, 19 nt, Artificial Sequence
  Description of Artificial Sequence: Synthetic oligonucleotide
  Antisense strand to SEQ ID NO: 1692115
ugggacaaggccauaacug

SEQ ID NO: 1692117 - RNA, 19 nt, Artificial Sequence
  Description of Artificial Sequence: Synthetic oligonucleotide
  Sense strand starting at position 3455 of SEQ ID NO: 1561704
aggagagguuaccaguuga

SEQ ID NO: 1692118 - RNA, 19 nt, Artificial Sequence
  Description of Artificial Sequence: Synthetic oligonucleotide
  Antisense strand to SEQ ID NO: 1692117
ucaacugguaaccucuccu

SEQ ID NO: 1692119 - RNA, 19 nt, Artificial Sequence
  Description of Artificial Sequence: Synthetic oligonucleotide
  Sense strand starting at position 3459 of SEQ ID NO: 1561704
gagguuaccaguugacaug

SEQ ID NO: 1692120 - RNA, 19 nt, Artificial Sequence
  Description of Artificial Sequence: Synthetic oligonucleotide
  Antisense strand to SEQ ID NO: 1692119
caugucaacugguaaccuc

SEQ ID NO: 1692121 - RNA, 19 nt, Artificial Sequence
  Description of Artificial Sequence: Synthetic oligonucleotide
  Sense strand starting at position 3484 of SEQ ID NO: 1561704
gguuuagacucacucgaag

SEQ ID NO: 1692122 - RNA, 19 nt, Artificial Sequence
  Description of Artificial Sequence: Synthetic oligonucleotide
  Antisense strand to SEQ ID NO: 1692121
cuucgagugagucuaaacc

SEQ ID NO: 1692123 - RNA, 19 nt, Artificial Sequence
  Description of Artificial Sequence: Synthetic oligonucleotide
  Sense strand starting at position 3655 of SEQ ID NO: 1561704
ucagaagcuguccaagacu

SEQ ID NO: 1692124 - RNA, 19 nt, Artificial Sequence
  Description of Artificial Sequence: Synthetic oligonucleotide
  Antisense strand to SEQ ID NO: 1692123
agucuuggacagcuucuga

SEQ ID NO: 1692125 - RNA, 19 nt, Artificial Sequence
  Description of Artificial Sequence: Synthetic oligonucleotide
  Sense strand starting at position 3664 of SEQ ID NO: 1561704
guccaagacugcuuuagac

SEQ ID NO: 1692126 - RNA, 19 nt, Artificial Sequence
  Description of Artificial Sequence: Synthetic oligonucleotide
  Antisense strand to SEQ ID NO: 1692125
gucuaaagcagucuuggac

SEQ ID NO: 1692127 - RNA, 19 nt, Artificial Sequence
  Description of Artificial Sequence: Synthetic oligonucleotide
  Sense strand starting at position 3701 of SEQ ID NO: 1561704
ucuugugucccuggucuau

SEQ ID NO: 1692128 - RNA, 19 nt, Artificial Sequence
  Description of Artificial Sequence: Synthetic oligonucleotide
  Antisense strand to SEQ ID NO: 1692127
auagaccagggacacaaga

SEQ ID NO: 1692129 - RNA, 19 nt, Artificial Sequence
  Description of Artificial Sequence: Synthetic oligonucleotide
  Sense strand starting at position 3703 of SEQ ID NO: 1561704
uugugucccuggucuauuu

SEQ ID NO: 1692130 - RNA, 19 nt, Artificial Sequence
  Description of Artificial Sequence: Synthetic oligonucleotide
  Antisense strand to SEQ ID NO: 1692129
aaauagaccagggacacaa

SEQ ID NO: 1692131 - RNA, 19 nt, Artificial Sequence
  Description of Artificial Sequence: Synthetic oligonucleotide
  Sense strand starting at position 3768 of SEQ ID NO: 1561704
cugagcauuaugcgaguua

SEQ ID NO: 1692132 - RNA, 19 nt, Artificial Sequence
  Description of Artificial Sequence: Synthetic oligonucleotide
  Antisense strand to SEQ ID NO: 1692131
uaacucgcauaaugcucag

SEQ ID NO: 1692133 - RNA, 19 nt, Artificial Sequence
  Description of Artificial Sequence: Synthetic oligonucleotide
  Sense strand starting at position 3775 of SEQ ID NO: 1561704
uuaugcgaguuauuucuuu

SEQ ID NO: 1692134 - RNA, 19 nt, Artificial Sequence
  Description of Artificial Sequence: Synthetic oligonucleotide
  Antisense strand to SEQ ID NO: 1692133
aaagaaauaacucgcauaa

SEQ ID NO: 1692135 - RNA, 19 nt, Artificial Sequence
  Description of Artificial Sequence: Synthetic oligonucleotide
  Sense strand starting at position 3779 of SEQ ID NO: 1561704
gcgaguuauuucuuuggag

SEQ ID NO: 1692136 - RNA, 19 nt, Artificial Sequence
  Description of Artificial Sequence: Synthetic oligonucleotide
  Antisense strand to SEQ ID NO: 1692135
cuccaaagaaauaacucgc

SEQ ID NO: 1692137 - RNA, 19 nt, Artificial Sequence
  Description of Artificial Sequence: Synthetic oligonucleotide
  Sense strand starting at position 3782 of SEQ ID NO: 1561704
aguuauuucuuuggagagg

SEQ ID NO: 1692138 - RNA, 19 nt, Artificial Sequence
  Description of Artificial Sequence: Synthetic oligonucleotide
  Antisense strand to SEQ ID NO: 1692137
ccucuccaaagaaauaacu

SEQ ID NO: 1692139 - RNA, 19 nt, Artificial Sequence
  Description of Artificial Sequence: Synthetic oligonucleotide
  Sense strand starting at position 3823 of SEQ ID NO: 1561704
uccaacgugcucugcgaaa

SEQ ID NO: 1692140 - RNA, 19 nt, Artificial Sequence
  Description of Artificial Sequence: Synthetic oligonucleotide
  Antisense strand to SEQ ID NO: 1692139
uuucgcagagcacguugga

SEQ ID NO: 1692141 - RNA, 19 nt, Artificial Sequence
  Description of Artificial Sequence: Synthetic oligonucleotide
  Sense strand starting at position 3935 of SEQ ID NO: 1561704
cuccaaacacuguguuaag

SEQ ID NO: 1692142 - RNA, 19 nt, Artificial Sequence
  Description of Artificial Sequence: Synthetic oligonucleotide
  Antisense strand to SEQ ID NO: 1692141
cuuaacacaguguuuggag

SEQ ID NO: 1692143 - RNA, 19 nt, Artificial Sequence
  Description of Artificial Sequence: Synthetic oligonucleotide
  Sense strand starting at position 3977 of SEQ ID NO: 1561704
gaaucuugagucuacugca

SEQ ID NO: 1692144 - RNA, 19 nt, Artificial Sequence
  Description of Artificial Sequence: Synthetic oligonucleotide
  Antisense strand to SEQ ID NO: 1692143
ugcaguagacucaagauuc

SEQ ID NO: 1692145 - RNA, 19 nt, Artificial Sequence
  Description of Artificial Sequence: Synthetic oligonucleotide
  Sense strand starting at position 148 of SEQ ID NO: 1561705
agauucuuacaaggagcau

SEQ ID NO: 1692146 - RNA, 19 nt, Artificial Sequence
  Description of Artificial Sequence: Synthetic oligonucleotide
  Antisense strand to SEQ ID NO: 1692145
augcuccuuguaagaaucu

SEQ ID NO: 1692147 - RNA, 19 nt, Artificial Sequence
  Description of Artificial Sequence: Synthetic oligonucleotide
  Sense strand starting at position 273 of SEQ ID NO: 1561705
auggcaagaccauguuuau

SEQ ID NO: 1692148 - RNA, 19 nt, Artificial Sequence
  Description of Artificial Sequence: Synthetic oligonucleotide
  Antisense strand to SEQ ID NO: 1692147
auaaacauggucuugccau

SEQ ID NO: 1692149 - RNA, 19 nt, Artificial Sequence
  Description of Artificial Sequence: Synthetic oligonucleotide
  Sense strand starting at position 286 of SEQ ID NO: 1561705
guuuauuuguugucucuac

SEQ ID NO: 1692150 - RNA, 19 nt, Artificial Sequence
  Description of Artificial Sequence: Synthetic oligonucleotide
  Antisense strand to SEQ ID NO: 1692149
guagagacaacaaauaaac

SEQ ID NO: 1692151 - RNA, 19 nt, Artificial Sequence
  Description of Artificial Sequence: Synthetic oligonucleotide
  Sense strand starting at position 287 of SEQ ID NO: 1561705
uuuauuuguugucucuaca

SEQ ID NO: 1692152 - RNA, 19 nt, Artificial Sequence
  Description of Artificial Sequence: Synthetic oligonucleotide
  Antisense strand to SEQ ID NO: 1692151
uguagagacaacaaauaaa

SEQ ID NO: 1692153 - RNA, 19 nt, Artificial Sequence
  Description of Artificial Sequence: Synthetic oligonucleotide
  Sense strand starting at position 537 of SEQ ID NO: 1561705
ggguuuguguuccugagaa

SEQ ID NO: 1692154 - RNA, 19 nt, Artificial Sequence
  Description of Artificial Sequence: Synthetic oligonucleotide
  Antisense strand to SEQ ID NO: 1692153
uucucaggaacacaaaccc

SEQ ID NO: 1692155 - RNA, 19 nt, Artificial Sequence
  Description of Artificial Sequence: Synthetic oligonucleotide
  Sense strand starting at position 539 of SEQ ID NO: 1561705
guuuguguuccugagaaac

SEQ ID NO: 1692156 - RNA, 19 nt, Artificial Sequence
  Description of Artificial Sequence: Synthetic oligonucleotide
  Antisense strand to SEQ ID NO: 1692155
guuucucaggaacacaaac

SEQ ID NO: 1692157 - RNA, 19 nt, Artificial Sequence
  Description of Artificial Sequence: Synthetic oligonucleotide
  Sense strand starting at position 553 of SEQ ID NO: 1561705
gaaacuaauuccguggcca

SEQ ID NO: 1692158 - RNA, 19 nt, Artificial Sequence
  Description of Artificial Sequence: Synthetic oligonucleotide
  Antisense strand to SEQ ID NO: 1692157
uggccacggaauuaguuuc

SEQ ID NO: 1692159 - RNA, 19 nt, Artificial Sequence
  Description of Artificial Sequence: Synthetic oligonucleotide
  Sense strand starting at position 693 of SEQ ID NO: 1561705
cugcuauacacguguaaag

SEQ ID NO: 1692160 - RNA, 19 nt, Artificial Sequence
  Description of Artificial Sequence: Synthetic oligonucleotide
  Antisense strand to SEQ ID NO: 1692159
cuuuacacguguauagcag

SEQ ID NO: 1692161 - RNA, 19 nt, Artificial Sequence
  Description of Artificial Sequence: Synthetic oligonucleotide
  Sense strand starting at position 695 of SEQ ID NO: 1561705
gcuauacacguguaaagag

SEQ ID NO: 1692162 - RNA, 19 nt, Artificial Sequence
  Description of Artificial Sequence: Synthetic oligonucleotide
  Antisense strand to SEQ ID NO: 1692161
cucuuuacacguguauagc

SEQ ID NO: 1692163 - RNA, 19 nt, Artificial Sequence
  Description of Artificial Sequence: Synthetic oligonucleotide
  Sense strand starting at position 727 of SEQ ID NO: 1561705
uuaccuuuccaaugagaug

SEQ ID NO: 1692164 - RNA, 19 nt, Artificial Sequence
  Description of Artificial Sequence: Synthetic oligonucleotide
  Antisense strand to SEQ ID NO: 1692163
caucucauuggaaagguaa

SEQ ID NO: 1692165 - RNA, 19 nt, Artificial Sequence
  Description of Artificial Sequence: Synthetic oligonucleotide
  Sense strand starting at position 812 of SEQ ID NO: 1561705
agccuuaaagugugaacuu

SEQ ID NO: 1692166 - RNA, 19 nt, Artificial Sequence
  Description of Artificial Sequence: Synthetic oligonucleotide
  Antisense strand to SEQ ID NO: 1692165
aaguucacacuuuaaggcu

SEQ ID NO: 1692167 - RNA, 19 nt, Artificial Sequence
  Description of Artificial Sequence: Synthetic oligonucleotide
  Sense strand starting at position 851 of SEQ ID NO: 1561705
ccauaauugcugugugacc

SEQ ID NO: 1692168 - RNA, 19 nt, Artificial Sequence
  Description of Artificial Sequence: Synthetic oligonucleotide
  Antisense strand to SEQ ID NO: 1692167
ggucacacagcaauuaugg

SEQ ID NO: 1692169 - RNA, 19 nt, Artificial Sequence
  Description of Artificial Sequence: Synthetic oligonucleotide
  Sense strand starting at position 853 of SEQ ID NO: 1561705
auaauugcugugugaccuu

SEQ ID NO: 1692170 - RNA, 19 nt, Artificial Sequence
  Description of Artificial Sequence: Synthetic oligonucleotide
  Antisense strand to SEQ ID NO: 1692169
aaggucacacagcaauuau

SEQ ID NO: 1692171 - RNA, 19 nt, Artificial Sequence
  Description of Artificial Sequence: Synthetic oligonucleotide
  Sense strand starting at position 898 of SEQ ID NO: 1561705
ccgccaauuccacaugugu

SEQ ID NO: 1692172 - RNA, 19 nt, Artificial Sequence
  Description of Artificial Sequence: Synthetic oligonucleotide
  Antisense strand to SEQ ID NO: 1692171
acacauguggaauuggcgg

SEQ ID NO: 1692173 - RNA, 19 nt, Artificial Sequence
  Description of Artificial Sequence: Synthetic oligonucleotide
  Sense strand starting at position 947 of SEQ ID NO: 1561705
ccauaaguguuauuaagaa

SEQ ID NO: 1692174 - RNA, 19 nt, Artificial Sequence
  Description of Artificial Sequence: Synthetic oligonucleotide
  Antisense strand to SEQ ID NO: 1692173
uucuuaauaacacuuaugg

SEQ ID NO: 1692175 - RNA, 19 nt, Artificial Sequence
  Description of Artificial Sequence: Synthetic oligonucleotide
  Sense strand starting at position 1053 of SEQ ID NO: 1561705
gagcauccugguuaagagu

SEQ ID NO: 1692176 - RNA, 19 nt, Artificial Sequence
  Description of Artificial Sequence: Synthetic oligonucleotide
  Antisense strand to SEQ ID NO: 1692175
acucuuaaccaggaugcuc

SEQ ID NO: 1692177 - RNA, 19 nt, Artificial Sequence
  Description of Artificial Sequence: Synthetic oligonucleotide
  Sense strand starting at position 1416 of SEQ ID NO: 1561705
ugcauaacgcaauguagaa

SEQ ID NO: 1692178 - RNA, 19 nt, Artificial Sequence
  Description of Artificial Sequence: Synthetic oligonucleotide
  Antisense strand to SEQ ID NO: 1692177
uucuacauugcguuaugca

SEQ ID NO: 1692179 - RNA, 19 nt, Artificial Sequence
  Description of Artificial Sequence: Synthetic oligonucleotide
  Sense strand starting at position 1511 of SEQ ID NO: 1561705
uuuauuggcugguuacaau

SEQ ID NO: 1692180 - RNA, 19 nt, Artificial Sequence
  Description of Artificial Sequence: Synthetic oligonucleotide
  Antisense strand to SEQ ID NO: 1692179
auuguaaccagccaauaaa

SEQ ID NO: 1692181 - RNA, 19 nt, Artificial Sequence
  Description of Artificial Sequence: Synthetic oligonucleotide
  Sense strand starting at position 1530 of SEQ ID NO: 1561705
gcguuaggcauggugcaaa

SEQ ID NO: 1692182 - RNA, 19 nt, Artificial Sequence
  Description of Artificial Sequence: Synthetic oligonucleotide
  Antisense strand to SEQ ID NO: 1692181
uuugcaccaugccuaacgc

SEQ ID NO: 1692183 - RNA, 19 nt, Artificial Sequence
  Description of Artificial Sequence: Synthetic oligonucleotide
  Sense strand starting at position 1557 of SEQ ID NO: 1561705
cgcgaauuauuaccuauaa

SEQ ID NO: 1692184 - RNA, 19 nt, Artificial Sequence
  Description of Artificial Sequence: Synthetic oligonucleotide
  Antisense strand to SEQ ID NO: 1692183
uuauagguaauaauucgcg

SEQ ID NO: 1692185 - RNA, 19 nt, Artificial Sequence
  Description of Artificial Sequence: Synthetic oligonucleotide
  Sense strand starting at position 1558 of SEQ ID NO: 1561705
gcgaauuauuaccuauaac

SEQ ID NO: 1692186 - RNA, 19 nt, Artificial Sequence
  Description of Artificial Sequence: Synthetic oligonucleotide
  Antisense strand to SEQ ID NO: 1692185
guuauagguaauaauucgc

SEQ ID NO: 1692187 - RNA, 19 nt, Artificial Sequence
  Description of Artificial Sequence: Synthetic oligonucleotide
  Sense strand starting at position 1633 of SEQ ID NO: 1561705
aagcgaagccuugaaagaa

SEQ ID NO: 1692188 - RNA, 19 nt, Artificial Sequence
  Description of Artificial Sequence: Synthetic oligonucleotide
  Antisense strand to SEQ ID NO: 1692187
uucuuucaaggcuucgcuu

SEQ ID NO: 1692189 - RNA, 19 nt, Artificial Sequence
  Description of Artificial Sequence: Synthetic oligonucleotide
  Sense strand starting at position 1893 of SEQ ID NO: 1561705
gcguaaguucugccggcaa

SEQ ID NO: 1692190 - RNA, 19 nt, Artificial Sequence
  Description of Artificial Sequence: Synthetic oligonucleotide
  Antisense strand to SEQ ID NO: 1692189
uugccggcagaacuuacgc

SEQ ID NO: 1692191 - RNA, 19 nt, Artificial Sequence
  Description of Artificial Sequence: Synthetic oligonucleotide
  Sense strand starting at position 2074 of SEQ ID NO: 1561705
ggacuuaagcggcaauuga

SEQ ID NO: 1692192 - RNA, 19 nt, Artificial Sequence
  Description of Artificial Sequence: Synthetic oligonucleotide
  Antisense strand to SEQ ID NO: 1692191
ucaauugccgcuuaagucc

SEQ ID NO: 1692193 - RNA, 19 nt, Artificial Sequence
  Description of Artificial Sequence: Synthetic oligonucleotide
  Sense strand starting at position 2087 of SEQ ID NO: 1561705
aauugagcuccucaaagug

SEQ ID NO: 1692194 - RNA, 19 nt, Artificial Sequence
  Description of Artificial Sequence: Synthetic oligonucleotide
  Antisense strand to SEQ ID NO: 1692193
cacuuugaggagcucaauu

SEQ ID NO: 1692195 - RNA, 19 nt, Artificial Sequence
  Description of Artificial Sequence: Synthetic oligonucleotide
  Sense strand starting at position 2107 of SEQ ID NO: 1561705
gugagugcaaaucaaaugu

SEQ ID NO: 1692196 - RNA, 19 nt, Artificial Sequence
  Description of Artificial Sequence: Synthetic oligonucleotide
  Antisense strand to SEQ ID NO: 1692195
acauuugauuugcacucac

SEQ ID NO: 1692197 - RNA, 19 nt, Artificial Sequence
  Description of Artificial Sequence: Synthetic oligonucleotide
  Sense strand starting at position 2118 of SEQ ID NO: 1561705
ucaaaugugcgcuaaaugu

SEQ ID NO: 1692198 - RNA, 19 nt, Artificial Sequence
  Description of Artificial Sequence: Synthetic oligonucleotide
  Antisense strand to SEQ ID NO: 1692197
acauuuagcgcacauuuga

SEQ ID NO: 1692199 - RNA, 19 nt, Artificial Sequence
  Description of Artificial Sequence: Synthetic oligonucleotide
  Sense strand starting at position 2203 of SEQ ID NO: 1561705
uauugauuaugugcugcaa

SEQ ID NO: 1692200 - RNA, 19 nt, Artificial Sequence
  Description of Artificial Sequence: Synthetic oligonucleotide
  Antisense strand to SEQ ID NO: 1692199
uugcagcacauaaucaaua

SEQ ID NO: 1692201 - RNA, 19 nt, Artificial Sequence
  Description of Artificial Sequence: Synthetic oligonucleotide
  Sense strand starting at position 2207 of SEQ ID NO: 1561705
gauuaugugcugcaauaau

SEQ ID NO: 1692202 - RNA, 19 nt, Artificial Sequence
  Description of Artificial Sequence: Synthetic oligonucleotide
  Antisense strand to SEQ ID NO: 1692201
auuauugcagcacauaauc

SEQ ID NO: 1692203 - RNA, 19 nt, Artificial Sequence
  Description of Artificial Sequence: Synthetic oligonucleotide
  Sense strand starting at position 2216 of SEQ ID NO: 1561705
cugcaauaauuguugggau

SEQ ID NO: 1692204 - RNA, 19 nt, Artificial Sequence
  Description of Artificial Sequence: Synthetic oligonucleotide
  Antisense strand to SEQ ID NO: 1692203
aucccaacaauuauugcag

SEQ ID NO: 1692205 - RNA, 19 nt, Artificial Sequence
  Description of Artificial Sequence: Synthetic oligonucleotide
  Sense strand starting at position 2218 of SEQ ID NO: 1561705
gcaauaauuguugggauau

SEQ ID NO: 1692206 - RNA, 19 nt, Artificial Sequence
  Description of Artificial Sequence: Synthetic oligonucleotide
  Antisense strand to SEQ ID NO: 1692205
auaucccaacaauuauugc

SEQ ID NO: 1692207 - RNA, 19 nt, Artificial Sequence
  Description of Artificial Sequence: Synthetic oligonucleotide
  Sense strand starting at position 2229 of SEQ ID NO: 1561705
ugggauauauuggauuaaa

SEQ ID NO: 1692208 - RNA, 19 nt, Artificial Sequence
  Description of Artificial Sequence: Synthetic oligonucleotide
  Antisense strand to SEQ ID NO: 1692207
uuuaauccaauauauccca

SEQ ID NO: 1692209 - RNA, 19 nt, Artificial Sequence
  Description of Artificial Sequence: Synthetic oligonucleotide
  Sense strand starting at position 2280 of SEQ ID NO: 1561705
uguagcuauggugguagaa

SEQ ID NO: 1692210 - RNA, 19 nt, Artificial Sequence
  Description of Artificial Sequence: Synthetic oligonucleotide
  Antisense strand to SEQ ID NO: 1692209
uucuaccaccauagcuaca

SEQ ID NO: 1692211 - RNA, 19 nt, Artificial Sequence
  Description of Artificial Sequence: Synthetic oligonucleotide
  Sense strand starting at position 2362 of SEQ ID NO: 1561705
aauaauauggugugaucau

SEQ ID NO: 1692212 - RNA, 19 nt, Artificial Sequence
  Description of Artificial Sequence: Synthetic oligonucleotide
  Antisense strand to SEQ ID NO: 1692211
augaucacaccauauuauu

SEQ ID NO: 1692213 - RNA, 19 nt, Artificial Sequence
  Description of Artificial Sequence: Synthetic oligonucleotide
  Sense strand starting at position 2613 of SEQ ID NO: 1561705
ccgguccuuacugggaaau

SEQ ID NO: 1692214 - RNA, 19 nt, Artificial Sequence
  Description of Artificial Sequence: Synthetic oligonucleotide
  Antisense strand to SEQ ID NO: 1692213
auuucccaguaaggaccgg

SEQ ID NO: 1692215 - RNA, 19 nt, Artificial Sequence
  Description of Artificial Sequence: Synthetic oligonucleotide
  Sense strand starting at position 2614 of SEQ ID NO: 1561705
cgguccuuacugggaaauu

SEQ ID NO: 1692216 - RNA, 19 nt, Artificial Sequence
  Description of Artificial Sequence: Synthetic oligonucleotide
  Antisense strand to SEQ ID NO: 1692215
aauuucccaguaaggaccg

SEQ ID NO: 1692217 - RNA, 19 nt, Artificial Sequence
  Description of Artificial Sequence: Synthetic oligonucleotide
  Sense strand starting at position 2688 of SEQ ID NO: 1561705
guuaaugacuuccugauuc

SEQ ID NO: 1692218 - RNA, 19 nt, Artificial Sequence
  Description of Artificial Sequence: Synthetic oligonucleotide
  Antisense strand to SEQ ID NO: 1692217
gaaucaggaagucauuaac

SEQ ID NO: 1692219 - RNA, 19 nt, Artificial Sequence
  Description of Artificial Sequence: Synthetic oligonucleotide
  Sense strand starting at position 2770 of SEQ ID NO: 1561705
cuucuugagugucugauga

SEQ ID NO: 1692220 - RNA, 19 nt, Artificial Sequence
  Description of Artificial Sequence: Synthetic oligonucleotide
  Antisense strand to SEQ ID NO: 1692219
ucaucagacacucaagaag

SEQ ID NO: 1692221 - RNA, 19 nt, Artificial Sequence
  Description of Artificial Sequence: Synthetic oligonucleotide
  Sense strand starting at position 3071 of SEQ ID NO: 1561705
gucaccuugucuccugaga

SEQ ID NO: 1692222 - RNA, 19 nt, Artificial Sequence
  Description of Artificial Sequence: Synthetic oligonucleotide
  Antisense strand to SEQ ID NO: 1692221
ucucaggagacaaggugac

SEQ ID NO: 1692223 - RNA, 19 nt, Artificial Sequence
  Description of Artificial Sequence: Synthetic oligonucleotide
  Sense strand starting at position 3824 of SEQ ID NO: 1561705
uuuccauugcccgugcaau

SEQ ID NO: 1692224 - RNA, 19 nt, Artificial Sequence
  Description of Artificial Sequence: Synthetic oligonucleotide
  Antisense strand to SEQ ID NO: 1692223
auugcacgggcaauggaaa

SEQ ID NO: 1692225 - RNA, 19 nt, Artificial Sequence
  Description of Artificial Sequence: Synthetic oligonucleotide
  Sense strand starting at position 289 of SEQ ID NO: 1561706
aggaacaguucucuuugga

SEQ ID NO: 1692226 - RNA, 19 nt, Artificial Sequence
  Description of Artificial Sequence: Synthetic oligonucleotide
  Antisense strand to SEQ ID NO: 1692225
uccaaagagaacuguuccu

SEQ ID NO: 1692227 - RNA, 19 nt, Artificial Sequence
  Description of Artificial Sequence: Synthetic oligonucleotide
  Sense strand starting at position 292 of SEQ ID NO: 1561706
aacaguucucuuuggauag

SEQ ID NO: 1692228 - RNA, 19 nt, Artificial Sequence
  Description of Artificial Sequence: Synthetic oligonucleotide
  Antisense strand to SEQ ID NO: 1692227
cuauccaaagagaacuguu

SEQ ID NO: 1692229 - RNA, 19 nt, Artificial Sequence
  Description of Artificial Sequence: Synthetic oligonucleotide
  Sense strand starting at position 304 of SEQ ID NO: 1561706
uggauaguccacugucaac

SEQ ID NO: 1692230 - RNA, 19 nt, Artificial Sequence
  Description of Artificial Sequence: Synthetic oligonucleotide
  Antisense strand to SEQ ID NO: 1692229
guugacaguggacuaucca

SEQ ID NO: 1692231 - RNA, 19 nt, Artificial Sequence
  Description of Artificial Sequence: Synthetic oligonucleotide
  Sense strand starting at position 322 of SEQ ID NO: 1561706
cugcaauaacacgaaaguu

SEQ ID NO: 1692232 - RNA, 19 nt, Artificial Sequence
  Description of Artificial Sequence: Synthetic oligonucleotide
  Antisense strand to SEQ ID NO: 1692231
aacuuucguguuauugcag

SEQ ID NO: 1692233 - RNA, 19 nt, Artificial Sequence
  Description of Artificial Sequence: Synthetic oligonucleotide
  Sense strand starting at position 464 of SEQ ID NO: 1561706
cguugcguccagucaucaa

SEQ ID NO: 1692234 - RNA, 19 nt, Artificial Sequence
  Description of Artificial Sequence: Synthetic oligonucleotide
  Antisense strand to SEQ ID NO: 1692233
uugaugacuggacgcaacg

SEQ ID NO: 1692235 - RNA, 19 nt, Artificial Sequence
  Description of Artificial Sequence: Synthetic oligonucleotide
  Sense strand starting at position 569 of SEQ ID NO: 1561706
aaccauugagcaggugaca

SEQ ID NO: 1692236 - RNA, 19 nt, Artificial Sequence
  Description of Artificial Sequence: Synthetic oligonucleotide
  Antisense strand to SEQ ID NO: 1692235
ugucaccugcucaaugguu

SEQ ID NO: 1692237 - RNA, 19 nt, Artificial Sequence
  Description of Artificial Sequence: Synthetic oligonucleotide
  Sense strand starting at position 622 of SEQ ID NO: 1561706
gcaagaaauuuagauuguu

SEQ ID NO: 1692238 - RNA, 19 nt, Artificial Sequence
  Description of Artificial Sequence: Synthetic oligonucleotide
  Antisense strand to SEQ ID NO: 1692237
aacaaucuaaauuucuugc

SEQ ID NO: 1692239 - RNA, 19 nt, Artificial Sequence
  Description of Artificial Sequence: Synthetic oligonucleotide
  Sense strand starting at position 628 of SEQ ID NO: 1561706
aauuuagauuguuaggaga

SEQ ID NO: 1692240 - RNA, 19 nt, Artificial Sequence
  Description of Artificial Sequence: Synthetic oligonucleotide
  Antisense strand to SEQ ID NO: 1692239
ucuccuaacaaucuaaauu

SEQ ID NO: 1692241 - RNA, 19 nt, Artificial Sequence
  Description of Artificial Sequence: Synthetic oligonucleotide
  Sense strand starting at position 663 of SEQ ID NO: 1561706
aggcaauaugugggccaaa

SEQ ID NO: 1692242 - RNA, 19 nt, Artificial Sequence
  Description of Artificial Sequence: Synthetic oligonucleotide
  Antisense strand to SEQ ID NO: 1692241
uuuggcccacauauugccu

SEQ ID NO: 1692243 - RNA, 19 nt, Artificial Sequence
  Description of Artificial Sequence: Synthetic oligonucleotide
  Sense strand starting at position 703 of SEQ ID NO: 1561706
augggcaaucccgagugaa

SEQ ID NO: 1692244 - RNA, 19 nt, Artificial Sequence
  Description of Artificial Sequence: Synthetic oligonucleotide
  Antisense strand to SEQ ID NO: 1692243
uucacucgggauugcccau

SEQ ID NO: 1692245 - RNA, 19 nt, Artificial Sequence
  Description of Artificial Sequence: Synthetic oligonucleotide
  Sense strand starting at position 706 of SEQ ID NO: 1561706
ggcaaucccgagugaacca

SEQ ID NO: 1692246 - RNA, 19 nt, Artificial Sequence
  Description of Artificial Sequence: Synthetic oligonucleotide
  Antisense strand to SEQ ID NO: 1692245
ugguucacucgggauugcc

SEQ ID NO: 1692247 - RNA, 19 nt, Artificial Sequence
  Description of Artificial Sequence: Synthetic oligonucleotide
  Sense strand starting at position 764 of SEQ ID NO: 1561706
acacaucacugucugauca

SEQ ID NO: 1692248 - RNA, 19 nt, Artificial Sequence
  Description of Artificial Sequence: Synthetic oligonucleotide
  Antisense strand to SEQ ID NO: 1692247
ugaucagacagugaugugu

SEQ ID NO: 1692249 - RNA, 19 nt, Artificial Sequence
  Description of Artificial Sequence: Synthetic oligonucleotide
  Sense strand starting at position 1106 of SEQ ID NO: 1561706
gcucaaagccgaugauuuc

SEQ ID NO: 1692250 - RNA, 19 nt, Artificial Sequence
  Description of Artificial Sequence: Synthetic oligonucleotide
  Antisense strand to SEQ ID NO: 1692249
gaaaucaucggcuuugagc

SEQ ID NO: 1692251 - RNA, 19 nt, Artificial Sequence
  Description of Artificial Sequence: Synthetic oligonucleotide
  Sense strand starting at position 1256 of SEQ ID NO: 1561706
cuaagaaggcucugcauau

SEQ ID NO: 1692252 - RNA, 19 nt, Artificial Sequence
  Description of Artificial Sequence: Synthetic oligonucleotide
  Antisense strand to SEQ ID NO: 1692251
auaugcagagccuucuuag

SEQ ID NO: 1692253 - RNA, 19 nt, Artificial Sequence
  Description of Artificial Sequence: Synthetic oligonucleotide
  Sense strand starting at position 2206 of SEQ ID NO: 1561706
gaggcucuagccugacaaa

SEQ ID NO: 1692254 - RNA, 19 nt, Artificial Sequence
  Description of Artificial Sequence: Synthetic oligonucleotide
  Antisense strand to SEQ ID NO: 1692253
uuugucaggcuagagccuc

SEQ ID NO: 1692255 - RNA, 19 nt, Artificial Sequence
  Description of Artificial Sequence: Synthetic oligonucleotide
  Sense strand starting at position 2207 of SEQ ID NO: 1561706
aggcucuagccugacaaau

SEQ ID NO: 1692256 - RNA, 19 nt, Artificial Sequence
  Description of Artificial Sequence: Synthetic oligonucleotide
  Antisense strand to SEQ ID NO: 1692255
auuugucaggcuagagccu

SEQ ID NO: 1692257 - RNA, 19 nt, Artificial Sequence
  Description of Artificial Sequence: Synthetic oligonucleotide
  Sense strand starting at position 2270 of SEQ ID NO: 1561706
gacguuauuuaggucgaau

SEQ ID NO: 1692258 - RNA, 19 nt, Artificial Sequence
  Description of Artificial Sequence: Synthetic oligonucleotide
  Antisense strand to SEQ ID NO: 1692257
auucgaccuaaauaacguc

SEQ ID NO: 1692259 - RNA, 19 nt, Artificial Sequence
  Description of Artificial Sequence: Synthetic oligonucleotide
  Sense strand starting at position 2334 of SEQ ID NO: 1561706
aucacaugaugagaaauga

SEQ ID NO: 1692260 - RNA, 19 nt, Artificial Sequence
  Description of Artificial Sequence: Synthetic oligonucleotide
  Antisense strand to SEQ ID NO: 1692259
ucauuucucaucaugugau

SEQ ID NO: 1692261 - RNA, 19 nt, Artificial Sequence
  Description of Artificial Sequence: Synthetic oligonucleotide
  Sense strand starting at position 2366 of SEQ ID NO: 1561706
gucugcuuugcuuugccaa

SEQ ID NO: 1692262 - RNA, 19 nt, Artificial Sequence
  Description of Artificial Sequence: Synthetic oligonucleotide
  Antisense strand to SEQ ID NO: 1692261
uuggcaaagcaaagcagac

SEQ ID NO: 1692263 - RNA, 19 nt, Artificial Sequence
  Description of Artificial Sequence: Synthetic oligonucleotide
  Sense strand starting at position 2394 of SEQ ID NO: 1561706
aguacuuguuaagcacuaa

SEQ ID NO: 1692264 - RNA, 19 nt, Artificial Sequence
  Description of Artificial Sequence: Synthetic oligonucleotide
  Antisense strand to SEQ ID NO: 1692263
uuagugcuuaacaaguacu

SEQ ID NO: 1692265 - RNA, 19 nt, Artificial Sequence
  Description of Artificial Sequence: Synthetic oligonucleotide
  Sense strand starting at position 2398 of SEQ ID NO: 1561706
cuuguuaagcacuaauugu

SEQ ID NO: 1692266 - RNA, 19 nt, Artificial Sequence
  Description of Artificial Sequence: Synthetic oligonucleotide
  Antisense strand to SEQ ID NO: 1692265
acaauuagugcuuaacaag

SEQ ID NO: 1692267 - RNA, 19 nt, Artificial Sequence
  Description of Artificial Sequence: Synthetic oligonucleotide
  Sense strand starting at position 2422 of SEQ ID NO: 1561706
aggcacugagcugaguaau

SEQ ID NO: 1692268 - RNA, 19 nt, Artificial Sequence
  Description of Artificial Sequence: Synthetic oligonucleotide
  Antisense strand to SEQ ID NO: 1692267
auuacucagcucagugccu

SEQ ID NO: 1692269 - RNA, 19 nt, Artificial Sequence
  Description of Artificial Sequence: Synthetic oligonucleotide
  Sense strand starting at position 2478 of SEQ ID NO: 1561706
cuuggaaguggguaugauu

SEQ ID NO: 1692270 - RNA, 19 nt, Artificial Sequence
  Description of Artificial Sequence: Synthetic oligonucleotide
  Antisense strand to SEQ ID NO: 1692269
aaucauacccacuuccaag

SEQ ID NO: 1692271 - RNA, 19 nt, Artificial Sequence
  Description of Artificial Sequence: Synthetic oligonucleotide
  Sense strand starting at position 2897 of SEQ ID NO: 1561706
ccucuaugucuuugacaca

SEQ ID NO: 1692272 - RNA, 19 nt, Artificial Sequence
  Description of Artificial Sequence: Synthetic oligonucleotide
  Antisense strand to SEQ ID NO: 1692271
ugugucaaagacauagagg

SEQ ID NO: 1692273 - RNA, 19 nt, Artificial Sequence
  Description of Artificial Sequence: Synthetic oligonucleotide
  Sense strand starting at position 2909 of SEQ ID NO: 1561706
ugacacauccauuguaagu

SEQ ID NO: 1692274 - RNA, 19 nt, Artificial Sequence
  Description of Artificial Sequence: Synthetic oligonucleotide
  Antisense strand to SEQ ID NO: 1692273
acuuacaauggauguguca

SEQ ID NO: 1692275 - RNA, 19 nt, Artificial Sequence
  Description of Artificial Sequence: Synthetic oligonucleotide
  Sense strand starting at position 2919 of SEQ ID NO: 1561706
auuguaaguacuuguugga

SEQ ID NO: 1692276 - RNA, 19 nt, Artificial Sequence
  Description of Artificial Sequence: Synthetic oligonucleotide
  Antisense strand to SEQ ID NO: 1692275
uccaacaaguacuuacaau

SEQ ID NO: 1692277 - RNA, 19 nt, Artificial Sequence
  Description of Artificial Sequence: Synthetic oligonucleotide
  Sense strand starting at position 2981 of SEQ ID NO: 1561706
cuagaaagugccuaguaag

SEQ ID NO: 1692278 - RNA, 19 nt, Artificial Sequence
  Description of Artificial Sequence: Synthetic oligonucleotide
  Antisense strand to SEQ ID NO: 1692277
cuuacuaggcacuuucuag

SEQ ID NO: 1692279 - RNA, 19 nt, Artificial Sequence
  Description of Artificial Sequence: Synthetic oligonucleotide
  Sense strand starting at position 3076 of SEQ ID NO: 1561706
acuuguguugcuccagcau

SEQ ID NO: 1692280 - RNA, 19 nt, Artificial Sequence
  Description of Artificial Sequence: Synthetic oligonucleotide
  Antisense strand to SEQ ID NO: 1692279
augcuggagcaacacaagu

SEQ ID NO: 1692281 - RNA, 19 nt, Artificial Sequence
  Description of Artificial Sequence: Synthetic oligonucleotide
  Sense strand starting at position 3520 of SEQ ID NO: 1561706
guauaugcccgaguagcuu

SEQ ID NO: 1692282 - RNA, 19 nt, Artificial Sequence
  Description of Artificial Sequence: Synthetic oligonucleotide
  Antisense strand to SEQ ID NO: 1692281
aagcuacucgggcauauac

SEQ ID NO: 1692283 - RNA, 19 nt, Artificial Sequence
  Description of Artificial Sequence: Synthetic oligonucleotide
  Sense strand starting at position 3701 of SEQ ID NO: 1561706
cgagcaagaugaucuucua

SEQ ID NO: 1692284 - RNA, 19 nt, Artificial Sequence
  Description of Artificial Sequence: Synthetic oligonucleotide
  Antisense strand to SEQ ID NO: 1692283
uagaagaucaucuugcucg

SEQ ID NO: 1692285 - RNA, 19 nt, Artificial Sequence
  Description of Artificial Sequence: Synthetic oligonucleotide
  Sense strand starting at position 3704 of SEQ ID NO: 1561706
gcaagaugaucuucuaaga

SEQ ID NO: 1692286 - RNA, 19 nt, Artificial Sequence
  Description of Artificial Sequence: Synthetic oligonucleotide
  Antisense strand to SEQ ID NO: 1692285
ucuuagaagaucaucuugc

SEQ ID NO: 1692287 - RNA, 19 nt, Artificial Sequence
  Description of Artificial Sequence: Synthetic oligonucleotide
  Sense strand starting at position 3730 of SEQ ID NO: 1561706
agauguuagugucuagaac

SEQ ID NO: 1692288 - RNA, 19 nt, Artificial Sequence
  Description of Artificial Sequence: Synthetic oligonucleotide
  Antisense strand to SEQ ID NO: 1692287
guucuagacacuaacaucu

SEQ ID NO: 1692289 - RNA, 19 nt, Artificial Sequence
  Description of Artificial Sequence: Synthetic oligonucleotide
  Sense strand starting at position 3731 of SEQ ID NO: 1561706
gauguuagugucuagaacu

SEQ ID NO: 1692290 - RNA, 19 nt, Artificial Sequence
  Description of Artificial Sequence: Synthetic oligonucleotide
  Antisense strand to SEQ ID NO: 1692289
aguucuagacacuaacauc

SEQ ID NO: 1692291 - RNA, 19 nt, Artificial Sequence
  Description of Artificial Sequence: Synthetic oligonucleotide
  Sense strand starting at position 3766 of SEQ ID NO: 1561706
guagguaugaaaggucaua

SEQ ID NO: 1692292 - RNA, 19 nt, Artificial Sequence
  Description of Artificial Sequence: Synthetic oligonucleotide
  Antisense strand to SEQ ID NO: 1692291
uaugaccuuucauaccuac

SEQ ID NO: 1692293 - RNA, 19 nt, Artificial Sequence
  Description of Artificial Sequence: Synthetic oligonucleotide
  Sense strand starting at position 3778 of SEQ ID NO: 1561706
ggucauaucuaagugagug

SEQ ID NO: 1692294 - RNA, 19 nt, Artificial Sequence
  Description of Artificial Sequence: Synthetic oligonucleotide
  Antisense strand to SEQ ID NO: 1692293
cacucacuuagauaugacc

SEQ ID NO: 1692295 - RNA, 19 nt, Artificial Sequence
  Description of Artificial Sequence: Synthetic oligonucleotide
  Sense strand starting at position 3782 of SEQ ID NO: 1561706
auaucuaagugagugucau

SEQ ID NO: 1692296 - RNA, 19 nt, Artificial Sequence
  Description of Artificial Sequence: Synthetic oligonucleotide
  Antisense strand to SEQ ID NO: 1692295
augacacucacuuagauau

SEQ ID NO: 1692297 - RNA, 19 nt, Artificial Sequence
  Description of Artificial Sequence: Synthetic oligonucleotide
  Sense strand starting at position 3898 of SEQ ID NO: 1561706
acagcaugauuacuaggau

SEQ ID NO: 1692298 - RNA, 19 nt, Artificial Sequence
  Description of Artificial Sequence: Synthetic oligonucleotide
  Antisense strand to SEQ ID NO: 1692297
auccuaguaaucaugcugu

SEQ ID NO: 1692299 - RNA, 19 nt, Artificial Sequence
  Description of Artificial Sequence: Synthetic oligonucleotide
  Sense strand starting at position 3901 of SEQ ID NO: 1561706
gcaugauuacuaggaugga

SEQ ID NO: 1692300 - RNA, 19 nt, Artificial Sequence
  Description of Artificial Sequence: Synthetic oligonucleotide
  Antisense strand to SEQ ID NO: 1692299
uccauccuaguaaucaugc

SEQ ID NO: 1692301 - RNA, 19 nt, Artificial Sequence
  Description of Artificial Sequence: Synthetic oligonucleotide
  Sense strand starting at position 3918 of SEQ ID NO: 1561706
gauaacauguggucugaac

SEQ ID NO: 1692302 - RNA, 19 nt, Artificial Sequence
  Description of Artificial Sequence: Synthetic oligonucleotide
  Antisense strand to SEQ ID NO: 1692301
guucagaccacauguuauc

SEQ ID NO: 1692303 - RNA, 19 nt, Artificial Sequence
  Description of Artificial Sequence: Synthetic oligonucleotide
  Sense strand starting at position 3920 of SEQ ID NO: 1561706
uaacauguggucugaacaa

SEQ ID NO: 1692304 - RNA, 19 nt, Artificial Sequence
  Description of Artificial Sequence: Synthetic oligonucleotide
  Antisense strand to SEQ ID NO: 1692303
uuguucagaccacauguua

SEQ ID NO: 1692305 - RNA, 19 nt, Artificial Sequence
  Description of Artificial Sequence: Synthetic oligonucleotide
  Sense strand starting at position 2609 of SEQ ID NO: 1561707
gcugcaauccaugaagggu

SEQ ID NO: 1692306 - RNA, 19 nt, Artificial Sequence
  Description of Artificial Sequence: Synthetic oligonucleotide
  Antisense strand to SEQ ID NO: 1692305
acccuucauggauugcagc

SEQ ID NO: 1692307 - RNA, 19 nt, Artificial Sequence
  Description of Artificial Sequence: Synthetic oligonucleotide
  Sense strand starting at position 2648 of SEQ ID NO: 1561707
uggcauuguucccaccaga

SEQ ID NO: 1692308 - RNA, 19 nt, Artificial Sequence
  Description of Artificial Sequence: Synthetic oligonucleotide
  Antisense strand to SEQ ID NO: 1692307
ucuggugggaacaaugcca

SEQ ID NO: 1692309 - RNA, 19 nt, Artificial Sequence
  Description of Artificial Sequence: Synthetic oligonucleotide
  Sense strand starting at position 2805 of SEQ ID NO: 1561707
augaaaugcccucaucuga

SEQ ID NO: 1692310 - RNA, 19 nt, Artificial Sequence
  Description of Artificial Sequence: Synthetic oligonucleotide
  Antisense strand to SEQ ID NO: 1692309
ucagaugagggcauuucau

SEQ ID NO: 1692311 - RNA, 19 nt, Artificial Sequence
  Description of Artificial Sequence: Synthetic oligonucleotide
  Sense strand starting at position 2886 of SEQ ID NO: 1561707
ggacuuaagcgaggccuca

SEQ ID NO: 1692312 - RNA, 19 nt, Artificial Sequence
  Description of Artificial Sequence: Synthetic oligonucleotide
  Antisense strand to SEQ ID NO: 1692311
ugaggccucgcuuaagucc

SEQ ID NO: 1692313 - RNA, 19 nt, Artificial Sequence
  Description of Artificial Sequence: Synthetic oligonucleotide
  Sense strand starting at position 2912 of SEQ ID NO: 1561707
gggugguaugcaggaaaga

SEQ ID NO: 1692314 - RNA, 19 nt, Artificial Sequence
  Description of Artificial Sequence: Synthetic oligonucleotide
  Antisense strand to SEQ ID NO: 1692313
ucuuuccugcauaccaccc

SEQ ID NO: 1692315 - RNA, 19 nt, Artificial Sequence
  Description of Artificial Sequence: Synthetic oligonucleotide
  Sense strand starting at position 3311 of SEQ ID NO: 1561707
ugcucaaccuuugguguua

SEQ ID NO: 1692316 - RNA, 19 nt, Artificial Sequence
  Description of Artificial Sequence: Synthetic oligonucleotide
  Antisense strand to SEQ ID NO: 1692315
uaacaccaaagguugagca

SEQ ID NO: 1692317 - RNA, 19 nt, Artificial Sequence
  Description of Artificial Sequence: Synthetic oligonucleotide
  Sense strand starting at position 3312 of SEQ ID NO: 1561707
gcucaaccuuugguguuau

SEQ ID NO: 1692318 - RNA, 19 nt, Artificial Sequence
  Description of Artificial Sequence: Synthetic oligonucleotide
  Antisense strand to SEQ ID NO: 1692317
auaacaccaaagguugagc

SEQ ID NO: 1692319 - RNA, 19 nt, Artificial Sequence
  Description of Artificial Sequence: Synthetic oligonucleotide
  Sense strand starting at position 3323 of SEQ ID NO: 1561707
gguguuaucugcugagcug

SEQ ID NO: 1692320 - RNA, 19 nt, Artificial Sequence
  Description of Artificial Sequence: Synthetic oligonucleotide
  Antisense strand to SEQ ID NO: 1692319
cagcucagcagauaacacc

SEQ ID NO: 1692321 - RNA, 19 nt, Artificial Sequence
  Description of Artificial Sequence: Synthetic oligonucleotide
  Sense strand starting at position 3603 of SEQ ID NO: 1561707
cccaccugcuagugaauuu

SEQ ID NO: 1692322 - RNA, 19 nt, Artificial Sequence
  Description of Artificial Sequence: Synthetic oligonucleotide
  Antisense strand to SEQ ID NO: 1692321
aaauucacuagcagguggg

SEQ ID NO: 1692323 - RNA, 19 nt, Artificial Sequence
  Description of Artificial Sequence: Synthetic oligonucleotide
  Sense strand starting at position 3641 of SEQ ID NO: 1561707
ccauuauccuagcugucua

SEQ ID NO: 1692324 - RNA, 19 nt, Artificial Sequence
  Description of Artificial Sequence: Synthetic oligonucleotide
  Antisense strand to SEQ ID NO: 1692323
uagacagcuaggauaaugg

SEQ ID NO: 1692325 - RNA, 19 nt, Artificial Sequence
  Description of Artificial Sequence: Synthetic oligonucleotide
  Sense strand starting at position 3855 of SEQ ID NO: 1561707
ugaccuucccaugggaagu

SEQ ID NO: 1692326 - RNA, 19 nt, Artificial Sequence
  Description of Artificial Sequence: Synthetic oligonucleotide
  Antisense strand to SEQ ID NO: 1692325
acuucccaugggaagguca

SEQ ID NO: 1692327 - RNA, 19 nt, Artificial Sequence
  Description of Artificial Sequence: Synthetic oligonucleotide
  Sense strand starting at position 3914 of SEQ ID NO: 1561707
ccgucaccauucucauuau

SEQ ID NO: 1692328 - RNA, 19 nt, Artificial Sequence
  Description of Artificial Sequence: Synthetic oligonucleotide
  Antisense strand to SEQ ID NO: 1692327
auaaugagaauggugacgg

SEQ ID NO: 1692329 - RNA, 19 nt, Artificial Sequence
  Description of Artificial Sequence: Synthetic oligonucleotide
  Sense strand starting at position 3915 of SEQ ID NO: 1561707
cgucaccauucucauuaua

SEQ ID NO: 1692330 - RNA, 19 nt, Artificial Sequence
  Description of Artificial Sequence: Synthetic oligonucleotide
  Antisense strand to SEQ ID NO: 1692329
uauaaugagaauggugacg

SEQ ID NO: 1692331 - RNA, 19 nt, Artificial Sequence
  Description of Artificial Sequence: Synthetic oligonucleotide
  Sense strand starting at position 3937 of SEQ ID NO: 1561707
agaauuaucuugccugcca

SEQ ID NO: 1692332 - RNA, 19 nt, Artificial Sequence
  Description of Artificial Sequence: Synthetic oligonucleotide
  Antisense strand to SEQ ID NO: 1692331
uggcaggcaagauaauucu

SEQ ID NO: 1692333 - RNA, 19 nt, Artificial Sequence
  Description of Artificial Sequence: Synthetic oligonucleotide
  Sense strand starting at position 36 of SEQ ID NO: 1561708
gugguucuuccuggucaca

SEQ ID NO: 1692334 - RNA, 19 nt, Artificial Sequence
  Description of Artificial Sequence: Synthetic oligonucleotide
  Antisense strand to SEQ ID NO: 1692333
ugugaccaggaagaaccac

SEQ ID NO: 1692335 - RNA, 19 nt, Artificial Sequence
  Description of Artificial Sequence: Synthetic oligonucleotide
  Sense strand starting at position 58 of SEQ ID NO: 1561708
accagaucguguuccaagu

SEQ ID NO: 1692336 - RNA, 19 nt, Artificial Sequence
  Description of Artificial Sequence: Synthetic oligonucleotide
  Antisense strand to SEQ ID NO: 1692335
acuuggaacacgaucuggu

SEQ ID NO: 1692337 - RNA, 19 nt, Artificial Sequence
  Description of Artificial Sequence: Synthetic oligonucleotide
  Sense strand starting at position 64 of SEQ ID NO: 1561708
ucguguuccaaguggagga

SEQ ID NO: 1692338 - RNA, 19 nt, Artificial Sequence
  Description of Artificial Sequence: Synthetic oligonucleotide
  Antisense strand to SEQ ID NO: 1692337
uccuccacuuggaacacga

SEQ ID NO: 1692339 - RNA, 19 nt, Artificial Sequence
  Description of Artificial Sequence: Synthetic oligonucleotide
  Sense strand starting at position 125 of SEQ ID NO: 1561708
accucuugaccauggcaaa

SEQ ID NO: 1692340 - RNA, 19 nt, Artificial Sequence
  Description of Artificial Sequence: Synthetic oligonucleotide
  Antisense strand to SEQ ID NO: 1692339
uuugccauggucaagaggu

SEQ ID NO: 1692341 - RNA, 19 nt, Artificial Sequence
  Description of Artificial Sequence: Synthetic oligonucleotide
  Sense strand starting at position 597 of SEQ ID NO: 1561708
aguggugaugguggcauua

SEQ ID NO: 1692342 - RNA, 19 nt, Artificial Sequence
  Description of Artificial Sequence: Synthetic oligonucleotide
  Antisense strand to SEQ ID NO: 1692341
uaaugccaccaucaccacu

SEQ ID NO: 1692343 - RNA, 19 nt, Artificial Sequence
  Description of Artificial Sequence: Synthetic oligonucleotide
  Sense strand starting at position 730 of SEQ ID NO: 1561708
gagggauccuggcccucua

SEQ ID NO: 1692344 - RNA, 19 nt, Artificial Sequence
  Description of Artificial Sequence: Synthetic oligonucleotide
  Antisense strand to SEQ ID NO: 1692343
uagagggccaggaucccuc

SEQ ID NO: 1692345 - RNA, 19 nt, Artificial Sequence
  Description of Artificial Sequence: Synthetic oligonucleotide
  Sense strand starting at position 935 of SEQ ID NO: 1561708
cagccauucggguguccaa

SEQ ID NO: 1692346 - RNA, 19 nt, Artificial Sequence
  Description of Artificial Sequence: Synthetic oligonucleotide
  Antisense strand to SEQ ID NO: 1692345
uuggacacccgaauggcug

SEQ ID NO: 1692347 - RNA, 19 nt, Artificial Sequence
  Description of Artificial Sequence: Synthetic oligonucleotide
  Sense strand starting at position 1562 of SEQ ID NO: 1561708
cgagcuugucguagggaga

SEQ ID NO: 1692348 - RNA, 19 nt, Artificial Sequence
  Description of Artificial Sequence: Synthetic oligonucleotide
  Antisense strand to SEQ ID NO: 1692347
ucucccuacgacaagcucg

SEQ ID NO: 1692349 - RNA, 19 nt, Artificial Sequence
  Description of Artificial Sequence: Synthetic oligonucleotide
  Sense strand starting at position 1739 of SEQ ID NO: 1561708
ccuggaugauccgugacuu

SEQ ID NO: 1692350 - RNA, 19 nt, Artificial Sequence
  Description of Artificial Sequence: Synthetic oligonucleotide
  Antisense strand to SEQ ID NO: 1692349
aagucacggaucauccagg

SEQ ID NO: 1692351 - RNA, 19 nt, Artificial Sequence
  Description of Artificial Sequence: Synthetic oligonucleotide
  Sense strand starting at position 1740 of SEQ ID NO: 1561708
cuggaugauccgugacuuc

SEQ ID NO: 1692352 - RNA, 19 nt, Artificial Sequence
  Description of Artificial Sequence: Synthetic oligonucleotide
  Antisense strand to SEQ ID NO: 1692351
gaagucacggaucauccag

SEQ ID NO: 1692353 - RNA, 19 nt, Artificial Sequence
  Description of Artificial Sequence: Synthetic oligonucleotide
  Sense strand starting at position 1751 of SEQ ID NO: 1561708
gugacuucucccggaacgu

SEQ ID NO: 1692354 - RNA, 19 nt, Artificial Sequence
  Description of Artificial Sequence: Synthetic oligonucleotide
  Antisense strand to SEQ ID NO: 1692353
acguuccgggagaagucac

SEQ ID NO: 1692355 - RNA, 19 nt, Artificial Sequence
  Description of Artificial Sequence: Synthetic oligonucleotide
  Sense strand starting at position 2537 of SEQ ID NO: 1561708
gacuguauagacuguauau

SEQ ID NO: 1692356 - RNA, 19 nt, Artificial Sequence
  Description of Artificial Sequence: Synthetic oligonucleotide
  Antisense strand to SEQ ID NO: 1692355
auauacagucuauacaguc

SEQ ID NO: 1692357 - RNA, 19 nt, Artificial Sequence
  Description of Artificial Sequence: Synthetic oligonucleotide
  Sense strand starting at position 2581 of SEQ ID NO: 1561708
gcaucaaguagugagaauu

SEQ ID NO: 1692358 - RNA, 19 nt, Artificial Sequence
  Description of Artificial Sequence: Synthetic oligonucleotide
  Antisense strand to SEQ ID NO: 1692357
aauucucacuacuugaugc

SEQ ID NO: 1692359 - RNA, 19 nt, Artificial Sequence
  Description of Artificial Sequence: Synthetic oligonucleotide
  Sense strand starting at position 2599 of SEQ ID NO: 1561708
uuugccauaucgguaagua

SEQ ID NO: 1692360 - RNA, 19 nt, Artificial Sequence
  Description of Artificial Sequence: Synthetic oligonucleotide
  Antisense strand to SEQ ID NO: 1692359
uacuuaccgauauggcaaa

SEQ ID NO: 1692361 - RNA, 19 nt, Artificial Sequence
  Description of Artificial Sequence: Synthetic oligonucleotide
  Sense strand starting at position 2600 of SEQ ID NO: 1561708
uugccauaucgguaaguau

SEQ ID NO: 1692362 - RNA, 19 nt, Artificial Sequence
  Description of Artificial Sequence: Synthetic oligonucleotide
  Antisense strand to SEQ ID NO: 1692361
auacuuaccgauauggcaa

SEQ ID NO: 1692363 - RNA, 19 nt, Artificial Sequence
  Description of Artificial Sequence: Synthetic oligonucleotide
  Sense strand starting at position 2603 of SEQ ID NO: 1561708
ccauaucgguaaguaucau

SEQ ID NO: 1692364 - RNA, 19 nt, Artificial Sequence
  Description of Artificial Sequence: Synthetic oligonucleotide
  Antisense strand to SEQ ID NO: 1692363
augauacuuaccgauaugg

SEQ ID NO: 1692365 - RNA, 19 nt, Artificial Sequence
  Description of Artificial Sequence: Synthetic oligonucleotide
  Sense strand starting at position 2609 of SEQ ID NO: 1561708
cgguaaguaucauugccaa

SEQ ID NO: 1692366 - RNA, 19 nt, Artificial Sequence
  Description of Artificial Sequence: Synthetic oligonucleotide
  Antisense strand to SEQ ID NO: 1692365
uuggcaaugauacuuaccg

SEQ ID NO: 1692367 - RNA, 19 nt, Artificial Sequence
  Description of Artificial Sequence: Synthetic oligonucleotide
  Sense strand starting at position 2635 of SEQ ID NO: 1561708
uuuaaugauuguguagcau

SEQ ID NO: 1692368 - RNA, 19 nt, Artificial Sequence
  Description of Artificial Sequence: Synthetic oligonucleotide
  Antisense strand to SEQ ID NO: 1692367
augcuacacaaucauuaaa

SEQ ID NO: 1692369 - RNA, 19 nt, Artificial Sequence
  Description of Artificial Sequence: Synthetic oligonucleotide
  Sense strand starting at position 2650 of SEQ ID NO: 1561708
gcauuccagcuaugaauga

SEQ ID NO: 1692370 - RNA, 19 nt, Artificial Sequence
  Description of Artificial Sequence: Synthetic oligonucleotide
  Antisense strand to SEQ ID NO: 1692369
ucauucauagcuggaaugc

SEQ ID NO: 1692371 - RNA, 19 nt, Artificial Sequence
  Description of Artificial Sequence: Synthetic oligonucleotide
  Sense strand starting at position 2661 of SEQ ID NO: 1561708
augaaugaacacuagcgua

SEQ ID NO: 1692372 - RNA, 19 nt, Artificial Sequence
  Description of Artificial Sequence: Synthetic oligonucleotide
  Antisense strand to SEQ ID NO: 1692371
uacgcuaguguucauucau

SEQ ID NO: 1692373 - RNA, 19 nt, Artificial Sequence
  Description of Artificial Sequence: Synthetic oligonucleotide
  Sense strand starting at position 2666 of SEQ ID NO: 1561708
ugaacacuagcguauguaa

SEQ ID NO: 1692374 - RNA, 19 nt, Artificial Sequence
  Description of Artificial Sequence: Synthetic oligonucleotide
  Antisense strand to SEQ ID NO: 1692373
uuacauacgcuaguguuca

SEQ ID NO: 1692375 - RNA, 19 nt, Artificial Sequence
  Description of Artificial Sequence: Synthetic oligonucleotide
  Sense strand starting at position 2675 of SEQ ID NO: 1561708
gcguauguaaccuauuguu

SEQ ID NO: 1692376 - RNA, 19 nt, Artificial Sequence
  Description of Artificial Sequence: Synthetic oligonucleotide
  Antisense strand to SEQ ID NO: 1692375
aacaauagguuacauacgc

SEQ ID NO: 1692377 - RNA, 19 nt, Artificial Sequence
  Description of Artificial Sequence: Synthetic oligonucleotide
  Sense strand starting at position 2838 of SEQ ID NO: 1561708
ugcauauagccauaaaugu

SEQ ID NO: 1692378 - RNA, 19 nt, Artificial Sequence
  Description of Artificial Sequence: Synthetic oligonucleotide
  Antisense strand to SEQ ID NO: 1692377
acauuuauggcuauaugca

SEQ ID NO: 1692379 - RNA, 19 nt, Artificial Sequence
  Description of Artificial Sequence: Synthetic oligonucleotide
  Sense strand starting at position 2846 of SEQ ID NO: 1561708
gccauaaauguauguguuu

SEQ ID NO: 1692380 - RNA, 19 nt, Artificial Sequence
  Description of Artificial Sequence: Synthetic oligonucleotide
  Antisense strand to SEQ ID NO: 1692379
aaacacauacauuuauggc

SEQ ID NO: 1692381 - RNA, 19 nt, Artificial Sequence
  Description of Artificial Sequence: Synthetic oligonucleotide
  Sense strand starting at position 2851 of SEQ ID NO: 1561708
aaauguauguguuugcacu

SEQ ID NO: 1692382 - RNA, 19 nt, Artificial Sequence
  Description of Artificial Sequence: Synthetic oligonucleotide
  Antisense strand to SEQ ID NO: 1692381
agugcaaacacauacauuu

SEQ ID NO: 1692383 - RNA, 19 nt, Artificial Sequence
  Description of Artificial Sequence: Synthetic oligonucleotide
  Sense strand starting at position 2852 of SEQ ID NO: 1561708
aauguauguguuugcacuu

SEQ ID NO: 1692384 - RNA, 19 nt, Artificial Sequence
  Description of Artificial Sequence: Synthetic oligonucleotide
  Antisense strand to SEQ ID NO: 1692383
aagugcaaacacauacauu

SEQ ID NO: 1692385 - RNA, 19 nt, Artificial Sequence
  Description of Artificial Sequence: Synthetic oligonucleotide
  Sense strand starting at position 2853 of SEQ ID NO: 1561708
auguauguguuugcacuua

SEQ ID NO: 1692386 - RNA, 19 nt, Artificial Sequence
  Description of Artificial Sequence: Synthetic oligonucleotide
  Antisense strand to SEQ ID NO: 1692385
uaagugcaaacacauacau

SEQ ID NO: 1692387 - RNA, 19 nt, Artificial Sequence
  Description of Artificial Sequence: Synthetic oligonucleotide
  Sense strand starting at position 2887 of SEQ ID NO: 1561708
guauauacauaagugugaa

SEQ ID NO: 1692388 - RNA, 19 nt, Artificial Sequence
  Description of Artificial Sequence: Synthetic oligonucleotide
  Antisense strand to SEQ ID NO: 1692387
uucacacuuauguauauac

SEQ ID NO: 1692389 - RNA, 19 nt, Artificial Sequence
  Description of Artificial Sequence: Synthetic oligonucleotide
  Sense strand starting at position 2899 of SEQ ID NO: 1561708
gugugaaucccugaagccu

SEQ ID NO: 1692390 - RNA, 19 nt, Artificial Sequence
  Description of Artificial Sequence: Synthetic oligonucleotide
  Antisense strand to SEQ ID NO: 1692389
aggcuucagggauucacac

SEQ ID NO: 1692391 - RNA, 19 nt, Artificial Sequence
  Description of Artificial Sequence: Synthetic oligonucleotide
  Sense strand starting at position 3084 of SEQ ID NO: 1561708
gugggugaguguagacaaa

SEQ ID NO: 1692392 - RNA, 19 nt, Artificial Sequence
  Description of Artificial Sequence: Synthetic oligonucleotide
  Antisense strand to SEQ ID NO: 1692391
uuugucuacacucacccac

SEQ ID NO: 1692393 - RNA, 19 nt, Artificial Sequence
  Description of Artificial Sequence: Synthetic oligonucleotide
  Sense strand starting at position 3560 of SEQ ID NO: 1561708
aguguaacucacugcuguu

SEQ ID NO: 1692394 - RNA, 19 nt, Artificial Sequence
  Description of Artificial Sequence: Synthetic oligonucleotide
  Antisense strand to SEQ ID NO: 1692393
aacagcagugaguuacacu

SEQ ID NO: 1692395 - RNA, 19 nt, Artificial Sequence
  Description of Artificial Sequence: Synthetic oligonucleotide
  Sense strand starting at position 3637 of SEQ ID NO: 1561708
agucauauccuuugaccau

SEQ ID NO: 1692396 - RNA, 19 nt, Artificial Sequence
  Description of Artificial Sequence: Synthetic oligonucleotide
  Antisense strand to SEQ ID NO: 1692395
auggucaaaggauaugacu

SEQ ID NO: 1692397 - RNA, 19 nt, Artificial Sequence
  Description of Artificial Sequence: Synthetic oligonucleotide
  Sense strand starting at position 3643 of SEQ ID NO: 1561708
auccuuugaccauguguuu

SEQ ID NO: 1692398 - RNA, 19 nt, Artificial Sequence
  Description of Artificial Sequence: Synthetic oligonucleotide
  Antisense strand to SEQ ID NO: 1692397
aaacacauggucaaaggau

SEQ ID NO: 1692399 - RNA, 19 nt, Artificial Sequence
  Description of Artificial Sequence: Synthetic oligonucleotide
  Sense strand starting at position 3649 of SEQ ID NO: 1561708
ugaccauguguuugucuuu

SEQ ID NO: 1692400 - RNA, 19 nt, Artificial Sequence
  Description of Artificial Sequence: Synthetic oligonucleotide
  Antisense strand to SEQ ID NO: 1692399
aaagacaaacacaugguca

SEQ ID NO: 1692401 - RNA, 19 nt, Artificial Sequence
  Description of Artificial Sequence: Synthetic oligonucleotide
  Sense strand starting at position 3687 of SEQ ID NO: 1561708
cuuuacaugcucugaagaa

SEQ ID NO: 1692402 - RNA, 19 nt, Artificial Sequence
  Description of Artificial Sequence: Synthetic oligonucleotide
  Antisense strand to SEQ ID NO: 1692401
uucuucagagcauguaaag

SEQ ID NO: 1692403 - RNA, 19 nt, Artificial Sequence
  Description of Artificial Sequence: Synthetic oligonucleotide
  Sense strand starting at position 3707 of SEQ ID NO: 1561708
agaucuuguuaaguauguu

SEQ ID NO: 1692404 - RNA, 19 nt, Artificial Sequence
  Description of Artificial Sequence: Synthetic oligonucleotide
  Antisense strand to SEQ ID NO: 1692403
aacauacuuaacaagaucu

SEQ ID NO: 1692405 - RNA, 19 nt, Artificial Sequence
  Description of Artificial Sequence: Synthetic oligonucleotide
  Sense strand starting at position 3711 of SEQ ID NO: 1561708
cuuguuaaguauguugcaa

SEQ ID NO: 1692406 - RNA, 19 nt, Artificial Sequence
  Description of Artificial Sequence: Synthetic oligonucleotide
  Antisense strand to SEQ ID NO: 1692405
uugcaacauacuuaacaag

SEQ ID NO: 1692407 - RNA, 19 nt, Artificial Sequence
  Description of Artificial Sequence: Synthetic oligonucleotide
  Sense strand starting at position 3745 of SEQ ID NO: 1561708
cugccacuugucuaaguua

SEQ ID NO: 1692408 - RNA, 19 nt, Artificial Sequence
  Description of Artificial Sequence: Synthetic oligonucleotide
  Antisense strand to SEQ ID NO: 1692407
uaacuuagacaaguggcag

SEQ ID NO: 1692409 - RNA, 19 nt, Artificial Sequence
  Description of Artificial Sequence: Synthetic oligonucleotide
  Sense strand starting at position 3748 of SEQ ID NO: 1561708
ccacuugucuaaguuaguu

SEQ ID NO: 1692410 - RNA, 19 nt, Artificial Sequence
  Description of Artificial Sequence: Synthetic oligonucleotide
  Antisense strand to SEQ ID NO: 1692409
aacuaacuuagacaagugg

SEQ ID NO: 1692411 - RNA, 19 nt, Artificial Sequence
  Description of Artificial Sequence: Synthetic oligonucleotide
  Sense strand starting at position 3838 of SEQ ID NO: 1561708
uugugucuuacuuagagag

SEQ ID NO: 1692412 - RNA, 19 nt, Artificial Sequence
  Description of Artificial Sequence: Synthetic oligonucleotide
  Antisense strand to SEQ ID NO: 1692411
cucucuaaguaagacacaa

SEQ ID NO: 1692413 - RNA, 19 nt, Artificial Sequence
  Description of Artificial Sequence: Synthetic oligonucleotide
  Sense strand starting at position 537 of SEQ ID NO: 1561709
ggauguuccagugaaccca

SEQ ID NO: 1692414 - RNA, 19 nt, Artificial Sequence
  Description of Artificial Sequence: Synthetic oligonucleotide
  Antisense strand to SEQ ID NO: 1692413
uggguucacuggaacaucc

SEQ ID NO: 1692415 - RNA, 19 nt, Artificial Sequence
  Description of Artificial Sequence: Synthetic oligonucleotide
  Sense strand starting at position 633 of SEQ ID NO: 1561709
aacuuauagcuuggucagu

SEQ ID NO: 1692416 - RNA, 19 nt, Artificial Sequence
  Description of Artificial Sequence: Synthetic oligonucleotide
  Antisense strand to SEQ ID NO: 1692415
acugaccaagcuauaaguu

SEQ ID NO: 1692417 - RNA, 19 nt, Artificial Sequence
  Description of Artificial Sequence: Synthetic oligonucleotide
  Sense strand starting at position 644 of SEQ ID NO: 1561709
uggucaguggcagagcaau

SEQ ID NO: 1692418 - RNA, 19 nt, Artificial Sequence
  Description of Artificial Sequence: Synthetic oligonucleotide
  Antisense strand to SEQ ID NO: 1692417
auugcucugccacugacca

SEQ ID NO: 1692419 - RNA, 19 nt, Artificial Sequence
  Description of Artificial Sequence: Synthetic oligonucleotide
  Sense strand starting at position 712 of SEQ ID NO: 1561709
gcuguuaaagcaugaacau

SEQ ID NO: 1692420 - RNA, 19 nt, Artificial Sequence
  Description of Artificial Sequence: Synthetic oligonucleotide
  Antisense strand to SEQ ID NO: 1692419
auguucaugcuuuaacagc

SEQ ID NO: 1692421 - RNA, 19 nt, Artificial Sequence
  Description of Artificial Sequence: Synthetic oligonucleotide
  Sense strand starting at position 735 of SEQ ID NO: 1561709
uuaguuaaagcauggacua

SEQ ID NO: 1692422 - RNA, 19 nt, Artificial Sequence
  Description of Artificial Sequence: Synthetic oligonucleotide
  Antisense strand to SEQ ID NO: 1692421
uaguccaugcuuuaacuaa

SEQ ID NO: 1692423 - RNA, 19 nt, Artificial Sequence
  Description of Artificial Sequence: Synthetic oligonucleotide
  Sense strand starting at position 780 of SEQ ID NO: 1561709
uucuuaaauagugagcgau

SEQ ID NO: 1692424 - RNA, 19 nt, Artificial Sequence
  Description of Artificial Sequence: Synthetic oligonucleotide
  Antisense strand to SEQ ID NO: 1692423
aucgcucacuauuuaagaa

SEQ ID NO: 1692425 - RNA, 19 nt, Artificial Sequence
  Description of Artificial Sequence: Synthetic oligonucleotide
  Sense strand starting at position 782 of SEQ ID NO: 1561709
cuuaaauagugagcgauaa

SEQ ID NO: 1692426 - RNA, 19 nt, Artificial Sequence
  Description of Artificial Sequence: Synthetic oligonucleotide
  Antisense strand to SEQ ID NO: 1692425
uuaucgcucacuauuuaag

SEQ ID NO: 1692427 - RNA, 19 nt, Artificial Sequence
  Description of Artificial Sequence: Synthetic oligonucleotide
  Sense strand starting at position 783 of SEQ ID NO: 1561709
uuaaauagugagcgauaau

SEQ ID NO: 1692428 - RNA, 19 nt, Artificial Sequence
  Description of Artificial Sequence: Synthetic oligonucleotide
  Antisense strand to SEQ ID NO: 1692427
auuaucgcucacuauuuaa

SEQ ID NO: 1692429 - RNA, 19 nt, Artificial Sequence
  Description of Artificial Sequence: Synthetic oligonucleotide
  Sense strand starting at position 892 of SEQ ID NO: 1561709
uguugugaccucuauaaau

SEQ ID NO: 1692430 - RNA, 19 nt, Artificial Sequence
  Description of Artificial Sequence: Synthetic oligonucleotide
  Antisense strand to SEQ ID NO: 1692429
auuuauagaggucacaaca

SEQ ID NO: 1692431 - RNA, 19 nt, Artificial Sequence
  Description of Artificial Sequence: Synthetic oligonucleotide
  Sense strand starting at position 1034 of SEQ ID NO: 1561709
cuagucaagucaucaaaug

SEQ ID NO: 1692432 - RNA, 19 nt, Artificial Sequence
  Description of Artificial Sequence: Synthetic oligonucleotide
  Antisense strand to SEQ ID NO: 1692431
cauuugaugacuugacuag

SEQ ID NO: 1692433 - RNA, 19 nt, Artificial Sequence
  Description of Artificial Sequence: Synthetic oligonucleotide
  Sense strand starting at position 1174 of SEQ ID NO: 1561709
cccauaggauuguugggaa

SEQ ID NO: 1692434 - RNA, 19 nt, Artificial Sequence
  Description of Artificial Sequence: Synthetic oligonucleotide
  Antisense strand to SEQ ID NO: 1692433
uucccaacaauccuauggg

SEQ ID NO: 1692435 - RNA, 19 nt, Artificial Sequence
  Description of Artificial Sequence: Synthetic oligonucleotide
  Sense strand starting at position 1529 of SEQ ID NO: 1561709
ucaguagcaccugacaauu

SEQ ID NO: 1692436 - RNA, 19 nt, Artificial Sequence
  Description of Artificial Sequence: Synthetic oligonucleotide
  Antisense strand to SEQ ID NO: 1692435
aauugucaggugcuacuga

SEQ ID NO: 1692437 - RNA, 19 nt, Artificial Sequence
  Description of Artificial Sequence: Synthetic oligonucleotide
  Sense strand starting at position 1539 of SEQ ID NO: 1561709
cugacaauuugugaucauu

SEQ ID NO: 1692438 - RNA, 19 nt, Artificial Sequence
  Description of Artificial Sequence: Synthetic oligonucleotide
  Antisense strand to SEQ ID NO: 1692437
aaugaucacaaauugucag

SEQ ID NO: 1692439 - RNA, 19 nt, Artificial Sequence
  Description of Artificial Sequence: Synthetic oligonucleotide
  Sense strand starting at position 1549 of SEQ ID NO: 1561709
gugaucauuccguacagua

SEQ ID NO: 1692440 - RNA, 19 nt, Artificial Sequence
  Description of Artificial Sequence: Synthetic oligonucleotide
  Antisense strand to SEQ ID NO: 1692439
uacuguacggaaugaucac

SEQ ID NO: 1692441 - RNA, 19 nt, Artificial Sequence
  Description of Artificial Sequence: Synthetic oligonucleotide
  Sense strand starting at position 1551 of SEQ ID NO: 1561709
gaucauuccguacaguaag

SEQ ID NO: 1692442 - RNA, 19 nt, Artificial Sequence
  Description of Artificial Sequence: Synthetic oligonucleotide
  Antisense strand to SEQ ID NO: 1692441
cuuacuguacggaaugauc

SEQ ID NO: 1692443 - RNA, 19 nt, Artificial Sequence
  Description of Artificial Sequence: Synthetic oligonucleotide
  Sense strand starting at position 1562 of SEQ ID NO: 1561709
acaguaagccaugacuauu

SEQ ID NO: 1692444 - RNA, 19 nt, Artificial Sequence
  Description of Artificial Sequence: Synthetic oligonucleotide
  Antisense strand to SEQ ID NO: 1692443
aauagucauggcuuacugu

SEQ ID NO: 1692445 - RNA, 19 nt, Artificial Sequence
  Description of Artificial Sequence: Synthetic oligonucleotide
  Sense strand starting at position 1573 of SEQ ID NO: 1561709
ugacuauuaucaucacgug

SEQ ID NO: 1692446 - RNA, 19 nt, Artificial Sequence
  Description of Artificial Sequence: Synthetic oligonucleotide
  Antisense strand to SEQ ID NO: 1692445
cacgugaugauaauaguca

SEQ ID NO: 1692447 - RNA, 19 nt, Artificial Sequence
  Description of Artificial Sequence: Synthetic oligonucleotide
  Sense strand starting at position 2037 of SEQ ID NO: 1561709
ggguuccucccggguaaca

SEQ ID NO: 1692448 - RNA, 19 nt, Artificial Sequence
  Description of Artificial Sequence: Synthetic oligonucleotide
  Antisense strand to SEQ ID NO: 1692447
uguuacccgggaggaaccc

SEQ ID NO: 1692449 - RNA, 19 nt, Artificial Sequence
  Description of Artificial Sequence: Synthetic oligonucleotide
  Sense strand starting at position 2189 of SEQ ID NO: 1561709
cggcuaguugcuccgcgau

SEQ ID NO: 1692450 - RNA, 19 nt, Artificial Sequence
  Description of Artificial Sequence: Synthetic oligonucleotide
  Antisense strand to SEQ ID NO: 1692449
aucgcggagcaacuagccg

SEQ ID NO: 1692451 - RNA, 19 nt, Artificial Sequence
  Description of Artificial Sequence: Synthetic oligonucleotide
  Sense strand starting at position 2466 of SEQ ID NO: 1561709
cggucagggucucuggauu

SEQ ID NO: 1692452 - RNA, 19 nt, Artificial Sequence
  Description of Artificial Sequence: Synthetic oligonucleotide
  Antisense strand to SEQ ID NO: 1692451
aauccagagacccugaccg

SEQ ID NO: 1692453 - RNA, 19 nt, Artificial Sequence
  Description of Artificial Sequence: Synthetic oligonucleotide
  Sense strand starting at position 2664 of SEQ ID NO: 1561709
acugguuagcgauaauacu

SEQ ID NO: 1692454 - RNA, 19 nt, Artificial Sequence
  Description of Artificial Sequence: Synthetic oligonucleotide
  Antisense strand to SEQ ID NO: 1692453
aguauuaucgcuaaccagu

SEQ ID NO: 1692455 - RNA, 19 nt, Artificial Sequence
  Description of Artificial Sequence: Synthetic oligonucleotide
  Sense strand starting at position 2762 of SEQ ID NO: 1561709
aggcgaguuacuuacucaa

SEQ ID NO: 1692456 - RNA, 19 nt, Artificial Sequence
  Description of Artificial Sequence: Synthetic oligonucleotide
  Antisense strand to SEQ ID NO: 1692455
uugaguaaguaacucgccu

SEQ ID NO: 1692457 - RNA, 19 nt, Artificial Sequence
  Description of Artificial Sequence: Synthetic oligonucleotide
  Sense strand starting at position 2764 of SEQ ID NO: 1561709
gcgaguuacuuacucaaca

SEQ ID NO: 1692458 - RNA, 19 nt, Artificial Sequence
  Description of Artificial Sequence: Synthetic oligonucleotide
  Antisense strand to SEQ ID NO: 1692457
uguugaguaaguaacucgc

SEQ ID NO: 1692459 - RNA, 19 nt, Artificial Sequence
  Description of Artificial Sequence: Synthetic oligonucleotide
  Sense strand starting at position 2765 of SEQ ID NO: 1561709
cgaguuacuuacucaacac

SEQ ID NO: 1692460 - RNA, 19 nt, Artificial Sequence
  Description of Artificial Sequence: Synthetic oligonucleotide
  Antisense strand to SEQ ID NO: 1692459
guguugaguaaguaacucg

SEQ ID NO: 1692461 - RNA, 19 nt, Artificial Sequence
  Description of Artificial Sequence: Synthetic oligonucleotide
  Sense strand starting at position 2811 of SEQ ID NO: 1561709
gaguguuaccuuuaccuga

SEQ ID NO: 1692462 - RNA, 19 nt, Artificial Sequence
  Description of Artificial Sequence: Synthetic oligonucleotide
  Antisense strand to SEQ ID NO: 1692461
ucagguaaagguaacacuc

SEQ ID NO: 1692463 - RNA, 19 nt, Artificial Sequence
  Description of Artificial Sequence: Synthetic oligonucleotide
  Sense strand starting at position 2813 of SEQ ID NO: 1561709
guguuaccuuuaccugacu

SEQ ID NO: 1692464 - RNA, 19 nt, Artificial Sequence
  Description of Artificial Sequence: Synthetic oligonucleotide
  Antisense strand to SEQ ID NO: 1692463
agucagguaaagguaacac

SEQ ID NO: 1692465 - RNA, 19 nt, Artificial Sequence
  Description of Artificial Sequence: Synthetic oligonucleotide
  Sense strand starting at position 2857 of SEQ ID NO: 1561709
gcuuaagccugacuucuag

SEQ ID NO: 1692466 - RNA, 19 nt, Artificial Sequence
  Description of Artificial Sequence: Synthetic oligonucleotide
  Antisense strand to SEQ ID NO: 1692465
cuagaagucaggcuuaagc

SEQ ID NO: 1692467 - RNA, 19 nt, Artificial Sequence
  Description of Artificial Sequence: Synthetic oligonucleotide
  Sense strand starting at position 2863 of SEQ ID NO: 1561709
gccugacuucuagagaacu

SEQ ID NO: 1692468 - RNA, 19 nt, Artificial Sequence
  Description of Artificial Sequence: Synthetic oligonucleotide
  Antisense strand to SEQ ID NO: 1692467
aguucucuagaagucaggc

SEQ ID NO: 1692469 - RNA, 19 nt, Artificial Sequence
  Description of Artificial Sequence: Synthetic oligonucleotide
  Sense strand starting at position 2893 of SEQ ID NO: 1561709
auaggacccaugcguuauu

SEQ ID NO: 1692470 - RNA, 19 nt, Artificial Sequence
  Description of Artificial Sequence: Synthetic oligonucleotide
  Antisense strand to SEQ ID NO: 1692469
aauaacgcauggguccuau

SEQ ID NO: 1692471 - RNA, 19 nt, Artificial Sequence
  Description of Artificial Sequence: Synthetic oligonucleotide
  Sense strand starting at position 3225 of SEQ ID NO: 1561709
cccggccuuguguauaaau

SEQ ID NO: 1692472 - RNA, 19 nt, Artificial Sequence
  Description of Artificial Sequence: Synthetic oligonucleotide
  Antisense strand to SEQ ID NO: 1692471
auuuauacacaaggccggg

SEQ ID NO: 1692473 - RNA, 19 nt, Artificial Sequence
  Description of Artificial Sequence: Synthetic oligonucleotide
  Sense strand starting at position 3227 of SEQ ID NO: 1561709
cggccuuguguauaaauug

SEQ ID NO: 1692474 - RNA, 19 nt, Artificial Sequence
  Description of Artificial Sequence: Synthetic oligonucleotide
  Antisense strand to SEQ ID NO: 1692473
caauuuauacacaaggccg

SEQ ID NO: 1692475 - RNA, 19 nt, Artificial Sequence
  Description of Artificial Sequence: Synthetic oligonucleotide
  Sense strand starting at position 3415 of SEQ ID NO: 1561709
gaaaguacccagggugauu

SEQ ID NO: 1692476 - RNA, 19 nt, Artificial Sequence
  Description of Artificial Sequence: Synthetic oligonucleotide
  Antisense strand to SEQ ID NO: 1692475
aaucacccuggguacuuuc

SEQ ID NO: 1692477 - RNA, 19 nt, Artificial Sequence
  Description of Artificial Sequence: Synthetic oligonucleotide
  Sense strand starting at position 3484 of SEQ ID NO: 1561709
gagcguagagacuguaauu

SEQ ID NO: 1692478 - RNA, 19 nt, Artificial Sequence
  Description of Artificial Sequence: Synthetic oligonucleotide
  Antisense strand to SEQ ID NO: 1692477
aauuacagucucuacgcuc

SEQ ID NO: 1692479 - RNA, 19 nt, Artificial Sequence
  Description of Artificial Sequence: Synthetic oligonucleotide
  Sense strand starting at position 3512 of SEQ ID NO: 1561709
gacuauagcgcucagcaca

SEQ ID NO: 1692480 - RNA, 19 nt, Artificial Sequence
  Description of Artificial Sequence: Synthetic oligonucleotide
  Antisense strand to SEQ ID NO: 1692479
ugugcugagcgcuauaguc

SEQ ID NO: 1692481 - RNA, 19 nt, Artificial Sequence
  Description of Artificial Sequence: Synthetic oligonucleotide
  Sense strand starting at position 3553 of SEQ ID NO: 1561709
ucaauaagugcugagugaa

SEQ ID NO: 1692482 - RNA, 19 nt, Artificial Sequence
  Description of Artificial Sequence: Synthetic oligonucleotide
  Antisense strand to SEQ ID NO: 1692481
uucacucagcacuuauuga

SEQ ID NO: 1692483 - RNA, 19 nt, Artificial Sequence
  Description of Artificial Sequence: Synthetic oligonucleotide
  Sense strand starting at position 3582 of SEQ ID NO: 1561709
aguggauagcucgagugaa

SEQ ID NO: 1692484 - RNA, 19 nt, Artificial Sequence
  Description of Artificial Sequence: Synthetic oligonucleotide
  Antisense strand to SEQ ID NO: 1692483
uucacucgagcuauccacu

SEQ ID NO: 1692485 - RNA, 19 nt, Artificial Sequence
  Description of Artificial Sequence: Synthetic oligonucleotide
  Sense strand starting at position 3794 of SEQ ID NO: 1561709
ggaacaucuccaggcacua

SEQ ID NO: 1692486 - RNA, 19 nt, Artificial Sequence
  Description of Artificial Sequence: Synthetic oligonucleotide
  Antisense strand to SEQ ID NO: 1692485
uagugccuggagauguucc

SEQ ID NO: 1692487 - RNA, 19 nt, Artificial Sequence
  Description of Artificial Sequence: Synthetic oligonucleotide
  Sense strand starting at position 3833 of SEQ ID NO: 1561709
gaagcaguggugugggauu

SEQ ID NO: 1692488 - RNA, 19 nt, Artificial Sequence
  Description of Artificial Sequence: Synthetic oligonucleotide
  Antisense strand to SEQ ID NO: 1692487
aaucccacaccacugcuuc

SEQ ID NO: 1692489 - RNA, 19 nt, Artificial Sequence
  Description of Artificial Sequence: Synthetic oligonucleotide
  Sense strand starting at position 3860 of SEQ ID NO: 1561709
gggaaauaaucccacaaca

SEQ ID NO: 1692490 - RNA, 19 nt, Artificial Sequence
  Description of Artificial Sequence: Synthetic oligonucleotide
  Antisense strand to SEQ ID NO: 1692489
uguugugggauuauuuccc

SEQ ID NO: 1692491 - RNA, 19 nt, Artificial Sequence
  Description of Artificial Sequence: Synthetic oligonucleotide
  Sense strand starting at position 3963 of SEQ ID NO: 1561709
gccucagggcguuugcaua

SEQ ID NO: 1692492 - RNA, 19 nt, Artificial Sequence
  Description of Artificial Sequence: Synthetic oligonucleotide
  Antisense strand to SEQ ID NO: 1692491
uaugcaaacgcccugaggc

SEQ ID NO: 1692493 - RNA, 19 nt, Artificial Sequence
  Description of Artificial Sequence: Synthetic oligonucleotide
  Sense strand starting at position 138 of SEQ ID NO: 1561710
gggaguaguuaucuuccau

SEQ ID NO: 1692494 - RNA, 19 nt, Artificial Sequence
  Description of Artificial Sequence: Synthetic oligonucleotide
  Antisense strand to SEQ ID NO: 1692493
auggaagauaacuacuccc

SEQ ID NO: 1692495 - RNA, 19 nt, Artificial Sequence
  Description of Artificial Sequence: Synthetic oligonucleotide
  Sense strand starting at position 193 of SEQ ID NO: 1561710
cuauuaauagaauguggca

SEQ ID NO: 1692496 - RNA, 19 nt, Artificial Sequence
  Description of Artificial Sequence: Synthetic oligonucleotide
  Antisense strand to SEQ ID NO: 1692495
ugccacauucuauuaauag

SEQ ID NO: 1692497 - RNA, 19 nt, Artificial Sequence
  Description of Artificial Sequence: Synthetic oligonucleotide
  Sense strand starting at position 237 of SEQ ID NO: 1561710
uugguuccuguuuaucuaa

SEQ ID NO: 1692498 - RNA, 19 nt, Artificial Sequence
  Description of Artificial Sequence: Synthetic oligonucleotide
  Antisense strand to SEQ ID NO: 1692497
uuagauaaacaggaaccaa

SEQ ID NO: 1692499 - RNA, 19 nt, Artificial Sequence
  Description of Artificial Sequence: Synthetic oligonucleotide
  Sense strand starting at position 329 of SEQ ID NO: 1561710
guuuccauccaauggacau

SEQ ID NO: 1692500 - RNA, 19 nt, Artificial Sequence
  Description of Artificial Sequence: Synthetic oligonucleotide
  Antisense strand to SEQ ID NO: 1692499
auguccauuggauggaaac

SEQ ID NO: 1692501 - RNA, 19 nt, Artificial Sequence
  Description of Artificial Sequence: Synthetic oligonucleotide
  Sense strand starting at position 353 of SEQ ID NO: 1561710
agguacugaguccaccaua

SEQ ID NO: 1692502 - RNA, 19 nt, Artificial Sequence
  Description of Artificial Sequence: Synthetic oligonucleotide
  Antisense strand to SEQ ID NO: 1692501
uaugguggacucaguaccu

SEQ ID NO: 1692503 - RNA, 19 nt, Artificial Sequence
  Description of Artificial Sequence: Synthetic oligonucleotide
  Sense strand starting at position 519 of SEQ ID NO: 1561710
cuggccuuagcuuaaacau

SEQ ID NO: 1692504 - RNA, 19 nt, Artificial Sequence
  Description of Artificial Sequence: Synthetic oligonucleotide
  Antisense strand to SEQ ID NO: 1692503
auguuuaagcuaaggccag

SEQ ID NO: 1692505 - RNA, 19 nt, Artificial Sequence
  Description of Artificial Sequence: Synthetic oligonucleotide
  Sense strand starting at position 1128 of SEQ ID NO: 1561710
ccauucucaucugugagau

SEQ ID NO: 1692506 - RNA, 19 nt, Artificial Sequence
  Description of Artificial Sequence: Synthetic oligonucleotide
  Antisense strand to SEQ ID NO: 1692505
aucucacagaugagaaugg

SEQ ID NO: 1692507 - RNA, 19 nt, Artificial Sequence
  Description of Artificial Sequence: Synthetic oligonucleotide
  Sense strand starting at position 1129 of SEQ ID NO: 1561710
cauucucaucugugagaug

SEQ ID NO: 1692508 - RNA, 19 nt, Artificial Sequence
  Description of Artificial Sequence: Synthetic oligonucleotide
  Antisense strand to SEQ ID NO: 1692507
caucucacagaugagaaug

SEQ ID NO: 1692509 - RNA, 19 nt, Artificial Sequence
  Description of Artificial Sequence: Synthetic oligonucleotide
  Sense strand starting at position 1140 of SEQ ID NO: 1561710
gugagauggacaugauagu

SEQ ID NO: 1692510 - RNA, 19 nt, Artificial Sequence
  Description of Artificial Sequence: Synthetic oligonucleotide
  Antisense strand to SEQ ID NO: 1692509
acuaucauguccaucucac

SEQ ID NO: 1692511 - RNA, 19 nt, Artificial Sequence
  Description of Artificial Sequence: Synthetic oligonucleotide
  Sense strand starting at position 1282 of SEQ ID NO: 1561710
gagugaggcagcugagauu

SEQ ID NO: 1692512 - RNA, 19 nt, Artificial Sequence
  Description of Artificial Sequence: Synthetic oligonucleotide
  Antisense strand to SEQ ID NO: 1692511
aaucucagcugccucacuc

SEQ ID NO: 1692513 - RNA, 19 nt, Artificial Sequence
  Description of Artificial Sequence: Synthetic oligonucleotide
  Sense strand starting at position 1301 of SEQ ID NO: 1561710
ugaaccaaguuuguuugaa

SEQ ID NO: 1692514 - RNA, 19 nt, Artificial Sequence
  Description of Artificial Sequence: Synthetic oligonucleotide
  Antisense strand to SEQ ID NO: 1692513
uucaaacaaacuugguuca

SEQ ID NO: 1692515 - RNA, 19 nt, Artificial Sequence
  Description of Artificial Sequence: Synthetic oligonucleotide
  Sense strand starting at position 1302 of SEQ ID NO: 1561710
gaaccaaguuuguuugaau

SEQ ID NO: 1692516 - RNA, 19 nt, Artificial Sequence
  Description of Artificial Sequence: Synthetic oligonucleotide
  Antisense strand to SEQ ID NO: 1692515
auucaaacaaacuugguuc

SEQ ID NO: 1692517 - RNA, 19 nt, Artificial Sequence
  Description of Artificial Sequence: Synthetic oligonucleotide
  Sense strand starting at position 1835 of SEQ ID NO: 1561710
uuaguuaucuacuuacaga

SEQ ID NO: 1692518 - RNA, 19 nt, Artificial Sequence
  Description of Artificial Sequence: Synthetic oligonucleotide
  Antisense strand to SEQ ID NO: 1692517
ucuguaaguagauaacuaa

SEQ ID NO: 1692519 - RNA, 19 nt, Artificial Sequence
  Description of Artificial Sequence: Synthetic oligonucleotide
  Sense strand starting at position 2109 of SEQ ID NO: 1561710
gugaacauggugugagaau

SEQ ID NO: 1692520 - RNA, 19 nt, Artificial Sequence
  Description of Artificial Sequence: Synthetic oligonucleotide
  Antisense strand to SEQ ID NO: 1692519
auucucacaccauguucac

SEQ ID NO: 1692521 - RNA, 19 nt, Artificial Sequence
  Description of Artificial Sequence: Synthetic oligonucleotide
  Sense strand starting at position 2163 of SEQ ID NO: 1561710
ugacaacugucacugcaaa

SEQ ID NO: 1692522 - RNA, 19 nt, Artificial Sequence
  Description of Artificial Sequence: Synthetic oligonucleotide
  Antisense strand to SEQ ID NO: 1692521
uuugcagugacaguuguca

SEQ ID NO: 1692523 - RNA, 19 nt, Artificial Sequence
  Description of Artificial Sequence: Synthetic oligonucleotide
  Sense strand starting at position 2188 of SEQ ID NO: 1561710
gacguuccuccauaggaga

SEQ ID NO: 1692524 - RNA, 19 nt, Artificial Sequence
  Description of Artificial Sequence: Synthetic oligonucleotide
  Antisense strand to SEQ ID NO: 1692523
ucuccuauggaggaacguc

SEQ ID NO: 1692525 - RNA, 19 nt, Artificial Sequence
  Description of Artificial Sequence: Synthetic oligonucleotide
  Sense strand starting at position 2190 of SEQ ID NO: 1561710
cguuccuccauaggagaau

SEQ ID NO: 1692526 - RNA, 19 nt, Artificial Sequence
  Description of Artificial Sequence: Synthetic oligonucleotide
  Antisense strand to SEQ ID NO: 1692525
auucuccuauggaggaacg

SEQ ID NO: 1692527 - RNA, 19 nt, Artificial Sequence
  Description of Artificial Sequence: Synthetic oligonucleotide
  Sense strand starting at position 2217 of SEQ ID NO: 1561710
ugagaacuggccuguuuag

SEQ ID NO: 1692528 - RNA, 19 nt, Artificial Sequence
  Description of Artificial Sequence: Synthetic oligonucleotide
  Antisense strand to SEQ ID NO: 1692527
cuaaacaggccaguucuca

SEQ ID NO: 1692529 - RNA, 19 nt, Artificial Sequence
  Description of Artificial Sequence: Synthetic oligonucleotide
  Sense strand starting at position 2232 of SEQ ID NO: 1561710
uuagaaguuucugcaacua

SEQ ID NO: 1692530 - RNA, 19 nt, Artificial Sequence
  Description of Artificial Sequence: Synthetic oligonucleotide
  Antisense strand to SEQ ID NO: 1692529
uaguugcagaaacuucuaa

SEQ ID NO: 1692531 - RNA, 19 nt, Artificial Sequence
  Description of Artificial Sequence: Synthetic oligonucleotide
  Sense strand starting at position 2334 of SEQ ID NO: 1561710
aggguccucuuauauuuaa

SEQ ID NO: 1692532 - RNA, 19 nt, Artificial Sequence
  Description of Artificial Sequence: Synthetic oligonucleotide
  Antisense strand to SEQ ID NO: 1692531
uuaaauauaagaggacccu

SEQ ID NO: 1692533 - RNA, 19 nt, Artificial Sequence
  Description of Artificial Sequence: Synthetic oligonucleotide
  Sense strand starting at position 2362 of SEQ ID NO: 1561710
auggcauguggugaagagu

SEQ ID NO: 1692534 - RNA, 19 nt, Artificial Sequence
  Description of Artificial Sequence: Synthetic oligonucleotide
  Antisense strand to SEQ ID NO: 1692533
acucuucaccacaugccau

SEQ ID NO: 1692535 - RNA, 19 nt, Artificial Sequence
  Description of Artificial Sequence: Synthetic oligonucleotide
  Sense strand starting at position 2448 of SEQ ID NO: 1561710
gucagcagucuugagacau

SEQ ID NO: 1692536 - RNA, 19 nt, Artificial Sequence
  Description of Artificial Sequence: Synthetic oligonucleotide
  Antisense strand to SEQ ID NO: 1692535
augucucaagacugcugac

SEQ ID NO: 1692537 - RNA, 19 nt, Artificial Sequence
  Description of Artificial Sequence: Synthetic oligonucleotide
  Sense strand starting at position 2488 of SEQ ID NO: 1561710
ugugguuaaguguaggaaa

SEQ ID NO: 1692538 - RNA, 19 nt, Artificial Sequence
  Description of Artificial Sequence: Synthetic oligonucleotide
  Antisense strand to SEQ ID NO: 1692537
uuuccuacacuuaaccaca

SEQ ID NO: 1692539 - RNA, 19 nt, Artificial Sequence
  Description of Artificial Sequence: Synthetic oligonucleotide
  Sense strand starting at position 2490 of SEQ ID NO: 1561710
ugguuaaguguaggaaaug

SEQ ID NO: 1692540 - RNA, 19 nt, Artificial Sequence
  Description of Artificial Sequence: Synthetic oligonucleotide
  Antisense strand to SEQ ID NO: 1692539
cauuuccuacacuuaacca

SEQ ID NO: 1692541 - RNA, 19 nt, Artificial Sequence
  Description of Artificial Sequence: Synthetic oligonucleotide
  Sense strand starting at position 2603 of SEQ ID NO: 1561710
uuccgacacucuuugggaa

SEQ ID NO: 1692542 - RNA, 19 nt, Artificial Sequence
  Description of Artificial Sequence: Synthetic oligonucleotide
  Antisense strand to SEQ ID NO: 1692541
uucccaaagagugucggaa

SEQ ID NO: 1692543 - RNA, 19 nt, Artificial Sequence
  Description of Artificial Sequence: Synthetic oligonucleotide
  Sense strand starting at position 2735 of SEQ ID NO: 1561710
gucucaauuucuguaaguc

SEQ ID NO: 1692544 - RNA, 19 nt, Artificial Sequence
  Description of Artificial Sequence: Synthetic oligonucleotide
  Antisense strand to SEQ ID NO: 1692543
gacuuacagaaauugagac

SEQ ID NO: 1692545 - RNA, 19 nt, Artificial Sequence
  Description of Artificial Sequence: Synthetic oligonucleotide
  Sense strand starting at position 2803 of SEQ ID NO: 1561710
auuauauacuagccaguga

SEQ ID NO: 1692546 - RNA, 19 nt, Artificial Sequence
  Description of Artificial Sequence: Synthetic oligonucleotide
  Antisense strand to SEQ ID NO: 1692545
ucacuggcuaguauauaau

SEQ ID NO: 1692547 - RNA, 19 nt, Artificial Sequence
  Description of Artificial Sequence: Synthetic oligonucleotide
  Sense strand starting at position 2937 of SEQ ID NO: 1561710
ugagacaucuuguuuguga

SEQ ID NO: 1692548 - RNA, 19 nt, Artificial Sequence
  Description of Artificial Sequence: Synthetic oligonucleotide
  Antisense strand to SEQ ID NO: 1692547
ucacaaacaagaugucuca

SEQ ID NO: 1692549 - RNA, 19 nt, Artificial Sequence
  Description of Artificial Sequence: Synthetic oligonucleotide
  Sense strand starting at position 2938 of SEQ ID NO: 1561710
gagacaucuuguuugugaa

SEQ ID NO: 1692550 - RNA, 19 nt, Artificial Sequence
  Description of Artificial Sequence: Synthetic oligonucleotide
  Antisense strand to SEQ ID NO: 1692549
uucacaaacaagaugucuc

SEQ ID NO: 1692551 - RNA, 19 nt, Artificial Sequence
  Description of Artificial Sequence: Synthetic oligonucleotide
  Sense strand starting at position 2939 of SEQ ID NO: 1561710
agacaucuuguuugugaaa

SEQ ID NO: 1692552 - RNA, 19 nt, Artificial Sequence
  Description of Artificial Sequence: Synthetic oligonucleotide
  Antisense strand to SEQ ID NO: 1692551
uuucacaaacaagaugucu

SEQ ID NO: 1692553 - RNA, 19 nt, Artificial Sequence
  Description of Artificial Sequence: Synthetic oligonucleotide
  Sense strand starting at position 2940 of SEQ ID NO: 1561710
gacaucuuguuugugaaac

SEQ ID NO: 1692554 - RNA, 19 nt, Artificial Sequence
  Description of Artificial Sequence: Synthetic oligonucleotide
  Antisense strand to SEQ ID NO: 1692553
guuucacaaacaagauguc

SEQ ID NO: 1692555 - RNA, 19 nt, Artificial Sequence
  Description of Artificial Sequence: Synthetic oligonucleotide
  Sense strand starting at position 3024 of SEQ ID NO: 1561710
gauaacugacuuugguaaa

SEQ ID NO: 1692556 - RNA, 19 nt, Artificial Sequence
  Description of Artificial Sequence: Synthetic oligonucleotide
  Antisense strand to SEQ ID NO: 1692555
uuuaccaaagucaguuauc

SEQ ID NO: 1692557 - RNA, 19 nt, Artificial Sequence
  Description of Artificial Sequence: Synthetic oligonucleotide
  Sense strand starting at position 3272 of SEQ ID NO: 1561710
cacaaagcucuagguagaa

SEQ ID NO: 1692558 - RNA, 19 nt, Artificial Sequence
  Description of Artificial Sequence: Synthetic oligonucleotide
  Antisense strand to SEQ ID NO: 1692557
uucuaccuagagcuuugug

SEQ ID NO: 1692559 - RNA, 19 nt, Artificial Sequence
  Description of Artificial Sequence: Synthetic oligonucleotide
  Sense strand starting at position 3307 of SEQ ID NO: 1561710
ugcugagaaguccaaauuc

SEQ ID NO: 1692560 - RNA, 19 nt, Artificial Sequence
  Description of Artificial Sequence: Synthetic oligonucleotide
  Antisense strand to SEQ ID NO: 1692559
gaauuuggacuucucagca

SEQ ID NO: 1692561 - RNA, 19 nt, Artificial Sequence
  Description of Artificial Sequence: Synthetic oligonucleotide
  Sense strand starting at position 3343 of SEQ ID NO: 1561710
ggcauucuaguccacacaa

SEQ ID NO: 1692562 - RNA, 19 nt, Artificial Sequence
  Description of Artificial Sequence: Synthetic oligonucleotide
  Antisense strand to SEQ ID NO: 1692561
uuguguggacuagaaugcc

SEQ ID NO: 1692563 - RNA, 19 nt, Artificial Sequence
  Description of Artificial Sequence: Synthetic oligonucleotide
  Sense strand starting at position 3354 of SEQ ID NO: 1561710
ccacacaaucuguguauua

SEQ ID NO: 1692564 - RNA, 19 nt, Artificial Sequence
  Description of Artificial Sequence: Synthetic oligonucleotide
  Antisense strand to SEQ ID NO: 1692563
uaauacacagauugugugg

SEQ ID NO: 1692565 - RNA, 19 nt, Artificial Sequence
  Description of Artificial Sequence: Synthetic oligonucleotide
  Sense strand starting at position 3356 of SEQ ID NO: 1561710
acacaaucuguguauuaug

SEQ ID NO: 1692566 - RNA, 19 nt, Artificial Sequence
  Description of Artificial Sequence: Synthetic oligonucleotide
  Antisense strand to SEQ ID NO: 1692565
cauaauacacagauugugu

SEQ ID NO: 1692567 - RNA, 19 nt, Artificial Sequence
  Description of Artificial Sequence: Synthetic oligonucleotide
  Sense strand starting at position 3515 of SEQ ID NO: 1561710
aaugaaauacgugguuauu

SEQ ID NO: 1692568 - RNA, 19 nt, Artificial Sequence
  Description of Artificial Sequence: Synthetic oligonucleotide
  Antisense strand to SEQ ID NO: 1692567
aauaaccacguauuucauu

SEQ ID NO: 1692569 - RNA, 19 nt, Artificial Sequence
  Description of Artificial Sequence: Synthetic oligonucleotide
  Sense strand starting at position 3517 of SEQ ID NO: 1561710
ugaaauacgugguuauuaa

SEQ ID NO: 1692570 - RNA, 19 nt, Artificial Sequence
  Description of Artificial Sequence: Synthetic oligonucleotide
  Antisense strand to SEQ ID NO: 1692569
uuaauaaccacguauuuca

SEQ ID NO: 1692571 - RNA, 19 nt, Artificial Sequence
  Description of Artificial Sequence: Synthetic oligonucleotide
  Sense strand starting at position 3518 of SEQ ID NO: 1561710
gaaauacgugguuauuaaa

SEQ ID NO: 1692572 - RNA, 19 nt, Artificial Sequence
  Description of Artificial Sequence: Synthetic oligonucleotide
  Antisense strand to SEQ ID NO: 1692571
uuuaauaaccacguauuuc

SEQ ID NO: 1692573 - RNA, 19 nt, Artificial Sequence
  Description of Artificial Sequence: Synthetic oligonucleotide
  Sense strand starting at position 145 of SEQ ID NO: 1561711
aauagucaaugggcugaau

SEQ ID NO: 1692574 - RNA, 19 nt, Artificial Sequence
  Description of Artificial Sequence: Synthetic oligonucleotide
  Antisense strand to SEQ ID NO: 1692573
auucagcccauugacuauu

SEQ ID NO: 1692575 - RNA, 19 nt, Artificial Sequence
  Description of Artificial Sequence: Synthetic oligonucleotide
  Sense strand starting at position 413 of SEQ ID NO: 1561711
gguaaacaugaagguauau

SEQ ID NO: 1692576 - RNA, 19 nt, Artificial Sequence
  Description of Artificial Sequence: Synthetic oligonucleotide
  Antisense strand to SEQ ID NO: 1692575
auauaccuucauguuuacc

SEQ ID NO: 1692577 - RNA, 19 nt, Artificial Sequence
  Description of Artificial Sequence: Synthetic oligonucleotide
  Sense strand starting at position 546 of SEQ ID NO: 1561711
acagaaauguaagagagaa

SEQ ID NO: 1692578 - RNA, 19 nt, Artificial Sequence
  Description of Artificial Sequence: Synthetic oligonucleotide
  Antisense strand to SEQ ID NO: 1692577
uucucucuuacauuucugu

SEQ ID NO: 1692579 - RNA, 19 nt, Artificial Sequence
  Description of Artificial Sequence: Synthetic oligonucleotide
  Sense strand starting at position 577 of SEQ ID NO: 1561711
gaagcaaaguauucuagca

SEQ ID NO: 1692580 - RNA, 19 nt, Artificial Sequence
  Description of Artificial Sequence: Synthetic oligonucleotide
  Antisense strand to SEQ ID NO: 1692579
ugcuagaauacuuugcuuc

SEQ ID NO: 1692581 - RNA, 19 nt, Artificial Sequence
  Description of Artificial Sequence: Synthetic oligonucleotide
  Sense strand starting at position 648 of SEQ ID NO: 1561711
guaaaucaauuguuuacag

SEQ ID NO: 1692582 - RNA, 19 nt, Artificial Sequence
  Description of Artificial Sequence: Synthetic oligonucleotide
  Antisense strand to SEQ ID NO: 1692581
cuguaaacaauugauuuac

SEQ ID NO: 1692583 - RNA, 19 nt, Artificial Sequence
  Description of Artificial Sequence: Synthetic oligonucleotide
  Sense strand starting at position 819 of SEQ ID NO: 1561711
uggcaaauacauugauguu

SEQ ID NO: 1692584 - RNA, 19 nt, Artificial Sequence
  Description of Artificial Sequence: Synthetic oligonucleotide
  Antisense strand to SEQ ID NO: 1692583
aacaucaauguauuugcca

SEQ ID NO: 1692585 - RNA, 19 nt, Artificial Sequence
  Description of Artificial Sequence: Synthetic oligonucleotide
  Sense strand starting at position 826 of SEQ ID NO: 1561711
uacauugauguugguuaua

SEQ ID NO: 1692586 - RNA, 19 nt, Artificial Sequence
  Description of Artificial Sequence: Synthetic oligonucleotide
  Antisense strand to SEQ ID NO: 1692585
uauaaccaacaucaaugua

SEQ ID NO: 1692587 - RNA, 19 nt, Artificial Sequence
  Description of Artificial Sequence: Synthetic oligonucleotide
  Sense strand starting at position 828 of SEQ ID NO: 1561711
cauugauguugguuauaac

SEQ ID NO: 1692588 - RNA, 19 nt, Artificial Sequence
  Description of Artificial Sequence: Synthetic oligonucleotide
  Antisense strand to SEQ ID NO: 1692587
guuauaaccaacaucaaug

SEQ ID NO: 1692589 - RNA, 19 nt, Artificial Sequence
  Description of Artificial Sequence: Synthetic oligonucleotide
  Sense strand starting at position 829 of SEQ ID NO: 1561711
auugauguugguuauaacu

SEQ ID NO: 1692590 - RNA, 19 nt, Artificial Sequence
  Description of Artificial Sequence: Synthetic oligonucleotide
  Antisense strand to SEQ ID NO: 1692589
aguuauaaccaacaucaau

SEQ ID NO: 1692591 - RNA, 19 nt, Artificial Sequence
  Description of Artificial Sequence: Synthetic oligonucleotide
  Sense strand starting at position 849 of SEQ ID NO: 1561711
acugcaguucuagaaaucu

SEQ ID NO: 1692592 - RNA, 19 nt, Artificial Sequence
  Description of Artificial Sequence: Synthetic oligonucleotide
  Antisense strand to SEQ ID NO: 1692591
agauuucuagaacugcagu

SEQ ID NO: 1692593 - RNA, 19 nt, Artificial Sequence
  Description of Artificial Sequence: Synthetic oligonucleotide
  Sense strand starting at position 889 of SEQ ID NO: 1561711
uaauaucugcauugguaga

SEQ ID NO: 1692594 - RNA, 19 nt, Artificial Sequence
  Description of Artificial Sequence: Synthetic oligonucleotide
  Antisense strand to SEQ ID NO: 1692593
ucuaccaaugcagauauua

SEQ ID NO: 1692595 - RNA, 19 nt, Artificial Sequence
  Description of Artificial Sequence: Synthetic oligonucleotide
  Sense strand starting at position 899 of SEQ ID NO: 1561711
auugguagacgugauauua

SEQ ID NO: 1692596 - RNA, 19 nt, Artificial Sequence
  Description of Artificial Sequence: Synthetic oligonucleotide
  Antisense strand to SEQ ID NO: 1692595
uaauaucacgucuaccaau

SEQ ID NO: 1692597 - RNA, 19 nt, Artificial Sequence
  Description of Artificial Sequence: Synthetic oligonucleotide
  Sense strand starting at position 960 of SEQ ID NO: 1561711
uuugcaacuguggaaauua

SEQ ID NO: 1692598 - RNA, 19 nt, Artificial Sequence
  Description of Artificial Sequence: Synthetic oligonucleotide
  Antisense strand to SEQ ID NO: 1692597
uaauuuccacaguugcaaa

SEQ ID NO: 1692599 - RNA, 19 nt, Artificial Sequence
  Description of Artificial Sequence: Synthetic oligonucleotide
  Sense strand starting at position 968 of SEQ ID NO: 1561711
uguggaaauuauccuaaca

SEQ ID NO: 1692600 - RNA, 19 nt, Artificial Sequence
  Description of Artificial Sequence: Synthetic oligonucleotide
  Antisense strand to SEQ ID NO: 1692599
uguuaggauaauuuccaca

SEQ ID NO: 1692601 - RNA, 19 nt, Artificial Sequence
  Description of Artificial Sequence: Synthetic oligonucleotide
  Sense strand starting at position 1146 of SEQ ID NO: 1561711
agaguuggaggcuguuaga

SEQ ID NO: 1692602 - RNA, 19 nt, Artificial Sequence
  Description of Artificial Sequence: Synthetic oligonucleotide
  Antisense strand to SEQ ID NO: 1692601
ucuaacagccuccaacucu

SEQ ID NO: 1692603 - RNA, 19 nt, Artificial Sequence
  Description of Artificial Sequence: Synthetic oligonucleotide
  Sense strand starting at position 1207 of SEQ ID NO: 1561711
ggaggaaaucucugugucu

SEQ ID NO: 1692604 - RNA, 19 nt, Artificial Sequence
  Description of Artificial Sequence: Synthetic oligonucleotide
  Antisense strand to SEQ ID NO: 1692603
agacacagagauuuccucc

SEQ ID NO: 1692605 - RNA, 19 nt, Artificial Sequence
  Description of Artificial Sequence: Synthetic oligonucleotide
  Sense strand starting at position 1208 of SEQ ID NO: 1561711
gaggaaaucucugugucuu

SEQ ID NO: 1692606 - RNA, 19 nt, Artificial Sequence
  Description of Artificial Sequence: Synthetic oligonucleotide
  Antisense strand to SEQ ID NO: 1692605
aagacacagagauuuccuc

SEQ ID NO: 1692607 - RNA, 19 nt, Artificial Sequence
  Description of Artificial Sequence: Synthetic oligonucleotide
  Sense strand starting at position 1345 of SEQ ID NO: 1561711
cugagcauuugucuuuaau

SEQ ID NO: 1692608 - RNA, 19 nt, Artificial Sequence
  Description of Artificial Sequence: Synthetic oligonucleotide
  Antisense strand to SEQ ID NO: 1692607
auuaaagacaaaugcucag

SEQ ID NO: 1692609 - RNA, 19 nt, Artificial Sequence
  Description of Artificial Sequence: Synthetic oligonucleotide
  Sense strand starting at position 1472 of SEQ ID NO: 1561711
ucacaagacugaguuguuu

SEQ ID NO: 1692610 - RNA, 19 nt, Artificial Sequence
  Description of Artificial Sequence: Synthetic oligonucleotide
  Antisense strand to SEQ ID NO: 1692609
aaacaacucagucuuguga

SEQ ID NO: 1692611 - RNA, 19 nt, Artificial Sequence
  Description of Artificial Sequence: Synthetic oligonucleotide
  Sense strand starting at position 2323 of SEQ ID NO: 1561711
gaaggcucacccugagaga

SEQ ID NO: 1692612 - RNA, 19 nt, Artificial Sequence
  Description of Artificial Sequence: Synthetic oligonucleotide
  Antisense strand to SEQ ID NO: 1692611
ucucucagggugagccuuc

SEQ ID NO: 1692613 - RNA, 19 nt, Artificial Sequence
  Description of Artificial Sequence: Synthetic oligonucleotide
  Sense strand starting at position 2450 of SEQ ID NO: 1561711
gggugguucggugaagauu

SEQ ID NO: 1692614 - RNA, 19 nt, Artificial Sequence
  Description of Artificial Sequence: Synthetic oligonucleotide
  Antisense strand to SEQ ID NO: 1692613
aaucuucaccgaaccaccc

SEQ ID NO: 1692615 - RNA, 19 nt, Artificial Sequence
  Description of Artificial Sequence: Synthetic oligonucleotide
  Sense strand starting at position 2452 of SEQ ID NO: 1561711
gugguucggugaagauuua

SEQ ID NO: 1692616 - RNA, 19 nt, Artificial Sequence
  Description of Artificial Sequence: Synthetic oligonucleotide
  Antisense strand to SEQ ID NO: 1692615
uaaaucuucaccgaaccac

SEQ ID NO: 1692617 - RNA, 19 nt, Artificial Sequence
  Description of Artificial Sequence: Synthetic oligonucleotide
  Sense strand starting at position 2538 of SEQ ID NO: 1561711
acacgaguuucuguauaaa

SEQ ID NO: 1692618 - RNA, 19 nt, Artificial Sequence
  Description of Artificial Sequence: Synthetic oligonucleotide
  Antisense strand to SEQ ID NO: 1692617
uuuauacagaaacucgugu

SEQ ID NO: 1692619 - RNA, 19 nt, Artificial Sequence
  Description of Artificial Sequence: Synthetic oligonucleotide
  Sense strand starting at position 2541 of SEQ ID NO: 1561711
cgaguuucuguauaaagac

SEQ ID NO: 1692620 - RNA, 19 nt, Artificial Sequence
  Description of Artificial Sequence: Synthetic oligonucleotide
  Antisense strand to SEQ ID NO: 1692619
gucuuuauacagaaacucg

SEQ ID NO: 1692621 - RNA, 19 nt, Artificial Sequence
  Description of Artificial Sequence: Synthetic oligonucleotide
  Sense strand starting at position 2558 of SEQ ID NO: 1561711
acgaccuugcuagauguua

SEQ ID NO: 1692622 - RNA, 19 nt, Artificial Sequence
  Description of Artificial Sequence: Synthetic oligonucleotide
  Antisense strand to SEQ ID NO: 1692621
uaacaucuagcaaggucgu

SEQ ID NO: 1692623 - RNA, 19 nt, Artificial Sequence
  Description of Artificial Sequence: Synthetic oligonucleotide
  Sense strand starting at position 2569 of SEQ ID NO: 1561711
agauguuaccgagaggcaa

SEQ ID NO: 1692624 - RNA, 19 nt, Artificial Sequence
  Description of Artificial Sequence: Synthetic oligonucleotide
  Antisense strand to SEQ ID NO: 1692623
uugccucucgguaacaucu

SEQ ID NO: 1692625 - RNA, 19 nt, Artificial Sequence
  Description of Artificial Sequence: Synthetic oligonucleotide
  Sense strand starting at position 2731 of SEQ ID NO: 1561711
guaggaguaguauaguauc

SEQ ID NO: 1692626 - RNA, 19 nt, Artificial Sequence
  Description of Artificial Sequence: Synthetic oligonucleotide
  Antisense strand to SEQ ID NO: 1692625
gauacuauacuacuccuac

SEQ ID NO: 1692627 - RNA, 19 nt, Artificial Sequence
  Description of Artificial Sequence: Synthetic oligonucleotide
  Sense strand starting at position 2780 of SEQ ID NO: 1561711
ugguauuuccuuugauagc

SEQ ID NO: 1692628 - RNA, 19 nt, Artificial Sequence
  Description of Artificial Sequence: Synthetic oligonucleotide
  Antisense strand to SEQ ID NO: 1692627
gcuaucaaaggaaauacca

SEQ ID NO: 1692629 - RNA, 19 nt, Artificial Sequence
  Description of Artificial Sequence: Synthetic oligonucleotide
  Sense strand starting at position 2805 of SEQ ID NO: 1561711
uuaccaagugcuuaauaug

SEQ ID NO: 1692630 - RNA, 19 nt, Artificial Sequence
  Description of Artificial Sequence: Synthetic oligonucleotide
  Antisense strand to SEQ ID NO: 1692629
cauauuaagcacuugguaa

SEQ ID NO: 1692631 - RNA, 19 nt, Artificial Sequence
  Description of Artificial Sequence: Synthetic oligonucleotide
  Sense strand starting at position 2831 of SEQ ID NO: 1561711
cuuugaagccuuuacagau

SEQ ID NO: 1692632 - RNA, 19 nt, Artificial Sequence
  Description of Artificial Sequence: Synthetic oligonucleotide
  Antisense strand to SEQ ID NO: 1692631
aucuguaaaggcuucaaag

SEQ ID NO: 1692633 - RNA, 19 nt, Artificial Sequence
  Description of Artificial Sequence: Synthetic oligonucleotide
  Sense strand starting at position 2875 of SEQ ID NO: 1561711
ccggaugacucucuugaac

SEQ ID NO: 1692634 - RNA, 19 nt, Artificial Sequence
  Description of Artificial Sequence: Synthetic oligonucleotide
  Antisense strand to SEQ ID NO: 1692633
guucaagagagucauccgg

SEQ ID NO: 1692635 - RNA, 19 nt, Artificial Sequence
  Description of Artificial Sequence: Synthetic oligonucleotide
  Sense strand starting at position 2916 of SEQ ID NO: 1561711
ucugacucgcaggaguaau

SEQ ID NO: 1692636 - RNA, 19 nt, Artificial Sequence
  Description of Artificial Sequence: Synthetic oligonucleotide
  Antisense strand to SEQ ID NO: 1692635
auuacuccugcgagucaga

SEQ ID NO: 1692637 - RNA, 19 nt, Artificial Sequence
  Description of Artificial Sequence: Synthetic oligonucleotide
  Sense strand starting at position 2924 of SEQ ID NO: 1561711
gcaggaguaaugcauauag

SEQ ID NO: 1692638 - RNA, 19 nt, Artificial Sequence
  Description of Artificial Sequence: Synthetic oligonucleotide
  Antisense strand to SEQ ID NO: 1692637
cuauaugcauuacuccugc

SEQ ID NO: 1692639 - RNA, 19 nt, Artificial Sequence
  Description of Artificial Sequence: Synthetic oligonucleotide
  Sense strand starting at position 3065 of SEQ ID NO: 1561711
gggcaucacugguccaaug

SEQ ID NO: 1692640 - RNA, 19 nt, Artificial Sequence
  Description of Artificial Sequence: Synthetic oligonucleotide
  Antisense strand to SEQ ID NO: 1692639
cauuggaccagugaugccc

SEQ ID NO: 1692641 - RNA, 19 nt, Artificial Sequence
  Description of Artificial Sequence: Synthetic oligonucleotide
  Sense strand starting at position 3067 of SEQ ID NO: 1561711
gcaucacugguccaaugga

SEQ ID NO: 1692642 - RNA, 19 nt, Artificial Sequence
  Description of Artificial Sequence: Synthetic oligonucleotide
  Antisense strand to SEQ ID NO: 1692641
uccauuggaccagugaugc

SEQ ID NO: 1692643 - RNA, 19 nt, Artificial Sequence
  Description of Artificial Sequence: Synthetic oligonucleotide
  Sense strand starting at position 3439 of SEQ ID NO: 1561711
ugaaauugccuuugacuug

SEQ ID NO: 1692644 - RNA, 19 nt, Artificial Sequence
  Description of Artificial Sequence: Synthetic oligonucleotide
  Antisense strand to SEQ ID NO: 1692643
caagucaaaggcaauuuca

SEQ ID NO: 1692645 - RNA, 19 nt, Artificial Sequence
  Description of Artificial Sequence: Synthetic oligonucleotide
  Sense strand starting at position 3595 of SEQ ID NO: 1561711
ccuagacggccucaaaguu

SEQ ID NO: 1692646 - RNA, 19 nt, Artificial Sequence
  Description of Artificial Sequence: Synthetic oligonucleotide
  Antisense strand to SEQ ID NO: 1692645
aacuuugaggccgucuagg

SEQ ID NO: 1692647 - RNA, 19 nt, Artificial Sequence
  Description of Artificial Sequence: Synthetic oligonucleotide
  Sense strand starting at position 3602 of SEQ ID NO: 1561711
ggccucaaaguuuauuauu

SEQ ID NO: 1692648 - RNA, 19 nt, Artificial Sequence
  Description of Artificial Sequence: Synthetic oligonucleotide
  Antisense strand to SEQ ID NO: 1692647
aauaauaaacuuugaggcc

SEQ ID NO: 1692649 - RNA, 19 nt, Artificial Sequence
  Description of Artificial Sequence: Synthetic oligonucleotide
  Sense strand starting at position 3688 of SEQ ID NO: 1561711
ggcuuugcaguagauacua

SEQ ID NO: 1692650 - RNA, 19 nt, Artificial Sequence
  Description of Artificial Sequence: Synthetic oligonucleotide
  Antisense strand to SEQ ID NO: 1692649
uaguaucuacugcaaagcc

SEQ ID NO: 1692651 - RNA, 19 nt, Artificial Sequence
  Description of Artificial Sequence: Synthetic oligonucleotide
  Sense strand starting at position 3916 of SEQ ID NO: 1561711
gguacagauaacugcugaa

SEQ ID NO: 1692652 - RNA, 19 nt, Artificial Sequence
  Description of Artificial Sequence: Synthetic oligonucleotide
  Antisense strand to SEQ ID NO: 1692651
uucagcaguuaucuguacc

SEQ ID NO: 1692653 - RNA, 19 nt, Artificial Sequence
  Description of Artificial Sequence: Synthetic oligonucleotide
  Sense strand starting at position 25 of SEQ ID NO: 1561712
gggaaagaugugugcagga

SEQ ID NO: 1692654 - RNA, 19 nt, Artificial Sequence
  Description of Artificial Sequence: Synthetic oligonucleotide
  Antisense strand to SEQ ID NO: 1692653
uccugcacacaucuuuccc

SEQ ID NO: 1692655 - RNA, 19 nt, Artificial Sequence
  Description of Artificial Sequence: Synthetic oligonucleotide
  Sense strand starting at position 27 of SEQ ID NO: 1561712
gaaagaugugugcaggaua

SEQ ID NO: 1692656 - RNA, 19 nt, Artificial Sequence
  Description of Artificial Sequence: Synthetic oligonucleotide
  Antisense strand to SEQ ID NO: 1692655
uauccugcacacaucuuuc

SEQ ID NO: 1692657 - RNA, 19 nt, Artificial Sequence
  Description of Artificial Sequence: Synthetic oligonucleotide
  Sense strand starting at position 108 of SEQ ID NO: 1561712
ugaaaucugcccuggaaca

SEQ ID NO: 1692658 - RNA, 19 nt, Artificial Sequence
  Description of Artificial Sequence: Synthetic oligonucleotide
  Antisense strand to SEQ ID NO: 1692657
uguuccagggcagauuuca

SEQ ID NO: 1692659 - RNA, 19 nt, Artificial Sequence
  Description of Artificial Sequence: Synthetic oligonucleotide
  Sense strand starting at position 179 of SEQ ID NO: 1561712
ugguuauaaagaugcauug

SEQ ID NO: 1692660 - RNA, 19 nt, Artificial Sequence
  Description of Artificial Sequence: Synthetic oligonucleotide
  Antisense strand to SEQ ID NO: 1692659
caaugcaucuuuauaacca

SEQ ID NO: 1692661 - RNA, 19 nt, Artificial Sequence
  Description of Artificial Sequence: Synthetic oligonucleotide
  Sense strand starting at position 188 of SEQ ID NO: 1561712
agaugcauugcuuauauga

SEQ ID NO: 1692662 - RNA, 19 nt, Artificial Sequence
  Description of Artificial Sequence: Synthetic oligonucleotide
  Antisense strand to SEQ ID NO: 1692661
ucauauaagcaaugcaucu

SEQ ID NO: 1692663 - RNA, 19 nt, Artificial Sequence
  Description of Artificial Sequence: Synthetic oligonucleotide
  Sense strand starting at position 229 of SEQ ID NO: 1561712
aaaucauguuacuugagga

SEQ ID NO: 1692664 - RNA, 19 nt, Artificial Sequence
  Description of Artificial Sequence: Synthetic oligonucleotide
  Antisense strand to SEQ ID NO: 1692663
uccucaaguaacaugauuu

SEQ ID NO: 1692665 - RNA, 19 nt, Artificial Sequence
  Description of Artificial Sequence: Synthetic oligonucleotide
  Sense strand starting at position 298 of SEQ ID NO: 1561712
gccagagagccauaaaguu

SEQ ID NO: 1692666 - RNA, 19 nt, Artificial Sequence
  Description of Artificial Sequence: Synthetic oligonucleotide
  Antisense strand to SEQ ID NO: 1692665
aacuuuauggcucucuggc

SEQ ID NO: 1692667 - RNA, 19 nt, Artificial Sequence
  Description of Artificial Sequence: Synthetic oligonucleotide
  Sense strand starting at position 528 of SEQ ID NO: 1561712
uugggaugguacucuuaca

SEQ ID NO: 1692668 - RNA, 19 nt, Artificial Sequence
  Description of Artificial Sequence: Synthetic oligonucleotide
  Antisense strand to SEQ ID NO: 1692667
uguaagaguaccaucccaa

SEQ ID NO: 1692669 - RNA, 19 nt, Artificial Sequence
  Description of Artificial Sequence: Synthetic oligonucleotide
  Sense strand starting at position 729 of SEQ ID NO: 1561712
accagaaaccuuggccaga

SEQ ID NO: 1692670 - RNA, 19 nt, Artificial Sequence
  Description of Artificial Sequence: Synthetic oligonucleotide
  Antisense strand to SEQ ID NO: 1692669
ucuggccaagguuucuggu

SEQ ID NO: 1692671 - RNA, 19 nt, Artificial Sequence
  Description of Artificial Sequence: Synthetic oligonucleotide
  Sense strand starting at position 730 of SEQ ID NO: 1561712
ccagaaaccuuggccagau

SEQ ID NO: 1692672 - RNA, 19 nt, Artificial Sequence
  Description of Artificial Sequence: Synthetic oligonucleotide
  Antisense strand to SEQ ID NO: 1692671
aucuggccaagguuucugg

SEQ ID NO: 1692673 - RNA, 19 nt, Artificial Sequence
  Description of Artificial Sequence: Synthetic oligonucleotide
  Sense strand starting at position 843 of SEQ ID NO: 1561712
acagucacauuagucauaa

SEQ ID NO: 1692674 - RNA, 19 nt, Artificial Sequence
  Description of Artificial Sequence: Synthetic oligonucleotide
  Antisense strand to SEQ ID NO: 1692673
uuaugacuaaugugacugu

SEQ ID NO: 1692675 - RNA, 19 nt, Artificial Sequence
  Description of Artificial Sequence: Synthetic oligonucleotide
  Sense strand starting at position 871 of SEQ ID NO: 1561712
ggaauacuuuauguacaca

SEQ ID NO: 1692676 - RNA, 19 nt, Artificial Sequence
  Description of Artificial Sequence: Synthetic oligonucleotide
  Antisense strand to SEQ ID NO: 1692675
uguguacauaaaguauucc

SEQ ID NO: 1692677 - RNA, 19 nt, Artificial Sequence
  Description of Artificial Sequence: Synthetic oligonucleotide
  Sense strand starting at position 1040 of SEQ ID NO: 1561712
auaggcaugucccuggaaa

SEQ ID NO: 1692678 - RNA, 19 nt, Artificial Sequence
  Description of Artificial Sequence: Synthetic oligonucleotide
  Antisense strand to SEQ ID NO: 1692677
uuuccagggacaugccuau

SEQ ID NO: 1692679 - RNA, 19 nt, Artificial Sequence
  Description of Artificial Sequence: Synthetic oligonucleotide
  Sense strand starting at position 1893 of SEQ ID NO: 1561712
ugaaguuuagcucagacac

SEQ ID NO: 1692680 - RNA, 19 nt, Artificial Sequence
  Description of Artificial Sequence: Synthetic oligonucleotide
  Antisense strand to SEQ ID NO: 1692679
gugucugagcuaaacuuca

SEQ ID NO: 1692681 - RNA, 19 nt, Artificial Sequence
  Description of Artificial Sequence: Synthetic oligonucleotide
  Sense strand starting at position 1963 of SEQ ID NO: 1561712
ugggcuucgccgguccaaa

SEQ ID NO: 1692682 - RNA, 19 nt, Artificial Sequence
  Description of Artificial Sequence: Synthetic oligonucleotide
  Antisense strand to SEQ ID NO: 1692681
uuuggaccggcgaagccca

SEQ ID NO: 1692683 - RNA, 19 nt, Artificial Sequence
  Description of Artificial Sequence: Synthetic oligonucleotide
  Sense strand starting at position 2089 of SEQ ID NO: 1561712
augugaucgcggccuugau

SEQ ID NO: 1692684 - RNA, 19 nt, Artificial Sequence
  Description of Artificial Sequence: Synthetic oligonucleotide
  Antisense strand to SEQ ID NO: 1692683
aucaaggccgcgaucacau

SEQ ID NO: 1692685 - RNA, 19 nt, Artificial Sequence
  Description of Artificial Sequence: Synthetic oligonucleotide
  Sense strand starting at position 2090 of SEQ ID NO: 1561712
ugugaucgcggccuugauu

SEQ ID NO: 1692686 - RNA, 19 nt, Artificial Sequence
  Description of Artificial Sequence: Synthetic oligonucleotide
  Antisense strand to SEQ ID NO: 1692685
aaucaaggccgcgaucaca

SEQ ID NO: 1692687 - RNA, 19 nt, Artificial Sequence
  Description of Artificial Sequence: Synthetic oligonucleotide
  Sense strand starting at position 2352 of SEQ ID NO: 1561712
uggcuagugaucuggaaga

SEQ ID NO: 1692688 - RNA, 19 nt, Artificial Sequence
  Description of Artificial Sequence: Synthetic oligonucleotide
  Antisense strand to SEQ ID NO: 1692687
ucuuccagaucacuagcca

SEQ ID NO: 1692689 - RNA, 19 nt, Artificial Sequence
  Description of Artificial Sequence: Synthetic oligonucleotide
  Sense strand starting at position 2354 of SEQ ID NO: 1561712
gcuagugaucuggaagacc

SEQ ID NO: 1692690 - RNA, 19 nt, Artificial Sequence
  Description of Artificial Sequence: Synthetic oligonucleotide
  Antisense strand to SEQ ID NO: 1692689
ggucuuccagaucacuagc

SEQ ID NO: 1692691 - RNA, 19 nt, Artificial Sequence
  Description of Artificial Sequence: Synthetic oligonucleotide
  Sense strand starting at position 2648 of SEQ ID NO: 1561712
uuggauagaucuccgugaa

SEQ ID NO: 1692692 - RNA, 19 nt, Artificial Sequence
  Description of Artificial Sequence: Synthetic oligonucleotide
  Antisense strand to SEQ ID NO: 1692691
uucacggagaucuauccaa

SEQ ID NO: 1692693 - RNA, 19 nt, Artificial Sequence
  Description of Artificial Sequence: Synthetic oligonucleotide
  Sense strand starting at position 2649 of SEQ ID NO: 1561712
uggauagaucuccgugaaa

SEQ ID NO: 1692694 - RNA, 19 nt, Artificial Sequence
  Description of Artificial Sequence: Synthetic oligonucleotide
  Antisense strand to SEQ ID NO: 1692693
uuucacggagaucuaucca

SEQ ID NO: 1692695 - RNA, 19 nt, Artificial Sequence
  Description of Artificial Sequence: Synthetic oligonucleotide
  Sense strand starting at position 2651 of SEQ ID NO: 1561712
gauagaucuccgugaaauc

SEQ ID NO: 1692696 - RNA, 19 nt, Artificial Sequence
  Description of Artificial Sequence: Synthetic oligonucleotide
  Antisense strand to SEQ ID NO: 1692695
gauuucacggagaucuauc

SEQ ID NO: 1692697 - RNA, 19 nt, Artificial Sequence
  Description of Artificial Sequence: Synthetic oligonucleotide
  Sense strand starting at position 2652 of SEQ ID NO: 1561712
auagaucuccgugaaauca

SEQ ID NO: 1692698 - RNA, 19 nt, Artificial Sequence
  Description of Artificial Sequence: Synthetic oligonucleotide
  Antisense strand to SEQ ID NO: 1692697
ugauuucacggagaucuau

SEQ ID NO: 1692699 - RNA, 19 nt, Artificial Sequence
  Description of Artificial Sequence: Synthetic oligonucleotide
  Sense strand starting at position 2673 of SEQ ID NO: 1561712
ugucgagcuauggugcauu

SEQ ID NO: 1692700 - RNA, 19 nt, Artificial Sequence
  Description of Artificial Sequence: Synthetic oligonucleotide
  Antisense strand to SEQ ID NO: 1692699
aaugcaccauagcucgaca

SEQ ID NO: 1692701 - RNA, 19 nt, Artificial Sequence
  Description of Artificial Sequence: Synthetic oligonucleotide
  Sense strand starting at position 2676 of SEQ ID NO: 1561712
cgagcuauggugcauuuau

SEQ ID NO: 1692702 - RNA, 19 nt, Artificial Sequence
  Description of Artificial Sequence: Synthetic oligonucleotide
  Antisense strand to SEQ ID NO: 1692701
auaaaugcaccauagcucg

SEQ ID NO: 1692703 - RNA, 19 nt, Artificial Sequence
  Description of Artificial Sequence: Synthetic oligonucleotide
  Sense strand starting at position 2809 of SEQ ID NO: 1561712
uugagugcccacuaaauuc

SEQ ID NO: 1692704 - RNA, 19 nt, Artificial Sequence
  Description of Artificial Sequence: Synthetic oligonucleotide
  Antisense strand to SEQ ID NO: 1692703
gaauuuagugggcacucaa

SEQ ID NO: 1692705 - RNA, 19 nt, Artificial Sequence
  Description of Artificial Sequence: Synthetic oligonucleotide
  Sense strand starting at position 2847 of SEQ ID NO: 1561712
ggauauugcggucaacaag

SEQ ID NO: 1692706 - RNA, 19 nt, Artificial Sequence
  Description of Artificial Sequence: Synthetic oligonucleotide
  Antisense strand to SEQ ID NO: 1692705
cuuguugaccgcaauaucc

SEQ ID NO: 1692707 - RNA, 19 nt, Artificial Sequence
  Description of Artificial Sequence: Synthetic oligonucleotide
  Sense strand starting at position 3041 of SEQ ID NO: 1561712
cucuguauggcgucucauu

SEQ ID NO: 1692708 - RNA, 19 nt, Artificial Sequence
  Description of Artificial Sequence: Synthetic oligonucleotide
  Antisense strand to SEQ ID NO: 1692707
aaugagacgccauacagag

SEQ ID NO: 1692709 - RNA, 19 nt, Artificial Sequence
  Description of Artificial Sequence: Synthetic oligonucleotide
  Sense strand starting at position 3151 of SEQ ID NO: 1561712
auuggauucugacuguaga

SEQ ID NO: 1692710 - RNA, 19 nt, Artificial Sequence
  Description of Artificial Sequence: Synthetic oligonucleotide
  Antisense strand to SEQ ID NO: 1692709
ucuacagucagaauccaau

SEQ ID NO: 1692711 - RNA, 19 nt, Artificial Sequence
  Description of Artificial Sequence: Synthetic oligonucleotide
  Sense strand starting at position 3152 of SEQ ID NO: 1561712
uuggauucugacuguagag

SEQ ID NO: 1692712 - RNA, 19 nt, Artificial Sequence
  Description of Artificial Sequence: Synthetic oligonucleotide
  Antisense strand to SEQ ID NO: 1692711
cucuacagucagaauccaa

SEQ ID NO: 1692713 - RNA, 19 nt, Artificial Sequence
  Description of Artificial Sequence: Synthetic oligonucleotide
  Sense strand starting at position 3162 of SEQ ID NO: 1561712
acuguagaggcucauucua

SEQ ID NO: 1692714 - RNA, 19 nt, Artificial Sequence
  Description of Artificial Sequence: Synthetic oligonucleotide
  Antisense strand to SEQ ID NO: 1692713
uagaaugagccucuacagu

SEQ ID NO: 1692715 - RNA, 19 nt, Artificial Sequence
  Description of Artificial Sequence: Synthetic oligonucleotide
  Sense strand starting at position 3188 of SEQ ID NO: 1561712
gcagaaaugaucugagucu

SEQ ID NO: 1692716 - RNA, 19 nt, Artificial Sequence
  Description of Artificial Sequence: Synthetic oligonucleotide
  Antisense strand to SEQ ID NO: 1692715
agacucagaucauuucugc

SEQ ID NO: 1692717 - RNA, 19 nt, Artificial Sequence
  Description of Artificial Sequence: Synthetic oligonucleotide
  Sense strand starting at position 3194 of SEQ ID NO: 1561712
augaucugagucugaugau

SEQ ID NO: 1692718 - RNA, 19 nt, Artificial Sequence
  Description of Artificial Sequence: Synthetic oligonucleotide
  Antisense strand to SEQ ID NO: 1692717
aucaucagacucagaucau

SEQ ID NO: 1692719 - RNA, 19 nt, Artificial Sequence
  Description of Artificial Sequence: Synthetic oligonucleotide
  Sense strand starting at position 3200 of SEQ ID NO: 1561712
ugagucugaugauucuaag

SEQ ID NO: 1692720 - RNA, 19 nt, Artificial Sequence
  Description of Artificial Sequence: Synthetic oligonucleotide
  Antisense strand to SEQ ID NO: 1692719
cuuagaaucaucagacuca

SEQ ID NO: 1692721 - RNA, 19 nt, Artificial Sequence
  Description of Artificial Sequence: Synthetic oligonucleotide
  Sense strand starting at position 3229 of SEQ ID NO: 1561712
gggauacauuuaggauaag

SEQ ID NO: 1692722 - RNA, 19 nt, Artificial Sequence
  Description of Artificial Sequence: Synthetic oligonucleotide
  Antisense strand to SEQ ID NO: 1692721
cuuauccuaaauguauccc

SEQ ID NO: 1692723 - RNA, 19 nt, Artificial Sequence
  Description of Artificial Sequence: Synthetic oligonucleotide
  Sense strand starting at position 3583 of SEQ ID NO: 1561712
gguauuguucuagacacaa

SEQ ID NO: 1692724 - RNA, 19 nt, Artificial Sequence
  Description of Artificial Sequence: Synthetic oligonucleotide
  Antisense strand to SEQ ID NO: 1692723
uugugucuagaacaauacc

SEQ ID NO: 1692725 - RNA, 19 nt, Artificial Sequence
  Description of Artificial Sequence: Synthetic oligonucleotide
  Sense strand starting at position 3656 of SEQ ID NO: 1561712
uccaguugagggugagaua

SEQ ID NO: 1692726 - RNA, 19 nt, Artificial Sequence
  Description of Artificial Sequence: Synthetic oligonucleotide
  Antisense strand to SEQ ID NO: 1692725
uaucucacccucaacugga

SEQ ID NO: 1692727 - RNA, 19 nt, Artificial Sequence
  Description of Artificial Sequence: Synthetic oligonucleotide
  Sense strand starting at position 3669 of SEQ ID NO: 1561712
gagauagagaguuacgcau

SEQ ID NO: 1692728 - RNA, 19 nt, Artificial Sequence
  Description of Artificial Sequence: Synthetic oligonucleotide
  Antisense strand to SEQ ID NO: 1692727
augcguaacucucuaucuc

SEQ ID NO: 1692729 - RNA, 19 nt, Artificial Sequence
  Description of Artificial Sequence: Synthetic oligonucleotide
  Sense strand starting at position 3683 of SEQ ID NO: 1561712
cgcauagauccugaggauc

SEQ ID NO: 1692730 - RNA, 19 nt, Artificial Sequence
  Description of Artificial Sequence: Synthetic oligonucleotide
  Antisense strand to SEQ ID NO: 1692729
gauccucaggaucuaugcg

SEQ ID NO: 1692731 - RNA, 19 nt, Artificial Sequence
  Description of Artificial Sequence: Synthetic oligonucleotide
  Sense strand starting at position 3933 of SEQ ID NO: 1561712
agaguuugggagcagaguu

SEQ ID NO: 1692732 - RNA, 19 nt, Artificial Sequence
  Description of Artificial Sequence: Synthetic oligonucleotide
  Antisense strand to SEQ ID NO: 1692731
aacucugcucccaaacucu

SEQ ID NO: 1692733 - RNA, 19 nt, Artificial Sequence
  Description of Artificial Sequence: Synthetic oligonucleotide
  Sense strand starting at position 202 of SEQ ID NO: 1561713
agagaucuguaaguauugu

SEQ ID NO: 1692734 - RNA, 19 nt, Artificial Sequence
  Description of Artificial Sequence: Synthetic oligonucleotide
  Antisense strand to SEQ ID NO: 1692733
acaauacuuacagaucucu

SEQ ID NO: 1692735 - RNA, 19 nt, Artificial Sequence
  Description of Artificial Sequence: Synthetic oligonucleotide
  Sense strand starting at position 213 of SEQ ID NO: 1561713
aguauuguaccacaauagu

SEQ ID NO: 1692736 - RNA, 19 nt, Artificial Sequence
  Description of Artificial Sequence: Synthetic oligonucleotide
  Antisense strand to SEQ ID NO: 1692735
acuauugugguacaauacu

SEQ ID NO: 1692737 - RNA, 19 nt, Artificial Sequence
  Description of Artificial Sequence: Synthetic oligonucleotide
  Sense strand starting at position 219 of SEQ ID NO: 1561713
guaccacaauaguuaaauc

SEQ ID NO: 1692738 - RNA, 19 nt, Artificial Sequence
  Description of Artificial Sequence: Synthetic oligonucleotide
  Antisense strand to SEQ ID NO: 1692737
gauuuaacuauugugguac

SEQ ID NO: 1692739 - RNA, 19 nt, Artificial Sequence
  Description of Artificial Sequence: Synthetic oligonucleotide
  Sense strand starting at position 367 of SEQ ID NO: 1561713
auugacaauuugugagaau

SEQ ID NO: 1692740 - RNA, 19 nt, Artificial Sequence
  Description of Artificial Sequence: Synthetic oligonucleotide
  Antisense strand to SEQ ID NO: 1692739
auucucacaaauugucaau

SEQ ID NO: 1692741 - RNA, 19 nt, Artificial Sequence
  Description of Artificial Sequence: Synthetic oligonucleotide
  Sense strand starting at position 368 of SEQ ID NO: 1561713
uugacaauuugugagaaug

SEQ ID NO: 1692742 - RNA, 19 nt, Artificial Sequence
  Description of Artificial Sequence: Synthetic oligonucleotide
  Antisense strand to SEQ ID NO: 1692741
cauucucacaaauugucaa

SEQ ID NO: 1692743 - RNA, 19 nt, Artificial Sequence
  Description of Artificial Sequence: Synthetic oligonucleotide
  Sense strand starting at position 370 of SEQ ID NO: 1561713
gacaauuugugagaaugac

SEQ ID NO: 1692744 - RNA, 19 nt, Artificial Sequence
  Description of Artificial Sequence: Synthetic oligonucleotide
  Antisense strand to SEQ ID NO: 1692743
gucauucucacaaauuguc

SEQ ID NO: 1692745 - RNA, 19 nt, Artificial Sequence
  Description of Artificial Sequence: Synthetic oligonucleotide
  Sense strand starting at position 399 of SEQ ID NO: 1561713
gcaaauucugaauguauau

SEQ ID NO: 1692746 - RNA, 19 nt, Artificial Sequence
  Description of Artificial Sequence: Synthetic oligonucleotide
  Antisense strand to SEQ ID NO: 1692745
auauacauucagaauuugc

SEQ ID NO: 1692747 - RNA, 19 nt, Artificial Sequence
  Description of Artificial Sequence: Synthetic oligonucleotide
  Sense strand starting at position 518 of SEQ ID NO: 1561713
aucucaauucuagguagga

SEQ ID NO: 1692748 - RNA, 19 nt, Artificial Sequence
  Description of Artificial Sequence: Synthetic oligonucleotide
  Antisense strand to SEQ ID NO: 1692747
uccuaccuagaauugagau

SEQ ID NO: 1692749 - RNA, 19 nt, Artificial Sequence
  Description of Artificial Sequence: Synthetic oligonucleotide
  Sense strand starting at position 519 of SEQ ID NO: 1561713
ucucaauucuagguaggag

SEQ ID NO: 1692750 - RNA, 19 nt, Artificial Sequence
  Description of Artificial Sequence: Synthetic oligonucleotide
  Antisense strand to SEQ ID NO: 1692749
cuccuaccuagaauugaga

SEQ ID NO: 1692751 - RNA, 19 nt, Artificial Sequence
  Description of Artificial Sequence: Synthetic oligonucleotide
  Sense strand starting at position 520 of SEQ ID NO: 1561713
cucaauucuagguaggagu

SEQ ID NO: 1692752 - RNA, 19 nt, Artificial Sequence
  Description of Artificial Sequence: Synthetic oligonucleotide
  Antisense strand to SEQ ID NO: 1692751
acuccuaccuagaauugag

SEQ ID NO: 1692753 - RNA, 19 nt, Artificial Sequence
  Description of Artificial Sequence: Synthetic oligonucleotide
  Sense strand starting at position 641 of SEQ ID NO: 1561713
ucucaauaccgguagguga

SEQ ID NO: 1692754 - RNA, 19 nt, Artificial Sequence
  Description of Artificial Sequence: Synthetic oligonucleotide
  Antisense strand to SEQ ID NO: 1692753
ucaccuaccgguauugaga

SEQ ID NO: 1692755 - RNA, 19 nt, Artificial Sequence
  Description of Artificial Sequence: Synthetic oligonucleotide
  Sense strand starting at position 714 of SEQ ID NO: 1561713
gaucauuuguuugagauuc

SEQ ID NO: 1692756 - RNA, 19 nt, Artificial Sequence
  Description of Artificial Sequence: Synthetic oligonucleotide
  Antisense strand to SEQ ID NO: 1692755
gaaucucaaacaaaugauc

SEQ ID NO: 1692757 - RNA, 19 nt, Artificial Sequence
  Description of Artificial Sequence: Synthetic oligonucleotide
  Sense strand starting at position 992 of SEQ ID NO: 1561713
uaauuccuuugagugugaa

SEQ ID NO: 1692758 - RNA, 19 nt, Artificial Sequence
  Description of Artificial Sequence: Synthetic oligonucleotide
  Antisense strand to SEQ ID NO: 1692757
uucacacucaaaggaauua

SEQ ID NO: 1692759 - RNA, 19 nt, Artificial Sequence
  Description of Artificial Sequence: Synthetic oligonucleotide
  Sense strand starting at position 993 of SEQ ID NO: 1561713
aauuccuuugagugugaaa

SEQ ID NO: 1692760 - RNA, 19 nt, Artificial Sequence
  Description of Artificial Sequence: Synthetic oligonucleotide
  Antisense strand to SEQ ID NO: 1692759
uuucacacucaaaggaauu

SEQ ID NO: 1692761 - RNA, 19 nt, Artificial Sequence
  Description of Artificial Sequence: Synthetic oligonucleotide
  Sense strand starting at position 995 of SEQ ID NO: 1561713
uuccuuugagugugaaauu

SEQ ID NO: 1692762 - RNA, 19 nt, Artificial Sequence
  Description of Artificial Sequence: Synthetic oligonucleotide
  Antisense strand to SEQ ID NO: 1692761
aauuucacacucaaaggaa

SEQ ID NO: 1692763 - RNA, 19 nt, Artificial Sequence
  Description of Artificial Sequence: Synthetic oligonucleotide
  Sense strand starting at position 1018 of SEQ ID NO: 1561713
auuaccugucccuagagau

SEQ ID NO: 1692764 - RNA, 19 nt, Artificial Sequence
  Description of Artificial Sequence: Synthetic oligonucleotide
  Antisense strand to SEQ ID NO: 1692763
aucucuagggacagguaau

SEQ ID NO: 1692765 - RNA, 19 nt, Artificial Sequence
  Description of Artificial Sequence: Synthetic oligonucleotide
  Sense strand starting at position 1024 of SEQ ID NO: 1561713
ugucccuagagauggaaau

SEQ ID NO: 1692766 - RNA, 19 nt, Artificial Sequence
  Description of Artificial Sequence: Synthetic oligonucleotide
  Antisense strand to SEQ ID NO: 1692765
auuuccaucucuagggaca

SEQ ID NO: 1692767 - RNA, 19 nt, Artificial Sequence
  Description of Artificial Sequence: Synthetic oligonucleotide
  Sense strand starting at position 1198 of SEQ ID NO: 1561713
ggaaauuaugcaggcacua

SEQ ID NO: 1692768 - RNA, 19 nt, Artificial Sequence
  Description of Artificial Sequence: Synthetic oligonucleotide
  Antisense strand to SEQ ID NO: 1692767
uagugccugcauaauuucc

SEQ ID NO: 1692769 - RNA, 19 nt, Artificial Sequence
  Description of Artificial Sequence: Synthetic oligonucleotide
  Sense strand starting at position 1247 of SEQ ID NO: 1561713
uguagucgccuggcuuuaa

SEQ ID NO: 1692770 - RNA, 19 nt, Artificial Sequence
  Description of Artificial Sequence: Synthetic oligonucleotide
  Antisense strand to SEQ ID NO: 1692769
uuaaagccaggcgacuaca

SEQ ID NO: 1692771 - RNA, 19 nt, Artificial Sequence
  Description of Artificial Sequence: Synthetic oligonucleotide
  Sense strand starting at position 2047 of SEQ ID NO: 1561713
gggaguagugcagaucuga

SEQ ID NO: 1692772 - RNA, 19 nt, Artificial Sequence
  Description of Artificial Sequence: Synthetic oligonucleotide
  Antisense strand to SEQ ID NO: 1692771
ucagaucugcacuacuccc

SEQ ID NO: 1692773 - RNA, 19 nt, Artificial Sequence
  Description of Artificial Sequence: Synthetic oligonucleotide
  Sense strand starting at position 2167 of SEQ ID NO: 1561713
gccugugugcugagaugug

SEQ ID NO: 1692774 - RNA, 19 nt, Artificial Sequence
  Description of Artificial Sequence: Synthetic oligonucleotide
  Antisense strand to SEQ ID NO: 1692773
cacaucucagcacacaggc

SEQ ID NO: 1692775 - RNA, 19 nt, Artificial Sequence
  Description of Artificial Sequence: Synthetic oligonucleotide
  Sense strand starting at position 2250 of SEQ ID NO: 1561713
agaacuaaaugguugguca

SEQ ID NO: 1692776 - RNA, 19 nt, Artificial Sequence
  Description of Artificial Sequence: Synthetic oligonucleotide
  Antisense strand to SEQ ID NO: 1692775
ugaccaaccauuuaguucu

SEQ ID NO: 1692777 - RNA, 19 nt, Artificial Sequence
  Description of Artificial Sequence: Synthetic oligonucleotide
  Sense strand starting at position 2254 of SEQ ID NO: 1561713
cuaaaugguuggucaggga

SEQ ID NO: 1692778 - RNA, 19 nt, Artificial Sequence
  Description of Artificial Sequence: Synthetic oligonucleotide
  Antisense strand to SEQ ID NO: 1692777
ucccugaccaaccauuuag

SEQ ID NO: 1692779 - RNA, 19 nt, Artificial Sequence
  Description of Artificial Sequence: Synthetic oligonucleotide
  Sense strand starting at position 2769 of SEQ ID NO: 1561713
gcuaguaagaaauagucga

SEQ ID NO: 1692780 - RNA, 19 nt, Artificial Sequence
  Description of Artificial Sequence: Synthetic oligonucleotide
  Antisense strand to SEQ ID NO: 1692779
ucgacuauuucuuacuagc

SEQ ID NO: 1692781 - RNA, 19 nt, Artificial Sequence
  Description of Artificial Sequence: Synthetic oligonucleotide
  Sense strand starting at position 2774 of SEQ ID NO: 1561713
uaagaaauagucgaugcua

SEQ ID NO: 1692782 - RNA, 19 nt, Artificial Sequence
  Description of Artificial Sequence: Synthetic oligonucleotide
  Antisense strand to SEQ ID NO: 1692781
uagcaucgacuauuucuua

SEQ ID NO: 1692783 - RNA, 19 nt, Artificial Sequence
  Description of Artificial Sequence: Synthetic oligonucleotide
  Sense strand starting at position 2776 of SEQ ID NO: 1561713
agaaauagucgaugcuaca

SEQ ID NO: 1692784 - RNA, 19 nt, Artificial Sequence
  Description of Artificial Sequence: Synthetic oligonucleotide
  Antisense strand to SEQ ID NO: 1692783
uguagcaucgacuauuucu

SEQ ID NO: 1692785 - RNA, 19 nt, Artificial Sequence
  Description of Artificial Sequence: Synthetic oligonucleotide
  Sense strand starting at position 2843 of SEQ ID NO: 1561713
uuguuaugaugugugagaa

SEQ ID NO: 1692786 - RNA, 19 nt, Artificial Sequence
  Description of Artificial Sequence: Synthetic oligonucleotide
  Antisense strand to SEQ ID NO: 1692785
uucucacacaucauaacaa

SEQ ID NO: 1692787 - RNA, 19 nt, Artificial Sequence
  Description of Artificial Sequence: Synthetic oligonucleotide
  Sense strand starting at position 2844 of SEQ ID NO: 1561713
uguuaugaugugugagaaa

SEQ ID NO: 1692788 - RNA, 19 nt, Artificial Sequence
  Description of Artificial Sequence: Synthetic oligonucleotide
  Antisense strand to SEQ ID NO: 1692787
uuucucacacaucauaaca

SEQ ID NO: 1692789 - RNA, 19 nt, Artificial Sequence
  Description of Artificial Sequence: Synthetic oligonucleotide
  Sense strand starting at position 2986 of SEQ ID NO: 1561713
gugagacuucacuggguuc

SEQ ID NO: 1692790 - RNA, 19 nt, Artificial Sequence
  Description of Artificial Sequence: Synthetic oligonucleotide
  Antisense strand to SEQ ID NO: 1692789
gaacccagugaagucucac

SEQ ID NO: 1692791 - RNA, 19 nt, Artificial Sequence
  Description of Artificial Sequence: Synthetic oligonucleotide
  Sense strand starting at position 3017 of SEQ ID NO: 1561713
gaaugaagaugucugcaug

SEQ ID NO: 1692792 - RNA, 19 nt, Artificial Sequence
  Description of Artificial Sequence: Synthetic oligonucleotide
  Antisense strand to SEQ ID NO: 1692791
caugcagacaucuucauuc

SEQ ID NO: 1692793 - RNA, 19 nt, Artificial Sequence
  Description of Artificial Sequence: Synthetic oligonucleotide
  Sense strand starting at position 3020 of SEQ ID NO: 1561713
ugaagaugucugcaugcac

SEQ ID NO: 1692794 - RNA, 19 nt, Artificial Sequence
  Description of Artificial Sequence: Synthetic oligonucleotide
  Antisense strand to SEQ ID NO: 1692793
gugcaugcagacaucuuca

SEQ ID NO: 1692795 - RNA, 19 nt, Artificial Sequence
  Description of Artificial Sequence: Synthetic oligonucleotide
  Sense strand starting at position 3095 of SEQ ID NO: 1561713
uuuguaugugcugaaugaa

SEQ ID NO: 1692796 - RNA, 19 nt, Artificial Sequence
  Description of Artificial Sequence: Synthetic oligonucleotide
  Antisense strand to SEQ ID NO: 1692795
uucauucagcacauacaaa

SEQ ID NO: 1692797 - RNA, 19 nt, Artificial Sequence
  Description of Artificial Sequence: Synthetic oligonucleotide
  Sense strand starting at position 3113 of SEQ ID NO: 1561713
auggcuacaucuuccugaa

SEQ ID NO: 1692798 - RNA, 19 nt, Artificial Sequence
  Description of Artificial Sequence: Synthetic oligonucleotide
  Antisense strand to SEQ ID NO: 1692797
uucaggaagauguagccau

SEQ ID NO: 1692799 - RNA, 19 nt, Artificial Sequence
  Description of Artificial Sequence: Synthetic oligonucleotide
  Sense strand starting at position 3229 of SEQ ID NO: 1561713
agaucuauagguuacugua

SEQ ID NO: 1692800 - RNA, 19 nt, Artificial Sequence
  Description of Artificial Sequence: Synthetic oligonucleotide
  Antisense strand to SEQ ID NO: 1692799
uacaguaaccuauagaucu

SEQ ID NO: 1692801 - RNA, 19 nt, Artificial Sequence
  Description of Artificial Sequence: Synthetic oligonucleotide
  Sense strand starting at position 3609 of SEQ ID NO: 1561713
ugaagugacuagguguaaa

SEQ ID NO: 1692802 - RNA, 19 nt, Artificial Sequence
  Description of Artificial Sequence: Synthetic oligonucleotide
  Antisense strand to SEQ ID NO: 1692801
uuuacaccuagucacuuca

SEQ ID NO: 1692803 - RNA, 19 nt, Artificial Sequence
  Description of Artificial Sequence: Synthetic oligonucleotide
  Sense strand starting at position 3628 of SEQ ID NO: 1561713
aggguaucauauguacaac

SEQ ID NO: 1692804 - RNA, 19 nt, Artificial Sequence
  Description of Artificial Sequence: Synthetic oligonucleotide
  Antisense strand to SEQ ID NO: 1692803
guuguacauaugauacccu

SEQ ID NO: 1692805 - RNA, 19 nt, Artificial Sequence
  Description of Artificial Sequence: Synthetic oligonucleotide
  Sense strand starting at position 3896 of SEQ ID NO: 1561713
guucuuugacugcagaucu

SEQ ID NO: 1692806 - RNA, 19 nt, Artificial Sequence
  Description of Artificial Sequence: Synthetic oligonucleotide
  Antisense strand to SEQ ID NO: 1692805
agaucugcagucaaagaac

SEQ ID NO: 1692807 - RNA, 19 nt, Artificial Sequence
  Description of Artificial Sequence: Synthetic oligonucleotide
  Sense strand starting at position 3927 of SEQ ID NO: 1561713
uccucuagagcugaaauua

SEQ ID NO: 1692808 - RNA, 19 nt, Artificial Sequence
  Description of Artificial Sequence: Synthetic oligonucleotide
  Antisense strand to SEQ ID NO: 1692807
uaauuucagcucuagagga

SEQ ID NO: 1692809 - RNA, 19 nt, Artificial Sequence
  Description of Artificial Sequence: Synthetic oligonucleotide
  Sense strand starting at position 3951 of SEQ ID NO: 1561713
ggguucuaauacucuuuaa

SEQ ID NO: 1692810 - RNA, 19 nt, Artificial Sequence
  Description of Artificial Sequence: Synthetic oligonucleotide
  Antisense strand to SEQ ID NO: 1692809
uuaaagaguauuagaaccc

SEQ ID NO: 1692811 - RNA, 19 nt, Artificial Sequence
  Description of Artificial Sequence: Synthetic oligonucleotide
  Sense strand starting at position 3975 of SEQ ID NO: 1561713
gcugauugccaacaauucu

SEQ ID NO: 1692812 - RNA, 19 nt, Artificial Sequence
  Description of Artificial Sequence: Synthetic oligonucleotide
  Antisense strand to SEQ ID NO: 1692811
agaauuguuggcaaucagc

SEQ ID NO: 1692813 - RNA, 19 nt, Artificial Sequence
  Description of Artificial Sequence: Synthetic oligonucleotide
  Sense strand starting at position 423 of SEQ ID NO: 1561714
uccagaauaucuguugacu

SEQ ID NO: 1692814 - RNA, 19 nt, Artificial Sequence
  Description of Artificial Sequence: Synthetic oligonucleotide
  Antisense strand to SEQ ID NO: 1692813
agucaacagauauucugga

SEQ ID NO: 1692815 - RNA, 19 nt, Artificial Sequence
  Description of Artificial Sequence: Synthetic oligonucleotide
  Sense strand starting at position 434 of SEQ ID NO: 1561714
uguugacuaucagcagaga

SEQ ID NO: 1692816 - RNA, 19 nt, Artificial Sequence
  Description of Artificial Sequence: Synthetic oligonucleotide
  Antisense strand to SEQ ID NO: 1692815
ucucugcugauagucaaca

SEQ ID NO: 1692817 - RNA, 19 nt, Artificial Sequence
  Description of Artificial Sequence: Synthetic oligonucleotide
  Sense strand starting at position 448 of SEQ ID NO: 1561714
agagaagcauccuccagau

SEQ ID NO: 1692818 - RNA, 19 nt, Artificial Sequence
  Description of Artificial Sequence: Synthetic oligonucleotide
  Antisense strand to SEQ ID NO: 1692817
aucuggaggaugcuucucu

SEQ ID NO: 1692819 - RNA, 19 nt, Artificial Sequence
  Description of Artificial Sequence: Synthetic oligonucleotide
  Sense strand starting at position 561 of SEQ ID NO: 1561714
gguaaaugagcucaagguc

SEQ ID NO: 1692820 - RNA, 19 nt, Artificial Sequence
  Description of Artificial Sequence: Synthetic oligonucleotide
  Antisense strand to SEQ ID NO: 1692819
gaccuugagcucauuuacc

SEQ ID NO: 1692821 - RNA, 19 nt, Artificial Sequence
  Description of Artificial Sequence: Synthetic oligonucleotide
  Sense strand starting at position 582 of SEQ ID NO: 1561714
acugcuagucacuagcaga

SEQ ID NO: 1692822 - RNA, 19 nt, Artificial Sequence
  Description of Artificial Sequence: Synthetic oligonucleotide
  Antisense strand to SEQ ID NO: 1692821
ucugcuagugacuagcagu

SEQ ID NO: 1692823 - RNA, 19 nt, Artificial Sequence
  Description of Artificial Sequence: Synthetic oligonucleotide
  Sense strand starting at position 596 of SEQ ID NO: 1561714
gcagacuucugagugaauu

SEQ ID NO: 1692824 - RNA, 19 nt, Artificial Sequence
  Description of Artificial Sequence: Synthetic oligonucleotide
  Antisense strand to SEQ ID NO: 1692823
aauucacucagaagucugc

SEQ ID NO: 1692825 - RNA, 19 nt, Artificial Sequence
  Description of Artificial Sequence: Synthetic oligonucleotide
  Sense strand starting at position 597 of SEQ ID NO: 1561714
cagacuucugagugaauua

SEQ ID NO: 1692826 - RNA, 19 nt, Artificial Sequence
  Description of Artificial Sequence: Synthetic oligonucleotide
  Antisense strand to SEQ ID NO: 1692825
uaauucacucagaagucug

SEQ ID NO: 1692827 - RNA, 19 nt, Artificial Sequence
  Description of Artificial Sequence: Synthetic oligonucleotide
  Sense strand starting at position 604 of SEQ ID NO: 1561714
cugagugaauuaccucaau

SEQ ID NO: 1692828 - RNA, 19 nt, Artificial Sequence
  Description of Artificial Sequence: Synthetic oligonucleotide
  Antisense strand to SEQ ID NO: 1692827
auugagguaauucacucag

SEQ ID NO: 1692829 - RNA, 19 nt, Artificial Sequence
  Description of Artificial Sequence: Synthetic oligonucleotide
  Sense strand starting at position 774 of SEQ ID NO: 1561714
cccagaaagccauacgaca

SEQ ID NO: 1692830 - RNA, 19 nt, Artificial Sequence
  Description of Artificial Sequence: Synthetic oligonucleotide
  Antisense strand to SEQ ID NO: 1692829
ugucguauggcuuucuggg

SEQ ID NO: 1692831 - RNA, 19 nt, Artificial Sequence
  Description of Artificial Sequence: Synthetic oligonucleotide
  Sense strand starting at position 806 of SEQ ID NO: 1561714
uaagcagugccucaagauu

SEQ ID NO: 1692832 - RNA, 19 nt, Artificial Sequence
  Description of Artificial Sequence: Synthetic oligonucleotide
  Antisense strand to SEQ ID NO: 1692831
aaucuugaggcacugcuua

SEQ ID NO: 1692833 - RNA, 19 nt, Artificial Sequence
  Description of Artificial Sequence: Synthetic oligonucleotide
  Sense strand starting at position 881 of SEQ ID NO: 1561714
auuucugguucagacggau

SEQ ID NO: 1692834 - RNA, 19 nt, Artificial Sequence
  Description of Artificial Sequence: Synthetic oligonucleotide
  Antisense strand to SEQ ID NO: 1692833
auccgucugaaccagaaau

SEQ ID NO: 1692835 - RNA, 19 nt, Artificial Sequence
  Description of Artificial Sequence: Synthetic oligonucleotide
  Sense strand starting at position 937 of SEQ ID NO: 1561714
cgggaaacuuugguaaggu

SEQ ID NO: 1692836 - RNA, 19 nt, Artificial Sequence
  Description of Artificial Sequence: Synthetic oligonucleotide
  Antisense strand to SEQ ID NO: 1692835
accuuaccaaaguuucccg

SEQ ID NO: 1692837 - RNA, 19 nt, Artificial Sequence
  Description of Artificial Sequence: Synthetic oligonucleotide
  Sense strand starting at position 1162 of SEQ ID NO: 1561714
cgagaauucugagacaaga

SEQ ID NO: 1692838 - RNA, 19 nt, Artificial Sequence
  Description of Artificial Sequence: Synthetic oligonucleotide
  Antisense strand to SEQ ID NO: 1692837
ucuugucucagaauucucg

SEQ ID NO: 1692839 - RNA, 19 nt, Artificial Sequence
  Description of Artificial Sequence: Synthetic oligonucleotide
  Sense strand starting at position 1374 of SEQ ID NO: 1561714
aggaaagugcugugagauu

SEQ ID NO: 1692840 - RNA, 19 nt, Artificial Sequence
  Description of Artificial Sequence: Synthetic oligonucleotide
  Antisense strand to SEQ ID NO: 1692839
aaucucacagcacuuuccu

SEQ ID NO: 1692841 - RNA, 19 nt, Artificial Sequence
  Description of Artificial Sequence: Synthetic oligonucleotide
  Sense strand starting at position 1440 of SEQ ID NO: 1561714
gcagaauaagucugacgau

SEQ ID NO: 1692842 - RNA, 19 nt, Artificial Sequence
  Description of Artificial Sequence: Synthetic oligonucleotide
  Antisense strand to SEQ ID NO: 1692841
aucgucagacuuauucugc

SEQ ID NO: 1692843 - RNA, 19 nt, Artificial Sequence
  Description of Artificial Sequence: Synthetic oligonucleotide
  Sense strand starting at position 1522 of SEQ ID NO: 1561714
gaagucugacccggagagu

SEQ ID NO: 1692844 - RNA, 19 nt, Artificial Sequence
  Description of Artificial Sequence: Synthetic oligonucleotide
  Antisense strand to SEQ ID NO: 1692843
acucuccgggucagacuuc

SEQ ID NO: 1692845 - RNA, 19 nt, Artificial Sequence
  Description of Artificial Sequence: Synthetic oligonucleotide
  Sense strand starting at position 1523 of SEQ ID NO: 1561714
aagucugacccggagaguu

SEQ ID NO: 1692846 - RNA, 19 nt, Artificial Sequence
  Description of Artificial Sequence: Synthetic oligonucleotide
  Antisense strand to SEQ ID NO: 1692845
aacucuccgggucagacuu

SEQ ID NO: 1692847 - RNA, 19 nt, Artificial Sequence
  Description of Artificial Sequence: Synthetic oligonucleotide
  Sense strand starting at position 1566 of SEQ ID NO: 1561714
cgagucugaugaaggugaa

SEQ ID NO: 1692848 - RNA, 19 nt, Artificial Sequence
  Description of Artificial Sequence: Synthetic oligonucleotide
  Antisense strand to SEQ ID NO: 1692847
uucaccuucaucagacucg

SEQ ID NO: 1692849 - RNA, 19 nt, Artificial Sequence
  Description of Artificial Sequence: Synthetic oligonucleotide
  Sense strand starting at position 2193 of SEQ ID NO: 1561714
uguggcauucugggaaaug

SEQ ID NO: 1692850 - RNA, 19 nt, Artificial Sequence
  Description of Artificial Sequence: Synthetic oligonucleotide
  Antisense strand to SEQ ID NO: 1692849
cauuucccagaaugccaca

SEQ ID NO: 1692851 - RNA, 19 nt, Artificial Sequence
  Description of Artificial Sequence: Synthetic oligonucleotide
  Sense strand starting at position 2203 of SEQ ID NO: 1561714
ugggaaauguagucuccuu

SEQ ID NO: 1692852 - RNA, 19 nt, Artificial Sequence
  Description of Artificial Sequence: Synthetic oligonucleotide
  Antisense strand to SEQ ID NO: 1692851
aaggagacuacauuuccca

SEQ ID NO: 1692853 - RNA, 19 nt, Artificial Sequence
  Description of Artificial Sequence: Synthetic oligonucleotide
  Sense strand starting at position 2290 of SEQ ID NO: 1561714
auuuauugcuaguauggga

SEQ ID NO: 1692854 - RNA, 19 nt, Artificial Sequence
  Description of Artificial Sequence: Synthetic oligonucleotide
  Antisense strand to SEQ ID NO: 1692853
ucccauacuagcaauaaau

SEQ ID NO: 1692855 - RNA, 19 nt, Artificial Sequence
  Description of Artificial Sequence: Synthetic oligonucleotide
  Sense strand starting at position 2305 of SEQ ID NO: 1561714
gggauacugccaugcuuga

SEQ ID NO: 1692856 - RNA, 19 nt, Artificial Sequence
  Description of Artificial Sequence: Synthetic oligonucleotide
  Antisense strand to SEQ ID NO: 1692855
ucaagcauggcaguauccc

SEQ ID NO: 1692857 - RNA, 19 nt, Artificial Sequence
  Description of Artificial Sequence: Synthetic oligonucleotide
  Sense strand starting at position 2367 of SEQ ID NO: 1561714
ggcaacaguuguuuccaau

SEQ ID NO: 1692858 - RNA, 19 nt, Artificial Sequence
  Description of Artificial Sequence: Synthetic oligonucleotide
  Antisense strand to SEQ ID NO: 1692857
auuggaaacaacuguugcc

SEQ ID NO: 1692859 - RNA, 19 nt, Artificial Sequence
  Description of Artificial Sequence: Synthetic oligonucleotide
  Sense strand starting at position 2395 of SEQ ID NO: 1561714
ucaauucuguggucacaga

SEQ ID NO: 1692860 - RNA, 19 nt, Artificial Sequence
  Description of Artificial Sequence: Synthetic oligonucleotide
  Antisense strand to SEQ ID NO: 1692859
ucugugaccacagaauuga

SEQ ID NO: 1692861 - RNA, 19 nt, Artificial Sequence
  Description of Artificial Sequence: Synthetic oligonucleotide
  Sense strand starting at position 2396 of SEQ ID NO: 1561714
caauucuguggucacagaa

SEQ ID NO: 1692862 - RNA, 19 nt, Artificial Sequence
  Description of Artificial Sequence: Synthetic oligonucleotide
  Antisense strand to SEQ ID NO: 1692861
uucugugaccacagaauug

SEQ ID NO: 1692863 - RNA, 19 nt, Artificial Sequence
  Description of Artificial Sequence: Synthetic oligonucleotide
  Sense strand starting at position 2492 of SEQ ID NO: 1561714
ccagcuaaggucugacagu

SEQ ID NO: 1692864 - RNA, 19 nt, Artificial Sequence
  Description of Artificial Sequence: Synthetic oligonucleotide
  Antisense strand to SEQ ID NO: 1692863
acugucagaccuuagcugg

SEQ ID NO: 1692865 - RNA, 19 nt, Artificial Sequence
  Description of Artificial Sequence: Synthetic oligonucleotide
  Sense strand starting at position 2577 of SEQ ID NO: 1561714
ucgugcuauccuguuccau

SEQ ID NO: 1692866 - RNA, 19 nt, Artificial Sequence
  Description of Artificial Sequence: Synthetic oligonucleotide
  Antisense strand to SEQ ID NO: 1692865
auggaacaggauagcacga

SEQ ID NO: 1692867 - RNA, 19 nt, Artificial Sequence
  Description of Artificial Sequence: Synthetic oligonucleotide
  Sense strand starting at position 2578 of SEQ ID NO: 1561714
cgugcuauccuguuccauc

SEQ ID NO: 1692868 - RNA, 19 nt, Artificial Sequence
  Description of Artificial Sequence: Synthetic oligonucleotide
  Antisense strand to SEQ ID NO: 1692867
gauggaacaggauagcacg

SEQ ID NO: 1692869 - RNA, 19 nt, Artificial Sequence
  Description of Artificial Sequence: Synthetic oligonucleotide
  Sense strand starting at position 2595 of SEQ ID NO: 1561714
uccuaccugcaaugugaau

SEQ ID NO: 1692870 - RNA, 19 nt, Artificial Sequence
  Description of Artificial Sequence: Synthetic oligonucleotide
  Antisense strand to SEQ ID NO: 1692869
auucacauugcagguagga

SEQ ID NO: 1692871 - RNA, 19 nt, Artificial Sequence
  Description of Artificial Sequence: Synthetic oligonucleotide
  Sense strand starting at position 2638 of SEQ ID NO: 1561714
accaucuguuaguuacuua

SEQ ID NO: 1692872 - RNA, 19 nt, Artificial Sequence
  Description of Artificial Sequence: Synthetic oligonucleotide
  Antisense strand to SEQ ID NO: 1692871
uaaguaacuaacagauggu

SEQ ID NO: 1692873 - RNA, 19 nt, Artificial Sequence
  Description of Artificial Sequence: Synthetic oligonucleotide
  Sense strand starting at position 2665 of SEQ ID NO: 1561714
ggaguuaucagauggacug

SEQ ID NO: 1692874 - RNA, 19 nt, Artificial Sequence
  Description of Artificial Sequence: Synthetic oligonucleotide
  Antisense strand to SEQ ID NO: 1692873
caguccaucugauaacucc

SEQ ID NO: 1692875 - RNA, 19 nt, Artificial Sequence
  Description of Artificial Sequence: Synthetic oligonucleotide
  Sense strand starting at position 2862 of SEQ ID NO: 1561714
ugaggucugcaguaagaac

SEQ ID NO: 1692876 - RNA, 19 nt, Artificial Sequence
  Description of Artificial Sequence: Synthetic oligonucleotide
  Antisense strand to SEQ ID NO: 1692875
guucuuacugcagaccuca

SEQ ID NO: 1692877 - RNA, 19 nt, Artificial Sequence
  Description of Artificial Sequence: Synthetic oligonucleotide
  Sense strand starting at position 2869 of SEQ ID NO: 1561714
ugcaguaagaacgaaucuu

SEQ ID NO: 1692878 - RNA, 19 nt, Artificial Sequence
  Description of Artificial Sequence: Synthetic oligonucleotide
  Antisense strand to SEQ ID NO: 1692877
aagauucguucuuacugca

SEQ ID NO: 1692879 - RNA, 19 nt, Artificial Sequence
  Description of Artificial Sequence: Synthetic oligonucleotide
  Sense strand starting at position 2880 of SEQ ID NO: 1561714
cgaaucuucuagcccuaga

SEQ ID NO: 1692880 - RNA, 19 nt, Artificial Sequence
  Description of Artificial Sequence: Synthetic oligonucleotide
  Antisense strand to SEQ ID NO: 1692879
ucuagggcuagaagauucg

SEQ ID NO: 1692881 - RNA, 19 nt, Artificial Sequence
  Description of Artificial Sequence: Synthetic oligonucleotide
  Sense strand starting at position 2885 of SEQ ID NO: 1561714
cuucuagcccuagaauugu

SEQ ID NO: 1692882 - RNA, 19 nt, Artificial Sequence
  Description of Artificial Sequence: Synthetic oligonucleotide
  Antisense strand to SEQ ID NO: 1692881
acaauucuagggcuagaag

SEQ ID NO: 1692883 - RNA, 19 nt, Artificial Sequence
  Description of Artificial Sequence: Synthetic oligonucleotide
  Sense strand starting at position 3011 of SEQ ID NO: 1561714
guuguauccuuacuuacag

SEQ ID NO: 1692884 - RNA, 19 nt, Artificial Sequence
  Description of Artificial Sequence: Synthetic oligonucleotide
  Antisense strand to SEQ ID NO: 1692883
cuguaaguaaggauacaac

SEQ ID NO: 1692885 - RNA, 19 nt, Artificial Sequence
  Description of Artificial Sequence: Synthetic oligonucleotide
  Sense strand starting at position 3079 of SEQ ID NO: 1561714
agcuuauacguggaagaca

SEQ ID NO: 1692886 - RNA, 19 nt, Artificial Sequence
  Description of Artificial Sequence: Synthetic oligonucleotide
  Antisense strand to SEQ ID NO: 1692885
ugucuuccacguauaagcu

SEQ ID NO: 1692887 - RNA, 19 nt, Artificial Sequence
  Description of Artificial Sequence: Synthetic oligonucleotide
  Sense strand starting at position 3145 of SEQ ID NO: 1561714
aagcauugagccuguauaa

SEQ ID NO: 1692888 - RNA, 19 nt, Artificial Sequence
  Description of Artificial Sequence: Synthetic oligonucleotide
  Antisense strand to SEQ ID NO: 1692887
uuauacaggcucaaugcuu

SEQ ID NO: 1692889 - RNA, 19 nt, Artificial Sequence
  Description of Artificial Sequence: Synthetic oligonucleotide
  Sense strand starting at position 3227 of SEQ ID NO: 1561714
guugcacugacuuaggaau

SEQ ID NO: 1692890 - RNA, 19 nt, Artificial Sequence
  Description of Artificial Sequence: Synthetic oligonucleotide
  Antisense strand to SEQ ID NO: 1692889
auuccuaagucagugcaac

SEQ ID NO: 1692891 - RNA, 19 nt, Artificial Sequence
  Description of Artificial Sequence: Synthetic oligonucleotide
  Sense strand starting at position 3518 of SEQ ID NO: 1561714
guaaacugaaaucgugcua

SEQ ID NO: 1692892 - RNA, 19 nt, Artificial Sequence
  Description of Artificial Sequence: Synthetic oligonucleotide
  Antisense strand to SEQ ID NO: 1692891
uagcacgauuucaguuuac

SEQ ID NO: 1692893 - RNA, 19 nt, Artificial Sequence
  Description of Artificial Sequence: Synthetic oligonucleotide
  Sense strand starting at position 154 of SEQ ID NO: 1561715
cgucaaugagcugagcgau

SEQ ID NO: 1692894 - RNA, 19 nt, Artificial Sequence
  Description of Artificial Sequence: Synthetic oligonucleotide
  Antisense strand to SEQ ID NO: 1692893
aucgcucagcucauugacg

SEQ ID NO: 1692895 - RNA, 19 nt, Artificial Sequence
  Description of Artificial Sequence: Synthetic oligonucleotide
  Sense strand starting at position 229 of SEQ ID NO: 1561715
acuuguuguaaccggagaa

SEQ ID NO: 1692896 - RNA, 19 nt, Artificial Sequence
  Description of Artificial Sequence: Synthetic oligonucleotide
  Antisense strand to SEQ ID NO: 1692895
uucuccgguuacaacaagu

SEQ ID NO: 1692897 - RNA, 19 nt, Artificial Sequence
  Description of Artificial Sequence: Synthetic oligonucleotide
  Sense strand starting at position 230 of SEQ ID NO: 1561715
cuuguuguaaccggagaag

SEQ ID NO: 1692898 - RNA, 19 nt, Artificial Sequence
  Description of Artificial Sequence: Synthetic oligonucleotide
  Antisense strand to SEQ ID NO: 1692897
cuucuccgguuacaacaag

SEQ ID NO: 1692899 - RNA, 19 nt, Artificial Sequence
  Description of Artificial Sequence: Synthetic oligonucleotide
  Sense strand starting at position 233 of SEQ ID NO: 1561715
guuguaaccggagaagagu

SEQ ID NO: 1692900 - RNA, 19 nt, Artificial Sequence
  Description of Artificial Sequence: Synthetic oligonucleotide
  Antisense strand to SEQ ID NO: 1692899
acucuucuccgguuacaac

SEQ ID NO: 1692901 - RNA, 19 nt, Artificial Sequence
  Description of Artificial Sequence: Synthetic oligonucleotide
  Sense strand starting at position 588 of SEQ ID NO: 1561715
guguaauugugauuuccuc

SEQ ID NO: 1692902 - RNA, 19 nt, Artificial Sequence
  Description of Artificial Sequence: Synthetic oligonucleotide
  Antisense strand to SEQ ID NO: 1692901
gaggaaaucacaauuacac

SEQ ID NO: 1692903 - RNA, 19 nt, Artificial Sequence
  Description of Artificial Sequence: Synthetic oligonucleotide
  Sense strand starting at position 914 of SEQ ID NO: 1561715
aggaguguuucagaugcag

SEQ ID NO: 1692904 - RNA, 19 nt, Artificial Sequence
  Description of Artificial Sequence: Synthetic oligonucleotide
  Antisense strand to SEQ ID NO: 1692903
cugcaucugaaacacuccu

SEQ ID NO: 1692905 - RNA, 19 nt, Artificial Sequence
  Description of Artificial Sequence: Synthetic oligonucleotide
  Sense strand starting at position 1001 of SEQ ID NO: 1561715
ccugaugagucgcucugga

SEQ ID NO: 1692906 - RNA, 19 nt, Artificial Sequence
  Description of Artificial Sequence: Synthetic oligonucleotide
  Antisense strand to SEQ ID NO: 1692905
uccagagcgacucaucagg

SEQ ID NO: 1692907 - RNA, 19 nt, Artificial Sequence
  Description of Artificial Sequence: Synthetic oligonucleotide
  Sense strand starting at position 2150 of SEQ ID NO: 1561715
ggguaaaguuuccuuguuc

SEQ ID NO: 1692908 - RNA, 19 nt, Artificial Sequence
  Description of Artificial Sequence: Synthetic oligonucleotide
  Antisense strand to SEQ ID NO: 1692907
gaacaaggaaacuuuaccc

SEQ ID NO: 1692909 - RNA, 19 nt, Artificial Sequence
  Description of Artificial Sequence: Synthetic oligonucleotide
  Sense strand starting at position 2151 of SEQ ID NO: 1561715
gguaaaguuuccuuguucu

SEQ ID NO: 1692910 - RNA, 19 nt, Artificial Sequence
  Description of Artificial Sequence: Synthetic oligonucleotide
  Antisense strand to SEQ ID NO: 1692909
agaacaaggaaacuuuacc

SEQ ID NO: 1692911 - RNA, 19 nt, Artificial Sequence
  Description of Artificial Sequence: Synthetic oligonucleotide
  Sense strand starting at position 2596 of SEQ ID NO: 1561715
gcgccuugugcggcugaau

SEQ ID NO: 1692912 - RNA, 19 nt, Artificial Sequence
  Description of Artificial Sequence: Synthetic oligonucleotide
  Antisense strand to SEQ ID NO: 1692911
auucagccgcacaaggcgc

SEQ ID NO: 1692913 - RNA, 19 nt, Artificial Sequence
  Description of Artificial Sequence: Synthetic oligonucleotide
  Sense strand starting at position 2607 of SEQ ID NO: 1561715
ggcugaaucucgugugcag

SEQ ID NO: 1692914 - RNA, 19 nt, Artificial Sequence
  Description of Artificial Sequence: Synthetic oligonucleotide
  Antisense strand to SEQ ID NO: 1692913
cugcacacgagauucagcc

SEQ ID NO: 1692915 - RNA, 19 nt, Artificial Sequence
  Description of Artificial Sequence: Synthetic oligonucleotide
  Sense strand starting at position 2633 of SEQ ID NO: 1561715
gggcgaggcucugcagaaa

SEQ ID NO: 1692916 - RNA, 19 nt, Artificial Sequence
  Description of Artificial Sequence: Synthetic oligonucleotide
  Antisense strand to SEQ ID NO: 1692915
uuucugcagagccucgccc

SEQ ID NO: 1692917 - RNA, 19 nt, Artificial Sequence
  Description of Artificial Sequence: Synthetic oligonucleotide
  Sense strand starting at position 2636 of SEQ ID NO: 1561715
cgaggcucugcagaaacau

SEQ ID NO: 1692918 - RNA, 19 nt, Artificial Sequence
  Description of Artificial Sequence: Synthetic oligonucleotide
  Antisense strand to SEQ ID NO: 1692917
auguuucugcagagccucg

SEQ ID NO: 1692919 - RNA, 19 nt, Artificial Sequence
  Description of Artificial Sequence: Synthetic oligonucleotide
  Sense strand starting at position 2730 of SEQ ID NO: 1561715
ggagauuuccgucgucggu

SEQ ID NO: 1692920 - RNA, 19 nt, Artificial Sequence
  Description of Artificial Sequence: Synthetic oligonucleotide
  Antisense strand to SEQ ID NO: 1692919
accgacgacggaaaucucc

SEQ ID NO: 1692921 - RNA, 19 nt, Artificial Sequence
  Description of Artificial Sequence: Synthetic oligonucleotide
  Sense strand starting at position 2732 of SEQ ID NO: 1561715
agauuuccgucgucgguaa

SEQ ID NO: 1692922 - RNA, 19 nt, Artificial Sequence
  Description of Artificial Sequence: Synthetic oligonucleotide
  Antisense strand to SEQ ID NO: 1692921
uuaccgacgacggaaaucu

SEQ ID NO: 1692923 - RNA, 19 nt, Artificial Sequence
  Description of Artificial Sequence: Synthetic oligonucleotide
  Sense strand starting at position 2733 of SEQ ID NO: 1561715
gauuuccgucgucgguaau

SEQ ID NO: 1692924 - RNA, 19 nt, Artificial Sequence
  Description of Artificial Sequence: Synthetic oligonucleotide
  Antisense strand to SEQ ID NO: 1692923
auuaccgacgacggaaauc

SEQ ID NO: 1692925 - RNA, 19 nt, Artificial Sequence
  Description of Artificial Sequence: Synthetic oligonucleotide
  Sense strand starting at position 2736 of SEQ ID NO: 1561715
uuccgucgucgguaaugga

SEQ ID NO: 1692926 - RNA, 19 nt, Artificial Sequence
  Description of Artificial Sequence: Synthetic oligonucleotide
  Antisense strand to SEQ ID NO: 1692925
uccauuaccgacgacggaa

SEQ ID NO: 1692927 - RNA, 19 nt, Artificial Sequence
  Description of Artificial Sequence: Synthetic oligonucleotide
  Sense strand starting at position 2737 of SEQ ID NO: 1561715
uccgucgucgguaauggaa

SEQ ID NO: 1692928 - RNA, 19 nt, Artificial Sequence
  Description of Artificial Sequence: Synthetic oligonucleotide
  Antisense strand to SEQ ID NO: 1692927
uuccauuaccgacgacgga

SEQ ID NO: 1692929 - RNA, 19 nt, Artificial Sequence
  Description of Artificial Sequence: Synthetic oligonucleotide
  Sense strand starting at position 2852 of SEQ ID NO: 1561715
ucaggaguucccugcagca

SEQ ID NO: 1692930 - RNA, 19 nt, Artificial Sequence
  Description of Artificial Sequence: Synthetic oligonucleotide
  Antisense strand to SEQ ID NO: 1692929
ugcugcagggaacuccuga

SEQ ID NO: 1692931 - RNA, 19 nt, Artificial Sequence
  Description of Artificial Sequence: Synthetic oligonucleotide
  Sense strand starting at position 3049 of SEQ ID NO: 1561715
gcucauggcuccucauaca

SEQ ID NO: 1692932 - RNA, 19 nt, Artificial Sequence
  Description of Artificial Sequence: Synthetic oligonucleotide
  Antisense strand to SEQ ID NO: 1692931
uguaugaggagccaugagc

SEQ ID NO: 1692933 - RNA, 19 nt, Artificial Sequence
  Description of Artificial Sequence: Synthetic oligonucleotide
  Sense strand starting at position 3125 of SEQ ID NO: 1561715
gugggcagugccuacaauu

SEQ ID NO: 1692934 - RNA, 19 nt, Artificial Sequence
  Description of Artificial Sequence: Synthetic oligonucleotide
  Antisense strand to SEQ ID NO: 1692933
aauuguaggcacugcccac

SEQ ID NO: 1692935 - RNA, 19 nt, Artificial Sequence
  Description of Artificial Sequence: Synthetic oligonucleotide
  Sense strand starting at position 3201 of SEQ ID NO: 1561715
uccugaauugccuggucca

SEQ ID NO: 1692936 - RNA, 19 nt, Artificial Sequence
  Description of Artificial Sequence: Synthetic oligonucleotide
  Antisense strand to SEQ ID NO: 1692935
uggaccaggcaauucagga

SEQ ID NO: 1692937 - RNA, 19 nt, Artificial Sequence
  Description of Artificial Sequence: Synthetic oligonucleotide
  Sense strand starting at position 3329 of SEQ ID NO: 1561715
gucccuacguuaccaaaga

SEQ ID NO: 1692938 - RNA, 19 nt, Artificial Sequence
  Description of Artificial Sequence: Synthetic oligonucleotide
  Antisense strand to SEQ ID NO: 1692937
ucuuugguaacguagggac

SEQ ID NO: 1692939 - RNA, 19 nt, Artificial Sequence
  Description of Artificial Sequence: Synthetic oligonucleotide
  Sense strand starting at position 3389 of SEQ ID NO: 1561715
cacagucaguacugggauu

SEQ ID NO: 1692940 - RNA, 19 nt, Artificial Sequence
  Description of Artificial Sequence: Synthetic oligonucleotide
  Antisense strand to SEQ ID NO: 1692939
aaucccaguacugacugug

SEQ ID NO: 1692941 - RNA, 19 nt, Artificial Sequence
  Description of Artificial Sequence: Synthetic oligonucleotide
  Sense strand starting at position 3452 of SEQ ID NO: 1561715
gcuggccucagauguaguu

SEQ ID NO: 1692942 - RNA, 19 nt, Artificial Sequence
  Description of Artificial Sequence: Synthetic oligonucleotide
  Antisense strand to SEQ ID NO: 1692941
aacuacaucugaggccagc

SEQ ID NO: 1692943 - RNA, 19 nt, Artificial Sequence
  Description of Artificial Sequence: Synthetic oligonucleotide
  Sense strand starting at position 3515 of SEQ ID NO: 1561715
aggucuacuuuccugaacu

SEQ ID NO: 1692944 - RNA, 19 nt, Artificial Sequence
  Description of Artificial Sequence: Synthetic oligonucleotide
  Antisense strand to SEQ ID NO: 1692943
aguucaggaaaguagaccu

SEQ ID NO: 1692945 - RNA, 19 nt, Artificial Sequence
  Description of Artificial Sequence: Synthetic oligonucleotide
  Sense strand starting at position 3516 of SEQ ID NO: 1561715
ggucuacuuuccugaacuc

SEQ ID NO: 1692946 - RNA, 19 nt, Artificial Sequence
  Description of Artificial Sequence: Synthetic oligonucleotide
  Antisense strand to SEQ ID NO: 1692945
gaguucaggaaaguagacc

SEQ ID NO: 1692947 - RNA, 19 nt, Artificial Sequence
  Description of Artificial Sequence: Synthetic oligonucleotide
  Sense strand starting at position 3938 of SEQ ID NO: 1561715
ccaugaggcucucugcuua

SEQ ID NO: 1692948 - RNA, 19 nt, Artificial Sequence
  Description of Artificial Sequence: Synthetic oligonucleotide
  Antisense strand to SEQ ID NO: 1692947
uaagcagagagccucaugg

SEQ ID NO: 1692949 - RNA, 19 nt, Artificial Sequence
  Description of Artificial Sequence: Synthetic oligonucleotide
  Sense strand starting at position 3942 of SEQ ID NO: 1561715
gaggcucucugcuuaggaa

SEQ ID NO: 1692950 - RNA, 19 nt, Artificial Sequence
  Description of Artificial Sequence: Synthetic oligonucleotide
  Antisense strand to SEQ ID NO: 1692949
uuccuaagcagagagccuc

SEQ ID NO: 1692951 - RNA, 19 nt, Artificial Sequence
  Description of Artificial Sequence: Synthetic oligonucleotide
  Sense strand starting at position 673 of SEQ ID NO: 1561716
uugcacuuaucacugggaa

SEQ ID NO: 1692952 - RNA, 19 nt, Artificial Sequence
  Description of Artificial Sequence: Synthetic oligonucleotide
  Antisense strand to SEQ ID NO: 1692951
uucccagugauaagugcaa

SEQ ID NO: 1692953 - RNA, 19 nt, Artificial Sequence
  Description of Artificial Sequence: Synthetic oligonucleotide
  Sense strand starting at position 674 of SEQ ID NO: 1561716
ugcacuuaucacugggaac

SEQ ID NO: 1692954 - RNA, 19 nt, Artificial Sequence
  Description of Artificial Sequence: Synthetic oligonucleotide
  Antisense strand to SEQ ID NO: 1692953
guucccagugauaagugca

SEQ ID NO: 1692955 - RNA, 19 nt, Artificial Sequence
  Description of Artificial Sequence: Synthetic oligonucleotide
  Sense strand starting at position 701 of SEQ ID NO: 1561716
augguacaaccauguugaa

SEQ ID NO: 1692956 - RNA, 19 nt, Artificial Sequence
  Description of Artificial Sequence: Synthetic oligonucleotide
  Antisense strand to SEQ ID NO: 1692955
uucaacaugguuguaccau

SEQ ID NO: 1692957 - RNA, 19 nt, Artificial Sequence
  Description of Artificial Sequence: Synthetic oligonucleotide
  Sense strand starting at position 719 of SEQ ID NO: 1561716
agagcaauuuggcaacauu

SEQ ID NO: 1692958 - RNA, 19 nt, Artificial Sequence
  Description of Artificial Sequence: Synthetic oligonucleotide
  Antisense strand to SEQ ID NO: 1692957
aauguugccaaauugcucu

SEQ ID NO: 1692959 - RNA, 19 nt, Artificial Sequence
  Description of Artificial Sequence: Synthetic oligonucleotide
  Sense strand starting at position 747 of SEQ ID NO: 1561716
ugaggauguguguacuuca

SEQ ID NO: 1692960 - RNA, 19 nt, Artificial Sequence
  Description of Artificial Sequence: Synthetic oligonucleotide
  Antisense strand to SEQ ID NO: 1692959
ugaaguacacacauccuca

SEQ ID NO: 1692961 - RNA, 19 nt, Artificial Sequence
  Description of Artificial Sequence: Synthetic oligonucleotide
  Sense strand starting at position 770 of SEQ ID NO: 1561716
ggaagaauuguauguacuu

SEQ ID NO: 1692962 - RNA, 19 nt, Artificial Sequence
  Description of Artificial Sequence: Synthetic oligonucleotide
  Antisense strand to SEQ ID NO: 1692961
aaguacauacaauucuucc

SEQ ID NO: 1692963 - RNA, 19 nt, Artificial Sequence
  Description of Artificial Sequence: Synthetic oligonucleotide
  Sense strand starting at position 771 of SEQ ID NO: 1561716
gaagaauuguauguacuuu

SEQ ID NO: 1692964 - RNA, 19 nt, Artificial Sequence
  Description of Artificial Sequence: Synthetic oligonucleotide
  Antisense strand to SEQ ID NO: 1692963
aaaguacauacaauucuuc

SEQ ID NO: 1692965 - RNA, 19 nt, Artificial Sequence
  Description of Artificial Sequence: Synthetic oligonucleotide
  Sense strand starting at position 828 of SEQ ID NO: 1561716
uagccaugaggguaaucau

SEQ ID NO: 1692966 - RNA, 19 nt, Artificial Sequence
  Description of Artificial Sequence: Synthetic oligonucleotide
  Antisense strand to SEQ ID NO: 1692965
augauuacccucauggcua

SEQ ID NO: 1692967 - RNA, 19 nt, Artificial Sequence
  Description of Artificial Sequence: Synthetic oligonucleotide
  Sense strand starting at position 835 of SEQ ID NO: 1561716
gaggguaaucauggcaaca

SEQ ID NO: 1692968 - RNA, 19 nt, Artificial Sequence
  Description of Artificial Sequence: Synthetic oligonucleotide
  Antisense strand to SEQ ID NO: 1692967
uguugccaugauuacccuc

SEQ ID NO: 1692969 - RNA, 19 nt, Artificial Sequence
  Description of Artificial Sequence: Synthetic oligonucleotide
  Sense strand starting at position 847 of SEQ ID NO: 1561716
ggcaacauuguguguaaca

SEQ ID NO: 1692970 - RNA, 19 nt, Artificial Sequence
  Description of Artificial Sequence: Synthetic oligonucleotide
  Antisense strand to SEQ ID NO: 1692969
uguuacacacaauguugcc

SEQ ID NO: 1692971 - RNA, 19 nt, Artificial Sequence
  Description of Artificial Sequence: Synthetic oligonucleotide
  Sense strand starting at position 848 of SEQ ID NO: 1561716
gcaacauuguguguaacag

SEQ ID NO: 1692972 - RNA, 19 nt, Artificial Sequence
  Description of Artificial Sequence: Synthetic oligonucleotide
  Antisense strand to SEQ ID NO: 1692971
cuguuacacacaauguugc

SEQ ID NO: 1692973 - RNA, 19 nt, Artificial Sequence
  Description of Artificial Sequence: Synthetic oligonucleotide
  Sense strand starting at position 849 of SEQ ID NO: 1561716
caacauuguguguaacagu

SEQ ID NO: 1692974 - RNA, 19 nt, Artificial Sequence
  Description of Artificial Sequence: Synthetic oligonucleotide
  Antisense strand to SEQ ID NO: 1692973
acuguuacacacaauguug

SEQ ID NO: 1692975 - RNA, 19 nt, Artificial Sequence
  Description of Artificial Sequence: Synthetic oligonucleotide
  Sense strand starting at position 962 of SEQ ID NO: 1561716
ugucaauguggauaaagcu

SEQ ID NO: 1692976 - RNA, 19 nt, Artificial Sequence
  Description of Artificial Sequence: Synthetic oligonucleotide
  Antisense strand to SEQ ID NO: 1692975
agcuuuauccacauugaca

SEQ ID NO: 1692977 - RNA, 19 nt, Artificial Sequence
  Description of Artificial Sequence: Synthetic oligonucleotide
  Sense strand starting at position 1014 of SEQ ID NO: 1561716
ugcuauuuaugguaucauu

SEQ ID NO: 1692978 - RNA, 19 nt, Artificial Sequence
  Description of Artificial Sequence: Synthetic oligonucleotide
  Antisense strand to SEQ ID NO: 1692977
aaugauaccauaaauagca

SEQ ID NO: 1692979 - RNA, 19 nt, Artificial Sequence
  Description of Artificial Sequence: Synthetic oligonucleotide
  Sense strand starting at position 1125 of SEQ ID NO: 1561716
ucaggaaagugguuacuau

SEQ ID NO: 1692980 - RNA, 19 nt, Artificial Sequence
  Description of Artificial Sequence: Synthetic oligonucleotide
  Antisense strand to SEQ ID NO: 1692979
auaguaaccacuuuccuga

SEQ ID NO: 1692981 - RNA, 19 nt, Artificial Sequence
  Description of Artificial Sequence: Synthetic oligonucleotide
  Sense strand starting at position 1182 of SEQ ID NO: 1561716
ucccuacaccuguaauguu

SEQ ID NO: 1692982 - RNA, 19 nt, Artificial Sequence
  Description of Artificial Sequence: Synthetic oligonucleotide
  Antisense strand to SEQ ID NO: 1692981
aacauuacagguguaggga

SEQ ID NO: 1692983 - RNA, 19 nt, Artificial Sequence
  Description of Artificial Sequence: Synthetic oligonucleotide
  Sense strand starting at position 1190 of SEQ ID NO: 1561716
ccuguaauguucuauuucu

SEQ ID NO: 1692984 - RNA, 19 nt, Artificial Sequence
  Description of Artificial Sequence: Synthetic oligonucleotide
  Antisense strand to SEQ ID NO: 1692983
agaaauagaacauuacagg

SEQ ID NO: 1692985 - RNA, 19 nt, Artificial Sequence
  Description of Artificial Sequence: Synthetic oligonucleotide
  Sense strand starting at position 1286 of SEQ ID NO: 1561716
auugucaggcauuauccaa

SEQ ID NO: 1692986 - RNA, 19 nt, Artificial Sequence
  Description of Artificial Sequence: Synthetic oligonucleotide
  Antisense strand to SEQ ID NO: 1692985
uuggauaaugccugacaau

SEQ ID NO: 1692987 - RNA, 19 nt, Artificial Sequence
  Description of Artificial Sequence: Synthetic oligonucleotide
  Sense strand starting at position 1425 of SEQ ID NO: 1561716
ucacaugacuaauagguga

SEQ ID NO: 1692988 - RNA, 19 nt, Artificial Sequence
  Description of Artificial Sequence: Synthetic oligonucleotide
  Antisense strand to SEQ ID NO: 1692987
ucaccuauuagucauguga

SEQ ID NO: 1692989 - RNA, 19 nt, Artificial Sequence
  Description of Artificial Sequence: Synthetic oligonucleotide
  Sense strand starting at position 1432 of SEQ ID NO: 1561716
acuaauaggugauagggau

SEQ ID NO: 1692990 - RNA, 19 nt, Artificial Sequence
  Description of Artificial Sequence: Synthetic oligonucleotide
  Antisense strand to SEQ ID NO: 1692989
aucccuaucaccuauuagu

SEQ ID NO: 1692991 - RNA, 19 nt, Artificial Sequence
  Description of Artificial Sequence: Synthetic oligonucleotide
  Sense strand starting at position 1597 of SEQ ID NO: 1561716
ggcuuauggcuugcccagu

SEQ ID NO: 1692992 - RNA, 19 nt, Artificial Sequence
  Description of Artificial Sequence: Synthetic oligonucleotide
  Antisense strand to SEQ ID NO: 1692991
acugggcaagccauaagcc

SEQ ID NO: 1692993 - RNA, 19 nt, Artificial Sequence
  Description of Artificial Sequence: Synthetic oligonucleotide
  Sense strand starting at position 2006 of SEQ ID NO: 1561716
gaagcccugcucugagaaa

SEQ ID NO: 1692994 - RNA, 19 nt, Artificial Sequence
  Description of Artificial Sequence: Synthetic oligonucleotide
  Antisense strand to SEQ ID NO: 1692993
uuucucagagcagggcuuc

SEQ ID NO: 1692995 - RNA, 19 nt, Artificial Sequence
  Description of Artificial Sequence: Synthetic oligonucleotide
  Sense strand starting at position 2040 of SEQ ID NO: 1561716
cuccuaaggucacaaugaa

SEQ ID NO: 1692996 - RNA, 19 nt, Artificial Sequence
  Description of Artificial Sequence: Synthetic oligonucleotide
  Antisense strand to SEQ ID NO: 1692995
uucauugugaccuuaggag

SEQ ID NO: 1692997 - RNA, 19 nt, Artificial Sequence
  Description of Artificial Sequence: Synthetic oligonucleotide
  Sense strand starting at position 2093 of SEQ ID NO: 1561716
gugggagucuaacauuuau

SEQ ID NO: 1692998 - RNA, 19 nt, Artificial Sequence
  Description of Artificial Sequence: Synthetic oligonucleotide
  Antisense strand to SEQ ID NO: 1692997
auaaauguuagacucccac

SEQ ID NO: 1692999 - RNA, 19 nt, Artificial Sequence
  Description of Artificial Sequence: Synthetic oligonucleotide
  Sense strand starting at position 2099 of SEQ ID NO: 1561716
gucuaacauuuaugggaua

SEQ ID NO: 1693000 - RNA, 19 nt, Artificial Sequence
  Description of Artificial Sequence: Synthetic oligonucleotide
  Antisense strand to SEQ ID NO: 1692999
uaucccauaaauguuagac

SEQ ID NO: 1693001 - RNA, 19 nt, Artificial Sequence
  Description of Artificial Sequence: Synthetic oligonucleotide
  Sense strand starting at position 2112 of SEQ ID NO: 1561716
gggauacucacaggcauua

SEQ ID NO: 1693002 - RNA, 19 nt, Artificial Sequence
  Description of Artificial Sequence: Synthetic oligonucleotide
  Antisense strand to SEQ ID NO: 1693001
uaaugccugugaguauccc

SEQ ID NO: 1693003 - RNA, 19 nt, Artificial Sequence
  Description of Artificial Sequence: Synthetic oligonucleotide
  Sense strand starting at position 2124 of SEQ ID NO: 1561716
ggcauuaucucagcuaauc

SEQ ID NO: 1693004 - RNA, 19 nt, Artificial Sequence
  Description of Artificial Sequence: Synthetic oligonucleotide
  Antisense strand to SEQ ID NO: 1693003
gauuagcugagauaaugcc

SEQ ID NO: 1693005 - RNA, 19 nt, Artificial Sequence
  Description of Artificial Sequence: Synthetic oligonucleotide
  Sense strand starting at position 2333 of SEQ ID NO: 1561716
uacaaaugucuuggcaaug

SEQ ID NO: 1693006 - RNA, 19 nt, Artificial Sequence
  Description of Artificial Sequence: Synthetic oligonucleotide
  Antisense strand to SEQ ID NO: 1693005
cauugccaagacauuugua

SEQ ID NO: 1693007 - RNA, 19 nt, Artificial Sequence
  Description of Artificial Sequence: Synthetic oligonucleotide
  Sense strand starting at position 2334 of SEQ ID NO: 1561716
acaaaugucuuggcaauga

SEQ ID NO: 1693008 - RNA, 19 nt, Artificial Sequence
  Description of Artificial Sequence: Synthetic oligonucleotide
  Antisense strand to SEQ ID NO: 1693007
ucauugccaagacauuugu

SEQ ID NO: 1693009 - RNA, 19 nt, Artificial Sequence
  Description of Artificial Sequence: Synthetic oligonucleotide
  Sense strand starting at position 2470 of SEQ ID NO: 1561716
uaggaaugcguauacuaca

SEQ ID NO: 1693010 - RNA, 19 nt, Artificial Sequence
  Description of Artificial Sequence: Synthetic oligonucleotide
  Antisense strand to SEQ ID NO: 1693009
uguaguauacgcauuccua

SEQ ID NO: 1693011 - RNA, 19 nt, Artificial Sequence
  Description of Artificial Sequence: Synthetic oligonucleotide
  Sense strand starting at position 2720 of SEQ ID NO: 1561716
ucaccuguccugcaaagau

SEQ ID NO: 1693012 - RNA, 19 nt, Artificial Sequence
  Description of Artificial Sequence: Synthetic oligonucleotide
  Antisense strand to SEQ ID NO: 1693011
aucuuugcaggacagguga

SEQ ID NO: 1693013 - RNA, 19 nt, Artificial Sequence
  Description of Artificial Sequence: Synthetic oligonucleotide
  Sense strand starting at position 2767 of SEQ ID NO: 1561716
cucacuuuguucccaggau

SEQ ID NO: 1693014 - RNA, 19 nt, Artificial Sequence
  Description of Artificial Sequence: Synthetic oligonucleotide
  Antisense strand to SEQ ID NO: 1693013
auccugggaacaaagugag

SEQ ID NO: 1693015 - RNA, 19 nt, Artificial Sequence
  Description of Artificial Sequence: Synthetic oligonucleotide
  Sense strand starting at position 3637 of SEQ ID NO: 1561716
agauacacuugcucuagga

SEQ ID NO: 1693016 - RNA, 19 nt, Artificial Sequence
  Description of Artificial Sequence: Synthetic oligonucleotide
  Antisense strand to SEQ ID NO: 1693015
uccuagagcaaguguaucu

SEQ ID NO: 1693017 - RNA, 19 nt, Artificial Sequence
  Description of Artificial Sequence: Synthetic oligonucleotide
  Sense strand starting at position 3639 of SEQ ID NO: 1561716
auacacuugcucuaggagu

SEQ ID NO: 1693018 - RNA, 19 nt, Artificial Sequence
  Description of Artificial Sequence: Synthetic oligonucleotide
  Antisense strand to SEQ ID NO: 1693017
acuccuagagcaaguguau

SEQ ID NO: 1693019 - RNA, 19 nt, Artificial Sequence
  Description of Artificial Sequence: Synthetic oligonucleotide
  Sense strand starting at position 3797 of SEQ ID NO: 1561716
auggguguacuuuguuaca

SEQ ID NO: 1693020 - RNA, 19 nt, Artificial Sequence
  Description of Artificial Sequence: Synthetic oligonucleotide
  Antisense strand to SEQ ID NO: 1693019
uguaacaaaguacacccau

SEQ ID NO: 1693021 - RNA, 19 nt, Artificial Sequence
  Description of Artificial Sequence: Synthetic oligonucleotide
  Sense strand starting at position 3835 of SEQ ID NO: 1561716
ggaguagguucauccagca

SEQ ID NO: 1693022 - RNA, 19 nt, Artificial Sequence
  Description of Artificial Sequence: Synthetic oligonucleotide
  Antisense strand to SEQ ID NO: 1693021
ugcuggaugaaccuacucc

SEQ ID NO: 1693023 - RNA, 19 nt, Artificial Sequence
  Description of Artificial Sequence: Synthetic oligonucleotide
  Sense strand starting at position 3865 of SEQ ID NO: 1561716
ggaccacucugagacuuag

SEQ ID NO: 1693024 - RNA, 19 nt, Artificial Sequence
  Description of Artificial Sequence: Synthetic oligonucleotide
  Antisense strand to SEQ ID NO: 1693023
cuaagucucagaguggucc

SEQ ID NO: 1693025 - RNA, 19 nt, Artificial Sequence
  Description of Artificial Sequence: Synthetic oligonucleotide
  Sense strand starting at position 3913 of SEQ ID NO: 1561716
aguacugucccauaagucu

SEQ ID NO: 1693026 - RNA, 19 nt, Artificial Sequence
  Description of Artificial Sequence: Synthetic oligonucleotide
  Antisense strand to SEQ ID NO: 1693025
agacuuaugggacaguacu

SEQ ID NO: 1693027 - RNA, 19 nt, Artificial Sequence
  Description of Artificial Sequence: Synthetic oligonucleotide
  Sense strand starting at position 3919 of SEQ ID NO: 1561716
gucccauaagucugguuaa

SEQ ID NO: 1693028 - RNA, 19 nt, Artificial Sequence
  Description of Artificial Sequence: Synthetic oligonucleotide
  Antisense strand to SEQ ID NO: 1693027
uuaaccagacuuaugggac

SEQ ID NO: 1693029 - RNA, 19 nt, Artificial Sequence
  Description of Artificial Sequence: Synthetic oligonucleotide
  Sense strand starting at position 3922 of SEQ ID NO: 1561716
ccauaagucugguuaaauc

SEQ ID NO: 1693030 - RNA, 19 nt, Artificial Sequence
  Description of Artificial Sequence: Synthetic oligonucleotide
  Antisense strand to SEQ ID NO: 1693029
gauuuaaccagacuuaugg

SEQ ID NO: 1693031 - RNA, 19 nt, Artificial Sequence
  Description of Artificial Sequence: Synthetic oligonucleotide
  Sense strand starting at position 154 of SEQ ID NO: 1561717
gccagagcuucuccaaauc

SEQ ID NO: 1693032 - RNA, 19 nt, Artificial Sequence
  Description of Artificial Sequence: Synthetic oligonucleotide
  Antisense strand to SEQ ID NO: 1693031
gauuuggagaagcucuggc

SEQ ID NO: 1693033 - RNA, 19 nt, Artificial Sequence
  Description of Artificial Sequence: Synthetic oligonucleotide
  Sense strand starting at position 236 of SEQ ID NO: 1561717
gccugcaaccuguugucua

SEQ ID NO: 1693034 - RNA, 19 nt, Artificial Sequence
  Description of Artificial Sequence: Synthetic oligonucleotide
  Antisense strand to SEQ ID NO: 1693033
uagacaacagguugcaggc

SEQ ID NO: 1693035 - RNA, 19 nt, Artificial Sequence
  Description of Artificial Sequence: Synthetic oligonucleotide
  Sense strand starting at position 352 of SEQ ID NO: 1561717
gcugcucugagugacaaca

SEQ ID NO: 1693036 - RNA, 19 nt, Artificial Sequence
  Description of Artificial Sequence: Synthetic oligonucleotide
  Antisense strand to SEQ ID NO: 1693035
uguugucacucagagcagc

SEQ ID NO: 1693037 - RNA, 19 nt, Artificial Sequence
  Description of Artificial Sequence: Synthetic oligonucleotide
  Sense strand starting at position 478 of SEQ ID NO: 1561717
gggcgagcucuccaggcaa

SEQ ID NO: 1693038 - RNA, 19 nt, Artificial Sequence
  Description of Artificial Sequence: Synthetic oligonucleotide
  Antisense strand to SEQ ID NO: 1693037
uugccuggagagcucgccc

SEQ ID NO: 1693039 - RNA, 19 nt, Artificial Sequence
  Description of Artificial Sequence: Synthetic oligonucleotide
  Sense strand starting at position 496 of SEQ ID NO: 1561717
augucugauugcuggacau

SEQ ID NO: 1693040 - RNA, 19 nt, Artificial Sequence
  Description of Artificial Sequence: Synthetic oligonucleotide
  Antisense strand to SEQ ID NO: 1693039
auguccagcaaucagacau

SEQ ID NO: 1693041 - RNA, 19 nt, Artificial Sequence
  Description of Artificial Sequence: Synthetic oligonucleotide
  Sense strand starting at position 498 of SEQ ID NO: 1561717
gucugauugcuggacaugu

SEQ ID NO: 1693042 - RNA, 19 nt, Artificial Sequence
  Description of Artificial Sequence: Synthetic oligonucleotide
  Antisense strand to SEQ ID NO: 1693041
acauguccagcaaucagac

SEQ ID NO: 1693043 - RNA, 19 nt, Artificial Sequence
  Description of Artificial Sequence: Synthetic oligonucleotide
  Sense strand starting at position 549 of SEQ ID NO: 1561717
gcggaagggucaucagaga

SEQ ID NO: 1693044 - RNA, 19 nt, Artificial Sequence
  Description of Artificial Sequence: Synthetic oligonucleotide
  Antisense strand to SEQ ID NO: 1693043
ucucugaugacccuuccgc

SEQ ID NO: 1693045 - RNA, 19 nt, Artificial Sequence
  Description of Artificial Sequence: Synthetic oligonucleotide
  Sense strand starting at position 1241 of SEQ ID NO: 1561717
guucuaggguccugaguga

SEQ ID NO: 1693046 - RNA, 19 nt, Artificial Sequence
  Description of Artificial Sequence: Synthetic oligonucleotide
  Antisense strand to SEQ ID NO: 1693045
ucacucaggacccuagaac

SEQ ID NO: 1693047 - RNA, 19 nt, Artificial Sequence
  Description of Artificial Sequence: Synthetic oligonucleotide
  Sense strand starting at position 1346 of SEQ ID NO: 1561717
ggaaucugcuccucugcaa

SEQ ID NO: 1693048 - RNA, 19 nt, Artificial Sequence
  Description of Artificial Sequence: Synthetic oligonucleotide
  Antisense strand to SEQ ID NO: 1693047
uugcagaggagcagauucc

SEQ ID NO: 1693049 - RNA, 19 nt, Artificial Sequence
  Description of Artificial Sequence: Synthetic oligonucleotide
  Sense strand starting at position 1395 of SEQ ID NO: 1561717
cggcuuaaaucagggauuu

SEQ ID NO: 1693050 - RNA, 19 nt, Artificial Sequence
  Description of Artificial Sequence: Synthetic oligonucleotide
  Antisense strand to SEQ ID NO: 1693049
aaaucccugauuuaagccg

SEQ ID NO: 1693051 - RNA, 19 nt, Artificial Sequence
  Description of Artificial Sequence: Synthetic oligonucleotide
  Sense strand starting at position 1555 of SEQ ID NO: 1561717
ccagaaaccuggcuugacu

SEQ ID NO: 1693052 - RNA, 19 nt, Artificial Sequence
  Description of Artificial Sequence: Synthetic oligonucleotide
  Antisense strand to SEQ ID NO: 1693051
agucaagccagguuucugg

SEQ ID NO: 1693053 - RNA, 19 nt, Artificial Sequence
  Description of Artificial Sequence: Synthetic oligonucleotide
  Sense strand starting at position 1663 of SEQ ID NO: 1561717
ccuggauguugucugagac

SEQ ID NO: 1693054 - RNA, 19 nt, Artificial Sequence
  Description of Artificial Sequence: Synthetic oligonucleotide
  Antisense strand to SEQ ID NO: 1693053
gucucagacaacauccagg

SEQ ID NO: 1693055 - RNA, 19 nt, Artificial Sequence
  Description of Artificial Sequence: Synthetic oligonucleotide
  Sense strand starting at position 1826 of SEQ ID NO: 1561717
gucagucacccucagauca

SEQ ID NO: 1693056 - RNA, 19 nt, Artificial Sequence
  Description of Artificial Sequence: Synthetic oligonucleotide
  Antisense strand to SEQ ID NO: 1693055
ugaucugagggugacugac

SEQ ID NO: 1693057 - RNA, 19 nt, Artificial Sequence
  Description of Artificial Sequence: Synthetic oligonucleotide
  Sense strand starting at position 2005 of SEQ ID NO: 1561717
aggcuucuccuccacagaa

SEQ ID NO: 1693058 - RNA, 19 nt, Artificial Sequence
  Description of Artificial Sequence: Synthetic oligonucleotide
  Antisense strand to SEQ ID NO: 1693057
uucuguggaggagaagccu

SEQ ID NO: 1693059 - RNA, 19 nt, Artificial Sequence
  Description of Artificial Sequence: Synthetic oligonucleotide
  Sense strand starting at position 2007 of SEQ ID NO: 1561717
gcuucuccuccacagaagu

SEQ ID NO: 1693060 - RNA, 19 nt, Artificial Sequence
  Description of Artificial Sequence: Synthetic oligonucleotide
  Antisense strand to SEQ ID NO: 1693059
acuucuguggaggagaagc

SEQ ID NO: 1693061 - RNA, 19 nt, Artificial Sequence
  Description of Artificial Sequence: Synthetic oligonucleotide
  Sense strand starting at position 2114 of SEQ ID NO: 1561717
ccgggcaucucuccaagaa

SEQ ID NO: 1693062 - RNA, 19 nt, Artificial Sequence
  Description of Artificial Sequence: Synthetic oligonucleotide
  Antisense strand to SEQ ID NO: 1693061
uucuuggagagaugcccgg

SEQ ID NO: 1693063 - RNA, 19 nt, Artificial Sequence
  Description of Artificial Sequence: Synthetic oligonucleotide
  Sense strand starting at position 2115 of SEQ ID NO: 1561717
cgggcaucucuccaagaac

SEQ ID NO: 1693064 - RNA, 19 nt, Artificial Sequence
  Description of Artificial Sequence: Synthetic oligonucleotide
  Antisense strand to SEQ ID NO: 1693063
guucuuggagagaugcccg

SEQ ID NO: 1693065 - RNA, 19 nt, Artificial Sequence
  Description of Artificial Sequence: Synthetic oligonucleotide
  Sense strand starting at position 2690 of SEQ ID NO: 1561717
cgggacugccugggagaua

SEQ ID NO: 1693066 - RNA, 19 nt, Artificial Sequence
  Description of Artificial Sequence: Synthetic oligonucleotide
  Antisense strand to SEQ ID NO: 1693065
uaucucccaggcagucccg

SEQ ID NO: 1693067 - RNA, 19 nt, Artificial Sequence
  Description of Artificial Sequence: Synthetic oligonucleotide
  Sense strand starting at position 2691 of SEQ ID NO: 1561717
gggacugccugggagauaa

SEQ ID NO: 1693068 - RNA, 19 nt, Artificial Sequence
  Description of Artificial Sequence: Synthetic oligonucleotide
  Antisense strand to SEQ ID NO: 1693067
uuaucucccaggcaguccc

SEQ ID NO: 1693069 - RNA, 19 nt, Artificial Sequence
  Description of Artificial Sequence: Synthetic oligonucleotide
  Sense strand starting at position 2873 of SEQ ID NO: 1561717
gucccuaccucugucuuua

SEQ ID NO: 1693070 - RNA, 19 nt, Artificial Sequence
  Description of Artificial Sequence: Synthetic oligonucleotide
  Antisense strand to SEQ ID NO: 1693069
uaaagacagagguagggac

SEQ ID NO: 1693071 - RNA, 19 nt, Artificial Sequence
  Description of Artificial Sequence: Synthetic oligonucleotide
  Sense strand starting at position 2877 of SEQ ID NO: 1561717
cuaccucugucuuuaagga

SEQ ID NO: 1693072 - RNA, 19 nt, Artificial Sequence
  Description of Artificial Sequence: Synthetic oligonucleotide
  Antisense strand to SEQ ID NO: 1693071
uccuuaaagacagagguag

SEQ ID NO: 1693073 - RNA, 19 nt, Artificial Sequence
  Description of Artificial Sequence: Synthetic oligonucleotide
  Sense strand starting at position 3361 of SEQ ID NO: 1561717
gcuguugucaccugggcua

SEQ ID NO: 1693074 - RNA, 19 nt, Artificial Sequence
  Description of Artificial Sequence: Synthetic oligonucleotide
  Antisense strand to SEQ ID NO: 1693073
uagcccaggugacaacagc

SEQ ID NO: 1693075 - RNA, 19 nt, Artificial Sequence
  Description of Artificial Sequence: Synthetic oligonucleotide
  Sense strand starting at position 3363 of SEQ ID NO: 1561717
uguugucaccugggcuaga

SEQ ID NO: 1693076 - RNA, 19 nt, Artificial Sequence
  Description of Artificial Sequence: Synthetic oligonucleotide
  Antisense strand to SEQ ID NO: 1693075
ucuagcccaggugacaaca

SEQ ID NO: 1693077 - RNA, 19 nt, Artificial Sequence
  Description of Artificial Sequence: Synthetic oligonucleotide
  Sense strand starting at position 3883 of SEQ ID NO: 1561717
gcgucagggucaucacaga

SEQ ID NO: 1693078 - RNA, 19 nt, Artificial Sequence
  Description of Artificial Sequence: Synthetic oligonucleotide
  Antisense strand to SEQ ID NO: 1693077
ucugugaugacccugacgc

SEQ ID NO: 1693079 - RNA, 19 nt, Artificial Sequence
  Description of Artificial Sequence: Synthetic oligonucleotide
  Sense strand starting at position 3921 of SEQ ID NO: 1561717
gcacuccuggcucaugaaa

SEQ ID NO: 1693080 - RNA, 19 nt, Artificial Sequence
  Description of Artificial Sequence: Synthetic oligonucleotide
  Antisense strand to SEQ ID NO: 1693079
uuucaugagccaggagugc

SEQ ID NO: 1693081 - RNA, 19 nt, Artificial Sequence
  Description of Artificial Sequence: Synthetic oligonucleotide
  Sense strand starting at position 3923 of SEQ ID NO: 1561717
acuccuggcucaugaaaug

SEQ ID NO: 1693082 - RNA, 19 nt, Artificial Sequence
  Description of Artificial Sequence: Synthetic oligonucleotide
  Antisense strand to SEQ ID NO: 1693081
cauuucaugagccaggagu

SEQ ID NO: 1693083 - RNA, 19 nt, Artificial Sequence
  Description of Artificial Sequence: Synthetic oligonucleotide
  Sense strand starting at position 63 of SEQ ID NO: 1561718
cucaguggcaucuguaaga

SEQ ID NO: 1693084 - RNA, 19 nt, Artificial Sequence
  Description of Artificial Sequence: Synthetic oligonucleotide
  Antisense strand to SEQ ID NO: 1693083
ucuuacagaugccacugag

SEQ ID NO: 1693085 - RNA, 19 nt, Artificial Sequence
  Description of Artificial Sequence: Synthetic oligonucleotide
  Sense strand starting at position 537 of SEQ ID NO: 1561718
agcuucucccugugaggaa

SEQ ID NO: 1693086 - RNA, 19 nt, Artificial Sequence
  Description of Artificial Sequence: Synthetic oligonucleotide
  Antisense strand to SEQ ID NO: 1693085
uuccucacagggagaagcu

SEQ ID NO: 1693087 - RNA, 19 nt, Artificial Sequence
  Description of Artificial Sequence: Synthetic oligonucleotide
  Sense strand starting at position 538 of SEQ ID NO: 1561718
gcuucucccugugaggaaa

SEQ ID NO: 1693088 - RNA, 19 nt, Artificial Sequence
  Description of Artificial Sequence: Synthetic oligonucleotide
  Antisense strand to SEQ ID NO: 1693087
uuuccucacagggagaagc

SEQ ID NO: 1693089 - RNA, 19 nt, Artificial Sequence
  Description of Artificial Sequence: Synthetic oligonucleotide
  Sense strand starting at position 938 of SEQ ID NO: 1561718
gaggcacaauuguagaauu

SEQ ID NO: 1693090 - RNA, 19 nt, Artificial Sequence
  Description of Artificial Sequence: Synthetic oligonucleotide
  Antisense strand to SEQ ID NO: 1693089
aauucuacaauugugccuc

SEQ ID NO: 1693091 - RNA, 19 nt, Artificial Sequence
  Description of Artificial Sequence: Synthetic oligonucleotide
  Sense strand starting at position 983 of SEQ ID NO: 1561718
ccacaccaguccugagaua

SEQ ID NO: 1693092 - RNA, 19 nt, Artificial Sequence
  Description of Artificial Sequence: Synthetic oligonucleotide
  Antisense strand to SEQ ID NO: 1693091
uaucucaggacuggugugg

SEQ ID NO: 1693093 - RNA, 19 nt, Artificial Sequence
  Description of Artificial Sequence: Synthetic oligonucleotide
  Sense strand starting at position 1009 of SEQ ID NO: 1561718
gggacaucaucucaggacu

SEQ ID NO: 1693094 - RNA, 19 nt, Artificial Sequence
  Description of Artificial Sequence: Synthetic oligonucleotide
  Antisense strand to SEQ ID NO: 1693093
aguccugagaugauguccc

SEQ ID NO: 1693095 - RNA, 19 nt, Artificial Sequence
  Description of Artificial Sequence: Synthetic oligonucleotide
  Sense strand starting at position 1011 of SEQ ID NO: 1561718
gacaucaucucaggacuga

SEQ ID NO: 1693096 - RNA, 19 nt, Artificial Sequence
  Description of Artificial Sequence: Synthetic oligonucleotide
  Antisense strand to SEQ ID NO: 1693095
ucaguccugagaugauguc

SEQ ID NO: 1693097 - RNA, 19 nt, Artificial Sequence
  Description of Artificial Sequence: Synthetic oligonucleotide
  Sense strand starting at position 1202 of SEQ ID NO: 1561718
cggcauucuggguggagga

SEQ ID NO: 1693098 - RNA, 19 nt, Artificial Sequence
  Description of Artificial Sequence: Synthetic oligonucleotide
  Antisense strand to SEQ ID NO: 1693097
uccuccacccagaaugccg

SEQ ID NO: 1693099 - RNA, 19 nt, Artificial Sequence
  Description of Artificial Sequence: Synthetic oligonucleotide
  Sense strand starting at position 1599 of SEQ ID NO: 1561718
gccgcucuccucggugaga

SEQ ID NO: 1693100 - RNA, 19 nt, Artificial Sequence
  Description of Artificial Sequence: Synthetic oligonucleotide
  Antisense strand to SEQ ID NO: 1693099
ucucaccgaggagagcggc

SEQ ID NO: 1693101 - RNA, 19 nt, Artificial Sequence
  Description of Artificial Sequence: Synthetic oligonucleotide
  Sense strand starting at position 2264 of SEQ ID NO: 1561718
cgcagcuuugagcaagaga

SEQ ID NO: 1693102 - RNA, 19 nt, Artificial Sequence
  Description of Artificial Sequence: Synthetic oligonucleotide
  Antisense strand to SEQ ID NO: 1693101
ucucuugcucaaagcugcg

SEQ ID NO: 1693103 - RNA, 19 nt, Artificial Sequence
  Description of Artificial Sequence: Synthetic oligonucleotide
  Sense strand starting at position 2381 of SEQ ID NO: 1561718
gcgaguuuccgaagccgca

SEQ ID NO: 1693104 - RNA, 19 nt, Artificial Sequence
  Description of Artificial Sequence: Synthetic oligonucleotide
  Antisense strand to SEQ ID NO: 1693103
ugcggcuucggaaacucgc

SEQ ID NO: 1693105 - RNA, 19 nt, Artificial Sequence
  Description of Artificial Sequence: Synthetic oligonucleotide
  Sense strand starting at position 2981 of SEQ ID NO: 1561718
gggacucaugacuguugca

SEQ ID NO: 1693106 - RNA, 19 nt, Artificial Sequence
  Description of Artificial Sequence: Synthetic oligonucleotide
  Antisense strand to SEQ ID NO: 1693105
ugcaacagucaugaguccc

SEQ ID NO: 1693107 - RNA, 19 nt, Artificial Sequence
  Description of Artificial Sequence: Synthetic oligonucleotide
  Sense strand starting at position 2984 of SEQ ID NO: 1561718
acucaugacuguugcaaug

SEQ ID NO: 1693108 - RNA, 19 nt, Artificial Sequence
  Description of Artificial Sequence: Synthetic oligonucleotide
  Antisense strand to SEQ ID NO: 1693107
cauugcaacagucaugagu

SEQ ID NO: 1693109 - RNA, 19 nt, Artificial Sequence
  Description of Artificial Sequence: Synthetic oligonucleotide
  Sense strand starting at position 2993 of SEQ ID NO: 1561718
uguugcaaugcugugaguu

SEQ ID NO: 1693110 - RNA, 19 nt, Artificial Sequence
  Description of Artificial Sequence: Synthetic oligonucleotide
  Antisense strand to SEQ ID NO: 1693109
aacucacagcauugcaaca

SEQ ID NO: 1693111 - RNA, 19 nt, Artificial Sequence
  Description of Artificial Sequence: Synthetic oligonucleotide
  Sense strand starting at position 2994 of SEQ ID NO: 1561718
guugcaaugcugugaguua

SEQ ID NO: 1693112 - RNA, 19 nt, Artificial Sequence
  Description of Artificial Sequence: Synthetic oligonucleotide
  Antisense strand to SEQ ID NO: 1693111
uaacucacagcauugcaac

SEQ ID NO: 1693113 - RNA, 19 nt, Artificial Sequence
  Description of Artificial Sequence: Synthetic oligonucleotide
  Sense strand starting at position 3170 of SEQ ID NO: 1561718
aggccucaugucuaccaaa

SEQ ID NO: 1693114 - RNA, 19 nt, Artificial Sequence
  Description of Artificial Sequence: Synthetic oligonucleotide
  Antisense strand to SEQ ID NO: 1693113
uuugguagacaugaggccu

SEQ ID NO: 1693115 - RNA, 19 nt, Artificial Sequence
  Description of Artificial Sequence: Synthetic oligonucleotide
  Sense strand starting at position 3221 of SEQ ID NO: 1561718
gccuguaguccacgcuaca

SEQ ID NO: 1693116 - RNA, 19 nt, Artificial Sequence
  Description of Artificial Sequence: Synthetic oligonucleotide
  Antisense strand to SEQ ID NO: 1693115
uguagcguggacuacaggc

SEQ ID NO: 1693117 - RNA, 19 nt, Artificial Sequence
  Description of Artificial Sequence: Synthetic oligonucleotide
  Sense strand starting at position 3349 of SEQ ID NO: 1561718
aaauaauagugucgcucua

SEQ ID NO: 1693118 - RNA, 19 nt, Artificial Sequence
  Description of Artificial Sequence: Synthetic oligonucleotide
  Antisense strand to SEQ ID NO: 1693117
uagagcgacacuauuauuu

SEQ ID NO: 1693119 - RNA, 19 nt, Artificial Sequence
  Description of Artificial Sequence: Synthetic oligonucleotide
  Sense strand starting at position 3351 of SEQ ID NO: 1561718
auaauagugucgcucuaau

SEQ ID NO: 1693120 - RNA, 19 nt, Artificial Sequence
  Description of Artificial Sequence: Synthetic oligonucleotide
  Antisense strand to SEQ ID NO: 1693119
auuagagcgacacuauuau

SEQ ID NO: 1693121 - RNA, 19 nt, Artificial Sequence
  Description of Artificial Sequence: Synthetic oligonucleotide
  Sense strand starting at position 3366 of SEQ ID NO: 1561718
uaaucucucccgcggugaa

SEQ ID NO: 1693122 - RNA, 19 nt, Artificial Sequence
  Description of Artificial Sequence: Synthetic oligonucleotide
  Antisense strand to SEQ ID NO: 1693121
uucaccgcgggagagauua

SEQ ID NO: 1693123 - RNA, 19 nt, Artificial Sequence
  Description of Artificial Sequence: Synthetic oligonucleotide
  Sense strand starting at position 3450 of SEQ ID NO: 1561718
ugcgaauuccaucaggcga

SEQ ID NO: 1693124 - RNA, 19 nt, Artificial Sequence
  Description of Artificial Sequence: Synthetic oligonucleotide
  Antisense strand to SEQ ID NO: 1693123
ucgccugauggaauucgca

SEQ ID NO: 1693125 - RNA, 19 nt, Artificial Sequence
  Description of Artificial Sequence: Synthetic oligonucleotide
  Sense strand starting at position 3650 of SEQ ID NO: 1561718
auaaguccucccuaccagu

SEQ ID NO: 1693126 - RNA, 19 nt, Artificial Sequence
  Description of Artificial Sequence: Synthetic oligonucleotide
  Antisense strand to SEQ ID NO: 1693125
acugguagggaggacuuau

SEQ ID NO: 1693127 - RNA, 19 nt, Artificial Sequence
  Description of Artificial Sequence: Synthetic oligonucleotide
  Sense strand starting at position 247 of SEQ ID NO: 1561719
aaauguggcuugcaaauuu

SEQ ID NO: 1693128 - RNA, 19 nt, Artificial Sequence
  Description of Artificial Sequence: Synthetic oligonucleotide
  Antisense strand to SEQ ID NO: 1693127
aaauuugcaagccacauuu

SEQ ID NO: 1693129 - RNA, 19 nt, Artificial Sequence
  Description of Artificial Sequence: Synthetic oligonucleotide
  Sense strand starting at position 292 of SEQ ID NO: 1561719
ccuuccugucguuacaagu

SEQ ID NO: 1693130 - RNA, 19 nt, Artificial Sequence
  Description of Artificial Sequence: Synthetic oligonucleotide
  Antisense strand to SEQ ID NO: 1693129
acuuguaacgacaggaagg

SEQ ID NO: 1693131 - RNA, 19 nt, Artificial Sequence
  Description of Artificial Sequence: Synthetic oligonucleotide
  Sense strand starting at position 388 of SEQ ID NO: 1561719
gcgcuaccuccugggaagu

SEQ ID NO: 1693132 - RNA, 19 nt, Artificial Sequence
  Description of Artificial Sequence: Synthetic oligonucleotide
  Antisense strand to SEQ ID NO: 1693131
acuucccaggagguagcgc

SEQ ID NO: 1693133 - RNA, 19 nt, Artificial Sequence
  Description of Artificial Sequence: Synthetic oligonucleotide
  Sense strand starting at position 425 of SEQ ID NO: 1561719
auagauguaucuucccagu

SEQ ID NO: 1693134 - RNA, 19 nt, Artificial Sequence
  Description of Artificial Sequence: Synthetic oligonucleotide
  Antisense strand to SEQ ID NO: 1693133
acugggaagauacaucuau

SEQ ID NO: 1693135 - RNA, 19 nt, Artificial Sequence
  Description of Artificial Sequence: Synthetic oligonucleotide
  Sense strand starting at position 449 of SEQ ID NO: 1561719
ugagaagugucauucucac

SEQ ID NO: 1693136 - RNA, 19 nt, Artificial Sequence
  Description of Artificial Sequence: Synthetic oligonucleotide
  Antisense strand to SEQ ID NO: 1693135
gugagaaugacacuucuca

SEQ ID NO: 1693137 - RNA, 19 nt, Artificial Sequence
  Description of Artificial Sequence: Synthetic oligonucleotide
  Sense strand starting at position 455 of SEQ ID NO: 1561719
gugucauucucaccuauuu

SEQ ID NO: 1693138 - RNA, 19 nt, Artificial Sequence
  Description of Artificial Sequence: Synthetic oligonucleotide
  Antisense strand to SEQ ID NO: 1693137
aaauaggugagaaugacac

SEQ ID NO: 1693139 - RNA, 19 nt, Artificial Sequence
  Description of Artificial Sequence: Synthetic oligonucleotide
  Sense strand starting at position 518 of SEQ ID NO: 1561719
gcaggaugccuccaagacu

SEQ ID NO: 1693140 - RNA, 19 nt, Artificial Sequence
  Description of Artificial Sequence: Synthetic oligonucleotide
  Antisense strand to SEQ ID NO: 1693139
agucuuggaggcauccugc

SEQ ID NO: 1693141 - RNA, 19 nt, Artificial Sequence
  Description of Artificial Sequence: Synthetic oligonucleotide
  Sense strand starting at position 626 of SEQ ID NO: 1561719
uguauaagguuucuuucca

SEQ ID NO: 1693142 - RNA, 19 nt, Artificial Sequence
  Description of Artificial Sequence: Synthetic oligonucleotide
  Antisense strand to SEQ ID NO: 1693141
uggaaagaaaccuuauaca

SEQ ID NO: 1693143 - RNA, 19 nt, Artificial Sequence
  Description of Artificial Sequence: Synthetic oligonucleotide
  Sense strand starting at position 627 of SEQ ID NO: 1561719
guauaagguuucuuuccau

SEQ ID NO: 1693144 - RNA, 19 nt, Artificial Sequence
  Description of Artificial Sequence: Synthetic oligonucleotide
  Antisense strand to SEQ ID NO: 1693143
auggaaagaaaccuuauac

SEQ ID NO: 1693145 - RNA, 19 nt, Artificial Sequence
  Description of Artificial Sequence: Synthetic oligonucleotide
  Sense strand starting at position 633 of SEQ ID NO: 1561719
gguuucuuuccaugugaau

SEQ ID NO: 1693146 - RNA, 19 nt, Artificial Sequence
  Description of Artificial Sequence: Synthetic oligonucleotide
  Antisense strand to SEQ ID NO: 1693145
auucacauggaaagaaacc

SEQ ID NO: 1693147 - RNA, 19 nt, Artificial Sequence
  Description of Artificial Sequence: Synthetic oligonucleotide
  Sense strand starting at position 645 of SEQ ID NO: 1561719
ugugaaucccagugacucu

SEQ ID NO: 1693148 - RNA, 19 nt, Artificial Sequence
  Description of Artificial Sequence: Synthetic oligonucleotide
  Antisense strand to SEQ ID NO: 1693147
agagucacugggauucaca

SEQ ID NO: 1693149 - RNA, 19 nt, Artificial Sequence
  Description of Artificial Sequence: Synthetic oligonucleotide
  Sense strand starting at position 746 of SEQ ID NO: 1561719
ggcuauuacugacacucau

SEQ ID NO: 1693150 - RNA, 19 nt, Artificial Sequence
  Description of Artificial Sequence: Synthetic oligonucleotide
  Antisense strand to SEQ ID NO: 1693149
augagugucaguaauagcc

SEQ ID NO: 1693151 - RNA, 19 nt, Artificial Sequence
  Description of Artificial Sequence: Synthetic oligonucleotide
  Sense strand starting at position 763 of SEQ ID NO: 1561719
augucacacugagauguaa

SEQ ID NO: 1693152 - RNA, 19 nt, Artificial Sequence
  Description of Artificial Sequence: Synthetic oligonucleotide
  Antisense strand to SEQ ID NO: 1693151
uuacaucucagugugacau

SEQ ID NO: 1693153 - RNA, 19 nt, Artificial Sequence
  Description of Artificial Sequence: Synthetic oligonucleotide
  Sense strand starting at position 765 of SEQ ID NO: 1561719
gucacacugagauguaaga

SEQ ID NO: 1693154 - RNA, 19 nt, Artificial Sequence
  Description of Artificial Sequence: Synthetic oligonucleotide
  Antisense strand to SEQ ID NO: 1693153
ucuuacaucucagugugac

SEQ ID NO: 1693155 - RNA, 19 nt, Artificial Sequence
  Description of Artificial Sequence: Synthetic oligonucleotide
  Sense strand starting at position 1079 of SEQ ID NO: 1561719
cccuuaggccuccggagau

SEQ ID NO: 1693156 - RNA, 19 nt, Artificial Sequence
  Description of Artificial Sequence: Synthetic oligonucleotide
  Antisense strand to SEQ ID NO: 1693155
aucuccggaggccuaaggg

SEQ ID NO: 1693157 - RNA, 19 nt, Artificial Sequence
  Description of Artificial Sequence: Synthetic oligonucleotide
  Sense strand starting at position 1675 of SEQ ID NO: 1561719
ggcgcuuggccucucugaa

SEQ ID NO: 1693158 - RNA, 19 nt, Artificial Sequence
  Description of Artificial Sequence: Synthetic oligonucleotide
  Antisense strand to SEQ ID NO: 1693157
uucagagaggccaagcgcc

SEQ ID NO: 1693159 - RNA, 19 nt, Artificial Sequence
  Description of Artificial Sequence: Synthetic oligonucleotide
  Sense strand starting at position 1743 of SEQ ID NO: 1561719
gaguuaagccuccagaaau

SEQ ID NO: 1693160 - RNA, 19 nt, Artificial Sequence
  Description of Artificial Sequence: Synthetic oligonucleotide
  Antisense strand to SEQ ID NO: 1693159
auuucuggaggcuuaacuc

SEQ ID NO: 1693161 - RNA, 19 nt, Artificial Sequence
  Description of Artificial Sequence: Synthetic oligonucleotide
  Sense strand starting at position 1753 of SEQ ID NO: 1561719
uccagaaauguuuaacgca

SEQ ID NO: 1693162 - RNA, 19 nt, Artificial Sequence
  Description of Artificial Sequence: Synthetic oligonucleotide
  Antisense strand to SEQ ID NO: 1693161
ugcguuaaacauuucugga

SEQ ID NO: 1693163 - RNA, 19 nt, Artificial Sequence
  Description of Artificial Sequence: Synthetic oligonucleotide
  Sense strand starting at position 1833 of SEQ ID NO: 1561719
cuaugcacuccagagauau

SEQ ID NO: 1693164 - RNA, 19 nt, Artificial Sequence
  Description of Artificial Sequence: Synthetic oligonucleotide
  Antisense strand to SEQ ID NO: 1693163
auaucucuggagugcauag

SEQ ID NO: 1693165 - RNA, 19 nt, Artificial Sequence
  Description of Artificial Sequence: Synthetic oligonucleotide
  Sense strand starting at position 1846 of SEQ ID NO: 1561719
agauauuuauggcagccua

SEQ ID NO: 1693166 - RNA, 19 nt, Artificial Sequence
  Description of Artificial Sequence: Synthetic oligonucleotide
  Antisense strand to SEQ ID NO: 1693165
uaggcugccauaaauaucu

SEQ ID NO: 1693167 - RNA, 19 nt, Artificial Sequence
  Description of Artificial Sequence: Synthetic oligonucleotide
  Sense strand starting at position 1858 of SEQ ID NO: 1561719
cagccuacucgaugccaga

SEQ ID NO: 1693168 - RNA, 19 nt, Artificial Sequence
  Description of Artificial Sequence: Synthetic oligonucleotide
  Antisense strand to SEQ ID NO: 1693167
ucuggcaucgaguaggcug

SEQ ID NO: 1693169 - RNA, 19 nt, Artificial Sequence
  Description of Artificial Sequence: Synthetic oligonucleotide
  Sense strand starting at position 1941 of SEQ ID NO: 1561719
gagacuaggucucaaccuu

SEQ ID NO: 1693170 - RNA, 19 nt, Artificial Sequence
  Description of Artificial Sequence: Synthetic oligonucleotide
  Antisense strand to SEQ ID NO: 1693169
aagguugagaccuagucuc

SEQ ID NO: 1693171 - RNA, 19 nt, Artificial Sequence
  Description of Artificial Sequence: Synthetic oligonucleotide
  Sense strand starting at position 2091 of SEQ ID NO: 1561719
gaccuucuggaguggaaga

SEQ ID NO: 1693172 - RNA, 19 nt, Artificial Sequence
  Description of Artificial Sequence: Synthetic oligonucleotide
  Antisense strand to SEQ ID NO: 1693171
ucuuccacuccagaagguc

SEQ ID NO: 1693173 - RNA, 19 nt, Artificial Sequence
  Description of Artificial Sequence: Synthetic oligonucleotide
  Sense strand starting at position 2199 of SEQ ID NO: 1561719
uacugagaccgugaucauc

SEQ ID NO: 1693174 - RNA, 19 nt, Artificial Sequence
  Description of Artificial Sequence: Synthetic oligonucleotide
  Antisense strand to SEQ ID NO: 1693173
gaugaucacggucucagua

SEQ ID NO: 1693175 - RNA, 19 nt, Artificial Sequence
  Description of Artificial Sequence: Synthetic oligonucleotide
  Sense strand starting at position 2274 of SEQ ID NO: 1561719
caguucccaggugaauauu

SEQ ID NO: 1693176 - RNA, 19 nt, Artificial Sequence
  Description of Artificial Sequence: Synthetic oligonucleotide
  Antisense strand to SEQ ID NO: 1693175
aauauucaccugggaacug

SEQ ID NO: 1693177 - RNA, 19 nt, Artificial Sequence
  Description of Artificial Sequence: Synthetic oligonucleotide
  Sense strand starting at position 2283 of SEQ ID NO: 1561719
ggugaauauuacccuaauc

SEQ ID NO: 1693178 - RNA, 19 nt, Artificial Sequence
  Description of Artificial Sequence: Synthetic oligonucleotide
  Antisense strand to SEQ ID NO: 1693177
gauuaggguaauauucacc

SEQ ID NO: 1693179 - RNA, 19 nt, Artificial Sequence
  Description of Artificial Sequence: Synthetic oligonucleotide
  Sense strand starting at position 2336 of SEQ ID NO: 1561719
cccagaaucuaggaacuga

SEQ ID NO: 1693180 - RNA, 19 nt, Artificial Sequence
  Description of Artificial Sequence: Synthetic oligonucleotide
  Antisense strand to SEQ ID NO: 1693179
ucaguuccuagauucuggg

SEQ ID NO: 1693181 - RNA, 19 nt, Artificial Sequence
  Description of Artificial Sequence: Synthetic oligonucleotide
  Sense strand starting at position 2408 of SEQ ID NO: 1561719
agguaaugccgagaaaccu

SEQ ID NO: 1693182 - RNA, 19 nt, Artificial Sequence
  Description of Artificial Sequence: Synthetic oligonucleotide
  Antisense strand to SEQ ID NO: 1693181
agguuucucggcauuaccu

SEQ ID NO: 1693183 - RNA, 19 nt, Artificial Sequence
  Description of Artificial Sequence: Synthetic oligonucleotide
  Sense strand starting at position 2961 of SEQ ID NO: 1561719
uugagaucuugagaucgag

SEQ ID NO: 1693184 - RNA, 19 nt, Artificial Sequence
  Description of Artificial Sequence: Synthetic oligonucleotide
  Antisense strand to SEQ ID NO: 1693183
cucgaucucaagaucucaa

SEQ ID NO: 1693185 - RNA, 19 nt, Artificial Sequence
  Description of Artificial Sequence: Synthetic oligonucleotide
  Sense strand starting at position 2964 of SEQ ID NO: 1561719
agaucuugagaucgagacu

SEQ ID NO: 1693186 - RNA, 19 nt, Artificial Sequence
  Description of Artificial Sequence: Synthetic oligonucleotide
  Antisense strand to SEQ ID NO: 1693185
agucucgaucucaagaucu

SEQ ID NO: 1693187 - RNA, 19 nt, Artificial Sequence
  Description of Artificial Sequence: Synthetic oligonucleotide
  Sense strand starting at position 3100 of SEQ ID NO: 1561719
gggauuccacagugacaca

SEQ ID NO: 1693188 - RNA, 19 nt, Artificial Sequence
  Description of Artificial Sequence: Synthetic oligonucleotide
  Antisense strand to SEQ ID NO: 1693187
ugugucacuguggaauccc

SEQ ID NO: 1693189 - RNA, 19 nt, Artificial Sequence
  Description of Artificial Sequence: Synthetic oligonucleotide
  Sense strand starting at position 3189 of SEQ ID NO: 1561719
gugugaaaguauuaaggga

SEQ ID NO: 1693190 - RNA, 19 nt, Artificial Sequence
  Description of Artificial Sequence: Synthetic oligonucleotide
  Antisense strand to SEQ ID NO: 1693189
ucccuuaauacuuucacac

SEQ ID NO: 1693191 - RNA, 19 nt, Artificial Sequence
  Description of Artificial Sequence: Synthetic oligonucleotide
  Sense strand starting at position 3196 of SEQ ID NO: 1561719
aguauuaagggaugccaaa

SEQ ID NO: 1693192 - RNA, 19 nt, Artificial Sequence
  Description of Artificial Sequence: Synthetic oligonucleotide
  Antisense strand to SEQ ID NO: 1693191
uuuggcaucccuuaauacu

SEQ ID NO: 1693193 - RNA, 19 nt, Artificial Sequence
  Description of Artificial Sequence: Synthetic oligonucleotide
  Sense strand starting at position 3220 of SEQ ID NO: 1561719
ggaggugcuuugagaaugu

SEQ ID NO: 1693194 - RNA, 19 nt, Artificial Sequence
  Description of Artificial Sequence: Synthetic oligonucleotide
  Antisense strand to SEQ ID NO: 1693193
acauucucaaagcaccucc

SEQ ID NO: 1693195 - RNA, 19 nt, Artificial Sequence
  Description of Artificial Sequence: Synthetic oligonucleotide
  Sense strand starting at position 3224 of SEQ ID NO: 1561719
gugcuuugagaauguguac

SEQ ID NO: 1693196 - RNA, 19 nt, Artificial Sequence
  Description of Artificial Sequence: Synthetic oligonucleotide
  Antisense strand to SEQ ID NO: 1693195
guacacauucucaaagcac

SEQ ID NO: 1693197 - RNA, 19 nt, Artificial Sequence
  Description of Artificial Sequence: Synthetic oligonucleotide
  Sense strand starting at position 3275 of SEQ ID NO: 1561719
agaauaaaccuucggguga

SEQ ID NO: 1693198 - RNA, 19 nt, Artificial Sequence
  Description of Artificial Sequence: Synthetic oligonucleotide
  Antisense strand to SEQ ID NO: 1693197
ucacccgaagguuuauucu

SEQ ID NO: 1693199 - RNA, 19 nt, Artificial Sequence
  Description of Artificial Sequence: Synthetic oligonucleotide
  Sense strand starting at position 3279 of SEQ ID NO: 1561719
uaaaccuucgggugacaaa

SEQ ID NO: 1693200 - RNA, 19 nt, Artificial Sequence
  Description of Artificial Sequence: Synthetic oligonucleotide
  Antisense strand to SEQ ID NO: 1693199
uuugucacccgaagguuua

SEQ ID NO: 1693201 - RNA, 19 nt, Artificial Sequence
  Description of Artificial Sequence: Synthetic oligonucleotide
  Sense strand starting at position 3318 of SEQ ID NO: 1561719
cuacucaccgugcaagaau

SEQ ID NO: 1693202 - RNA, 19 nt, Artificial Sequence
  Description of Artificial Sequence: Synthetic oligonucleotide
  Antisense strand to SEQ ID NO: 1693201
auucuugcacggugaguag

SEQ ID NO: 1693203 - RNA, 19 nt, Artificial Sequence
  Description of Artificial Sequence: Synthetic oligonucleotide
  Sense strand starting at position 3815 of SEQ ID NO: 1561719
uuugucuucuuacuagaga

SEQ ID NO: 1693204 - RNA, 19 nt, Artificial Sequence
  Description of Artificial Sequence: Synthetic oligonucleotide
  Antisense strand to SEQ ID NO: 1693203
ucucuaguaagaagacaaa

SEQ ID NO: 1693205 - RNA, 19 nt, Artificial Sequence
  Description of Artificial Sequence: Synthetic oligonucleotide
  Sense strand starting at position 3822 of SEQ ID NO: 1561719
ucuuacuagagauggguuu

SEQ ID NO: 1693206 - RNA, 19 nt, Artificial Sequence
  Description of Artificial Sequence: Synthetic oligonucleotide
  Antisense strand to SEQ ID NO: 1693205
aaacccaucucuaguaaga

SEQ ID NO: 1693207 - RNA, 19 nt, Artificial Sequence
  Description of Artificial Sequence: Synthetic oligonucleotide
  Sense strand starting at position 381 of SEQ ID NO: 1561720
uuuguuauucuccaugggu

SEQ ID NO: 1693208 - RNA, 19 nt, Artificial Sequence
  Description of Artificial Sequence: Synthetic oligonucleotide
  Antisense strand to SEQ ID NO: 1693207
acccauggagaauaacaaa

SEQ ID NO: 1693209 - RNA, 19 nt, Artificial Sequence
  Description of Artificial Sequence: Synthetic oligonucleotide
  Sense strand starting at position 383 of SEQ ID NO: 1561720
uguuauucuccauggguca

SEQ ID NO: 1693210 - RNA, 19 nt, Artificial Sequence
  Description of Artificial Sequence: Synthetic oligonucleotide
  Antisense strand to SEQ ID NO: 1693209
ugacccauggagaauaaca

SEQ ID NO: 1693211 - RNA, 19 nt, Artificial Sequence
  Description of Artificial Sequence: Synthetic oligonucleotide
  Sense strand starting at position 412 of SEQ ID NO: 1561720
ucugcuaucuggcugaagu

SEQ ID NO: 1693212 - RNA, 19 nt, Artificial Sequence
  Description of Artificial Sequence: Synthetic oligonucleotide
  Antisense strand to SEQ ID NO: 1693211
acuucagccagauagcaga

SEQ ID NO: 1693213 - RNA, 19 nt, Artificial Sequence
  Description of Artificial Sequence: Synthetic oligonucleotide
  Sense strand starting at position 413 of SEQ ID NO: 1561720
cugcuaucuggcugaaguc

SEQ ID NO: 1693214 - RNA, 19 nt, Artificial Sequence
  Description of Artificial Sequence: Synthetic oligonucleotide
  Antisense strand to SEQ ID NO: 1693213
gacuucagccagauagcag

SEQ ID NO: 1693215 - RNA, 19 nt, Artificial Sequence
  Description of Artificial Sequence: Synthetic oligonucleotide
  Sense strand starting at position 423 of SEQ ID NO: 1561720
gcugaagucucuccuacuu

SEQ ID NO: 1693216 - RNA, 19 nt, Artificial Sequence
  Description of Artificial Sequence: Synthetic oligonucleotide
  Antisense strand to SEQ ID NO: 1693215
aaguaggagagacuucagc

SEQ ID NO: 1693217 - RNA, 19 nt, Artificial Sequence
  Description of Artificial Sequence: Synthetic oligonucleotide
  Sense strand starting at position 441 of SEQ ID NO: 1561720
uuaggucucuuucuucuua

SEQ ID NO: 1693218 - RNA, 19 nt, Artificial Sequence
  Description of Artificial Sequence: Synthetic oligonucleotide
  Antisense strand to SEQ ID NO: 1693217
uaagaagaaagagaccuaa

SEQ ID NO: 1693219 - RNA, 19 nt, Artificial Sequence
  Description of Artificial Sequence: Synthetic oligonucleotide
  Sense strand starting at position 666 of SEQ ID NO: 1561720
gaacaugggaaguguggua

SEQ ID NO: 1693220 - RNA, 19 nt, Artificial Sequence
  Description of Artificial Sequence: Synthetic oligonucleotide
  Antisense strand to SEQ ID NO: 1693219
uaccacacuucccauguuc

SEQ ID NO: 1693221 - RNA, 19 nt, Artificial Sequence
  Description of Artificial Sequence: Synthetic oligonucleotide
  Sense strand starting at position 877 of SEQ ID NO: 1561720
ggcgugaagguauagauga

SEQ ID NO: 1693222 - RNA, 19 nt, Artificial Sequence
  Description of Artificial Sequence: Synthetic oligonucleotide
  Antisense strand to SEQ ID NO: 1693221
ucaucuauaccuucacgcc

SEQ ID NO: 1693223 - RNA, 19 nt, Artificial Sequence
  Description of Artificial Sequence: Synthetic oligonucleotide
  Sense strand starting at position 879 of SEQ ID NO: 1561720
cgugaagguauagaugagu

SEQ ID NO: 1693224 - RNA, 19 nt, Artificial Sequence
  Description of Artificial Sequence: Synthetic oligonucleotide
  Antisense strand to SEQ ID NO: 1693223
acucaucuauaccuucacg

SEQ ID NO: 1693225 - RNA, 19 nt, Artificial Sequence
  Description of Artificial Sequence: Synthetic oligonucleotide
  Sense strand starting at position 1140 of SEQ ID NO: 1561720
gucugaagaguuugaggcu

SEQ ID NO: 1693226 - RNA, 19 nt, Artificial Sequence
  Description of Artificial Sequence: Synthetic oligonucleotide
  Antisense strand to SEQ ID NO: 1693225
agccucaaacucuucagac

SEQ ID NO: 1693227 - RNA, 19 nt, Artificial Sequence
  Description of Artificial Sequence: Synthetic oligonucleotide
  Sense strand starting at position 1186 of SEQ ID NO: 1561720
agcucagucuggccagauu

SEQ ID NO: 1693228 - RNA, 19 nt, Artificial Sequence
  Description of Artificial Sequence: Synthetic oligonucleotide
  Antisense strand to SEQ ID NO: 1693227
aaucuggccagacugagcu

SEQ ID NO: 1693229 - RNA, 19 nt, Artificial Sequence
  Description of Artificial Sequence: Synthetic oligonucleotide
  Sense strand starting at position 1264 of SEQ ID NO: 1561720
gggagcaguucuugagucu

SEQ ID NO: 1693230 - RNA, 19 nt, Artificial Sequence
  Description of Artificial Sequence: Synthetic oligonucleotide
  Antisense strand to SEQ ID NO: 1693229
agacucaagaacugcuccc

SEQ ID NO: 1693231 - RNA, 19 nt, Artificial Sequence
  Description of Artificial Sequence: Synthetic oligonucleotide
  Sense strand starting at position 1509 of SEQ ID NO: 1561720
gggacuuaacugggucaga

SEQ ID NO: 1693232 - RNA, 19 nt, Artificial Sequence
  Description of Artificial Sequence: Synthetic oligonucleotide
  Antisense strand to SEQ ID NO: 1693231
ucugacccaguuaaguccc

SEQ ID NO: 1693233 - RNA, 19 nt, Artificial Sequence
  Description of Artificial Sequence: Synthetic oligonucleotide
  Sense strand starting at position 1614 of SEQ ID NO: 1561720
gggcacacuacaggugaua

SEQ ID NO: 1693234 - RNA, 19 nt, Artificial Sequence
  Description of Artificial Sequence: Synthetic oligonucleotide
  Antisense strand to SEQ ID NO: 1693233
uaucaccuguagugugccc

SEQ ID NO: 1693235 - RNA, 19 nt, Artificial Sequence
  Description of Artificial Sequence: Synthetic oligonucleotide
  Sense strand starting at position 1669 of SEQ ID NO: 1561720
ggcuccggccagugauuau

SEQ ID NO: 1693236 - RNA, 19 nt, Artificial Sequence
  Description of Artificial Sequence: Synthetic oligonucleotide
  Antisense strand to SEQ ID NO: 1693235
auaaucacuggccggagcc

SEQ ID NO: 1693237 - RNA, 19 nt, Artificial Sequence
  Description of Artificial Sequence: Synthetic oligonucleotide
  Sense strand starting at position 1673 of SEQ ID NO: 1561720
ccggccagugauuaugauu

SEQ ID NO: 1693238 - RNA, 19 nt, Artificial Sequence
  Description of Artificial Sequence: Synthetic oligonucleotide
  Antisense strand to SEQ ID NO: 1693237
aaucauaaucacuggccgg

SEQ ID NO: 1693239 - RNA, 19 nt, Artificial Sequence
  Description of Artificial Sequence: Synthetic oligonucleotide
  Sense strand starting at position 1676 of SEQ ID NO: 1561720
gccagugauuaugauuagu

SEQ ID NO: 1693240 - RNA, 19 nt, Artificial Sequence
  Description of Artificial Sequence: Synthetic oligonucleotide
  Antisense strand to SEQ ID NO: 1693239
acuaaucauaaucacuggc

SEQ ID NO: 1693241 - RNA, 19 nt, Artificial Sequence
  Description of Artificial Sequence: Synthetic oligonucleotide
  Sense strand starting at position 1697 of SEQ ID NO: 1561720
gugggagagcuccacauau

SEQ ID NO: 1693242 - RNA, 19 nt, Artificial Sequence
  Description of Artificial Sequence: Synthetic oligonucleotide
  Antisense strand to SEQ ID NO: 1693241
auauguggagcucucccac

SEQ ID NO: 1693243 - RNA, 19 nt, Artificial Sequence
  Description of Artificial Sequence: Synthetic oligonucleotide
  Sense strand starting at position 3628 of SEQ ID NO: 1561720
auugcauacuuguuuacca

SEQ ID NO: 1693244 - RNA, 19 nt, Artificial Sequence
  Description of Artificial Sequence: Synthetic oligonucleotide
  Antisense strand to SEQ ID NO: 1693243
ugguaaacaaguaugcaau

SEQ ID NO: 1693245 - RNA, 19 nt, Artificial Sequence
  Description of Artificial Sequence: Synthetic oligonucleotide
  Sense strand starting at position 3633 of SEQ ID NO: 1561720
auacuuguuuaccaggaua

SEQ ID NO: 1693246 - RNA, 19 nt, Artificial Sequence
  Description of Artificial Sequence: Synthetic oligonucleotide
  Antisense strand to SEQ ID NO: 1693245
uauccugguaaacaaguau

SEQ ID NO: 1693247 - RNA, 19 nt, Artificial Sequence
  Description of Artificial Sequence: Synthetic oligonucleotide
  Sense strand starting at position 3635 of SEQ ID NO: 1561720
acuuguuuaccaggauaaa

SEQ ID NO: 1693248 - RNA, 19 nt, Artificial Sequence
  Description of Artificial Sequence: Synthetic oligonucleotide
  Antisense strand to SEQ ID NO: 1693247
uuuauccugguaaacaagu

SEQ ID NO: 1693249 - RNA, 19 nt, Artificial Sequence
  Description of Artificial Sequence: Synthetic oligonucleotide
  Sense strand starting at position 3638 of SEQ ID NO: 1561720
uguuuaccaggauaaaugu

SEQ ID NO: 1693250 - RNA, 19 nt, Artificial Sequence
  Description of Artificial Sequence: Synthetic oligonucleotide
  Antisense strand to SEQ ID NO: 1693249
acauuuauccugguaaaca

SEQ ID NO: 1693251 - RNA, 19 nt, Artificial Sequence
  Description of Artificial Sequence: Synthetic oligonucleotide
  Sense strand starting at position 3706 of SEQ ID NO: 1561720
ggcuuacaauucuguucua

SEQ ID NO: 1693252 - RNA, 19 nt, Artificial Sequence
  Description of Artificial Sequence: Synthetic oligonucleotide
  Antisense strand to SEQ ID NO: 1693251
uagaacagaauuguaagcc

SEQ ID NO: 1693253 - RNA, 19 nt, Artificial Sequence
  Description of Artificial Sequence: Synthetic oligonucleotide
  Sense strand starting at position 3715 of SEQ ID NO: 1561720
uucuguucuaggcagagga

SEQ ID NO: 1693254 - RNA, 19 nt, Artificial Sequence
  Description of Artificial Sequence: Synthetic oligonucleotide
  Antisense strand to SEQ ID NO: 1693253
uccucugccuagaacagaa

SEQ ID NO: 1693255 - RNA, 19 nt, Artificial Sequence
  Description of Artificial Sequence: Synthetic oligonucleotide
  Sense strand starting at position 103 of SEQ ID NO: 1561721
guauaaacacgccaaacau

SEQ ID NO: 1693256 - RNA, 19 nt, Artificial Sequence
  Description of Artificial Sequence: Synthetic oligonucleotide
  Antisense strand to SEQ ID NO: 1693255
auguuuggcguguuuauac

SEQ ID NO: 1693257 - RNA, 19 nt, Artificial Sequence
  Description of Artificial Sequence: Synthetic oligonucleotide
  Sense strand starting at position 163 of SEQ ID NO: 1561721
cuguaacaguucuucccaa

SEQ ID NO: 1693258 - RNA, 19 nt, Artificial Sequence
  Description of Artificial Sequence: Synthetic oligonucleotide
  Antisense strand to SEQ ID NO: 1693257
uugggaagaacuguuacag

SEQ ID NO: 1693259 - RNA, 19 nt, Artificial Sequence
  Description of Artificial Sequence: Synthetic oligonucleotide
  Sense strand starting at position 282 of SEQ ID NO: 1561721
cuuguauuguaguucuaua

SEQ ID NO: 1693260 - RNA, 19 nt, Artificial Sequence
  Description of Artificial Sequence: Synthetic oligonucleotide
  Antisense strand to SEQ ID NO: 1693259
uauagaacuacaauacaag

SEQ ID NO: 1693261 - RNA, 19 nt, Artificial Sequence
  Description of Artificial Sequence: Synthetic oligonucleotide
  Sense strand starting at position 318 of SEQ ID NO: 1561721
ucccuauguguccagacuu

SEQ ID NO: 1693262 - RNA, 19 nt, Artificial Sequence
  Description of Artificial Sequence: Synthetic oligonucleotide
  Antisense strand to SEQ ID NO: 1693261
aagucuggacacauaggga

SEQ ID NO: 1693263 - RNA, 19 nt, Artificial Sequence
  Description of Artificial Sequence: Synthetic oligonucleotide
  Sense strand starting at position 351 of SEQ ID NO: 1561721
gacugcaaaugcucugaga

SEQ ID NO: 1693264 - RNA, 19 nt, Artificial Sequence
  Description of Artificial Sequence: Synthetic oligonucleotide
  Antisense strand to SEQ ID NO: 1693263
ucucagagcauuugcaguc

SEQ ID NO: 1693265 - RNA, 19 nt, Artificial Sequence
  Description of Artificial Sequence: Synthetic oligonucleotide
  Sense strand starting at position 353 of SEQ ID NO: 1561721
cugcaaaugcucugagaug

SEQ ID NO: 1693266 - RNA, 19 nt, Artificial Sequence
  Description of Artificial Sequence: Synthetic oligonucleotide
  Antisense strand to SEQ ID NO: 1693265
caucucagagcauuugcag

SEQ ID NO: 1693267 - RNA, 19 nt, Artificial Sequence
  Description of Artificial Sequence: Synthetic oligonucleotide
  Sense strand starting at position 404 of SEQ ID NO: 1561721
agacaauucuuguugcuaa

SEQ ID NO: 1693268 - RNA, 19 nt, Artificial Sequence
  Description of Artificial Sequence: Synthetic oligonucleotide
  Antisense strand to SEQ ID NO: 1693267
uuagcaacaagaauugucu

SEQ ID NO: 1693269 - RNA, 19 nt, Artificial Sequence
  Description of Artificial Sequence: Synthetic oligonucleotide
  Sense strand starting at position 545 of SEQ ID NO: 1561721
guggguuauacugacucua

SEQ ID NO: 1693270 - RNA, 19 nt, Artificial Sequence
  Description of Artificial Sequence: Synthetic oligonucleotide
  Antisense strand to SEQ ID NO: 1693269
uagagucaguauaacccac

SEQ ID NO: 1693271 - RNA, 19 nt, Artificial Sequence
  Description of Artificial Sequence: Synthetic oligonucleotide
  Sense strand starting at position 547 of SEQ ID NO: 1561721
ggguuauacugacucuauu

SEQ ID NO: 1693272 - RNA, 19 nt, Artificial Sequence
  Description of Artificial Sequence: Synthetic oligonucleotide
  Antisense strand to SEQ ID NO: 1693271
aauagagucaguauaaccc

SEQ ID NO: 1693273 - RNA, 19 nt, Artificial Sequence
  Description of Artificial Sequence: Synthetic oligonucleotide
  Sense strand starting at position 610 of SEQ ID NO: 1561721
uuagguuaucucugagaau

SEQ ID NO: 1693274 - RNA, 19 nt, Artificial Sequence
  Description of Artificial Sequence: Synthetic oligonucleotide
  Antisense strand to SEQ ID NO: 1693273
auucucagagauaaccuaa

SEQ ID NO: 1693275 - RNA, 19 nt, Artificial Sequence
  Description of Artificial Sequence: Synthetic oligonucleotide
  Sense strand starting at position 673 of SEQ ID NO: 1561721
cugcaauucucagcaugac

SEQ ID NO: 1693276 - RNA, 19 nt, Artificial Sequence
  Description of Artificial Sequence: Synthetic oligonucleotide
  Antisense strand to SEQ ID NO: 1693275
gucaugcugagaauugcag

SEQ ID NO: 1693277 - RNA, 19 nt, Artificial Sequence
  Description of Artificial Sequence: Synthetic oligonucleotide
  Sense strand starting at position 674 of SEQ ID NO: 1561721
ugcaauucucagcaugaca

SEQ ID NO: 1693278 - RNA, 19 nt, Artificial Sequence
  Description of Artificial Sequence: Synthetic oligonucleotide
  Antisense strand to SEQ ID NO: 1693277
ugucaugcugagaauugca

SEQ ID NO: 1693279 - RNA, 19 nt, Artificial Sequence
  Description of Artificial Sequence: Synthetic oligonucleotide
  Sense strand starting at position 702 of SEQ ID NO: 1561721
ugaguaaauguuuagcacu

SEQ ID NO: 1693280 - RNA, 19 nt, Artificial Sequence
  Description of Artificial Sequence: Synthetic oligonucleotide
  Antisense strand to SEQ ID NO: 1693279
agugcuaaacauuuacuca

SEQ ID NO: 1693281 - RNA, 19 nt, Artificial Sequence
  Description of Artificial Sequence: Synthetic oligonucleotide
  Sense strand starting at position 704 of SEQ ID NO: 1561721
aguaaauguuuagcacuua

SEQ ID NO: 1693282 - RNA, 19 nt, Artificial Sequence
  Description of Artificial Sequence: Synthetic oligonucleotide
  Antisense strand to SEQ ID NO: 1693281
uaagugcuaaacauuuacu

SEQ ID NO: 1693283 - RNA, 19 nt, Artificial Sequence
  Description of Artificial Sequence: Synthetic oligonucleotide
  Sense strand starting at position 853 of SEQ ID NO: 1561721
accuguagauccucaaagu

SEQ ID NO: 1693284 - RNA, 19 nt, Artificial Sequence
  Description of Artificial Sequence: Synthetic oligonucleotide
  Antisense strand to SEQ ID NO: 1693283
acuuugaggaucuacaggu

SEQ ID NO: 1693285 - RNA, 19 nt, Artificial Sequence
  Description of Artificial Sequence: Synthetic oligonucleotide
  Sense strand starting at position 973 of SEQ ID NO: 1561721
uggaucucguccuccugaa

SEQ ID NO: 1693286 - RNA, 19 nt, Artificial Sequence
  Description of Artificial Sequence: Synthetic oligonucleotide
  Antisense strand to SEQ ID NO: 1693285
uucaggaggacgagaucca

SEQ ID NO: 1693287 - RNA, 19 nt, Artificial Sequence
  Description of Artificial Sequence: Synthetic oligonucleotide
  Sense strand starting at position 1008 of SEQ ID NO: 1561721
ucccgagggagccguaaau

SEQ ID NO: 1693288 - RNA, 19 nt, Artificial Sequence
  Description of Artificial Sequence: Synthetic oligonucleotide
  Antisense strand to SEQ ID NO: 1693287
auuuacggcucccucggga

SEQ ID NO: 1693289 - RNA, 19 nt, Artificial Sequence
  Description of Artificial Sequence: Synthetic oligonucleotide
  Sense strand starting at position 1010 of SEQ ID NO: 1561721
ccgagggagccguaaaugu

SEQ ID NO: 1693290 - RNA, 19 nt, Artificial Sequence
  Description of Artificial Sequence: Synthetic oligonucleotide
  Antisense strand to SEQ ID NO: 1693289
acauuuacggcucccucgg

SEQ ID NO: 1693291 - RNA, 19 nt, Artificial Sequence
  Description of Artificial Sequence: Synthetic oligonucleotide
  Sense strand starting at position 1018 of SEQ ID NO: 1561721
gccguaaaugugcugcuca

SEQ ID NO: 1693292 - RNA, 19 nt, Artificial Sequence
  Description of Artificial Sequence: Synthetic oligonucleotide
  Antisense strand to SEQ ID NO: 1693291
ugagcagcacauuuacggc

SEQ ID NO: 1693293 - RNA, 19 nt, Artificial Sequence
  Description of Artificial Sequence: Synthetic oligonucleotide
  Sense strand starting at position 1020 of SEQ ID NO: 1561721
cguaaaugugcugcucaca

SEQ ID NO: 1693294 - RNA, 19 nt, Artificial Sequence
  Description of Artificial Sequence: Synthetic oligonucleotide
  Antisense strand to SEQ ID NO: 1693293
ugugagcagcacauuuacg

SEQ ID NO: 1693295 - RNA, 19 nt, Artificial Sequence
  Description of Artificial Sequence: Synthetic oligonucleotide
  Sense strand starting at position 1158 of SEQ ID NO: 1561721
cugcuacacccucgaguaa

SEQ ID NO: 1693296 - RNA, 19 nt, Artificial Sequence
  Description of Artificial Sequence: Synthetic oligonucleotide
  Antisense strand to SEQ ID NO: 1693295
uuacucgaggguguagcag

SEQ ID NO: 1693297 - RNA, 19 nt, Artificial Sequence
  Description of Artificial Sequence: Synthetic oligonucleotide
  Sense strand starting at position 1159 of SEQ ID NO: 1561721
ugcuacacccucgaguaaa

SEQ ID NO: 1693298 - RNA, 19 nt, Artificial Sequence
  Description of Artificial Sequence: Synthetic oligonucleotide
  Antisense strand to SEQ ID NO: 1693297
uuuacucgaggguguagca

SEQ ID NO: 1693299 - RNA, 19 nt, Artificial Sequence
  Description of Artificial Sequence: Synthetic oligonucleotide
  Sense strand starting at position 1253 of SEQ ID NO: 1561721
ugugacacuuccuuucuga

SEQ ID NO: 1693300 - RNA, 19 nt, Artificial Sequence
  Description of Artificial Sequence: Synthetic oligonucleotide
  Antisense strand to SEQ ID NO: 1693299
ucagaaaggaagugucaca

SEQ ID NO: 1693301 - RNA, 19 nt, Artificial Sequence
  Description of Artificial Sequence: Synthetic oligonucleotide
  Sense strand starting at position 1370 of SEQ ID NO: 1561721
gaaggaguguccucacuac

SEQ ID NO: 1693302 - RNA, 19 nt, Artificial Sequence
  Description of Artificial Sequence: Synthetic oligonucleotide
  Antisense strand to SEQ ID NO: 1693301
guagugaggacacuccuuc

SEQ ID NO: 1693303 - RNA, 19 nt, Artificial Sequence
  Description of Artificial Sequence: Synthetic oligonucleotide
  Sense strand starting at position 1374 of SEQ ID NO: 1561721
gaguguccucacuacgauu

SEQ ID NO: 1693304 - RNA, 19 nt, Artificial Sequence
  Description of Artificial Sequence: Synthetic oligonucleotide
  Antisense strand to SEQ ID NO: 1693303
aaucguagugaggacacuc

SEQ ID NO: 1693305 - RNA, 19 nt, Artificial Sequence
  Description of Artificial Sequence: Synthetic oligonucleotide
  Sense strand starting at position 1376 of SEQ ID NO: 1561721
guguccucacuacgauuau

SEQ ID NO: 1693306 - RNA, 19 nt, Artificial Sequence
  Description of Artificial Sequence: Synthetic oligonucleotide
  Antisense strand to SEQ ID NO: 1693305
auaaucguagugaggacac

SEQ ID NO: 1693307 - RNA, 19 nt, Artificial Sequence
  Description of Artificial Sequence: Synthetic oligonucleotide
  Sense strand starting at position 1408 of SEQ ID NO: 1561721
ggcacagagauguaguuau

SEQ ID NO: 1693308 - RNA, 19 nt, Artificial Sequence
  Description of Artificial Sequence: Synthetic oligonucleotide
  Antisense strand to SEQ ID NO: 1693307
auaacuacaucucugugcc

SEQ ID NO: 1693309 - RNA, 19 nt, Artificial Sequence
  Description of Artificial Sequence: Synthetic oligonucleotide
  Sense strand starting at position 2038 of SEQ ID NO: 1561721
ggcgaucucccggaaguua

SEQ ID NO: 1693310 - RNA, 19 nt, Artificial Sequence
  Description of Artificial Sequence: Synthetic oligonucleotide
  Antisense strand to SEQ ID NO: 1693309
uaacuuccgggagaucgcc

SEQ ID NO: 1693311 - RNA, 19 nt, Artificial Sequence
  Description of Artificial Sequence: Synthetic oligonucleotide
  Sense strand starting at position 2151 of SEQ ID NO: 1561721
ggguaugagugucuagcuu

SEQ ID NO: 1693312 - RNA, 19 nt, Artificial Sequence
  Description of Artificial Sequence: Synthetic oligonucleotide
  Antisense strand to SEQ ID NO: 1693311
aagcuagacacucauaccc

SEQ ID NO: 1693313 - RNA, 19 nt, Artificial Sequence
  Description of Artificial Sequence: Synthetic oligonucleotide
  Sense strand starting at position 2178 of SEQ ID NO: 1561721
acugcaagacugugcaaau

SEQ ID NO: 1693314 - RNA, 19 nt, Artificial Sequence
  Description of Artificial Sequence: Synthetic oligonucleotide
  Antisense strand to SEQ ID NO: 1693313
auuugcacagucuugcagu

SEQ ID NO: 1693315 - RNA, 19 nt, Artificial Sequence
  Description of Artificial Sequence: Synthetic oligonucleotide
  Sense strand starting at position 2179 of SEQ ID NO: 1561721
cugcaagacugugcaaauu

SEQ ID NO: 1693316 - RNA, 19 nt, Artificial Sequence
  Description of Artificial Sequence: Synthetic oligonucleotide
  Antisense strand to SEQ ID NO: 1693315
aauuugcacagucuugcag

SEQ ID NO: 1693317 - RNA, 19 nt, Artificial Sequence
  Description of Artificial Sequence: Synthetic oligonucleotide
  Sense strand starting at position 2209 of SEQ ID NO: 1561721
uccaguuuccgcggaagga

SEQ ID NO: 1693318 - RNA, 19 nt, Artificial Sequence
  Description of Artificial Sequence: Synthetic oligonucleotide
  Antisense strand to SEQ ID NO: 1693317
uccuuccgcggaaacugga

SEQ ID NO: 1693319 - RNA, 19 nt, Artificial Sequence
  Description of Artificial Sequence: Synthetic oligonucleotide
  Sense strand starting at position 2222 of SEQ ID NO: 1561721
gaaggagcgaauugugcuu

SEQ ID NO: 1693320 - RNA, 19 nt, Artificial Sequence
  Description of Artificial Sequence: Synthetic oligonucleotide
  Antisense strand to SEQ ID NO: 1693319
aagcacaauucgcuccuuc

SEQ ID NO: 1693321 - RNA, 19 nt, Artificial Sequence
  Description of Artificial Sequence: Synthetic oligonucleotide
  Sense strand starting at position 2234 of SEQ ID NO: 1561721
ugugcuuaccucuaaguuu

SEQ ID NO: 1693322 - RNA, 19 nt, Artificial Sequence
  Description of Artificial Sequence: Synthetic oligonucleotide
  Antisense strand to SEQ ID NO: 1693321
aaacuuagagguaagcaca

SEQ ID NO: 1693323 - RNA, 19 nt, Artificial Sequence
  Description of Artificial Sequence: Synthetic oligonucleotide
  Sense strand starting at position 2273 of SEQ ID NO: 1561721
caacgugguggcuaguuau

SEQ ID NO: 1693324 - RNA, 19 nt, Artificial Sequence
  Description of Artificial Sequence: Synthetic oligonucleotide
  Antisense strand to SEQ ID NO: 1693323
auaacuagccaccacguug

SEQ ID NO: 1693325 - RNA, 19 nt, Artificial Sequence
  Description of Artificial Sequence: Synthetic oligonucleotide
  Sense strand starting at position 2279 of SEQ ID NO: 1561721
gguggcuaguuauuauauc

SEQ ID NO: 1693326 - RNA, 19 nt, Artificial Sequence
  Description of Artificial Sequence: Synthetic oligonucleotide
  Antisense strand to SEQ ID NO: 1693325
gauauaauaacuagccacc

SEQ ID NO: 1693327 - RNA, 19 nt, Artificial Sequence
  Description of Artificial Sequence: Synthetic oligonucleotide
  Sense strand starting at position 3550 of SEQ ID NO: 1561721
ggcuuaagucuguaguccu

SEQ ID NO: 1693328 - RNA, 19 nt, Artificial Sequence
  Description of Artificial Sequence: Synthetic oligonucleotide
  Antisense strand to SEQ ID NO: 1693327
aggacuacagacuuaagcc

SEQ ID NO: 1693329 - RNA, 19 nt, Artificial Sequence
  Description of Artificial Sequence: Synthetic oligonucleotide
  Sense strand starting at position 3646 of SEQ ID NO: 1561721
ugcacuuuagcucagguaa

SEQ ID NO: 1693330 - RNA, 19 nt, Artificial Sequence
  Description of Artificial Sequence: Synthetic oligonucleotide
  Antisense strand to SEQ ID NO: 1693329
uuaccugagcuaaagugca

SEQ ID NO: 1693331 - RNA, 19 nt, Artificial Sequence
  Description of Artificial Sequence: Synthetic oligonucleotide
  Sense strand starting at position 3846 of SEQ ID NO: 1561721
guuugcucuguguagguaa

SEQ ID NO: 1693332 - RNA, 19 nt, Artificial Sequence
  Description of Artificial Sequence: Synthetic oligonucleotide
  Antisense strand to SEQ ID NO: 1693331
uuaccuacacagagcaaac

SEQ ID NO: 1693333 - RNA, 19 nt, Artificial Sequence
  Description of Artificial Sequence: Synthetic oligonucleotide
  Sense strand starting at position 3971 of SEQ ID NO: 1561721
gaaguuuaggccgggcaua

SEQ ID NO: 1693334 - RNA, 19 nt, Artificial Sequence
  Description of Artificial Sequence: Synthetic oligonucleotide
  Antisense strand to SEQ ID NO: 1693333
uaugcccggccuaaacuuc

SEQ ID NO: 1693335 - RNA, 19 nt, Artificial Sequence
  Description of Artificial Sequence: Synthetic oligonucleotide
  Sense strand starting at position 185 of SEQ ID NO: 1561722
agcaaaucuguccagcuuu

SEQ ID NO: 1693336 - RNA, 19 nt, Artificial Sequence
  Description of Artificial Sequence: Synthetic oligonucleotide
  Antisense strand to SEQ ID NO: 1693335
aaagcuggacagauuugcu

SEQ ID NO: 1693337 - RNA, 19 nt, Artificial Sequence
  Description of Artificial Sequence: Synthetic oligonucleotide
  Sense strand starting at position 335 of SEQ ID NO: 1561722
agcuuuauguggucauuug

SEQ ID NO: 1693338 - RNA, 19 nt, Artificial Sequence
  Description of Artificial Sequence: Synthetic oligonucleotide
  Antisense strand to SEQ ID NO: 1693337
caaaugaccacauaaagcu

SEQ ID NO: 1693339 - RNA, 19 nt, Artificial Sequence
  Description of Artificial Sequence: Synthetic oligonucleotide
  Sense strand starting at position 360 of SEQ ID NO: 1561722
acaaaugguuucucuaaug

SEQ ID NO: 1693340 - RNA, 19 nt, Artificial Sequence
  Description of Artificial Sequence: Synthetic oligonucleotide
  Antisense strand to SEQ ID NO: 1693339
cauuagagaaaccauuugu

SEQ ID NO: 1693341 - RNA, 19 nt, Artificial Sequence
  Description of Artificial Sequence: Synthetic oligonucleotide
  Sense strand starting at position 370 of SEQ ID NO: 1561722
ucucuaaugguaugccaaa

SEQ ID NO: 1693342 - RNA, 19 nt, Artificial Sequence
  Description of Artificial Sequence: Synthetic oligonucleotide
  Antisense strand to SEQ ID NO: 1693341
uuuggcauaccauuagaga

SEQ ID NO: 1693343 - RNA, 19 nt, Artificial Sequence
  Description of Artificial Sequence: Synthetic oligonucleotide
  Sense strand starting at position 396 of SEQ ID NO: 1561722
auguguucucuccagauag

SEQ ID NO: 1693344 - RNA, 19 nt, Artificial Sequence
  Description of Artificial Sequence: Synthetic oligonucleotide
  Antisense strand to SEQ ID NO: 1693343
cuaucuggagagaacacau

SEQ ID NO: 1693345 - RNA, 19 nt, Artificial Sequence
  Description of Artificial Sequence: Synthetic oligonucleotide
  Sense strand starting at position 398 of SEQ ID NO: 1561722
guguucucuccagauagcu

SEQ ID NO: 1693346 - RNA, 19 nt, Artificial Sequence
  Description of Artificial Sequence: Synthetic oligonucleotide
  Antisense strand to SEQ ID NO: 1693345
agcuaucuggagagaacac

SEQ ID NO: 1693347 - RNA, 19 nt, Artificial Sequence
  Description of Artificial Sequence: Synthetic oligonucleotide
  Sense strand starting at position 406 of SEQ ID NO: 1561722
uccagauagcuuuacugua

SEQ ID NO: 1693348 - RNA, 19 nt, Artificial Sequence
  Description of Artificial Sequence: Synthetic oligonucleotide
  Antisense strand to SEQ ID NO: 1693347
uacaguaaagcuaucugga

SEQ ID NO: 1693349 - RNA, 19 nt, Artificial Sequence
  Description of Artificial Sequence: Synthetic oligonucleotide
  Sense strand starting at position 451 of SEQ ID NO: 1561722
gugagucuucuguaaacag

SEQ ID NO: 1693350 - RNA, 19 nt, Artificial Sequence
  Description of Artificial Sequence: Synthetic oligonucleotide
  Antisense strand to SEQ ID NO: 1693349
cuguuuacagaagacucac

SEQ ID NO: 1693351 - RNA, 19 nt, Artificial Sequence
  Description of Artificial Sequence: Synthetic oligonucleotide
  Sense strand starting at position 473 of SEQ ID NO: 1561722
accaaugcucuauguuaug

SEQ ID NO: 1693352 - RNA, 19 nt, Artificial Sequence
  Description of Artificial Sequence: Synthetic oligonucleotide
  Antisense strand to SEQ ID NO: 1693351
cauaacauagagcauuggu

SEQ ID NO: 1693353 - RNA, 19 nt, Artificial Sequence
  Description of Artificial Sequence: Synthetic oligonucleotide
  Sense strand starting at position 525 of SEQ ID NO: 1561722
agguucuaaccuggaaaua

SEQ ID NO: 1693354 - RNA, 19 nt, Artificial Sequence
  Description of Artificial Sequence: Synthetic oligonucleotide
  Antisense strand to SEQ ID NO: 1693353
uauuuccagguuagaaccu

SEQ ID NO: 1693355 - RNA, 19 nt, Artificial Sequence
  Description of Artificial Sequence: Synthetic oligonucleotide
  Sense strand starting at position 607 of SEQ ID NO: 1561722
gugaauggcuacccuaaua

SEQ ID NO: 1693356 - RNA, 19 nt, Artificial Sequence
  Description of Artificial Sequence: Synthetic oligonucleotide
  Antisense strand to SEQ ID NO: 1693355
uauuaggguagccauucac

SEQ ID NO: 1693357 - RNA, 19 nt, Artificial Sequence
  Description of Artificial Sequence: Synthetic oligonucleotide
  Sense strand starting at position 649 of SEQ ID NO: 1561722
auaggccugucauuuaagu

SEQ ID NO: 1693358 - RNA, 19 nt, Artificial Sequence
  Description of Artificial Sequence: Synthetic oligonucleotide
  Antisense strand to SEQ ID NO: 1693357
acuuaaaugacaggccuau

SEQ ID NO: 1693359 - RNA, 19 nt, Artificial Sequence
  Description of Artificial Sequence: Synthetic oligonucleotide
  Sense strand starting at position 754 of SEQ ID NO: 1561722
cacacugagccugggauua

SEQ ID NO: 1693360 - RNA, 19 nt, Artificial Sequence
  Description of Artificial Sequence: Synthetic oligonucleotide
  Antisense strand to SEQ ID NO: 1693359
uaaucccaggcucagugug

SEQ ID NO: 1693361 - RNA, 19 nt, Artificial Sequence
  Description of Artificial Sequence: Synthetic oligonucleotide
  Sense strand starting at position 1074 of SEQ ID NO: 1561722
acuuaaauuguuuggucca

SEQ ID NO: 1693362 - RNA, 19 nt, Artificial Sequence
  Description of Artificial Sequence: Synthetic oligonucleotide
  Antisense strand to SEQ ID NO: 1693361
uggaccaaacaauuuaagu

SEQ ID NO: 1693363 - RNA, 19 nt, Artificial Sequence
  Description of Artificial Sequence: Synthetic oligonucleotide
  Sense strand starting at position 1263 of SEQ ID NO: 1561722
auuauuggcuuccuuugau

SEQ ID NO: 1693364 - RNA, 19 nt, Artificial Sequence
  Description of Artificial Sequence: Synthetic oligonucleotide
  Antisense strand to SEQ ID NO: 1693363
aucaaaggaagccaauaau

SEQ ID NO: 1693365 - RNA, 19 nt, Artificial Sequence
  Description of Artificial Sequence: Synthetic oligonucleotide
  Sense strand starting at position 1269 of SEQ ID NO: 1561722
ggcuuccuuugauccuaca

SEQ ID NO: 1693366 - RNA, 19 nt, Artificial Sequence
  Description of Artificial Sequence: Synthetic oligonucleotide
  Antisense strand to SEQ ID NO: 1693365
uguaggaucaaaggaagcc

SEQ ID NO: 1693367 - RNA, 19 nt, Artificial Sequence
  Description of Artificial Sequence: Synthetic oligonucleotide
  Sense strand starting at position 1541 of SEQ ID NO: 1561722
ucauaucuucuaggguaac

SEQ ID NO: 1693368 - RNA, 19 nt, Artificial Sequence
  Description of Artificial Sequence: Synthetic oligonucleotide
  Antisense strand to SEQ ID NO: 1693367
guuacccuagaagauauga

SEQ ID NO: 1693369 - RNA, 19 nt, Artificial Sequence
  Description of Artificial Sequence: Synthetic oligonucleotide
  Sense strand starting at position 1597 of SEQ ID NO: 1561722
cgguguaagcguucagacu

SEQ ID NO: 1693370 - RNA, 19 nt, Artificial Sequence
  Description of Artificial Sequence: Synthetic oligonucleotide
  Antisense strand to SEQ ID NO: 1693369
agucugaacgcuuacaccg

SEQ ID NO: 1693371 - RNA, 19 nt, Artificial Sequence
  Description of Artificial Sequence: Synthetic oligonucleotide
  Sense strand starting at position 1743 of SEQ ID NO: 1561722
cuuuguaaugcugaaugga

SEQ ID NO: 1693372 - RNA, 19 nt, Artificial Sequence
  Description of Artificial Sequence: Synthetic oligonucleotide
  Antisense strand to SEQ ID NO: 1693371
uccauucagcauuacaaag

SEQ ID NO: 1693373 - RNA, 19 nt, Artificial Sequence
  Description of Artificial Sequence: Synthetic oligonucleotide
  Sense strand starting at position 1746 of SEQ ID NO: 1561722
uguaaugcugaauggaaua

SEQ ID NO: 1693374 - RNA, 19 nt, Artificial Sequence
  Description of Artificial Sequence: Synthetic oligonucleotide
  Antisense strand to SEQ ID NO: 1693373
uauuccauucagcauuaca

SEQ ID NO: 1693375 - RNA, 19 nt, Artificial Sequence
  Description of Artificial Sequence: Synthetic oligonucleotide
  Sense strand starting at position 1765 of SEQ ID NO: 1561722
uuuguuaugugggcacaga

SEQ ID NO: 1693376 - RNA, 19 nt, Artificial Sequence
  Description of Artificial Sequence: Synthetic oligonucleotide
  Antisense strand to SEQ ID NO: 1693375
ucugugcccacauaacaaa

SEQ ID NO: 1693377 - RNA, 19 nt, Artificial Sequence
  Description of Artificial Sequence: Synthetic oligonucleotide
  Sense strand starting at position 1780 of SEQ ID NO: 1561722
cagacuuuggcagaguuga

SEQ ID NO: 1693378 - RNA, 19 nt, Artificial Sequence
  Description of Artificial Sequence: Synthetic oligonucleotide
  Antisense strand to SEQ ID NO: 1693377
ucaacucugccaaagucug

SEQ ID NO: 1693379 - RNA, 19 nt, Artificial Sequence
  Description of Artificial Sequence: Synthetic oligonucleotide
  Sense strand starting at position 1894 of SEQ ID NO: 1561722
uuaguaauuggaugaacuu

SEQ ID NO: 1693380 - RNA, 19 nt, Artificial Sequence
  Description of Artificial Sequence: Synthetic oligonucleotide
  Antisense strand to SEQ ID NO: 1693379
aaguucauccaauuacuaa

SEQ ID NO: 1693381 - RNA, 19 nt, Artificial Sequence
  Description of Artificial Sequence: Synthetic oligonucleotide
  Sense strand starting at position 1913 of SEQ ID NO: 1561722
gaauaaagcgauugcccau

SEQ ID NO: 1693382 - RNA, 19 nt, Artificial Sequence
  Description of Artificial Sequence: Synthetic oligonucleotide
  Antisense strand to SEQ ID NO: 1693381
augggcaaucgcuuuauuc

SEQ ID NO: 1693383 - RNA, 19 nt, Artificial Sequence
  Description of Artificial Sequence: Synthetic oligonucleotide
  Sense strand starting at position 2139 of SEQ ID NO: 1561722
uggugaucuugaccuugau

SEQ ID NO: 1693384 - RNA, 19 nt, Artificial Sequence
  Description of Artificial Sequence: Synthetic oligonucleotide
  Antisense strand to SEQ ID NO: 1693383
aucaaggucaagaucacca

SEQ ID NO: 1693385 - RNA, 19 nt, Artificial Sequence
  Description of Artificial Sequence: Synthetic oligonucleotide
  Sense strand starting at position 2206 of SEQ ID NO: 1561722
ggaugaguuuguccagaag

SEQ ID NO: 1693386 - RNA, 19 nt, Artificial Sequence
  Description of Artificial Sequence: Synthetic oligonucleotide
  Antisense strand to SEQ ID NO: 1693385
cuucuggacaaacucaucc

SEQ ID NO: 1693387 - RNA, 19 nt, Artificial Sequence
  Description of Artificial Sequence: Synthetic oligonucleotide
  Sense strand starting at position 2209 of SEQ ID NO: 1561722
ugaguuuguccagaagguc

SEQ ID NO: 1693388 - RNA, 19 nt, Artificial Sequence
  Description of Artificial Sequence: Synthetic oligonucleotide
  Antisense strand to SEQ ID NO: 1693387
gaccuucuggacaaacuca

SEQ ID NO: 1693389 - RNA, 19 nt, Artificial Sequence
  Description of Artificial Sequence: Synthetic oligonucleotide
  Sense strand starting at position 2217 of SEQ ID NO: 1561722
uccagaaggucccauauuu

SEQ ID NO: 1693390 - RNA, 19 nt, Artificial Sequence
  Description of Artificial Sequence: Synthetic oligonucleotide
  Antisense strand to SEQ ID NO: 1693389
aaauaugggaccuucugga

SEQ ID NO: 1693391 - RNA, 19 nt, Artificial Sequence
  Description of Artificial Sequence: Synthetic oligonucleotide
  Sense strand starting at position 2297 of SEQ ID NO: 1561722
ccacauagcguugaaucau

SEQ ID NO: 1693392 - RNA, 19 nt, Artificial Sequence
  Description of Artificial Sequence: Synthetic oligonucleotide
  Antisense strand to SEQ ID NO: 1693391
augauucaacgcuaugugg

SEQ ID NO: 1693393 - RNA, 19 nt, Artificial Sequence
  Description of Artificial Sequence: Synthetic oligonucleotide
  Sense strand starting at position 2306 of SEQ ID NO: 1561722
guugaaucaucagcauucu

SEQ ID NO: 1693394 - RNA, 19 nt, Artificial Sequence
  Description of Artificial Sequence: Synthetic oligonucleotide
  Antisense strand to SEQ ID NO: 1693393
agaaugcugaugauucaac

SEQ ID NO: 1693395 - RNA, 19 nt, Artificial Sequence
  Description of Artificial Sequence: Synthetic oligonucleotide
  Sense strand starting at position 2501 of SEQ ID NO: 1561722
acagaucaucaggguugau

SEQ ID NO: 1693396 - RNA, 19 nt, Artificial Sequence
  Description of Artificial Sequence: Synthetic oligonucleotide
  Antisense strand to SEQ ID NO: 1693395
aucaacccugaugaucugu

SEQ ID NO: 1693397 - RNA, 19 nt, Artificial Sequence
  Description of Artificial Sequence: Synthetic oligonucleotide
  Sense strand starting at position 2546 of SEQ ID NO: 1561722
aguucaucuggauaggguu

SEQ ID NO: 1693398 - RNA, 19 nt, Artificial Sequence
  Description of Artificial Sequence: Synthetic oligonucleotide
  Antisense strand to SEQ ID NO: 1693397
aacccuauccagaugaacu

SEQ ID NO: 1693399 - RNA, 19 nt, Artificial Sequence
  Description of Artificial Sequence: Synthetic oligonucleotide
  Sense strand starting at position 3022 of SEQ ID NO: 1561722
ggugauggauuauuaaagu

SEQ ID NO: 1693400 - RNA, 19 nt, Artificial Sequence
  Description of Artificial Sequence: Synthetic oligonucleotide
  Antisense strand to SEQ ID NO: 1693399
acuuuaauaauccaucacc

SEQ ID NO: 1693401 - RNA, 19 nt, Artificial Sequence
  Description of Artificial Sequence: Synthetic oligonucleotide
  Sense strand starting at position 3072 of SEQ ID NO: 1561722
acucauuccugagcuaggu

SEQ ID NO: 1693402 - RNA, 19 nt, Artificial Sequence
  Description of Artificial Sequence: Synthetic oligonucleotide
  Antisense strand to SEQ ID NO: 1693401
accuagcucaggaaugagu

SEQ ID NO: 1693403 - RNA, 19 nt, Artificial Sequence
  Description of Artificial Sequence: Synthetic oligonucleotide
  Sense strand starting at position 3106 of SEQ ID NO: 1561722
cuggcauuugcugguggua

SEQ ID NO: 1693404 - RNA, 19 nt, Artificial Sequence
  Description of Artificial Sequence: Synthetic oligonucleotide
  Antisense strand to SEQ ID NO: 1693403
uaccaccagcaaaugccag

SEQ ID NO: 1693405 - RNA, 19 nt, Artificial Sequence
  Description of Artificial Sequence: Synthetic oligonucleotide
  Sense strand starting at position 3109 of SEQ ID NO: 1561722
gcauuugcuggugguauau

SEQ ID NO: 1693406 - RNA, 19 nt, Artificial Sequence
  Description of Artificial Sequence: Synthetic oligonucleotide
  Antisense strand to SEQ ID NO: 1693405
auauaccaccagcaaaugc

SEQ ID NO: 1693407 - RNA, 19 nt, Artificial Sequence
  Description of Artificial Sequence: Synthetic oligonucleotide
  Sense strand starting at position 3120 of SEQ ID NO: 1561722
ugguauaucuaaguuggca

SEQ ID NO: 1693408 - RNA, 19 nt, Artificial Sequence
  Description of Artificial Sequence: Synthetic oligonucleotide
  Antisense strand to SEQ ID NO: 1693407
ugccaacuuagauauacca

SEQ ID NO: 1693409 - RNA, 19 nt, Artificial Sequence
  Description of Artificial Sequence: Synthetic oligonucleotide
  Sense strand starting at position 3473 of SEQ ID NO: 1561722
uguuuaucacaccaaguuu

SEQ ID NO: 1693410 - RNA, 19 nt, Artificial Sequence
  Description of Artificial Sequence: Synthetic oligonucleotide
  Antisense strand to SEQ ID NO: 1693409
aaacuuggugugauaaaca

SEQ ID NO: 1693411 - RNA, 19 nt, Artificial Sequence
  Description of Artificial Sequence: Synthetic oligonucleotide
  Sense strand starting at position 3757 of SEQ ID NO: 1561722
agaaaugucuaagucaaau

SEQ ID NO: 1693412 - RNA, 19 nt, Artificial Sequence
  Description of Artificial Sequence: Synthetic oligonucleotide
  Antisense strand to SEQ ID NO: 1693411
auuugacuuagacauuucu

SEQ ID NO: 1693413 - RNA, 19 nt, Artificial Sequence
  Description of Artificial Sequence: Synthetic oligonucleotide
  Sense strand starting at position 3885 of SEQ ID NO: 1561722
aauuaucaagagugugauu

SEQ ID NO: 1693414 - RNA, 19 nt, Artificial Sequence
  Description of Artificial Sequence: Synthetic oligonucleotide
  Antisense strand to SEQ ID NO: 1693413
aaucacacucuugauaauu

SEQ ID NO: 1693415 - RNA, 19 nt, Artificial Sequence
  Description of Artificial Sequence: Synthetic oligonucleotide
  Sense strand starting at position 69 of SEQ ID NO: 1561723
agaggaaguaccuguuucu

SEQ ID NO: 1693416 - RNA, 19 nt, Artificial Sequence
  Description of Artificial Sequence: Synthetic oligonucleotide
  Antisense strand to SEQ ID NO: 1693415
agaaacagguacuuccucu

SEQ ID NO: 1693417 - RNA, 19 nt, Artificial Sequence
  Description of Artificial Sequence: Synthetic oligonucleotide
  Sense strand starting at position 72 of SEQ ID NO: 1561723
ggaaguaccuguuucuugu

SEQ ID NO: 1693418 - RNA, 19 nt, Artificial Sequence
  Description of Artificial Sequence: Synthetic oligonucleotide
  Antisense strand to SEQ ID NO: 1693417
acaagaaacagguacuucc

SEQ ID NO: 1693419 - RNA, 19 nt, Artificial Sequence
  Description of Artificial Sequence: Synthetic oligonucleotide
  Sense strand starting at position 78 of SEQ ID NO: 1561723
accuguuucuuguuucuca

SEQ ID NO: 1693420 - RNA, 19 nt, Artificial Sequence
  Description of Artificial Sequence: Synthetic oligonucleotide
  Antisense strand to SEQ ID NO: 1693419
ugagaaacaagaaacaggu

SEQ ID NO: 1693421 - RNA, 19 nt, Artificial Sequence
  Description of Artificial Sequence: Synthetic oligonucleotide
  Sense strand starting at position 162 of SEQ ID NO: 1561723
gcgaguuagaguuagcuuc

SEQ ID NO: 1693422 - RNA, 19 nt, Artificial Sequence
  Description of Artificial Sequence: Synthetic oligonucleotide
  Antisense strand to SEQ ID NO: 1693421
gaagcuaacucuaacucgc

SEQ ID NO: 1693423 - RNA, 19 nt, Artificial Sequence
  Description of Artificial Sequence: Synthetic oligonucleotide
  Sense strand starting at position 164 of SEQ ID NO: 1561723
gaguuagaguuagcuucuu

SEQ ID NO: 1693424 - RNA, 19 nt, Artificial Sequence
  Description of Artificial Sequence: Synthetic oligonucleotide
  Antisense strand to SEQ ID NO: 1693423
aagaagcuaacucuaacuc

SEQ ID NO: 1693425 - RNA, 19 nt, Artificial Sequence
  Description of Artificial Sequence: Synthetic oligonucleotide
  Sense strand starting at position 206 of SEQ ID NO: 1561723
ucuucuugaugacucgaau

SEQ ID NO: 1693426 - RNA, 19 nt, Artificial Sequence
  Description of Artificial Sequence: Synthetic oligonucleotide
  Antisense strand to SEQ ID NO: 1693425
auucgagucaucaagaaga

SEQ ID NO: 1693427 - RNA, 19 nt, Artificial Sequence
  Description of Artificial Sequence: Synthetic oligonucleotide
  Sense strand starting at position 437 of SEQ ID NO: 1561723
ccuucuccucccugaugua

SEQ ID NO: 1693428 - RNA, 19 nt, Artificial Sequence
  Description of Artificial Sequence: Synthetic oligonucleotide
  Antisense strand to SEQ ID NO: 1693427
uacaucagggaggagaagg

SEQ ID NO: 1693429 - RNA, 19 nt, Artificial Sequence
  Description of Artificial Sequence: Synthetic oligonucleotide
  Sense strand starting at position 524 of SEQ ID NO: 1561723
acuguucgguugcuccaaa

SEQ ID NO: 1693430 - RNA, 19 nt, Artificial Sequence
  Description of Artificial Sequence: Synthetic oligonucleotide
  Antisense strand to SEQ ID NO: 1693429
uuuggagcaaccgaacagu

SEQ ID NO: 1693431 - RNA, 19 nt, Artificial Sequence
  Description of Artificial Sequence: Synthetic oligonucleotide
  Sense strand starting at position 677 of SEQ ID NO: 1561723
aggcuuucuuagcuccaga

SEQ ID NO: 1693432 - RNA, 19 nt, Artificial Sequence
  Description of Artificial Sequence: Synthetic oligonucleotide
  Antisense strand to SEQ ID NO: 1693431
ucuggagcuaagaaagccu

SEQ ID NO: 1693433 - RNA, 19 nt, Artificial Sequence
  Description of Artificial Sequence: Synthetic oligonucleotide
  Sense strand starting at position 1424 of SEQ ID NO: 1561723
ggagugugaguguguauau

SEQ ID NO: 1693434 - RNA, 19 nt, Artificial Sequence
  Description of Artificial Sequence: Synthetic oligonucleotide
  Antisense strand to SEQ ID NO: 1693433
auauacacacucacacucc

SEQ ID NO: 1693435 - RNA, 19 nt, Artificial Sequence
  Description of Artificial Sequence: Synthetic oligonucleotide
  Sense strand starting at position 2205 of SEQ ID NO: 1561723
gccuuuauagucugcaaag

SEQ ID NO: 1693436 - RNA, 19 nt, Artificial Sequence
  Description of Artificial Sequence: Synthetic oligonucleotide
  Antisense strand to SEQ ID NO: 1693435
cuuugcagacuauaaaggc

SEQ ID NO: 1693437 - RNA, 19 nt, Artificial Sequence
  Description of Artificial Sequence: Synthetic oligonucleotide
  Sense strand starting at position 2372 of SEQ ID NO: 1561723
acuagaauuucuguacguu

SEQ ID NO: 1693438 - RNA, 19 nt, Artificial Sequence
  Description of Artificial Sequence: Synthetic oligonucleotide
  Antisense strand to SEQ ID NO: 1693437
aacguacagaaauucuagu

SEQ ID NO: 1693439 - RNA, 19 nt, Artificial Sequence
  Description of Artificial Sequence: Synthetic oligonucleotide
  Sense strand starting at position 2380 of SEQ ID NO: 1561723
uucuguacguuuccggaau

SEQ ID NO: 1693440 - RNA, 19 nt, Artificial Sequence
  Description of Artificial Sequence: Synthetic oligonucleotide
  Antisense strand to SEQ ID NO: 1693439
auuccggaaacguacagaa

SEQ ID NO: 1693441 - RNA, 19 nt, Artificial Sequence
  Description of Artificial Sequence: Synthetic oligonucleotide
  Sense strand starting at position 2392 of SEQ ID NO: 1561723
ccggaaugagugcacguua

SEQ ID NO: 1693442 - RNA, 19 nt, Artificial Sequence
  Description of Artificial Sequence: Synthetic oligonucleotide
  Antisense strand to SEQ ID NO: 1693441
uaacgugcacucauuccgg

SEQ ID NO: 1693443 - RNA, 19 nt, Artificial Sequence
  Description of Artificial Sequence: Synthetic oligonucleotide
  Sense strand starting at position 2393 of SEQ ID NO: 1561723
cggaaugagugcacguuaa

SEQ ID NO: 1693444 - RNA, 19 nt, Artificial Sequence
  Description of Artificial Sequence: Synthetic oligonucleotide
  Antisense strand to SEQ ID NO: 1693443
uuaacgugcacucauuccg

SEQ ID NO: 1693445 - RNA, 19 nt, Artificial Sequence
  Description of Artificial Sequence: Synthetic oligonucleotide
  Sense strand starting at position 2411 of SEQ ID NO: 1561723
agacccauugugcaaacuu

SEQ ID NO: 1693446 - RNA, 19 nt, Artificial Sequence
  Description of Artificial Sequence: Synthetic oligonucleotide
  Antisense strand to SEQ ID NO: 1693445
aaguuugcacaaugggucu

SEQ ID NO: 1693447 - RNA, 19 nt, Artificial Sequence
  Description of Artificial Sequence: Synthetic oligonucleotide
  Sense strand starting at position 2477 of SEQ ID NO: 1561723
ugaccuaagugacuaaugu

SEQ ID NO: 1693448 - RNA, 19 nt, Artificial Sequence
  Description of Artificial Sequence: Synthetic oligonucleotide
  Antisense strand to SEQ ID NO: 1693447
acauuagucacuuagguca

SEQ ID NO: 1693449 - RNA, 19 nt, Artificial Sequence
  Description of Artificial Sequence: Synthetic oligonucleotide
  Sense strand starting at position 2486 of SEQ ID NO: 1561723
ugacuaaugugguccaaau

SEQ ID NO: 1693450 - RNA, 19 nt, Artificial Sequence
  Description of Artificial Sequence: Synthetic oligonucleotide
  Antisense strand to SEQ ID NO: 1693449
auuuggaccacauuaguca

SEQ ID NO: 1693451 - RNA, 19 nt, Artificial Sequence
  Description of Artificial Sequence: Synthetic oligonucleotide
  Sense strand starting at position 2488 of SEQ ID NO: 1561723
acuaaugugguccaaauua

SEQ ID NO: 1693452 - RNA, 19 nt, Artificial Sequence
  Description of Artificial Sequence: Synthetic oligonucleotide
  Antisense strand to SEQ ID NO: 1693451
uaauuuggaccacauuagu

SEQ ID NO: 1693453 - RNA, 19 nt, Artificial Sequence
  Description of Artificial Sequence: Synthetic oligonucleotide
  Sense strand starting at position 2570 of SEQ ID NO: 1561723
cucguccuuuccgucuaau

SEQ ID NO: 1693454 - RNA, 19 nt, Artificial Sequence
  Description of Artificial Sequence: Synthetic oligonucleotide
  Antisense strand to SEQ ID NO: 1693453
auuagacggaaaggacgag

SEQ ID NO: 1693455 - RNA, 19 nt, Artificial Sequence
  Description of Artificial Sequence: Synthetic oligonucleotide
  Sense strand starting at position 2573 of SEQ ID NO: 1561723
guccuuuccgucuaauaaa

SEQ ID NO: 1693456 - RNA, 19 nt, Artificial Sequence
  Description of Artificial Sequence: Synthetic oligonucleotide
  Antisense strand to SEQ ID NO: 1693455
uuuauuagacggaaaggac

SEQ ID NO: 1693457 - RNA, 19 nt, Artificial Sequence
  Description of Artificial Sequence: Synthetic oligonucleotide
  Sense strand starting at position 2605 of SEQ ID NO: 1561723
gaccuacacgguuguugau

SEQ ID NO: 1693458 - RNA, 19 nt, Artificial Sequence
  Description of Artificial Sequence: Synthetic oligonucleotide
  Antisense strand to SEQ ID NO: 1693457
aucaacaaccguguagguc

SEQ ID NO: 1693459 - RNA, 19 nt, Artificial Sequence
  Description of Artificial Sequence: Synthetic oligonucleotide
  Sense strand starting at position 2607 of SEQ ID NO: 1561723
ccuacacgguuguugauaa

SEQ ID NO: 1693460 - RNA, 19 nt, Artificial Sequence
  Description of Artificial Sequence: Synthetic oligonucleotide
  Antisense strand to SEQ ID NO: 1693459
uuaucaacaaccguguagg

SEQ ID NO: 1693461 - RNA, 19 nt, Artificial Sequence
  Description of Artificial Sequence: Synthetic oligonucleotide
  Sense strand starting at position 2614 of SEQ ID NO: 1561723
gguuguugauaaguucuuu

SEQ ID NO: 1693462 - RNA, 19 nt, Artificial Sequence
  Description of Artificial Sequence: Synthetic oligonucleotide
  Antisense strand to SEQ ID NO: 1693461
aaagaacuuaucaacaacc

SEQ ID NO: 1693463 - RNA, 19 nt, Artificial Sequence
  Description of Artificial Sequence: Synthetic oligonucleotide
  Sense strand starting at position 2799 of SEQ ID NO: 1561723
ggcagcucuucugugggau

SEQ ID NO: 1693464 - RNA, 19 nt, Artificial Sequence
  Description of Artificial Sequence: Synthetic oligonucleotide
  Antisense strand to SEQ ID NO: 1693463
aucccacagaagagcugcc

SEQ ID NO: 1693465 - RNA, 19 nt, Artificial Sequence
  Description of Artificial Sequence: Synthetic oligonucleotide
  Sense strand starting at position 2914 of SEQ ID NO: 1561723
gcuugaguucucguuggca

SEQ ID NO: 1693466 - RNA, 19 nt, Artificial Sequence
  Description of Artificial Sequence: Synthetic oligonucleotide
  Antisense strand to SEQ ID NO: 1693465
ugccaacgagaacucaagc

SEQ ID NO: 1693467 - RNA, 19 nt, Artificial Sequence
  Description of Artificial Sequence: Synthetic oligonucleotide
  Sense strand starting at position 2916 of SEQ ID NO: 1561723
uugaguucucguuggcaac

SEQ ID NO: 1693468 - RNA, 19 nt, Artificial Sequence
  Description of Artificial Sequence: Synthetic oligonucleotide
  Antisense strand to SEQ ID NO: 1693467
guugccaacgagaacucaa

SEQ ID NO: 1693469 - RNA, 19 nt, Artificial Sequence
  Description of Artificial Sequence: Synthetic oligonucleotide
  Sense strand starting at position 2989 of SEQ ID NO: 1561723
agagcuauugccugucaga

SEQ ID NO: 1693470 - RNA, 19 nt, Artificial Sequence
  Description of Artificial Sequence: Synthetic oligonucleotide
  Antisense strand to SEQ ID NO: 1693469
ucugacaggcaauagcucu

SEQ ID NO: 1693471 - RNA, 19 nt, Artificial Sequence
  Description of Artificial Sequence: Synthetic oligonucleotide
  Sense strand starting at position 3093 of SEQ ID NO: 1561723
ucuuguaguuccuugucua

SEQ ID NO: 1693472 - RNA, 19 nt, Artificial Sequence
  Description of Artificial Sequence: Synthetic oligonucleotide
  Antisense strand to SEQ ID NO: 1693471
uagacaaggaacuacaaga

SEQ ID NO: 1693473 - RNA, 19 nt, Artificial Sequence
  Description of Artificial Sequence: Synthetic oligonucleotide
  Sense strand starting at position 3094 of SEQ ID NO: 1561723
cuuguaguuccuugucuaa

SEQ ID NO: 1693474 - RNA, 19 nt, Artificial Sequence
  Description of Artificial Sequence: Synthetic oligonucleotide
  Antisense strand to SEQ ID NO: 1693473
uuagacaaggaacuacaag

SEQ ID NO: 1693475 - RNA, 19 nt, Artificial Sequence
  Description of Artificial Sequence: Synthetic oligonucleotide
  Sense strand starting at position 3096 of SEQ ID NO: 1561723
uguaguuccuugucuaaac

SEQ ID NO: 1693476 - RNA, 19 nt, Artificial Sequence
  Description of Artificial Sequence: Synthetic oligonucleotide
  Antisense strand to SEQ ID NO: 1693475
guuuagacaaggaacuaca

SEQ ID NO: 1693477 - RNA, 19 nt, Artificial Sequence
  Description of Artificial Sequence: Synthetic oligonucleotide
  Sense strand starting at position 3304 of SEQ ID NO: 1561723
guuaaagaccgggagucua

SEQ ID NO: 1693478 - RNA, 19 nt, Artificial Sequence
  Description of Artificial Sequence: Synthetic oligonucleotide
  Antisense strand to SEQ ID NO: 1693477
uagacucccggucuuuaac

SEQ ID NO: 1693479 - RNA, 19 nt, Artificial Sequence
  Description of Artificial Sequence: Synthetic oligonucleotide
  Sense strand starting at position 3691 of SEQ ID NO: 1561723
uucuaauauugcuuggguu

SEQ ID NO: 1693480 - RNA, 19 nt, Artificial Sequence
  Description of Artificial Sequence: Synthetic oligonucleotide
  Antisense strand to SEQ ID NO: 1693479
aacccaagcaauauuagaa

SEQ ID NO: 1693481 - RNA, 19 nt, Artificial Sequence
  Description of Artificial Sequence: Synthetic oligonucleotide
  Sense strand starting at position 3749 of SEQ ID NO: 1561723
gaaacuugggauugcaaug

SEQ ID NO: 1693482 - RNA, 19 nt, Artificial Sequence
  Description of Artificial Sequence: Synthetic oligonucleotide
  Antisense strand to SEQ ID NO: 1693481
cauugcaaucccaaguuuc

SEQ ID NO: 1693483 - RNA, 19 nt, Artificial Sequence
  Description of Artificial Sequence: Synthetic oligonucleotide
  Sense strand starting at position 3754 of SEQ ID NO: 1561723
uugggauugcaaugcuacu

SEQ ID NO: 1693484 - RNA, 19 nt, Artificial Sequence
  Description of Artificial Sequence: Synthetic oligonucleotide
  Antisense strand to SEQ ID NO: 1693483
aguagcauugcaaucccaa

SEQ ID NO: 1693485 - RNA, 19 nt, Artificial Sequence
  Description of Artificial Sequence: Synthetic oligonucleotide
  Sense strand starting at position 3814 of SEQ ID NO: 1561723
ucagaagucccauauguuc

SEQ ID NO: 1693486 - RNA, 19 nt, Artificial Sequence
  Description of Artificial Sequence: Synthetic oligonucleotide
  Antisense strand to SEQ ID NO: 1693485
gaacauaugggacuucuga

SEQ ID NO: 1693487 - RNA, 19 nt, Artificial Sequence
  Description of Artificial Sequence: Synthetic oligonucleotide
  Sense strand starting at position 3873 of SEQ ID NO: 1561723
acauacaaauugucaugua

SEQ ID NO: 1693488 - RNA, 19 nt, Artificial Sequence
  Description of Artificial Sequence: Synthetic oligonucleotide
  Antisense strand to SEQ ID NO: 1693487
uacaugacaauuuguaugu

SEQ ID NO: 1693489 - RNA, 19 nt, Artificial Sequence
  Description of Artificial Sequence: Synthetic oligonucleotide
  Sense strand starting at position 3883 of SEQ ID NO: 1561723
ugucauguaugcuuccaag

SEQ ID NO: 1693490 - RNA, 19 nt, Artificial Sequence
  Description of Artificial Sequence: Synthetic oligonucleotide
  Antisense strand to SEQ ID NO: 1693489
cuuggaagcauacaugaca

SEQ ID NO: 1693491 - RNA, 19 nt, Artificial Sequence
  Description of Artificial Sequence: Synthetic oligonucleotide
  Sense strand starting at position 3889 of SEQ ID NO: 1561723
guaugcuuccaaggaacgu

SEQ ID NO: 1693492 - RNA, 19 nt, Artificial Sequence
  Description of Artificial Sequence: Synthetic oligonucleotide
  Antisense strand to SEQ ID NO: 1693491
acguuccuuggaagcauac

SEQ ID NO: 1693493 - RNA, 19 nt, Artificial Sequence
  Description of Artificial Sequence: Synthetic oligonucleotide
  Sense strand starting at position 3918 of SEQ ID NO: 1561723
cgguucugaugucuuagau

SEQ ID NO: 1693494 - RNA, 19 nt, Artificial Sequence
  Description of Artificial Sequence: Synthetic oligonucleotide
  Antisense strand to SEQ ID NO: 1693493
aucuaagacaucagaaccg

SEQ ID NO: 1693495 - RNA, 19 nt, Artificial Sequence
  Description of Artificial Sequence: Synthetic oligonucleotide
  Sense strand starting at position 199 of SEQ ID NO: 1561724
gcaugcccggccuauuaua

SEQ ID NO: 1693496 - RNA, 19 nt, Artificial Sequence
  Description of Artificial Sequence: Synthetic oligonucleotide
  Antisense strand to SEQ ID NO: 1693495
uauaauaggccgggcaugc

SEQ ID NO: 1693497 - RNA, 19 nt, Artificial Sequence
  Description of Artificial Sequence: Synthetic oligonucleotide
  Sense strand starting at position 481 of SEQ ID NO: 1561724
ugcuaaaugcuauauagag

SEQ ID NO: 1693498 - RNA, 19 nt, Artificial Sequence
  Description of Artificial Sequence: Synthetic oligonucleotide
  Antisense strand to SEQ ID NO: 1693497
cucuauauagcauuuagca

SEQ ID NO: 1693499 - RNA, 19 nt, Artificial Sequence
  Description of Artificial Sequence: Synthetic oligonucleotide
  Sense strand starting at position 552 of SEQ ID NO: 1561724
aucacuaagucagagaacu

SEQ ID NO: 1693500 - RNA, 19 nt, Artificial Sequence
  Description of Artificial Sequence: Synthetic oligonucleotide
  Antisense strand to SEQ ID NO: 1693499
aguucucugacuuagugau

SEQ ID NO: 1693501 - RNA, 19 nt, Artificial Sequence
  Description of Artificial Sequence: Synthetic oligonucleotide
  Sense strand starting at position 617 of SEQ ID NO: 1561724
ucgagaaauuguguaaauu

SEQ ID NO: 1693502 - RNA, 19 nt, Artificial Sequence
  Description of Artificial Sequence: Synthetic oligonucleotide
  Antisense strand to SEQ ID NO: 1693501
aauuuacacaauuucucga

SEQ ID NO: 1693503 - RNA, 19 nt, Artificial Sequence
  Description of Artificial Sequence: Synthetic oligonucleotide
  Sense strand starting at position 736 of SEQ ID NO: 1561724
gagccaagcuguuugaagu

SEQ ID NO: 1693504 - RNA, 19 nt, Artificial Sequence
  Description of Artificial Sequence: Synthetic oligonucleotide
  Antisense strand to SEQ ID NO: 1693503
acuucaaacagcuuggcuc

SEQ ID NO: 1693505 - RNA, 19 nt, Artificial Sequence
  Description of Artificial Sequence: Synthetic oligonucleotide
  Sense strand starting at position 737 of SEQ ID NO: 1561724
agccaagcuguuugaaguu

SEQ ID NO: 1693506 - RNA, 19 nt, Artificial Sequence
  Description of Artificial Sequence: Synthetic oligonucleotide
  Antisense strand to SEQ ID NO: 1693505
aacuucaaacagcuuggcu

SEQ ID NO: 1693507 - RNA, 19 nt, Artificial Sequence
  Description of Artificial Sequence: Synthetic oligonucleotide
  Sense strand starting at position 776 of SEQ ID NO: 1561724
uuggcagcugucugaagaa

SEQ ID NO: 1693508 - RNA, 19 nt, Artificial Sequence
  Description of Artificial Sequence: Synthetic oligonucleotide
  Antisense strand to SEQ ID NO: 1693507
uucuucagacagcugccaa

SEQ ID NO: 1693509 - RNA, 19 nt, Artificial Sequence
  Description of Artificial Sequence: Synthetic oligonucleotide
  Sense strand starting at position 815 of SEQ ID NO: 1561724
gaaucugacucaugagagg

SEQ ID NO: 1693510 - RNA, 19 nt, Artificial Sequence
  Description of Artificial Sequence: Synthetic oligonucleotide
  Antisense strand to SEQ ID NO: 1693509
ccucucaugagucagauuc

SEQ ID NO: 1693511 - RNA, 19 nt, Artificial Sequence
  Description of Artificial Sequence: Synthetic oligonucleotide
  Sense strand starting at position 818 of SEQ ID NO: 1561724
ucugacucaugagaggaua

SEQ ID NO: 1693512 - RNA, 19 nt, Artificial Sequence
  Description of Artificial Sequence: Synthetic oligonucleotide
  Antisense strand to SEQ ID NO: 1693511
uauccucucaugagucaga

SEQ ID NO: 1693513 - RNA, 19 nt, Artificial Sequence
  Description of Artificial Sequence: Synthetic oligonucleotide
  Sense strand starting at position 948 of SEQ ID NO: 1561724
cugugucaagacugccaau

SEQ ID NO: 1693514 - RNA, 19 nt, Artificial Sequence
  Description of Artificial Sequence: Synthetic oligonucleotide
  Antisense strand to SEQ ID NO: 1693513
auuggcagucuugacacag

SEQ ID NO: 1693515 - RNA, 19 nt, Artificial Sequence
  Description of Artificial Sequence: Synthetic oligonucleotide
  Sense strand starting at position 1029 of SEQ ID NO: 1561724
gccaacuugccugaaucuu

SEQ ID NO: 1693516 - RNA, 19 nt, Artificial Sequence
  Description of Artificial Sequence: Synthetic oligonucleotide
  Antisense strand to SEQ ID NO: 1693515
aagauucaggcaaguuggc

SEQ ID NO: 1693517 - RNA, 19 nt, Artificial Sequence
  Description of Artificial Sequence: Synthetic oligonucleotide
  Sense strand starting at position 1174 of SEQ ID NO: 1561724
agacacuaugucuguguuu

SEQ ID NO: 1693518 - RNA, 19 nt, Artificial Sequence
  Description of Artificial Sequence: Synthetic oligonucleotide
  Antisense strand to SEQ ID NO: 1693517
aaacacagacauagugucu

SEQ ID NO: 1693519 - RNA, 19 nt, Artificial Sequence
  Description of Artificial Sequence: Synthetic oligonucleotide
  Sense strand starting at position 1175 of SEQ ID NO: 1561724
gacacuaugucuguguuua

SEQ ID NO: 1693520 - RNA, 19 nt, Artificial Sequence
  Description of Artificial Sequence: Synthetic oligonucleotide
  Antisense strand to SEQ ID NO: 1693519
uaaacacagacauaguguc

SEQ ID NO: 1693521 - RNA, 19 nt, Artificial Sequence
  Description of Artificial Sequence: Synthetic oligonucleotide
  Sense strand starting at position 1176 of SEQ ID NO: 1561724
acacuaugucuguguuuau

SEQ ID NO: 1693522 - RNA, 19 nt, Artificial Sequence
  Description of Artificial Sequence: Synthetic oligonucleotide
  Antisense strand to SEQ ID NO: 1693521
auaaacacagacauagugu

SEQ ID NO: 1693523 - RNA, 19 nt, Artificial Sequence
  Description of Artificial Sequence: Synthetic oligonucleotide
  Sense strand starting at position 1177 of SEQ ID NO: 1561724
cacuaugucuguguuuaua

SEQ ID NO: 1693524 - RNA, 19 nt, Artificial Sequence
  Description of Artificial Sequence: Synthetic oligonucleotide
  Antisense strand to SEQ ID NO: 1693523
uauaaacacagacauagug

SEQ ID NO: 1693525 - RNA, 19 nt, Artificial Sequence
  Description of Artificial Sequence: Synthetic oligonucleotide
  Sense strand starting at position 1179 of SEQ ID NO: 1561724
cuaugucuguguuuauaaa

SEQ ID NO: 1693526 - RNA, 19 nt, Artificial Sequence
  Description of Artificial Sequence: Synthetic oligonucleotide
  Antisense strand to SEQ ID NO: 1693525
uuuauaaacacagacauag

SEQ ID NO: 1693527 - RNA, 19 nt, Artificial Sequence
  Description of Artificial Sequence: Synthetic oligonucleotide
  Sense strand starting at position 1219 of SEQ ID NO: 1561724
cucagcuuggagggauaau

SEQ ID NO: 1693528 - RNA, 19 nt, Artificial Sequence
  Description of Artificial Sequence: Synthetic oligonucleotide
  Antisense strand to SEQ ID NO: 1693527
auuaucccuccaagcugag

SEQ ID NO: 1693529 - RNA, 19 nt, Artificial Sequence
  Description of Artificial Sequence: Synthetic oligonucleotide
  Sense strand starting at position 1463 of SEQ ID NO: 1561724
gucuguugaccauacuaug

SEQ ID NO: 1693530 - RNA, 19 nt, Artificial Sequence
  Description of Artificial Sequence: Synthetic oligonucleotide
  Antisense strand to SEQ ID NO: 1693529
cauaguauggucaacagac

SEQ ID NO: 1693531 - RNA, 19 nt, Artificial Sequence
  Description of Artificial Sequence: Synthetic oligonucleotide
  Sense strand starting at position 1471 of SEQ ID NO: 1561724
accauacuaugguagagaa

SEQ ID NO: 1693532 - RNA, 19 nt, Artificial Sequence
  Description of Artificial Sequence: Synthetic oligonucleotide
  Antisense strand to SEQ ID NO: 1693531
uucucuaccauaguauggu

SEQ ID NO: 1693533 - RNA, 19 nt, Artificial Sequence
  Description of Artificial Sequence: Synthetic oligonucleotide
  Sense strand starting at position 1747 of SEQ ID NO: 1561724
caguuaaggugucucauua

SEQ ID NO: 1693534 - RNA, 19 nt, Artificial Sequence
  Description of Artificial Sequence: Synthetic oligonucleotide
  Antisense strand to SEQ ID NO: 1693533
uaaugagacaccuuaacug

SEQ ID NO: 1693535 - RNA, 19 nt, Artificial Sequence
  Description of Artificial Sequence: Synthetic oligonucleotide
  Sense strand starting at position 1755 of SEQ ID NO: 1561724
gugucucauuaauuuguaa

SEQ ID NO: 1693536 - RNA, 19 nt, Artificial Sequence
  Description of Artificial Sequence: Synthetic oligonucleotide
  Antisense strand to SEQ ID NO: 1693535
uuacaaauuaaugagacac

SEQ ID NO: 1693537 - RNA, 19 nt, Artificial Sequence
  Description of Artificial Sequence: Synthetic oligonucleotide
  Sense strand starting at position 1795 of SEQ ID NO: 1561724
caaaguuaauguuaggaga

SEQ ID NO: 1693538 - RNA, 19 nt, Artificial Sequence
  Description of Artificial Sequence: Synthetic oligonucleotide
  Antisense strand to SEQ ID NO: 1693537
ucuccuaacauuaacuuug

SEQ ID NO: 1693539 - RNA, 19 nt, Artificial Sequence
  Description of Artificial Sequence: Synthetic oligonucleotide
  Sense strand starting at position 1834 of SEQ ID NO: 1561724
ccagauaaccuguggcaua

SEQ ID NO: 1693540 - RNA, 19 nt, Artificial Sequence
  Description of Artificial Sequence: Synthetic oligonucleotide
  Antisense strand to SEQ ID NO: 1693539
uaugccacagguuaucugg

SEQ ID NO: 1693541 - RNA, 19 nt, Artificial Sequence
  Description of Artificial Sequence: Synthetic oligonucleotide
  Sense strand starting at position 2047 of SEQ ID NO: 1561724
guaauaauugcaugagucu

SEQ ID NO: 1693542 - RNA, 19 nt, Artificial Sequence
  Description of Artificial Sequence: Synthetic oligonucleotide
  Antisense strand to SEQ ID NO: 1693541
agacucaugcaauuauuac

SEQ ID NO: 1693543 - RNA, 19 nt, Artificial Sequence
  Description of Artificial Sequence: Synthetic oligonucleotide
  Sense strand starting at position 2056 of SEQ ID NO: 1561724
gcaugagucuugcuaacau

SEQ ID NO: 1693544 - RNA, 19 nt, Artificial Sequence
  Description of Artificial Sequence: Synthetic oligonucleotide
  Antisense strand to SEQ ID NO: 1693543
auguuagcaagacucaugc

SEQ ID NO: 1693545 - RNA, 19 nt, Artificial Sequence
  Description of Artificial Sequence: Synthetic oligonucleotide
  Sense strand starting at position 2122 of SEQ ID NO: 1561724
guagcauaucaacagguaa

SEQ ID NO: 1693546 - RNA, 19 nt, Artificial Sequence
  Description of Artificial Sequence: Synthetic oligonucleotide
  Antisense strand to SEQ ID NO: 1693545
uuaccuguugauaugcuac

SEQ ID NO: 1693547 - RNA, 19 nt, Artificial Sequence
  Description of Artificial Sequence: Synthetic oligonucleotide
  Sense strand starting at position 2159 of SEQ ID NO: 1561724
ccguuaccucaagaauagu

SEQ ID NO: 1693548 - RNA, 19 nt, Artificial Sequence
  Description of Artificial Sequence: Synthetic oligonucleotide
  Antisense strand to SEQ ID NO: 1693547
acuauucuugagguaacgg

SEQ ID NO: 1693549 - RNA, 19 nt, Artificial Sequence
  Description of Artificial Sequence: Synthetic oligonucleotide
  Sense strand starting at position 2247 of SEQ ID NO: 1561724
auccuauaauguguaaggu

SEQ ID NO: 1693550 - RNA, 19 nt, Artificial Sequence
  Description of Artificial Sequence: Synthetic oligonucleotide
  Antisense strand to SEQ ID NO: 1693549
accuuacacauuauaggau

SEQ ID NO: 1693551 - RNA, 19 nt, Artificial Sequence
  Description of Artificial Sequence: Synthetic oligonucleotide
  Sense strand starting at position 2248 of SEQ ID NO: 1561724
uccuauaauguguaagguu

SEQ ID NO: 1693552 - RNA, 19 nt, Artificial Sequence
  Description of Artificial Sequence: Synthetic oligonucleotide
  Antisense strand to SEQ ID NO: 1693551
aaccuuacacauuauagga

SEQ ID NO: 1693553 - RNA, 19 nt, Artificial Sequence
  Description of Artificial Sequence: Synthetic oligonucleotide
  Sense strand starting at position 2523 of SEQ ID NO: 1561724
gcuggugacccugaaauuc

SEQ ID NO: 1693554 - RNA, 19 nt, Artificial Sequence
  Description of Artificial Sequence: Synthetic oligonucleotide
  Antisense strand to SEQ ID NO: 1693553
gaauuucagggucaccagc

SEQ ID NO: 1693555 - RNA, 19 nt, Artificial Sequence
  Description of Artificial Sequence: Synthetic oligonucleotide
  Sense strand starting at position 3499 of SEQ ID NO: 1561724
gguucuugugggugguuua

SEQ ID NO: 1693556 - RNA, 19 nt, Artificial Sequence
  Description of Artificial Sequence: Synthetic oligonucleotide
  Antisense strand to SEQ ID NO: 1693555
uaaaccacccacaagaacc

SEQ ID NO: 1693557 - RNA, 19 nt, Artificial Sequence
  Description of Artificial Sequence: Synthetic oligonucleotide
  Sense strand starting at position 3518 of SEQ ID NO: 1561724
caguaucuagugcagaaga

SEQ ID NO: 1693558 - RNA, 19 nt, Artificial Sequence
  Description of Artificial Sequence: Synthetic oligonucleotide
  Antisense strand to SEQ ID NO: 1693557
ucuucugcacuagauacug

SEQ ID NO: 1693559 - RNA, 19 nt, Artificial Sequence
  Description of Artificial Sequence: Synthetic oligonucleotide
  Sense strand starting at position 3520 of SEQ ID NO: 1561724
guaucuagugcagaagaaa

SEQ ID NO: 1693560 - RNA, 19 nt, Artificial Sequence
  Description of Artificial Sequence: Synthetic oligonucleotide
  Antisense strand to SEQ ID NO: 1693559
uuucuucugcacuagauac

SEQ ID NO: 1693561 - RNA, 19 nt, Artificial Sequence
  Description of Artificial Sequence: Synthetic oligonucleotide
  Sense strand starting at position 3567 of SEQ ID NO: 1561724
ucuccucuuugagcauuga

SEQ ID NO: 1693562 - RNA, 19 nt, Artificial Sequence
  Description of Artificial Sequence: Synthetic oligonucleotide
  Antisense strand to SEQ ID NO: 1693561
ucaaugcucaaagaggaga

SEQ ID NO: 1693563 - RNA, 19 nt, Artificial Sequence
  Description of Artificial Sequence: Synthetic oligonucleotide
  Sense strand starting at position 3568 of SEQ ID NO: 1561724
cuccucuuugagcauugaa

SEQ ID NO: 1693564 - RNA, 19 nt, Artificial Sequence
  Description of Artificial Sequence: Synthetic oligonucleotide
  Antisense strand to SEQ ID NO: 1693563
uucaaugcucaaagaggag

SEQ ID NO: 1693565 - RNA, 19 nt, Artificial Sequence
  Description of Artificial Sequence: Synthetic oligonucleotide
  Sense strand starting at position 3571 of SEQ ID NO: 1561724
cucuuugagcauugaauaa

SEQ ID NO: 1693566 - RNA, 19 nt, Artificial Sequence
  Description of Artificial Sequence: Synthetic oligonucleotide
  Antisense strand to SEQ ID NO: 1693565
uuauucaaugcucaaagag

SEQ ID NO: 1693567 - RNA, 19 nt, Artificial Sequence
  Description of Artificial Sequence: Synthetic oligonucleotide
  Sense strand starting at position 3612 of SEQ ID NO: 1561724
agcauuaguaaauguuagu

SEQ ID NO: 1693568 - RNA, 19 nt, Artificial Sequence
  Description of Artificial Sequence: Synthetic oligonucleotide
  Antisense strand to SEQ ID NO: 1693567
acuaacauuuacuaaugcu

SEQ ID NO: 1693569 - RNA, 19 nt, Artificial Sequence
  Description of Artificial Sequence: Synthetic oligonucleotide
  Sense strand starting at position 3627 of SEQ ID NO: 1561724
uaguaauagcaauggcuga

SEQ ID NO: 1693570 - RNA, 19 nt, Artificial Sequence
  Description of Artificial Sequence: Synthetic oligonucleotide
  Antisense strand to SEQ ID NO: 1693569
ucagccauugcuauuacua

SEQ ID NO: 1693571 - RNA, 19 nt, Artificial Sequence
  Description of Artificial Sequence: Synthetic oligonucleotide
  Sense strand starting at position 3860 of SEQ ID NO: 1561724
uagguuuagagagguuaag

SEQ ID NO: 1693572 - RNA, 19 nt, Artificial Sequence
  Description of Artificial Sequence: Synthetic oligonucleotide
  Antisense strand to SEQ ID NO: 1693571
cuuaaccucucuaaaccua

SEQ ID NO: 1693573 - RNA, 19 nt, Artificial Sequence
  Description of Artificial Sequence: Synthetic oligonucleotide
  Sense strand starting at position 3888 of SEQ ID NO: 1561724
uauaauauccgagacaguu

SEQ ID NO: 1693574 - RNA, 19 nt, Artificial Sequence
  Description of Artificial Sequence: Synthetic oligonucleotide
  Antisense strand to SEQ ID NO: 1693573
aacugucucggauauuaua

SEQ ID NO: 1693575 - RNA, 19 nt, Artificial Sequence
  Description of Artificial Sequence: Synthetic oligonucleotide
  Sense strand starting at position 16 of SEQ ID NO: 1561725
gacacuaugucuguguuua

SEQ ID NO: 1693576 - RNA, 19 nt, Artificial Sequence
  Description of Artificial Sequence: Synthetic oligonucleotide
  Antisense strand to SEQ ID NO: 1693575
uaaacacagacauaguguc

SEQ ID NO: 1693577 - RNA, 19 nt, Artificial Sequence
  Description of Artificial Sequence: Synthetic oligonucleotide
  Sense strand starting at position 20 of SEQ ID NO: 1561725
cuaugucuguguuuauaaa

SEQ ID NO: 1693578 - RNA, 19 nt, Artificial Sequence
  Description of Artificial Sequence: Synthetic oligonucleotide
  Antisense strand to SEQ ID NO: 1693577
uuuauaaacacagacauag

SEQ ID NO: 1693579 - RNA, 19 nt, Artificial Sequence
  Description of Artificial Sequence: Synthetic oligonucleotide
  Sense strand starting at position 60 of SEQ ID NO: 1561725
cucagcuuggagggauaau

SEQ ID NO: 1693580 - RNA, 19 nt, Artificial Sequence
  Description of Artificial Sequence: Synthetic oligonucleotide
  Antisense strand to SEQ ID NO: 1693579
auuaucccuccaagcugag

SEQ ID NO: 1693581 - RNA, 19 nt, Artificial Sequence
  Description of Artificial Sequence: Synthetic oligonucleotide
  Sense strand starting at position 304 of SEQ ID NO: 1561725
gucuguugaccauacuaug

SEQ ID NO: 1693582 - RNA, 19 nt, Artificial Sequence
  Description of Artificial Sequence: Synthetic oligonucleotide
  Antisense strand to SEQ ID NO: 1693581
cauaguauggucaacagac

SEQ ID NO: 1693583 - RNA, 19 nt, Artificial Sequence
  Description of Artificial Sequence: Synthetic oligonucleotide
  Sense strand starting at position 588 of SEQ ID NO: 1561725
caguuaaggugucucauua

SEQ ID NO: 1693584 - RNA, 19 nt, Artificial Sequence
  Description of Artificial Sequence: Synthetic oligonucleotide
  Antisense strand to SEQ ID NO: 1693583
uaaugagacaccuuaacug

SEQ ID NO: 1693585 - RNA, 19 nt, Artificial Sequence
  Description of Artificial Sequence: Synthetic oligonucleotide
  Sense strand starting at position 596 of SEQ ID NO: 1561725
gugucucauuaauuuguaa

SEQ ID NO: 1693586 - RNA, 19 nt, Artificial Sequence
  Description of Artificial Sequence: Synthetic oligonucleotide
  Antisense strand to SEQ ID NO: 1693585
uuacaaauuaaugagacac

SEQ ID NO: 1693587 - RNA, 19 nt, Artificial Sequence
  Description of Artificial Sequence: Synthetic oligonucleotide
  Sense strand starting at position 675 of SEQ ID NO: 1561725
ccagauaaccuguggcaua

SEQ ID NO: 1693588 - RNA, 19 nt, Artificial Sequence
  Description of Artificial Sequence: Synthetic oligonucleotide
  Antisense strand to SEQ ID NO: 1693587
uaugccacagguuaucugg

SEQ ID NO: 1693589 - RNA, 19 nt, Artificial Sequence
  Description of Artificial Sequence: Synthetic oligonucleotide
  Sense strand starting at position 888 of SEQ ID NO: 1561725
guaauaauugcaugagucu

SEQ ID NO: 1693590 - RNA, 19 nt, Artificial Sequence
  Description of Artificial Sequence: Synthetic oligonucleotide
  Antisense strand to SEQ ID NO: 1693589
agacucaugcaauuauuac

SEQ ID NO: 1693591 - RNA, 19 nt, Artificial Sequence
  Description of Artificial Sequence: Synthetic oligonucleotide
  Sense strand starting at position 963 of SEQ ID NO: 1561725
guagcauaucaacagguaa

SEQ ID NO: 1693592 - RNA, 19 nt, Artificial Sequence
  Description of Artificial Sequence: Synthetic oligonucleotide
  Antisense strand to SEQ ID NO: 1693591
uuaccuguugauaugcuac

SEQ ID NO: 1693593 - RNA, 19 nt, Artificial Sequence
  Description of Artificial Sequence: Synthetic oligonucleotide
  Sense strand starting at position 1000 of SEQ ID NO: 1561725
ccguuaccucaagaauagu

SEQ ID NO: 1693594 - RNA, 19 nt, Artificial Sequence
  Description of Artificial Sequence: Synthetic oligonucleotide
  Antisense strand to SEQ ID NO: 1693593
acuauucuugagguaacgg

SEQ ID NO: 1693595 - RNA, 19 nt, Artificial Sequence
  Description of Artificial Sequence: Synthetic oligonucleotide
  Sense strand starting at position 1088 of SEQ ID NO: 1561725
auccuauaauguguaaggu

SEQ ID NO: 1693596 - RNA, 19 nt, Artificial Sequence
  Description of Artificial Sequence: Synthetic oligonucleotide
  Antisense strand to SEQ ID NO: 1693595
accuuacacauuauaggau

SEQ ID NO: 1693597 - RNA, 19 nt, Artificial Sequence
  Description of Artificial Sequence: Synthetic oligonucleotide
  Sense strand starting at position 1089 of SEQ ID NO: 1561725
uccuauaauguguaagguu

SEQ ID NO: 1693598 - RNA, 19 nt, Artificial Sequence
  Description of Artificial Sequence: Synthetic oligonucleotide
  Antisense strand to SEQ ID NO: 1693597
aaccuuacacauuauagga

SEQ ID NO: 1693599 - RNA, 19 nt, Artificial Sequence
  Description of Artificial Sequence: Synthetic oligonucleotide
  Sense strand starting at position 1364 of SEQ ID NO: 1561725
gcuggugacccugaaauuc

SEQ ID NO: 1693600 - RNA, 19 nt, Artificial Sequence
  Description of Artificial Sequence: Synthetic oligonucleotide
  Antisense strand to SEQ ID NO: 1693599
gaauuucagggucaccagc

SEQ ID NO: 1693601 - RNA, 19 nt, Artificial Sequence
  Description of Artificial Sequence: Synthetic oligonucleotide
  Sense strand starting at position 2359 of SEQ ID NO: 1561725
caguaucuagugcagaaga

SEQ ID NO: 1693602 - RNA, 19 nt, Artificial Sequence
  Description of Artificial Sequence: Synthetic oligonucleotide
  Antisense strand to SEQ ID NO: 1693601
ucuucugcacuagauacug

SEQ ID NO: 1693603 - RNA, 19 nt, Artificial Sequence
  Description of Artificial Sequence: Synthetic oligonucleotide
  Sense strand starting at position 2361 of SEQ ID NO: 1561725
guaucuagugcagaagaaa

SEQ ID NO: 1693604 - RNA, 19 nt, Artificial Sequence
  Description of Artificial Sequence: Synthetic oligonucleotide
  Antisense strand to SEQ ID NO: 1693603
uuucuucugcacuagauac

SEQ ID NO: 1693605 - RNA, 19 nt, Artificial Sequence
  Description of Artificial Sequence: Synthetic oligonucleotide
  Sense strand starting at position 2408 of SEQ ID NO: 1561725
ucuccucuuugagcauuga

SEQ ID NO: 1693606 - RNA, 19 nt, Artificial Sequence
  Description of Artificial Sequence: Synthetic oligonucleotide
  Antisense strand to SEQ ID NO: 1693605
ucaaugcucaaagaggaga

SEQ ID NO: 1693607 - RNA, 19 nt, Artificial Sequence
  Description of Artificial Sequence: Synthetic oligonucleotide
  Sense strand starting at position 2409 of SEQ ID NO: 1561725
cuccucuuugagcauugaa

SEQ ID NO: 1693608 - RNA, 19 nt, Artificial Sequence
  Description of Artificial Sequence: Synthetic oligonucleotide
  Antisense strand to SEQ ID NO: 1693607
uucaaugcucaaagaggag

SEQ ID NO: 1693609 - RNA, 19 nt, Artificial Sequence
  Description of Artificial Sequence: Synthetic oligonucleotide
  Sense strand starting at position 2412 of SEQ ID NO: 1561725
cucuuugagcauugaauaa

SEQ ID NO: 1693610 - RNA, 19 nt, Artificial Sequence
  Description of Artificial Sequence: Synthetic oligonucleotide
  Antisense strand to SEQ ID NO: 1693609
uuauucaaugcucaaagag

SEQ ID NO: 1693611 - RNA, 19 nt, Artificial Sequence
  Description of Artificial Sequence: Synthetic oligonucleotide
  Sense strand starting at position 2453 of SEQ ID NO: 1561725
agcauuaguaaauguuagu

SEQ ID NO: 1693612 - RNA, 19 nt, Artificial Sequence
  Description of Artificial Sequence: Synthetic oligonucleotide
  Antisense strand to SEQ ID NO: 1693611
acuaacauuuacuaaugcu

SEQ ID NO: 1693613 - RNA, 19 nt, Artificial Sequence
  Description of Artificial Sequence: Synthetic oligonucleotide
  Sense strand starting at position 2468 of SEQ ID NO: 1561725
uaguaauagcaauggcuga

SEQ ID NO: 1693614 - RNA, 19 nt, Artificial Sequence
  Description of Artificial Sequence: Synthetic oligonucleotide
  Antisense strand to SEQ ID NO: 1693613
ucagccauugcuauuacua

SEQ ID NO: 1693615 - RNA, 19 nt, Artificial Sequence
  Description of Artificial Sequence: Synthetic oligonucleotide
  Sense strand starting at position 2701 of SEQ ID NO: 1561725
uagguuuagagagguuaag

SEQ ID NO: 1693616 - RNA, 19 nt, Artificial Sequence
  Description of Artificial Sequence: Synthetic oligonucleotide
  Antisense strand to SEQ ID NO: 1693615
cuuaaccucucuaaaccua

SEQ ID NO: 1693617 - RNA, 19 nt, Artificial Sequence
  Description of Artificial Sequence: Synthetic oligonucleotide
  Sense strand starting at position 2729 of SEQ ID NO: 1561725
uauaauauccgagacaguu

SEQ ID NO: 1693618 - RNA, 19 nt, Artificial Sequence
  Description of Artificial Sequence: Synthetic oligonucleotide
  Antisense strand to SEQ ID NO: 1693617
aacugucucggauauuaua

SEQ ID NO: 1693619 - RNA, 19 nt, Artificial Sequence
  Description of Artificial Sequence: Synthetic oligonucleotide
  Sense strand starting at position 2861 of SEQ ID NO: 1561725
ugaacugaauuugaaugau

SEQ ID NO: 1693620 - RNA, 19 nt, Artificial Sequence
  Description of Artificial Sequence: Synthetic oligonucleotide
  Antisense strand to SEQ ID NO: 1693619
aucauucaaauucaguuca

SEQ ID NO: 1693621 - RNA, 19 nt, Artificial Sequence
  Description of Artificial Sequence: Synthetic oligonucleotide
  Sense strand starting at position 2915 of SEQ ID NO: 1561725
aucuaugauggcugaacua

SEQ ID NO: 1693622 - RNA, 19 nt, Artificial Sequence
  Description of Artificial Sequence: Synthetic oligonucleotide
  Antisense strand to SEQ ID NO: 1693621
uaguucagccaucauagau

SEQ ID NO: 1693623 - RNA, 19 nt, Artificial Sequence
  Description of Artificial Sequence: Synthetic oligonucleotide
  Sense strand starting at position 2925 of SEQ ID NO: 1561725
gcugaacuaccuuacaguu

SEQ ID NO: 1693624 - RNA, 19 nt, Artificial Sequence
  Description of Artificial Sequence: Synthetic oligonucleotide
  Antisense strand to SEQ ID NO: 1693623
aacuguaagguaguucagc

SEQ ID NO: 1693625 - RNA, 19 nt, Artificial Sequence
  Description of Artificial Sequence: Synthetic oligonucleotide
  Sense strand starting at position 2934 of SEQ ID NO: 1561725
ccuuacaguugaguuuaaa

SEQ ID NO: 1693626 - RNA, 19 nt, Artificial Sequence
  Description of Artificial Sequence: Synthetic oligonucleotide
  Antisense strand to SEQ ID NO: 1693625
uuuaaacucaacuguaagg

SEQ ID NO: 1693627 - RNA, 19 nt, Artificial Sequence
  Description of Artificial Sequence: Synthetic oligonucleotide
  Sense strand starting at position 2954 of SEQ ID NO: 1561725
ucuuaauucggguaguuag

SEQ ID NO: 1693628 - RNA, 19 nt, Artificial Sequence
  Description of Artificial Sequence: Synthetic oligonucleotide
  Antisense strand to SEQ ID NO: 1693627
cuaacuacccgaauuaaga

SEQ ID NO: 1693629 - RNA, 19 nt, Artificial Sequence
  Description of Artificial Sequence: Synthetic oligonucleotide
  Sense strand starting at position 2991 of SEQ ID NO: 1561725
gaaagugagcaacauugua

SEQ ID NO: 1693630 - RNA, 19 nt, Artificial Sequence
  Description of Artificial Sequence: Synthetic oligonucleotide
  Antisense strand to SEQ ID NO: 1693629
uacaauguugcucacuuuc

SEQ ID NO: 1693631 - RNA, 19 nt, Artificial Sequence
  Description of Artificial Sequence: Synthetic oligonucleotide
  Sense strand starting at position 3151 of SEQ ID NO: 1561725
gguaaacauuaauucugga

SEQ ID NO: 1693632 - RNA, 19 nt, Artificial Sequence
  Description of Artificial Sequence: Synthetic oligonucleotide
  Antisense strand to SEQ ID NO: 1693631
uccagaauuaauguuuacc

SEQ ID NO: 1693633 - RNA, 19 nt, Artificial Sequence
  Description of Artificial Sequence: Synthetic oligonucleotide
  Sense strand starting at position 3165 of SEQ ID NO: 1561725
cuggauaacccuggcaaga

SEQ ID NO: 1693634 - RNA, 19 nt, Artificial Sequence
  Description of Artificial Sequence: Synthetic oligonucleotide
  Antisense strand to SEQ ID NO: 1693633
ucuugccaggguuauccag

SEQ ID NO: 1693635 - RNA, 19 nt, Artificial Sequence
  Description of Artificial Sequence: Synthetic oligonucleotide
  Sense strand starting at position 3218 of SEQ ID NO: 1561725
ucaugagauugccuuuauu

SEQ ID NO: 1693636 - RNA, 19 nt, Artificial Sequence
  Description of Artificial Sequence: Synthetic oligonucleotide
  Antisense strand to SEQ ID NO: 1693635
aauaaaggcaaucucauga

SEQ ID NO: 1693637 - RNA, 19 nt, Artificial Sequence
  Description of Artificial Sequence: Synthetic oligonucleotide
  Sense strand starting at position 3256 of SEQ ID NO: 1561725
cacucauugugucuuggga

SEQ ID NO: 1693638 - RNA, 19 nt, Artificial Sequence
  Description of Artificial Sequence: Synthetic oligonucleotide
  Antisense strand to SEQ ID NO: 1693637
ucccaagacacaaugagug

SEQ ID NO: 1693639 - RNA, 19 nt, Artificial Sequence
  Description of Artificial Sequence: Synthetic oligonucleotide
  Sense strand starting at position 3315 of SEQ ID NO: 1561725
cucuaauccuuggcacuga

SEQ ID NO: 1693640 - RNA, 19 nt, Artificial Sequence
  Description of Artificial Sequence: Synthetic oligonucleotide
  Antisense strand to SEQ ID NO: 1693639
ucagugccaaggauuagag

SEQ ID NO: 1693641 - RNA, 19 nt, Artificial Sequence
  Description of Artificial Sequence: Synthetic oligonucleotide
  Sense strand starting at position 3559 of SEQ ID NO: 1561725
auuguuuggagcuagcauu

SEQ ID NO: 1693642 - RNA, 19 nt, Artificial Sequence
  Description of Artificial Sequence: Synthetic oligonucleotide
  Antisense strand to SEQ ID NO: 1693641
aaugcuagcuccaaacaau

SEQ ID NO: 1693643 - RNA, 19 nt, Artificial Sequence
  Description of Artificial Sequence: Synthetic oligonucleotide
  Sense strand starting at position 3756 of SEQ ID NO: 1561725
uacaauagaguccgccaau

SEQ ID NO: 1693644 - RNA, 19 nt, Artificial Sequence
  Description of Artificial Sequence: Synthetic oligonucleotide
  Antisense strand to SEQ ID NO: 1693643
auuggcggacucuauugua

SEQ ID NO: 1693645 - RNA, 19 nt, Artificial Sequence
  Description of Artificial Sequence: Synthetic oligonucleotide
  Sense strand starting at position 3757 of SEQ ID NO: 1561725
acaauagaguccgccaauu

SEQ ID NO: 1693646 - RNA, 19 nt, Artificial Sequence
  Description of Artificial Sequence: Synthetic oligonucleotide
  Antisense strand to SEQ ID NO: 1693645
aauuggcggacucuauugu

SEQ ID NO: 1693647 - RNA, 19 nt, Artificial Sequence
  Description of Artificial Sequence: Synthetic oligonucleotide
  Sense strand starting at position 3829 of SEQ ID NO: 1561725
gauggcuaauugucuuuaa

SEQ ID NO: 1693648 - RNA, 19 nt, Artificial Sequence
  Description of Artificial Sequence: Synthetic oligonucleotide
  Antisense strand to SEQ ID NO: 1693647
uuaaagacaauuagccauc

SEQ ID NO: 1693649 - RNA, 19 nt, Artificial Sequence
  Description of Artificial Sequence: Synthetic oligonucleotide
  Sense strand starting at position 3830 of SEQ ID NO: 1561725
auggcuaauugucuuuaaa

SEQ ID NO: 1693650 - RNA, 19 nt, Artificial Sequence
  Description of Artificial Sequence: Synthetic oligonucleotide
  Antisense strand to SEQ ID NO: 1693649
uuuaaagacaauuagccau

SEQ ID NO: 1693651 - RNA, 19 nt, Artificial Sequence
  Description of Artificial Sequence: Synthetic oligonucleotide
  Sense strand starting at position 3973 of SEQ ID NO: 1561725
agcuaucagucuuugaucu

SEQ ID NO: 1693652 - RNA, 19 nt, Artificial Sequence
  Description of Artificial Sequence: Synthetic oligonucleotide
  Antisense strand to SEQ ID NO: 1693651
agaucaaagacugauagcu

SEQ ID NO: 1693653 - RNA, 19 nt, Artificial Sequence
  Description of Artificial Sequence: Synthetic oligonucleotide
  Sense strand starting at position 3977 of SEQ ID NO: 1561725
aucagucuuugaucucauu

SEQ ID NO: 1693654 - RNA, 19 nt, Artificial Sequence
  Description of Artificial Sequence: Synthetic oligonucleotide
  Antisense strand to SEQ ID NO: 1693653
aaugagaucaaagacugau

SEQ ID NO: 1693655 - RNA, 19 nt, Artificial Sequence
  Description of Artificial Sequence: Synthetic oligonucleotide
  Sense strand starting at position 216 of SEQ ID NO: 1561726
gguuuaucagucuagguua

SEQ ID NO: 1693656 - RNA, 19 nt, Artificial Sequence
  Description of Artificial Sequence: Synthetic oligonucleotide
  Antisense strand to SEQ ID NO: 1693655
uaaccuagacugauaaacc

SEQ ID NO: 1693657 - RNA, 19 nt, Artificial Sequence
  Description of Artificial Sequence: Synthetic oligonucleotide
  Sense strand starting at position 219 of SEQ ID NO: 1561726
uuaucagucuagguuaaug

SEQ ID NO: 1693658 - RNA, 19 nt, Artificial Sequence
  Description of Artificial Sequence: Synthetic oligonucleotide
  Antisense strand to SEQ ID NO: 1693657
cauuaaccuagacugauaa

SEQ ID NO: 1693659 - RNA, 19 nt, Artificial Sequence
  Description of Artificial Sequence: Synthetic oligonucleotide
  Sense strand starting at position 268 of SEQ ID NO: 1561726
cuauucuaguaguuagaaa

SEQ ID NO: 1693660 - RNA, 19 nt, Artificial Sequence
  Description of Artificial Sequence: Synthetic oligonucleotide
  Antisense strand to SEQ ID NO: 1693659
uuucuaacuacuagaauag

SEQ ID NO: 1693661 - RNA, 19 nt, Artificial Sequence
  Description of Artificial Sequence: Synthetic oligonucleotide
  Sense strand starting at position 286 of SEQ ID NO: 1561726
aacuaugggccguagacua

SEQ ID NO: 1693662 - RNA, 19 nt, Artificial Sequence
  Description of Artificial Sequence: Synthetic oligonucleotide
  Antisense strand to SEQ ID NO: 1693661
uagucuacggcccauaguu

SEQ ID NO: 1693663 - RNA, 19 nt, Artificial Sequence
  Description of Artificial Sequence: Synthetic oligonucleotide
  Sense strand starting at position 325 of SEQ ID NO: 1561726
uuguauggacugugaauga

SEQ ID NO: 1693664 - RNA, 19 nt, Artificial Sequence
  Description of Artificial Sequence: Synthetic oligonucleotide
  Antisense strand to SEQ ID NO: 1693663
ucauucacaguccauacaa

SEQ ID NO: 1693665 - RNA, 19 nt, Artificial Sequence
  Description of Artificial Sequence: Synthetic oligonucleotide
  Sense strand starting at position 334 of SEQ ID NO: 1561726
cugugaaugagcuagggau

SEQ ID NO: 1693666 - RNA, 19 nt, Artificial Sequence
  Description of Artificial Sequence: Synthetic oligonucleotide
  Antisense strand to SEQ ID NO: 1693665
aucccuagcucauucacag

SEQ ID NO: 1693667 - RNA, 19 nt, Artificial Sequence
  Description of Artificial Sequence: Synthetic oligonucleotide
  Sense strand starting at position 336 of SEQ ID NO: 1561726
gugaaugagcuagggauau

SEQ ID NO: 1693668 - RNA, 19 nt, Artificial Sequence
  Description of Artificial Sequence: Synthetic oligonucleotide
  Antisense strand to SEQ ID NO: 1693667
auaucccuagcucauucac

SEQ ID NO: 1693669 - RNA, 19 nt, Artificial Sequence
  Description of Artificial Sequence: Synthetic oligonucleotide
  Sense strand starting at position 527 of SEQ ID NO: 1561726
augcucauuugugccgaua

SEQ ID NO: 1693670 - RNA, 19 nt, Artificial Sequence
  Description of Artificial Sequence: Synthetic oligonucleotide
  Antisense strand to SEQ ID NO: 1693669
uaucggcacaaaugagcau

SEQ ID NO: 1693671 - RNA, 19 nt, Artificial Sequence
  Description of Artificial Sequence: Synthetic oligonucleotide
  Sense strand starting at position 582 of SEQ ID NO: 1561726
ugacuaguuguguagacaa

SEQ ID NO: 1693672 - RNA, 19 nt, Artificial Sequence
  Description of Artificial Sequence: Synthetic oligonucleotide
  Antisense strand to SEQ ID NO: 1693671
uugucuacacaacuaguca

SEQ ID NO: 1693673 - RNA, 19 nt, Artificial Sequence
  Description of Artificial Sequence: Synthetic oligonucleotide
  Sense strand starting at position 584 of SEQ ID NO: 1561726
acuaguuguguagacaaca

SEQ ID NO: 1693674 - RNA, 19 nt, Artificial Sequence
  Description of Artificial Sequence: Synthetic oligonucleotide
  Antisense strand to SEQ ID NO: 1693673
uguugucuacacaacuagu

SEQ ID NO: 1693675 - RNA, 19 nt, Artificial Sequence
  Description of Artificial Sequence: Synthetic oligonucleotide
  Sense strand starting at position 596 of SEQ ID NO: 1561726
gacaacauguggcucauaa

SEQ ID NO: 1693676 - RNA, 19 nt, Artificial Sequence
  Description of Artificial Sequence: Synthetic oligonucleotide
  Antisense strand to SEQ ID NO: 1693675
uuaugagccacauguuguc

SEQ ID NO: 1693677 - RNA, 19 nt, Artificial Sequence
  Description of Artificial Sequence: Synthetic oligonucleotide
  Sense strand starting at position 598 of SEQ ID NO: 1561726
caacauguggcucauaaag

SEQ ID NO: 1693678 - RNA, 19 nt, Artificial Sequence
  Description of Artificial Sequence: Synthetic oligonucleotide
  Antisense strand to SEQ ID NO: 1693677
cuuuaugagccacauguug

SEQ ID NO: 1693679 - RNA, 19 nt, Artificial Sequence
  Description of Artificial Sequence: Synthetic oligonucleotide
  Sense strand starting at position 607 of SEQ ID NO: 1561726
gcucauaaagcuuaaugua

SEQ ID NO: 1693680 - RNA, 19 nt, Artificial Sequence
  Description of Artificial Sequence: Synthetic oligonucleotide
  Antisense strand to SEQ ID NO: 1693679
uacauuaagcuuuaugagc

SEQ ID NO: 1693681 - RNA, 19 nt, Artificial Sequence
  Description of Artificial Sequence: Synthetic oligonucleotide
  Sense strand starting at position 663 of SEQ ID NO: 1561726
cgugcuacuggcuucuaau

SEQ ID NO: 1693682 - RNA, 19 nt, Artificial Sequence
  Description of Artificial Sequence: Synthetic oligonucleotide
  Antisense strand to SEQ ID NO: 1693681
auuagaagccaguagcacg

SEQ ID NO: 1693683 - RNA, 19 nt, Artificial Sequence
  Description of Artificial Sequence: Synthetic oligonucleotide
  Sense strand starting at position 676 of SEQ ID NO: 1561726
ucuaauguugcucaugaga

SEQ ID NO: 1693684 - RNA, 19 nt, Artificial Sequence
  Description of Artificial Sequence: Synthetic oligonucleotide
  Antisense strand to SEQ ID NO: 1693683
ucucaugagcaacauuaga

SEQ ID NO: 1693685 - RNA, 19 nt, Artificial Sequence
  Description of Artificial Sequence: Synthetic oligonucleotide
  Sense strand starting at position 679 of SEQ ID NO: 1561726
aauguugcucaugagaaau

SEQ ID NO: 1693686 - RNA, 19 nt, Artificial Sequence
  Description of Artificial Sequence: Synthetic oligonucleotide
  Antisense strand to SEQ ID NO: 1693685
auuucucaugagcaacauu

SEQ ID NO: 1693687 - RNA, 19 nt, Artificial Sequence
  Description of Artificial Sequence: Synthetic oligonucleotide
  Sense strand starting at position 691 of SEQ ID NO: 1561726
gagaaauauucugucaguc

SEQ ID NO: 1693688 - RNA, 19 nt, Artificial Sequence
  Description of Artificial Sequence: Synthetic oligonucleotide
  Antisense strand to SEQ ID NO: 1693687
gacugacagaauauuucuc

SEQ ID NO: 1693689 - RNA, 19 nt, Artificial Sequence
  Description of Artificial Sequence: Synthetic oligonucleotide
  Sense strand starting at position 1204 of SEQ ID NO: 1561726
caucuaaaguucuugguga

SEQ ID NO: 1693690 - RNA, 19 nt, Artificial Sequence
  Description of Artificial Sequence: Synthetic oligonucleotide
  Antisense strand to SEQ ID NO: 1693689
ucaccaagaacuuuagaug

SEQ ID NO: 1693691 - RNA, 19 nt, Artificial Sequence
  Description of Artificial Sequence: Synthetic oligonucleotide
  Sense strand starting at position 1281 of SEQ ID NO: 1561726
uggacuucucagcaguauu

SEQ ID NO: 1693692 - RNA, 19 nt, Artificial Sequence
  Description of Artificial Sequence: Synthetic oligonucleotide
  Antisense strand to SEQ ID NO: 1693691
aauacugcugagaagucca

SEQ ID NO: 1693693 - RNA, 19 nt, Artificial Sequence
  Description of Artificial Sequence: Synthetic oligonucleotide
  Sense strand starting at position 1318 of SEQ ID NO: 1561726
uagagcuuuguguagagaa

SEQ ID NO: 1693694 - RNA, 19 nt, Artificial Sequence
  Description of Artificial Sequence: Synthetic oligonucleotide
  Antisense strand to SEQ ID NO: 1693693
uucucuacacaaagcucua

SEQ ID NO: 1693695 - RNA, 19 nt, Artificial Sequence
  Description of Artificial Sequence: Synthetic oligonucleotide
  Sense strand starting at position 1320 of SEQ ID NO: 1561726
gagcuuuguguagagaaag

SEQ ID NO: 1693696 - RNA, 19 nt, Artificial Sequence
  Description of Artificial Sequence: Synthetic oligonucleotide
  Antisense strand to SEQ ID NO: 1693695
cuuucucuacacaaagcuc

SEQ ID NO: 1693697 - RNA, 19 nt, Artificial Sequence
  Description of Artificial Sequence: Synthetic oligonucleotide
  Sense strand starting at position 1331 of SEQ ID NO: 1561726
agagaaagcuugucacuuu

SEQ ID NO: 1693698 - RNA, 19 nt, Artificial Sequence
  Description of Artificial Sequence: Synthetic oligonucleotide
  Antisense strand to SEQ ID NO: 1693697
aaagugacaagcuuucucu

SEQ ID NO: 1693699 - RNA, 19 nt, Artificial Sequence
  Description of Artificial Sequence: Synthetic oligonucleotide
  Sense strand starting at position 1402 of SEQ ID NO: 1561726
uccaaagucccagguagau

SEQ ID NO: 1693700 - RNA, 19 nt, Artificial Sequence
  Description of Artificial Sequence: Synthetic oligonucleotide
  Antisense strand to SEQ ID NO: 1693699
aucuaccugggacuuugga

SEQ ID NO: 1693701 - RNA, 19 nt, Artificial Sequence
  Description of Artificial Sequence: Synthetic oligonucleotide
  Sense strand starting at position 1448 of SEQ ID NO: 1561726
uggagugagguccauucua

SEQ ID NO: 1693702 - RNA, 19 nt, Artificial Sequence
  Description of Artificial Sequence: Synthetic oligonucleotide
  Antisense strand to SEQ ID NO: 1693701
uagaauggaccucacucca

SEQ ID NO: 1693703 - RNA, 19 nt, Artificial Sequence
  Description of Artificial Sequence: Synthetic oligonucleotide
  Sense strand starting at position 1481 of SEQ ID NO: 1561726
gucagaucggcucacauca

SEQ ID NO: 1693704 - RNA, 19 nt, Artificial Sequence
  Description of Artificial Sequence: Synthetic oligonucleotide
  Antisense strand to SEQ ID NO: 1693703
ugaugugagccgaucugac

SEQ ID NO: 1693705 - RNA, 19 nt, Artificial Sequence
  Description of Artificial Sequence: Synthetic oligonucleotide
  Sense strand starting at position 1512 of SEQ ID NO: 1561726
uggagaauuucccucgcuc

SEQ ID NO: 1693706 - RNA, 19 nt, Artificial Sequence
  Description of Artificial Sequence: Synthetic oligonucleotide
  Antisense strand to SEQ ID NO: 1693705
gagcgagggaaauucucca

SEQ ID NO: 1693707 - RNA, 19 nt, Artificial Sequence
  Description of Artificial Sequence: Synthetic oligonucleotide
  Sense strand starting at position 1623 of SEQ ID NO: 1561726
guagcauuaguuuaugaua

SEQ ID NO: 1693708 - RNA, 19 nt, Artificial Sequence
  Description of Artificial Sequence: Synthetic oligonucleotide
  Antisense strand to SEQ ID NO: 1693707
uaucauaaacuaaugcuac

SEQ ID NO: 1693709 - RNA, 19 nt, Artificial Sequence
  Description of Artificial Sequence: Synthetic oligonucleotide
  Sense strand starting at position 1803 of SEQ ID NO: 1561726
uggcuuucccuaugaagga

SEQ ID NO: 1693710 - RNA, 19 nt, Artificial Sequence
  Description of Artificial Sequence: Synthetic oligonucleotide
  Antisense strand to SEQ ID NO: 1693709
uccuucauagggaaagcca

SEQ ID NO: 1693711 - RNA, 19 nt, Artificial Sequence
  Description of Artificial Sequence: Synthetic oligonucleotide
  Sense strand starting at position 2261 of SEQ ID NO: 1561726
ggacccugaauccguaaau

SEQ ID NO: 1693712 - RNA, 19 nt, Artificial Sequence
  Description of Artificial Sequence: Synthetic oligonucleotide
  Antisense strand to SEQ ID NO: 1693711
auuuacggauucagggucc

SEQ ID NO: 1693713 - RNA, 19 nt, Artificial Sequence
  Description of Artificial Sequence: Synthetic oligonucleotide
  Sense strand starting at position 2262 of SEQ ID NO: 1561726
gacccugaauccguaaaua

SEQ ID NO: 1693714 - RNA, 19 nt, Artificial Sequence
  Description of Artificial Sequence: Synthetic oligonucleotide
  Antisense strand to SEQ ID NO: 1693713
uauuuacggauucaggguc

SEQ ID NO: 1693715 - RNA, 19 nt, Artificial Sequence
  Description of Artificial Sequence: Synthetic oligonucleotide
  Sense strand starting at position 2342 of SEQ ID NO: 1561726
caaagaauauaguugcaga

SEQ ID NO: 1693716 - RNA, 19 nt, Artificial Sequence
  Description of Artificial Sequence: Synthetic oligonucleotide
  Antisense strand to SEQ ID NO: 1693715
ucugcaacuauauucuuug

SEQ ID NO: 1693717 - RNA, 19 nt, Artificial Sequence
  Description of Artificial Sequence: Synthetic oligonucleotide
  Sense strand starting at position 2370 of SEQ ID NO: 1561726
acaggccaguucucagaaa

SEQ ID NO: 1693718 - RNA, 19 nt, Artificial Sequence
  Description of Artificial Sequence: Synthetic oligonucleotide
  Antisense strand to SEQ ID NO: 1693717
uuucugagaacuggccugu

SEQ ID NO: 1693719 - RNA, 19 nt, Artificial Sequence
  Description of Artificial Sequence: Synthetic oligonucleotide
  Sense strand starting at position 2492 of SEQ ID NO: 1561726
cucugaccacauggaaauu

SEQ ID NO: 1693720 - RNA, 19 nt, Artificial Sequence
  Description of Artificial Sequence: Synthetic oligonucleotide
  Antisense strand to SEQ ID NO: 1693719
aauuuccauguggucagag

SEQ ID NO: 1693721 - RNA, 19 nt, Artificial Sequence
  Description of Artificial Sequence: Synthetic oligonucleotide
  Sense strand starting at position 2530 of SEQ ID NO: 1561726
uguguauuauaaccaaacu

SEQ ID NO: 1693722 - RNA, 19 nt, Artificial Sequence
  Description of Artificial Sequence: Synthetic oligonucleotide
  Antisense strand to SEQ ID NO: 1693721
aguuugguuauaauacaca

SEQ ID NO: 1693723 - RNA, 19 nt, Artificial Sequence
  Description of Artificial Sequence: Synthetic oligonucleotide
  Sense strand starting at position 2751 of SEQ ID NO: 1561726
guaaguagauaacuaaguu

SEQ ID NO: 1693724 - RNA, 19 nt, Artificial Sequence
  Description of Artificial Sequence: Synthetic oligonucleotide
  Antisense strand to SEQ ID NO: 1693723
aacuuaguuaucuacuuac

SEQ ID NO: 1693725 - RNA, 19 nt, Artificial Sequence
  Description of Artificial Sequence: Synthetic oligonucleotide
  Sense strand starting at position 3163 of SEQ ID NO: 1561726
ugagcaaauggguagcuua

SEQ ID NO: 1693726 - RNA, 19 nt, Artificial Sequence
  Description of Artificial Sequence: Synthetic oligonucleotide
  Antisense strand to SEQ ID NO: 1693725
uaagcuacccauuugcuca

SEQ ID NO: 1693727 - RNA, 19 nt, Artificial Sequence
  Description of Artificial Sequence: Synthetic oligonucleotide
  Sense strand starting at position 3175 of SEQ ID NO: 1561726
uagcuuacugcacagugaa

SEQ ID NO: 1693728 - RNA, 19 nt, Artificial Sequence
  Description of Artificial Sequence: Synthetic oligonucleotide
  Antisense strand to SEQ ID NO: 1693727
uucacugugcaguaagcua

SEQ ID NO: 1693729 - RNA, 19 nt, Artificial Sequence
  Description of Artificial Sequence: Synthetic oligonucleotide
  Sense strand starting at position 3203 of SEQ ID NO: 1561726
gcaagaaaucucugggaac

SEQ ID NO: 1693730 - RNA, 19 nt, Artificial Sequence
  Description of Artificial Sequence: Synthetic oligonucleotide
  Antisense strand to SEQ ID NO: 1693729
guucccagagauuucuugc

SEQ ID NO: 1693731 - RNA, 19 nt, Artificial Sequence
  Description of Artificial Sequence: Synthetic oligonucleotide
  Sense strand starting at position 3551 of SEQ ID NO: 1561726
acuuuaaaguaugcauaga

SEQ ID NO: 1693732 - RNA, 19 nt, Artificial Sequence
  Description of Artificial Sequence: Synthetic oligonucleotide
  Antisense strand to SEQ ID NO: 1693731
ucuaugcauacuuuaaagu

SEQ ID NO: 1693733 - RNA, 19 nt, Artificial Sequence
  Description of Artificial Sequence: Synthetic oligonucleotide
  Sense strand starting at position 3562 of SEQ ID NO: 1561726
ugcauagauuuguuucuua

SEQ ID NO: 1693734 - RNA, 19 nt, Artificial Sequence
  Description of Artificial Sequence: Synthetic oligonucleotide
  Antisense strand to SEQ ID NO: 1693733
uaagaaacaaaucuaugca

SEQ ID NO: 1693735 - RNA, 19 nt, Artificial Sequence
  Description of Artificial Sequence: Synthetic oligonucleotide
  Sense strand starting at position 208 of SEQ ID NO: 1561727
ggauaugaacuuuguuagu

SEQ ID NO: 1693736 - RNA, 19 nt, Artificial Sequence
  Description of Artificial Sequence: Synthetic oligonucleotide
  Antisense strand to SEQ ID NO: 1693735
acuaacaaaguucauaucc

SEQ ID NO: 1693737 - RNA, 19 nt, Artificial Sequence
  Description of Artificial Sequence: Synthetic oligonucleotide
  Sense strand starting at position 219 of SEQ ID NO: 1561727
uuguuaguauuaucacaag

SEQ ID NO: 1693738 - RNA, 19 nt, Artificial Sequence
  Description of Artificial Sequence: Synthetic oligonucleotide
  Antisense strand to SEQ ID NO: 1693737
cuugugauaauacuaacaa

SEQ ID NO: 1693739 - RNA, 19 nt, Artificial Sequence
  Description of Artificial Sequence: Synthetic oligonucleotide
  Sense strand starting at position 325 of SEQ ID NO: 1561727
acugcaaagccauagguaa

SEQ ID NO: 1693740 - RNA, 19 nt, Artificial Sequence
  Description of Artificial Sequence: Synthetic oligonucleotide
  Antisense strand to SEQ ID NO: 1693739
uuaccuauggcuuugcagu

SEQ ID NO: 1693741 - RNA, 19 nt, Artificial Sequence
  Description of Artificial Sequence: Synthetic oligonucleotide
  Sense strand starting at position 585 of SEQ ID NO: 1561727
guaaguucucaucauuaga

SEQ ID NO: 1693742 - RNA, 19 nt, Artificial Sequence
  Description of Artificial Sequence: Synthetic oligonucleotide
  Antisense strand to SEQ ID NO: 1693741
ucuaaugaugagaacuuac

SEQ ID NO: 1693743 - RNA, 19 nt, Artificial Sequence
  Description of Artificial Sequence: Synthetic oligonucleotide
  Sense strand starting at position 595 of SEQ ID NO: 1561727
aucauuagacuguaagcuu

SEQ ID NO: 1693744 - RNA, 19 nt, Artificial Sequence
  Description of Artificial Sequence: Synthetic oligonucleotide
  Antisense strand to SEQ ID NO: 1693743
aagcuuacagucuaaugau

SEQ ID NO: 1693745 - RNA, 19 nt, Artificial Sequence
  Description of Artificial Sequence: Synthetic oligonucleotide
  Sense strand starting at position 684 of SEQ ID NO: 1561727
acauguggugaguacaaau

SEQ ID NO: 1693746 - RNA, 19 nt, Artificial Sequence
  Description of Artificial Sequence: Synthetic oligonucleotide
  Antisense strand to SEQ ID NO: 1693745
auuuguacucaccacaugu

SEQ ID NO: 1693747 - RNA, 19 nt, Artificial Sequence
  Description of Artificial Sequence: Synthetic oligonucleotide
  Sense strand starting at position 815 of SEQ ID NO: 1561727
uuggauacauuagcucaaa

SEQ ID NO: 1693748 - RNA, 19 nt, Artificial Sequence
  Description of Artificial Sequence: Synthetic oligonucleotide
  Antisense strand to SEQ ID NO: 1693747
uuugagcuaauguauccaa

SEQ ID NO: 1693749 - RNA, 19 nt, Artificial Sequence
  Description of Artificial Sequence: Synthetic oligonucleotide
  Sense strand starting at position 816 of SEQ ID NO: 1561727
uggauacauuagcucaaau

SEQ ID NO: 1693750 - RNA, 19 nt, Artificial Sequence
  Description of Artificial Sequence: Synthetic oligonucleotide
  Antisense strand to SEQ ID NO: 1693749
auuugagcuaauguaucca

SEQ ID NO: 1693751 - RNA, 19 nt, Artificial Sequence
  Description of Artificial Sequence: Synthetic oligonucleotide
  Sense strand starting at position 920 of SEQ ID NO: 1561727
uguggugugcauuauauuu

SEQ ID NO: 1693752 - RNA, 19 nt, Artificial Sequence
  Description of Artificial Sequence: Synthetic oligonucleotide
  Antisense strand to SEQ ID NO: 1693751
aaauauaaugcacaccaca

SEQ ID NO: 1693753 - RNA, 19 nt, Artificial Sequence
  Description of Artificial Sequence: Synthetic oligonucleotide
  Sense strand starting at position 925 of SEQ ID NO: 1561727
ugugcauuauauuuccauu

SEQ ID NO: 1693754 - RNA, 19 nt, Artificial Sequence
  Description of Artificial Sequence: Synthetic oligonucleotide
  Antisense strand to SEQ ID NO: 1693753
aauggaaauauaaugcaca

SEQ ID NO: 1693755 - RNA, 19 nt, Artificial Sequence
  Description of Artificial Sequence: Synthetic oligonucleotide
  Sense strand starting at position 936 of SEQ ID NO: 1561727
uuuccauuggaccagugau

SEQ ID NO: 1693756 - RNA, 19 nt, Artificial Sequence
  Description of Artificial Sequence: Synthetic oligonucleotide
  Antisense strand to SEQ ID NO: 1693755
aucacugguccaauggaaa

SEQ ID NO: 1693757 - RNA, 19 nt, Artificial Sequence
  Description of Artificial Sequence: Synthetic oligonucleotide
  Sense strand starting at position 946 of SEQ ID NO: 1561727
accagugaugcccaauaaa

SEQ ID NO: 1693758 - RNA, 19 nt, Artificial Sequence
  Description of Artificial Sequence: Synthetic oligonucleotide
  Antisense strand to SEQ ID NO: 1693757
uuuauugggcaucacuggu

SEQ ID NO: 1693759 - RNA, 19 nt, Artificial Sequence
  Description of Artificial Sequence: Synthetic oligonucleotide
  Sense strand starting at position 1000 of SEQ ID NO: 1561727
augccacauguggaguaau

SEQ ID NO: 1693760 - RNA, 19 nt, Artificial Sequence
  Description of Artificial Sequence: Synthetic oligonucleotide
  Antisense strand to SEQ ID NO: 1693759
auuacuccacauguggcau

SEQ ID NO: 1693761 - RNA, 19 nt, Artificial Sequence
  Description of Artificial Sequence: Synthetic oligonucleotide
  Sense strand starting at position 1096 of SEQ ID NO: 1561727
cugcgagucagacaaauag

SEQ ID NO: 1693762 - RNA, 19 nt, Artificial Sequence
  Description of Artificial Sequence: Synthetic oligonucleotide
  Antisense strand to SEQ ID NO: 1693761
cuauuugucugacucgcag

SEQ ID NO: 1693763 - RNA, 19 nt, Artificial Sequence
  Description of Artificial Sequence: Synthetic oligonucleotide
  Sense strand starting at position 1103 of SEQ ID NO: 1561727
ucagacaaauaguuaugua

SEQ ID NO: 1693764 - RNA, 19 nt, Artificial Sequence
  Description of Artificial Sequence: Synthetic oligonucleotide
  Antisense strand to SEQ ID NO: 1693763
uacauaacuauuugucuga

SEQ ID NO: 1693765 - RNA, 19 nt, Artificial Sequence
  Description of Artificial Sequence: Synthetic oligonucleotide
  Sense strand starting at position 1140 of SEQ ID NO: 1561727
gucauccgggcucaagaaa

SEQ ID NO: 1693766 - RNA, 19 nt, Artificial Sequence
  Description of Artificial Sequence: Synthetic oligonucleotide
  Antisense strand to SEQ ID NO: 1693765
uuucuugagcccggaugac

SEQ ID NO: 1693767 - RNA, 19 nt, Artificial Sequence
  Description of Artificial Sequence: Synthetic oligonucleotide
  Sense strand starting at position 1164 of SEQ ID NO: 1561727
gagggaggguaucuguaaa

SEQ ID NO: 1693768 - RNA, 19 nt, Artificial Sequence
  Description of Artificial Sequence: Synthetic oligonucleotide
  Antisense strand to SEQ ID NO: 1693767
uuuacagauacccucccuc

SEQ ID NO: 1693769 - RNA, 19 nt, Artificial Sequence
  Description of Artificial Sequence: Synthetic oligonucleotide
  Sense strand starting at position 1240 of SEQ ID NO: 1561727
accagauaguaagucuacu

SEQ ID NO: 1693770 - RNA, 19 nt, Artificial Sequence
  Description of Artificial Sequence: Synthetic oligonucleotide
  Antisense strand to SEQ ID NO: 1693769
aguagacuuacuaucuggu

SEQ ID NO: 1693771 - RNA, 19 nt, Artificial Sequence
  Description of Artificial Sequence: Synthetic oligonucleotide
  Sense strand starting at position 1343 of SEQ ID NO: 1561727
caagucucagcuuaaaggu

SEQ ID NO: 1693772 - RNA, 19 nt, Artificial Sequence
  Description of Artificial Sequence: Synthetic oligonucleotide
  Antisense strand to SEQ ID NO: 1693771
accuuuaagcugagacuug

SEQ ID NO: 1693773 - RNA, 19 nt, Artificial Sequence
  Description of Artificial Sequence: Synthetic oligonucleotide
  Sense strand starting at position 2412 of SEQ ID NO: 1561727
gacaguugugcccaaauaa

SEQ ID NO: 1693774 - RNA, 19 nt, Artificial Sequence
  Description of Artificial Sequence: Synthetic oligonucleotide
  Antisense strand to SEQ ID NO: 1693773
uuauuugggcacaacuguc

SEQ ID NO: 1693775 - RNA, 19 nt, Artificial Sequence
  Description of Artificial Sequence: Synthetic oligonucleotide
  Sense strand starting at position 2430 of SEQ ID NO: 1561727
auucuaaggugcccaaaua

SEQ ID NO: 1693776 - RNA, 19 nt, Artificial Sequence
  Description of Artificial Sequence: Synthetic oligonucleotide
  Antisense strand to SEQ ID NO: 1693775
uauuugggcaccuuagaau

SEQ ID NO: 1693777 - RNA, 19 nt, Artificial Sequence
  Description of Artificial Sequence: Synthetic oligonucleotide
  Sense strand starting at position 2431 of SEQ ID NO: 1561727
uucuaaggugcccaaauaa

SEQ ID NO: 1693778 - RNA, 19 nt, Artificial Sequence
  Description of Artificial Sequence: Synthetic oligonucleotide
  Antisense strand to SEQ ID NO: 1693777
uuauuugggcaccuuagaa

SEQ ID NO: 1693779 - RNA, 19 nt, Artificial Sequence
  Description of Artificial Sequence: Synthetic oligonucleotide
  Sense strand starting at position 2453 of SEQ ID NO: 1561727
acucuaaggcuuggaauua

SEQ ID NO: 1693780 - RNA, 19 nt, Artificial Sequence
  Description of Artificial Sequence: Synthetic oligonucleotide
  Antisense strand to SEQ ID NO: 1693779
uaauuccaagccuuagagu

SEQ ID NO: 1693781 - RNA, 19 nt, Artificial Sequence
  Description of Artificial Sequence: Synthetic oligonucleotide
  Sense strand starting at position 2666 of SEQ ID NO: 1561727
gacaaaugcucaguagaug

SEQ ID NO: 1693782 - RNA, 19 nt, Artificial Sequence
  Description of Artificial Sequence: Synthetic oligonucleotide
  Antisense strand to SEQ ID NO: 1693781
caucuacugagcauuuguc

SEQ ID NO: 1693783 - RNA, 19 nt, Artificial Sequence
  Description of Artificial Sequence: Synthetic oligonucleotide
  Sense strand starting at position 2667 of SEQ ID NO: 1561727
acaaaugcucaguagaugu

SEQ ID NO: 1693784 - RNA, 19 nt, Artificial Sequence
  Description of Artificial Sequence: Synthetic oligonucleotide
  Antisense strand to SEQ ID NO: 1693783
acaucuacugagcauuugu

SEQ ID NO: 1693785 - RNA, 19 nt, Artificial Sequence
  Description of Artificial Sequence: Synthetic oligonucleotide
  Sense strand starting at position 2669 of SEQ ID NO: 1561727
aaaugcucaguagauguua

SEQ ID NO: 1693786 - RNA, 19 nt, Artificial Sequence
  Description of Artificial Sequence: Synthetic oligonucleotide
  Antisense strand to SEQ ID NO: 1693785
uaacaucuacugagcauuu

SEQ ID NO: 1693787 - RNA, 19 nt, Artificial Sequence
  Description of Artificial Sequence: Synthetic oligonucleotide
  Sense strand starting at position 2988 of SEQ ID NO: 1561727
auucuaugagguuggacaa

SEQ ID NO: 1693788 - RNA, 19 nt, Artificial Sequence
  Description of Artificial Sequence: Synthetic oligonucleotide
  Antisense strand to SEQ ID NO: 1693787
uuguccaaccucauagaau

SEQ ID NO: 1693789 - RNA, 19 nt, Artificial Sequence
  Description of Artificial Sequence: Synthetic oligonucleotide
  Sense strand starting at position 2989 of SEQ ID NO: 1561727
uucuaugagguuggacaaa

SEQ ID NO: 1693790 - RNA, 19 nt, Artificial Sequence
  Description of Artificial Sequence: Synthetic oligonucleotide
  Antisense strand to SEQ ID NO: 1693789
uuuguccaaccucauagaa

SEQ ID NO: 1693791 - RNA, 19 nt, Artificial Sequence
  Description of Artificial Sequence: Synthetic oligonucleotide
  Sense strand starting at position 3027 of SEQ ID NO: 1561727
gcagcucauuuguuaggau

SEQ ID NO: 1693792 - RNA, 19 nt, Artificial Sequence
  Description of Artificial Sequence: Synthetic oligonucleotide
  Antisense strand to SEQ ID NO: 1693791
auccuaacaaaugagcugc

SEQ ID NO: 1693793 - RNA, 19 nt, Artificial Sequence
  Description of Artificial Sequence: Synthetic oligonucleotide
  Sense strand starting at position 3375 of SEQ ID NO: 1561727
ccaaaugaaucauugguuu

SEQ ID NO: 1693794 - RNA, 19 nt, Artificial Sequence
  Description of Artificial Sequence: Synthetic oligonucleotide
  Antisense strand to SEQ ID NO: 1693793
aaaccaaugauucauuugg

SEQ ID NO: 1693795 - RNA, 19 nt, Artificial Sequence
  Description of Artificial Sequence: Synthetic oligonucleotide
  Sense strand starting at position 3379 of SEQ ID NO: 1561727
augaaucauugguuuaauc

SEQ ID NO: 1693796 - RNA, 19 nt, Artificial Sequence
  Description of Artificial Sequence: Synthetic oligonucleotide
  Antisense strand to SEQ ID NO: 1693795
gauuaaaccaaugauucau

SEQ ID NO: 1693797 - RNA, 19 nt, Artificial Sequence
  Description of Artificial Sequence: Synthetic oligonucleotide
  Sense strand starting at position 3432 of SEQ ID NO: 1561727
agaauacuuugcuucugau

SEQ ID NO: 1693798 - RNA, 19 nt, Artificial Sequence
  Description of Artificial Sequence: Synthetic oligonucleotide
  Antisense strand to SEQ ID NO: 1693797
aucagaagcaaaguauucu

SEQ ID NO: 1693799 - RNA, 19 nt, Artificial Sequence
  Description of Artificial Sequence: Synthetic oligonucleotide
  Sense strand starting at position 3470 of SEQ ID NO: 1561727
auuucuguugucuggcaau

SEQ ID NO: 1693800 - RNA, 19 nt, Artificial Sequence
  Description of Artificial Sequence: Synthetic oligonucleotide
  Antisense strand to SEQ ID NO: 1693799
auugccagacaacagaaau

SEQ ID NO: 1693801 - RNA, 19 nt, Artificial Sequence
  Description of Artificial Sequence: Synthetic oligonucleotide
  Sense strand starting at position 3770 of SEQ ID NO: 1561727
gguuuaucagucuagguua

SEQ ID NO: 1693802 - RNA, 19 nt, Artificial Sequence
  Description of Artificial Sequence: Synthetic oligonucleotide
  Antisense strand to SEQ ID NO: 1693801
uaaccuagacugauaaacc

SEQ ID NO: 1693803 - RNA, 19 nt, Artificial Sequence
  Description of Artificial Sequence: Synthetic oligonucleotide
  Sense strand starting at position 3773 of SEQ ID NO: 1561727
uuaucagucuagguuaaug

SEQ ID NO: 1693804 - RNA, 19 nt, Artificial Sequence
  Description of Artificial Sequence: Synthetic oligonucleotide
  Antisense strand to SEQ ID NO: 1693803
cauuaaccuagacugauaa

SEQ ID NO: 1693805 - RNA, 19 nt, Artificial Sequence
  Description of Artificial Sequence: Synthetic oligonucleotide
  Sense strand starting at position 3822 of SEQ ID NO: 1561727
cuauucuaguaguuagaaa

SEQ ID NO: 1693806 - RNA, 19 nt, Artificial Sequence
  Description of Artificial Sequence: Synthetic oligonucleotide
  Antisense strand to SEQ ID NO: 1693805
uuucuaacuacuagaauag

SEQ ID NO: 1693807 - RNA, 19 nt, Artificial Sequence
  Description of Artificial Sequence: Synthetic oligonucleotide
  Sense strand starting at position 3840 of SEQ ID NO: 1561727
aacuaugggccguagacua

SEQ ID NO: 1693808 - RNA, 19 nt, Artificial Sequence
  Description of Artificial Sequence: Synthetic oligonucleotide
  Antisense strand to SEQ ID NO: 1693807
uagucuacggcccauaguu

SEQ ID NO: 1693809 - RNA, 19 nt, Artificial Sequence
  Description of Artificial Sequence: Synthetic oligonucleotide
  Sense strand starting at position 3879 of SEQ ID NO: 1561727
uuguauggacugugaauga

SEQ ID NO: 1693810 - RNA, 19 nt, Artificial Sequence
  Description of Artificial Sequence: Synthetic oligonucleotide
  Antisense strand to SEQ ID NO: 1693809
ucauucacaguccauacaa

SEQ ID NO: 1693811 - RNA, 19 nt, Artificial Sequence
  Description of Artificial Sequence: Synthetic oligonucleotide
  Sense strand starting at position 3888 of SEQ ID NO: 1561727
cugugaaugagcuagggau

SEQ ID NO: 1693812 - RNA, 19 nt, Artificial Sequence
  Description of Artificial Sequence: Synthetic oligonucleotide
  Antisense strand to SEQ ID NO: 1693811
aucccuagcucauucacag

SEQ ID NO: 1693813 - RNA, 19 nt, Artificial Sequence
  Description of Artificial Sequence: Synthetic oligonucleotide
  Sense strand starting at position 3890 of SEQ ID NO: 1561727
gugaaugagcuagggauau

SEQ ID NO: 1693814 - RNA, 19 nt, Artificial Sequence
  Description of Artificial Sequence: Synthetic oligonucleotide
  Antisense strand to SEQ ID NO: 1693813
auaucccuagcucauucac

SEQ ID NO: 1693815 - RNA, 19 nt, Artificial Sequence
  Description of Artificial Sequence: Synthetic oligonucleotide
  Sense strand starting at position 4 of SEQ ID NO: 1561728
cacugaugguaagaaguga

SEQ ID NO: 1693816 - RNA, 19 nt, Artificial Sequence
  Description of Artificial Sequence: Synthetic oligonucleotide
  Antisense strand to SEQ ID NO: 1693815
ucacuucuuaccaucagug

SEQ ID NO: 1693817 - RNA, 19 nt, Artificial Sequence
  Description of Artificial Sequence: Synthetic oligonucleotide
  Sense strand starting at position 60 of SEQ ID NO: 1561728
uuaggauccucugaaagca

SEQ ID NO: 1693818 - RNA, 19 nt, Artificial Sequence
  Description of Artificial Sequence: Synthetic oligonucleotide
  Antisense strand to SEQ ID NO: 1693817
ugcuuucagaggauccuaa

SEQ ID NO: 1693819 - RNA, 19 nt, Artificial Sequence
  Description of Artificial Sequence: Synthetic oligonucleotide
  Sense strand starting at position 200 of SEQ ID NO: 1561728
ugugccuccaaggaagaau

SEQ ID NO: 1693820 - RNA, 19 nt, Artificial Sequence
  Description of Artificial Sequence: Synthetic oligonucleotide
  Antisense strand to SEQ ID NO: 1693819
auucuuccuuggaggcaca

SEQ ID NO: 1693821 - RNA, 19 nt, Artificial Sequence
  Description of Artificial Sequence: Synthetic oligonucleotide
  Sense strand starting at position 333 of SEQ ID NO: 1561728
ugagaaagauaacaaguaa

SEQ ID NO: 1693822 - RNA, 19 nt, Artificial Sequence
  Description of Artificial Sequence: Synthetic oligonucleotide
  Antisense strand to SEQ ID NO: 1693821
uuacuuguuaucuuucuca

SEQ ID NO: 1693823 - RNA, 19 nt, Artificial Sequence
  Description of Artificial Sequence: Synthetic oligonucleotide
  Sense strand starting at position 352 of SEQ ID NO: 1561728
gcaauaaguaaguguuagu

SEQ ID NO: 1693824 - RNA, 19 nt, Artificial Sequence
  Description of Artificial Sequence: Synthetic oligonucleotide
  Antisense strand to SEQ ID NO: 1693823
acuaacacuuacuuauugc

SEQ ID NO: 1693825 - RNA, 19 nt, Artificial Sequence
  Description of Artificial Sequence: Synthetic oligonucleotide
  Sense strand starting at position 357 of SEQ ID NO: 1561728
aaguaaguguuaguaaaug

SEQ ID NO: 1693826 - RNA, 19 nt, Artificial Sequence
  Description of Artificial Sequence: Synthetic oligonucleotide
  Antisense strand to SEQ ID NO: 1693825
cauuuacuaacacuuacuu

SEQ ID NO: 1693827 - RNA, 19 nt, Artificial Sequence
  Description of Artificial Sequence: Synthetic oligonucleotide
  Sense strand starting at position 367 of SEQ ID NO: 1561728
uaguaaaugcuaugaagua

SEQ ID NO: 1693828 - RNA, 19 nt, Artificial Sequence
  Description of Artificial Sequence: Synthetic oligonucleotide
  Antisense strand to SEQ ID NO: 1693827
uacuucauagcauuuacua

SEQ ID NO: 1693829 - RNA, 19 nt, Artificial Sequence
  Description of Artificial Sequence: Synthetic oligonucleotide
  Sense strand starting at position 419 of SEQ ID NO: 1561728
ggagaaagguccuagacag

SEQ ID NO: 1693830 - RNA, 19 nt, Artificial Sequence
  Description of Artificial Sequence: Synthetic oligonucleotide
  Antisense strand to SEQ ID NO: 1693829
cugucuaggaccuuucucc

SEQ ID NO: 1693831 - RNA, 19 nt, Artificial Sequence
  Description of Artificial Sequence: Synthetic oligonucleotide
  Sense strand starting at position 831 of SEQ ID NO: 1561728
ucggaauaacccuggaaua

SEQ ID NO: 1693832 - RNA, 19 nt, Artificial Sequence
  Description of Artificial Sequence: Synthetic oligonucleotide
  Antisense strand to SEQ ID NO: 1693831
uauuccaggguuauuccga

SEQ ID NO: 1693833 - RNA, 19 nt, Artificial Sequence
  Description of Artificial Sequence: Synthetic oligonucleotide
  Sense strand starting at position 832 of SEQ ID NO: 1561728
cggaauaacccuggaauau

SEQ ID NO: 1693834 - RNA, 19 nt, Artificial Sequence
  Description of Artificial Sequence: Synthetic oligonucleotide
  Antisense strand to SEQ ID NO: 1693833
auauuccaggguuauuccg

SEQ ID NO: 1693835 - RNA, 19 nt, Artificial Sequence
  Description of Artificial Sequence: Synthetic oligonucleotide
  Sense strand starting at position 932 of SEQ ID NO: 1561728
uuuguaaaccacgguaaau

SEQ ID NO: 1693836 - RNA, 19 nt, Artificial Sequence
  Description of Artificial Sequence: Synthetic oligonucleotide
  Antisense strand to SEQ ID NO: 1693835
auuuaccgugguuuacaaa

SEQ ID NO: 1693837 - RNA, 19 nt, Artificial Sequence
  Description of Artificial Sequence: Synthetic oligonucleotide
  Sense strand starting at position 934 of SEQ ID NO: 1561728
uguaaaccacgguaaauaa

SEQ ID NO: 1693838 - RNA, 19 nt, Artificial Sequence
  Description of Artificial Sequence: Synthetic oligonucleotide
  Antisense strand to SEQ ID NO: 1693837
uuauuuaccgugguuuaca

SEQ ID NO: 1693839 - RNA, 19 nt, Artificial Sequence
  Description of Artificial Sequence: Synthetic oligonucleotide
  Sense strand starting at position 970 of SEQ ID NO: 1561728
gccacuuuccgagguagau

SEQ ID NO: 1693840 - RNA, 19 nt, Artificial Sequence
  Description of Artificial Sequence: Synthetic oligonucleotide
  Antisense strand to SEQ ID NO: 1693839
aucuaccucggaaaguggc

SEQ ID NO: 1693841 - RNA, 19 nt, Artificial Sequence
  Description of Artificial Sequence: Synthetic oligonucleotide
  Sense strand starting at position 1020 of SEQ ID NO: 1561728
aauggaggcucagugagau

SEQ ID NO: 1693842 - RNA, 19 nt, Artificial Sequence
  Description of Artificial Sequence: Synthetic oligonucleotide
  Antisense strand to SEQ ID NO: 1693841
aucucacugagccuccauu

SEQ ID NO: 1693843 - RNA, 19 nt, Artificial Sequence
  Description of Artificial Sequence: Synthetic oligonucleotide
  Sense strand starting at position 1073 of SEQ ID NO: 1561728
aggcuacgucuggaaugaa

SEQ ID NO: 1693844 - RNA, 19 nt, Artificial Sequence
  Description of Artificial Sequence: Synthetic oligonucleotide
  Antisense strand to SEQ ID NO: 1693843
uucauuccagacguagccu

SEQ ID NO: 1693845 - RNA, 19 nt, Artificial Sequence
  Description of Artificial Sequence: Synthetic oligonucleotide
  Sense strand starting at position 1111 of SEQ ID NO: 1561728
aagucuaugcuccgaacca

SEQ ID NO: 1693846 - RNA, 19 nt, Artificial Sequence
  Description of Artificial Sequence: Synthetic oligonucleotide
  Antisense strand to SEQ ID NO: 1693845
ugguucggagcauagacuu

SEQ ID NO: 1693847 - RNA, 19 nt, Artificial Sequence
  Description of Artificial Sequence: Synthetic oligonucleotide
  Sense strand starting at position 1190 of SEQ ID NO: 1561728
uuucuaugucccgggugua

SEQ ID NO: 1693848 - RNA, 19 nt, Artificial Sequence
  Description of Artificial Sequence: Synthetic oligonucleotide
  Antisense strand to SEQ ID NO: 1693847
uacacccgggacauagaaa

SEQ ID NO: 1693849 - RNA, 19 nt, Artificial Sequence
  Description of Artificial Sequence: Synthetic oligonucleotide
  Sense strand starting at position 1202 of SEQ ID NO: 1561728
ggguguaccgacuagaauu

SEQ ID NO: 1693850 - RNA, 19 nt, Artificial Sequence
  Description of Artificial Sequence: Synthetic oligonucleotide
  Antisense strand to SEQ ID NO: 1693849
aauucuagucgguacaccc

SEQ ID NO: 1693851 - RNA, 19 nt, Artificial Sequence
  Description of Artificial Sequence: Synthetic oligonucleotide
  Sense strand starting at position 1210 of SEQ ID NO: 1561728
cgacuagaauucucacaaa

SEQ ID NO: 1693852 - RNA, 19 nt, Artificial Sequence
  Description of Artificial Sequence: Synthetic oligonucleotide
  Antisense strand to SEQ ID NO: 1693851
uuugugagaauucuagucg

SEQ ID NO: 1693853 - RNA, 19 nt, Artificial Sequence
  Description of Artificial Sequence: Synthetic oligonucleotide
  Sense strand starting at position 1506 of SEQ ID NO: 1561728
cgccgugauggagaggaaa

SEQ ID NO: 1693854 - RNA, 19 nt, Artificial Sequence
  Description of Artificial Sequence: Synthetic oligonucleotide
  Antisense strand to SEQ ID NO: 1693853
uuuccucuccaucacggcg

SEQ ID NO: 1693855 - RNA, 19 nt, Artificial Sequence
  Description of Artificial Sequence: Synthetic oligonucleotide
  Sense strand starting at position 1730 of SEQ ID NO: 1561728
ucccuagcgcucguuagua

SEQ ID NO: 1693856 - RNA, 19 nt, Artificial Sequence
  Description of Artificial Sequence: Synthetic oligonucleotide
  Antisense strand to SEQ ID NO: 1693855
uacuaacgagcgcuaggga

SEQ ID NO: 1693857 - RNA, 19 nt, Artificial Sequence
  Description of Artificial Sequence: Synthetic oligonucleotide
  Sense strand starting at position 2072 of SEQ ID NO: 1561728
gcucuuuggcucugaccau

SEQ ID NO: 1693858 - RNA, 19 nt, Artificial Sequence
  Description of Artificial Sequence: Synthetic oligonucleotide
  Antisense strand to SEQ ID NO: 1693857
auggucagagccaaagagc

SEQ ID NO: 1693859 - RNA, 19 nt, Artificial Sequence
  Description of Artificial Sequence: Synthetic oligonucleotide
  Sense strand starting at position 2183 of SEQ ID NO: 1561728
gcacguaggagguguucaa

SEQ ID NO: 1693860 - RNA, 19 nt, Artificial Sequence
  Description of Artificial Sequence: Synthetic oligonucleotide
  Antisense strand to SEQ ID NO: 1693859
uugaacaccuccuacgugc

SEQ ID NO: 1693861 - RNA, 19 nt, Artificial Sequence
  Description of Artificial Sequence: Synthetic oligonucleotide
  Sense strand starting at position 2187 of SEQ ID NO: 1561728
guaggagguguucaauguu

SEQ ID NO: 1693862 - RNA, 19 nt, Artificial Sequence
  Description of Artificial Sequence: Synthetic oligonucleotide
  Antisense strand to SEQ ID NO: 1693861
aacauugaacaccuccuac

SEQ ID NO: 1693863 - RNA, 19 nt, Artificial Sequence
  Description of Artificial Sequence: Synthetic oligonucleotide
  Sense strand starting at position 2190 of SEQ ID NO: 1561728
ggagguguucaauguugau

SEQ ID NO: 1693864 - RNA, 19 nt, Artificial Sequence
  Description of Artificial Sequence: Synthetic oligonucleotide
  Antisense strand to SEQ ID NO: 1693863
aucaacauugaacaccucc

SEQ ID NO: 1693865 - RNA, 19 nt, Artificial Sequence
  Description of Artificial Sequence: Synthetic oligonucleotide
  Sense strand starting at position 2194 of SEQ ID NO: 1561728
guguucaauguugaucgau

SEQ ID NO: 1693866 - RNA, 19 nt, Artificial Sequence
  Description of Artificial Sequence: Synthetic oligonucleotide
  Antisense strand to SEQ ID NO: 1693865
aucgaucaacauugaacac

SEQ ID NO: 1693867 - RNA, 19 nt, Artificial Sequence
  Description of Artificial Sequence: Synthetic oligonucleotide
  Sense strand starting at position 2586 of SEQ ID NO: 1561728
ugggauguucuagauuccu

SEQ ID NO: 1693868 - RNA, 19 nt, Artificial Sequence
  Description of Artificial Sequence: Synthetic oligonucleotide
  Antisense strand to SEQ ID NO: 1693867
aggaaucuagaacauccca

SEQ ID NO: 1693869 - RNA, 19 nt, Artificial Sequence
  Description of Artificial Sequence: Synthetic oligonucleotide
  Sense strand starting at position 2591 of SEQ ID NO: 1561728
uguucuagauuccugaaug

SEQ ID NO: 1693870 - RNA, 19 nt, Artificial Sequence
  Description of Artificial Sequence: Synthetic oligonucleotide
  Antisense strand to SEQ ID NO: 1693869
cauucaggaaucuagaaca

SEQ ID NO: 1693871 - RNA, 19 nt, Artificial Sequence
  Description of Artificial Sequence: Synthetic oligonucleotide
  Sense strand starting at position 2607 of SEQ ID NO: 1561728
augauuggcuccuucuuua

SEQ ID NO: 1693872 - RNA, 19 nt, Artificial Sequence
  Description of Artificial Sequence: Synthetic oligonucleotide
  Antisense strand to SEQ ID NO: 1693871
uaaagaaggagccaaucau

SEQ ID NO: 1693873 - RNA, 19 nt, Artificial Sequence
  Description of Artificial Sequence: Synthetic oligonucleotide
  Sense strand starting at position 2742 of SEQ ID NO: 1561728
ugcccaggucaauguaaau

SEQ ID NO: 1693874 - RNA, 19 nt, Artificial Sequence
  Description of Artificial Sequence: Synthetic oligonucleotide
  Antisense strand to SEQ ID NO: 1693873
auuuacauugaccugggca

SEQ ID NO: 1693875 - RNA, 19 nt, Artificial Sequence
  Description of Artificial Sequence: Synthetic oligonucleotide
  Sense strand starting at position 2787 of SEQ ID NO: 1561728
guauaaauacuguguagga

SEQ ID NO: 1693876 - RNA, 19 nt, Artificial Sequence
  Description of Artificial Sequence: Synthetic oligonucleotide
  Antisense strand to SEQ ID NO: 1693875
uccuacacaguauuuauac

SEQ ID NO: 1693877 - RNA, 19 nt, Artificial Sequence
  Description of Artificial Sequence: Synthetic oligonucleotide
  Sense strand starting at position 2791 of SEQ ID NO: 1561728
aaauacuguguaggacaua

SEQ ID NO: 1693878 - RNA, 19 nt, Artificial Sequence
  Description of Artificial Sequence: Synthetic oligonucleotide
  Antisense strand to SEQ ID NO: 1693877
uauguccuacacaguauuu

SEQ ID NO: 1693879 - RNA, 19 nt, Artificial Sequence
  Description of Artificial Sequence: Synthetic oligonucleotide
  Sense strand starting at position 2792 of SEQ ID NO: 1561728
aauacuguguaggacauau

SEQ ID NO: 1693880 - RNA, 19 nt, Artificial Sequence
  Description of Artificial Sequence: Synthetic oligonucleotide
  Antisense strand to SEQ ID NO: 1693879
auauguccuacacaguauu

SEQ ID NO: 1693881 - RNA, 19 nt, Artificial Sequence
  Description of Artificial Sequence: Synthetic oligonucleotide
  Sense strand starting at position 2824 of SEQ ID NO: 1561728
ucaugcauugcuuaucuga

SEQ ID NO: 1693882 - RNA, 19 nt, Artificial Sequence
  Description of Artificial Sequence: Synthetic oligonucleotide
  Antisense strand to SEQ ID NO: 1693881
ucagauaagcaaugcauga

SEQ ID NO: 1693883 - RNA, 19 nt, Artificial Sequence
  Description of Artificial Sequence: Synthetic oligonucleotide
  Sense strand starting at position 2826 of SEQ ID NO: 1561728
augcauugcuuaucugaaa

SEQ ID NO: 1693884 - RNA, 19 nt, Artificial Sequence
  Description of Artificial Sequence: Synthetic oligonucleotide
  Antisense strand to SEQ ID NO: 1693883
uuucagauaagcaaugcau

SEQ ID NO: 1693885 - RNA, 19 nt, Artificial Sequence
  Description of Artificial Sequence: Synthetic oligonucleotide
  Sense strand starting at position 2827 of SEQ ID NO: 1561728
ugcauugcuuaucugaaau

SEQ ID NO: 1693886 - RNA, 19 nt, Artificial Sequence
  Description of Artificial Sequence: Synthetic oligonucleotide
  Antisense strand to SEQ ID NO: 1693885
auuucagauaagcaaugca

SEQ ID NO: 1693887 - RNA, 19 nt, Artificial Sequence
  Description of Artificial Sequence: Synthetic oligonucleotide
  Sense strand starting at position 2856 of SEQ ID NO: 1561728
cugggugcccaguguuuga

SEQ ID NO: 1693888 - RNA, 19 nt, Artificial Sequence
  Description of Artificial Sequence: Synthetic oligonucleotide
  Antisense strand to SEQ ID NO: 1693887
ucaaacacugggcacccag

SEQ ID NO: 1693889 - RNA, 19 nt, Artificial Sequence
  Description of Artificial Sequence: Synthetic oligonucleotide
  Sense strand starting at position 2865 of SEQ ID NO: 1561728
caguguuugaucugguaag

SEQ ID NO: 1693890 - RNA, 19 nt, Artificial Sequence
  Description of Artificial Sequence: Synthetic oligonucleotide
  Antisense strand to SEQ ID NO: 1693889
cuuaccagaucaaacacug

SEQ ID NO: 1693891 - RNA, 19 nt, Artificial Sequence
  Description of Artificial Sequence: Synthetic oligonucleotide
  Sense strand starting at position 2882 of SEQ ID NO: 1561728
agccuaguuccaugauauc

SEQ ID NO: 1693892 - RNA, 19 nt, Artificial Sequence
  Description of Artificial Sequence: Synthetic oligonucleotide
  Antisense strand to SEQ ID NO: 1693891
gauaucauggaacuaggcu

SEQ ID NO: 1693893 - RNA, 19 nt, Artificial Sequence
  Description of Artificial Sequence: Synthetic oligonucleotide
  Sense strand starting at position 3644 of SEQ ID NO: 1561728
cgguaaucccagugauuug

SEQ ID NO: 1693894 - RNA, 19 nt, Artificial Sequence
  Description of Artificial Sequence: Synthetic oligonucleotide
  Antisense strand to SEQ ID NO: 1693893
caaaucacugggauuaccg

SEQ ID NO: 1693895 - RNA, 19 nt, Artificial Sequence
  Description of Artificial Sequence: Synthetic oligonucleotide
  Sense strand starting at position 355 of SEQ ID NO: 1561729
guaagcacuugacacaaau

SEQ ID NO: 1693896 - RNA, 19 nt, Artificial Sequence
  Description of Artificial Sequence: Synthetic oligonucleotide
  Antisense strand to SEQ ID NO: 1693895
auuugugucaagugcuuac

SEQ ID NO: 1693897 - RNA, 19 nt, Artificial Sequence
  Description of Artificial Sequence: Synthetic oligonucleotide
  Sense strand starting at position 490 of SEQ ID NO: 1561729
ccugauauuugagaaccua

SEQ ID NO: 1693898 - RNA, 19 nt, Artificial Sequence
  Description of Artificial Sequence: Synthetic oligonucleotide
  Antisense strand to SEQ ID NO: 1693897
uagguucucaaauaucagg

SEQ ID NO: 1693899 - RNA, 19 nt, Artificial Sequence
  Description of Artificial Sequence: Synthetic oligonucleotide
  Sense strand starting at position 542 of SEQ ID NO: 1561729
gcacuccucagauggaaug

SEQ ID NO: 1693900 - RNA, 19 nt, Artificial Sequence
  Description of Artificial Sequence: Synthetic oligonucleotide
  Antisense strand to SEQ ID NO: 1693899
cauuccaucugaggagugc

SEQ ID NO: 1693901 - RNA, 19 nt, Artificial Sequence
  Description of Artificial Sequence: Synthetic oligonucleotide
  Sense strand starting at position 562 of SEQ ID NO: 1561729
agucuccaauucuuggaaa

SEQ ID NO: 1693902 - RNA, 19 nt, Artificial Sequence
  Description of Artificial Sequence: Synthetic oligonucleotide
  Antisense strand to SEQ ID NO: 1693901
uuuccaagaauuggagacu

SEQ ID NO: 1693903 - RNA, 19 nt, Artificial Sequence
  Description of Artificial Sequence: Synthetic oligonucleotide
  Sense strand starting at position 925 of SEQ ID NO: 1561729
cccauucucguagaauuaa

SEQ ID NO: 1693904 - RNA, 19 nt, Artificial Sequence
  Description of Artificial Sequence: Synthetic oligonucleotide
  Antisense strand to SEQ ID NO: 1693903
uuaauucuacgagaauggg

SEQ ID NO: 1693905 - RNA, 19 nt, Artificial Sequence
  Description of Artificial Sequence: Synthetic oligonucleotide
  Sense strand starting at position 933 of SEQ ID NO: 1561729
cguagaauuaaacagcuga

SEQ ID NO: 1693906 - RNA, 19 nt, Artificial Sequence
  Description of Artificial Sequence: Synthetic oligonucleotide
  Antisense strand to SEQ ID NO: 1693905
ucagcuguuuaauucuacg

SEQ ID NO: 1693907 - RNA, 19 nt, Artificial Sequence
  Description of Artificial Sequence: Synthetic oligonucleotide
  Sense strand starting at position 1689 of SEQ ID NO: 1561729
uugguuuaugugugaaggu

SEQ ID NO: 1693908 - RNA, 19 nt, Artificial Sequence
  Description of Artificial Sequence: Synthetic oligonucleotide
  Antisense strand to SEQ ID NO: 1693907
accuucacacauaaaccaa

SEQ ID NO: 1693909 - RNA, 19 nt, Artificial Sequence
  Description of Artificial Sequence: Synthetic oligonucleotide
  Sense strand starting at position 2028 of SEQ ID NO: 1561729
gaggaaucucucugaaugc

SEQ ID NO: 1693910 - RNA, 19 nt, Artificial Sequence
  Description of Artificial Sequence: Synthetic oligonucleotide
  Antisense strand to SEQ ID NO: 1693909
gcauucagagagauuccuc

SEQ ID NO: 1693911 - RNA, 19 nt, Artificial Sequence
  Description of Artificial Sequence: Synthetic oligonucleotide
  Sense strand starting at position 2135 of SEQ ID NO: 1561729
uaaggagacuugcaauagu

SEQ ID NO: 1693912 - RNA, 19 nt, Artificial Sequence
  Description of Artificial Sequence: Synthetic oligonucleotide
  Antisense strand to SEQ ID NO: 1693911
acuauugcaagucuccuua

SEQ ID NO: 1693913 - RNA, 19 nt, Artificial Sequence
  Description of Artificial Sequence: Synthetic oligonucleotide
  Sense strand starting at position 2146 of SEQ ID NO: 1561729
gcaauaguuaagcgcauuu

SEQ ID NO: 1693914 - RNA, 19 nt, Artificial Sequence
  Description of Artificial Sequence: Synthetic oligonucleotide
  Antisense strand to SEQ ID NO: 1693913
aaaugcgcuuaacuauugc

SEQ ID NO: 1693915 - RNA, 19 nt, Artificial Sequence
  Description of Artificial Sequence: Synthetic oligonucleotide
  Sense strand starting at position 2208 of SEQ ID NO: 1561729
cucccauuaggugaacagu

SEQ ID NO: 1693916 - RNA, 19 nt, Artificial Sequence
  Description of Artificial Sequence: Synthetic oligonucleotide
  Antisense strand to SEQ ID NO: 1693915
acuguucaccuaaugggag

SEQ ID NO: 1693917 - RNA, 19 nt, Artificial Sequence
  Description of Artificial Sequence: Synthetic oligonucleotide
  Sense strand starting at position 2216 of SEQ ID NO: 1561729
aggugaacaguugguuuga

SEQ ID NO: 1693918 - RNA, 19 nt, Artificial Sequence
  Description of Artificial Sequence: Synthetic oligonucleotide
  Antisense strand to SEQ ID NO: 1693917
ucaaaccaacuguucaccu

SEQ ID NO: 1693919 - RNA, 19 nt, Artificial Sequence
  Description of Artificial Sequence: Synthetic oligonucleotide
  Sense strand starting at position 2225 of SEQ ID NO: 1561729
guugguuugacccaaguua

SEQ ID NO: 1693920 - RNA, 19 nt, Artificial Sequence
  Description of Artificial Sequence: Synthetic oligonucleotide
  Antisense strand to SEQ ID NO: 1693919
uaacuugggucaaaccaac

SEQ ID NO: 1693921 - RNA, 19 nt, Artificial Sequence
  Description of Artificial Sequence: Synthetic oligonucleotide
  Sense strand starting at position 2409 of SEQ ID NO: 1561729
aaacuuggaguucggaaga

SEQ ID NO: 1693922 - RNA, 19 nt, Artificial Sequence
  Description of Artificial Sequence: Synthetic oligonucleotide
  Antisense strand to SEQ ID NO: 1693921
ucuuccgaacuccaaguuu

SEQ ID NO: 1693923 - RNA, 19 nt, Artificial Sequence
  Description of Artificial Sequence: Synthetic oligonucleotide
  Sense strand starting at position 2431 of SEQ ID NO: 1561729
gaaugaaaguuggacccua

SEQ ID NO: 1693924 - RNA, 19 nt, Artificial Sequence
  Description of Artificial Sequence: Synthetic oligonucleotide
  Antisense strand to SEQ ID NO: 1693923
uaggguccaacuuucauuc

SEQ ID NO: 1693925 - RNA, 19 nt, Artificial Sequence
  Description of Artificial Sequence: Synthetic oligonucleotide
  Sense strand starting at position 2467 of SEQ ID NO: 1561729
gagucugagaagugaggau

SEQ ID NO: 1693926 - RNA, 19 nt, Artificial Sequence
  Description of Artificial Sequence: Synthetic oligonucleotide
  Antisense strand to SEQ ID NO: 1693925
auccucacuucucagacuc

SEQ ID NO: 1693927 - RNA, 19 nt, Artificial Sequence
  Description of Artificial Sequence: Synthetic oligonucleotide
  Sense strand starting at position 2479 of SEQ ID NO: 1561729
ugaggauacuagcucucaa

SEQ ID NO: 1693928 - RNA, 19 nt, Artificial Sequence
  Description of Artificial Sequence: Synthetic oligonucleotide
  Antisense strand to SEQ ID NO: 1693927
uugagagcuaguauccuca

SEQ ID NO: 1693929 - RNA, 19 nt, Artificial Sequence
  Description of Artificial Sequence: Synthetic oligonucleotide
  Sense strand starting at position 2880 of SEQ ID NO: 1561729
ggcaguuacuucucuuacu

SEQ ID NO: 1693930 - RNA, 19 nt, Artificial Sequence
  Description of Artificial Sequence: Synthetic oligonucleotide
  Antisense strand to SEQ ID NO: 1693929
aguaagagaaguaacugcc

SEQ ID NO: 1693931 - RNA, 19 nt, Artificial Sequence
  Description of Artificial Sequence: Synthetic oligonucleotide
  Sense strand starting at position 2916 of SEQ ID NO: 1561729
auaauuucuguaugccgau

SEQ ID NO: 1693932 - RNA, 19 nt, Artificial Sequence
  Description of Artificial Sequence: Synthetic oligonucleotide
  Antisense strand to SEQ ID NO: 1693931
aucggcauacagaaauuau

SEQ ID NO: 1693933 - RNA, 19 nt, Artificial Sequence
  Description of Artificial Sequence: Synthetic oligonucleotide
  Sense strand starting at position 2917 of SEQ ID NO: 1561729
uaauuucuguaugccgauu

SEQ ID NO: 1693934 - RNA, 19 nt, Artificial Sequence
  Description of Artificial Sequence: Synthetic oligonucleotide
  Antisense strand to SEQ ID NO: 1693933
aaucggcauacagaaauua

SEQ ID NO: 1693935 - RNA, 19 nt, Artificial Sequence
  Description of Artificial Sequence: Synthetic oligonucleotide
  Sense strand starting at position 2923 of SEQ ID NO: 1561729
cuguaugccgauugaacua

SEQ ID NO: 1693936 - RNA, 19 nt, Artificial Sequence
  Description of Artificial Sequence: Synthetic oligonucleotide
  Antisense strand to SEQ ID NO: 1693935
uaguucaaucggcauacag

SEQ ID NO: 1693937 - RNA, 19 nt, Artificial Sequence
  Description of Artificial Sequence: Synthetic oligonucleotide
  Sense strand starting at position 2964 of SEQ ID NO: 1561729
gggucuccucucuguuuaa

SEQ ID NO: 1693938 - RNA, 19 nt, Artificial Sequence
  Description of Artificial Sequence: Synthetic oligonucleotide
  Antisense strand to SEQ ID NO: 1693937
uuaaacagagaggagaccc

SEQ ID NO: 1693939 - RNA, 19 nt, Artificial Sequence
  Description of Artificial Sequence: Synthetic oligonucleotide
  Sense strand starting at position 3112 of SEQ ID NO: 1561729
agcugaagcgucuaagagu

SEQ ID NO: 1693940 - RNA, 19 nt, Artificial Sequence
  Description of Artificial Sequence: Synthetic oligonucleotide
  Antisense strand to SEQ ID NO: 1693939
acucuuagacgcuucagcu

SEQ ID NO: 1693941 - RNA, 19 nt, Artificial Sequence
  Description of Artificial Sequence: Synthetic oligonucleotide
  Sense strand starting at position 3119 of SEQ ID NO: 1561729
gcgucuaagaguugcugaa

SEQ ID NO: 1693942 - RNA, 19 nt, Artificial Sequence
  Description of Artificial Sequence: Synthetic oligonucleotide
  Antisense strand to SEQ ID NO: 1693941
uucagcaacucuuagacgc

SEQ ID NO: 1693943 - RNA, 19 nt, Artificial Sequence
  Description of Artificial Sequence: Synthetic oligonucleotide
  Sense strand starting at position 3121 of SEQ ID NO: 1561729
gucuaagaguugcugaaag

SEQ ID NO: 1693944 - RNA, 19 nt, Artificial Sequence
  Description of Artificial Sequence: Synthetic oligonucleotide
  Antisense strand to SEQ ID NO: 1693943
cuuucagcaacucuuagac

SEQ ID NO: 1693945 - RNA, 19 nt, Artificial Sequence
  Description of Artificial Sequence: Synthetic oligonucleotide
  Sense strand starting at position 3246 of SEQ ID NO: 1561729
agaauagcugguugucuca

SEQ ID NO: 1693946 - RNA, 19 nt, Artificial Sequence
  Description of Artificial Sequence: Synthetic oligonucleotide
  Antisense strand to SEQ ID NO: 1693945
ugagacaaccagcuauucu

SEQ ID NO: 1693947 - RNA, 19 nt, Artificial Sequence
  Description of Artificial Sequence: Synthetic oligonucleotide
  Sense strand starting at position 3300 of SEQ ID NO: 1561729
cacaguuugucagcugacu

SEQ ID NO: 1693948 - RNA, 19 nt, Artificial Sequence
  Description of Artificial Sequence: Synthetic oligonucleotide
  Antisense strand to SEQ ID NO: 1693947
agucagcugacaaacugug

SEQ ID NO: 1693949 - RNA, 19 nt, Artificial Sequence
  Description of Artificial Sequence: Synthetic oligonucleotide
  Sense strand starting at position 3447 of SEQ ID NO: 1561729
ugugacaucugaucccaau

SEQ ID NO: 1693950 - RNA, 19 nt, Artificial Sequence
  Description of Artificial Sequence: Synthetic oligonucleotide
  Antisense strand to SEQ ID NO: 1693949
auugggaucagaugucaca

SEQ ID NO: 1693951 - RNA, 19 nt, Artificial Sequence
  Description of Artificial Sequence: Synthetic oligonucleotide
  Sense strand starting at position 3530 of SEQ ID NO: 1561729
guggacugaggagguuaua

SEQ ID NO: 1693952 - RNA, 19 nt, Artificial Sequence
  Description of Artificial Sequence: Synthetic oligonucleotide
  Antisense strand to SEQ ID NO: 1693951
uauaaccuccucaguccac

SEQ ID NO: 1693953 - RNA, 19 nt, Artificial Sequence
  Description of Artificial Sequence: Synthetic oligonucleotide
  Sense strand starting at position 3556 of SEQ ID NO: 1561729
aucccaaaguuucugggaa

SEQ ID NO: 1693954 - RNA, 19 nt, Artificial Sequence
  Description of Artificial Sequence: Synthetic oligonucleotide
  Antisense strand to SEQ ID NO: 1693953
uucccagaaacuuugggau

SEQ ID NO: 1693955 - RNA, 19 nt, Artificial Sequence
  Description of Artificial Sequence: Synthetic oligonucleotide
  Sense strand starting at position 3724 of SEQ ID NO: 1561729
gggauguguuaugaggaag

SEQ ID NO: 1693956 - RNA, 19 nt, Artificial Sequence
  Description of Artificial Sequence: Synthetic oligonucleotide
  Antisense strand to SEQ ID NO: 1693955
cuuccucauaacacauccc

SEQ ID NO: 1693957 - RNA, 19 nt, Artificial Sequence
  Description of Artificial Sequence: Synthetic oligonucleotide
  Sense strand starting at position 3763 of SEQ ID NO: 1561729
gguggagcuuaccuucuaa

SEQ ID NO: 1693958 - RNA, 19 nt, Artificial Sequence
  Description of Artificial Sequence: Synthetic oligonucleotide
  Antisense strand to SEQ ID NO: 1693957
uuagaagguaagcuccacc

SEQ ID NO: 1693959 - RNA, 19 nt, Artificial Sequence
  Description of Artificial Sequence: Synthetic oligonucleotide
  Sense strand starting at position 3775 of SEQ ID NO: 1561729
cuucuaaagugagaagcaa

SEQ ID NO: 1693960 - RNA, 19 nt, Artificial Sequence
  Description of Artificial Sequence: Synthetic oligonucleotide
  Antisense strand to SEQ ID NO: 1693959
uugcuucucacuuuagaag

SEQ ID NO: 1693961 - RNA, 19 nt, Artificial Sequence
  Description of Artificial Sequence: Synthetic oligonucleotide
  Sense strand starting at position 3783 of SEQ ID NO: 1561729
gugagaagcaaguaaugca

SEQ ID NO: 1693962 - RNA, 19 nt, Artificial Sequence
  Description of Artificial Sequence: Synthetic oligonucleotide
  Antisense strand to SEQ ID NO: 1693961
ugcauuacuugcuucucac

SEQ ID NO: 1693963 - RNA, 19 nt, Artificial Sequence
  Description of Artificial Sequence: Synthetic oligonucleotide
  Sense strand starting at position 3790 of SEQ ID NO: 1561729
gcaaguaaugcacagguaa

SEQ ID NO: 1693964 - RNA, 19 nt, Artificial Sequence
  Description of Artificial Sequence: Synthetic oligonucleotide
  Antisense strand to SEQ ID NO: 1693963
uuaccugugcauuacuugc

SEQ ID NO: 1693965 - RNA, 19 nt, Artificial Sequence
  Description of Artificial Sequence: Synthetic oligonucleotide
  Sense strand starting at position 3868 of SEQ ID NO: 1561729
guagcugugaaguauagag

SEQ ID NO: 1693966 - RNA, 19 nt, Artificial Sequence
  Description of Artificial Sequence: Synthetic oligonucleotide
  Antisense strand to SEQ ID NO: 1693965
cucuauacuucacagcuac

SEQ ID NO: 1693967 - RNA, 19 nt, Artificial Sequence
  Description of Artificial Sequence: Synthetic oligonucleotide
  Sense strand starting at position 3872 of SEQ ID NO: 1561729
cugugaaguauagagcuuu

SEQ ID NO: 1693968 - RNA, 19 nt, Artificial Sequence
  Description of Artificial Sequence: Synthetic oligonucleotide
  Antisense strand to SEQ ID NO: 1693967
aaagcucuauacuucacag

SEQ ID NO: 1693969 - RNA, 19 nt, Artificial Sequence
  Description of Artificial Sequence: Synthetic oligonucleotide
  Sense strand starting at position 3884 of SEQ ID NO: 1561729
gagcuuuagcuugaguggu

SEQ ID NO: 1693970 - RNA, 19 nt, Artificial Sequence
  Description of Artificial Sequence: Synthetic oligonucleotide
  Antisense strand to SEQ ID NO: 1693969
accacucaagcuaaagcuc

SEQ ID NO: 1693971 - RNA, 19 nt, Artificial Sequence
  Description of Artificial Sequence: Synthetic oligonucleotide
  Sense strand starting at position 3954 of SEQ ID NO: 1561729
gaaagagcaucacaaguuu

SEQ ID NO: 1693972 - RNA, 19 nt, Artificial Sequence
  Description of Artificial Sequence: Synthetic oligonucleotide
  Antisense strand to SEQ ID NO: 1693971
aaacuugugaugcucuuuc

SEQ ID NO: 1693973 - RNA, 19 nt, Artificial Sequence
  Description of Artificial Sequence: Synthetic oligonucleotide
  Sense strand starting at position 3960 of SEQ ID NO: 1561729
gcaucacaaguuugaagaa

SEQ ID NO: 1693974 - RNA, 19 nt, Artificial Sequence
  Description of Artificial Sequence: Synthetic oligonucleotide
  Antisense strand to SEQ ID NO: 1693973
uucuucaaacuugugaugc

SEQ ID NO: 1693975 - RNA, 19 nt, Artificial Sequence
  Description of Artificial Sequence: Synthetic oligonucleotide
  Sense strand starting at position 33 of SEQ ID NO: 1561730
uguuaacagugacuaaauu

SEQ ID NO: 1693976 - RNA, 19 nt, Artificial Sequence
  Description of Artificial Sequence: Synthetic oligonucleotide
  Antisense strand to SEQ ID NO: 1693975
aauuuagucacuguuaaca

SEQ ID NO: 1693977 - RNA, 19 nt, Artificial Sequence
  Description of Artificial Sequence: Synthetic oligonucleotide
  Sense strand starting at position 121 of SEQ ID NO: 1561730
guauuucucugacuugguu

SEQ ID NO: 1693978 - RNA, 19 nt, Artificial Sequence
  Description of Artificial Sequence: Synthetic oligonucleotide
  Antisense strand to SEQ ID NO: 1693977
aaccaagucagagaaauac

SEQ ID NO: 1693979 - RNA, 19 nt, Artificial Sequence
  Description of Artificial Sequence: Synthetic oligonucleotide
  Sense strand starting at position 125 of SEQ ID NO: 1561730
uucucugacuugguuacaa

SEQ ID NO: 1693980 - RNA, 19 nt, Artificial Sequence
  Description of Artificial Sequence: Synthetic oligonucleotide
  Antisense strand to SEQ ID NO: 1693979
uuguaaccaagucagagaa

SEQ ID NO: 1693981 - RNA, 19 nt, Artificial Sequence
  Description of Artificial Sequence: Synthetic oligonucleotide
  Sense strand starting at position 127 of SEQ ID NO: 1561730
cucugacuugguuacaaau

SEQ ID NO: 1693982 - RNA, 19 nt, Artificial Sequence
  Description of Artificial Sequence: Synthetic oligonucleotide
  Antisense strand to SEQ ID NO: 1693981
auuuguaaccaagucagag

SEQ ID NO: 1693983 - RNA, 19 nt, Artificial Sequence
  Description of Artificial Sequence: Synthetic oligonucleotide
  Sense strand starting at position 171 of SEQ ID NO: 1561730
guaccuauaucuuuacuag

SEQ ID NO: 1693984 - RNA, 19 nt, Artificial Sequence
  Description of Artificial Sequence: Synthetic oligonucleotide
  Antisense strand to SEQ ID NO: 1693983
cuaguaaagauauagguac

SEQ ID NO: 1693985 - RNA, 19 nt, Artificial Sequence
  Description of Artificial Sequence: Synthetic oligonucleotide
  Sense strand starting at position 190 of SEQ ID NO: 1561730
ucucuugccuaaugggaaa

SEQ ID NO: 1693986 - RNA, 19 nt, Artificial Sequence
  Description of Artificial Sequence: Synthetic oligonucleotide
  Antisense strand to SEQ ID NO: 1693985
uuucccauuaggcaagaga

SEQ ID NO: 1693987 - RNA, 19 nt, Artificial Sequence
  Description of Artificial Sequence: Synthetic oligonucleotide
  Sense strand starting at position 207 of SEQ ID NO: 1561730
aaauccuguuucgguauaa

SEQ ID NO: 1693988 - RNA, 19 nt, Artificial Sequence
  Description of Artificial Sequence: Synthetic oligonucleotide
  Antisense strand to SEQ ID NO: 1693987
uuauaccgaaacaggauuu

SEQ ID NO: 1693989 - RNA, 19 nt, Artificial Sequence
  Description of Artificial Sequence: Synthetic oligonucleotide
  Sense strand starting at position 208 of SEQ ID NO: 1561730
aauccuguuucgguauaaa

SEQ ID NO: 1693990 - RNA, 19 nt, Artificial Sequence
  Description of Artificial Sequence: Synthetic oligonucleotide
  Antisense strand to SEQ ID NO: 1693989
uuuauaccgaaacaggauu

SEQ ID NO: 1693991 - RNA, 19 nt, Artificial Sequence
  Description of Artificial Sequence: Synthetic oligonucleotide
  Sense strand starting at position 211 of SEQ ID NO: 1561730
ccuguuucgguauaaacca

SEQ ID NO: 1693992 - RNA, 19 nt, Artificial Sequence
  Description of Artificial Sequence: Synthetic oligonucleotide
  Antisense strand to SEQ ID NO: 1693991
ugguuuauaccgaaacagg

SEQ ID NO: 1693993 - RNA, 19 nt, Artificial Sequence
  Description of Artificial Sequence: Synthetic oligonucleotide
  Sense strand starting at position 781 of SEQ ID NO: 1561730
gcaaucagggaguguguau

SEQ ID NO: 1693994 - RNA, 19 nt, Artificial Sequence
  Description of Artificial Sequence: Synthetic oligonucleotide
  Antisense strand to SEQ ID NO: 1693993
auacacacucccugauugc

SEQ ID NO: 1693995 - RNA, 19 nt, Artificial Sequence
  Description of Artificial Sequence: Synthetic oligonucleotide
  Sense strand starting at position 787 of SEQ ID NO: 1561730
agggaguguguaugaggua

SEQ ID NO: 1693996 - RNA, 19 nt, Artificial Sequence
  Description of Artificial Sequence: Synthetic oligonucleotide
  Antisense strand to SEQ ID NO: 1693995
uaccucauacacacucccu

SEQ ID NO: 1693997 - RNA, 19 nt, Artificial Sequence
  Description of Artificial Sequence: Synthetic oligonucleotide
  Sense strand starting at position 788 of SEQ ID NO: 1561730
gggaguguguaugagguau

SEQ ID NO: 1693998 - RNA, 19 nt, Artificial Sequence
  Description of Artificial Sequence: Synthetic oligonucleotide
  Antisense strand to SEQ ID NO: 1693997
auaccucauacacacuccc

SEQ ID NO: 1693999 - RNA, 19 nt, Artificial Sequence
  Description of Artificial Sequence: Synthetic oligonucleotide
  Sense strand starting at position 792 of SEQ ID NO: 1561730
guguguaugagguaucucu

SEQ ID NO: 1694000 - RNA, 19 nt, Artificial Sequence
  Description of Artificial Sequence: Synthetic oligonucleotide
  Antisense strand to SEQ ID NO: 1693999
agagauaccucauacacac

SEQ ID NO: 1694001 - RNA, 19 nt, Artificial Sequence
  Description of Artificial Sequence: Synthetic oligonucleotide
  Sense strand starting at position 802 of SEQ ID NO: 1561730
gguaucucuugccagcaga

SEQ ID NO: 1694002 - RNA, 19 nt, Artificial Sequence
  Description of Artificial Sequence: Synthetic oligonucleotide
  Antisense strand to SEQ ID NO: 1694001
ucugcuggcaagagauacc

SEQ ID NO: 1694003 - RNA, 19 nt, Artificial Sequence
  Description of Artificial Sequence: Synthetic oligonucleotide
  Sense strand starting at position 913 of SEQ ID NO: 1561730
gcaggaguucuccacguaa

SEQ ID NO: 1694004 - RNA, 19 nt, Artificial Sequence
  Description of Artificial Sequence: Synthetic oligonucleotide
  Antisense strand to SEQ ID NO: 1694003
uuacguggagaacuccugc

SEQ ID NO: 1694005 - RNA, 19 nt, Artificial Sequence
  Description of Artificial Sequence: Synthetic oligonucleotide
  Sense strand starting at position 915 of SEQ ID NO: 1561730
aggaguucuccacguaagu

SEQ ID NO: 1694006 - RNA, 19 nt, Artificial Sequence
  Description of Artificial Sequence: Synthetic oligonucleotide
  Antisense strand to SEQ ID NO: 1694005
acuuacguggagaacuccu

SEQ ID NO: 1694007 - RNA, 19 nt, Artificial Sequence
  Description of Artificial Sequence: Synthetic oligonucleotide
  Sense strand starting at position 920 of SEQ ID NO: 1561730
uucuccacguaaguuaaau

SEQ ID NO: 1694008 - RNA, 19 nt, Artificial Sequence
  Description of Artificial Sequence: Synthetic oligonucleotide
  Antisense strand to SEQ ID NO: 1694007
auuuaacuuacguggagaa

SEQ ID NO: 1694009 - RNA, 19 nt, Artificial Sequence
  Description of Artificial Sequence: Synthetic oligonucleotide
  Sense strand starting at position 1029 of SEQ ID NO: 1561730
auggcuaauucuuuaagua

SEQ ID NO: 1694010 - RNA, 19 nt, Artificial Sequence
  Description of Artificial Sequence: Synthetic oligonucleotide
  Antisense strand to SEQ ID NO: 1694009
uacuuaaagaauuagccau

SEQ ID NO: 1694011 - RNA, 19 nt, Artificial Sequence
  Description of Artificial Sequence: Synthetic oligonucleotide
  Sense strand starting at position 1030 of SEQ ID NO: 1561730
uggcuaauucuuuaaguaa

SEQ ID NO: 1694012 - RNA, 19 nt, Artificial Sequence
  Description of Artificial Sequence: Synthetic oligonucleotide
  Antisense strand to SEQ ID NO: 1694011
uuacuuaaagaauuagcca

SEQ ID NO: 1694013 - RNA, 19 nt, Artificial Sequence
  Description of Artificial Sequence: Synthetic oligonucleotide
  Sense strand starting at position 2191 of SEQ ID NO: 1561730
uaaauuugguagugugcua

SEQ ID NO: 1694014 - RNA, 19 nt, Artificial Sequence
  Description of Artificial Sequence: Synthetic oligonucleotide
  Antisense strand to SEQ ID NO: 1694013
uagcacacuaccaaauuua

SEQ ID NO: 1694015 - RNA, 19 nt, Artificial Sequence
  Description of Artificial Sequence: Synthetic oligonucleotide
  Sense strand starting at position 2196 of SEQ ID NO: 1561730
uugguagugugcuaaaugu

SEQ ID NO: 1694016 - RNA, 19 nt, Artificial Sequence
  Description of Artificial Sequence: Synthetic oligonucleotide
  Antisense strand to SEQ ID NO: 1694015
acauuuagcacacuaccaa

SEQ ID NO: 1694017 - RNA, 19 nt, Artificial Sequence
  Description of Artificial Sequence: Synthetic oligonucleotide
  Sense strand starting at position 2203 of SEQ ID NO: 1561730
ugugcuaaauguuauuacu

SEQ ID NO: 1694018 - RNA, 19 nt, Artificial Sequence
  Description of Artificial Sequence: Synthetic oligonucleotide
  Antisense strand to SEQ ID NO: 1694017
aguaauaacauuuagcaca

SEQ ID NO: 1694019 - RNA, 19 nt, Artificial Sequence
  Description of Artificial Sequence: Synthetic oligonucleotide
  Sense strand starting at position 2205 of SEQ ID NO: 1561730
ugcuaaauguuauuacuga

SEQ ID NO: 1694020 - RNA, 19 nt, Artificial Sequence
  Description of Artificial Sequence: Synthetic oligonucleotide
  Antisense strand to SEQ ID NO: 1694019
ucaguaauaacauuuagca

SEQ ID NO: 1694021 - RNA, 19 nt, Artificial Sequence
  Description of Artificial Sequence: Synthetic oligonucleotide
  Sense strand starting at position 2206 of SEQ ID NO: 1561730
gcuaaauguuauuacugaa

SEQ ID NO: 1694022 - RNA, 19 nt, Artificial Sequence
  Description of Artificial Sequence: Synthetic oligonucleotide
  Antisense strand to SEQ ID NO: 1694021
uucaguaauaacauuuagc

SEQ ID NO: 1694023 - RNA, 19 nt, Artificial Sequence
  Description of Artificial Sequence: Synthetic oligonucleotide
  Sense strand starting at position 2254 of SEQ ID NO: 1561730
cugaacauuuaguacagaa

SEQ ID NO: 1694024 - RNA, 19 nt, Artificial Sequence
  Description of Artificial Sequence: Synthetic oligonucleotide
  Antisense strand to SEQ ID NO: 1694023
uucuguacuaaauguucag

SEQ ID NO: 1694025 - RNA, 19 nt, Artificial Sequence
  Description of Artificial Sequence: Synthetic oligonucleotide
  Sense strand starting at position 2303 of SEQ ID NO: 1561730
cuggcacuauguuaaauuu

SEQ ID NO: 1694026 - RNA, 19 nt, Artificial Sequence
  Description of Artificial Sequence: Synthetic oligonucleotide
  Antisense strand to SEQ ID NO: 1694025
aaauuuaacauagugccag

SEQ ID NO: 1694027 - RNA, 19 nt, Artificial Sequence
  Description of Artificial Sequence: Synthetic oligonucleotide
  Sense strand starting at position 2700 of SEQ ID NO: 1561730
acucuucuguuagcacuua

SEQ ID NO: 1694028 - RNA, 19 nt, Artificial Sequence
  Description of Artificial Sequence: Synthetic oligonucleotide
  Antisense strand to SEQ ID NO: 1694027
uaagugcuaacagaagagu

SEQ ID NO: 1694029 - RNA, 19 nt, Artificial Sequence
  Description of Artificial Sequence: Synthetic oligonucleotide
  Sense strand starting at position 2773 of SEQ ID NO: 1561730
cuuggcuucuagcauguaa

SEQ ID NO: 1694030 - RNA, 19 nt, Artificial Sequence
  Description of Artificial Sequence: Synthetic oligonucleotide
  Antisense strand to SEQ ID NO: 1694029
uuacaugcuagaagccaag

SEQ ID NO: 1694031 - RNA, 19 nt, Artificial Sequence
  Description of Artificial Sequence: Synthetic oligonucleotide
  Sense strand starting at position 2775 of SEQ ID NO: 1561730
uggcuucuagcauguaaag

SEQ ID NO: 1694032 - RNA, 19 nt, Artificial Sequence
  Description of Artificial Sequence: Synthetic oligonucleotide
  Antisense strand to SEQ ID NO: 1694031
cuuuacaugcuagaagcca

SEQ ID NO: 1694033 - RNA, 19 nt, Artificial Sequence
  Description of Artificial Sequence: Synthetic oligonucleotide
  Sense strand starting at position 2894 of SEQ ID NO: 1561730
aaugguaguuaccuuagua

SEQ ID NO: 1694034 - RNA, 19 nt, Artificial Sequence
  Description of Artificial Sequence: Synthetic oligonucleotide
  Antisense strand to SEQ ID NO: 1694033
uacuaagguaacuaccauu

SEQ ID NO: 1694035 - RNA, 19 nt, Artificial Sequence
  Description of Artificial Sequence: Synthetic oligonucleotide
  Sense strand starting at position 2898 of SEQ ID NO: 1561730
guaguuaccuuaguaagca

SEQ ID NO: 1694036 - RNA, 19 nt, Artificial Sequence
  Description of Artificial Sequence: Synthetic oligonucleotide
  Antisense strand to SEQ ID NO: 1694035
ugcuuacuaagguaacuac

SEQ ID NO: 1694037 - RNA, 19 nt, Artificial Sequence
  Description of Artificial Sequence: Synthetic oligonucleotide
  Sense strand starting at position 3079 of SEQ ID NO: 1561730
ccuguaaucuuaggccaag

SEQ ID NO: 1694038 - RNA, 19 nt, Artificial Sequence
  Description of Artificial Sequence: Synthetic oligonucleotide
  Antisense strand to SEQ ID NO: 1694037
cuuggccuaagauuacagg

SEQ ID NO: 1694039 - RNA, 19 nt, Artificial Sequence
  Description of Artificial Sequence: Synthetic oligonucleotide
  Sense strand starting at position 3436 of SEQ ID NO: 1561730
uggagaucuuggcuccaug

SEQ ID NO: 1694040 - RNA, 19 nt, Artificial Sequence
  Description of Artificial Sequence: Synthetic oligonucleotide
  Antisense strand to SEQ ID NO: 1694039
cauggagccaagaucucca

SEQ ID NO: 1694041 - RNA, 19 nt, Artificial Sequence
  Description of Artificial Sequence: Synthetic oligonucleotide
  Sense strand starting at position 3476 of SEQ ID NO: 1561730
aucuccaccuucugaguua

SEQ ID NO: 1694042 - RNA, 19 nt, Artificial Sequence
  Description of Artificial Sequence: Synthetic oligonucleotide
  Antisense strand to SEQ ID NO: 1694041
uaacucagaagguggagau

SEQ ID NO: 1694043 - RNA, 19 nt, Artificial Sequence
  Description of Artificial Sequence: Synthetic oligonucleotide
  Sense strand starting at position 3874 of SEQ ID NO: 1561730
gaaggagucccgggauuga

SEQ ID NO: 1694044 - RNA, 19 nt, Artificial Sequence
  Description of Artificial Sequence: Synthetic oligonucleotide
  Antisense strand to SEQ ID NO: 1694043
ucaaucccgggacuccuuc

SEQ ID NO: 1694045 - RNA, 19 nt, Artificial Sequence
  Description of Artificial Sequence: Synthetic oligonucleotide
  Sense strand starting at position 3878 of SEQ ID NO: 1561730
gagucccgggauugauaua

SEQ ID NO: 1694046 - RNA, 19 nt, Artificial Sequence
  Description of Artificial Sequence: Synthetic oligonucleotide
  Antisense strand to SEQ ID NO: 1694045
uauaucaaucccgggacuc

SEQ ID NO: 1694047 - RNA, 19 nt, Artificial Sequence
  Description of Artificial Sequence: Synthetic oligonucleotide
  Sense strand starting at position 458 of SEQ ID NO: 1561731
uaggaagucugucugauga

SEQ ID NO: 1694048 - RNA, 19 nt, Artificial Sequence
  Description of Artificial Sequence: Synthetic oligonucleotide
  Antisense strand to SEQ ID NO: 1694047
ucaucagacagacuuccua

SEQ ID NO: 1694049 - RNA, 19 nt, Artificial Sequence
  Description of Artificial Sequence: Synthetic oligonucleotide
  Sense strand starting at position 460 of SEQ ID NO: 1561731
ggaagucugucugaugaca

SEQ ID NO: 1694050 - RNA, 19 nt, Artificial Sequence
  Description of Artificial Sequence: Synthetic oligonucleotide
  Antisense strand to SEQ ID NO: 1694049
ugucaucagacagacuucc

SEQ ID NO: 1694051 - RNA, 19 nt, Artificial Sequence
  Description of Artificial Sequence: Synthetic oligonucleotide
  Sense strand starting at position 660 of SEQ ID NO: 1561731
gugucuuacaguugcagau

SEQ ID NO: 1694052 - RNA, 19 nt, Artificial Sequence
  Description of Artificial Sequence: Synthetic oligonucleotide
  Antisense strand to SEQ ID NO: 1694051
aucugcaacuguaagacac

SEQ ID NO: 1694053 - RNA, 19 nt, Artificial Sequence
  Description of Artificial Sequence: Synthetic oligonucleotide
  Sense strand starting at position 664 of SEQ ID NO: 1561731
cuuacaguugcagauuaga

SEQ ID NO: 1694054 - RNA, 19 nt, Artificial Sequence
  Description of Artificial Sequence: Synthetic oligonucleotide
  Antisense strand to SEQ ID NO: 1694053
ucuaaucugcaacuguaag

SEQ ID NO: 1694055 - RNA, 19 nt, Artificial Sequence
  Description of Artificial Sequence: Synthetic oligonucleotide
  Sense strand starting at position 667 of SEQ ID NO: 1561731
acaguugcagauuagaauu

SEQ ID NO: 1694056 - RNA, 19 nt, Artificial Sequence
  Description of Artificial Sequence: Synthetic oligonucleotide
  Antisense strand to SEQ ID NO: 1694055
aauucuaaucugcaacugu

SEQ ID NO: 1694057 - RNA, 19 nt, Artificial Sequence
  Description of Artificial Sequence: Synthetic oligonucleotide
  Sense strand starting at position 704 of SEQ ID NO: 1561731
gggccuuucccagacacaa

SEQ ID NO: 1694058 - RNA, 19 nt, Artificial Sequence
  Description of Artificial Sequence: Synthetic oligonucleotide
  Antisense strand to SEQ ID NO: 1694057
uugugucugggaaaggccc

SEQ ID NO: 1694059 - RNA, 19 nt, Artificial Sequence
  Description of Artificial Sequence: Synthetic oligonucleotide
  Sense strand starting at position 798 of SEQ ID NO: 1561731
ucaguuuacccaugucuaa

SEQ ID NO: 1694060 - RNA, 19 nt, Artificial Sequence
  Description of Artificial Sequence: Synthetic oligonucleotide
  Antisense strand to SEQ ID NO: 1694059
uuagacauggguaaacuga

SEQ ID NO: 1694061 - RNA, 19 nt, Artificial Sequence
  Description of Artificial Sequence: Synthetic oligonucleotide
  Sense strand starting at position 916 of SEQ ID NO: 1561731
cagggaguguaucucguau

SEQ ID NO: 1694062 - RNA, 19 nt, Artificial Sequence
  Description of Artificial Sequence: Synthetic oligonucleotide
  Antisense strand to SEQ ID NO: 1694061
auacgagauacacucccug

SEQ ID NO: 1694063 - RNA, 19 nt, Artificial Sequence
  Description of Artificial Sequence: Synthetic oligonucleotide
  Sense strand starting at position 927 of SEQ ID NO: 1561731
ucucguaugcagggagaga

SEQ ID NO: 1694064 - RNA, 19 nt, Artificial Sequence
  Description of Artificial Sequence: Synthetic oligonucleotide
  Antisense strand to SEQ ID NO: 1694063
ucucucccugcauacgaga

SEQ ID NO: 1694065 - RNA, 19 nt, Artificial Sequence
  Description of Artificial Sequence: Synthetic oligonucleotide
  Sense strand starting at position 1020 of SEQ ID NO: 1561731
agcucuaaagacuguguca

SEQ ID NO: 1694066 - RNA, 19 nt, Artificial Sequence
  Description of Artificial Sequence: Synthetic oligonucleotide
  Antisense strand to SEQ ID NO: 1694065
ugacacagucuuuagagcu

SEQ ID NO: 1694067 - RNA, 19 nt, Artificial Sequence
  Description of Artificial Sequence: Synthetic oligonucleotide
  Sense strand starting at position 1023 of SEQ ID NO: 1561731
ucuaaagacugugucacua

SEQ ID NO: 1694068 - RNA, 19 nt, Artificial Sequence
  Description of Artificial Sequence: Synthetic oligonucleotide
  Antisense strand to SEQ ID NO: 1694067
uagugacacagucuuuaga

SEQ ID NO: 1694069 - RNA, 19 nt, Artificial Sequence
  Description of Artificial Sequence: Synthetic oligonucleotide
  Sense strand starting at position 1504 of SEQ ID NO: 1561731
guuaaaggaagcugaguuu

SEQ ID NO: 1694070 - RNA, 19 nt, Artificial Sequence
  Description of Artificial Sequence: Synthetic oligonucleotide
  Antisense strand to SEQ ID NO: 1694069
aaacucagcuuccuuuaac

SEQ ID NO: 1694071 - RNA, 19 nt, Artificial Sequence
  Description of Artificial Sequence: Synthetic oligonucleotide
  Sense strand starting at position 1536 of SEQ ID NO: 1561731
gagcgugcuuaggcaugaa

SEQ ID NO: 1694072 - RNA, 19 nt, Artificial Sequence
  Description of Artificial Sequence: Synthetic oligonucleotide
  Antisense strand to SEQ ID NO: 1694071
uucaugccuaagcacgcuc

SEQ ID NO: 1694073 - RNA, 19 nt, Artificial Sequence
  Description of Artificial Sequence: Synthetic oligonucleotide
  Sense strand starting at position 1609 of SEQ ID NO: 1561731
auguaucaguguugauuug

SEQ ID NO: 1694074 - RNA, 19 nt, Artificial Sequence
  Description of Artificial Sequence: Synthetic oligonucleotide
  Antisense strand to SEQ ID NO: 1694073
caaaucaacacugauacau

SEQ ID NO: 1694075 - RNA, 19 nt, Artificial Sequence
  Description of Artificial Sequence: Synthetic oligonucleotide
  Sense strand starting at position 1620 of SEQ ID NO: 1561731
uugauuugcugggaaugcu

SEQ ID NO: 1694076 - RNA, 19 nt, Artificial Sequence
  Description of Artificial Sequence: Synthetic oligonucleotide
  Antisense strand to SEQ ID NO: 1694075
agcauucccagcaaaucaa

SEQ ID NO: 1694077 - RNA, 19 nt, Artificial Sequence
  Description of Artificial Sequence: Synthetic oligonucleotide
  Sense strand starting at position 1734 of SEQ ID NO: 1561731
gucuguaguagucaucuuu

SEQ ID NO: 1694078 - RNA, 19 nt, Artificial Sequence
  Description of Artificial Sequence: Synthetic oligonucleotide
  Antisense strand to SEQ ID NO: 1694077
aaagaugacuacuacagac

SEQ ID NO: 1694079 - RNA, 19 nt, Artificial Sequence
  Description of Artificial Sequence: Synthetic oligonucleotide
  Sense strand starting at position 1807 of SEQ ID NO: 1561731
aucauugaggucugcguua

SEQ ID NO: 1694080 - RNA, 19 nt, Artificial Sequence
  Description of Artificial Sequence: Synthetic oligonucleotide
  Antisense strand to SEQ ID NO: 1694079
uaacgcagaccucaaugau

SEQ ID NO: 1694081 - RNA, 19 nt, Artificial Sequence
  Description of Artificial Sequence: Synthetic oligonucleotide
  Sense strand starting at position 1809 of SEQ ID NO: 1561731
cauugaggucugcguuaua

SEQ ID NO: 1694082 - RNA, 19 nt, Artificial Sequence
  Description of Artificial Sequence: Synthetic oligonucleotide
  Antisense strand to SEQ ID NO: 1694081
uauaacgcagaccucaaug

SEQ ID NO: 1694083 - RNA, 19 nt, Artificial Sequence
  Description of Artificial Sequence: Synthetic oligonucleotide
  Sense strand starting at position 1812 of SEQ ID NO: 1561731
ugaggucugcguuauagau

SEQ ID NO: 1694084 - RNA, 19 nt, Artificial Sequence
  Description of Artificial Sequence: Synthetic oligonucleotide
  Antisense strand to SEQ ID NO: 1694083
aucuauaacgcagaccuca

SEQ ID NO: 1694085 - RNA, 19 nt, Artificial Sequence
  Description of Artificial Sequence: Synthetic oligonucleotide
  Sense strand starting at position 1902 of SEQ ID NO: 1561731
gcagcaggguacucagaua

SEQ ID NO: 1694086 - RNA, 19 nt, Artificial Sequence
  Description of Artificial Sequence: Synthetic oligonucleotide
  Antisense strand to SEQ ID NO: 1694085
uaucugaguacccugcugc

SEQ ID NO: 1694087 - RNA, 19 nt, Artificial Sequence
  Description of Artificial Sequence: Synthetic oligonucleotide
  Sense strand starting at position 2306 of SEQ ID NO: 1561731
gacugugaaagcuauguga

SEQ ID NO: 1694088 - RNA, 19 nt, Artificial Sequence
  Description of Artificial Sequence: Synthetic oligonucleotide
  Antisense strand to SEQ ID NO: 1694087
ucacauagcuuucacaguc

SEQ ID NO: 1694089 - RNA, 19 nt, Artificial Sequence
  Description of Artificial Sequence: Synthetic oligonucleotide
  Sense strand starting at position 2308 of SEQ ID NO: 1561731
cugugaaagcuaugugacu

SEQ ID NO: 1694090 - RNA, 19 nt, Artificial Sequence
  Description of Artificial Sequence: Synthetic oligonucleotide
  Antisense strand to SEQ ID NO: 1694089
agucacauagcuuucacag

SEQ ID NO: 1694091 - RNA, 19 nt, Artificial Sequence
  Description of Artificial Sequence: Synthetic oligonucleotide
  Sense strand starting at position 2309 of SEQ ID NO: 1561731
ugugaaagcuaugugacuu

SEQ ID NO: 1694092 - RNA, 19 nt, Artificial Sequence
  Description of Artificial Sequence: Synthetic oligonucleotide
  Antisense strand to SEQ ID NO: 1694091
aagucacauagcuuucaca

SEQ ID NO: 1694093 - RNA, 19 nt, Artificial Sequence
  Description of Artificial Sequence: Synthetic oligonucleotide
  Sense strand starting at position 2310 of SEQ ID NO: 1561731
gugaaagcuaugugacuuc

SEQ ID NO: 1694094 - RNA, 19 nt, Artificial Sequence
  Description of Artificial Sequence: Synthetic oligonucleotide
  Antisense strand to SEQ ID NO: 1694093
gaagucacauagcuuucac

SEQ ID NO: 1694095 - RNA, 19 nt, Artificial Sequence
  Description of Artificial Sequence: Synthetic oligonucleotide
  Sense strand starting at position 2407 of SEQ ID NO: 1561731
ggucacagucucugaaucu

SEQ ID NO: 1694096 - RNA, 19 nt, Artificial Sequence
  Description of Artificial Sequence: Synthetic oligonucleotide
  Antisense strand to SEQ ID NO: 1694095
agauucagagacugugacc

SEQ ID NO: 1694097 - RNA, 19 nt, Artificial Sequence
  Description of Artificial Sequence: Synthetic oligonucleotide
  Sense strand starting at position 2471 of SEQ ID NO: 1561731
auacccuaauguggagaau

SEQ ID NO: 1694098 - RNA, 19 nt, Artificial Sequence
  Description of Artificial Sequence: Synthetic oligonucleotide
  Antisense strand to SEQ ID NO: 1694097
auucuccacauuaggguau

SEQ ID NO: 1694099 - RNA, 19 nt, Artificial Sequence
  Description of Artificial Sequence: Synthetic oligonucleotide
  Sense strand starting at position 2680 of SEQ ID NO: 1561731
acacgaacucacgagcaau

SEQ ID NO: 1694100 - RNA, 19 nt, Artificial Sequence
  Description of Artificial Sequence: Synthetic oligonucleotide
  Antisense strand to SEQ ID NO: 1694099
auugcucgugaguucgugu

SEQ ID NO: 1694101 - RNA, 19 nt, Artificial Sequence
  Description of Artificial Sequence: Synthetic oligonucleotide
  Sense strand starting at position 2683 of SEQ ID NO: 1561731
cgaacucacgagcaauuga

SEQ ID NO: 1694102 - RNA, 19 nt, Artificial Sequence
  Description of Artificial Sequence: Synthetic oligonucleotide
  Antisense strand to SEQ ID NO: 1694101
ucaauugcucgugaguucg

SEQ ID NO: 1694103 - RNA, 19 nt, Artificial Sequence
  Description of Artificial Sequence: Synthetic oligonucleotide
  Sense strand starting at position 2937 of SEQ ID NO: 1561731
ucaaguauccuguggcaca

SEQ ID NO: 1694104 - RNA, 19 nt, Artificial Sequence
  Description of Artificial Sequence: Synthetic oligonucleotide
  Antisense strand to SEQ ID NO: 1694103
ugugccacaggauacuuga

SEQ ID NO: 1694105 - RNA, 19 nt, Artificial Sequence
  Description of Artificial Sequence: Synthetic oligonucleotide
  Sense strand starting at position 2951 of SEQ ID NO: 1561731
gcacauguggcugguucua

SEQ ID NO: 1694106 - RNA, 19 nt, Artificial Sequence
  Description of Artificial Sequence: Synthetic oligonucleotide
  Antisense strand to SEQ ID NO: 1694105
uagaaccagccacaugugc

SEQ ID NO: 1694107 - RNA, 19 nt, Artificial Sequence
  Description of Artificial Sequence: Synthetic oligonucleotide
  Sense strand starting at position 3010 of SEQ ID NO: 1561731
augguagguuacgaucaaa

SEQ ID NO: 1694108 - RNA, 19 nt, Artificial Sequence
  Description of Artificial Sequence: Synthetic oligonucleotide
  Antisense strand to SEQ ID NO: 1694107
uuugaucguaaccuaccau

SEQ ID NO: 1694109 - RNA, 19 nt, Artificial Sequence
  Description of Artificial Sequence: Synthetic oligonucleotide
  Sense strand starting at position 3040 of SEQ ID NO: 1561731
gggaguuaugcucacucuu

SEQ ID NO: 1694110 - RNA, 19 nt, Artificial Sequence
  Description of Artificial Sequence: Synthetic oligonucleotide
  Antisense strand to SEQ ID NO: 1694109
aagagugagcauaacuccc

SEQ ID NO: 1694111 - RNA, 19 nt, Artificial Sequence
  Description of Artificial Sequence: Synthetic oligonucleotide
  Sense strand starting at position 3253 of SEQ ID NO: 1561731
ccuggagucucacaguaaa

SEQ ID NO: 1694112 - RNA, 19 nt, Artificial Sequence
  Description of Artificial Sequence: Synthetic oligonucleotide
  Antisense strand to SEQ ID NO: 1694111
uuuacugugagacuccagg

SEQ ID NO: 1694113 - RNA, 19 nt, Artificial Sequence
  Description of Artificial Sequence: Synthetic oligonucleotide
  Sense strand starting at position 3256 of SEQ ID NO: 1561731
ggagucucacaguaaaugu

SEQ ID NO: 1694114 - RNA, 19 nt, Artificial Sequence
  Description of Artificial Sequence: Synthetic oligonucleotide
  Antisense strand to SEQ ID NO: 1694113
acauuuacugugagacucc

SEQ ID NO: 1694115 - RNA, 19 nt, Artificial Sequence
  Description of Artificial Sequence: Synthetic oligonucleotide
  Sense strand starting at position 3497 of SEQ ID NO: 1561731
gccuaauaguaugugcuca

SEQ ID NO: 1694116 - RNA, 19 nt, Artificial Sequence
  Description of Artificial Sequence: Synthetic oligonucleotide
  Antisense strand to SEQ ID NO: 1694115
ugagcacauacuauuaggc

SEQ ID NO: 1694117 - RNA, 19 nt, Artificial Sequence
  Description of Artificial Sequence: Synthetic oligonucleotide
  Sense strand starting at position 3499 of SEQ ID NO: 1561731
cuaauaguaugugcucaau

SEQ ID NO: 1694118 - RNA, 19 nt, Artificial Sequence
  Description of Artificial Sequence: Synthetic oligonucleotide
  Antisense strand to SEQ ID NO: 1694117
auugagcacauacuauuag

SEQ ID NO: 1694119 - RNA, 19 nt, Artificial Sequence
  Description of Artificial Sequence: Synthetic oligonucleotide
  Sense strand starting at position 3502 of SEQ ID NO: 1561731
auaguaugugcucaaucug

SEQ ID NO: 1694120 - RNA, 19 nt, Artificial Sequence
  Description of Artificial Sequence: Synthetic oligonucleotide
  Antisense strand to SEQ ID NO: 1694119
cagauugagcacauacuau

SEQ ID NO: 1694121 - RNA, 19 nt, Artificial Sequence
  Description of Artificial Sequence: Synthetic oligonucleotide
  Sense strand starting at position 3552 of SEQ ID NO: 1561731
ccacuuuauccagaccugu

SEQ ID NO: 1694122 - RNA, 19 nt, Artificial Sequence
  Description of Artificial Sequence: Synthetic oligonucleotide
  Antisense strand to SEQ ID NO: 1694121
acaggucuggauaaagugg

SEQ ID NO: 1694123 - RNA, 19 nt, Artificial Sequence
  Description of Artificial Sequence: Synthetic oligonucleotide
  Sense strand starting at position 3808 of SEQ ID NO: 1561731
cugagaggauuuggucagu

SEQ ID NO: 1694124 - RNA, 19 nt, Artificial Sequence
  Description of Artificial Sequence: Synthetic oligonucleotide
  Antisense strand to SEQ ID NO: 1694123
acugaccaaauccucucag

SEQ ID NO: 1694125 - RNA, 19 nt, Artificial Sequence
  Description of Artificial Sequence: Synthetic oligonucleotide
  Sense strand starting at position 3819 of SEQ ID NO: 1561731
uggucaguuggguguccua

SEQ ID NO: 1694126 - RNA, 19 nt, Artificial Sequence
  Description of Artificial Sequence: Synthetic oligonucleotide
  Antisense strand to SEQ ID NO: 1694125
uaggacacccaacugacca

SEQ ID NO: 1694127 - RNA, 19 nt, Artificial Sequence
  Description of Artificial Sequence: Synthetic oligonucleotide
  Sense strand starting at position 615 of SEQ ID NO: 1561732
ucauguugacucugaggua

SEQ ID NO: 1694128 - RNA, 19 nt, Artificial Sequence
  Description of Artificial Sequence: Synthetic oligonucleotide
  Antisense strand to SEQ ID NO: 1694127
uaccucagagucaacauga

SEQ ID NO: 1694129 - RNA, 19 nt, Artificial Sequence
  Description of Artificial Sequence: Synthetic oligonucleotide
  Sense strand starting at position 661 of SEQ ID NO: 1561732
cccacaggcugcuuaaaua

SEQ ID NO: 1694130 - RNA, 19 nt, Artificial Sequence
  Description of Artificial Sequence: Synthetic oligonucleotide
  Antisense strand to SEQ ID NO: 1694129
uauuuaagcagccuguggg

SEQ ID NO: 1694131 - RNA, 19 nt, Artificial Sequence
  Description of Artificial Sequence: Synthetic oligonucleotide
  Sense strand starting at position 836 of SEQ ID NO: 1561732
ggagguguuacccaugcau

SEQ ID NO: 1694132 - RNA, 19 nt, Artificial Sequence
  Description of Artificial Sequence: Synthetic oligonucleotide
  Antisense strand to SEQ ID NO: 1694131
augcauggguaacaccucc

SEQ ID NO: 1694133 - RNA, 19 nt, Artificial Sequence
  Description of Artificial Sequence: Synthetic oligonucleotide
  Sense strand starting at position 838 of SEQ ID NO: 1561732
agguguuacccaugcauuc

SEQ ID NO: 1694134 - RNA, 19 nt, Artificial Sequence
  Description of Artificial Sequence: Synthetic oligonucleotide
  Antisense strand to SEQ ID NO: 1694133
gaaugcauggguaacaccu

SEQ ID NO: 1694135 - RNA, 19 nt, Artificial Sequence
  Description of Artificial Sequence: Synthetic oligonucleotide
  Sense strand starting at position 860 of SEQ ID NO: 1561732
ucaagccagcuugaguaaa

SEQ ID NO: 1694136 - RNA, 19 nt, Artificial Sequence
  Description of Artificial Sequence: Synthetic oligonucleotide
  Antisense strand to SEQ ID NO: 1694135
uuuacucaagcuggcuuga

SEQ ID NO: 1694137 - RNA, 19 nt, Artificial Sequence
  Description of Artificial Sequence: Synthetic oligonucleotide
  Sense strand starting at position 862 of SEQ ID NO: 1561732
aagccagcuugaguaaauu

SEQ ID NO: 1694138 - RNA, 19 nt, Artificial Sequence
  Description of Artificial Sequence: Synthetic oligonucleotide
  Antisense strand to SEQ ID NO: 1694137
aauuuacucaagcuggcuu

SEQ ID NO: 1694139 - RNA, 19 nt, Artificial Sequence
  Description of Artificial Sequence: Synthetic oligonucleotide
  Sense strand starting at position 932 of SEQ ID NO: 1561732
aaggacuucugucuacguu

SEQ ID NO: 1694140 - RNA, 19 nt, Artificial Sequence
  Description of Artificial Sequence: Synthetic oligonucleotide
  Antisense strand to SEQ ID NO: 1694139
aacguagacagaaguccuu

SEQ ID NO: 1694141 - RNA, 19 nt, Artificial Sequence
  Description of Artificial Sequence: Synthetic oligonucleotide
  Sense strand starting at position 933 of SEQ ID NO: 1561732
aggacuucugucuacguua

SEQ ID NO: 1694142 - RNA, 19 nt, Artificial Sequence
  Description of Artificial Sequence: Synthetic oligonucleotide
  Antisense strand to SEQ ID NO: 1694141
uaacguagacagaaguccu

SEQ ID NO: 1694143 - RNA, 19 nt, Artificial Sequence
  Description of Artificial Sequence: Synthetic oligonucleotide
  Sense strand starting at position 935 of SEQ ID NO: 1561732
gacuucugucuacguuaaa

SEQ ID NO: 1694144 - RNA, 19 nt, Artificial Sequence
  Description of Artificial Sequence: Synthetic oligonucleotide
  Antisense strand to SEQ ID NO: 1694143
uuuaacguagacagaaguc

SEQ ID NO: 1694145 - RNA, 19 nt, Artificial Sequence
  Description of Artificial Sequence: Synthetic oligonucleotide
  Sense strand starting at position 936 of SEQ ID NO: 1561732
acuucugucuacguuaaag

SEQ ID NO: 1694146 - RNA, 19 nt, Artificial Sequence
  Description of Artificial Sequence: Synthetic oligonucleotide
  Antisense strand to SEQ ID NO: 1694145
cuuuaacguagacagaagu

SEQ ID NO: 1694147 - RNA, 19 nt, Artificial Sequence
  Description of Artificial Sequence: Synthetic oligonucleotide
  Sense strand starting at position 1213 of SEQ ID NO: 1561732
cuauuugacucaugauugu

SEQ ID NO: 1694148 - RNA, 19 nt, Artificial Sequence
  Description of Artificial Sequence: Synthetic oligonucleotide
  Antisense strand to SEQ ID NO: 1694147
acaaucaugagucaaauag

SEQ ID NO: 1694149 - RNA, 19 nt, Artificial Sequence
  Description of Artificial Sequence: Synthetic oligonucleotide
  Sense strand starting at position 1396 of SEQ ID NO: 1561732
ccauguggucucuguaacu

SEQ ID NO: 1694150 - RNA, 19 nt, Artificial Sequence
  Description of Artificial Sequence: Synthetic oligonucleotide
  Antisense strand to SEQ ID NO: 1694149
aguuacagagaccacaugg

SEQ ID NO: 1694151 - RNA, 19 nt, Artificial Sequence
  Description of Artificial Sequence: Synthetic oligonucleotide
  Sense strand starting at position 1414 of SEQ ID NO: 1561732
uacucaguucggcaugagu

SEQ ID NO: 1694152 - RNA, 19 nt, Artificial Sequence
  Description of Artificial Sequence: Synthetic oligonucleotide
  Antisense strand to SEQ ID NO: 1694151
acucaugccgaacugagua

SEQ ID NO: 1694153 - RNA, 19 nt, Artificial Sequence
  Description of Artificial Sequence: Synthetic oligonucleotide
  Sense strand starting at position 1536 of SEQ ID NO: 1561732
auguaaugugcugaggauc

SEQ ID NO: 1694154 - RNA, 19 nt, Artificial Sequence
  Description of Artificial Sequence: Synthetic oligonucleotide
  Antisense strand to SEQ ID NO: 1694153
gauccucagcacauuacau

SEQ ID NO: 1694155 - RNA, 19 nt, Artificial Sequence
  Description of Artificial Sequence: Synthetic oligonucleotide
  Sense strand starting at position 1569 of SEQ ID NO: 1561732
uuguuuaagugccuuaauu

SEQ ID NO: 1694156 - RNA, 19 nt, Artificial Sequence
  Description of Artificial Sequence: Synthetic oligonucleotide
  Antisense strand to SEQ ID NO: 1694155
aauuaaggcacuuaaacaa

SEQ ID NO: 1694157 - RNA, 19 nt, Artificial Sequence
  Description of Artificial Sequence: Synthetic oligonucleotide
  Sense strand starting at position 1750 of SEQ ID NO: 1561732
cuuuaaggacucggaagau

SEQ ID NO: 1694158 - RNA, 19 nt, Artificial Sequence
  Description of Artificial Sequence: Synthetic oligonucleotide
  Antisense strand to SEQ ID NO: 1694157
aucuuccgaguccuuaaag

SEQ ID NO: 1694159 - RNA, 19 nt, Artificial Sequence
  Description of Artificial Sequence: Synthetic oligonucleotide
  Sense strand starting at position 1771 of SEQ ID NO: 1561732
ugaagugguacuugucauc

SEQ ID NO: 1694160 - RNA, 19 nt, Artificial Sequence
  Description of Artificial Sequence: Synthetic oligonucleotide
  Antisense strand to SEQ ID NO: 1694159
gaugacaaguaccacuuca

SEQ ID NO: 1694161 - RNA, 19 nt, Artificial Sequence
  Description of Artificial Sequence: Synthetic oligonucleotide
  Sense strand starting at position 1776 of SEQ ID NO: 1561732
ugguacuugucaucacuuu

SEQ ID NO: 1694162 - RNA, 19 nt, Artificial Sequence
  Description of Artificial Sequence: Synthetic oligonucleotide
  Antisense strand to SEQ ID NO: 1694161
aaagugaugacaaguacca

SEQ ID NO: 1694163 - RNA, 19 nt, Artificial Sequence
  Description of Artificial Sequence: Synthetic oligonucleotide
  Sense strand starting at position 1784 of SEQ ID NO: 1561732
gucaucacuuuccuuguua

SEQ ID NO: 1694164 - RNA, 19 nt, Artificial Sequence
  Description of Artificial Sequence: Synthetic oligonucleotide
  Antisense strand to SEQ ID NO: 1694163
uaacaaggaaagugaugac

SEQ ID NO: 1694165 - RNA, 19 nt, Artificial Sequence
  Description of Artificial Sequence: Synthetic oligonucleotide
  Sense strand starting at position 1797 of SEQ ID NO: 1561732
uuguuauacuggucgguga

SEQ ID NO: 1694166 - RNA, 19 nt, Artificial Sequence
  Description of Artificial Sequence: Synthetic oligonucleotide
  Antisense strand to SEQ ID NO: 1694165
ucaccgaccaguauaacaa

SEQ ID NO: 1694167 - RNA, 19 nt, Artificial Sequence
  Description of Artificial Sequence: Synthetic oligonucleotide
  Sense strand starting at position 1798 of SEQ ID NO: 1561732
uguuauacuggucggugau

SEQ ID NO: 1694168 - RNA, 19 nt, Artificial Sequence
  Description of Artificial Sequence: Synthetic oligonucleotide
  Antisense strand to SEQ ID NO: 1694167
aucaccgaccaguauaaca

SEQ ID NO: 1694169 - RNA, 19 nt, Artificial Sequence
  Description of Artificial Sequence: Synthetic oligonucleotide
  Sense strand starting at position 1799 of SEQ ID NO: 1561732
guuauacuggucggugauc

SEQ ID NO: 1694170 - RNA, 19 nt, Artificial Sequence
  Description of Artificial Sequence: Synthetic oligonucleotide
  Antisense strand to SEQ ID NO: 1694169
gaucaccgaccaguauaac

SEQ ID NO: 1694171 - RNA, 19 nt, Artificial Sequence
  Description of Artificial Sequence: Synthetic oligonucleotide
  Sense strand starting at position 1822 of SEQ ID NO: 1561732
gcaagcuguccuucgcaua

SEQ ID NO: 1694172 - RNA, 19 nt, Artificial Sequence
  Description of Artificial Sequence: Synthetic oligonucleotide
  Antisense strand to SEQ ID NO: 1694171
uaugcgaaggacagcuugc

SEQ ID NO: 1694173 - RNA, 19 nt, Artificial Sequence
  Description of Artificial Sequence: Synthetic oligonucleotide
  Sense strand starting at position 1985 of SEQ ID NO: 1561732
caggaagaguguucucugu

SEQ ID NO: 1694174 - RNA, 19 nt, Artificial Sequence
  Description of Artificial Sequence: Synthetic oligonucleotide
  Antisense strand to SEQ ID NO: 1694173
acagagaacacucuuccug

SEQ ID NO: 1694175 - RNA, 19 nt, Artificial Sequence
  Description of Artificial Sequence: Synthetic oligonucleotide
  Sense strand starting at position 1987 of SEQ ID NO: 1561732
ggaagaguguucucuguac

SEQ ID NO: 1694176 - RNA, 19 nt, Artificial Sequence
  Description of Artificial Sequence: Synthetic oligonucleotide
  Antisense strand to SEQ ID NO: 1694175
guacagagaacacucuucc

SEQ ID NO: 1694177 - RNA, 19 nt, Artificial Sequence
  Description of Artificial Sequence: Synthetic oligonucleotide
  Sense strand starting at position 1989 of SEQ ID NO: 1561732
aagaguguucucuguacuc

SEQ ID NO: 1694178 - RNA, 19 nt, Artificial Sequence
  Description of Artificial Sequence: Synthetic oligonucleotide
  Antisense strand to SEQ ID NO: 1694177
gaguacagagaacacucuu

SEQ ID NO: 1694179 - RNA, 19 nt, Artificial Sequence
  Description of Artificial Sequence: Synthetic oligonucleotide
  Sense strand starting at position 1991 of SEQ ID NO: 1561732
gaguguucucuguacuccu

SEQ ID NO: 1694180 - RNA, 19 nt, Artificial Sequence
  Description of Artificial Sequence: Synthetic oligonucleotide
  Antisense strand to SEQ ID NO: 1694179
aggaguacagagaacacuc

SEQ ID NO: 1694181 - RNA, 19 nt, Artificial Sequence
  Description of Artificial Sequence: Synthetic oligonucleotide
  Sense strand starting at position 2255 of SEQ ID NO: 1561732
cagcauugucuugguggga

SEQ ID NO: 1694182 - RNA, 19 nt, Artificial Sequence
  Description of Artificial Sequence: Synthetic oligonucleotide
  Antisense strand to SEQ ID NO: 1694181
ucccaccaagacaaugcug

SEQ ID NO: 1694183 - RNA, 19 nt, Artificial Sequence
  Description of Artificial Sequence: Synthetic oligonucleotide
  Sense strand starting at position 2631 of SEQ ID NO: 1561732
ggagcuuucugguuggaca

SEQ ID NO: 1694184 - RNA, 19 nt, Artificial Sequence
  Description of Artificial Sequence: Synthetic oligonucleotide
  Antisense strand to SEQ ID NO: 1694183
uguccaaccagaaagcucc

SEQ ID NO: 1694185 - RNA, 19 nt, Artificial Sequence
  Description of Artificial Sequence: Synthetic oligonucleotide
  Sense strand starting at position 2632 of SEQ ID NO: 1561732
gagcuuucugguuggacau

SEQ ID NO: 1694186 - RNA, 19 nt, Artificial Sequence
  Description of Artificial Sequence: Synthetic oligonucleotide
  Antisense strand to SEQ ID NO: 1694185
auguccaaccagaaagcuc

SEQ ID NO: 1694187 - RNA, 19 nt, Artificial Sequence
  Description of Artificial Sequence: Synthetic oligonucleotide
  Sense strand starting at position 2633 of SEQ ID NO: 1561732
agcuuucugguuggacauu

SEQ ID NO: 1694188 - RNA, 19 nt, Artificial Sequence
  Description of Artificial Sequence: Synthetic oligonucleotide
  Antisense strand to SEQ ID NO: 1694187
aauguccaaccagaaagcu

SEQ ID NO: 1694189 - RNA, 19 nt, Artificial Sequence
  Description of Artificial Sequence: Synthetic oligonucleotide
  Sense strand starting at position 2644 of SEQ ID NO: 1561732
uggacauucuggucuccua

SEQ ID NO: 1694190 - RNA, 19 nt, Artificial Sequence
  Description of Artificial Sequence: Synthetic oligonucleotide
  Antisense strand to SEQ ID NO: 1694189
uaggagaccagaaugucca

SEQ ID NO: 1694191 - RNA, 19 nt, Artificial Sequence
  Description of Artificial Sequence: Synthetic oligonucleotide
  Sense strand starting at position 2647 of SEQ ID NO: 1561732
acauucuggucuccuaaag

SEQ ID NO: 1694192 - RNA, 19 nt, Artificial Sequence
  Description of Artificial Sequence: Synthetic oligonucleotide
  Antisense strand to SEQ ID NO: 1694191
cuuuaggagaccagaaugu

SEQ ID NO: 1694193 - RNA, 19 nt, Artificial Sequence
  Description of Artificial Sequence: Synthetic oligonucleotide
  Sense strand starting at position 2777 of SEQ ID NO: 1561732
aggcuuagugcgguuaugu

SEQ ID NO: 1694194 - RNA, 19 nt, Artificial Sequence
  Description of Artificial Sequence: Synthetic oligonucleotide
  Antisense strand to SEQ ID NO: 1694193
acauaaccgcacuaagccu

SEQ ID NO: 1694195 - RNA, 19 nt, Artificial Sequence
  Description of Artificial Sequence: Synthetic oligonucleotide
  Sense strand starting at position 2778 of SEQ ID NO: 1561732
ggcuuagugcgguuauguu

SEQ ID NO: 1694196 - RNA, 19 nt, Artificial Sequence
  Description of Artificial Sequence: Synthetic oligonucleotide
  Antisense strand to SEQ ID NO: 1694195
aacauaaccgcacuaagcc

SEQ ID NO: 1694197 - RNA, 19 nt, Artificial Sequence
  Description of Artificial Sequence: Synthetic oligonucleotide
  Sense strand starting at position 2791 of SEQ ID NO: 1561732
uauguucgauuccuagaag

SEQ ID NO: 1694198 - RNA, 19 nt, Artificial Sequence
  Description of Artificial Sequence: Synthetic oligonucleotide
  Antisense strand to SEQ ID NO: 1694197
cuucuaggaaucgaacaua

SEQ ID NO: 1694199 - RNA, 19 nt, Artificial Sequence
  Description of Artificial Sequence: Synthetic oligonucleotide
  Sense strand starting at position 2857 of SEQ ID NO: 1561732
gauggcuccugugugggaa

SEQ ID NO: 1694200 - RNA, 19 nt, Artificial Sequence
  Description of Artificial Sequence: Synthetic oligonucleotide
  Antisense strand to SEQ ID NO: 1694199
uucccacacaggagccauc

SEQ ID NO: 1694201 - RNA, 19 nt, Artificial Sequence
  Description of Artificial Sequence: Synthetic oligonucleotide
  Sense strand starting at position 3666 of SEQ ID NO: 1561732
aggguucacuccuuggagu

SEQ ID NO: 1694202 - RNA, 19 nt, Artificial Sequence
  Description of Artificial Sequence: Synthetic oligonucleotide
  Antisense strand to SEQ ID NO: 1694201
acuccaaggagugaacccu

SEQ ID NO: 1694203 - RNA, 19 nt, Artificial Sequence
  Description of Artificial Sequence: Synthetic oligonucleotide
  Sense strand starting at position 3667 of SEQ ID NO: 1561732
ggguucacuccuuggagua

SEQ ID NO: 1694204 - RNA, 19 nt, Artificial Sequence
  Description of Artificial Sequence: Synthetic oligonucleotide
  Antisense strand to SEQ ID NO: 1694203
uacuccaaggagugaaccc

SEQ ID NO: 1694205 - RNA, 19 nt, Artificial Sequence
  Description of Artificial Sequence: Synthetic oligonucleotide
  Sense strand starting at position 3912 of SEQ ID NO: 1561732
gugggauaucaaugcucuu

SEQ ID NO: 1694206 - RNA, 19 nt, Artificial Sequence
  Description of Artificial Sequence: Synthetic oligonucleotide
  Antisense strand to SEQ ID NO: 1694205
aagagcauugauaucccac

SEQ ID NO: 1694207 - RNA, 19 nt, Artificial Sequence
  Description of Artificial Sequence: Synthetic oligonucleotide
  Sense strand starting at position 17 of SEQ ID NO: 1561733
guaccugaggcugggauua

SEQ ID NO: 1694208 - RNA, 19 nt, Artificial Sequence
  Description of Artificial Sequence: Synthetic oligonucleotide
  Antisense strand to SEQ ID NO: 1694207
uaaucccagccucagguac

SEQ ID NO: 1694209 - RNA, 19 nt, Artificial Sequence
  Description of Artificial Sequence: Synthetic oligonucleotide
  Sense strand starting at position 19 of SEQ ID NO: 1561733
accugaggcugggauuaga

SEQ ID NO: 1694210 - RNA, 19 nt, Artificial Sequence
  Description of Artificial Sequence: Synthetic oligonucleotide
  Antisense strand to SEQ ID NO: 1694209
ucuaaucccagccucaggu

SEQ ID NO: 1694211 - RNA, 19 nt, Artificial Sequence
  Description of Artificial Sequence: Synthetic oligonucleotide
  Sense strand starting at position 115 of SEQ ID NO: 1561733
cagaguugaucucccagua

SEQ ID NO: 1694212 - RNA, 19 nt, Artificial Sequence
  Description of Artificial Sequence: Synthetic oligonucleotide
  Antisense strand to SEQ ID NO: 1694211
uacugggagaucaacucug

SEQ ID NO: 1694213 - RNA, 19 nt, Artificial Sequence
  Description of Artificial Sequence: Synthetic oligonucleotide
  Sense strand starting at position 145 of SEQ ID NO: 1561733
gcugaaggcuuccuagcaa

SEQ ID NO: 1694214 - RNA, 19 nt, Artificial Sequence
  Description of Artificial Sequence: Synthetic oligonucleotide
  Antisense strand to SEQ ID NO: 1694213
uugcuaggaagccuucagc

SEQ ID NO: 1694215 - RNA, 19 nt, Artificial Sequence
  Description of Artificial Sequence: Synthetic oligonucleotide
  Sense strand starting at position 396 of SEQ ID NO: 1561733
uguauacauccaugcauac

SEQ ID NO: 1694216 - RNA, 19 nt, Artificial Sequence
  Description of Artificial Sequence: Synthetic oligonucleotide
  Antisense strand to SEQ ID NO: 1694215
guaugcauggauguauaca

SEQ ID NO: 1694217 - RNA, 19 nt, Artificial Sequence
  Description of Artificial Sequence: Synthetic oligonucleotide
  Sense strand starting at position 586 of SEQ ID NO: 1561733
ggacuugguacauaugguu

SEQ ID NO: 1694218 - RNA, 19 nt, Artificial Sequence
  Description of Artificial Sequence: Synthetic oligonucleotide
  Antisense strand to SEQ ID NO: 1694217
aaccauauguaccaagucc

SEQ ID NO: 1694219 - RNA, 19 nt, Artificial Sequence
  Description of Artificial Sequence: Synthetic oligonucleotide
  Sense strand starting at position 613 of SEQ ID NO: 1561733
cucuaugucgaagaaguaa

SEQ ID NO: 1694220 - RNA, 19 nt, Artificial Sequence
  Description of Artificial Sequence: Synthetic oligonucleotide
  Antisense strand to SEQ ID NO: 1694219
uuacuucuucgacauagag

SEQ ID NO: 1694221 - RNA, 19 nt, Artificial Sequence
  Description of Artificial Sequence: Synthetic oligonucleotide
  Sense strand starting at position 930 of SEQ ID NO: 1561733
gugucaguuuacccaugua

SEQ ID NO: 1694222 - RNA, 19 nt, Artificial Sequence
  Description of Artificial Sequence: Synthetic oligonucleotide
  Antisense strand to SEQ ID NO: 1694221
uacauggguaaacugacac

SEQ ID NO: 1694223 - RNA, 19 nt, Artificial Sequence
  Description of Artificial Sequence: Synthetic oligonucleotide
  Sense strand starting at position 1003 of SEQ ID NO: 1561733
uauugucaugcuugaaagg

SEQ ID NO: 1694224 - RNA, 19 nt, Artificial Sequence
  Description of Artificial Sequence: Synthetic oligonucleotide
  Antisense strand to SEQ ID NO: 1694223
ccuuucaagcaugacaaua

SEQ ID NO: 1694225 - RNA, 19 nt, Artificial Sequence
  Description of Artificial Sequence: Synthetic oligonucleotide
  Sense strand starting at position 1155 of SEQ ID NO: 1561733
agcucuaaagccuguguca

SEQ ID NO: 1694226 - RNA, 19 nt, Artificial Sequence
  Description of Artificial Sequence: Synthetic oligonucleotide
  Antisense strand to SEQ ID NO: 1694225
ugacacaggcuuuagagcu

SEQ ID NO: 1694227 - RNA, 19 nt, Artificial Sequence
  Description of Artificial Sequence: Synthetic oligonucleotide
  Sense strand starting at position 1157 of SEQ ID NO: 1561733
cucuaaagccugugucacu

SEQ ID NO: 1694228 - RNA, 19 nt, Artificial Sequence
  Description of Artificial Sequence: Synthetic oligonucleotide
  Antisense strand to SEQ ID NO: 1694227
agugacacaggcuuuagag

SEQ ID NO: 1694229 - RNA, 19 nt, Artificial Sequence
  Description of Artificial Sequence: Synthetic oligonucleotide
  Sense strand starting at position 1158 of SEQ ID NO: 1561733
ucuaaagccugugucacua

SEQ ID NO: 1694230 - RNA, 19 nt, Artificial Sequence
  Description of Artificial Sequence: Synthetic oligonucleotide
  Antisense strand to SEQ ID NO: 1694229
uagugacacaggcuuuaga

SEQ ID NO: 1694231 - RNA, 19 nt, Artificial Sequence
  Description of Artificial Sequence: Synthetic oligonucleotide
  Sense strand starting at position 1292 of SEQ ID NO: 1561733
aggucuaacucugcaucaa

SEQ ID NO: 1694232 - RNA, 19 nt, Artificial Sequence
  Description of Artificial Sequence: Synthetic oligonucleotide
  Antisense strand to SEQ ID NO: 1694231
uugaugcagaguuagaccu

SEQ ID NO: 1694233 - RNA, 19 nt, Artificial Sequence
  Description of Artificial Sequence: Synthetic oligonucleotide
  Sense strand starting at position 1293 of SEQ ID NO: 1561733
ggucuaacucugcaucaac

SEQ ID NO: 1694234 - RNA, 19 nt, Artificial Sequence
  Description of Artificial Sequence: Synthetic oligonucleotide
  Antisense strand to SEQ ID NO: 1694233
guugaugcagaguuagacc

SEQ ID NO: 1694235 - RNA, 19 nt, Artificial Sequence
  Description of Artificial Sequence: Synthetic oligonucleotide
  Sense strand starting at position 1447 of SEQ ID NO: 1561733
gaaguagggcucugcagaa

SEQ ID NO: 1694236 - RNA, 19 nt, Artificial Sequence
  Description of Artificial Sequence: Synthetic oligonucleotide
  Antisense strand to SEQ ID NO: 1694235
uucugcagagcccuacuuc

SEQ ID NO: 1694237 - RNA, 19 nt, Artificial Sequence
  Description of Artificial Sequence: Synthetic oligonucleotide
  Sense strand starting at position 1672 of SEQ ID NO: 1561733
aguguugaugugcugcgaa

SEQ ID NO: 1694238 - RNA, 19 nt, Artificial Sequence
  Description of Artificial Sequence: Synthetic oligonucleotide
  Antisense strand to SEQ ID NO: 1694237
uucgcagcacaucaacacu

SEQ ID NO: 1694239 - RNA, 19 nt, Artificial Sequence
  Description of Artificial Sequence: Synthetic oligonucleotide
  Sense strand starting at position 1692 of SEQ ID NO: 1561733
gcucuuauggaucgggcaa

SEQ ID NO: 1694240 - RNA, 19 nt, Artificial Sequence
  Description of Artificial Sequence: Synthetic oligonucleotide
  Antisense strand to SEQ ID NO: 1694239
uugcccgauccauaagagc

SEQ ID NO: 1694241 - RNA, 19 nt, Artificial Sequence
  Description of Artificial Sequence: Synthetic oligonucleotide
  Sense strand starting at position 1816 of SEQ ID NO: 1561733
uuguuauacucgcugauga

SEQ ID NO: 1694242 - RNA, 19 nt, Artificial Sequence
  Description of Artificial Sequence: Synthetic oligonucleotide
  Antisense strand to SEQ ID NO: 1694241
ucaucagcgaguauaacaa

SEQ ID NO: 1694243 - RNA, 19 nt, Artificial Sequence
  Description of Artificial Sequence: Synthetic oligonucleotide
  Sense strand starting at position 1817 of SEQ ID NO: 1561733
uguuauacucgcugaugac

SEQ ID NO: 1694244 - RNA, 19 nt, Artificial Sequence
  Description of Artificial Sequence: Synthetic oligonucleotide
  Antisense strand to SEQ ID NO: 1694243
gucaucagcgaguauaaca

SEQ ID NO: 1694245 - RNA, 19 nt, Artificial Sequence
  Description of Artificial Sequence: Synthetic oligonucleotide
  Sense strand starting at position 1818 of SEQ ID NO: 1561733
guuauacucgcugaugaca

SEQ ID NO: 1694246 - RNA, 19 nt, Artificial Sequence
  Description of Artificial Sequence: Synthetic oligonucleotide
  Antisense strand to SEQ ID NO: 1694245
ugucaucagcgaguauaac

SEQ ID NO: 1694247 - RNA, 19 nt, Artificial Sequence
  Description of Artificial Sequence: Synthetic oligonucleotide
  Sense strand starting at position 1850 of SEQ ID NO: 1561733
gcuguacccgcucaucauu

SEQ ID NO: 1694248 - RNA, 19 nt, Artificial Sequence
  Description of Artificial Sequence: Synthetic oligonucleotide
  Antisense strand to SEQ ID NO: 1694247
aaugaugagcggguacagc

SEQ ID NO: 1694249 - RNA, 19 nt, Artificial Sequence
  Description of Artificial Sequence: Synthetic oligonucleotide
  Sense strand starting at position 1883 of SEQ ID NO: 1561733
agaugccacccucgauuau

SEQ ID NO: 1694250 - RNA, 19 nt, Artificial Sequence
  Description of Artificial Sequence: Synthetic oligonucleotide
  Antisense strand to SEQ ID NO: 1694249
auaaucgaggguggcaucu

SEQ ID NO: 1694251 - RNA, 19 nt, Artificial Sequence
  Description of Artificial Sequence: Synthetic oligonucleotide
  Sense strand starting at position 2352 of SEQ ID NO: 1561733
uucuccuuuggcuaugaaa

SEQ ID NO: 1694252 - RNA, 19 nt, Artificial Sequence
  Description of Artificial Sequence: Synthetic oligonucleotide
  Antisense strand to SEQ ID NO: 1694251
uuucauagccaaaggagaa

SEQ ID NO: 1694253 - RNA, 19 nt, Artificial Sequence
  Description of Artificial Sequence: Synthetic oligonucleotide
  Sense strand starting at position 2380 of SEQ ID NO: 1561733
ccuccuguuugcucagaaa

SEQ ID NO: 1694254 - RNA, 19 nt, Artificial Sequence
  Description of Artificial Sequence: Synthetic oligonucleotide
  Antisense strand to SEQ ID NO: 1694253
uuucugagcaaacaggagg

SEQ ID NO: 1694255 - RNA, 19 nt, Artificial Sequence
  Description of Artificial Sequence: Synthetic oligonucleotide
  Sense strand starting at position 2656 of SEQ ID NO: 1561733
ggucuagggcuugaauacu

SEQ ID NO: 1694256 - RNA, 19 nt, Artificial Sequence
  Description of Artificial Sequence: Synthetic oligonucleotide
  Antisense strand to SEQ ID NO: 1694255
aguauucaagcccuagacc

SEQ ID NO: 1694257 - RNA, 19 nt, Artificial Sequence
  Description of Artificial Sequence: Synthetic oligonucleotide
  Sense strand starting at position 2755 of SEQ ID NO: 1561733
aaauguguaguagaugcau

SEQ ID NO: 1694258 - RNA, 19 nt, Artificial Sequence
  Description of Artificial Sequence: Synthetic oligonucleotide
  Antisense strand to SEQ ID NO: 1694257
augcaucuacuacacauuu

SEQ ID NO: 1694259 - RNA, 19 nt, Artificial Sequence
  Description of Artificial Sequence: Synthetic oligonucleotide
  Sense strand starting at position 2908 of SEQ ID NO: 1561733
cuuugaaauucgcugugua

SEQ ID NO: 1694260 - RNA, 19 nt, Artificial Sequence
  Description of Artificial Sequence: Synthetic oligonucleotide
  Antisense strand to SEQ ID NO: 1694259
uacacagcgaauuucaaag

SEQ ID NO: 1694261 - RNA, 19 nt, Artificial Sequence
  Description of Artificial Sequence: Synthetic oligonucleotide
  Sense strand starting at position 2909 of SEQ ID NO: 1561733
uuugaaauucgcuguguau

SEQ ID NO: 1694262 - RNA, 19 nt, Artificial Sequence
  Description of Artificial Sequence: Synthetic oligonucleotide
  Antisense strand to SEQ ID NO: 1694261
auacacagcgaauuucaaa

SEQ ID NO: 1694263 - RNA, 19 nt, Artificial Sequence
  Description of Artificial Sequence: Synthetic oligonucleotide
  Sense strand starting at position 2911 of SEQ ID NO: 1561733
ugaaauucgcuguguauuu

SEQ ID NO: 1694264 - RNA, 19 nt, Artificial Sequence
  Description of Artificial Sequence: Synthetic oligonucleotide
  Antisense strand to SEQ ID NO: 1694263
aaauacacagcgaauuuca

SEQ ID NO: 1694265 - RNA, 19 nt, Artificial Sequence
  Description of Artificial Sequence: Synthetic oligonucleotide
  Sense strand starting at position 2933 of SEQ ID NO: 1561733
acacuuagccugggaguca

SEQ ID NO: 1694266 - RNA, 19 nt, Artificial Sequence
  Description of Artificial Sequence: Synthetic oligonucleotide
  Antisense strand to SEQ ID NO: 1694265
ugacucccaggcuaagugu

SEQ ID NO: 1694267 - RNA, 19 nt, Artificial Sequence
  Description of Artificial Sequence: Synthetic oligonucleotide
  Sense strand starting at position 2990 of SEQ ID NO: 1561733
guggcagguggcuaugaaa

SEQ ID NO: 1694268 - RNA, 19 nt, Artificial Sequence
  Description of Artificial Sequence: Synthetic oligonucleotide
  Antisense strand to SEQ ID NO: 1694267
uuucauagccaccugccac

SEQ ID NO: 1694269 - RNA, 19 nt, Artificial Sequence
  Description of Artificial Sequence: Synthetic oligonucleotide
  Sense strand starting at position 3452 of SEQ ID NO: 1561733
cuaugcacugcuuggaaga

SEQ ID NO: 1694270 - RNA, 19 nt, Artificial Sequence
  Description of Artificial Sequence: Synthetic oligonucleotide
  Antisense strand to SEQ ID NO: 1694269
ucuuccaagcagugcauag

SEQ ID NO: 1694271 - RNA, 19 nt, Artificial Sequence
  Description of Artificial Sequence: Synthetic oligonucleotide
  Sense strand starting at position 3518 of SEQ ID NO: 1561733
acaguaagaugccuaauag

SEQ ID NO: 1694272 - RNA, 19 nt, Artificial Sequence
  Description of Artificial Sequence: Synthetic oligonucleotide
  Antisense strand to SEQ ID NO: 1694271
cuauuaggcaucuuacugu

SEQ ID NO: 1694273 - RNA, 19 nt, Artificial Sequence
  Description of Artificial Sequence: Synthetic oligonucleotide
  Sense strand starting at position 3519 of SEQ ID NO: 1561733
caguaagaugccuaauagu

SEQ ID NO: 1694274 - RNA, 19 nt, Artificial Sequence
  Description of Artificial Sequence: Synthetic oligonucleotide
  Antisense strand to SEQ ID NO: 1694273
acuauuaggcaucuuacug

SEQ ID NO: 1694275 - RNA, 19 nt, Artificial Sequence
  Description of Artificial Sequence: Synthetic oligonucleotide
  Sense strand starting at position 3700 of SEQ ID NO: 1561733
gucaccugcccuugagauu

SEQ ID NO: 1694276 - RNA, 19 nt, Artificial Sequence
  Description of Artificial Sequence: Synthetic oligonucleotide
  Antisense strand to SEQ ID NO: 1694275
aaucucaagggcaggugac

SEQ ID NO: 1694277 - RNA, 19 nt, Artificial Sequence
  Description of Artificial Sequence: Synthetic oligonucleotide
  Sense strand starting at position 3709 of SEQ ID NO: 1561733
ccuugagauucccaggaau

SEQ ID NO: 1694278 - RNA, 19 nt, Artificial Sequence
  Description of Artificial Sequence: Synthetic oligonucleotide
  Antisense strand to SEQ ID NO: 1694277
auuccugggaaucucaagg

SEQ ID NO: 1694279 - RNA, 19 nt, Artificial Sequence
  Description of Artificial Sequence: Synthetic oligonucleotide
  Sense strand starting at position 3725 of SEQ ID NO: 1561733
aauggaauccugcagagca

SEQ ID NO: 1694280 - RNA, 19 nt, Artificial Sequence
  Description of Artificial Sequence: Synthetic oligonucleotide
  Antisense strand to SEQ ID NO: 1694279
ugcucugcaggauuccauu

SEQ ID NO: 1694281 - RNA, 19 nt, Artificial Sequence
  Description of Artificial Sequence: Synthetic oligonucleotide
  Sense strand starting at position 3727 of SEQ ID NO: 1561733
uggaauccugcagagcaau

SEQ ID NO: 1694282 - RNA, 19 nt, Artificial Sequence
  Description of Artificial Sequence: Synthetic oligonucleotide
  Antisense strand to SEQ ID NO: 1694281
auugcucugcaggauucca

SEQ ID NO: 1694283 - RNA, 19 nt, Artificial Sequence
  Description of Artificial Sequence: Synthetic oligonucleotide
  Sense strand starting at position 3738 of SEQ ID NO: 1561733
agagcaaucccagaugugu

SEQ ID NO: 1694284 - RNA, 19 nt, Artificial Sequence
  Description of Artificial Sequence: Synthetic oligonucleotide
  Antisense strand to SEQ ID NO: 1694283
acacaucugggauugcucu

SEQ ID NO: 1694285 - RNA, 19 nt, Artificial Sequence
  Description of Artificial Sequence: Synthetic oligonucleotide
  Sense strand starting at position 3873 of SEQ ID NO: 1561733
gugacaaagucuccagcuu

SEQ ID NO: 1694286 - RNA, 19 nt, Artificial Sequence
  Description of Artificial Sequence: Synthetic oligonucleotide
  Antisense strand to SEQ ID NO: 1694285
aagcuggagacuuugucac

SEQ ID NO: 1694287 - RNA, 19 nt, Artificial Sequence
  Description of Artificial Sequence: Synthetic oligonucleotide
  Sense strand starting at position 30 of SEQ ID NO: 1561734
gucagucugcuccucugua

SEQ ID NO: 1694288 - RNA, 19 nt, Artificial Sequence
  Description of Artificial Sequence: Synthetic oligonucleotide
  Antisense strand to SEQ ID NO: 1694287
uacagaggagcagacugac

SEQ ID NO: 1694289 - RNA, 19 nt, Artificial Sequence
  Description of Artificial Sequence: Synthetic oligonucleotide
  Sense strand starting at position 31 of SEQ ID NO: 1561734
ucagucugcuccucuguaa

SEQ ID NO: 1694290 - RNA, 19 nt, Artificial Sequence
  Description of Artificial Sequence: Synthetic oligonucleotide
  Antisense strand to SEQ ID NO: 1694289
uuacagaggagcagacuga

SEQ ID NO: 1694291 - RNA, 19 nt, Artificial Sequence
  Description of Artificial Sequence: Synthetic oligonucleotide
  Sense strand starting at position 573 of SEQ ID NO: 1561734
agaguauucugggaggagg

SEQ ID NO: 1694292 - RNA, 19 nt, Artificial Sequence
  Description of Artificial Sequence: Synthetic oligonucleotide
  Antisense strand to SEQ ID NO: 1694291
ccuccucccagaauacucu

SEQ ID NO: 1694293 - RNA, 19 nt, Artificial Sequence
  Description of Artificial Sequence: Synthetic oligonucleotide
  Sense strand starting at position 665 of SEQ ID NO: 1561734
ccugcuagacccugggaaa

SEQ ID NO: 1694294 - RNA, 19 nt, Artificial Sequence
  Description of Artificial Sequence: Synthetic oligonucleotide
  Antisense strand to SEQ ID NO: 1694293
uuucccagggucuagcagg

SEQ ID NO: 1694295 - RNA, 19 nt, Artificial Sequence
  Description of Artificial Sequence: Synthetic oligonucleotide
  Sense strand starting at position 666 of SEQ ID NO: 1561734
cugcuagacccugggaaau

SEQ ID NO: 1694296 - RNA, 19 nt, Artificial Sequence
  Description of Artificial Sequence: Synthetic oligonucleotide
  Antisense strand to SEQ ID NO: 1694295
auuucccagggucuagcag

SEQ ID NO: 1694297 - RNA, 19 nt, Artificial Sequence
  Description of Artificial Sequence: Synthetic oligonucleotide
  Sense strand starting at position 868 of SEQ ID NO: 1561734
auggaauagugauuaugug

SEQ ID NO: 1694298 - RNA, 19 nt, Artificial Sequence
  Description of Artificial Sequence: Synthetic oligonucleotide
  Antisense strand to SEQ ID NO: 1694297
cacauaaucacuauuccau

SEQ ID NO: 1694299 - RNA, 19 nt, Artificial Sequence
  Description of Artificial Sequence: Synthetic oligonucleotide
  Sense strand starting at position 872 of SEQ ID NO: 1561734
aauagugauuaugugcgau

SEQ ID NO: 1694300 - RNA, 19 nt, Artificial Sequence
  Description of Artificial Sequence: Synthetic oligonucleotide
  Antisense strand to SEQ ID NO: 1694299
aucgcacauaaucacuauu

SEQ ID NO: 1694301 - RNA, 19 nt, Artificial Sequence
  Description of Artificial Sequence: Synthetic oligonucleotide
  Sense strand starting at position 874 of SEQ ID NO: 1561734
uagugauuaugugcgauau

SEQ ID NO: 1694302 - RNA, 19 nt, Artificial Sequence
  Description of Artificial Sequence: Synthetic oligonucleotide
  Antisense strand to SEQ ID NO: 1694301
auaucgcacauaaucacua

SEQ ID NO: 1694303 - RNA, 19 nt, Artificial Sequence
  Description of Artificial Sequence: Synthetic oligonucleotide
  Sense strand starting at position 875 of SEQ ID NO: 1561734
agugauuaugugcgauauu

SEQ ID NO: 1694304 - RNA, 19 nt, Artificial Sequence
  Description of Artificial Sequence: Synthetic oligonucleotide
  Antisense strand to SEQ ID NO: 1694303
aauaucgcacauaaucacu

SEQ ID NO: 1694305 - RNA, 19 nt, Artificial Sequence
  Description of Artificial Sequence: Synthetic oligonucleotide
  Sense strand starting at position 884 of SEQ ID NO: 1561734
gugcgauauugcccuuguu

SEQ ID NO: 1694306 - RNA, 19 nt, Artificial Sequence
  Description of Artificial Sequence: Synthetic oligonucleotide
  Antisense strand to SEQ ID NO: 1694305
aacaagggcaauaucgcac

SEQ ID NO: 1694307 - RNA, 19 nt, Artificial Sequence
  Description of Artificial Sequence: Synthetic oligonucleotide
  Sense strand starting at position 885 of SEQ ID NO: 1561734
ugcgauauugcccuuguuu

SEQ ID NO: 1694308 - RNA, 19 nt, Artificial Sequence
  Description of Artificial Sequence: Synthetic oligonucleotide
  Antisense strand to SEQ ID NO: 1694307
aaacaagggcaauaucgca

SEQ ID NO: 1694309 - RNA, 19 nt, Artificial Sequence
  Description of Artificial Sequence: Synthetic oligonucleotide
  Sense strand starting at position 1027 of SEQ ID NO: 1561734
auguuaacaucugugcuaa

SEQ ID NO: 1694310 - RNA, 19 nt, Artificial Sequence
  Description of Artificial Sequence: Synthetic oligonucleotide
  Antisense strand to SEQ ID NO: 1694309
uuagcacagauguuaacau

SEQ ID NO: 1694311 - RNA, 19 nt, Artificial Sequence
  Description of Artificial Sequence: Synthetic oligonucleotide
  Sense strand starting at position 1028 of SEQ ID NO: 1561734
uguuaacaucugugcuaac

SEQ ID NO: 1694312 - RNA, 19 nt, Artificial Sequence
  Description of Artificial Sequence: Synthetic oligonucleotide
  Antisense strand to SEQ ID NO: 1694311
guuagcacagauguuaaca

SEQ ID NO: 1694313 - RNA, 19 nt, Artificial Sequence
  Description of Artificial Sequence: Synthetic oligonucleotide
  Sense strand starting at position 1029 of SEQ ID NO: 1561734
guuaacaucugugcuaaca

SEQ ID NO: 1694314 - RNA, 19 nt, Artificial Sequence
  Description of Artificial Sequence: Synthetic oligonucleotide
  Antisense strand to SEQ ID NO: 1694313
uguuagcacagauguuaac

SEQ ID NO: 1694315 - RNA, 19 nt, Artificial Sequence
  Description of Artificial Sequence: Synthetic oligonucleotide
  Sense strand starting at position 1038 of SEQ ID NO: 1561734
ugugcuaacaucugaggga

SEQ ID NO: 1694316 - RNA, 19 nt, Artificial Sequence
  Description of Artificial Sequence: Synthetic oligonucleotide
  Antisense strand to SEQ ID NO: 1694315
ucccucagauguuagcaca

SEQ ID NO: 1694317 - RNA, 19 nt, Artificial Sequence
  Description of Artificial Sequence: Synthetic oligonucleotide
  Sense strand starting at position 1039 of SEQ ID NO: 1561734
gugcuaacaucugagggau

SEQ ID NO: 1694318 - RNA, 19 nt, Artificial Sequence
  Description of Artificial Sequence: Synthetic oligonucleotide
  Antisense strand to SEQ ID NO: 1694317
aucccucagauguuagcac

SEQ ID NO: 1694319 - RNA, 19 nt, Artificial Sequence
  Description of Artificial Sequence: Synthetic oligonucleotide
  Sense strand starting at position 1041 of SEQ ID NO: 1561734
gcuaacaucugagggaucu

SEQ ID NO: 1694320 - RNA, 19 nt, Artificial Sequence
  Description of Artificial Sequence: Synthetic oligonucleotide
  Antisense strand to SEQ ID NO: 1694319
agaucccucagauguuagc

SEQ ID NO: 1694321 - RNA, 19 nt, Artificial Sequence
  Description of Artificial Sequence: Synthetic oligonucleotide
  Sense strand starting at position 1075 of SEQ ID NO: 1561734
agggaugcccugugcuauu

SEQ ID NO: 1694322 - RNA, 19 nt, Artificial Sequence
  Description of Artificial Sequence: Synthetic oligonucleotide
  Antisense strand to SEQ ID NO: 1694321
aauagcacagggcaucccu

SEQ ID NO: 1694323 - RNA, 19 nt, Artificial Sequence
  Description of Artificial Sequence: Synthetic oligonucleotide
  Sense strand starting at position 1099 of SEQ ID NO: 1561734
gcugcucuguaagucugaa

SEQ ID NO: 1694324 - RNA, 19 nt, Artificial Sequence
  Description of Artificial Sequence: Synthetic oligonucleotide
  Antisense strand to SEQ ID NO: 1694323
uucagacuuacagagcagc

SEQ ID NO: 1694325 - RNA, 19 nt, Artificial Sequence
  Description of Artificial Sequence: Synthetic oligonucleotide
  Sense strand starting at position 1111 of SEQ ID NO: 1561734
gucugaaauuacgggagaa

SEQ ID NO: 1694326 - RNA, 19 nt, Artificial Sequence
  Description of Artificial Sequence: Synthetic oligonucleotide
  Antisense strand to SEQ ID NO: 1694325
uucucccguaauuucagac

SEQ ID NO: 1694327 - RNA, 19 nt, Artificial Sequence
  Description of Artificial Sequence: Synthetic oligonucleotide
  Sense strand starting at position 2863 of SEQ ID NO: 1561734
uccugaguauccgugagca

SEQ ID NO: 1694328 - RNA, 19 nt, Artificial Sequence
  Description of Artificial Sequence: Synthetic oligonucleotide
  Antisense strand to SEQ ID NO: 1694327
ugcucacggauacucagga

SEQ ID NO: 1694329 - RNA, 19 nt, Artificial Sequence
  Description of Artificial Sequence: Synthetic oligonucleotide
  Sense strand starting at position 2865 of SEQ ID NO: 1561734
cugaguauccgugagcauu

SEQ ID NO: 1694330 - RNA, 19 nt, Artificial Sequence
  Description of Artificial Sequence: Synthetic oligonucleotide
  Antisense strand to SEQ ID NO: 1694329
aaugcucacggauacucag

SEQ ID NO: 1694331 - RNA, 19 nt, Artificial Sequence
  Description of Artificial Sequence: Synthetic oligonucleotide
  Sense strand starting at position 3070 of SEQ ID NO: 1561734
ccagguagucuaggagcua

SEQ ID NO: 1694332 - RNA, 19 nt, Artificial Sequence
  Description of Artificial Sequence: Synthetic oligonucleotide
  Antisense strand to SEQ ID NO: 1694331
uagcuccuagacuaccugg

SEQ ID NO: 1694333 - RNA, 19 nt, Artificial Sequence
  Description of Artificial Sequence: Synthetic oligonucleotide
  Sense strand starting at position 3133 of SEQ ID NO: 1561734
gcugcugccagacagaaau

SEQ ID NO: 1694334 - RNA, 19 nt, Artificial Sequence
  Description of Artificial Sequence: Synthetic oligonucleotide
  Antisense strand to SEQ ID NO: 1694333
auuucugucuggcagcagc

SEQ ID NO: 1694335 - RNA, 19 nt, Artificial Sequence
  Description of Artificial Sequence: Synthetic oligonucleotide
  Sense strand starting at position 3341 of SEQ ID NO: 1561734
ugaaauucccuguguaugu

SEQ ID NO: 1694336 - RNA, 19 nt, Artificial Sequence
  Description of Artificial Sequence: Synthetic oligonucleotide
  Antisense strand to SEQ ID NO: 1694335
acauacacagggaauuuca

SEQ ID NO: 1694337 - RNA, 19 nt, Artificial Sequence
  Description of Artificial Sequence: Synthetic oligonucleotide
  Sense strand starting at position 3350 of SEQ ID NO: 1561734
cuguguaugugggugucaa

SEQ ID NO: 1694338 - RNA, 19 nt, Artificial Sequence
  Description of Artificial Sequence: Synthetic oligonucleotide
  Antisense strand to SEQ ID NO: 1694337
uugacacccacauacacag

SEQ ID NO: 1694339 - RNA, 19 nt, Artificial Sequence
  Description of Artificial Sequence: Synthetic oligonucleotide
  Sense strand starting at position 3351 of SEQ ID NO: 1561734
uguguaugugggugucaau

SEQ ID NO: 1694340 - RNA, 19 nt, Artificial Sequence
  Description of Artificial Sequence: Synthetic oligonucleotide
  Antisense strand to SEQ ID NO: 1694339
auugacacccacauacaca

SEQ ID NO: 1694341 - RNA, 19 nt, Artificial Sequence
  Description of Artificial Sequence: Synthetic oligonucleotide
  Sense strand starting at position 3358 of SEQ ID NO: 1561734
gugggugucaauuguacug

SEQ ID NO: 1694342 - RNA, 19 nt, Artificial Sequence
  Description of Artificial Sequence: Synthetic oligonucleotide
  Antisense strand to SEQ ID NO: 1694341
caguacaauugacacccac

SEQ ID NO: 1694343 - RNA, 19 nt, Artificial Sequence
  Description of Artificial Sequence: Synthetic oligonucleotide
  Sense strand starting at position 3453 of SEQ ID NO: 1561734
gaggauggcgaauagugau

SEQ ID NO: 1694344 - RNA, 19 nt, Artificial Sequence
  Description of Artificial Sequence: Synthetic oligonucleotide
  Antisense strand to SEQ ID NO: 1694343
aucacuauucgccauccuc

SEQ ID NO: 1694345 - RNA, 19 nt, Artificial Sequence
  Description of Artificial Sequence: Synthetic oligonucleotide
  Sense strand starting at position 3459 of SEQ ID NO: 1561734
ggcgaauagugaucaauaa

SEQ ID NO: 1694346 - RNA, 19 nt, Artificial Sequence
  Description of Artificial Sequence: Synthetic oligonucleotide
  Antisense strand to SEQ ID NO: 1694345
uuauugaucacuauucgcc

SEQ ID NO: 1694347 - RNA, 19 nt, Artificial Sequence
  Description of Artificial Sequence: Synthetic oligonucleotide
  Sense strand starting at position 3460 of SEQ ID NO: 1561734
gcgaauagugaucaauaau

SEQ ID NO: 1694348 - RNA, 19 nt, Artificial Sequence
  Description of Artificial Sequence: Synthetic oligonucleotide
  Antisense strand to SEQ ID NO: 1694347
auuauugaucacuauucgc

SEQ ID NO: 1694349 - RNA, 19 nt, Artificial Sequence
  Description of Artificial Sequence: Synthetic oligonucleotide
  Sense strand starting at position 3499 of SEQ ID NO: 1561734
cucuguuggaagugagagu

SEQ ID NO: 1694350 - RNA, 19 nt, Artificial Sequence
  Description of Artificial Sequence: Synthetic oligonucleotide
  Antisense strand to SEQ ID NO: 1694349
acucucacuuccaacagag

SEQ ID NO: 1694351 - RNA, 19 nt, Artificial Sequence
  Description of Artificial Sequence: Synthetic oligonucleotide
  Sense strand starting at position 3528 of SEQ ID NO: 1561734
gagagaugaugccacugga

SEQ ID NO: 1694352 - RNA, 19 nt, Artificial Sequence
  Description of Artificial Sequence: Synthetic oligonucleotide
  Antisense strand to SEQ ID NO: 1694351
uccaguggcaucaucucuc

SEQ ID NO: 1694353 - RNA, 19 nt, Artificial Sequence
  Description of Artificial Sequence: Synthetic oligonucleotide
  Sense strand starting at position 3556 of SEQ ID NO: 1561734
ggaggacucuaugagacug

SEQ ID NO: 1694354 - RNA, 19 nt, Artificial Sequence
  Description of Artificial Sequence: Synthetic oligonucleotide
  Antisense strand to SEQ ID NO: 1694353
cagucucauagaguccucc

SEQ ID NO: 1694355 - RNA, 19 nt, Artificial Sequence
  Description of Artificial Sequence: Synthetic oligonucleotide
  Sense strand starting at position 3719 of SEQ ID NO: 1561734
ggagucucaugguaacugu

SEQ ID NO: 1694356 - RNA, 19 nt, Artificial Sequence
  Description of Artificial Sequence: Synthetic oligonucleotide
  Antisense strand to SEQ ID NO: 1694355
acaguuaccaugagacucc

SEQ ID NO: 1694357 - RNA, 19 nt, Artificial Sequence
  Description of Artificial Sequence: Synthetic oligonucleotide
  Sense strand starting at position 3914 of SEQ ID NO: 1561734
uuagaacaucacugugagu

SEQ ID NO: 1694358 - RNA, 19 nt, Artificial Sequence
  Description of Artificial Sequence: Synthetic oligonucleotide
  Antisense strand to SEQ ID NO: 1694357
acucacagugauguucuaa

SEQ ID NO: 1694359 - RNA, 19 nt, Artificial Sequence
  Description of Artificial Sequence: Synthetic oligonucleotide
  Sense strand starting at position 3916 of SEQ ID NO: 1561734
agaacaucacugugaguga

SEQ ID NO: 1694360 - RNA, 19 nt, Artificial Sequence
  Description of Artificial Sequence: Synthetic oligonucleotide
  Antisense strand to SEQ ID NO: 1694359
ucacucacagugauguucu

SEQ ID NO: 1694361 - RNA, 19 nt, Artificial Sequence
  Description of Artificial Sequence: Synthetic oligonucleotide
  Sense strand starting at position 3920 of SEQ ID NO: 1561734
caucacugugagugaggua

SEQ ID NO: 1694362 - RNA, 19 nt, Artificial Sequence
  Description of Artificial Sequence: Synthetic oligonucleotide
  Antisense strand to SEQ ID NO: 1694361
uaccucacucacagugaug

SEQ ID NO: 1694363 - RNA, 19 nt, Artificial Sequence
  Description of Artificial Sequence: Synthetic oligonucleotide
  Sense strand starting at position 3923 of SEQ ID NO: 1561734
cacugugagugagguagaa

SEQ ID NO: 1694364 - RNA, 19 nt, Artificial Sequence
  Description of Artificial Sequence: Synthetic oligonucleotide
  Antisense strand to SEQ ID NO: 1694363
uucuaccucacucacagug

SEQ ID NO: 1694365 - RNA, 19 nt, Artificial Sequence
  Description of Artificial Sequence: Synthetic oligonucleotide
  Sense strand starting at position 3925 of SEQ ID NO: 1561734
cugugagugagguagaauu

SEQ ID NO: 1694366 - RNA, 19 nt, Artificial Sequence
  Description of Artificial Sequence: Synthetic oligonucleotide
  Antisense strand to SEQ ID NO: 1694365
aauucuaccucacucacag

SEQ ID NO: 1694367 - RNA, 19 nt, Artificial Sequence
  Description of Artificial Sequence: Synthetic oligonucleotide
  Sense strand starting at position 347 of SEQ ID NO: 1561735
gccucaugcccgcucuuaa

SEQ ID NO: 1694368 - RNA, 19 nt, Artificial Sequence
  Description of Artificial Sequence: Synthetic oligonucleotide
  Antisense strand to SEQ ID NO: 1694367
uuaagagcgggcaugaggc

SEQ ID NO: 1694369 - RNA, 19 nt, Artificial Sequence
  Description of Artificial Sequence: Synthetic oligonucleotide
  Sense strand starting at position 374 of SEQ ID NO: 1561735
uucucugugcuggguaaga

SEQ ID NO: 1694370 - RNA, 19 nt, Artificial Sequence
  Description of Artificial Sequence: Synthetic oligonucleotide
  Antisense strand to SEQ ID NO: 1694369
ucuuacccagcacagagaa

SEQ ID NO: 1694371 - RNA, 19 nt, Artificial Sequence
  Description of Artificial Sequence: Synthetic oligonucleotide
  Sense strand starting at position 399 of SEQ ID NO: 1561735
auugaauucugcuaccugu

SEQ ID NO: 1694372 - RNA, 19 nt, Artificial Sequence
  Description of Artificial Sequence: Synthetic oligonucleotide
  Antisense strand to SEQ ID NO: 1694371
acagguagcagaauucaau

SEQ ID NO: 1694373 - RNA, 19 nt, Artificial Sequence
  Description of Artificial Sequence: Synthetic oligonucleotide
  Sense strand starting at position 454 of SEQ ID NO: 1561735
aaggcugucugaugacaaa

SEQ ID NO: 1694374 - RNA, 19 nt, Artificial Sequence
  Description of Artificial Sequence: Synthetic oligonucleotide
  Antisense strand to SEQ ID NO: 1694373
uuugucaucagacagccuu

SEQ ID NO: 1694375 - RNA, 19 nt, Artificial Sequence
  Description of Artificial Sequence: Synthetic oligonucleotide
  Sense strand starting at position 618 of SEQ ID NO: 1561735
caagauacguuucucaagu

SEQ ID NO: 1694376 - RNA, 19 nt, Artificial Sequence
  Description of Artificial Sequence: Synthetic oligonucleotide
  Antisense strand to SEQ ID NO: 1694375
acuugagaaacguaucuug

SEQ ID NO: 1694377 - RNA, 19 nt, Artificial Sequence
  Description of Artificial Sequence: Synthetic oligonucleotide
  Sense strand starting at position 619 of SEQ ID NO: 1561735
aagauacguuucucaaguc

SEQ ID NO: 1694378 - RNA, 19 nt, Artificial Sequence
  Description of Artificial Sequence: Synthetic oligonucleotide
  Antisense strand to SEQ ID NO: 1694377
gacuugagaaacguaucuu

SEQ ID NO: 1694379 - RNA, 19 nt, Artificial Sequence
  Description of Artificial Sequence: Synthetic oligonucleotide
  Sense strand starting at position 620 of SEQ ID NO: 1561735
agauacguuucucaaguca

SEQ ID NO: 1694380 - RNA, 19 nt, Artificial Sequence
  Description of Artificial Sequence: Synthetic oligonucleotide
  Antisense strand to SEQ ID NO: 1694379
ugacuugagaaacguaucu

SEQ ID NO: 1694381 - RNA, 19 nt, Artificial Sequence
  Description of Artificial Sequence: Synthetic oligonucleotide
  Sense strand starting at position 644 of SEQ ID NO: 1561735
acaccugagugucuuacaa

SEQ ID NO: 1694382 - RNA, 19 nt, Artificial Sequence
  Description of Artificial Sequence: Synthetic oligonucleotide
  Antisense strand to SEQ ID NO: 1694381
uuguaagacacucaggugu

SEQ ID NO: 1694383 - RNA, 19 nt, Artificial Sequence
  Description of Artificial Sequence: Synthetic oligonucleotide
  Sense strand starting at position 646 of SEQ ID NO: 1561735
accugagugucuuacaauu

SEQ ID NO: 1694384 - RNA, 19 nt, Artificial Sequence
  Description of Artificial Sequence: Synthetic oligonucleotide
  Antisense strand to SEQ ID NO: 1694383
aauuguaagacacucaggu

SEQ ID NO: 1694385 - RNA, 19 nt, Artificial Sequence
  Description of Artificial Sequence: Synthetic oligonucleotide
  Sense strand starting at position 654 of SEQ ID NO: 1561735
gucuuacaauugcagauua

SEQ ID NO: 1694386 - RNA, 19 nt, Artificial Sequence
  Description of Artificial Sequence: Synthetic oligonucleotide
  Antisense strand to SEQ ID NO: 1694385
uaaucugcaauuguaagac

SEQ ID NO: 1694387 - RNA, 19 nt, Artificial Sequence
  Description of Artificial Sequence: Synthetic oligonucleotide
  Sense strand starting at position 744 of SEQ ID NO: 1561735
gagggacucuuuggaacca

SEQ ID NO: 1694388 - RNA, 19 nt, Artificial Sequence
  Description of Artificial Sequence: Synthetic oligonucleotide
  Antisense strand to SEQ ID NO: 1694387
ugguuccaaagagucccuc

SEQ ID NO: 1694389 - RNA, 19 nt, Artificial Sequence
  Description of Artificial Sequence: Synthetic oligonucleotide
  Sense strand starting at position 773 of SEQ ID NO: 1561735
cugagaucccucgaguauc

SEQ ID NO: 1694390 - RNA, 19 nt, Artificial Sequence
  Description of Artificial Sequence: Synthetic oligonucleotide
  Antisense strand to SEQ ID NO: 1694389
gauacucgagggaucucag

SEQ ID NO: 1694391 - RNA, 19 nt, Artificial Sequence
  Description of Artificial Sequence: Synthetic oligonucleotide
  Sense strand starting at position 776 of SEQ ID NO: 1561735
agaucccucgaguaucagu

SEQ ID NO: 1694392 - RNA, 19 nt, Artificial Sequence
  Description of Artificial Sequence: Synthetic oligonucleotide
  Antisense strand to SEQ ID NO: 1694391
acugauacucgagggaucu

SEQ ID NO: 1694393 - RNA, 19 nt, Artificial Sequence
  Description of Artificial Sequence: Synthetic oligonucleotide
  Sense strand starting at position 784 of SEQ ID NO: 1561735
cgaguaucaguuuacccau

SEQ ID NO: 1694394 - RNA, 19 nt, Artificial Sequence
  Description of Artificial Sequence: Synthetic oligonucleotide
  Antisense strand to SEQ ID NO: 1694393
auggguaaacugauacucg

SEQ ID NO: 1694395 - RNA, 19 nt, Artificial Sequence
  Description of Artificial Sequence: Synthetic oligonucleotide
  Sense strand starting at position 787 of SEQ ID NO: 1561735
guaucaguuuacccaugua

SEQ ID NO: 1694396 - RNA, 19 nt, Artificial Sequence
  Description of Artificial Sequence: Synthetic oligonucleotide
  Antisense strand to SEQ ID NO: 1694395
uacauggguaaacugauac

SEQ ID NO: 1694397 - RNA, 19 nt, Artificial Sequence
  Description of Artificial Sequence: Synthetic oligonucleotide
  Sense strand starting at position 819 of SEQ ID NO: 1561735
caggucugauggucugcaa

SEQ ID NO: 1694398 - RNA, 19 nt, Artificial Sequence
  Description of Artificial Sequence: Synthetic oligonucleotide
  Antisense strand to SEQ ID NO: 1694397
uugcagaccaucagaccug

SEQ ID NO: 1694399 - RNA, 19 nt, Artificial Sequence
  Description of Artificial Sequence: Synthetic oligonucleotide
  Sense strand starting at position 1011 of SEQ ID NO: 1561735
cucuaaaggcugugucacu

SEQ ID NO: 1694400 - RNA, 19 nt, Artificial Sequence
  Description of Artificial Sequence: Synthetic oligonucleotide
  Antisense strand to SEQ ID NO: 1694399
agugacacagccuuuagag

SEQ ID NO: 1694401 - RNA, 19 nt, Artificial Sequence
  Description of Artificial Sequence: Synthetic oligonucleotide
  Sense strand starting at position 1301 of SEQ ID NO: 1561735
gaagaagggcucugcagaa

SEQ ID NO: 1694402 - RNA, 19 nt, Artificial Sequence
  Description of Artificial Sequence: Synthetic oligonucleotide
  Antisense strand to SEQ ID NO: 1694401
uucugcagagcccuucuuc

SEQ ID NO: 1694403 - RNA, 19 nt, Artificial Sequence
  Description of Artificial Sequence: Synthetic oligonucleotide
  Sense strand starting at position 1618 of SEQ ID NO: 1561735
ucaugaaugugucaguguu

SEQ ID NO: 1694404 - RNA, 19 nt, Artificial Sequence
  Description of Artificial Sequence: Synthetic oligonucleotide
  Antisense strand to SEQ ID NO: 1694403
aacacugacacauucauga

SEQ ID NO: 1694405 - RNA, 19 nt, Artificial Sequence
  Description of Artificial Sequence: Synthetic oligonucleotide
  Sense strand starting at position 1620 of SEQ ID NO: 1561735
augaaugugucaguguuga

SEQ ID NO: 1694406 - RNA, 19 nt, Artificial Sequence
  Description of Artificial Sequence: Synthetic oligonucleotide
  Antisense strand to SEQ ID NO: 1694405
ucaacacugacacauucau

SEQ ID NO: 1694407 - RNA, 19 nt, Artificial Sequence
  Description of Artificial Sequence: Synthetic oligonucleotide
  Sense strand starting at position 1624 of SEQ ID NO: 1561735
augugucaguguugauuug

SEQ ID NO: 1694408 - RNA, 19 nt, Artificial Sequence
  Description of Artificial Sequence: Synthetic oligonucleotide
  Antisense strand to SEQ ID NO: 1694407
caaaucaacacugacacau

SEQ ID NO: 1694409 - RNA, 19 nt, Artificial Sequence
  Description of Artificial Sequence: Synthetic oligonucleotide
  Sense strand starting at position 1745 of SEQ ID NO: 1561735
gggcgucuguaguacucau

SEQ ID NO: 1694410 - RNA, 19 nt, Artificial Sequence
  Description of Artificial Sequence: Synthetic oligonucleotide
  Antisense strand to SEQ ID NO: 1694409
augaguacuacagacgccc

SEQ ID NO: 1694411 - RNA, 19 nt, Artificial Sequence
  Description of Artificial Sequence: Synthetic oligonucleotide
  Sense strand starting at position 1840 of SEQ ID NO: 1561735
auagaugccaccugggauu

SEQ ID NO: 1694412 - RNA, 19 nt, Artificial Sequence
  Description of Artificial Sequence: Synthetic oligonucleotide
  Antisense strand to SEQ ID NO: 1694411
aaucccagguggcaucuau

SEQ ID NO: 1694413 - RNA, 19 nt, Artificial Sequence
  Description of Artificial Sequence: Synthetic oligonucleotide
  Sense strand starting at position 1851 of SEQ ID NO: 1561735
cugggauuauccuauucuc

SEQ ID NO: 1694414 - RNA, 19 nt, Artificial Sequence
  Description of Artificial Sequence: Synthetic oligonucleotide
  Antisense strand to SEQ ID NO: 1694413
gagaauaggauaaucccag

SEQ ID NO: 1694415 - RNA, 19 nt, Artificial Sequence
  Description of Artificial Sequence: Synthetic oligonucleotide
  Sense strand starting at position 2323 of SEQ ID NO: 1561735
cugugaaagcaaugugacu

SEQ ID NO: 1694416 - RNA, 19 nt, Artificial Sequence
  Description of Artificial Sequence: Synthetic oligonucleotide
  Antisense strand to SEQ ID NO: 1694415
agucacauugcuuucacag

SEQ ID NO: 1694417 - RNA, 19 nt, Artificial Sequence
  Description of Artificial Sequence: Synthetic oligonucleotide
  Sense strand starting at position 2486 of SEQ ID NO: 1561735
acacccuaauauggagaau

SEQ ID NO: 1694418 - RNA, 19 nt, Artificial Sequence
  Description of Artificial Sequence: Synthetic oligonucleotide
  Antisense strand to SEQ ID NO: 1694417
auucuccauauuagggugu

SEQ ID NO: 1694419 - RNA, 19 nt, Artificial Sequence
  Description of Artificial Sequence: Synthetic oligonucleotide
  Sense strand starting at position 2834 of SEQ ID NO: 1561735
ugagaucguuuaugugugu

SEQ ID NO: 1694420 - RNA, 19 nt, Artificial Sequence
  Description of Artificial Sequence: Synthetic oligonucleotide
  Antisense strand to SEQ ID NO: 1694419
acacacauaaacgaucuca

SEQ ID NO: 1694421 - RNA, 19 nt, Artificial Sequence
  Description of Artificial Sequence: Synthetic oligonucleotide
  Sense strand starting at position 2899 of SEQ ID NO: 1561735
uuacacuuagcccaggaau

SEQ ID NO: 1694422 - RNA, 19 nt, Artificial Sequence
  Description of Artificial Sequence: Synthetic oligonucleotide
  Antisense strand to SEQ ID NO: 1694421
auuccugggcuaaguguaa

SEQ ID NO: 1694423 - RNA, 19 nt, Artificial Sequence
  Description of Artificial Sequence: Synthetic oligonucleotide
  Sense strand starting at position 2901 of SEQ ID NO: 1561735
acacuuagcccaggaauca

SEQ ID NO: 1694424 - RNA, 19 nt, Artificial Sequence
  Description of Artificial Sequence: Synthetic oligonucleotide
  Antisense strand to SEQ ID NO: 1694423
ugauuccugggcuaagugu

SEQ ID NO: 1694425 - RNA, 19 nt, Artificial Sequence
  Description of Artificial Sequence: Synthetic oligonucleotide
  Sense strand starting at position 2938 of SEQ ID NO: 1561735
ucaaguguccuguggcaca

SEQ ID NO: 1694426 - RNA, 19 nt, Artificial Sequence
  Description of Artificial Sequence: Synthetic oligonucleotide
  Antisense strand to SEQ ID NO: 1694425
ugugccacaggacacuuga

SEQ ID NO: 1694427 - RNA, 19 nt, Artificial Sequence
  Description of Artificial Sequence: Synthetic oligonucleotide
  Sense strand starting at position 2983 of SEQ ID NO: 1561735
aguaaauuccuacacagug

SEQ ID NO: 1694428 - RNA, 19 nt, Artificial Sequence
  Description of Artificial Sequence: Synthetic oligonucleotide
  Antisense strand to SEQ ID NO: 1694427
cacuguguaggaauuuacu

SEQ ID NO: 1694429 - RNA, 19 nt, Artificial Sequence
  Description of Artificial Sequence: Synthetic oligonucleotide
  Sense strand starting at position 3015 of SEQ ID NO: 1561735
guagguuacgaucaacaau

SEQ ID NO: 1694430 - RNA, 19 nt, Artificial Sequence
  Description of Artificial Sequence: Synthetic oligonucleotide
  Antisense strand to SEQ ID NO: 1694429
auuguugaucguaaccuac

SEQ ID NO: 1694431 - RNA, 19 nt, Artificial Sequence
  Description of Artificial Sequence: Synthetic oligonucleotide
  Sense strand starting at position 3425 of SEQ ID NO: 1561735
gugcacuccuuggaagacu

SEQ ID NO: 1694432 - RNA, 19 nt, Artificial Sequence
  Description of Artificial Sequence: Synthetic oligonucleotide
  Antisense strand to SEQ ID NO: 1694431
agucuuccaaggagugcac

SEQ ID NO: 1694433 - RNA, 19 nt, Artificial Sequence
  Description of Artificial Sequence: Synthetic oligonucleotide
  Sense strand starting at position 3436 of SEQ ID NO: 1561735
ggaagacucacguggcauu

SEQ ID NO: 1694434 - RNA, 19 nt, Artificial Sequence
  Description of Artificial Sequence: Synthetic oligonucleotide
  Antisense strand to SEQ ID NO: 1694433
aaugccacgugagucuucc

SEQ ID NO: 1694435 - RNA, 19 nt, Artificial Sequence
  Description of Artificial Sequence: Synthetic oligonucleotide
  Sense strand starting at position 3501 of SEQ ID NO: 1561735
cuaauaguaugugcccaau

SEQ ID NO: 1694436 - RNA, 19 nt, Artificial Sequence
  Description of Artificial Sequence: Synthetic oligonucleotide
  Antisense strand to SEQ ID NO: 1694435
auugggcacauacuauuag

SEQ ID NO: 1694437 - RNA, 19 nt, Artificial Sequence
  Description of Artificial Sequence: Synthetic oligonucleotide
  Sense strand starting at position 3784 of SEQ ID NO: 1561735
gacugugaguucuccuucu

SEQ ID NO: 1694438 - RNA, 19 nt, Artificial Sequence
  Description of Artificial Sequence: Synthetic oligonucleotide
  Antisense strand to SEQ ID NO: 1694437
agaaggagaacucacaguc

SEQ ID NO: 1694439 - RNA, 19 nt, Artificial Sequence
  Description of Artificial Sequence: Synthetic oligonucleotide
  Sense strand starting at position 3833 of SEQ ID NO: 1561735
uguccugugggcugacaaa

SEQ ID NO: 1694440 - RNA, 19 nt, Artificial Sequence
  Description of Artificial Sequence: Synthetic oligonucleotide
  Antisense strand to SEQ ID NO: 1694439
uuugucagcccacaggaca

SEQ ID NO: 1694441 - RNA, 19 nt, Artificial Sequence
  Description of Artificial Sequence: Synthetic oligonucleotide
  Sense strand starting at position 519 of SEQ ID NO: 1561736
gccuccauuccagguguga

SEQ ID NO: 1694442 - RNA, 19 nt, Artificial Sequence
  Description of Artificial Sequence: Synthetic oligonucleotide
  Antisense strand to SEQ ID NO: 1694441
ucacaccuggaauggaggc

SEQ ID NO: 1694443 - RNA, 19 nt, Artificial Sequence
  Description of Artificial Sequence: Synthetic oligonucleotide
  Sense strand starting at position 1116 of SEQ ID NO: 1561736
ggugauugcuguccucauu

SEQ ID NO: 1694444 - RNA, 19 nt, Artificial Sequence
  Description of Artificial Sequence: Synthetic oligonucleotide
  Antisense strand to SEQ ID NO: 1694443
aaugaggacagcaaucacc

SEQ ID NO: 1694445 - RNA, 19 nt, Artificial Sequence
  Description of Artificial Sequence: Synthetic oligonucleotide
  Sense strand starting at position 1140 of SEQ ID NO: 1561736
gaggucuaacucugcguua

SEQ ID NO: 1694446 - RNA, 19 nt, Artificial Sequence
  Description of Artificial Sequence: Synthetic oligonucleotide
  Antisense strand to SEQ ID NO: 1694445
uaacgcagaguuagaccuc

SEQ ID NO: 1694447 - RNA, 19 nt, Artificial Sequence
  Description of Artificial Sequence: Synthetic oligonucleotide
  Sense strand starting at position 1593 of SEQ ID NO: 1561736
gcugaaugagucugcgguu

SEQ ID NO: 1694448 - RNA, 19 nt, Artificial Sequence
  Description of Artificial Sequence: Synthetic oligonucleotide
  Antisense strand to SEQ ID NO: 1694447
aaccgcagacucauucagc

SEQ ID NO: 1694449 - RNA, 19 nt, Artificial Sequence
  Description of Artificial Sequence: Synthetic oligonucleotide
  Sense strand starting at position 1594 of SEQ ID NO: 1561736
cugaaugagucugcgguuu

SEQ ID NO: 1694450 - RNA, 19 nt, Artificial Sequence
  Description of Artificial Sequence: Synthetic oligonucleotide
  Antisense strand to SEQ ID NO: 1694449
aaaccgcagacucauucag

SEQ ID NO: 1694451 - RNA, 19 nt, Artificial Sequence
  Description of Artificial Sequence: Synthetic oligonucleotide
  Sense strand starting at position 1600 of SEQ ID NO: 1561736
gagucugcgguuuagauaa

SEQ ID NO: 1694452 - RNA, 19 nt, Artificial Sequence
  Description of Artificial Sequence: Synthetic oligonucleotide
  Antisense strand to SEQ ID NO: 1694451
uuaucuaaaccgcagacuc

SEQ ID NO: 1694453 - RNA, 19 nt, Artificial Sequence
  Description of Artificial Sequence: Synthetic oligonucleotide
  Sense strand starting at position 1800 of SEQ ID NO: 1561736
ugcacacucuugucauuga

SEQ ID NO: 1694454 - RNA, 19 nt, Artificial Sequence
  Description of Artificial Sequence: Synthetic oligonucleotide
  Antisense strand to SEQ ID NO: 1694453
ucaaugacaagagugugca

SEQ ID NO: 1694455 - RNA, 19 nt, Artificial Sequence
  Description of Artificial Sequence: Synthetic oligonucleotide
  Sense strand starting at position 1803 of SEQ ID NO: 1561736
acacucuugucauugaggu

SEQ ID NO: 1694456 - RNA, 19 nt, Artificial Sequence
  Description of Artificial Sequence: Synthetic oligonucleotide
  Antisense strand to SEQ ID NO: 1694455
accucaaugacaagagugu

SEQ ID NO: 1694457 - RNA, 19 nt, Artificial Sequence
  Description of Artificial Sequence: Synthetic oligonucleotide
  Sense strand starting at position 1811 of SEQ ID NO: 1561736
gucauugaggucuguggca

SEQ ID NO: 1694458 - RNA, 19 nt, Artificial Sequence
  Description of Artificial Sequence: Synthetic oligonucleotide
  Antisense strand to SEQ ID NO: 1694457
ugccacagaccucaaugac

SEQ ID NO: 1694459 - RNA, 19 nt, Artificial Sequence
  Description of Artificial Sequence: Synthetic oligonucleotide
  Sense strand starting at position 1931 of SEQ ID NO: 1561736
cauguucuacugggacaca

SEQ ID NO: 1694460 - RNA, 19 nt, Artificial Sequence
  Description of Artificial Sequence: Synthetic oligonucleotide
  Antisense strand to SEQ ID NO: 1694459
ugugucccaguagaacaug

SEQ ID NO: 1694461 - RNA, 19 nt, Artificial Sequence
  Description of Artificial Sequence: Synthetic oligonucleotide
  Sense strand starting at position 2014 of SEQ ID NO: 1561736
gaagcuagcugugcauuua

SEQ ID NO: 1694462 - RNA, 19 nt, Artificial Sequence
  Description of Artificial Sequence: Synthetic oligonucleotide
  Antisense strand to SEQ ID NO: 1694461
uaaaugcacagcuagcuuc

SEQ ID NO: 1694463 - RNA, 19 nt, Artificial Sequence
  Description of Artificial Sequence: Synthetic oligonucleotide
  Sense strand starting at position 2015 of SEQ ID NO: 1561736
aagcuagcugugcauuuau

SEQ ID NO: 1694464 - RNA, 19 nt, Artificial Sequence
  Description of Artificial Sequence: Synthetic oligonucleotide
  Antisense strand to SEQ ID NO: 1694463
auaaaugcacagcuagcuu

SEQ ID NO: 1694465 - RNA, 19 nt, Artificial Sequence
  Description of Artificial Sequence: Synthetic oligonucleotide
  Sense strand starting at position 2243 of SEQ ID NO: 1561736
cuuccucagugcucuaaag

SEQ ID NO: 1694466 - RNA, 19 nt, Artificial Sequence
  Description of Artificial Sequence: Synthetic oligonucleotide
  Antisense strand to SEQ ID NO: 1694465
cuuuagagcacugaggaag

SEQ ID NO: 1694467 - RNA, 19 nt, Artificial Sequence
  Description of Artificial Sequence: Synthetic oligonucleotide
  Sense strand starting at position 2245 of SEQ ID NO: 1561736
uccucagugcucuaaagcu

SEQ ID NO: 1694468 - RNA, 19 nt, Artificial Sequence
  Description of Artificial Sequence: Synthetic oligonucleotide
  Antisense strand to SEQ ID NO: 1694467
agcuuuagagcacugagga

SEQ ID NO: 1694469 - RNA, 19 nt, Artificial Sequence
  Description of Artificial Sequence: Synthetic oligonucleotide
  Sense strand starting at position 2402 of SEQ ID NO: 1561736
guggucauggucugggaau

SEQ ID NO: 1694470 - RNA, 19 nt, Artificial Sequence
  Description of Artificial Sequence: Synthetic oligonucleotide
  Antisense strand to SEQ ID NO: 1694469
auucccagaccaugaccac

SEQ ID NO: 1694471 - RNA, 19 nt, Artificial Sequence
  Description of Artificial Sequence: Synthetic oligonucleotide
  Sense strand starting at position 2404 of SEQ ID NO: 1561736
ggucauggucugggaauuc

SEQ ID NO: 1694472 - RNA, 19 nt, Artificial Sequence
  Description of Artificial Sequence: Synthetic oligonucleotide
  Antisense strand to SEQ ID NO: 1694471
gaauucccagaccaugacc

SEQ ID NO: 1694473 - RNA, 19 nt, Artificial Sequence
  Description of Artificial Sequence: Synthetic oligonucleotide
  Sense strand starting at position 2450 of SEQ ID NO: 1561736
ccgggaugaccuuguccau

SEQ ID NO: 1694474 - RNA, 19 nt, Artificial Sequence
  Description of Artificial Sequence: Synthetic oligonucleotide
  Antisense strand to SEQ ID NO: 1694473
auggacaaggucaucccgg

SEQ ID NO: 1694475 - RNA, 19 nt, Artificial Sequence
  Description of Artificial Sequence: Synthetic oligonucleotide
  Sense strand starting at position 2504 of SEQ ID NO: 1561736
guaauuaaccuuuggguaa

SEQ ID NO: 1694476 - RNA, 19 nt, Artificial Sequence
  Description of Artificial Sequence: Synthetic oligonucleotide
  Antisense strand to SEQ ID NO: 1694475
uuacccaaagguuaauuac

SEQ ID NO: 1694477 - RNA, 19 nt, Artificial Sequence
  Description of Artificial Sequence: Synthetic oligonucleotide
  Sense strand starting at position 2508 of SEQ ID NO: 1561736
uuaaccuuuggguaaaguu

SEQ ID NO: 1694478 - RNA, 19 nt, Artificial Sequence
  Description of Artificial Sequence: Synthetic oligonucleotide
  Antisense strand to SEQ ID NO: 1694477
aacuuuacccaaagguuaa

SEQ ID NO: 1694479 - RNA, 19 nt, Artificial Sequence
  Description of Artificial Sequence: Synthetic oligonucleotide
  Sense strand starting at position 2517 of SEQ ID NO: 1561736
ggguaaaguucacuggguu

SEQ ID NO: 1694480 - RNA, 19 nt, Artificial Sequence
  Description of Artificial Sequence: Synthetic oligonucleotide
  Antisense strand to SEQ ID NO: 1694479
aacccagugaacuuuaccc

SEQ ID NO: 1694481 - RNA, 19 nt, Artificial Sequence
  Description of Artificial Sequence: Synthetic oligonucleotide
  Sense strand starting at position 2518 of SEQ ID NO: 1561736
gguaaaguucacuggguuc

SEQ ID NO: 1694482 - RNA, 19 nt, Artificial Sequence
  Description of Artificial Sequence: Synthetic oligonucleotide
  Antisense strand to SEQ ID NO: 1694481
gaacccagugaacuuuacc

SEQ ID NO: 1694483 - RNA, 19 nt, Artificial Sequence
  Description of Artificial Sequence: Synthetic oligonucleotide
  Sense strand starting at position 2594 of SEQ ID NO: 1561736
ccaagcagucugggcaaua

SEQ ID NO: 1694484 - RNA, 19 nt, Artificial Sequence
  Description of Artificial Sequence: Synthetic oligonucleotide
  Antisense strand to SEQ ID NO: 1694483
uauugcccagacugcuugg

SEQ ID NO: 1694485 - RNA, 19 nt, Artificial Sequence
  Description of Artificial Sequence: Synthetic oligonucleotide
  Sense strand starting at position 2607 of SEQ ID NO: 1561736
gcaauagagccguagacau

SEQ ID NO: 1694486 - RNA, 19 nt, Artificial Sequence
  Description of Artificial Sequence: Synthetic oligonucleotide
  Antisense strand to SEQ ID NO: 1694485
augucuacggcucuauugc

SEQ ID NO: 1694487 - RNA, 19 nt, Artificial Sequence
  Description of Artificial Sequence: Synthetic oligonucleotide
  Sense strand starting at position 2812 of SEQ ID NO: 1561736
guguaaugucuugaaguuc

SEQ ID NO: 1694488 - RNA, 19 nt, Artificial Sequence
  Description of Artificial Sequence: Synthetic oligonucleotide
  Antisense strand to SEQ ID NO: 1694487
gaacuucaagacauuacac

SEQ ID NO: 1694489 - RNA, 19 nt, Artificial Sequence
  Description of Artificial Sequence: Synthetic oligonucleotide
  Sense strand starting at position 2820 of SEQ ID NO: 1561736
ucuugaaguucccugugua

SEQ ID NO: 1694490 - RNA, 19 nt, Artificial Sequence
  Description of Artificial Sequence: Synthetic oligonucleotide
  Antisense strand to SEQ ID NO: 1694489
uacacagggaacuucaaga

SEQ ID NO: 1694491 - RNA, 19 nt, Artificial Sequence
  Description of Artificial Sequence: Synthetic oligonucleotide
  Sense strand starting at position 2821 of SEQ ID NO: 1561736
cuugaaguucccuguguau

SEQ ID NO: 1694492 - RNA, 19 nt, Artificial Sequence
  Description of Artificial Sequence: Synthetic oligonucleotide
  Antisense strand to SEQ ID NO: 1694491
auacacagggaacuucaag

SEQ ID NO: 1694493 - RNA, 19 nt, Artificial Sequence
  Description of Artificial Sequence: Synthetic oligonucleotide
  Sense strand starting at position 2823 of SEQ ID NO: 1561736
ugaaguucccuguguauuu

SEQ ID NO: 1694494 - RNA, 19 nt, Artificial Sequence
  Description of Artificial Sequence: Synthetic oligonucleotide
  Antisense strand to SEQ ID NO: 1694493
aaauacacagggaacuuca

SEQ ID NO: 1694495 - RNA, 19 nt, Artificial Sequence
  Description of Artificial Sequence: Synthetic oligonucleotide
  Sense strand starting at position 2987 of SEQ ID NO: 1561736
agggaauuauagucgcuca

SEQ ID NO: 1694496 - RNA, 19 nt, Artificial Sequence
  Description of Artificial Sequence: Synthetic oligonucleotide
  Antisense strand to SEQ ID NO: 1694495
ugagcgacuauaauucccu

SEQ ID NO: 1694497 - RNA, 19 nt, Artificial Sequence
  Description of Artificial Sequence: Synthetic oligonucleotide
  Sense strand starting at position 2988 of SEQ ID NO: 1561736
gggaauuauagucgcucag

SEQ ID NO: 1694498 - RNA, 19 nt, Artificial Sequence
  Description of Artificial Sequence: Synthetic oligonucleotide
  Antisense strand to SEQ ID NO: 1694497
cugagcgacuauaauuccc

SEQ ID NO: 1694499 - RNA, 19 nt, Artificial Sequence
  Description of Artificial Sequence: Synthetic oligonucleotide
  Sense strand starting at position 2990 of SEQ ID NO: 1561736
gaauuauagucgcucaguu

SEQ ID NO: 1694500 - RNA, 19 nt, Artificial Sequence
  Description of Artificial Sequence: Synthetic oligonucleotide
  Antisense strand to SEQ ID NO: 1694499
aacugagcgacuauaauuc

SEQ ID NO: 1694501 - RNA, 19 nt, Artificial Sequence
  Description of Artificial Sequence: Synthetic oligonucleotide
  Sense strand starting at position 3087 of SEQ ID NO: 1561736
agggaauagucagugcaaa

SEQ ID NO: 1694502 - RNA, 19 nt, Artificial Sequence
  Description of Artificial Sequence: Synthetic oligonucleotide
  Antisense strand to SEQ ID NO: 1694501
uuugcacugacuauucccu

SEQ ID NO: 1694503 - RNA, 19 nt, Artificial Sequence
  Description of Artificial Sequence: Synthetic oligonucleotide
  Sense strand starting at position 3088 of SEQ ID NO: 1561736
gggaauagucagugcaaag

SEQ ID NO: 1694504 - RNA, 19 nt, Artificial Sequence
  Description of Artificial Sequence: Synthetic oligonucleotide
  Antisense strand to SEQ ID NO: 1694503
cuuugcacugacuauuccc

SEQ ID NO: 1694505 - RNA, 19 nt, Artificial Sequence
  Description of Artificial Sequence: Synthetic oligonucleotide
  Sense strand starting at position 3205 of SEQ ID NO: 1561736
uggguguguccagguggaa

SEQ ID NO: 1694506 - RNA, 19 nt, Artificial Sequence
  Description of Artificial Sequence: Synthetic oligonucleotide
  Antisense strand to SEQ ID NO: 1694505
uuccaccuggacacaccca

SEQ ID NO: 1694507 - RNA, 19 nt, Artificial Sequence
  Description of Artificial Sequence: Synthetic oligonucleotide
  Sense strand starting at position 3352 of SEQ ID NO: 1561736
ucuguacacugcuuggaaa

SEQ ID NO: 1694508 - RNA, 19 nt, Artificial Sequence
  Description of Artificial Sequence: Synthetic oligonucleotide
  Antisense strand to SEQ ID NO: 1694507
uuuccaagcaguguacaga

SEQ ID NO: 1694509 - RNA, 19 nt, Artificial Sequence
  Description of Artificial Sequence: Synthetic oligonucleotide
  Sense strand starting at position 3393 of SEQ ID NO: 1561736
uacauugaaugagguagaa

SEQ ID NO: 1694510 - RNA, 19 nt, Artificial Sequence
  Description of Artificial Sequence: Synthetic oligonucleotide
  Antisense strand to SEQ ID NO: 1694509
uucuaccucauucaaugua

SEQ ID NO: 1694511 - RNA, 19 nt, Artificial Sequence
  Description of Artificial Sequence: Synthetic oligonucleotide
  Sense strand starting at position 3431 of SEQ ID NO: 1561736
cuaauuguaugugcccaau

SEQ ID NO: 1694512 - RNA, 19 nt, Artificial Sequence
  Description of Artificial Sequence: Synthetic oligonucleotide
  Antisense strand to SEQ ID NO: 1694511
auugggcacauacaauuag

SEQ ID NO: 1694513 - RNA, 19 nt, Artificial Sequence
  Description of Artificial Sequence: Synthetic oligonucleotide
  Sense strand starting at position 3490 of SEQ ID NO: 1561736
uguccacaccugugauauc

SEQ ID NO: 1694514 - RNA, 19 nt, Artificial Sequence
  Description of Artificial Sequence: Synthetic oligonucleotide
  Antisense strand to SEQ ID NO: 1694513
gauaucacagguguggaca

SEQ ID NO: 1694515 - RNA, 19 nt, Artificial Sequence
  Description of Artificial Sequence: Synthetic oligonucleotide
  Sense strand starting at position 3602 of SEQ ID NO: 1561736
guugccuguccuugagcuu

SEQ ID NO: 1694516 - RNA, 19 nt, Artificial Sequence
  Description of Artificial Sequence: Synthetic oligonucleotide
  Antisense strand to SEQ ID NO: 1694515
aagcucaaggacaggcaac

SEQ ID NO: 1694517 - RNA, 19 nt, Artificial Sequence
  Description of Artificial Sequence: Synthetic oligonucleotide
  Sense strand starting at position 3693 of SEQ ID NO: 1561736
gauugagaguucuccuucu

SEQ ID NO: 1694518 - RNA, 19 nt, Artificial Sequence
  Description of Artificial Sequence: Synthetic oligonucleotide
  Antisense strand to SEQ ID NO: 1694517
agaaggagaacucucaauc

SEQ ID NO: 1694519 - RNA, 19 nt, Artificial Sequence
  Description of Artificial Sequence: Synthetic oligonucleotide
  Sense strand starting at position 3742 of SEQ ID NO: 1561736
ugcccugugggcugacaaa

SEQ ID NO: 1694520 - RNA, 19 nt, Artificial Sequence
  Description of Artificial Sequence: Synthetic oligonucleotide
  Antisense strand to SEQ ID NO: 1694519
uuugucagcccacagggca

SEQ ID NO: 1694521 - RNA, 19 nt, Artificial Sequence
  Description of Artificial Sequence: Synthetic oligonucleotide
  Sense strand starting at position 197 of SEQ ID NO: 1561737
cuguuauagucccuagccu

SEQ ID NO: 1694522 - RNA, 19 nt, Artificial Sequence
  Description of Artificial Sequence: Synthetic oligonucleotide
  Antisense strand to SEQ ID NO: 1694521
aggcuagggacuauaacag

SEQ ID NO: 1694523 - RNA, 19 nt, Artificial Sequence
  Description of Artificial Sequence: Synthetic oligonucleotide
  Sense strand starting at position 209 of SEQ ID NO: 1561737
cuagccugcuccgugagau

SEQ ID NO: 1694524 - RNA, 19 nt, Artificial Sequence
  Description of Artificial Sequence: Synthetic oligonucleotide
  Antisense strand to SEQ ID NO: 1694523
aucucacggagcaggcuag

SEQ ID NO: 1694525 - RNA, 19 nt, Artificial Sequence
  Description of Artificial Sequence: Synthetic oligonucleotide
  Sense strand starting at position 210 of SEQ ID NO: 1561737
uagccugcuccgugagaug

SEQ ID NO: 1694526 - RNA, 19 nt, Artificial Sequence
  Description of Artificial Sequence: Synthetic oligonucleotide
  Antisense strand to SEQ ID NO: 1694525
caucucacggagcaggcua

SEQ ID NO: 1694527 - RNA, 19 nt, Artificial Sequence
  Description of Artificial Sequence: Synthetic oligonucleotide
  Sense strand starting at position 250 of SEQ ID NO: 1561737
agcagucaguagguuuaau

SEQ ID NO: 1694528 - RNA, 19 nt, Artificial Sequence
  Description of Artificial Sequence: Synthetic oligonucleotide
  Antisense strand to SEQ ID NO: 1694527
auuaaaccuacugacugcu

SEQ ID NO: 1694529 - RNA, 19 nt, Artificial Sequence
  Description of Artificial Sequence: Synthetic oligonucleotide
  Sense strand starting at position 264 of SEQ ID NO: 1561737
uuaauuagaucccaggaca

SEQ ID NO: 1694530 - RNA, 19 nt, Artificial Sequence
  Description of Artificial Sequence: Synthetic oligonucleotide
  Antisense strand to SEQ ID NO: 1694529
uguccugggaucuaauuaa

SEQ ID NO: 1694531 - RNA, 19 nt, Artificial Sequence
  Description of Artificial Sequence: Synthetic oligonucleotide
  Sense strand starting at position 343 of SEQ ID NO: 1561737
gccacuucucuggagugaa

SEQ ID NO: 1694532 - RNA, 19 nt, Artificial Sequence
  Description of Artificial Sequence: Synthetic oligonucleotide
  Antisense strand to SEQ ID NO: 1694531
uucacuccagagaaguggc

SEQ ID NO: 1694533 - RNA, 19 nt, Artificial Sequence
  Description of Artificial Sequence: Synthetic oligonucleotide
  Sense strand starting at position 346 of SEQ ID NO: 1561737
acuucucuggagugaacuu

SEQ ID NO: 1694534 - RNA, 19 nt, Artificial Sequence
  Description of Artificial Sequence: Synthetic oligonucleotide
  Antisense strand to SEQ ID NO: 1694533
aaguucacuccagagaagu

SEQ ID NO: 1694535 - RNA, 19 nt, Artificial Sequence
  Description of Artificial Sequence: Synthetic oligonucleotide
  Sense strand starting at position 355 of SEQ ID NO: 1561737
gagugaacuugccucucuu

SEQ ID NO: 1694536 - RNA, 19 nt, Artificial Sequence
  Description of Artificial Sequence: Synthetic oligonucleotide
  Antisense strand to SEQ ID NO: 1694535
aagagaggcaaguucacuc

SEQ ID NO: 1694537 - RNA, 19 nt, Artificial Sequence
  Description of Artificial Sequence: Synthetic oligonucleotide
  Sense strand starting at position 498 of SEQ ID NO: 1561737
gggcuccuugcgugagcua

SEQ ID NO: 1694538 - RNA, 19 nt, Artificial Sequence
  Description of Artificial Sequence: Synthetic oligonucleotide
  Antisense strand to SEQ ID NO: 1694537
uagcucacgcaaggagccc

SEQ ID NO: 1694539 - RNA, 19 nt, Artificial Sequence
  Description of Artificial Sequence: Synthetic oligonucleotide
  Sense strand starting at position 499 of SEQ ID NO: 1561737
ggcuccuugcgugagcuaa

SEQ ID NO: 1694540 - RNA, 19 nt, Artificial Sequence
  Description of Artificial Sequence: Synthetic oligonucleotide
  Antisense strand to SEQ ID NO: 1694539
uuagcucacgcaaggagcc

SEQ ID NO: 1694541 - RNA, 19 nt, Artificial Sequence
  Description of Artificial Sequence: Synthetic oligonucleotide
  Sense strand starting at position 501 of SEQ ID NO: 1561737
cuccuugcgugagcuaaga

SEQ ID NO: 1694542 - RNA, 19 nt, Artificial Sequence
  Description of Artificial Sequence: Synthetic oligonucleotide
  Antisense strand to SEQ ID NO: 1694541
ucuuagcucacgcaaggag

SEQ ID NO: 1694543 - RNA, 19 nt, Artificial Sequence
  Description of Artificial Sequence: Synthetic oligonucleotide
  Sense strand starting at position 584 of SEQ ID NO: 1561737
gcuccauguucgcugagca

SEQ ID NO: 1694544 - RNA, 19 nt, Artificial Sequence
  Description of Artificial Sequence: Synthetic oligonucleotide
  Antisense strand to SEQ ID NO: 1694543
ugcucagcgaacauggagc

SEQ ID NO: 1694545 - RNA, 19 nt, Artificial Sequence
  Description of Artificial Sequence: Synthetic oligonucleotide
  Sense strand starting at position 625 of SEQ ID NO: 1561737
gcauguucccaucagugag

SEQ ID NO: 1694546 - RNA, 19 nt, Artificial Sequence
  Description of Artificial Sequence: Synthetic oligonucleotide
  Antisense strand to SEQ ID NO: 1694545
cucacugaugggaacaugc

SEQ ID NO: 1694547 - RNA, 19 nt, Artificial Sequence
  Description of Artificial Sequence: Synthetic oligonucleotide
  Sense strand starting at position 753 of SEQ ID NO: 1561737
aucacugaguccucaguau

SEQ ID NO: 1694548 - RNA, 19 nt, Artificial Sequence
  Description of Artificial Sequence: Synthetic oligonucleotide
  Antisense strand to SEQ ID NO: 1694547
auacugaggacucagugau

SEQ ID NO: 1694549 - RNA, 19 nt, Artificial Sequence
  Description of Artificial Sequence: Synthetic oligonucleotide
  Sense strand starting at position 959 of SEQ ID NO: 1561737
ccagcuuccugguugguua

SEQ ID NO: 1694550 - RNA, 19 nt, Artificial Sequence
  Description of Artificial Sequence: Synthetic oligonucleotide
  Antisense strand to SEQ ID NO: 1694549
uaaccaaccaggaagcugg

SEQ ID NO: 1694551 - RNA, 19 nt, Artificial Sequence
  Description of Artificial Sequence: Synthetic oligonucleotide
  Sense strand starting at position 960 of SEQ ID NO: 1561737
cagcuuccugguugguuaa

SEQ ID NO: 1694552 - RNA, 19 nt, Artificial Sequence
  Description of Artificial Sequence: Synthetic oligonucleotide
  Antisense strand to SEQ ID NO: 1694551
uuaaccaaccaggaagcug

SEQ ID NO: 1694553 - RNA, 19 nt, Artificial Sequence
  Description of Artificial Sequence: Synthetic oligonucleotide
  Sense strand starting at position 962 of SEQ ID NO: 1561737
gcuuccugguugguuaaau

SEQ ID NO: 1694554 - RNA, 19 nt, Artificial Sequence
  Description of Artificial Sequence: Synthetic oligonucleotide
  Antisense strand to SEQ ID NO: 1694553
auuuaaccaaccaggaagc

SEQ ID NO: 1694555 - RNA, 19 nt, Artificial Sequence
  Description of Artificial Sequence: Synthetic oligonucleotide
  Sense strand starting at position 1006 of SEQ ID NO: 1561737
ucaguauccuggucugauu

SEQ ID NO: 1694556 - RNA, 19 nt, Artificial Sequence
  Description of Artificial Sequence: Synthetic oligonucleotide
  Antisense strand to SEQ ID NO: 1694555
aaucagaccaggauacuga

SEQ ID NO: 1694557 - RNA, 19 nt, Artificial Sequence
  Description of Artificial Sequence: Synthetic oligonucleotide
  Sense strand starting at position 1017 of SEQ ID NO: 1561737
gucugauuccugugccagg

SEQ ID NO: 1694558 - RNA, 19 nt, Artificial Sequence
  Description of Artificial Sequence: Synthetic oligonucleotide
  Antisense strand to SEQ ID NO: 1694557
ccuggcacaggaaucagac

SEQ ID NO: 1694559 - RNA, 19 nt, Artificial Sequence
  Description of Artificial Sequence: Synthetic oligonucleotide
  Sense strand starting at position 1208 of SEQ ID NO: 1561737
ggugaaagagucugaucgu

SEQ ID NO: 1694560 - RNA, 19 nt, Artificial Sequence
  Description of Artificial Sequence: Synthetic oligonucleotide
  Antisense strand to SEQ ID NO: 1694559
acgaucagacucuuucacc

SEQ ID NO: 1694561 - RNA, 19 nt, Artificial Sequence
  Description of Artificial Sequence: Synthetic oligonucleotide
  Sense strand starting at position 1211 of SEQ ID NO: 1561737
gaaagagucugaucguuag

SEQ ID NO: 1694562 - RNA, 19 nt, Artificial Sequence
  Description of Artificial Sequence: Synthetic oligonucleotide
  Antisense strand to SEQ ID NO: 1694561
cuaacgaucagacucuuuc

SEQ ID NO: 1694563 - RNA, 19 nt, Artificial Sequence
  Description of Artificial Sequence: Synthetic oligonucleotide
  Sense strand starting at position 1214 of SEQ ID NO: 1561737
agagucugaucguuagggu

SEQ ID NO: 1694564 - RNA, 19 nt, Artificial Sequence
  Description of Artificial Sequence: Synthetic oligonucleotide
  Antisense strand to SEQ ID NO: 1694563
acccuaacgaucagacucu

SEQ ID NO: 1694565 - RNA, 19 nt, Artificial Sequence
  Description of Artificial Sequence: Synthetic oligonucleotide
  Sense strand starting at position 1374 of SEQ ID NO: 1561737
uucucagaccucugugaag

SEQ ID NO: 1694566 - RNA, 19 nt, Artificial Sequence
  Description of Artificial Sequence: Synthetic oligonucleotide
  Antisense strand to SEQ ID NO: 1694565
cuucacagaggucugagaa

SEQ ID NO: 1694567 - RNA, 19 nt, Artificial Sequence
  Description of Artificial Sequence: Synthetic oligonucleotide
  Sense strand starting at position 1376 of SEQ ID NO: 1561737
cucagaccucugugaagag

SEQ ID NO: 1694568 - RNA, 19 nt, Artificial Sequence
  Description of Artificial Sequence: Synthetic oligonucleotide
  Antisense strand to SEQ ID NO: 1694567
cucuucacagaggucugag

SEQ ID NO: 1694569 - RNA, 19 nt, Artificial Sequence
  Description of Artificial Sequence: Synthetic oligonucleotide
  Sense strand starting at position 1602 of SEQ ID NO: 1561737
ggccaaucucagggagaga

SEQ ID NO: 1694570 - RNA, 19 nt, Artificial Sequence
  Description of Artificial Sequence: Synthetic oligonucleotide
  Antisense strand to SEQ ID NO: 1694569
ucucucccugagauuggcc

SEQ ID NO: 1694571 - RNA, 19 nt, Artificial Sequence
  Description of Artificial Sequence: Synthetic oligonucleotide
  Sense strand starting at position 2145 of SEQ ID NO: 1561737
gcaaccgcuuccuuuauaa

SEQ ID NO: 1694572 - RNA, 19 nt, Artificial Sequence
  Description of Artificial Sequence: Synthetic oligonucleotide
  Antisense strand to SEQ ID NO: 1694571
uuauaaaggaagcgguugc

SEQ ID NO: 1694573 - RNA, 19 nt, Artificial Sequence
  Description of Artificial Sequence: Synthetic oligonucleotide
  Sense strand starting at position 2206 of SEQ ID NO: 1561737
acaugagacccaugagcaa

SEQ ID NO: 1694574 - RNA, 19 nt, Artificial Sequence
  Description of Artificial Sequence: Synthetic oligonucleotide
  Antisense strand to SEQ ID NO: 1694573
uugcucaugggucucaugu

SEQ ID NO: 1694575 - RNA, 19 nt, Artificial Sequence
  Description of Artificial Sequence: Synthetic oligonucleotide
  Sense strand starting at position 2217 of SEQ ID NO: 1561737
augagcaaauccugaugca

SEQ ID NO: 1694576 - RNA, 19 nt, Artificial Sequence
  Description of Artificial Sequence: Synthetic oligonucleotide
  Antisense strand to SEQ ID NO: 1694575
ugcaucaggauuugcucau

SEQ ID NO: 1694577 - RNA, 19 nt, Artificial Sequence
  Description of Artificial Sequence: Synthetic oligonucleotide
  Sense strand starting at position 2218 of SEQ ID NO: 1561737
ugagcaaauccugaugcaa

SEQ ID NO: 1694578 - RNA, 19 nt, Artificial Sequence
  Description of Artificial Sequence: Synthetic oligonucleotide
  Antisense strand to SEQ ID NO: 1694577
uugcaucaggauuugcuca

SEQ ID NO: 1694579 - RNA, 19 nt, Artificial Sequence
  Description of Artificial Sequence: Synthetic oligonucleotide
  Sense strand starting at position 2220 of SEQ ID NO: 1561737
agcaaauccugaugcaaug

SEQ ID NO: 1694580 - RNA, 19 nt, Artificial Sequence
  Description of Artificial Sequence: Synthetic oligonucleotide
  Antisense strand to SEQ ID NO: 1694579
cauugcaucaggauuugcu

SEQ ID NO: 1694581 - RNA, 19 nt, Artificial Sequence
  Description of Artificial Sequence: Synthetic oligonucleotide
  Sense strand starting at position 2256 of SEQ ID NO: 1561737
acacgaaagagauguugca

SEQ ID NO: 1694582 - RNA, 19 nt, Artificial Sequence
  Description of Artificial Sequence: Synthetic oligonucleotide
  Antisense strand to SEQ ID NO: 1694581
ugcaacaucucuuucgugu

SEQ ID NO: 1694583 - RNA, 19 nt, Artificial Sequence
  Description of Artificial Sequence: Synthetic oligonucleotide
  Sense strand starting at position 2478 of SEQ ID NO: 1561737
cccagauaguccuuggugu

SEQ ID NO: 1694584 - RNA, 19 nt, Artificial Sequence
  Description of Artificial Sequence: Synthetic oligonucleotide
  Antisense strand to SEQ ID NO: 1694583
acaccaaggacuaucuggg

SEQ ID NO: 1694585 - RNA, 19 nt, Artificial Sequence
  Description of Artificial Sequence: Synthetic oligonucleotide
  Sense strand starting at position 2480 of SEQ ID NO: 1561737
cagauaguccuuggugugu

SEQ ID NO: 1694586 - RNA, 19 nt, Artificial Sequence
  Description of Artificial Sequence: Synthetic oligonucleotide
  Antisense strand to SEQ ID NO: 1694585
acacaccaaggacuaucug

SEQ ID NO: 1694587 - RNA, 19 nt, Artificial Sequence
  Description of Artificial Sequence: Synthetic oligonucleotide
  Sense strand starting at position 3160 of SEQ ID NO: 1561737
ucuugucaauuguuuaagu

SEQ ID NO: 1694588 - RNA, 19 nt, Artificial Sequence
  Description of Artificial Sequence: Synthetic oligonucleotide
  Antisense strand to SEQ ID NO: 1694587
acuuaaacaauugacaaga

SEQ ID NO: 1694589 - RNA, 19 nt, Artificial Sequence
  Description of Artificial Sequence: Synthetic oligonucleotide
  Sense strand starting at position 3161 of SEQ ID NO: 1561737
cuugucaauuguuuaaguu

SEQ ID NO: 1694590 - RNA, 19 nt, Artificial Sequence
  Description of Artificial Sequence: Synthetic oligonucleotide
  Antisense strand to SEQ ID NO: 1694589
aacuuaaacaauugacaag

SEQ ID NO: 1694591 - RNA, 19 nt, Artificial Sequence
  Description of Artificial Sequence: Synthetic oligonucleotide
  Sense strand starting at position 3180 of SEQ ID NO: 1561737
ccuuguagauucucgacau

SEQ ID NO: 1694592 - RNA, 19 nt, Artificial Sequence
  Description of Artificial Sequence: Synthetic oligonucleotide
  Antisense strand to SEQ ID NO: 1694591
augucgagaaucuacaagg

SEQ ID NO: 1694593 - RNA, 19 nt, Artificial Sequence
  Description of Artificial Sequence: Synthetic oligonucleotide
  Sense strand starting at position 3184 of SEQ ID NO: 1561737
guagauucucgacauuagc

SEQ ID NO: 1694594 - RNA, 19 nt, Artificial Sequence
  Description of Artificial Sequence: Synthetic oligonucleotide
  Antisense strand to SEQ ID NO: 1694593
gcuaaugucgagaaucuac

SEQ ID NO: 1694595 - RNA, 19 nt, Artificial Sequence
  Description of Artificial Sequence: Synthetic oligonucleotide
  Sense strand starting at position 3613 of SEQ ID NO: 1561737
ugguguuauuucugggcuu

SEQ ID NO: 1694596 - RNA, 19 nt, Artificial Sequence
  Description of Artificial Sequence: Synthetic oligonucleotide
  Antisense strand to SEQ ID NO: 1694595
aagcccagaaauaacacca

SEQ ID NO: 1694597 - RNA, 19 nt, Artificial Sequence
  Description of Artificial Sequence: Synthetic oligonucleotide
  Sense strand starting at position 3614 of SEQ ID NO: 1561737
gguguuauuucugggcuuc

SEQ ID NO: 1694598 - RNA, 19 nt, Artificial Sequence
  Description of Artificial Sequence: Synthetic oligonucleotide
  Antisense strand to SEQ ID NO: 1694597
gaagcccagaaauaacacc

SEQ ID NO: 1694599 - RNA, 19 nt, Artificial Sequence
  Description of Artificial Sequence: Synthetic oligonucleotide
  Sense strand starting at position 3615 of SEQ ID NO: 1561737
guguuauuucugggcuucu

SEQ ID NO: 1694600 - RNA, 19 nt, Artificial Sequence
  Description of Artificial Sequence: Synthetic oligonucleotide
  Antisense strand to SEQ ID NO: 1694599
agaagcccagaaauaacac

SEQ ID NO: 1694601 - RNA, 19 nt, Artificial Sequence
  Description of Artificial Sequence: Synthetic oligonucleotide
  Sense strand starting at position 4 of SEQ ID NO: 1561738
gucacagaugagugguuca

SEQ ID NO: 1694602 - RNA, 19 nt, Artificial Sequence
  Description of Artificial Sequence: Synthetic oligonucleotide
  Antisense strand to SEQ ID NO: 1694601
ugaaccacucaucugugac

SEQ ID NO: 1694603 - RNA, 19 nt, Artificial Sequence
  Description of Artificial Sequence: Synthetic oligonucleotide
  Sense strand starting at position 134 of SEQ ID NO: 1561738
agauuugugaccuguuggu

SEQ ID NO: 1694604 - RNA, 19 nt, Artificial Sequence
  Description of Artificial Sequence: Synthetic oligonucleotide
  Antisense strand to SEQ ID NO: 1694603
accaacaggucacaaaucu

SEQ ID NO: 1694605 - RNA, 19 nt, Artificial Sequence
  Description of Artificial Sequence: Synthetic oligonucleotide
  Sense strand starting at position 141 of SEQ ID NO: 1561738
ugaccuguugguuagcaau

SEQ ID NO: 1694606 - RNA, 19 nt, Artificial Sequence
  Description of Artificial Sequence: Synthetic oligonucleotide
  Antisense strand to SEQ ID NO: 1694605
auugcuaaccaacagguca

SEQ ID NO: 1694607 - RNA, 19 nt, Artificial Sequence
  Description of Artificial Sequence: Synthetic oligonucleotide
  Sense strand starting at position 143 of SEQ ID NO: 1561738
accuguugguuagcaauua

SEQ ID NO: 1694608 - RNA, 19 nt, Artificial Sequence
  Description of Artificial Sequence: Synthetic oligonucleotide
  Antisense strand to SEQ ID NO: 1694607
uaauugcuaaccaacaggu

SEQ ID NO: 1694609 - RNA, 19 nt, Artificial Sequence
  Description of Artificial Sequence: Synthetic oligonucleotide
  Sense strand starting at position 151 of SEQ ID NO: 1561738
guuagcaauuaugcaauuu

SEQ ID NO: 1694610 - RNA, 19 nt, Artificial Sequence
  Description of Artificial Sequence: Synthetic oligonucleotide
  Antisense strand to SEQ ID NO: 1694609
aaauugcauaauugcuaac

SEQ ID NO: 1694611 - RNA, 19 nt, Artificial Sequence
  Description of Artificial Sequence: Synthetic oligonucleotide
  Sense strand starting at position 381 of SEQ ID NO: 1561738
uuugucaccuccuugaaag

SEQ ID NO: 1694612 - RNA, 19 nt, Artificial Sequence
  Description of Artificial Sequence: Synthetic oligonucleotide
  Antisense strand to SEQ ID NO: 1694611
cuuucaaggaggugacaaa

SEQ ID NO: 1694613 - RNA, 19 nt, Artificial Sequence
  Description of Artificial Sequence: Synthetic oligonucleotide
  Sense strand starting at position 574 of SEQ ID NO: 1561738
ucccucagauuccugugaa

SEQ ID NO: 1694614 - RNA, 19 nt, Artificial Sequence
  Description of Artificial Sequence: Synthetic oligonucleotide
  Antisense strand to SEQ ID NO: 1694613
uucacaggaaucugaggga

SEQ ID NO: 1694615 - RNA, 19 nt, Artificial Sequence
  Description of Artificial Sequence: Synthetic oligonucleotide
  Sense strand starting at position 577 of SEQ ID NO: 1561738
cucagauuccugugaaacc

SEQ ID NO: 1694616 - RNA, 19 nt, Artificial Sequence
  Description of Artificial Sequence: Synthetic oligonucleotide
  Antisense strand to SEQ ID NO: 1694615
gguuucacaggaaucugag

SEQ ID NO: 1694617 - RNA, 19 nt, Artificial Sequence
  Description of Artificial Sequence: Synthetic oligonucleotide
  Sense strand starting at position 673 of SEQ ID NO: 1561738
ugaguuugccugucuuguu

SEQ ID NO: 1694618 - RNA, 19 nt, Artificial Sequence
  Description of Artificial Sequence: Synthetic oligonucleotide
  Antisense strand to SEQ ID NO: 1694617
aacaagacaggcaaacuca

SEQ ID NO: 1694619 - RNA, 19 nt, Artificial Sequence
  Description of Artificial Sequence: Synthetic oligonucleotide
  Sense strand starting at position 698 of SEQ ID NO: 1561738
ugagucuuuagugaguaga

SEQ ID NO: 1694620 - RNA, 19 nt, Artificial Sequence
  Description of Artificial Sequence: Synthetic oligonucleotide
  Antisense strand to SEQ ID NO: 1694619
ucuacucacuaaagacuca

SEQ ID NO: 1694621 - RNA, 19 nt, Artificial Sequence
  Description of Artificial Sequence: Synthetic oligonucleotide
  Sense strand starting at position 700 of SEQ ID NO: 1561738
agucuuuagugaguagaac

SEQ ID NO: 1694622 - RNA, 19 nt, Artificial Sequence
  Description of Artificial Sequence: Synthetic oligonucleotide
  Antisense strand to SEQ ID NO: 1694621
guucuacucacuaaagacu

SEQ ID NO: 1694623 - RNA, 19 nt, Artificial Sequence
  Description of Artificial Sequence: Synthetic oligonucleotide
  Sense strand starting at position 701 of SEQ ID NO: 1561738
gucuuuagugaguagaaca

SEQ ID NO: 1694624 - RNA, 19 nt, Artificial Sequence
  Description of Artificial Sequence: Synthetic oligonucleotide
  Antisense strand to SEQ ID NO: 1694623
uguucuacucacuaaagac

SEQ ID NO: 1694625 - RNA, 19 nt, Artificial Sequence
  Description of Artificial Sequence: Synthetic oligonucleotide
  Sense strand starting at position 725 of SEQ ID NO: 1561738
agguuuauagcaggacauu

SEQ ID NO: 1694626 - RNA, 19 nt, Artificial Sequence
  Description of Artificial Sequence: Synthetic oligonucleotide
  Antisense strand to SEQ ID NO: 1694625
aauguccugcuauaaaccu

SEQ ID NO: 1694627 - RNA, 19 nt, Artificial Sequence
  Description of Artificial Sequence: Synthetic oligonucleotide
  Sense strand starting at position 726 of SEQ ID NO: 1561738
gguuuauagcaggacauua

SEQ ID NO: 1694628 - RNA, 19 nt, Artificial Sequence
  Description of Artificial Sequence: Synthetic oligonucleotide
  Antisense strand to SEQ ID NO: 1694627
uaauguccugcuauaaacc

SEQ ID NO: 1694629 - RNA, 19 nt, Artificial Sequence
  Description of Artificial Sequence: Synthetic oligonucleotide
  Sense strand starting at position 731 of SEQ ID NO: 1561738
auagcaggacauuaguauu

SEQ ID NO: 1694630 - RNA, 19 nt, Artificial Sequence
  Description of Artificial Sequence: Synthetic oligonucleotide
  Antisense strand to SEQ ID NO: 1694629
aauacuaauguccugcuau

SEQ ID NO: 1694631 - RNA, 19 nt, Artificial Sequence
  Description of Artificial Sequence: Synthetic oligonucleotide
  Sense strand starting at position 756 of SEQ ID NO: 1561738
acucauuagugacugaaug

SEQ ID NO: 1694632 - RNA, 19 nt, Artificial Sequence
  Description of Artificial Sequence: Synthetic oligonucleotide
  Antisense strand to SEQ ID NO: 1694631
cauucagucacuaaugagu

SEQ ID NO: 1694633 - RNA, 19 nt, Artificial Sequence
  Description of Artificial Sequence: Synthetic oligonucleotide
  Sense strand starting at position 776 of SEQ ID NO: 1561738
aaucaaggcuacuugugau

SEQ ID NO: 1694634 - RNA, 19 nt, Artificial Sequence
  Description of Artificial Sequence: Synthetic oligonucleotide
  Antisense strand to SEQ ID NO: 1694633
aucacaaguagccuugauu

SEQ ID NO: 1694635 - RNA, 19 nt, Artificial Sequence
  Description of Artificial Sequence: Synthetic oligonucleotide
  Sense strand starting at position 820 of SEQ ID NO: 1561738
gcauuaaaggauuacagca

SEQ ID NO: 1694636 - RNA, 19 nt, Artificial Sequence
  Description of Artificial Sequence: Synthetic oligonucleotide
  Antisense strand to SEQ ID NO: 1694635
ugcuguaauccuuuaaugc

SEQ ID NO: 1694637 - RNA, 19 nt, Artificial Sequence
  Description of Artificial Sequence: Synthetic oligonucleotide
  Sense strand starting at position 970 of SEQ ID NO: 1561738
ggguuuaaaugaguuaauc

SEQ ID NO: 1694638 - RNA, 19 nt, Artificial Sequence
  Description of Artificial Sequence: Synthetic oligonucleotide
  Antisense strand to SEQ ID NO: 1694637
gauuaacucauuuaaaccc

SEQ ID NO: 1694639 - RNA, 19 nt, Artificial Sequence
  Description of Artificial Sequence: Synthetic oligonucleotide
  Sense strand starting at position 979 of SEQ ID NO: 1561738
ugaguuaaucuaugcgaag

SEQ ID NO: 1694640 - RNA, 19 nt, Artificial Sequence
  Description of Artificial Sequence: Synthetic oligonucleotide
  Antisense strand to SEQ ID NO: 1694639
cuucgcauagauuaacuca

SEQ ID NO: 1694641 - RNA, 19 nt, Artificial Sequence
  Description of Artificial Sequence: Synthetic oligonucleotide
  Sense strand starting at position 980 of SEQ ID NO: 1561738
gaguuaaucuaugcgaagg

SEQ ID NO: 1694642 - RNA, 19 nt, Artificial Sequence
  Description of Artificial Sequence: Synthetic oligonucleotide
  Antisense strand to SEQ ID NO: 1694641
ccuucgcauagauuaacuc

SEQ ID NO: 1694643 - RNA, 19 nt, Artificial Sequence
  Description of Artificial Sequence: Synthetic oligonucleotide
  Sense strand starting at position 981 of SEQ ID NO: 1561738
aguuaaucuaugcgaagga

SEQ ID NO: 1694644 - RNA, 19 nt, Artificial Sequence
  Description of Artificial Sequence: Synthetic oligonucleotide
  Antisense strand to SEQ ID NO: 1694643
uccuucgcauagauuaacu

SEQ ID NO: 1694645 - RNA, 19 nt, Artificial Sequence
  Description of Artificial Sequence: Synthetic oligonucleotide
  Sense strand starting at position 985 of SEQ ID NO: 1561738
aaucuaugcgaaggacuua

SEQ ID NO: 1694646 - RNA, 19 nt, Artificial Sequence
  Description of Artificial Sequence: Synthetic oligonucleotide
  Antisense strand to SEQ ID NO: 1694645
uaaguccuucgcauagauu

SEQ ID NO: 1694647 - RNA, 19 nt, Artificial Sequence
  Description of Artificial Sequence: Synthetic oligonucleotide
  Sense strand starting at position 1010 of SEQ ID NO: 1561738
aagcgcaagcguuuguaga

SEQ ID NO: 1694648 - RNA, 19 nt, Artificial Sequence
  Description of Artificial Sequence: Synthetic oligonucleotide
  Antisense strand to SEQ ID NO: 1694647
ucuacaaacgcuugcgcuu

SEQ ID NO: 1694649 - RNA, 19 nt, Artificial Sequence
  Description of Artificial Sequence: Synthetic oligonucleotide
  Sense strand starting at position 1065 of SEQ ID NO: 1561738
ggaagugucuaggcucuua

SEQ ID NO: 1694650 - RNA, 19 nt, Artificial Sequence
  Description of Artificial Sequence: Synthetic oligonucleotide
  Antisense strand to SEQ ID NO: 1694649
uaagagccuagacacuucc

SEQ ID NO: 1694651 - RNA, 19 nt, Artificial Sequence
  Description of Artificial Sequence: Synthetic oligonucleotide
  Sense strand starting at position 1701 of SEQ ID NO: 1561738
caaucugugugucuaggga

SEQ ID NO: 1694652 - RNA, 19 nt, Artificial Sequence
  Description of Artificial Sequence: Synthetic oligonucleotide
  Antisense strand to SEQ ID NO: 1694651
ucccuagacacacagauug

SEQ ID NO: 1694653 - RNA, 19 nt, Artificial Sequence
  Description of Artificial Sequence: Synthetic oligonucleotide
  Sense strand starting at position 2070 of SEQ ID NO: 1561738
gugucuugucccagugagg

SEQ ID NO: 1694654 - RNA, 19 nt, Artificial Sequence
  Description of Artificial Sequence: Synthetic oligonucleotide
  Antisense strand to SEQ ID NO: 1694653
ccucacugggacaagacac

SEQ ID NO: 1694655 - RNA, 19 nt, Artificial Sequence
  Description of Artificial Sequence: Synthetic oligonucleotide
  Sense strand starting at position 2188 of SEQ ID NO: 1561738
gccugcaaugguuaauacu

SEQ ID NO: 1694656 - RNA, 19 nt, Artificial Sequence
  Description of Artificial Sequence: Synthetic oligonucleotide
  Antisense strand to SEQ ID NO: 1694655
aguauuaaccauugcaggc

SEQ ID NO: 1694657 - RNA, 19 nt, Artificial Sequence
  Description of Artificial Sequence: Synthetic oligonucleotide
  Sense strand starting at position 2212 of SEQ ID NO: 1561738
ucaacuugauuugaucgaa

SEQ ID NO: 1694658 - RNA, 19 nt, Artificial Sequence
  Description of Artificial Sequence: Synthetic oligonucleotide
  Antisense strand to SEQ ID NO: 1694657
uucgaucaaaucaaguuga

SEQ ID NO: 1694659 - RNA, 19 nt, Artificial Sequence
  Description of Artificial Sequence: Synthetic oligonucleotide
  Sense strand starting at position 2534 of SEQ ID NO: 1561738
ggcccuugugaucauguaa

SEQ ID NO: 1694660 - RNA, 19 nt, Artificial Sequence
  Description of Artificial Sequence: Synthetic oligonucleotide
  Antisense strand to SEQ ID NO: 1694659
uuacaugaucacaagggcc

SEQ ID NO: 1694661 - RNA, 19 nt, Artificial Sequence
  Description of Artificial Sequence: Synthetic oligonucleotide
  Sense strand starting at position 3372 of SEQ ID NO: 1561738
ccaaaucaguguccagaaa

SEQ ID NO: 1694662 - RNA, 19 nt, Artificial Sequence
  Description of Artificial Sequence: Synthetic oligonucleotide
  Antisense strand to SEQ ID NO: 1694661
uuucuggacacugauuugg

SEQ ID NO: 1694663 - RNA, 19 nt, Artificial Sequence
  Description of Artificial Sequence: Synthetic oligonucleotide
  Sense strand starting at position 3383 of SEQ ID NO: 1561738
uccagaaaguuccugguga

SEQ ID NO: 1694664 - RNA, 19 nt, Artificial Sequence
  Description of Artificial Sequence: Synthetic oligonucleotide
  Antisense strand to SEQ ID NO: 1694663
ucaccaggaacuuucugga

SEQ ID NO: 1694665 - RNA, 19 nt, Artificial Sequence
  Description of Artificial Sequence: Synthetic oligonucleotide
  Sense strand starting at position 3404 of SEQ ID NO: 1561738
cagagaggugagcauucuu

SEQ ID NO: 1694666 - RNA, 19 nt, Artificial Sequence
  Description of Artificial Sequence: Synthetic oligonucleotide
  Antisense strand to SEQ ID NO: 1694665
aagaaugcucaccucucug

SEQ ID NO: 1694667 - RNA, 19 nt, Artificial Sequence
  Description of Artificial Sequence: Synthetic oligonucleotide
  Sense strand starting at position 3420 of SEQ ID NO: 1561738
cuuccuaggcugcaaagau

SEQ ID NO: 1694668 - RNA, 19 nt, Artificial Sequence
  Description of Artificial Sequence: Synthetic oligonucleotide
  Antisense strand to SEQ ID NO: 1694667
aucuuugcagccuaggaag

SEQ ID NO: 1694669 - RNA, 19 nt, Artificial Sequence
  Description of Artificial Sequence: Synthetic oligonucleotide
  Sense strand starting at position 3433 of SEQ ID NO: 1561738
aaagaucaauggguucuau

SEQ ID NO: 1694670 - RNA, 19 nt, Artificial Sequence
  Description of Artificial Sequence: Synthetic oligonucleotide
  Antisense strand to SEQ ID NO: 1694669
auagaacccauugaucuuu

SEQ ID NO: 1694671 - RNA, 19 nt, Artificial Sequence
  Description of Artificial Sequence: Synthetic oligonucleotide
  Sense strand starting at position 3511 of SEQ ID NO: 1561738
agcauugcagacuacaaau

SEQ ID NO: 1694672 - RNA, 19 nt, Artificial Sequence
  Description of Artificial Sequence: Synthetic oligonucleotide
  Antisense strand to SEQ ID NO: 1694671
auuuguagucugcaaugcu

SEQ ID NO: 1694673 - RNA, 19 nt, Artificial Sequence
  Description of Artificial Sequence: Synthetic oligonucleotide
  Sense strand starting at position 3599 of SEQ ID NO: 1561738
acaguauugcagugaacaa

SEQ ID NO: 1694674 - RNA, 19 nt, Artificial Sequence
  Description of Artificial Sequence: Synthetic oligonucleotide
  Antisense strand to SEQ ID NO: 1694673
uuguucacugcaauacugu

SEQ ID NO: 1694675 - RNA, 19 nt, Artificial Sequence
  Description of Artificial Sequence: Synthetic oligonucleotide
  Sense strand starting at position 3685 of SEQ ID NO: 1561738
gaugcaaagcuuuacgcaa

SEQ ID NO: 1694676 - RNA, 19 nt, Artificial Sequence
  Description of Artificial Sequence: Synthetic oligonucleotide
  Antisense strand to SEQ ID NO: 1694675
uugcguaaagcuuugcauc

SEQ ID NO: 1694677 - RNA, 19 nt, Artificial Sequence
  Description of Artificial Sequence: Synthetic oligonucleotide
  Sense strand starting at position 3813 of SEQ ID NO: 1561738
gggcauaccuaacugauaa

SEQ ID NO: 1694678 - RNA, 19 nt, Artificial Sequence
  Description of Artificial Sequence: Synthetic oligonucleotide
  Antisense strand to SEQ ID NO: 1694677
uuaucaguuagguaugccc

SEQ ID NO: 1694679 - RNA, 19 nt, Artificial Sequence
  Description of Artificial Sequence: Synthetic oligonucleotide
  Sense strand starting at position 3941 of SEQ ID NO: 1561738
gauauuaaugugcacauga

SEQ ID NO: 1694680 - RNA, 19 nt, Artificial Sequence
  Description of Artificial Sequence: Synthetic oligonucleotide
  Antisense strand to SEQ ID NO: 1694679
ucaugugcacauuaauauc

SEQ ID NO: 1694681 - RNA, 19 nt, Artificial Sequence
  Description of Artificial Sequence: Synthetic oligonucleotide
  Sense strand starting at position 124 of SEQ ID NO: 1561739
gguguuggaucuccaagag

SEQ ID NO: 1694682 - RNA, 19 nt, Artificial Sequence
  Description of Artificial Sequence: Synthetic oligonucleotide
  Antisense strand to SEQ ID NO: 1694681
cucuuggagauccaacacc

SEQ ID NO: 1694683 - RNA, 19 nt, Artificial Sequence
  Description of Artificial Sequence: Synthetic oligonucleotide
  Sense strand starting at position 415 of SEQ ID NO: 1561739
cugggauugccauauccag

SEQ ID NO: 1694684 - RNA, 19 nt, Artificial Sequence
  Description of Artificial Sequence: Synthetic oligonucleotide
  Antisense strand to SEQ ID NO: 1694683
cuggauauggcaaucccag

SEQ ID NO: 1694685 - RNA, 19 nt, Artificial Sequence
  Description of Artificial Sequence: Synthetic oligonucleotide
  Sense strand starting at position 455 of SEQ ID NO: 1561739
aggacuuacugucauuuag

SEQ ID NO: 1694686 - RNA, 19 nt, Artificial Sequence
  Description of Artificial Sequence: Synthetic oligonucleotide
  Antisense strand to SEQ ID NO: 1694685
cuaaaugacaguaaguccu

SEQ ID NO: 1694687 - RNA, 19 nt, Artificial Sequence
  Description of Artificial Sequence: Synthetic oligonucleotide
  Sense strand starting at position 505 of SEQ ID NO: 1561739
uuauucuaacgguauuaag

SEQ ID NO: 1694688 - RNA, 19 nt, Artificial Sequence
  Description of Artificial Sequence: Synthetic oligonucleotide
  Antisense strand to SEQ ID NO: 1694687
cuuaauaccguuagaauaa

SEQ ID NO: 1694689 - RNA, 19 nt, Artificial Sequence
  Description of Artificial Sequence: Synthetic oligonucleotide
  Sense strand starting at position 536 of SEQ ID NO: 1561739
cacugaggucuuggagaau

SEQ ID NO: 1694690 - RNA, 19 nt, Artificial Sequence
  Description of Artificial Sequence: Synthetic oligonucleotide
  Antisense strand to SEQ ID NO: 1694689
auucuccaagaccucagug

SEQ ID NO: 1694691 - RNA, 19 nt, Artificial Sequence
  Description of Artificial Sequence: Synthetic oligonucleotide
  Sense strand starting at position 617 of SEQ ID NO: 1561739
aagguuccagcaugaauau

SEQ ID NO: 1694692 - RNA, 19 nt, Artificial Sequence
  Description of Artificial Sequence: Synthetic oligonucleotide
  Antisense strand to SEQ ID NO: 1694691
auauucaugcuggaaccuu

SEQ ID NO: 1694693 - RNA, 19 nt, Artificial Sequence
  Description of Artificial Sequence: Synthetic oligonucleotide
  Sense strand starting at position 618 of SEQ ID NO: 1561739
agguuccagcaugaauauu

SEQ ID NO: 1694694 - RNA, 19 nt, Artificial Sequence
  Description of Artificial Sequence: Synthetic oligonucleotide
  Antisense strand to SEQ ID NO: 1694693
aauauucaugcuggaaccu

SEQ ID NO: 1694695 - RNA, 19 nt, Artificial Sequence
  Description of Artificial Sequence: Synthetic oligonucleotide
  Sense strand starting at position 873 of SEQ ID NO: 1561739
gcucuuggugcugagaaag

SEQ ID NO: 1694696 - RNA, 19 nt, Artificial Sequence
  Description of Artificial Sequence: Synthetic oligonucleotide
  Antisense strand to SEQ ID NO: 1694695
cuuucucagcaccaagagc

SEQ ID NO: 1694697 - RNA, 19 nt, Artificial Sequence
  Description of Artificial Sequence: Synthetic oligonucleotide
  Sense strand starting at position 919 of SEQ ID NO: 1561739
accagaaguucuccacuag

SEQ ID NO: 1694698 - RNA, 19 nt, Artificial Sequence
  Description of Artificial Sequence: Synthetic oligonucleotide
  Antisense strand to SEQ ID NO: 1694697
cuaguggagaacuucuggu

SEQ ID NO: 1694699 - RNA, 19 nt, Artificial Sequence
  Description of Artificial Sequence: Synthetic oligonucleotide
  Sense strand starting at position 977 of SEQ ID NO: 1561739
cugugcauuccugaccaca

SEQ ID NO: 1694700 - RNA, 19 nt, Artificial Sequence
  Description of Artificial Sequence: Synthetic oligonucleotide
  Antisense strand to SEQ ID NO: 1694699
uguggucaggaaugcacag

SEQ ID NO: 1694701 - RNA, 19 nt, Artificial Sequence
  Description of Artificial Sequence: Synthetic oligonucleotide
  Sense strand starting at position 1306 of SEQ ID NO: 1561739
ccuggaaauguuuaucagu

SEQ ID NO: 1694702 - RNA, 19 nt, Artificial Sequence
  Description of Artificial Sequence: Synthetic oligonucleotide
  Antisense strand to SEQ ID NO: 1694701
acugauaaacauuuccagg

SEQ ID NO: 1694703 - RNA, 19 nt, Artificial Sequence
  Description of Artificial Sequence: Synthetic oligonucleotide
  Sense strand starting at position 1320 of SEQ ID NO: 1561739
ucagucucuuugguuauuu

SEQ ID NO: 1694704 - RNA, 19 nt, Artificial Sequence
  Description of Artificial Sequence: Synthetic oligonucleotide
  Antisense strand to SEQ ID NO: 1694703
aaauaaccaaagagacuga

SEQ ID NO: 1694705 - RNA, 19 nt, Artificial Sequence
  Description of Artificial Sequence: Synthetic oligonucleotide
  Sense strand starting at position 1391 of SEQ ID NO: 1561739
ucaguuauacaaugucuua

SEQ ID NO: 1694706 - RNA, 19 nt, Artificial Sequence
  Description of Artificial Sequence: Synthetic oligonucleotide
  Antisense strand to SEQ ID NO: 1694705
uaagacauuguauaacuga

SEQ ID NO: 1694707 - RNA, 19 nt, Artificial Sequence
  Description of Artificial Sequence: Synthetic oligonucleotide
  Sense strand starting at position 1621 of SEQ ID NO: 1561739
ggauguggucaccaaccuu

SEQ ID NO: 1694708 - RNA, 19 nt, Artificial Sequence
  Description of Artificial Sequence: Synthetic oligonucleotide
  Antisense strand to SEQ ID NO: 1694707
aagguuggugaccacaucc

SEQ ID NO: 1694709 - RNA, 19 nt, Artificial Sequence
  Description of Artificial Sequence: Synthetic oligonucleotide
  Sense strand starting at position 1715 of SEQ ID NO: 1561739
guugaaaguguucaaggca

SEQ ID NO: 1694710 - RNA, 19 nt, Artificial Sequence
  Description of Artificial Sequence: Synthetic oligonucleotide
  Antisense strand to SEQ ID NO: 1694709
ugccuugaacacuuucaac

SEQ ID NO: 1694711 - RNA, 19 nt, Artificial Sequence
  Description of Artificial Sequence: Synthetic oligonucleotide
  Sense strand starting at position 2062 of SEQ ID NO: 1561739
uccaaaggcguuuaaauca

SEQ ID NO: 1694712 - RNA, 19 nt, Artificial Sequence
  Description of Artificial Sequence: Synthetic oligonucleotide
  Antisense strand to SEQ ID NO: 1694711
ugauuuaaacgccuuugga

SEQ ID NO: 1694713 - RNA, 19 nt, Artificial Sequence
  Description of Artificial Sequence: Synthetic oligonucleotide
  Sense strand starting at position 2142 of SEQ ID NO: 1561739
gagagauagugcccugaac

SEQ ID NO: 1694714 - RNA, 19 nt, Artificial Sequence
  Description of Artificial Sequence: Synthetic oligonucleotide
  Antisense strand to SEQ ID NO: 1694713
guucagggcacuaucucuc

SEQ ID NO: 1694715 - RNA, 19 nt, Artificial Sequence
  Description of Artificial Sequence: Synthetic oligonucleotide
  Sense strand starting at position 2144 of SEQ ID NO: 1561739
gagauagugcccugaacau

SEQ ID NO: 1694716 - RNA, 19 nt, Artificial Sequence
  Description of Artificial Sequence: Synthetic oligonucleotide
  Antisense strand to SEQ ID NO: 1694715
auguucagggcacuaucuc

SEQ ID NO: 1694717 - RNA, 19 nt, Artificial Sequence
  Description of Artificial Sequence: Synthetic oligonucleotide
  Sense strand starting at position 2250 of SEQ ID NO: 1561739
acaagugugagagguauga

SEQ ID NO: 1694718 - RNA, 19 nt, Artificial Sequence
  Description of Artificial Sequence: Synthetic oligonucleotide
  Antisense strand to SEQ ID NO: 1694717
ucauaccucucacacuugu

SEQ ID NO: 1694719 - RNA, 19 nt, Artificial Sequence
  Description of Artificial Sequence: Synthetic oligonucleotide
  Sense strand starting at position 2252 of SEQ ID NO: 1561739
aagugugagagguaugagu

SEQ ID NO: 1694720 - RNA, 19 nt, Artificial Sequence
  Description of Artificial Sequence: Synthetic oligonucleotide
  Antisense strand to SEQ ID NO: 1694719
acucauaccucucacacuu

SEQ ID NO: 1694721 - RNA, 19 nt, Artificial Sequence
  Description of Artificial Sequence: Synthetic oligonucleotide
  Sense strand starting at position 2259 of SEQ ID NO: 1561739
agagguaugaguggaaggu

SEQ ID NO: 1694722 - RNA, 19 nt, Artificial Sequence
  Description of Artificial Sequence: Synthetic oligonucleotide
  Antisense strand to SEQ ID NO: 1694721
accuuccacucauaccucu

SEQ ID NO: 1694723 - RNA, 19 nt, Artificial Sequence
  Description of Artificial Sequence: Synthetic oligonucleotide
  Sense strand starting at position 2804 of SEQ ID NO: 1561739
cacaguuuguggguggaga

SEQ ID NO: 1694724 - RNA, 19 nt, Artificial Sequence
  Description of Artificial Sequence: Synthetic oligonucleotide
  Antisense strand to SEQ ID NO: 1694723
ucuccacccacaaacugug

SEQ ID NO: 1694725 - RNA, 19 nt, Artificial Sequence
  Description of Artificial Sequence: Synthetic oligonucleotide
  Sense strand starting at position 2805 of SEQ ID NO: 1561739
acaguuuguggguggagau

SEQ ID NO: 1694726 - RNA, 19 nt, Artificial Sequence
  Description of Artificial Sequence: Synthetic oligonucleotide
  Antisense strand to SEQ ID NO: 1694725
aucuccacccacaaacugu

SEQ ID NO: 1694727 - RNA, 19 nt, Artificial Sequence
  Description of Artificial Sequence: Synthetic oligonucleotide
  Sense strand starting at position 2821 of SEQ ID NO: 1561739
gauucugaguucucgacca

SEQ ID NO: 1694728 - RNA, 19 nt, Artificial Sequence
  Description of Artificial Sequence: Synthetic oligonucleotide
  Antisense strand to SEQ ID NO: 1694727
uggucgagaacucagaauc

SEQ ID NO: 1694729 - RNA, 19 nt, Artificial Sequence
  Description of Artificial Sequence: Synthetic oligonucleotide
  Sense strand starting at position 2823 of SEQ ID NO: 1561739
uucugaguucucgaccaag

SEQ ID NO: 1694730 - RNA, 19 nt, Artificial Sequence
  Description of Artificial Sequence: Synthetic oligonucleotide
  Antisense strand to SEQ ID NO: 1694729
cuuggucgagaacucagaa

SEQ ID NO: 1694731 - RNA, 19 nt, Artificial Sequence
  Description of Artificial Sequence: Synthetic oligonucleotide
  Sense strand starting at position 2931 of SEQ ID NO: 1561739
ugugaaauaugccuuugau

SEQ ID NO: 1694732 - RNA, 19 nt, Artificial Sequence
  Description of Artificial Sequence: Synthetic oligonucleotide
  Antisense strand to SEQ ID NO: 1694731
aucaaaggcauauuucaca

SEQ ID NO: 1694733 - RNA, 19 nt, Artificial Sequence
  Description of Artificial Sequence: Synthetic oligonucleotide
  Sense strand starting at position 2934 of SEQ ID NO: 1561739
gaaauaugccuuugauguu

SEQ ID NO: 1694734 - RNA, 19 nt, Artificial Sequence
  Description of Artificial Sequence: Synthetic oligonucleotide
  Antisense strand to SEQ ID NO: 1694733
aacaucaaaggcauauuuc

SEQ ID NO: 1694735 - RNA, 19 nt, Artificial Sequence
  Description of Artificial Sequence: Synthetic oligonucleotide
  Sense strand starting at position 3120 of SEQ ID NO: 1561739
ucagaaccauacuuugagu

SEQ ID NO: 1694736 - RNA, 19 nt, Artificial Sequence
  Description of Artificial Sequence: Synthetic oligonucleotide
  Antisense strand to SEQ ID NO: 1694735
acucaaaguaugguucuga

SEQ ID NO: 1694737 - RNA, 19 nt, Artificial Sequence
  Description of Artificial Sequence: Synthetic oligonucleotide
  Sense strand starting at position 3150 of SEQ ID NO: 1561739
agaauacuuccugggaagu

SEQ ID NO: 1694738 - RNA, 19 nt, Artificial Sequence
  Description of Artificial Sequence: Synthetic oligonucleotide
  Antisense strand to SEQ ID NO: 1694737
acuucccaggaaguauucu

SEQ ID NO: 1694739 - RNA, 19 nt, Artificial Sequence
  Description of Artificial Sequence: Synthetic oligonucleotide
  Sense strand starting at position 3151 of SEQ ID NO: 1561739
gaauacuuccugggaagug

SEQ ID NO: 1694740 - RNA, 19 nt, Artificial Sequence
  Description of Artificial Sequence: Synthetic oligonucleotide
  Antisense strand to SEQ ID NO: 1694739
cacuucccaggaaguauuc

SEQ ID NO: 1694741 - RNA, 19 nt, Artificial Sequence
  Description of Artificial Sequence: Synthetic oligonucleotide
  Sense strand starting at position 3294 of SEQ ID NO: 1561739
agaauaagaguuuguuucu

SEQ ID NO: 1694742 - RNA, 19 nt, Artificial Sequence
  Description of Artificial Sequence: Synthetic oligonucleotide
  Antisense strand to SEQ ID NO: 1694741
agaaacaaacucuuauucu

SEQ ID NO: 1694743 - RNA, 19 nt, Artificial Sequence
  Description of Artificial Sequence: Synthetic oligonucleotide
  Sense strand starting at position 3295 of SEQ ID NO: 1561739
gaauaagaguuuguuucua

SEQ ID NO: 1694744 - RNA, 19 nt, Artificial Sequence
  Description of Artificial Sequence: Synthetic oligonucleotide
  Antisense strand to SEQ ID NO: 1694743
uagaaacaaacucuuauuc

SEQ ID NO: 1694745 - RNA, 19 nt, Artificial Sequence
  Description of Artificial Sequence: Synthetic oligonucleotide
  Sense strand starting at position 3297 of SEQ ID NO: 1561739
auaagaguuuguuucuaga

SEQ ID NO: 1694746 - RNA, 19 nt, Artificial Sequence
  Description of Artificial Sequence: Synthetic oligonucleotide
  Antisense strand to SEQ ID NO: 1694745
ucuagaaacaaacucuuau

SEQ ID NO: 1694747 - RNA, 19 nt, Artificial Sequence
  Description of Artificial Sequence: Synthetic oligonucleotide
  Sense strand starting at position 3345 of SEQ ID NO: 1561739
gugacaauuccaggaaagc

SEQ ID NO: 1694748 - RNA, 19 nt, Artificial Sequence
  Description of Artificial Sequence: Synthetic oligonucleotide
  Antisense strand to SEQ ID NO: 1694747
gcuuuccuggaauugucac

SEQ ID NO: 1694749 - RNA, 19 nt, Artificial Sequence
  Description of Artificial Sequence: Synthetic oligonucleotide
  Sense strand starting at position 3457 of SEQ ID NO: 1561739
ugguuucuuagcuggagag

SEQ ID NO: 1694750 - RNA, 19 nt, Artificial Sequence
  Description of Artificial Sequence: Synthetic oligonucleotide
  Antisense strand to SEQ ID NO: 1694749
cucuccagcuaagaaacca

SEQ ID NO: 1694751 - RNA, 19 nt, Artificial Sequence
  Description of Artificial Sequence: Synthetic oligonucleotide
  Sense strand starting at position 3461 of SEQ ID NO: 1561739
uucuuagcuggagagugau

SEQ ID NO: 1694752 - RNA, 19 nt, Artificial Sequence
  Description of Artificial Sequence: Synthetic oligonucleotide
  Antisense strand to SEQ ID NO: 1694751
aucacucuccagcuaagaa

SEQ ID NO: 1694753 - RNA, 19 nt, Artificial Sequence
  Description of Artificial Sequence: Synthetic oligonucleotide
  Sense strand starting at position 3559 of SEQ ID NO: 1561739
ugcugugagaacuagaauc

SEQ ID NO: 1694754 - RNA, 19 nt, Artificial Sequence
  Description of Artificial Sequence: Synthetic oligonucleotide
  Antisense strand to SEQ ID NO: 1694753
gauucuaguucucacagca

SEQ ID NO: 1694755 - RNA, 19 nt, Artificial Sequence
  Description of Artificial Sequence: Synthetic oligonucleotide
  Sense strand starting at position 3573 of SEQ ID NO: 1561739
gaauccugaugccuggaau

SEQ ID NO: 1694756 - RNA, 19 nt, Artificial Sequence
  Description of Artificial Sequence: Synthetic oligonucleotide
  Antisense strand to SEQ ID NO: 1694755
auuccaggcaucaggauuc

SEQ ID NO: 1694757 - RNA, 19 nt, Artificial Sequence
  Description of Artificial Sequence: Synthetic oligonucleotide
  Sense strand starting at position 3724 of SEQ ID NO: 1561739
ccacaugugcuccaaggga

SEQ ID NO: 1694758 - RNA, 19 nt, Artificial Sequence
  Description of Artificial Sequence: Synthetic oligonucleotide
  Antisense strand to SEQ ID NO: 1694757
ucccuuggagcacaugugg

SEQ ID NO: 1694759 - RNA, 19 nt, Artificial Sequence
  Description of Artificial Sequence: Synthetic oligonucleotide
  Sense strand starting at position 3961 of SEQ ID NO: 1561739
aagacauagccagguaaag

SEQ ID NO: 1694760 - RNA, 19 nt, Artificial Sequence
  Description of Artificial Sequence: Synthetic oligonucleotide
  Antisense strand to SEQ ID NO: 1694759
cuuuaccuggcuaugucuu

SEQ ID NO: 1694761 - RNA, 19 nt, Artificial Sequence
  Description of Artificial Sequence: Synthetic oligonucleotide
  Sense strand starting at position 358 of SEQ ID NO: 1561740
ggucuuuccagaggcugaa

SEQ ID NO: 1694762 - RNA, 19 nt, Artificial Sequence
  Description of Artificial Sequence: Synthetic oligonucleotide
  Antisense strand to SEQ ID NO: 1694761
uucagccucuggaaagacc

SEQ ID NO: 1694763 - RNA, 19 nt, Artificial Sequence
  Description of Artificial Sequence: Synthetic oligonucleotide
  Sense strand starting at position 781 of SEQ ID NO: 1561740
ccucaacuuggugacuauu

SEQ ID NO: 1694764 - RNA, 19 nt, Artificial Sequence
  Description of Artificial Sequence: Synthetic oligonucleotide
  Antisense strand to SEQ ID NO: 1694763
aauagucaccaaguugagg

SEQ ID NO: 1694765 - RNA, 19 nt, Artificial Sequence
  Description of Artificial Sequence: Synthetic oligonucleotide
  Sense strand starting at position 871 of SEQ ID NO: 1561740
ggagaacauuuaggauuaa

SEQ ID NO: 1694766 - RNA, 19 nt, Artificial Sequence
  Description of Artificial Sequence: Synthetic oligonucleotide
  Antisense strand to SEQ ID NO: 1694765
uuaauccuaaauguucucc

SEQ ID NO: 1694767 - RNA, 19 nt, Artificial Sequence
  Description of Artificial Sequence: Synthetic oligonucleotide
  Sense strand starting at position 884 of SEQ ID NO: 1561740
gauuaagaccuguggucug

SEQ ID NO: 1694768 - RNA, 19 nt, Artificial Sequence
  Description of Artificial Sequence: Synthetic oligonucleotide
  Antisense strand to SEQ ID NO: 1694767
cagaccacaggucuuaauc

SEQ ID NO: 1694769 - RNA, 19 nt, Artificial Sequence
  Description of Artificial Sequence: Synthetic oligonucleotide
  Sense strand starting at position 889 of SEQ ID NO: 1561740
agaccuguggucugaggaa

SEQ ID NO: 1694770 - RNA, 19 nt, Artificial Sequence
  Description of Artificial Sequence: Synthetic oligonucleotide
  Antisense strand to SEQ ID NO: 1694769
uuccucagaccacaggucu

SEQ ID NO: 1694771 - RNA, 19 nt, Artificial Sequence
  Description of Artificial Sequence: Synthetic oligonucleotide
  Sense strand starting at position 924 of SEQ ID NO: 1561740
ucaguuuauuaagugcaga

SEQ ID NO: 1694772 - RNA, 19 nt, Artificial Sequence
  Description of Artificial Sequence: Synthetic oligonucleotide
  Antisense strand to SEQ ID NO: 1694771
ucugcacuuaauaaacuga

SEQ ID NO: 1694773 - RNA, 19 nt, Artificial Sequence
  Description of Artificial Sequence: Synthetic oligonucleotide
  Sense strand starting at position 1442 of SEQ ID NO: 1561740
gaggguacguggucaccaa

SEQ ID NO: 1694774 - RNA, 19 nt, Artificial Sequence
  Description of Artificial Sequence: Synthetic oligonucleotide
  Antisense strand to SEQ ID NO: 1694773
uuggugaccacguacccuc

SEQ ID NO: 1694775 - RNA, 19 nt, Artificial Sequence
  Description of Artificial Sequence: Synthetic oligonucleotide
  Sense strand starting at position 1491 of SEQ ID NO: 1561740
ccagucuguaggcauagua

SEQ ID NO: 1694776 - RNA, 19 nt, Artificial Sequence
  Description of Artificial Sequence: Synthetic oligonucleotide
  Antisense strand to SEQ ID NO: 1694775
uacuaugccuacagacugg

SEQ ID NO: 1694777 - RNA, 19 nt, Artificial Sequence
  Description of Artificial Sequence: Synthetic oligonucleotide
  Sense strand starting at position 1561 of SEQ ID NO: 1561740
gagguaacgagccaugaca

SEQ ID NO: 1694778 - RNA, 19 nt, Artificial Sequence
  Description of Artificial Sequence: Synthetic oligonucleotide
  Antisense strand to SEQ ID NO: 1694777
ugucauggcucguuaccuc

SEQ ID NO: 1694779 - RNA, 19 nt, Artificial Sequence
  Description of Artificial Sequence: Synthetic oligonucleotide
  Sense strand starting at position 1563 of SEQ ID NO: 1561740
gguaacgagccaugacauu

SEQ ID NO: 1694780 - RNA, 19 nt, Artificial Sequence
  Description of Artificial Sequence: Synthetic oligonucleotide
  Antisense strand to SEQ ID NO: 1694779
aaugucauggcucguuacc

SEQ ID NO: 1694781 - RNA, 19 nt, Artificial Sequence
  Description of Artificial Sequence: Synthetic oligonucleotide
  Sense strand starting at position 1617 of SEQ ID NO: 1561740
aggcauagaucagcaggau

SEQ ID NO: 1694782 - RNA, 19 nt, Artificial Sequence
  Description of Artificial Sequence: Synthetic oligonucleotide
  Antisense strand to SEQ ID NO: 1694781
auccugcugaucuaugccu

SEQ ID NO: 1694783 - RNA, 19 nt, Artificial Sequence
  Description of Artificial Sequence: Synthetic oligonucleotide
  Sense strand starting at position 1755 of SEQ ID NO: 1561740
ggaguuaauugagcacaga

SEQ ID NO: 1694784 - RNA, 19 nt, Artificial Sequence
  Description of Artificial Sequence: Synthetic oligonucleotide
  Antisense strand to SEQ ID NO: 1694783
ucugugcucaauuaacucc

SEQ ID NO: 1694785 - RNA, 19 nt, Artificial Sequence
  Description of Artificial Sequence: Synthetic oligonucleotide
  Sense strand starting at position 1808 of SEQ ID NO: 1561740
gugggacaaacuugucuca

SEQ ID NO: 1694786 - RNA, 19 nt, Artificial Sequence
  Description of Artificial Sequence: Synthetic oligonucleotide
  Antisense strand to SEQ ID NO: 1694785
ugagacaaguuugucccac

SEQ ID NO: 1694787 - RNA, 19 nt, Artificial Sequence
  Description of Artificial Sequence: Synthetic oligonucleotide
  Sense strand starting at position 2147 of SEQ ID NO: 1561740
ggaucuccguuguucagaa

SEQ ID NO: 1694788 - RNA, 19 nt, Artificial Sequence
  Description of Artificial Sequence: Synthetic oligonucleotide
  Antisense strand to SEQ ID NO: 1694787
uucugaacaacggagaucc

SEQ ID NO: 1694789 - RNA, 19 nt, Artificial Sequence
  Description of Artificial Sequence: Synthetic oligonucleotide
  Sense strand starting at position 2175 of SEQ ID NO: 1561740
agauaucaguuuguucuuu

SEQ ID NO: 1694790 - RNA, 19 nt, Artificial Sequence
  Description of Artificial Sequence: Synthetic oligonucleotide
  Antisense strand to SEQ ID NO: 1694789
aaagaacaaacugauaucu

SEQ ID NO: 1694791 - RNA, 19 nt, Artificial Sequence
  Description of Artificial Sequence: Synthetic oligonucleotide
  Sense strand starting at position 2195 of SEQ ID NO: 1561740
guuguauaauaccucaaca

SEQ ID NO: 1694792 - RNA, 19 nt, Artificial Sequence
  Description of Artificial Sequence: Synthetic oligonucleotide
  Antisense strand to SEQ ID NO: 1694791
uguugagguauuauacaac

SEQ ID NO: 1694793 - RNA, 19 nt, Artificial Sequence
  Description of Artificial Sequence: Synthetic oligonucleotide
  Sense strand starting at position 2197 of SEQ ID NO: 1561740
uguauaauaccucaacagu

SEQ ID NO: 1694794 - RNA, 19 nt, Artificial Sequence
  Description of Artificial Sequence: Synthetic oligonucleotide
  Antisense strand to SEQ ID NO: 1694793
acuguugagguauuauaca

SEQ ID NO: 1694795 - RNA, 19 nt, Artificial Sequence
  Description of Artificial Sequence: Synthetic oligonucleotide
  Sense strand starting at position 2211 of SEQ ID NO: 1561740
acaguuguacucugugaac

SEQ ID NO: 1694796 - RNA, 19 nt, Artificial Sequence
  Description of Artificial Sequence: Synthetic oligonucleotide
  Antisense strand to SEQ ID NO: 1694795
guucacagaguacaacugu

SEQ ID NO: 1694797 - RNA, 19 nt, Artificial Sequence
  Description of Artificial Sequence: Synthetic oligonucleotide
  Sense strand starting at position 2213 of SEQ ID NO: 1561740
aguuguacucugugaacca

SEQ ID NO: 1694798 - RNA, 19 nt, Artificial Sequence
  Description of Artificial Sequence: Synthetic oligonucleotide
  Antisense strand to SEQ ID NO: 1694797
ugguucacagaguacaacu

SEQ ID NO: 1694799 - RNA, 19 nt, Artificial Sequence
  Description of Artificial Sequence: Synthetic oligonucleotide
  Sense strand starting at position 2620 of SEQ ID NO: 1561740
guguucuagagugagcuau

SEQ ID NO: 1694800 - RNA, 19 nt, Artificial Sequence
  Description of Artificial Sequence: Synthetic oligonucleotide
  Antisense strand to SEQ ID NO: 1694799
auagcucacucuagaacac

SEQ ID NO: 1694801 - RNA, 19 nt, Artificial Sequence
  Description of Artificial Sequence: Synthetic oligonucleotide
  Sense strand starting at position 2622 of SEQ ID NO: 1561740
guucuagagugagcuauuu

SEQ ID NO: 1694802 - RNA, 19 nt, Artificial Sequence
  Description of Artificial Sequence: Synthetic oligonucleotide
  Antisense strand to SEQ ID NO: 1694801
aaauagcucacucuagaac

SEQ ID NO: 1694803 - RNA, 19 nt, Artificial Sequence
  Description of Artificial Sequence: Synthetic oligonucleotide
  Sense strand starting at position 2644 of SEQ ID NO: 1561740
cagcacuuaggugauacua

SEQ ID NO: 1694804 - RNA, 19 nt, Artificial Sequence
  Description of Artificial Sequence: Synthetic oligonucleotide
  Antisense strand to SEQ ID NO: 1694803
uaguaucaccuaagugcug

SEQ ID NO: 1694805 - RNA, 19 nt, Artificial Sequence
  Description of Artificial Sequence: Synthetic oligonucleotide
  Sense strand starting at position 2652 of SEQ ID NO: 1561740
aggugauacuaggugguua

SEQ ID NO: 1694806 - RNA, 19 nt, Artificial Sequence
  Description of Artificial Sequence: Synthetic oligonucleotide
  Antisense strand to SEQ ID NO: 1694805
uaaccaccuaguaucaccu

SEQ ID NO: 1694807 - RNA, 19 nt, Artificial Sequence
  Description of Artificial Sequence: Synthetic oligonucleotide
  Sense strand starting at position 2777 of SEQ ID NO: 1561740
aagugagagcuuugaguuu

SEQ ID NO: 1694808 - RNA, 19 nt, Artificial Sequence
  Description of Artificial Sequence: Synthetic oligonucleotide
  Antisense strand to SEQ ID NO: 1694807
aaacucaaagcucucacuu

SEQ ID NO: 1694809 - RNA, 19 nt, Artificial Sequence
  Description of Artificial Sequence: Synthetic oligonucleotide
  Sense strand starting at position 2786 of SEQ ID NO: 1561740
cuuugaguuuggcugagaa

SEQ ID NO: 1694810 - RNA, 19 nt, Artificial Sequence
  Description of Artificial Sequence: Synthetic oligonucleotide
  Antisense strand to SEQ ID NO: 1694809
uucucagccaaacucaaag

SEQ ID NO: 1694811 - RNA, 19 nt, Artificial Sequence
  Description of Artificial Sequence: Synthetic oligonucleotide
  Sense strand starting at position 2788 of SEQ ID NO: 1561740
uugaguuuggcugagaaga

SEQ ID NO: 1694812 - RNA, 19 nt, Artificial Sequence
  Description of Artificial Sequence: Synthetic oligonucleotide
  Antisense strand to SEQ ID NO: 1694811
ucuucucagccaaacucaa

SEQ ID NO: 1694813 - RNA, 19 nt, Artificial Sequence
  Description of Artificial Sequence: Synthetic oligonucleotide
  Sense strand starting at position 2814 of SEQ ID NO: 1561740
gcugcaauauaggcaagaa

SEQ ID NO: 1694814 - RNA, 19 nt, Artificial Sequence
  Description of Artificial Sequence: Synthetic oligonucleotide
  Antisense strand to SEQ ID NO: 1694813
uucuugccuauauugcagc

SEQ ID NO: 1694815 - RNA, 19 nt, Artificial Sequence
  Description of Artificial Sequence: Synthetic oligonucleotide
  Sense strand starting at position 2909 of SEQ ID NO: 1561740
gacugugucccauaccaug

SEQ ID NO: 1694816 - RNA, 19 nt, Artificial Sequence
  Description of Artificial Sequence: Synthetic oligonucleotide
  Antisense strand to SEQ ID NO: 1694815
caugguaugggacacaguc

SEQ ID NO: 1694817 - RNA, 19 nt, Artificial Sequence
  Description of Artificial Sequence: Synthetic oligonucleotide
  Sense strand starting at position 3195 of SEQ ID NO: 1561740
ugaaaccuguguccugauu

SEQ ID NO: 1694818 - RNA, 19 nt, Artificial Sequence
  Description of Artificial Sequence: Synthetic oligonucleotide
  Antisense strand to SEQ ID NO: 1694817
aaucaggacacagguuuca

SEQ ID NO: 1694819 - RNA, 19 nt, Artificial Sequence
  Description of Artificial Sequence: Synthetic oligonucleotide
  Sense strand starting at position 3201 of SEQ ID NO: 1561740
cuguguccugauuagcaau

SEQ ID NO: 1694820 - RNA, 19 nt, Artificial Sequence
  Description of Artificial Sequence: Synthetic oligonucleotide
  Antisense strand to SEQ ID NO: 1694819
auugcuaaucaggacacag

SEQ ID NO: 1694821 - RNA, 19 nt, Artificial Sequence
  Description of Artificial Sequence: Synthetic oligonucleotide
  Sense strand starting at position 3203 of SEQ ID NO: 1561740
guguccugauuagcaauga

SEQ ID NO: 1694822 - RNA, 19 nt, Artificial Sequence
  Description of Artificial Sequence: Synthetic oligonucleotide
  Antisense strand to SEQ ID NO: 1694821
ucauugcuaaucaggacac

SEQ ID NO: 1694823 - RNA, 19 nt, Artificial Sequence
  Description of Artificial Sequence: Synthetic oligonucleotide
  Sense strand starting at position 3207 of SEQ ID NO: 1561740
ccugauuagcaaugauaac

SEQ ID NO: 1694824 - RNA, 19 nt, Artificial Sequence
  Description of Artificial Sequence: Synthetic oligonucleotide
  Antisense strand to SEQ ID NO: 1694823
guuaucauugcuaaucagg

SEQ ID NO: 1694825 - RNA, 19 nt, Artificial Sequence
  Description of Artificial Sequence: Synthetic oligonucleotide
  Sense strand starting at position 3227 of SEQ ID NO: 1561740
ggugaaaucuggcccauug

SEQ ID NO: 1694826 - RNA, 19 nt, Artificial Sequence
  Description of Artificial Sequence: Synthetic oligonucleotide
  Antisense strand to SEQ ID NO: 1694825
caaugggccagauuucacc

SEQ ID NO: 1694827 - RNA, 19 nt, Artificial Sequence
  Description of Artificial Sequence: Synthetic oligonucleotide
  Sense strand starting at position 3580 of SEQ ID NO: 1561740
ugucacuggucuucuggau

SEQ ID NO: 1694828 - RNA, 19 nt, Artificial Sequence
  Description of Artificial Sequence: Synthetic oligonucleotide
  Antisense strand to SEQ ID NO: 1694827
auccagaagaccagugaca

SEQ ID NO: 1694829 - RNA, 19 nt, Artificial Sequence
  Description of Artificial Sequence: Synthetic oligonucleotide
  Sense strand starting at position 3584 of SEQ ID NO: 1561740
acuggucuucuggaucaca

SEQ ID NO: 1694830 - RNA, 19 nt, Artificial Sequence
  Description of Artificial Sequence: Synthetic oligonucleotide
  Antisense strand to SEQ ID NO: 1694829
ugugauccagaagaccagu

SEQ ID NO: 1694831 - RNA, 19 nt, Artificial Sequence
  Description of Artificial Sequence: Synthetic oligonucleotide
  Sense strand starting at position 3684 of SEQ ID NO: 1561740
gugagaucuacuggguugu

SEQ ID NO: 1694832 - RNA, 19 nt, Artificial Sequence
  Description of Artificial Sequence: Synthetic oligonucleotide
  Antisense strand to SEQ ID NO: 1694831
acaacccaguagaucucac

SEQ ID NO: 1694833 - RNA, 19 nt, Artificial Sequence
  Description of Artificial Sequence: Synthetic oligonucleotide
  Sense strand starting at position 3686 of SEQ ID NO: 1561740
gagaucuacuggguuguga

SEQ ID NO: 1694834 - RNA, 19 nt, Artificial Sequence
  Description of Artificial Sequence: Synthetic oligonucleotide
  Antisense strand to SEQ ID NO: 1694833
ucacaacccaguagaucuc

SEQ ID NO: 1694835 - RNA, 19 nt, Artificial Sequence
  Description of Artificial Sequence: Synthetic oligonucleotide
  Sense strand starting at position 3688 of SEQ ID NO: 1561740
gaucuacuggguugugaaa

SEQ ID NO: 1694836 - RNA, 19 nt, Artificial Sequence
  Description of Artificial Sequence: Synthetic oligonucleotide
  Antisense strand to SEQ ID NO: 1694835
uuucacaacccaguagauc

SEQ ID NO: 1694837 - RNA, 19 nt, Artificial Sequence
  Description of Artificial Sequence: Synthetic oligonucleotide
  Sense strand starting at position 3801 of SEQ ID NO: 1561740
ucuugcuuauaauugugaa

SEQ ID NO: 1694838 - RNA, 19 nt, Artificial Sequence
  Description of Artificial Sequence: Synthetic oligonucleotide
  Antisense strand to SEQ ID NO: 1694837
uucacaauuauaagcaaga

SEQ ID NO: 1694839 - RNA, 19 nt, Artificial Sequence
  Description of Artificial Sequence: Synthetic oligonucleotide
  Sense strand starting at position 3844 of SEQ ID NO: 1561740
cuuaccacugcaugaguua

SEQ ID NO: 1694840 - RNA, 19 nt, Artificial Sequence
  Description of Artificial Sequence: Synthetic oligonucleotide
  Antisense strand to SEQ ID NO: 1694839
uaacucaugcagugguaag

SEQ ID NO: 1694841 - RNA, 19 nt, Artificial Sequence
  Description of Artificial Sequence: Synthetic oligonucleotide
  Sense strand starting at position 241 of SEQ ID NO: 1561741
aggucuaugcuugaguaga

SEQ ID NO: 1694842 - RNA, 19 nt, Artificial Sequence
  Description of Artificial Sequence: Synthetic oligonucleotide
  Antisense strand to SEQ ID NO: 1694841
ucuacucaagcauagaccu

SEQ ID NO: 1694843 - RNA, 19 nt, Artificial Sequence
  Description of Artificial Sequence: Synthetic oligonucleotide
  Sense strand starting at position 243 of SEQ ID NO: 1561741
gucuaugcuugaguagaaa

SEQ ID NO: 1694844 - RNA, 19 nt, Artificial Sequence
  Description of Artificial Sequence: Synthetic oligonucleotide
  Antisense strand to SEQ ID NO: 1694843
uuucuacucaagcauagac

SEQ ID NO: 1694845 - RNA, 19 nt, Artificial Sequence
  Description of Artificial Sequence: Synthetic oligonucleotide
  Sense strand starting at position 336 of SEQ ID NO: 1561741
gaguuacuuguccaagguu

SEQ ID NO: 1694846 - RNA, 19 nt, Artificial Sequence
  Description of Artificial Sequence: Synthetic oligonucleotide
  Antisense strand to SEQ ID NO: 1694845
aaccuuggacaaguaacuc

SEQ ID NO: 1694847 - RNA, 19 nt, Artificial Sequence
  Description of Artificial Sequence: Synthetic oligonucleotide
  Sense strand starting at position 339 of SEQ ID NO: 1561741
uuacuuguccaagguuaaa

SEQ ID NO: 1694848 - RNA, 19 nt, Artificial Sequence
  Description of Artificial Sequence: Synthetic oligonucleotide
  Antisense strand to SEQ ID NO: 1694847
uuuaaccuuggacaaguaa

SEQ ID NO: 1694849 - RNA, 19 nt, Artificial Sequence
  Description of Artificial Sequence: Synthetic oligonucleotide
  Sense strand starting at position 352 of SEQ ID NO: 1561741
guuaaagcacaccagaauu

SEQ ID NO: 1694850 - RNA, 19 nt, Artificial Sequence
  Description of Artificial Sequence: Synthetic oligonucleotide
  Antisense strand to SEQ ID NO: 1694849
aauucuggugugcuuuaac

SEQ ID NO: 1694851 - RNA, 19 nt, Artificial Sequence
  Description of Artificial Sequence: Synthetic oligonucleotide
  Sense strand starting at position 375 of SEQ ID NO: 1561741
acuccagaucccugagcuu

SEQ ID NO: 1694852 - RNA, 19 nt, Artificial Sequence
  Description of Artificial Sequence: Synthetic oligonucleotide
  Antisense strand to SEQ ID NO: 1694851
aagcucagggaucuggagu

SEQ ID NO: 1694853 - RNA, 19 nt, Artificial Sequence
  Description of Artificial Sequence: Synthetic oligonucleotide
  Sense strand starting at position 388 of SEQ ID NO: 1561741
gagcuuaaccacugaagga

SEQ ID NO: 1694854 - RNA, 19 nt, Artificial Sequence
  Description of Artificial Sequence: Synthetic oligonucleotide
  Antisense strand to SEQ ID NO: 1694853
uccuucagugguuaagcuc

SEQ ID NO: 1694855 - RNA, 19 nt, Artificial Sequence
  Description of Artificial Sequence: Synthetic oligonucleotide
  Sense strand starting at position 445 of SEQ ID NO: 1561741
ggcugauuaccuugaacug

SEQ ID NO: 1694856 - RNA, 19 nt, Artificial Sequence
  Description of Artificial Sequence: Synthetic oligonucleotide
  Antisense strand to SEQ ID NO: 1694855
caguucaagguaaucagcc

SEQ ID NO: 1694857 - RNA, 19 nt, Artificial Sequence
  Description of Artificial Sequence: Synthetic oligonucleotide
  Sense strand starting at position 446 of SEQ ID NO: 1561741
gcugauuaccuugaacuga

SEQ ID NO: 1694858 - RNA, 19 nt, Artificial Sequence
  Description of Artificial Sequence: Synthetic oligonucleotide
  Antisense strand to SEQ ID NO: 1694857
ucaguucaagguaaucagc

SEQ ID NO: 1694859 - RNA, 19 nt, Artificial Sequence
  Description of Artificial Sequence: Synthetic oligonucleotide
  Sense strand starting at position 542 of SEQ ID NO: 1561741
auaccucaauugucacgaa

SEQ ID NO: 1694860 - RNA, 19 nt, Artificial Sequence
  Description of Artificial Sequence: Synthetic oligonucleotide
  Antisense strand to SEQ ID NO: 1694859
uucgugacaauugagguau

SEQ ID NO: 1694861 - RNA, 19 nt, Artificial Sequence
  Description of Artificial Sequence: Synthetic oligonucleotide
  Sense strand starting at position 552 of SEQ ID NO: 1561741
ugucacgaauccuuauaaa

SEQ ID NO: 1694862 - RNA, 19 nt, Artificial Sequence
  Description of Artificial Sequence: Synthetic oligonucleotide
  Antisense strand to SEQ ID NO: 1694861
uuuauaaggauucgugaca

SEQ ID NO: 1694863 - RNA, 19 nt, Artificial Sequence
  Description of Artificial Sequence: Synthetic oligonucleotide
  Sense strand starting at position 576 of SEQ ID NO: 1561741
gaagauuaacucggaucac

SEQ ID NO: 1694864 - RNA, 19 nt, Artificial Sequence
  Description of Artificial Sequence: Synthetic oligonucleotide
  Antisense strand to SEQ ID NO: 1694863
gugauccgaguuaaucuuc

SEQ ID NO: 1694865 - RNA, 19 nt, Artificial Sequence
  Description of Artificial Sequence: Synthetic oligonucleotide
  Sense strand starting at position 686 of SEQ ID NO: 1561741
cccauaacuuguguuagag

SEQ ID NO: 1694866 - RNA, 19 nt, Artificial Sequence
  Description of Artificial Sequence: Synthetic oligonucleotide
  Antisense strand to SEQ ID NO: 1694865
cucuaacacaaguuauggg

SEQ ID NO: 1694867 - RNA, 19 nt, Artificial Sequence
  Description of Artificial Sequence: Synthetic oligonucleotide
  Sense strand starting at position 762 of SEQ ID NO: 1561741
ccauguaggcuuuaaucau

SEQ ID NO: 1694868 - RNA, 19 nt, Artificial Sequence
  Description of Artificial Sequence: Synthetic oligonucleotide
  Antisense strand to SEQ ID NO: 1694867
augauuaaagccuacaugg

SEQ ID NO: 1694869 - RNA, 19 nt, Artificial Sequence
  Description of Artificial Sequence: Synthetic oligonucleotide
  Sense strand starting at position 768 of SEQ ID NO: 1561741
aggcuuuaaucaucugacu

SEQ ID NO: 1694870 - RNA, 19 nt, Artificial Sequence
  Description of Artificial Sequence: Synthetic oligonucleotide
  Antisense strand to SEQ ID NO: 1694869
agucagaugauuaaagccu

SEQ ID NO: 1694871 - RNA, 19 nt, Artificial Sequence
  Description of Artificial Sequence: Synthetic oligonucleotide
  Sense strand starting at position 809 of SEQ ID NO: 1561741
gugggacuccuguacguaa

SEQ ID NO: 1694872 - RNA, 19 nt, Artificial Sequence
  Description of Artificial Sequence: Synthetic oligonucleotide
  Antisense strand to SEQ ID NO: 1694871
uuacguacaggagucccac

SEQ ID NO: 1694873 - RNA, 19 nt, Artificial Sequence
  Description of Artificial Sequence: Synthetic oligonucleotide
  Sense strand starting at position 879 of SEQ ID NO: 1561741
ggagauucuuaaguaccaa

SEQ ID NO: 1694874 - RNA, 19 nt, Artificial Sequence
  Description of Artificial Sequence: Synthetic oligonucleotide
  Antisense strand to SEQ ID NO: 1694873
uugguacuuaagaaucucc

SEQ ID NO: 1694875 - RNA, 19 nt, Artificial Sequence
  Description of Artificial Sequence: Synthetic oligonucleotide
  Sense strand starting at position 967 of SEQ ID NO: 1561741
ggguuaauaugacucgaau

SEQ ID NO: 1694876 - RNA, 19 nt, Artificial Sequence
  Description of Artificial Sequence: Synthetic oligonucleotide
  Antisense strand to SEQ ID NO: 1694875
auucgagucauauuaaccc

SEQ ID NO: 1694877 - RNA, 19 nt, Artificial Sequence
  Description of Artificial Sequence: Synthetic oligonucleotide
  Sense strand starting at position 979 of SEQ ID NO: 1561741
cucgaauaauuuccguaug

SEQ ID NO: 1694878 - RNA, 19 nt, Artificial Sequence
  Description of Artificial Sequence: Synthetic oligonucleotide
  Antisense strand to SEQ ID NO: 1694877
cauacggaaauuauucgag

SEQ ID NO: 1694879 - RNA, 19 nt, Artificial Sequence
  Description of Artificial Sequence: Synthetic oligonucleotide
  Sense strand starting at position 981 of SEQ ID NO: 1561741
cgaauaauuuccguaugcu

SEQ ID NO: 1694880 - RNA, 19 nt, Artificial Sequence
  Description of Artificial Sequence: Synthetic oligonucleotide
  Antisense strand to SEQ ID NO: 1694879
agcauacggaaauuauucg

SEQ ID NO: 1694881 - RNA, 19 nt, Artificial Sequence
  Description of Artificial Sequence: Synthetic oligonucleotide
  Sense strand starting at position 2124 of SEQ ID NO: 1561741
ggguuuaacuccuauuuaa

SEQ ID NO: 1694882 - RNA, 19 nt, Artificial Sequence
  Description of Artificial Sequence: Synthetic oligonucleotide
  Antisense strand to SEQ ID NO: 1694881
uuaaauaggaguuaaaccc

SEQ ID NO: 1694883 - RNA, 19 nt, Artificial Sequence
  Description of Artificial Sequence: Synthetic oligonucleotide
  Sense strand starting at position 2234 of SEQ ID NO: 1561741
gggauaucucaguggcgga

SEQ ID NO: 1694884 - RNA, 19 nt, Artificial Sequence
  Description of Artificial Sequence: Synthetic oligonucleotide
  Antisense strand to SEQ ID NO: 1694883
uccgccacugagauauccc

SEQ ID NO: 1694885 - RNA, 19 nt, Artificial Sequence
  Description of Artificial Sequence: Synthetic oligonucleotide
  Sense strand starting at position 2502 of SEQ ID NO: 1561741
ccgagaucaccuggguaag

SEQ ID NO: 1694886 - RNA, 19 nt, Artificial Sequence
  Description of Artificial Sequence: Synthetic oligonucleotide
  Antisense strand to SEQ ID NO: 1694885
cuuacccaggugaucucgg

SEQ ID NO: 1694887 - RNA, 19 nt, Artificial Sequence
  Description of Artificial Sequence: Synthetic oligonucleotide
  Sense strand starting at position 2503 of SEQ ID NO: 1561741
cgagaucaccuggguaaga

SEQ ID NO: 1694888 - RNA, 19 nt, Artificial Sequence
  Description of Artificial Sequence: Synthetic oligonucleotide
  Antisense strand to SEQ ID NO: 1694887
ucuuacccaggugaucucg

SEQ ID NO: 1694889 - RNA, 19 nt, Artificial Sequence
  Description of Artificial Sequence: Synthetic oligonucleotide
  Sense strand starting at position 2582 of SEQ ID NO: 1561741
guaagcguacggagaacuu

SEQ ID NO: 1694890 - RNA, 19 nt, Artificial Sequence
  Description of Artificial Sequence: Synthetic oligonucleotide
  Antisense strand to SEQ ID NO: 1694889
aaguucuccguacgcuuac

SEQ ID NO: 1694891 - RNA, 19 nt, Artificial Sequence
  Description of Artificial Sequence: Synthetic oligonucleotide
  Sense strand starting at position 2651 of SEQ ID NO: 1561741
ggccgcuuuagauagaaua

SEQ ID NO: 1694892 - RNA, 19 nt, Artificial Sequence
  Description of Artificial Sequence: Synthetic oligonucleotide
  Antisense strand to SEQ ID NO: 1694891
uauucuaucuaaagcggcc

SEQ ID NO: 1694893 - RNA, 19 nt, Artificial Sequence
  Description of Artificial Sequence: Synthetic oligonucleotide
  Sense strand starting at position 2693 of SEQ ID NO: 1561741
cuggaugagugggugaauu

SEQ ID NO: 1694894 - RNA, 19 nt, Artificial Sequence
  Description of Artificial Sequence: Synthetic oligonucleotide
  Antisense strand to SEQ ID NO: 1694893
aauucacccacucauccag

SEQ ID NO: 1694895 - RNA, 19 nt, Artificial Sequence
  Description of Artificial Sequence: Synthetic oligonucleotide
  Sense strand starting at position 2717 of SEQ ID NO: 1561741
augagaaccuccuugcaga

SEQ ID NO: 1694896 - RNA, 19 nt, Artificial Sequence
  Description of Artificial Sequence: Synthetic oligonucleotide
  Antisense strand to SEQ ID NO: 1694895
ucugcaaggagguucucau

SEQ ID NO: 1694897 - RNA, 19 nt, Artificial Sequence
  Description of Artificial Sequence: Synthetic oligonucleotide
  Sense strand starting at position 2824 of SEQ ID NO: 1561741
ccgagagcccgguaaauca

SEQ ID NO: 1694898 - RNA, 19 nt, Artificial Sequence
  Description of Artificial Sequence: Synthetic oligonucleotide
  Antisense strand to SEQ ID NO: 1694897
ugauuuaccgggcucucgg

SEQ ID NO: 1694899 - RNA, 19 nt, Artificial Sequence
  Description of Artificial Sequence: Synthetic oligonucleotide
  Sense strand starting at position 2860 of SEQ ID NO: 1561741
gacccaggugucuaguuau

SEQ ID NO: 1694900 - RNA, 19 nt, Artificial Sequence
  Description of Artificial Sequence: Synthetic oligonucleotide
  Antisense strand to SEQ ID NO: 1694899
auaacuagacaccuggguc

SEQ ID NO: 1694901 - RNA, 19 nt, Artificial Sequence
  Description of Artificial Sequence: Synthetic oligonucleotide
  Sense strand starting at position 2866 of SEQ ID NO: 1561741
ggugucuaguuauuaacaa

SEQ ID NO: 1694902 - RNA, 19 nt, Artificial Sequence
  Description of Artificial Sequence: Synthetic oligonucleotide
  Antisense strand to SEQ ID NO: 1694901
uuguuaauaacuagacacc

SEQ ID NO: 1694903 - RNA, 19 nt, Artificial Sequence
  Description of Artificial Sequence: Synthetic oligonucleotide
  Sense strand starting at position 2889 of SEQ ID NO: 1561741
uccagaugauucuuagguu

SEQ ID NO: 1694904 - RNA, 19 nt, Artificial Sequence
  Description of Artificial Sequence: Synthetic oligonucleotide
  Antisense strand to SEQ ID NO: 1694903
aaccuaagaaucaucugga

SEQ ID NO: 1694905 - RNA, 19 nt, Artificial Sequence
  Description of Artificial Sequence: Synthetic oligonucleotide
  Sense strand starting at position 3239 of SEQ ID NO: 1561741
uaggacuucugguuugaac

SEQ ID NO: 1694906 - RNA, 19 nt, Artificial Sequence
  Description of Artificial Sequence: Synthetic oligonucleotide
  Antisense strand to SEQ ID NO: 1694905
guucaaaccagaaguccua

SEQ ID NO: 1694907 - RNA, 19 nt, Artificial Sequence
  Description of Artificial Sequence: Synthetic oligonucleotide
  Sense strand starting at position 3241 of SEQ ID NO: 1561741
ggacuucugguuugaacug

SEQ ID NO: 1694908 - RNA, 19 nt, Artificial Sequence
  Description of Artificial Sequence: Synthetic oligonucleotide
  Antisense strand to SEQ ID NO: 1694907
caguucaaaccagaagucc

SEQ ID NO: 1694909 - RNA, 19 nt, Artificial Sequence
  Description of Artificial Sequence: Synthetic oligonucleotide
  Sense strand starting at position 3300 of SEQ ID NO: 1561741
gcagauuagagucaccuga

SEQ ID NO: 1694910 - RNA, 19 nt, Artificial Sequence
  Description of Artificial Sequence: Synthetic oligonucleotide
  Antisense strand to SEQ ID NO: 1694909
ucaggugacucuaaucugc

SEQ ID NO: 1694911 - RNA, 19 nt, Artificial Sequence
  Description of Artificial Sequence: Synthetic oligonucleotide
  Sense strand starting at position 3406 of SEQ ID NO: 1561741
guagaauaaauuggagcaa

SEQ ID NO: 1694912 - RNA, 19 nt, Artificial Sequence
  Description of Artificial Sequence: Synthetic oligonucleotide
  Antisense strand to SEQ ID NO: 1694911
uugcuccaauuuauucuac

SEQ ID NO: 1694913 - RNA, 19 nt, Artificial Sequence
  Description of Artificial Sequence: Synthetic oligonucleotide
  Sense strand starting at position 3438 of SEQ ID NO: 1561741
cugucagaagaauguugaa

SEQ ID NO: 1694914 - RNA, 19 nt, Artificial Sequence
  Description of Artificial Sequence: Synthetic oligonucleotide
  Antisense strand to SEQ ID NO: 1694913
uucaacauucuucugacag

SEQ ID NO: 1694915 - RNA, 19 nt, Artificial Sequence
  Description of Artificial Sequence: Synthetic oligonucleotide
  Sense strand starting at position 3485 of SEQ ID NO: 1561741
uuagacugcuacuuagaau

SEQ ID NO: 1694916 - RNA, 19 nt, Artificial Sequence
  Description of Artificial Sequence: Synthetic oligonucleotide
  Antisense strand to SEQ ID NO: 1694915
auucuaaguagcagucuaa

SEQ ID NO: 1694917 - RNA, 19 nt, Artificial Sequence
  Description of Artificial Sequence: Synthetic oligonucleotide
  Sense strand starting at position 3511 of SEQ ID NO: 1561741
gaaguaaagcauuagagca

SEQ ID NO: 1694918 - RNA, 19 nt, Artificial Sequence
  Description of Artificial Sequence: Synthetic oligonucleotide
  Antisense strand to SEQ ID NO: 1694917
ugcucuaaugcuuuacuuc

SEQ ID NO: 1694919 - RNA, 19 nt, Artificial Sequence
  Description of Artificial Sequence: Synthetic oligonucleotide
  Sense strand starting at position 3521 of SEQ ID NO: 1561741
auuagagcaugugugaaau

SEQ ID NO: 1694920 - RNA, 19 nt, Artificial Sequence
  Description of Artificial Sequence: Synthetic oligonucleotide
  Antisense strand to SEQ ID NO: 1694919
auuucacacaugcucuaau

SEQ ID NO: 1694921 - RNA, 19 nt, Artificial Sequence
  Description of Artificial Sequence: Synthetic oligonucleotide
  Sense strand starting at position 521 of SEQ ID NO: 1561742
aggucuaugcuugaguaga

SEQ ID NO: 1694922 - RNA, 19 nt, Artificial Sequence
  Description of Artificial Sequence: Synthetic oligonucleotide
  Antisense strand to SEQ ID NO: 1694921
ucuacucaagcauagaccu

SEQ ID NO: 1694923 - RNA, 19 nt, Artificial Sequence
  Description of Artificial Sequence: Synthetic oligonucleotide
  Sense strand starting at position 523 of SEQ ID NO: 1561742
gucuaugcuugaguagaaa

SEQ ID NO: 1694924 - RNA, 19 nt, Artificial Sequence
  Description of Artificial Sequence: Synthetic oligonucleotide
  Antisense strand to SEQ ID NO: 1694923
uuucuacucaagcauagac

SEQ ID NO: 1694925 - RNA, 19 nt, Artificial Sequence
  Description of Artificial Sequence: Synthetic oligonucleotide
  Sense strand starting at position 616 of SEQ ID NO: 1561742
gaguuacuuguccaagguu

SEQ ID NO: 1694926 - RNA, 19 nt, Artificial Sequence
  Description of Artificial Sequence: Synthetic oligonucleotide
  Antisense strand to SEQ ID NO: 1694925
aaccuuggacaaguaacuc

SEQ ID NO: 1694927 - RNA, 19 nt, Artificial Sequence
  Description of Artificial Sequence: Synthetic oligonucleotide
  Sense strand starting at position 619 of SEQ ID NO: 1561742
uuacuuguccaagguuaaa

SEQ ID NO: 1694928 - RNA, 19 nt, Artificial Sequence
  Description of Artificial Sequence: Synthetic oligonucleotide
  Antisense strand to SEQ ID NO: 1694927
uuuaaccuuggacaaguaa

SEQ ID NO: 1694929 - RNA, 19 nt, Artificial Sequence
  Description of Artificial Sequence: Synthetic oligonucleotide
  Sense strand starting at position 632 of SEQ ID NO: 1561742
guuaaagcacaccagaauu

SEQ ID NO: 1694930 - RNA, 19 nt, Artificial Sequence
  Description of Artificial Sequence: Synthetic oligonucleotide
  Antisense strand to SEQ ID NO: 1694929
aauucuggugugcuuuaac

SEQ ID NO: 1694931 - RNA, 19 nt, Artificial Sequence
  Description of Artificial Sequence: Synthetic oligonucleotide
  Sense strand starting at position 655 of SEQ ID NO: 1561742
acuccagaucccugagcuu

SEQ ID NO: 1694932 - RNA, 19 nt, Artificial Sequence
  Description of Artificial Sequence: Synthetic oligonucleotide
  Antisense strand to SEQ ID NO: 1694931
aagcucagggaucuggagu

SEQ ID NO: 1694933 - RNA, 19 nt, Artificial Sequence
  Description of Artificial Sequence: Synthetic oligonucleotide
  Sense strand starting at position 668 of SEQ ID NO: 1561742
gagcuuaaccacugaagga

SEQ ID NO: 1694934 - RNA, 19 nt, Artificial Sequence
  Description of Artificial Sequence: Synthetic oligonucleotide
  Antisense strand to SEQ ID NO: 1694933
uccuucagugguuaagcuc

SEQ ID NO: 1694935 - RNA, 19 nt, Artificial Sequence
  Description of Artificial Sequence: Synthetic oligonucleotide
  Sense strand starting at position 725 of SEQ ID NO: 1561742
ggcugauuaccuugaacug

SEQ ID NO: 1694936 - RNA, 19 nt, Artificial Sequence
  Description of Artificial Sequence: Synthetic oligonucleotide
  Antisense strand to SEQ ID NO: 1694935
caguucaagguaaucagcc

SEQ ID NO: 1694937 - RNA, 19 nt, Artificial Sequence
  Description of Artificial Sequence: Synthetic oligonucleotide
  Sense strand starting at position 726 of SEQ ID NO: 1561742
gcugauuaccuugaacuga

SEQ ID NO: 1694938 - RNA, 19 nt, Artificial Sequence
  Description of Artificial Sequence: Synthetic oligonucleotide
  Antisense strand to SEQ ID NO: 1694937
ucaguucaagguaaucagc

SEQ ID NO: 1694939 - RNA, 19 nt, Artificial Sequence
  Description of Artificial Sequence: Synthetic oligonucleotide
  Sense strand starting at position 822 of SEQ ID NO: 1561742
auaccucaauugucacgaa

SEQ ID NO: 1694940 - RNA, 19 nt, Artificial Sequence
  Description of Artificial Sequence: Synthetic oligonucleotide
  Antisense strand to SEQ ID NO: 1694939
uucgugacaauugagguau

SEQ ID NO: 1694941 - RNA, 19 nt, Artificial Sequence
  Description of Artificial Sequence: Synthetic oligonucleotide
  Sense strand starting at position 832 of SEQ ID NO: 1561742
ugucacgaauccuuauaaa

SEQ ID NO: 1694942 - RNA, 19 nt, Artificial Sequence
  Description of Artificial Sequence: Synthetic oligonucleotide
  Antisense strand to SEQ ID NO: 1694941
uuuauaaggauucgugaca

SEQ ID NO: 1694943 - RNA, 19 nt, Artificial Sequence
  Description of Artificial Sequence: Synthetic oligonucleotide
  Sense strand starting at position 856 of SEQ ID NO: 1561742
gaagauuaacucggaucac

SEQ ID NO: 1694944 - RNA, 19 nt, Artificial Sequence
  Description of Artificial Sequence: Synthetic oligonucleotide
  Antisense strand to SEQ ID NO: 1694943
gugauccgaguuaaucuuc

SEQ ID NO: 1694945 - RNA, 19 nt, Artificial Sequence
  Description of Artificial Sequence: Synthetic oligonucleotide
  Sense strand starting at position 966 of SEQ ID NO: 1561742
cccauaacuuguguuagag

SEQ ID NO: 1694946 - RNA, 19 nt, Artificial Sequence
  Description of Artificial Sequence: Synthetic oligonucleotide
  Antisense strand to SEQ ID NO: 1694945
cucuaacacaaguuauggg

SEQ ID NO: 1694947 - RNA, 19 nt, Artificial Sequence
  Description of Artificial Sequence: Synthetic oligonucleotide
  Sense strand starting at position 1042 of SEQ ID NO: 1561742
ccauguaggcuuuaaucau

SEQ ID NO: 1694948 - RNA, 19 nt, Artificial Sequence
  Description of Artificial Sequence: Synthetic oligonucleotide
  Antisense strand to SEQ ID NO: 1694947
augauuaaagccuacaugg

SEQ ID NO: 1694949 - RNA, 19 nt, Artificial Sequence
  Description of Artificial Sequence: Synthetic oligonucleotide
  Sense strand starting at position 1048 of SEQ ID NO: 1561742
aggcuuuaaucaucugacu

SEQ ID NO: 1694950 - RNA, 19 nt, Artificial Sequence
  Description of Artificial Sequence: Synthetic oligonucleotide
  Antisense strand to SEQ ID NO: 1694949
agucagaugauuaaagccu

SEQ ID NO: 1694951 - RNA, 19 nt, Artificial Sequence
  Description of Artificial Sequence: Synthetic oligonucleotide
  Sense strand starting at position 1089 of SEQ ID NO: 1561742
gugggacuccuguacguaa

SEQ ID NO: 1694952 - RNA, 19 nt, Artificial Sequence
  Description of Artificial Sequence: Synthetic oligonucleotide
  Antisense strand to SEQ ID NO: 1694951
uuacguacaggagucccac

SEQ ID NO: 1694953 - RNA, 19 nt, Artificial Sequence
  Description of Artificial Sequence: Synthetic oligonucleotide
  Sense strand starting at position 1159 of SEQ ID NO: 1561742
ggagauucuuaaguaccaa

SEQ ID NO: 1694954 - RNA, 19 nt, Artificial Sequence
  Description of Artificial Sequence: Synthetic oligonucleotide
  Antisense strand to SEQ ID NO: 1694953
uugguacuuaagaaucucc

SEQ ID NO: 1694955 - RNA, 19 nt, Artificial Sequence
  Description of Artificial Sequence: Synthetic oligonucleotide
  Sense strand starting at position 1247 of SEQ ID NO: 1561742
ggguuaauaugacucgaau

SEQ ID NO: 1694956 - RNA, 19 nt, Artificial Sequence
  Description of Artificial Sequence: Synthetic oligonucleotide
  Antisense strand to SEQ ID NO: 1694955
auucgagucauauuaaccc

SEQ ID NO: 1694957 - RNA, 19 nt, Artificial Sequence
  Description of Artificial Sequence: Synthetic oligonucleotide
  Sense strand starting at position 1259 of SEQ ID NO: 1561742
cucgaauaauuuccguaug

SEQ ID NO: 1694958 - RNA, 19 nt, Artificial Sequence
  Description of Artificial Sequence: Synthetic oligonucleotide
  Antisense strand to SEQ ID NO: 1694957
cauacggaaauuauucgag

SEQ ID NO: 1694959 - RNA, 19 nt, Artificial Sequence
  Description of Artificial Sequence: Synthetic oligonucleotide
  Sense strand starting at position 1261 of SEQ ID NO: 1561742
cgaauaauuuccguaugcu

SEQ ID NO: 1694960 - RNA, 19 nt, Artificial Sequence
  Description of Artificial Sequence: Synthetic oligonucleotide
  Antisense strand to SEQ ID NO: 1694959
agcauacggaaauuauucg

SEQ ID NO: 1694961 - RNA, 19 nt, Artificial Sequence
  Description of Artificial Sequence: Synthetic oligonucleotide
  Sense strand starting at position 2404 of SEQ ID NO: 1561742
ggguuuaacuccuauuuaa

SEQ ID NO: 1694962 - RNA, 19 nt, Artificial Sequence
  Description of Artificial Sequence: Synthetic oligonucleotide
  Antisense strand to SEQ ID NO: 1694961
uuaaauaggaguuaaaccc

SEQ ID NO: 1694963 - RNA, 19 nt, Artificial Sequence
  Description of Artificial Sequence: Synthetic oligonucleotide
  Sense strand starting at position 2514 of SEQ ID NO: 1561742
gggauaucucaguggcgga

SEQ ID NO: 1694964 - RNA, 19 nt, Artificial Sequence
  Description of Artificial Sequence: Synthetic oligonucleotide
  Antisense strand to SEQ ID NO: 1694963
uccgccacugagauauccc

SEQ ID NO: 1694965 - RNA, 19 nt, Artificial Sequence
  Description of Artificial Sequence: Synthetic oligonucleotide
  Sense strand starting at position 2782 of SEQ ID NO: 1561742
ccgagaucaccuggguaag

SEQ ID NO: 1694966 - RNA, 19 nt, Artificial Sequence
  Description of Artificial Sequence: Synthetic oligonucleotide
  Antisense strand to SEQ ID NO: 1694965
cuuacccaggugaucucgg

SEQ ID NO: 1694967 - RNA, 19 nt, Artificial Sequence
  Description of Artificial Sequence: Synthetic oligonucleotide
  Sense strand starting at position 2783 of SEQ ID NO: 1561742
cgagaucaccuggguaaga

SEQ ID NO: 1694968 - RNA, 19 nt, Artificial Sequence
  Description of Artificial Sequence: Synthetic oligonucleotide
  Antisense strand to SEQ ID NO: 1694967
ucuuacccaggugaucucg

SEQ ID NO: 1694969 - RNA, 19 nt, Artificial Sequence
  Description of Artificial Sequence: Synthetic oligonucleotide
  Sense strand starting at position 2862 of SEQ ID NO: 1561742
guaagcguacggagaacuu

SEQ ID NO: 1694970 - RNA, 19 nt, Artificial Sequence
  Description of Artificial Sequence: Synthetic oligonucleotide
  Antisense strand to SEQ ID NO: 1694969
aaguucuccguacgcuuac

SEQ ID NO: 1694971 - RNA, 19 nt, Artificial Sequence
  Description of Artificial Sequence: Synthetic oligonucleotide
  Sense strand starting at position 2931 of SEQ ID NO: 1561742
ggccgcuuuagauagaaua

SEQ ID NO: 1694972 - RNA, 19 nt, Artificial Sequence
  Description of Artificial Sequence: Synthetic oligonucleotide
  Antisense strand to SEQ ID NO: 1694971
uauucuaucuaaagcggcc

SEQ ID NO: 1694973 - RNA, 19 nt, Artificial Sequence
  Description of Artificial Sequence: Synthetic oligonucleotide
  Sense strand starting at position 2973 of SEQ ID NO: 1561742
cuggaugagugggugaauu

SEQ ID NO: 1694974 - RNA, 19 nt, Artificial Sequence
  Description of Artificial Sequence: Synthetic oligonucleotide
  Antisense strand to SEQ ID NO: 1694973
aauucacccacucauccag

SEQ ID NO: 1694975 - RNA, 19 nt, Artificial Sequence
  Description of Artificial Sequence: Synthetic oligonucleotide
  Sense strand starting at position 2997 of SEQ ID NO: 1561742
augagaaccuccuugcaga

SEQ ID NO: 1694976 - RNA, 19 nt, Artificial Sequence
  Description of Artificial Sequence: Synthetic oligonucleotide
  Antisense strand to SEQ ID NO: 1694975
ucugcaaggagguucucau

SEQ ID NO: 1694977 - RNA, 19 nt, Artificial Sequence
  Description of Artificial Sequence: Synthetic oligonucleotide
  Sense strand starting at position 3104 of SEQ ID NO: 1561742
ccgagagcccgguaaauca

SEQ ID NO: 1694978 - RNA, 19 nt, Artificial Sequence
  Description of Artificial Sequence: Synthetic oligonucleotide
  Antisense strand to SEQ ID NO: 1694977
ugauuuaccgggcucucgg

SEQ ID NO: 1694979 - RNA, 19 nt, Artificial Sequence
  Description of Artificial Sequence: Synthetic oligonucleotide
  Sense strand starting at position 3140 of SEQ ID NO: 1561742
gacccaggugucuaguuau

SEQ ID NO: 1694980 - RNA, 19 nt, Artificial Sequence
  Description of Artificial Sequence: Synthetic oligonucleotide
  Antisense strand to SEQ ID NO: 1694979
auaacuagacaccuggguc

SEQ ID NO: 1694981 - RNA, 19 nt, Artificial Sequence
  Description of Artificial Sequence: Synthetic oligonucleotide
  Sense strand starting at position 3146 of SEQ ID NO: 1561742
ggugucuaguuauuaacaa

SEQ ID NO: 1694982 - RNA, 19 nt, Artificial Sequence
  Description of Artificial Sequence: Synthetic oligonucleotide
  Antisense strand to SEQ ID NO: 1694981
uuguuaauaacuagacacc

SEQ ID NO: 1694983 - RNA, 19 nt, Artificial Sequence
  Description of Artificial Sequence: Synthetic oligonucleotide
  Sense strand starting at position 3169 of SEQ ID NO: 1561742
uccagaugauucuuagguu

SEQ ID NO: 1694984 - RNA, 19 nt, Artificial Sequence
  Description of Artificial Sequence: Synthetic oligonucleotide
  Antisense strand to SEQ ID NO: 1694983
aaccuaagaaucaucugga

SEQ ID NO: 1694985 - RNA, 19 nt, Artificial Sequence
  Description of Artificial Sequence: Synthetic oligonucleotide
  Sense strand starting at position 3519 of SEQ ID NO: 1561742
uaggacuucugguuugaac

SEQ ID NO: 1694986 - RNA, 19 nt, Artificial Sequence
  Description of Artificial Sequence: Synthetic oligonucleotide
  Antisense strand to SEQ ID NO: 1694985
guucaaaccagaaguccua

SEQ ID NO: 1694987 - RNA, 19 nt, Artificial Sequence
  Description of Artificial Sequence: Synthetic oligonucleotide
  Sense strand starting at position 3521 of SEQ ID NO: 1561742
ggacuucugguuugaacug

SEQ ID NO: 1694988 - RNA, 19 nt, Artificial Sequence
  Description of Artificial Sequence: Synthetic oligonucleotide
  Antisense strand to SEQ ID NO: 1694987
caguucaaaccagaagucc

SEQ ID NO: 1694989 - RNA, 19 nt, Artificial Sequence
  Description of Artificial Sequence: Synthetic oligonucleotide
  Sense strand starting at position 3580 of SEQ ID NO: 1561742
gcagauuagagucaccuga

SEQ ID NO: 1694990 - RNA, 19 nt, Artificial Sequence
  Description of Artificial Sequence: Synthetic oligonucleotide
  Antisense strand to SEQ ID NO: 1694989
ucaggugacucuaaucugc

SEQ ID NO: 1694991 - RNA, 19 nt, Artificial Sequence
  Description of Artificial Sequence: Synthetic oligonucleotide
  Sense strand starting at position 3686 of SEQ ID NO: 1561742
guagaauaaauuggagcaa

SEQ ID NO: 1694992 - RNA, 19 nt, Artificial Sequence
  Description of Artificial Sequence: Synthetic oligonucleotide
  Antisense strand to SEQ ID NO: 1694991
uugcuccaauuuauucuac

SEQ ID NO: 1694993 - RNA, 19 nt, Artificial Sequence
  Description of Artificial Sequence: Synthetic oligonucleotide
  Sense strand starting at position 3718 of SEQ ID NO: 1561742
cugucagaagaauguugaa

SEQ ID NO: 1694994 - RNA, 19 nt, Artificial Sequence
  Description of Artificial Sequence: Synthetic oligonucleotide
  Antisense strand to SEQ ID NO: 1694993
uucaacauucuucugacag

SEQ ID NO: 1694995 - RNA, 19 nt, Artificial Sequence
  Description of Artificial Sequence: Synthetic oligonucleotide
  Sense strand starting at position 3765 of SEQ ID NO: 1561742
uuagacugcuacuuagaau

SEQ ID NO: 1694996 - RNA, 19 nt, Artificial Sequence
  Description of Artificial Sequence: Synthetic oligonucleotide
  Antisense strand to SEQ ID NO: 1694995
auucuaaguagcagucuaa

SEQ ID NO: 1694997 - RNA, 19 nt, Artificial Sequence
  Description of Artificial Sequence: Synthetic oligonucleotide
  Sense strand starting at position 3791 of SEQ ID NO: 1561742
gaaguaaagcauuagagca

SEQ ID NO: 1694998 - RNA, 19 nt, Artificial Sequence
  Description of Artificial Sequence: Synthetic oligonucleotide
  Antisense strand to SEQ ID NO: 1694997
ugcucuaaugcuuuacuuc

SEQ ID NO: 1694999 - RNA, 19 nt, Artificial Sequence
  Description of Artificial Sequence: Synthetic oligonucleotide
  Sense strand starting at position 3801 of SEQ ID NO: 1561742
auuagagcaugugugaaau

SEQ ID NO: 1695000 - RNA, 19 nt, Artificial Sequence
  Description of Artificial Sequence: Synthetic oligonucleotide
  Antisense strand to SEQ ID NO: 1694999
auuucacacaugcucuaau

SEQ ID NO: 1695001 - RNA, 19 nt, Artificial Sequence
  Description of Artificial Sequence: Synthetic oligonucleotide
  Sense strand starting at position 388 of SEQ ID NO: 1561743
aggucuaugcuugaguaga

SEQ ID NO: 1695002 - RNA, 19 nt, Artificial Sequence
  Description of Artificial Sequence: Synthetic oligonucleotide
  Antisense strand to SEQ ID NO: 1695001
ucuacucaagcauagaccu

SEQ ID NO: 1695003 - RNA, 19 nt, Artificial Sequence
  Description of Artificial Sequence: Synthetic oligonucleotide
  Sense strand starting at position 390 of SEQ ID NO: 1561743
gucuaugcuugaguagaaa

SEQ ID NO: 1695004 - RNA, 19 nt, Artificial Sequence
  Description of Artificial Sequence: Synthetic oligonucleotide
  Antisense strand to SEQ ID NO: 1695003
uuucuacucaagcauagac

SEQ ID NO: 1695005 - RNA, 19 nt, Artificial Sequence
  Description of Artificial Sequence: Synthetic oligonucleotide
  Sense strand starting at position 483 of SEQ ID NO: 1561743
gaguuacuuguccaagguu

SEQ ID NO: 1695006 - RNA, 19 nt, Artificial Sequence
  Description of Artificial Sequence: Synthetic oligonucleotide
  Antisense strand to SEQ ID NO: 1695005
aaccuuggacaaguaacuc

SEQ ID NO: 1695007 - RNA, 19 nt, Artificial Sequence
  Description of Artificial Sequence: Synthetic oligonucleotide
  Sense strand starting at position 486 of SEQ ID NO: 1561743
uuacuuguccaagguuaaa

SEQ ID NO: 1695008 - RNA, 19 nt, Artificial Sequence
  Description of Artificial Sequence: Synthetic oligonucleotide
  Antisense strand to SEQ ID NO: 1695007
uuuaaccuuggacaaguaa

SEQ ID NO: 1695009 - RNA, 19 nt, Artificial Sequence
  Description of Artificial Sequence: Synthetic oligonucleotide
  Sense strand starting at position 499 of SEQ ID NO: 1561743
guuaaagcacaccagaauu

SEQ ID NO: 1695010 - RNA, 19 nt, Artificial Sequence
  Description of Artificial Sequence: Synthetic oligonucleotide
  Antisense strand to SEQ ID NO: 1695009
aauucuggugugcuuuaac

SEQ ID NO: 1695011 - RNA, 19 nt, Artificial Sequence
  Description of Artificial Sequence: Synthetic oligonucleotide
  Sense strand starting at position 522 of SEQ ID NO: 1561743
acuccagaucccugagcuu

SEQ ID NO: 1695012 - RNA, 19 nt, Artificial Sequence
  Description of Artificial Sequence: Synthetic oligonucleotide
  Antisense strand to SEQ ID NO: 1695011
aagcucagggaucuggagu

SEQ ID NO: 1695013 - RNA, 19 nt, Artificial Sequence
  Description of Artificial Sequence: Synthetic oligonucleotide
  Sense strand starting at position 535 of SEQ ID NO: 1561743
gagcuuaaccacugaagga

SEQ ID NO: 1695014 - RNA, 19 nt, Artificial Sequence
  Description of Artificial Sequence: Synthetic oligonucleotide
  Antisense strand to SEQ ID NO: 1695013
uccuucagugguuaagcuc

SEQ ID NO: 1695015 - RNA, 19 nt, Artificial Sequence
  Description of Artificial Sequence: Synthetic oligonucleotide
  Sense strand starting at position 592 of SEQ ID NO: 1561743
ggcugauuaccuugaacug

SEQ ID NO: 1695016 - RNA, 19 nt, Artificial Sequence
  Description of Artificial Sequence: Synthetic oligonucleotide
  Antisense strand to SEQ ID NO: 1695015
caguucaagguaaucagcc

SEQ ID NO: 1695017 - RNA, 19 nt, Artificial Sequence
  Description of Artificial Sequence: Synthetic oligonucleotide
  Sense strand starting at position 593 of SEQ ID NO: 1561743
gcugauuaccuugaacuga

SEQ ID NO: 1695018 - RNA, 19 nt, Artificial Sequence
  Description of Artificial Sequence: Synthetic oligonucleotide
  Antisense strand to SEQ ID NO: 1695017
ucaguucaagguaaucagc

SEQ ID NO: 1695019 - RNA, 19 nt, Artificial Sequence
  Description of Artificial Sequence: Synthetic oligonucleotide
  Sense strand starting at position 689 of SEQ ID NO: 1561743
auaccucaauugucacgaa

SEQ ID NO: 1695020 - RNA, 19 nt, Artificial Sequence
  Description of Artificial Sequence: Synthetic oligonucleotide
  Antisense strand to SEQ ID NO: 1695019
uucgugacaauugagguau

SEQ ID NO: 1695021 - RNA, 19 nt, Artificial Sequence
  Description of Artificial Sequence: Synthetic oligonucleotide
  Sense strand starting at position 699 of SEQ ID NO: 1561743
ugucacgaauccuuauaaa

SEQ ID NO: 1695022 - RNA, 19 nt, Artificial Sequence
  Description of Artificial Sequence: Synthetic oligonucleotide
  Antisense strand to SEQ ID NO: 1695021
uuuauaaggauucgugaca

SEQ ID NO: 1695023 - RNA, 19 nt, Artificial Sequence
  Description of Artificial Sequence: Synthetic oligonucleotide
  Sense strand starting at position 723 of SEQ ID NO: 1561743
gaagauuaacucggaucac

SEQ ID NO: 1695024 - RNA, 19 nt, Artificial Sequence
  Description of Artificial Sequence: Synthetic oligonucleotide
  Antisense strand to SEQ ID NO: 1695023
gugauccgaguuaaucuuc

SEQ ID NO: 1695025 - RNA, 19 nt, Artificial Sequence
  Description of Artificial Sequence: Synthetic oligonucleotide
  Sense strand starting at position 833 of SEQ ID NO: 1561743
cccauaacuuguguuagag

SEQ ID NO: 1695026 - RNA, 19 nt, Artificial Sequence
  Description of Artificial Sequence: Synthetic oligonucleotide
  Antisense strand to SEQ ID NO: 1695025
cucuaacacaaguuauggg

SEQ ID NO: 1695027 - RNA, 19 nt, Artificial Sequence
  Description of Artificial Sequence: Synthetic oligonucleotide
  Sense strand starting at position 909 of SEQ ID NO: 1561743
ccauguaggcuuuaaucau

SEQ ID NO: 1695028 - RNA, 19 nt, Artificial Sequence
  Description of Artificial Sequence: Synthetic oligonucleotide
  Antisense strand to SEQ ID NO: 1695027
augauuaaagccuacaugg

SEQ ID NO: 1695029 - RNA, 19 nt, Artificial Sequence
  Description of Artificial Sequence: Synthetic oligonucleotide
  Sense strand starting at position 915 of SEQ ID NO: 1561743
aggcuuuaaucaucugacu

SEQ ID NO: 1695030 - RNA, 19 nt, Artificial Sequence
  Description of Artificial Sequence: Synthetic oligonucleotide
  Antisense strand to SEQ ID NO: 1695029
agucagaugauuaaagccu

SEQ ID NO: 1695031 - RNA, 19 nt, Artificial Sequence
  Description of Artificial Sequence: Synthetic oligonucleotide
  Sense strand starting at position 956 of SEQ ID NO: 1561743
gugggacuccuguacguaa

SEQ ID NO: 1695032 - RNA, 19 nt, Artificial Sequence
  Description of Artificial Sequence: Synthetic oligonucleotide
  Antisense strand to SEQ ID NO: 1695031
uuacguacaggagucccac

SEQ ID NO: 1695033 - RNA, 19 nt, Artificial Sequence
  Description of Artificial Sequence: Synthetic oligonucleotide
  Sense strand starting at position 1026 of SEQ ID NO: 1561743
ggagauucuuaaguaccaa

SEQ ID NO: 1695034 - RNA, 19 nt, Artificial Sequence
  Description of Artificial Sequence: Synthetic oligonucleotide
  Antisense strand to SEQ ID NO: 1695033
uugguacuuaagaaucucc

SEQ ID NO: 1695035 - RNA, 19 nt, Artificial Sequence
  Description of Artificial Sequence: Synthetic oligonucleotide
  Sense strand starting at position 1114 of SEQ ID NO: 1561743
ggguuaauaugacucgaau

SEQ ID NO: 1695036 - RNA, 19 nt, Artificial Sequence
  Description of Artificial Sequence: Synthetic oligonucleotide
  Antisense strand to SEQ ID NO: 1695035
auucgagucauauuaaccc

SEQ ID NO: 1695037 - RNA, 19 nt, Artificial Sequence
  Description of Artificial Sequence: Synthetic oligonucleotide
  Sense strand starting at position 1126 of SEQ ID NO: 1561743
cucgaauaauuuccguaug

SEQ ID NO: 1695038 - RNA, 19 nt, Artificial Sequence
  Description of Artificial Sequence: Synthetic oligonucleotide
  Antisense strand to SEQ ID NO: 1695037
cauacggaaauuauucgag

SEQ ID NO: 1695039 - RNA, 19 nt, Artificial Sequence
  Description of Artificial Sequence: Synthetic oligonucleotide
  Sense strand starting at position 1128 of SEQ ID NO: 1561743
cgaauaauuuccguaugcu

SEQ ID NO: 1695040 - RNA, 19 nt, Artificial Sequence
  Description of Artificial Sequence: Synthetic oligonucleotide
  Antisense strand to SEQ ID NO: 1695039
agcauacggaaauuauucg

SEQ ID NO: 1695041 - RNA, 19 nt, Artificial Sequence
  Description of Artificial Sequence: Synthetic oligonucleotide
  Sense strand starting at position 2271 of SEQ ID NO: 1561743
ggguuuaacuccuauuuaa

SEQ ID NO: 1695042 - RNA, 19 nt, Artificial Sequence
  Description of Artificial Sequence: Synthetic oligonucleotide
  Antisense strand to SEQ ID NO: 1695041
uuaaauaggaguuaaaccc

SEQ ID NO: 1695043 - RNA, 19 nt, Artificial Sequence
  Description of Artificial Sequence: Synthetic oligonucleotide
  Sense strand starting at position 2381 of SEQ ID NO: 1561743
gggauaucucaguggcgga

SEQ ID NO: 1695044 - RNA, 19 nt, Artificial Sequence
  Description of Artificial Sequence: Synthetic oligonucleotide
  Antisense strand to SEQ ID NO: 1695043
uccgccacugagauauccc

SEQ ID NO: 1695045 - RNA, 19 nt, Artificial Sequence
  Description of Artificial Sequence: Synthetic oligonucleotide
  Sense strand starting at position 2649 of SEQ ID NO: 1561743
ccgagaucaccuggguaag

SEQ ID NO: 1695046 - RNA, 19 nt, Artificial Sequence
  Description of Artificial Sequence: Synthetic oligonucleotide
  Antisense strand to SEQ ID NO: 1695045
cuuacccaggugaucucgg

SEQ ID NO: 1695047 - RNA, 19 nt, Artificial Sequence
  Description of Artificial Sequence: Synthetic oligonucleotide
  Sense strand starting at position 2650 of SEQ ID NO: 1561743
cgagaucaccuggguaaga

SEQ ID NO: 1695048 - RNA, 19 nt, Artificial Sequence
  Description of Artificial Sequence: Synthetic oligonucleotide
  Antisense strand to SEQ ID NO: 1695047
ucuuacccaggugaucucg

SEQ ID NO: 1695049 - RNA, 19 nt, Artificial Sequence
  Description of Artificial Sequence: Synthetic oligonucleotide
  Sense strand starting at position 2729 of SEQ ID NO: 1561743
guaagcguacggagaacuu

SEQ ID NO: 1695050 - RNA, 19 nt, Artificial Sequence
  Description of Artificial Sequence: Synthetic oligonucleotide
  Antisense strand to SEQ ID NO: 1695049
aaguucuccguacgcuuac

SEQ ID NO: 1695051 - RNA, 19 nt, Artificial Sequence
  Description of Artificial Sequence: Synthetic oligonucleotide
  Sense strand starting at position 2798 of SEQ ID NO: 1561743
ggccgcuuuagauagaaua

SEQ ID NO: 1695052 - RNA, 19 nt, Artificial Sequence
  Description of Artificial Sequence: Synthetic oligonucleotide
  Antisense strand to SEQ ID NO: 1695051
uauucuaucuaaagcggcc

SEQ ID NO: 1695053 - RNA, 19 nt, Artificial Sequence
  Description of Artificial Sequence: Synthetic oligonucleotide
  Sense strand starting at position 2840 of SEQ ID NO: 1561743
cuggaugagugggugaauu

SEQ ID NO: 1695054 - RNA, 19 nt, Artificial Sequence
  Description of Artificial Sequence: Synthetic oligonucleotide
  Antisense strand to SEQ ID NO: 1695053
aauucacccacucauccag

SEQ ID NO: 1695055 - RNA, 19 nt, Artificial Sequence
  Description of Artificial Sequence: Synthetic oligonucleotide
  Sense strand starting at position 2864 of SEQ ID NO: 1561743
augagaaccuccuugcaga

SEQ ID NO: 1695056 - RNA, 19 nt, Artificial Sequence
  Description of Artificial Sequence: Synthetic oligonucleotide
  Antisense strand to SEQ ID NO: 1695055
ucugcaaggagguucucau

SEQ ID NO: 1695057 - RNA, 19 nt, Artificial Sequence
  Description of Artificial Sequence: Synthetic oligonucleotide
  Sense strand starting at position 2971 of SEQ ID NO: 1561743
ccgagagcccgguaaauca

SEQ ID NO: 1695058 - RNA, 19 nt, Artificial Sequence
  Description of Artificial Sequence: Synthetic oligonucleotide
  Antisense strand to SEQ ID NO: 1695057
ugauuuaccgggcucucgg

SEQ ID NO: 1695059 - RNA, 19 nt, Artificial Sequence
  Description of Artificial Sequence: Synthetic oligonucleotide
  Sense strand starting at position 3007 of SEQ ID NO: 1561743
gacccaggugucuaguuau

SEQ ID NO: 1695060 - RNA, 19 nt, Artificial Sequence
  Description of Artificial Sequence: Synthetic oligonucleotide
  Antisense strand to SEQ ID NO: 1695059
auaacuagacaccuggguc

SEQ ID NO: 1695061 - RNA, 19 nt, Artificial Sequence
  Description of Artificial Sequence: Synthetic oligonucleotide
  Sense strand starting at position 3013 of SEQ ID NO: 1561743
ggugucuaguuauuaacaa

SEQ ID NO: 1695062 - RNA, 19 nt, Artificial Sequence
  Description of Artificial Sequence: Synthetic oligonucleotide
  Antisense strand to SEQ ID NO: 1695061
uuguuaauaacuagacacc

SEQ ID NO: 1695063 - RNA, 19 nt, Artificial Sequence
  Description of Artificial Sequence: Synthetic oligonucleotide
  Sense strand starting at position 3036 of SEQ ID NO: 1561743
uccagaugauucuuagguu

SEQ ID NO: 1695064 - RNA, 19 nt, Artificial Sequence
  Description of Artificial Sequence: Synthetic oligonucleotide
  Antisense strand to SEQ ID NO: 1695063
aaccuaagaaucaucugga

SEQ ID NO: 1695065 - RNA, 19 nt, Artificial Sequence
  Description of Artificial Sequence: Synthetic oligonucleotide
  Sense strand starting at position 3386 of SEQ ID NO: 1561743
uaggacuucugguuugaac

SEQ ID NO: 1695066 - RNA, 19 nt, Artificial Sequence
  Description of Artificial Sequence: Synthetic oligonucleotide
  Antisense strand to SEQ ID NO: 1695065
guucaaaccagaaguccua

SEQ ID NO: 1695067 - RNA, 19 nt, Artificial Sequence
  Description of Artificial Sequence: Synthetic oligonucleotide
  Sense strand starting at position 3388 of SEQ ID NO: 1561743
ggacuucugguuugaacug

SEQ ID NO: 1695068 - RNA, 19 nt, Artificial Sequence
  Description of Artificial Sequence: Synthetic oligonucleotide
  Antisense strand to SEQ ID NO: 1695067
caguucaaaccagaagucc

SEQ ID NO: 1695069 - RNA, 19 nt, Artificial Sequence
  Description of Artificial Sequence: Synthetic oligonucleotide
  Sense strand starting at position 3447 of SEQ ID NO: 1561743
gcagauuagagucaccuga

SEQ ID NO: 1695070 - RNA, 19 nt, Artificial Sequence
  Description of Artificial Sequence: Synthetic oligonucleotide
  Antisense strand to SEQ ID NO: 1695069
ucaggugacucuaaucugc

SEQ ID NO: 1695071 - RNA, 19 nt, Artificial Sequence
  Description of Artificial Sequence: Synthetic oligonucleotide
  Sense strand starting at position 3553 of SEQ ID NO: 1561743
guagaauaaauuggagcaa

SEQ ID NO: 1695072 - RNA, 19 nt, Artificial Sequence
  Description of Artificial Sequence: Synthetic oligonucleotide
  Antisense strand to SEQ ID NO: 1695071
uugcuccaauuuauucuac

SEQ ID NO: 1695073 - RNA, 19 nt, Artificial Sequence
  Description of Artificial Sequence: Synthetic oligonucleotide
  Sense strand starting at position 3585 of SEQ ID NO: 1561743
cugucagaagaauguugaa

SEQ ID NO: 1695074 - RNA, 19 nt, Artificial Sequence
  Description of Artificial Sequence: Synthetic oligonucleotide
  Antisense strand to SEQ ID NO: 1695073
uucaacauucuucugacag

SEQ ID NO: 1695075 - RNA, 19 nt, Artificial Sequence
  Description of Artificial Sequence: Synthetic oligonucleotide
  Sense strand starting at position 3632 of SEQ ID NO: 1561743
uuagacugcuacuuagaau

SEQ ID NO: 1695076 - RNA, 19 nt, Artificial Sequence
  Description of Artificial Sequence: Synthetic oligonucleotide
  Antisense strand to SEQ ID NO: 1695075
auucuaaguagcagucuaa

SEQ ID NO: 1695077 - RNA, 19 nt, Artificial Sequence
  Description of Artificial Sequence: Synthetic oligonucleotide
  Sense strand starting at position 3658 of SEQ ID NO: 1561743
gaaguaaagcauuagagca

SEQ ID NO: 1695078 - RNA, 19 nt, Artificial Sequence
  Description of Artificial Sequence: Synthetic oligonucleotide
  Antisense strand to SEQ ID NO: 1695077
ugcucuaaugcuuuacuuc

SEQ ID NO: 1695079 - RNA, 19 nt, Artificial Sequence
  Description of Artificial Sequence: Synthetic oligonucleotide
  Sense strand starting at position 3668 of SEQ ID NO: 1561743
auuagagcaugugugaaau

SEQ ID NO: 1695080 - RNA, 19 nt, Artificial Sequence
  Description of Artificial Sequence: Synthetic oligonucleotide
  Antisense strand to SEQ ID NO: 1695079
auuucacacaugcucuaau

SEQ ID NO: 1695081 - RNA, 19 nt, Artificial Sequence
  Description of Artificial Sequence: Synthetic oligonucleotide
  Sense strand starting at position 101 of SEQ ID NO: 1561744
uuaccauaugugggaagau

SEQ ID NO: 1695082 - RNA, 19 nt, Artificial Sequence
  Description of Artificial Sequence: Synthetic oligonucleotide
  Antisense strand to SEQ ID NO: 1695081
aucuucccacauaugguaa

SEQ ID NO: 1695083 - RNA, 19 nt, Artificial Sequence
  Description of Artificial Sequence: Synthetic oligonucleotide
  Sense strand starting at position 121 of SEQ ID NO: 1561744
ugcauagguuauguggaaa

SEQ ID NO: 1695084 - RNA, 19 nt, Artificial Sequence
  Description of Artificial Sequence: Synthetic oligonucleotide
  Antisense strand to SEQ ID NO: 1695083
uuuccacauaaccuaugca

SEQ ID NO: 1695085 - RNA, 19 nt, Artificial Sequence
  Description of Artificial Sequence: Synthetic oligonucleotide
  Sense strand starting at position 228 of SEQ ID NO: 1561744
gggacuguauaguuuauua

SEQ ID NO: 1695086 - RNA, 19 nt, Artificial Sequence
  Description of Artificial Sequence: Synthetic oligonucleotide
  Antisense strand to SEQ ID NO: 1695085
uaauaaacuauacaguccc

SEQ ID NO: 1695087 - RNA, 19 nt, Artificial Sequence
  Description of Artificial Sequence: Synthetic oligonucleotide
  Sense strand starting at position 929 of SEQ ID NO: 1561744
agaguuuaauccucaguga

SEQ ID NO: 1695088 - RNA, 19 nt, Artificial Sequence
  Description of Artificial Sequence: Synthetic oligonucleotide
  Antisense strand to SEQ ID NO: 1695087
ucacugaggauuaaacucu

SEQ ID NO: 1695089 - RNA, 19 nt, Artificial Sequence
  Description of Artificial Sequence: Synthetic oligonucleotide
  Sense strand starting at position 930 of SEQ ID NO: 1561744
gaguuuaauccucagugaa

SEQ ID NO: 1695090 - RNA, 19 nt, Artificial Sequence
  Description of Artificial Sequence: Synthetic oligonucleotide
  Antisense strand to SEQ ID NO: 1695089
uucacugaggauuaaacuc

SEQ ID NO: 1695091 - RNA, 19 nt, Artificial Sequence
  Description of Artificial Sequence: Synthetic oligonucleotide
  Sense strand starting at position 932 of SEQ ID NO: 1561744
guuuaauccucagugaaca

SEQ ID NO: 1695092 - RNA, 19 nt, Artificial Sequence
  Description of Artificial Sequence: Synthetic oligonucleotide
  Antisense strand to SEQ ID NO: 1695091
uguucacugaggauuaaac

SEQ ID NO: 1695093 - RNA, 19 nt, Artificial Sequence
  Description of Artificial Sequence: Synthetic oligonucleotide
  Sense strand starting at position 964 of SEQ ID NO: 1561744
guguauuggaguuagaguu

SEQ ID NO: 1695094 - RNA, 19 nt, Artificial Sequence
  Description of Artificial Sequence: Synthetic oligonucleotide
  Antisense strand to SEQ ID NO: 1695093
aacucuaacuccaauacac

SEQ ID NO: 1695095 - RNA, 19 nt, Artificial Sequence
  Description of Artificial Sequence: Synthetic oligonucleotide
  Sense strand starting at position 971 of SEQ ID NO: 1561744
ggaguuagaguucaugcca

SEQ ID NO: 1695096 - RNA, 19 nt, Artificial Sequence
  Description of Artificial Sequence: Synthetic oligonucleotide
  Antisense strand to SEQ ID NO: 1695095
uggcaugaacucuaacucc

SEQ ID NO: 1695097 - RNA, 19 nt, Artificial Sequence
  Description of Artificial Sequence: Synthetic oligonucleotide
  Sense strand starting at position 982 of SEQ ID NO: 1561744
ucaugccaguccuuaggaa

SEQ ID NO: 1695098 - RNA, 19 nt, Artificial Sequence
  Description of Artificial Sequence: Synthetic oligonucleotide
  Antisense strand to SEQ ID NO: 1695097
uuccuaaggacuggcauga

SEQ ID NO: 1695099 - RNA, 19 nt, Artificial Sequence
  Description of Artificial Sequence: Synthetic oligonucleotide
  Sense strand starting at position 983 of SEQ ID NO: 1561744
caugccaguccuuaggaaa

SEQ ID NO: 1695100 - RNA, 19 nt, Artificial Sequence
  Description of Artificial Sequence: Synthetic oligonucleotide
  Antisense strand to SEQ ID NO: 1695099
uuuccuaaggacuggcaug

SEQ ID NO: 1695101 - RNA, 19 nt, Artificial Sequence
  Description of Artificial Sequence: Synthetic oligonucleotide
  Sense strand starting at position 1169 of SEQ ID NO: 1561744
ugcugaugucuugggagag

SEQ ID NO: 1695102 - RNA, 19 nt, Artificial Sequence
  Description of Artificial Sequence: Synthetic oligonucleotide
  Antisense strand to SEQ ID NO: 1695101
cucucccaagacaucagca

SEQ ID NO: 1695103 - RNA, 19 nt, Artificial Sequence
  Description of Artificial Sequence: Synthetic oligonucleotide
  Sense strand starting at position 1191 of SEQ ID NO: 1561744
gguacaaaccugcaucuga

SEQ ID NO: 1695104 - RNA, 19 nt, Artificial Sequence
  Description of Artificial Sequence: Synthetic oligonucleotide
  Antisense strand to SEQ ID NO: 1695103
ucagaugcagguuuguacc

SEQ ID NO: 1695105 - RNA, 19 nt, Artificial Sequence
  Description of Artificial Sequence: Synthetic oligonucleotide
  Sense strand starting at position 1634 of SEQ ID NO: 1561744
uggugauccaggcaagcaa

SEQ ID NO: 1695106 - RNA, 19 nt, Artificial Sequence
  Description of Artificial Sequence: Synthetic oligonucleotide
  Antisense strand to SEQ ID NO: 1695105
uugcuugccuggaucacca

SEQ ID NO: 1695107 - RNA, 19 nt, Artificial Sequence
  Description of Artificial Sequence: Synthetic oligonucleotide
  Sense strand starting at position 1736 of SEQ ID NO: 1561744
uacagugcucugcaauaag

SEQ ID NO: 1695108 - RNA, 19 nt, Artificial Sequence
  Description of Artificial Sequence: Synthetic oligonucleotide
  Antisense strand to SEQ ID NO: 1695107
cuuauugcagagcacugua

SEQ ID NO: 1695109 - RNA, 19 nt, Artificial Sequence
  Description of Artificial Sequence: Synthetic oligonucleotide
  Sense strand starting at position 1762 of SEQ ID NO: 1561744
guuguagauagagaagcau

SEQ ID NO: 1695110 - RNA, 19 nt, Artificial Sequence
  Description of Artificial Sequence: Synthetic oligonucleotide
  Antisense strand to SEQ ID NO: 1695109
augcuucucuaucuacaac

SEQ ID NO: 1695111 - RNA, 19 nt, Artificial Sequence
  Description of Artificial Sequence: Synthetic oligonucleotide
  Sense strand starting at position 1852 of SEQ ID NO: 1561744
ggagcaaggagugguacau

SEQ ID NO: 1695112 - RNA, 19 nt, Artificial Sequence
  Description of Artificial Sequence: Synthetic oligonucleotide
  Antisense strand to SEQ ID NO: 1695111
auguaccacuccuugcucc

SEQ ID NO: 1695113 - RNA, 19 nt, Artificial Sequence
  Description of Artificial Sequence: Synthetic oligonucleotide
  Sense strand starting at position 1864 of SEQ ID NO: 1561744
gguacauuauucuuaccuu

SEQ ID NO: 1695114 - RNA, 19 nt, Artificial Sequence
  Description of Artificial Sequence: Synthetic oligonucleotide
  Antisense strand to SEQ ID NO: 1695113
aagguaagaauaauguacc

SEQ ID NO: 1695115 - RNA, 19 nt, Artificial Sequence
  Description of Artificial Sequence: Synthetic oligonucleotide
  Sense strand starting at position 2109 of SEQ ID NO: 1561744
uuuagaaauuauccgcaga

SEQ ID NO: 1695116 - RNA, 19 nt, Artificial Sequence
  Description of Artificial Sequence: Synthetic oligonucleotide
  Antisense strand to SEQ ID NO: 1695115
ucugcggauaauuucuaaa

SEQ ID NO: 1695117 - RNA, 19 nt, Artificial Sequence
  Description of Artificial Sequence: Synthetic oligonucleotide
  Sense strand starting at position 2161 of SEQ ID NO: 1561744
gcccaugaaugcccuauuu

SEQ ID NO: 1695118 - RNA, 19 nt, Artificial Sequence
  Description of Artificial Sequence: Synthetic oligonucleotide
  Antisense strand to SEQ ID NO: 1695117
aaauagggcauucaugggc

SEQ ID NO: 1695119 - RNA, 19 nt, Artificial Sequence
  Description of Artificial Sequence: Synthetic oligonucleotide
  Sense strand starting at position 2245 of SEQ ID NO: 1561744
gugggugaaucaccagaga

SEQ ID NO: 1695120 - RNA, 19 nt, Artificial Sequence
  Description of Artificial Sequence: Synthetic oligonucleotide
  Antisense strand to SEQ ID NO: 1695119
ucucuggugauucacccac

SEQ ID NO: 1695121 - RNA, 19 nt, Artificial Sequence
  Description of Artificial Sequence: Synthetic oligonucleotide
  Sense strand starting at position 2549 of SEQ ID NO: 1561744
guugaugaaaugugaauaa

SEQ ID NO: 1695122 - RNA, 19 nt, Artificial Sequence
  Description of Artificial Sequence: Synthetic oligonucleotide
  Antisense strand to SEQ ID NO: 1695121
uuauucacauuucaucaac

SEQ ID NO: 1695123 - RNA, 19 nt, Artificial Sequence
  Description of Artificial Sequence: Synthetic oligonucleotide
  Sense strand starting at position 2569 of SEQ ID NO: 1561744
aucugcagauuaguuaaua

SEQ ID NO: 1695124 - RNA, 19 nt, Artificial Sequence
  Description of Artificial Sequence: Synthetic oligonucleotide
  Antisense strand to SEQ ID NO: 1695123
uauuaacuaaucugcagau

SEQ ID NO: 1695125 - RNA, 19 nt, Artificial Sequence
  Description of Artificial Sequence: Synthetic oligonucleotide
  Sense strand starting at position 2570 of SEQ ID NO: 1561744
ucugcagauuaguuaauag

SEQ ID NO: 1695126 - RNA, 19 nt, Artificial Sequence
  Description of Artificial Sequence: Synthetic oligonucleotide
  Antisense strand to SEQ ID NO: 1695125
cuauuaacuaaucugcaga

SEQ ID NO: 1695127 - RNA, 19 nt, Artificial Sequence
  Description of Artificial Sequence: Synthetic oligonucleotide
  Sense strand starting at position 2597 of SEQ ID NO: 1561744
gaauguugauauucuaguu

SEQ ID NO: 1695128 - RNA, 19 nt, Artificial Sequence
  Description of Artificial Sequence: Synthetic oligonucleotide
  Antisense strand to SEQ ID NO: 1695127
aacuagaauaucaacauuc

SEQ ID NO: 1695129 - RNA, 19 nt, Artificial Sequence
  Description of Artificial Sequence: Synthetic oligonucleotide
  Sense strand starting at position 2677 of SEQ ID NO: 1561744
acgagaaugcuuuaugcua

SEQ ID NO: 1695130 - RNA, 19 nt, Artificial Sequence
  Description of Artificial Sequence: Synthetic oligonucleotide
  Antisense strand to SEQ ID NO: 1695129
uagcauaaagcauucucgu

SEQ ID NO: 1695131 - RNA, 19 nt, Artificial Sequence
  Description of Artificial Sequence: Synthetic oligonucleotide
  Sense strand starting at position 2766 of SEQ ID NO: 1561744
cguuguucugugaggagua

SEQ ID NO: 1695132 - RNA, 19 nt, Artificial Sequence
  Description of Artificial Sequence: Synthetic oligonucleotide
  Antisense strand to SEQ ID NO: 1695131
uacuccucacagaacaacg

SEQ ID NO: 1695133 - RNA, 19 nt, Artificial Sequence
  Description of Artificial Sequence: Synthetic oligonucleotide
  Sense strand starting at position 2981 of SEQ ID NO: 1561744
aggugucaggugcauaaga

SEQ ID NO: 1695134 - RNA, 19 nt, Artificial Sequence
  Description of Artificial Sequence: Synthetic oligonucleotide
  Antisense strand to SEQ ID NO: 1695133
ucuuaugcaccugacaccu

SEQ ID NO: 1695135 - RNA, 19 nt, Artificial Sequence
  Description of Artificial Sequence: Synthetic oligonucleotide
  Sense strand starting at position 2983 of SEQ ID NO: 1561744
gugucaggugcauaagaau

SEQ ID NO: 1695136 - RNA, 19 nt, Artificial Sequence
  Description of Artificial Sequence: Synthetic oligonucleotide
  Antisense strand to SEQ ID NO: 1695135
auucuuaugcaccugacac

SEQ ID NO: 1695137 - RNA, 19 nt, Artificial Sequence
  Description of Artificial Sequence: Synthetic oligonucleotide
  Sense strand starting at position 3014 of SEQ ID NO: 1561744
auucuucugugacucugaa

SEQ ID NO: 1695138 - RNA, 19 nt, Artificial Sequence
  Description of Artificial Sequence: Synthetic oligonucleotide
  Antisense strand to SEQ ID NO: 1695137
uucagagucacagaagaau

SEQ ID NO: 1695139 - RNA, 19 nt, Artificial Sequence
  Description of Artificial Sequence: Synthetic oligonucleotide
  Sense strand starting at position 3167 of SEQ ID NO: 1561744
ggugauacauuugaaauuc

SEQ ID NO: 1695140 - RNA, 19 nt, Artificial Sequence
  Description of Artificial Sequence: Synthetic oligonucleotide
  Antisense strand to SEQ ID NO: 1695139
gaauuucaaauguaucacc

SEQ ID NO: 1695141 - RNA, 19 nt, Artificial Sequence
  Description of Artificial Sequence: Synthetic oligonucleotide
  Sense strand starting at position 3206 of SEQ ID NO: 1561744
ggccacuugcuguagaaua

SEQ ID NO: 1695142 - RNA, 19 nt, Artificial Sequence
  Description of Artificial Sequence: Synthetic oligonucleotide
  Antisense strand to SEQ ID NO: 1695141
uauucuacagcaaguggcc

SEQ ID NO: 1695143 - RNA, 19 nt, Artificial Sequence
  Description of Artificial Sequence: Synthetic oligonucleotide
  Sense strand starting at position 3208 of SEQ ID NO: 1561744
ccacuugcuguagaauaga

SEQ ID NO: 1695144 - RNA, 19 nt, Artificial Sequence
  Description of Artificial Sequence: Synthetic oligonucleotide
  Antisense strand to SEQ ID NO: 1695143
ucuauucuacagcaagugg

SEQ ID NO: 1695145 - RNA, 19 nt, Artificial Sequence
  Description of Artificial Sequence: Synthetic oligonucleotide
  Sense strand starting at position 3211 of SEQ ID NO: 1561744
cuugcuguagaauagauaa

SEQ ID NO: 1695146 - RNA, 19 nt, Artificial Sequence
  Description of Artificial Sequence: Synthetic oligonucleotide
  Antisense strand to SEQ ID NO: 1695145
uuaucuauucuacagcaag

SEQ ID NO: 1695147 - RNA, 19 nt, Artificial Sequence
  Description of Artificial Sequence: Synthetic oligonucleotide
  Sense strand starting at position 3240 of SEQ ID NO: 1561744
cgaguaauccgggaagcca

SEQ ID NO: 1695148 - RNA, 19 nt, Artificial Sequence
  Description of Artificial Sequence: Synthetic oligonucleotide
  Antisense strand to SEQ ID NO: 1695147
uggcuucccggauuacucg

SEQ ID NO: 1695149 - RNA, 19 nt, Artificial Sequence
  Description of Artificial Sequence: Synthetic oligonucleotide
  Sense strand starting at position 3341 of SEQ ID NO: 1561744
uugggugggccauauuaga

SEQ ID NO: 1695150 - RNA, 19 nt, Artificial Sequence
  Description of Artificial Sequence: Synthetic oligonucleotide
  Antisense strand to SEQ ID NO: 1695149
ucuaauauggcccacccaa

SEQ ID NO: 1695151 - RNA, 19 nt, Artificial Sequence
  Description of Artificial Sequence: Synthetic oligonucleotide
  Sense strand starting at position 3401 of SEQ ID NO: 1561744
gcuuaagaaauaugggagu

SEQ ID NO: 1695152 - RNA, 19 nt, Artificial Sequence
  Description of Artificial Sequence: Synthetic oligonucleotide
  Antisense strand to SEQ ID NO: 1695151
acucccauauuucuuaagc

SEQ ID NO: 1695153 - RNA, 19 nt, Artificial Sequence
  Description of Artificial Sequence: Synthetic oligonucleotide
  Sense strand starting at position 3645 of SEQ ID NO: 1561744
uugguuacagcauggaaua

SEQ ID NO: 1695154 - RNA, 19 nt, Artificial Sequence
  Description of Artificial Sequence: Synthetic oligonucleotide
  Antisense strand to SEQ ID NO: 1695153
uauuccaugcuguaaccaa

SEQ ID NO: 1695155 - RNA, 19 nt, Artificial Sequence
  Description of Artificial Sequence: Synthetic oligonucleotide
  Sense strand starting at position 3950 of SEQ ID NO: 1561744
ugguuacugccaugaaaca

SEQ ID NO: 1695156 - RNA, 19 nt, Artificial Sequence
  Description of Artificial Sequence: Synthetic oligonucleotide
  Antisense strand to SEQ ID NO: 1695155
uguuucauggcaguaacca

SEQ ID NO: 1695157 - RNA, 19 nt, Artificial Sequence
  Description of Artificial Sequence: Synthetic oligonucleotide
  Sense strand starting at position 3951 of SEQ ID NO: 1561744
gguuacugccaugaaacaa

SEQ ID NO: 1695158 - RNA, 19 nt, Artificial Sequence
  Description of Artificial Sequence: Synthetic oligonucleotide
  Antisense strand to SEQ ID NO: 1695157
uuguuucauggcaguaacc

SEQ ID NO: 1695159 - RNA, 19 nt, Artificial Sequence
  Description of Artificial Sequence: Synthetic oligonucleotide
  Sense strand starting at position 3983 of SEQ ID NO: 1561744
gccugaguauuuccgugga

SEQ ID NO: 1695160 - RNA, 19 nt, Artificial Sequence
  Description of Artificial Sequence: Synthetic oligonucleotide
  Antisense strand to SEQ ID NO: 1695159
uccacggaaauacucaggc

SEQ ID NO: 1695161 - RNA, 19 nt, Artificial Sequence
  Description of Artificial Sequence: Synthetic oligonucleotide
  Sense strand starting at position 7 of SEQ ID NO: 1561745
guaccuugaucaguccagu

SEQ ID NO: 1695162 - RNA, 19 nt, Artificial Sequence
  Description of Artificial Sequence: Synthetic oligonucleotide
  Antisense strand to SEQ ID NO: 1695161
acuggacugaucaagguac

SEQ ID NO: 1695163 - RNA, 19 nt, Artificial Sequence
  Description of Artificial Sequence: Synthetic oligonucleotide
  Sense strand starting at position 10 of SEQ ID NO: 1561745
ccuugaucaguccaguagu

SEQ ID NO: 1695164 - RNA, 19 nt, Artificial Sequence
  Description of Artificial Sequence: Synthetic oligonucleotide
  Antisense strand to SEQ ID NO: 1695163
acuacuggacugaucaagg

SEQ ID NO: 1695165 - RNA, 19 nt, Artificial Sequence
  Description of Artificial Sequence: Synthetic oligonucleotide
  Sense strand starting at position 13 of SEQ ID NO: 1561745
ugaucaguccaguaguuuc

SEQ ID NO: 1695166 - RNA, 19 nt, Artificial Sequence
  Description of Artificial Sequence: Synthetic oligonucleotide
  Antisense strand to SEQ ID NO: 1695165
gaaacuacuggacugauca

SEQ ID NO: 1695167 - RNA, 19 nt, Artificial Sequence
  Description of Artificial Sequence: Synthetic oligonucleotide
  Sense strand starting at position 128 of SEQ ID NO: 1561745
cagcucuugcuggauacua

SEQ ID NO: 1695168 - RNA, 19 nt, Artificial Sequence
  Description of Artificial Sequence: Synthetic oligonucleotide
  Antisense strand to SEQ ID NO: 1695167
uaguauccagcaagagcug

SEQ ID NO: 1695169 - RNA, 19 nt, Artificial Sequence
  Description of Artificial Sequence: Synthetic oligonucleotide
  Sense strand starting at position 130 of SEQ ID NO: 1561745
gcucuugcuggauacuaau

SEQ ID NO: 1695170 - RNA, 19 nt, Artificial Sequence
  Description of Artificial Sequence: Synthetic oligonucleotide
  Antisense strand to SEQ ID NO: 1695169
auuaguauccagcaagagc

SEQ ID NO: 1695171 - RNA, 19 nt, Artificial Sequence
  Description of Artificial Sequence: Synthetic oligonucleotide
  Sense strand starting at position 244 of SEQ ID NO: 1561745
gcuguaugcucagcaagcu

SEQ ID NO: 1695172 - RNA, 19 nt, Artificial Sequence
  Description of Artificial Sequence: Synthetic oligonucleotide
  Antisense strand to SEQ ID NO: 1695171
agcuugcugagcauacagc

SEQ ID NO: 1695173 - RNA, 19 nt, Artificial Sequence
  Description of Artificial Sequence: Synthetic oligonucleotide
  Sense strand starting at position 432 of SEQ ID NO: 1561745
uggucuuucucucugcaca

SEQ ID NO: 1695174 - RNA, 19 nt, Artificial Sequence
  Description of Artificial Sequence: Synthetic oligonucleotide
  Antisense strand to SEQ ID NO: 1695173
ugugcagagagaaagacca

SEQ ID NO: 1695175 - RNA, 19 nt, Artificial Sequence
  Description of Artificial Sequence: Synthetic oligonucleotide
  Sense strand starting at position 493 of SEQ ID NO: 1561745
acucgaguucuuugaucuu

SEQ ID NO: 1695176 - RNA, 19 nt, Artificial Sequence
  Description of Artificial Sequence: Synthetic oligonucleotide
  Antisense strand to SEQ ID NO: 1695175
aagaucaaagaacucgagu

SEQ ID NO: 1695177 - RNA, 19 nt, Artificial Sequence
  Description of Artificial Sequence: Synthetic oligonucleotide
  Sense strand starting at position 496 of SEQ ID NO: 1561745
cgaguucuuugaucuuggu

SEQ ID NO: 1695178 - RNA, 19 nt, Artificial Sequence
  Description of Artificial Sequence: Synthetic oligonucleotide
  Antisense strand to SEQ ID NO: 1695177
accaagaucaaagaacucg

SEQ ID NO: 1695179 - RNA, 19 nt, Artificial Sequence
  Description of Artificial Sequence: Synthetic oligonucleotide
  Sense strand starting at position 499 of SEQ ID NO: 1561745
guucuuugaucuuggugaa

SEQ ID NO: 1695180 - RNA, 19 nt, Artificial Sequence
  Description of Artificial Sequence: Synthetic oligonucleotide
  Antisense strand to SEQ ID NO: 1695179
uucaccaagaucaaagaac

SEQ ID NO: 1695181 - RNA, 19 nt, Artificial Sequence
  Description of Artificial Sequence: Synthetic oligonucleotide
  Sense strand starting at position 500 of SEQ ID NO: 1561745
uucuuugaucuuggugaau

SEQ ID NO: 1695182 - RNA, 19 nt, Artificial Sequence
  Description of Artificial Sequence: Synthetic oligonucleotide
  Antisense strand to SEQ ID NO: 1695181
auucaccaagaucaaagaa

SEQ ID NO: 1695183 - RNA, 19 nt, Artificial Sequence
  Description of Artificial Sequence: Synthetic oligonucleotide
  Sense strand starting at position 502 of SEQ ID NO: 1561745
cuuugaucuuggugaauug

SEQ ID NO: 1695184 - RNA, 19 nt, Artificial Sequence
  Description of Artificial Sequence: Synthetic oligonucleotide
  Antisense strand to SEQ ID NO: 1695183
caauucaccaagaucaaag

SEQ ID NO: 1695185 - RNA, 19 nt, Artificial Sequence
  Description of Artificial Sequence: Synthetic oligonucleotide
  Sense strand starting at position 509 of SEQ ID NO: 1561745
cuuggugaauugcucagaa

SEQ ID NO: 1695186 - RNA, 19 nt, Artificial Sequence
  Description of Artificial Sequence: Synthetic oligonucleotide
  Antisense strand to SEQ ID NO: 1695185
uucugagcaauucaccaag

SEQ ID NO: 1695187 - RNA, 19 nt, Artificial Sequence
  Description of Artificial Sequence: Synthetic oligonucleotide
  Sense strand starting at position 513 of SEQ ID NO: 1561745
gugaauugcucagaaagga

SEQ ID NO: 1695188 - RNA, 19 nt, Artificial Sequence
  Description of Artificial Sequence: Synthetic oligonucleotide
  Antisense strand to SEQ ID NO: 1695187
uccuuucugagcaauucac

SEQ ID NO: 1695189 - RNA, 19 nt, Artificial Sequence
  Description of Artificial Sequence: Synthetic oligonucleotide
  Sense strand starting at position 554 of SEQ ID NO: 1561745
aaugacuuggccuguuuga

SEQ ID NO: 1695190 - RNA, 19 nt, Artificial Sequence
  Description of Artificial Sequence: Synthetic oligonucleotide
  Antisense strand to SEQ ID NO: 1695189
ucaaacaggccaagucauu

SEQ ID NO: 1695191 - RNA, 19 nt, Artificial Sequence
  Description of Artificial Sequence: Synthetic oligonucleotide
  Sense strand starting at position 649 of SEQ ID NO: 1561745
aggcuuuggaguugaaaca

SEQ ID NO: 1695192 - RNA, 19 nt, Artificial Sequence
  Description of Artificial Sequence: Synthetic oligonucleotide
  Antisense strand to SEQ ID NO: 1695191
uguuucaacuccaaagccu

SEQ ID NO: 1695193 - RNA, 19 nt, Artificial Sequence
  Description of Artificial Sequence: Synthetic oligonucleotide
  Sense strand starting at position 689 of SEQ ID NO: 1561745
uggacuuaguagggucaga

SEQ ID NO: 1695194 - RNA, 19 nt, Artificial Sequence
  Description of Artificial Sequence: Synthetic oligonucleotide
  Antisense strand to SEQ ID NO: 1695193
ucugacccuacuaagucca

SEQ ID NO: 1695195 - RNA, 19 nt, Artificial Sequence
  Description of Artificial Sequence: Synthetic oligonucleotide
  Sense strand starting at position 694 of SEQ ID NO: 1561745
uuaguagggucagaacaau

SEQ ID NO: 1695196 - RNA, 19 nt, Artificial Sequence
  Description of Artificial Sequence: Synthetic oligonucleotide
  Antisense strand to SEQ ID NO: 1695195
auuguucugacccuacuaa

SEQ ID NO: 1695197 - RNA, 19 nt, Artificial Sequence
  Description of Artificial Sequence: Synthetic oligonucleotide
  Sense strand starting at position 912 of SEQ ID NO: 1561745
ccgguucagucagugaaca

SEQ ID NO: 1695198 - RNA, 19 nt, Artificial Sequence
  Description of Artificial Sequence: Synthetic oligonucleotide
  Antisense strand to SEQ ID NO: 1695197
uguucacugacugaaccgg

SEQ ID NO: 1695199 - RNA, 19 nt, Artificial Sequence
  Description of Artificial Sequence: Synthetic oligonucleotide
  Sense strand starting at position 913 of SEQ ID NO: 1561745
cgguucagucagugaacau

SEQ ID NO: 1695200 - RNA, 19 nt, Artificial Sequence
  Description of Artificial Sequence: Synthetic oligonucleotide
  Antisense strand to SEQ ID NO: 1695199
auguucacugacugaaccg

SEQ ID NO: 1695201 - RNA, 19 nt, Artificial Sequence
  Description of Artificial Sequence: Synthetic oligonucleotide
  Sense strand starting at position 2067 of SEQ ID NO: 1561745
ggugguggguaauggauaa

SEQ ID NO: 1695202 - RNA, 19 nt, Artificial Sequence
  Description of Artificial Sequence: Synthetic oligonucleotide
  Antisense strand to SEQ ID NO: 1695201
uuauccauuacccaccacc

SEQ ID NO: 1695203 - RNA, 19 nt, Artificial Sequence
  Description of Artificial Sequence: Synthetic oligonucleotide
  Sense strand starting at position 2234 of SEQ ID NO: 1561745
aggugaggguaauggauaa

SEQ ID NO: 1695204 - RNA, 19 nt, Artificial Sequence
  Description of Artificial Sequence: Synthetic oligonucleotide
  Antisense strand to SEQ ID NO: 1695203
uuauccauuacccucaccu

SEQ ID NO: 1695205 - RNA, 19 nt, Artificial Sequence
  Description of Artificial Sequence: Synthetic oligonucleotide
  Sense strand starting at position 3543 of SEQ ID NO: 1561745
gaggcuucguggugggaaa

SEQ ID NO: 1695206 - RNA, 19 nt, Artificial Sequence
  Description of Artificial Sequence: Synthetic oligonucleotide
  Antisense strand to SEQ ID NO: 1695205
uuucccaccacgaagccuc

SEQ ID NO: 1695207 - RNA, 19 nt, Artificial Sequence
  Description of Artificial Sequence: Synthetic oligonucleotide
  Sense strand starting at position 3928 of SEQ ID NO: 1561745
gguucaguucguuacgugu

SEQ ID NO: 1695208 - RNA, 19 nt, Artificial Sequence
  Description of Artificial Sequence: Synthetic oligonucleotide
  Antisense strand to SEQ ID NO: 1695207
acacguaacgaacugaacc

SEQ ID NO: 1695209 - RNA, 19 nt, Artificial Sequence
  Description of Artificial Sequence: Synthetic oligonucleotide
  Sense strand starting at position 3932 of SEQ ID NO: 1561745
caguucguuacguguguuu

SEQ ID NO: 1695210 - RNA, 19 nt, Artificial Sequence
  Description of Artificial Sequence: Synthetic oligonucleotide
  Antisense strand to SEQ ID NO: 1695209
aaacacacguaacgaacug

SEQ ID NO: 1695211 - RNA, 19 nt, Artificial Sequence
  Description of Artificial Sequence: Synthetic oligonucleotide
  Sense strand starting at position 5 of SEQ ID NO: 1561746
aaacguuuguguguaaagu

SEQ ID NO: 1695212 - RNA, 19 nt, Artificial Sequence
  Description of Artificial Sequence: Synthetic oligonucleotide
  Antisense strand to SEQ ID NO: 1695211
acuuuacacacaaacguuu

SEQ ID NO: 1695213 - RNA, 19 nt, Artificial Sequence
  Description of Artificial Sequence: Synthetic oligonucleotide
  Sense strand starting at position 6 of SEQ ID NO: 1561746
aacguuuguguguaaagug

SEQ ID NO: 1695214 - RNA, 19 nt, Artificial Sequence
  Description of Artificial Sequence: Synthetic oligonucleotide
  Antisense strand to SEQ ID NO: 1695213
cacuuuacacacaaacguu

SEQ ID NO: 1695215 - RNA, 19 nt, Artificial Sequence
  Description of Artificial Sequence: Synthetic oligonucleotide
  Sense strand starting at position 167 of SEQ ID NO: 1561746
uagggaguguauucuauga

SEQ ID NO: 1695216 - RNA, 19 nt, Artificial Sequence
  Description of Artificial Sequence: Synthetic oligonucleotide
  Antisense strand to SEQ ID NO: 1695215
ucauagaauacacucccua

SEQ ID NO: 1695217 - RNA, 19 nt, Artificial Sequence
  Description of Artificial Sequence: Synthetic oligonucleotide
  Sense strand starting at position 169 of SEQ ID NO: 1561746
gggaguguauucuaugaga

SEQ ID NO: 1695218 - RNA, 19 nt, Artificial Sequence
  Description of Artificial Sequence: Synthetic oligonucleotide
  Antisense strand to SEQ ID NO: 1695217
ucucauagaauacacuccc

SEQ ID NO: 1695219 - RNA, 19 nt, Artificial Sequence
  Description of Artificial Sequence: Synthetic oligonucleotide
  Sense strand starting at position 171 of SEQ ID NO: 1561746
gaguguauucuaugagaug

SEQ ID NO: 1695220 - RNA, 19 nt, Artificial Sequence
  Description of Artificial Sequence: Synthetic oligonucleotide
  Antisense strand to SEQ ID NO: 1695219
caucucauagaauacacuc

SEQ ID NO: 1695221 - RNA, 19 nt, Artificial Sequence
  Description of Artificial Sequence: Synthetic oligonucleotide
  Sense strand starting at position 172 of SEQ ID NO: 1561746
aguguauucuaugagauga

SEQ ID NO: 1695222 - RNA, 19 nt, Artificial Sequence
  Description of Artificial Sequence: Synthetic oligonucleotide
  Antisense strand to SEQ ID NO: 1695221
ucaucucauagaauacacu

SEQ ID NO: 1695223 - RNA, 19 nt, Artificial Sequence
  Description of Artificial Sequence: Synthetic oligonucleotide
  Sense strand starting at position 174 of SEQ ID NO: 1561746
uguauucuaugagaugaac

SEQ ID NO: 1695224 - RNA, 19 nt, Artificial Sequence
  Description of Artificial Sequence: Synthetic oligonucleotide
  Antisense strand to SEQ ID NO: 1695223
guucaucucauagaauaca

SEQ ID NO: 1695225 - RNA, 19 nt, Artificial Sequence
  Description of Artificial Sequence: Synthetic oligonucleotide
  Sense strand starting at position 200 of SEQ ID NO: 1561746
cccuuugucuuucuuugau

SEQ ID NO: 1695226 - RNA, 19 nt, Artificial Sequence
  Description of Artificial Sequence: Synthetic oligonucleotide
  Antisense strand to SEQ ID NO: 1695225
aucaaagaaagacaaaggg

SEQ ID NO: 1695227 - RNA, 19 nt, Artificial Sequence
  Description of Artificial Sequence: Synthetic oligonucleotide
  Sense strand starting at position 260 of SEQ ID NO: 1561746
guagguugauccucuuguu

SEQ ID NO: 1695228 - RNA, 19 nt, Artificial Sequence
  Description of Artificial Sequence: Synthetic oligonucleotide
  Antisense strand to SEQ ID NO: 1695227
aacaagaggaucaaccuac

SEQ ID NO: 1695229 - RNA, 19 nt, Artificial Sequence
  Description of Artificial Sequence: Synthetic oligonucleotide
  Sense strand starting at position 292 of SEQ ID NO: 1561746
auuugaaacugugagaaca

SEQ ID NO: 1695230 - RNA, 19 nt, Artificial Sequence
  Description of Artificial Sequence: Synthetic oligonucleotide
  Antisense strand to SEQ ID NO: 1695229
uguucucacaguuucaaau

SEQ ID NO: 1695231 - RNA, 19 nt, Artificial Sequence
  Description of Artificial Sequence: Synthetic oligonucleotide
  Sense strand starting at position 294 of SEQ ID NO: 1561746
uugaaacugugagaacaau

SEQ ID NO: 1695232 - RNA, 19 nt, Artificial Sequence
  Description of Artificial Sequence: Synthetic oligonucleotide
  Antisense strand to SEQ ID NO: 1695231
auuguucucacaguuucaa

SEQ ID NO: 1695233 - RNA, 19 nt, Artificial Sequence
  Description of Artificial Sequence: Synthetic oligonucleotide
  Sense strand starting at position 303 of SEQ ID NO: 1561746
ugagaacaauuucgucacu

SEQ ID NO: 1695234 - RNA, 19 nt, Artificial Sequence
  Description of Artificial Sequence: Synthetic oligonucleotide
  Antisense strand to SEQ ID NO: 1695233
agugacgaaauuguucuca

SEQ ID NO: 1695235 - RNA, 19 nt, Artificial Sequence
  Description of Artificial Sequence: Synthetic oligonucleotide
  Sense strand starting at position 331 of SEQ ID NO: 1561746
uccugacauuguuuccaca

SEQ ID NO: 1695236 - RNA, 19 nt, Artificial Sequence
  Description of Artificial Sequence: Synthetic oligonucleotide
  Antisense strand to SEQ ID NO: 1695235
uguggaaacaaugucagga

SEQ ID NO: 1695237 - RNA, 19 nt, Artificial Sequence
  Description of Artificial Sequence: Synthetic oligonucleotide
  Sense strand starting at position 396 of SEQ ID NO: 1561746
ccugcucuuccucgagcua

SEQ ID NO: 1695238 - RNA, 19 nt, Artificial Sequence
  Description of Artificial Sequence: Synthetic oligonucleotide
  Antisense strand to SEQ ID NO: 1695237
uagcucgaggaagagcagg

SEQ ID NO: 1695239 - RNA, 19 nt, Artificial Sequence
  Description of Artificial Sequence: Synthetic oligonucleotide
  Sense strand starting at position 397 of SEQ ID NO: 1561746
cugcucuuccucgagcuaa

SEQ ID NO: 1695240 - RNA, 19 nt, Artificial Sequence
  Description of Artificial Sequence: Synthetic oligonucleotide
  Antisense strand to SEQ ID NO: 1695239
uuagcucgaggaagagcag

SEQ ID NO: 1695241 - RNA, 19 nt, Artificial Sequence
  Description of Artificial Sequence: Synthetic oligonucleotide
  Sense strand starting at position 507 of SEQ ID NO: 1561746
aguggaagauuaugcauca

SEQ ID NO: 1695242 - RNA, 19 nt, Artificial Sequence
  Description of Artificial Sequence: Synthetic oligonucleotide
  Antisense strand to SEQ ID NO: 1695241
ugaugcauaaucuuccacu

SEQ ID NO: 1695243 - RNA, 19 nt, Artificial Sequence
  Description of Artificial Sequence: Synthetic oligonucleotide
  Sense strand starting at position 529 of SEQ ID NO: 1561746
uguuaauuauuucgcauca

SEQ ID NO: 1695244 - RNA, 19 nt, Artificial Sequence
  Description of Artificial Sequence: Synthetic oligonucleotide
  Antisense strand to SEQ ID NO: 1695243
ugaugcgaaauaauuaaca

SEQ ID NO: 1695245 - RNA, 19 nt, Artificial Sequence
  Description of Artificial Sequence: Synthetic oligonucleotide
  Sense strand starting at position 549 of SEQ ID NO: 1561746
gguuguggcagugaaacuu

SEQ ID NO: 1695246 - RNA, 19 nt, Artificial Sequence
  Description of Artificial Sequence: Synthetic oligonucleotide
  Antisense strand to SEQ ID NO: 1695245
aaguuucacugccacaacc

SEQ ID NO: 1695247 - RNA, 19 nt, Artificial Sequence
  Description of Artificial Sequence: Synthetic oligonucleotide
  Sense strand starting at position 792 of SEQ ID NO: 1561746
guaccuugaucaguccagu

SEQ ID NO: 1695248 - RNA, 19 nt, Artificial Sequence
  Description of Artificial Sequence: Synthetic oligonucleotide
  Antisense strand to SEQ ID NO: 1695247
acuggacugaucaagguac

SEQ ID NO: 1695249 - RNA, 19 nt, Artificial Sequence
  Description of Artificial Sequence: Synthetic oligonucleotide
  Sense strand starting at position 795 of SEQ ID NO: 1561746
ccuugaucaguccaguagu

SEQ ID NO: 1695250 - RNA, 19 nt, Artificial Sequence
  Description of Artificial Sequence: Synthetic oligonucleotide
  Antisense strand to SEQ ID NO: 1695249
acuacuggacugaucaagg

SEQ ID NO: 1695251 - RNA, 19 nt, Artificial Sequence
  Description of Artificial Sequence: Synthetic oligonucleotide
  Sense strand starting at position 798 of SEQ ID NO: 1561746
ugaucaguccaguaguuuc

SEQ ID NO: 1695252 - RNA, 19 nt, Artificial Sequence
  Description of Artificial Sequence: Synthetic oligonucleotide
  Antisense strand to SEQ ID NO: 1695251
gaaacuacuggacugauca

SEQ ID NO: 1695253 - RNA, 19 nt, Artificial Sequence
  Description of Artificial Sequence: Synthetic oligonucleotide
  Sense strand starting at position 913 of SEQ ID NO: 1561746
cagcucuugcuggauacua

SEQ ID NO: 1695254 - RNA, 19 nt, Artificial Sequence
  Description of Artificial Sequence: Synthetic oligonucleotide
  Antisense strand to SEQ ID NO: 1695253
uaguauccagcaagagcug

SEQ ID NO: 1695255 - RNA, 19 nt, Artificial Sequence
  Description of Artificial Sequence: Synthetic oligonucleotide
  Sense strand starting at position 915 of SEQ ID NO: 1561746
gcucuugcuggauacuaau

SEQ ID NO: 1695256 - RNA, 19 nt, Artificial Sequence
  Description of Artificial Sequence: Synthetic oligonucleotide
  Antisense strand to SEQ ID NO: 1695255
auuaguauccagcaagagc

SEQ ID NO: 1695257 - RNA, 19 nt, Artificial Sequence
  Description of Artificial Sequence: Synthetic oligonucleotide
  Sense strand starting at position 1029 of SEQ ID NO: 1561746
gcuguaugcucagcaagcu

SEQ ID NO: 1695258 - RNA, 19 nt, Artificial Sequence
  Description of Artificial Sequence: Synthetic oligonucleotide
  Antisense strand to SEQ ID NO: 1695257
agcuugcugagcauacagc

SEQ ID NO: 1695259 - RNA, 19 nt, Artificial Sequence
  Description of Artificial Sequence: Synthetic oligonucleotide
  Sense strand starting at position 1217 of SEQ ID NO: 1561746
uggucuuucucucugcaca

SEQ ID NO: 1695260 - RNA, 19 nt, Artificial Sequence
  Description of Artificial Sequence: Synthetic oligonucleotide
  Antisense strand to SEQ ID NO: 1695259
ugugcagagagaaagacca

SEQ ID NO: 1695261 - RNA, 19 nt, Artificial Sequence
  Description of Artificial Sequence: Synthetic oligonucleotide
  Sense strand starting at position 1278 of SEQ ID NO: 1561746
acucgaguucuuugaucuu

SEQ ID NO: 1695262 - RNA, 19 nt, Artificial Sequence
  Description of Artificial Sequence: Synthetic oligonucleotide
  Antisense strand to SEQ ID NO: 1695261
aagaucaaagaacucgagu

SEQ ID NO: 1695263 - RNA, 19 nt, Artificial Sequence
  Description of Artificial Sequence: Synthetic oligonucleotide
  Sense strand starting at position 1281 of SEQ ID NO: 1561746
cgaguucuuugaucuuggu

SEQ ID NO: 1695264 - RNA, 19 nt, Artificial Sequence
  Description of Artificial Sequence: Synthetic oligonucleotide
  Antisense strand to SEQ ID NO: 1695263
accaagaucaaagaacucg

SEQ ID NO: 1695265 - RNA, 19 nt, Artificial Sequence
  Description of Artificial Sequence: Synthetic oligonucleotide
  Sense strand starting at position 1284 of SEQ ID NO: 1561746
guucuuugaucuuggugaa

SEQ ID NO: 1695266 - RNA, 19 nt, Artificial Sequence
  Description of Artificial Sequence: Synthetic oligonucleotide
  Antisense strand to SEQ ID NO: 1695265
uucaccaagaucaaagaac

SEQ ID NO: 1695267 - RNA, 19 nt, Artificial Sequence
  Description of Artificial Sequence: Synthetic oligonucleotide
  Sense strand starting at position 1285 of SEQ ID NO: 1561746
uucuuugaucuuggugaau

SEQ ID NO: 1695268 - RNA, 19 nt, Artificial Sequence
  Description of Artificial Sequence: Synthetic oligonucleotide
  Antisense strand to SEQ ID NO: 1695267
auucaccaagaucaaagaa

SEQ ID NO: 1695269 - RNA, 19 nt, Artificial Sequence
  Description of Artificial Sequence: Synthetic oligonucleotide
  Sense strand starting at position 1287 of SEQ ID NO: 1561746
cuuugaucuuggugaauug

SEQ ID NO: 1695270 - RNA, 19 nt, Artificial Sequence
  Description of Artificial Sequence: Synthetic oligonucleotide
  Antisense strand to SEQ ID NO: 1695269
caauucaccaagaucaaag

SEQ ID NO: 1695271 - RNA, 19 nt, Artificial Sequence
  Description of Artificial Sequence: Synthetic oligonucleotide
  Sense strand starting at position 1294 of SEQ ID NO: 1561746
cuuggugaauugcucagaa

SEQ ID NO: 1695272 - RNA, 19 nt, Artificial Sequence
  Description of Artificial Sequence: Synthetic oligonucleotide
  Antisense strand to SEQ ID NO: 1695271
uucugagcaauucaccaag

SEQ ID NO: 1695273 - RNA, 19 nt, Artificial Sequence
  Description of Artificial Sequence: Synthetic oligonucleotide
  Sense strand starting at position 1298 of SEQ ID NO: 1561746
gugaauugcucagaaagga

SEQ ID NO: 1695274 - RNA, 19 nt, Artificial Sequence
  Description of Artificial Sequence: Synthetic oligonucleotide
  Antisense strand to SEQ ID NO: 1695273
uccuuucugagcaauucac

SEQ ID NO: 1695275 - RNA, 19 nt, Artificial Sequence
  Description of Artificial Sequence: Synthetic oligonucleotide
  Sense strand starting at position 1339 of SEQ ID NO: 1561746
aaugacuuggccuguuuga

SEQ ID NO: 1695276 - RNA, 19 nt, Artificial Sequence
  Description of Artificial Sequence: Synthetic oligonucleotide
  Antisense strand to SEQ ID NO: 1695275
ucaaacaggccaagucauu

SEQ ID NO: 1695277 - RNA, 19 nt, Artificial Sequence
  Description of Artificial Sequence: Synthetic oligonucleotide
  Sense strand starting at position 1434 of SEQ ID NO: 1561746
aggcuuuggaguugaaaca

SEQ ID NO: 1695278 - RNA, 19 nt, Artificial Sequence
  Description of Artificial Sequence: Synthetic oligonucleotide
  Antisense strand to SEQ ID NO: 1695277
uguuucaacuccaaagccu

SEQ ID NO: 1695279 - RNA, 19 nt, Artificial Sequence
  Description of Artificial Sequence: Synthetic oligonucleotide
  Sense strand starting at position 1474 of SEQ ID NO: 1561746
uggacuuaguagggucaga

SEQ ID NO: 1695280 - RNA, 19 nt, Artificial Sequence
  Description of Artificial Sequence: Synthetic oligonucleotide
  Antisense strand to SEQ ID NO: 1695279
ucugacccuacuaagucca

SEQ ID NO: 1695281 - RNA, 19 nt, Artificial Sequence
  Description of Artificial Sequence: Synthetic oligonucleotide
  Sense strand starting at position 1479 of SEQ ID NO: 1561746
uuaguagggucagaacaau

SEQ ID NO: 1695282 - RNA, 19 nt, Artificial Sequence
  Description of Artificial Sequence: Synthetic oligonucleotide
  Antisense strand to SEQ ID NO: 1695281
auuguucugacccuacuaa

SEQ ID NO: 1695283 - RNA, 19 nt, Artificial Sequence
  Description of Artificial Sequence: Synthetic oligonucleotide
  Sense strand starting at position 1697 of SEQ ID NO: 1561746
ccgguucagucagugaaca

SEQ ID NO: 1695284 - RNA, 19 nt, Artificial Sequence
  Description of Artificial Sequence: Synthetic oligonucleotide
  Antisense strand to SEQ ID NO: 1695283
uguucacugacugaaccgg

SEQ ID NO: 1695285 - RNA, 19 nt, Artificial Sequence
  Description of Artificial Sequence: Synthetic oligonucleotide
  Sense strand starting at position 1698 of SEQ ID NO: 1561746
cgguucagucagugaacau

SEQ ID NO: 1695286 - RNA, 19 nt, Artificial Sequence
  Description of Artificial Sequence: Synthetic oligonucleotide
  Antisense strand to SEQ ID NO: 1695285
auguucacugacugaaccg

SEQ ID NO: 1695287 - RNA, 19 nt, Artificial Sequence
  Description of Artificial Sequence: Synthetic oligonucleotide
  Sense strand starting at position 2852 of SEQ ID NO: 1561746
ggugguggguaauggauaa

SEQ ID NO: 1695288 - RNA, 19 nt, Artificial Sequence
  Description of Artificial Sequence: Synthetic oligonucleotide
  Antisense strand to SEQ ID NO: 1695287
uuauccauuacccaccacc

SEQ ID NO: 1695289 - RNA, 19 nt, Artificial Sequence
  Description of Artificial Sequence: Synthetic oligonucleotide
  Sense strand starting at position 3019 of SEQ ID NO: 1561746
aggugaggguaauggauaa

SEQ ID NO: 1695290 - RNA, 19 nt, Artificial Sequence
  Description of Artificial Sequence: Synthetic oligonucleotide
  Antisense strand to SEQ ID NO: 1695289
uuauccauuacccucaccu

SEQ ID NO: 1695291 - RNA, 19 nt, Artificial Sequence
  Description of Artificial Sequence: Synthetic oligonucleotide
  Sense strand starting at position 3 of SEQ ID NO: 1561747
gguugauccucuuguucuu

SEQ ID NO: 1695292 - RNA, 19 nt, Artificial Sequence
  Description of Artificial Sequence: Synthetic oligonucleotide
  Antisense strand to SEQ ID NO: 1695291
aagaacaagaggaucaacc

SEQ ID NO: 1695293 - RNA, 19 nt, Artificial Sequence
  Description of Artificial Sequence: Synthetic oligonucleotide
  Sense strand starting at position 32 of SEQ ID NO: 1561747
auuugaaacugugagaaca

SEQ ID NO: 1695294 - RNA, 19 nt, Artificial Sequence
  Description of Artificial Sequence: Synthetic oligonucleotide
  Antisense strand to SEQ ID NO: 1695293
uguucucacaguuucaaau

SEQ ID NO: 1695295 - RNA, 19 nt, Artificial Sequence
  Description of Artificial Sequence: Synthetic oligonucleotide
  Sense strand starting at position 34 of SEQ ID NO: 1561747
uugaaacugugagaacaau

SEQ ID NO: 1695296 - RNA, 19 nt, Artificial Sequence
  Description of Artificial Sequence: Synthetic oligonucleotide
  Antisense strand to SEQ ID NO: 1695295
auuguucucacaguuucaa

SEQ ID NO: 1695297 - RNA, 19 nt, Artificial Sequence
  Description of Artificial Sequence: Synthetic oligonucleotide
  Sense strand starting at position 43 of SEQ ID NO: 1561747
ugagaacaauuucgucacu

SEQ ID NO: 1695298 - RNA, 19 nt, Artificial Sequence
  Description of Artificial Sequence: Synthetic oligonucleotide
  Antisense strand to SEQ ID NO: 1695297
agugacgaaauuguucuca

SEQ ID NO: 1695299 - RNA, 19 nt, Artificial Sequence
  Description of Artificial Sequence: Synthetic oligonucleotide
  Sense strand starting at position 71 of SEQ ID NO: 1561747
uccugacauuguuuccaca

SEQ ID NO: 1695300 - RNA, 19 nt, Artificial Sequence
  Description of Artificial Sequence: Synthetic oligonucleotide
  Antisense strand to SEQ ID NO: 1695299
uguggaaacaaugucagga

SEQ ID NO: 1695301 - RNA, 19 nt, Artificial Sequence
  Description of Artificial Sequence: Synthetic oligonucleotide
  Sense strand starting at position 136 of SEQ ID NO: 1561747
ccugcucuuccucgagcua

SEQ ID NO: 1695302 - RNA, 19 nt, Artificial Sequence
  Description of Artificial Sequence: Synthetic oligonucleotide
  Antisense strand to SEQ ID NO: 1695301
uagcucgaggaagagcagg

SEQ ID NO: 1695303 - RNA, 19 nt, Artificial Sequence
  Description of Artificial Sequence: Synthetic oligonucleotide
  Sense strand starting at position 137 of SEQ ID NO: 1561747
cugcucuuccucgagcuaa

SEQ ID NO: 1695304 - RNA, 19 nt, Artificial Sequence
  Description of Artificial Sequence: Synthetic oligonucleotide
  Antisense strand to SEQ ID NO: 1695303
uuagcucgaggaagagcag

SEQ ID NO: 1695305 - RNA, 19 nt, Artificial Sequence
  Description of Artificial Sequence: Synthetic oligonucleotide
  Sense strand starting at position 247 of SEQ ID NO: 1561747
aguggaagauuaugcauca

SEQ ID NO: 1695306 - RNA, 19 nt, Artificial Sequence
  Description of Artificial Sequence: Synthetic oligonucleotide
  Antisense strand to SEQ ID NO: 1695305
ugaugcauaaucuuccacu

SEQ ID NO: 1695307 - RNA, 19 nt, Artificial Sequence
  Description of Artificial Sequence: Synthetic oligonucleotide
  Sense strand starting at position 269 of SEQ ID NO: 1561747
uguuaauuauuucgcauca

SEQ ID NO: 1695308 - RNA, 19 nt, Artificial Sequence
  Description of Artificial Sequence: Synthetic oligonucleotide
  Antisense strand to SEQ ID NO: 1695307
ugaugcgaaauaauuaaca

SEQ ID NO: 1695309 - RNA, 19 nt, Artificial Sequence
  Description of Artificial Sequence: Synthetic oligonucleotide
  Sense strand starting at position 289 of SEQ ID NO: 1561747
gguuguggcagugaaacuu

SEQ ID NO: 1695310 - RNA, 19 nt, Artificial Sequence
  Description of Artificial Sequence: Synthetic oligonucleotide
  Antisense strand to SEQ ID NO: 1695309
aaguuucacugccacaacc

SEQ ID NO: 1695311 - RNA, 19 nt, Artificial Sequence
  Description of Artificial Sequence: Synthetic oligonucleotide
  Sense strand starting at position 532 of SEQ ID NO: 1561747
guaccuugaucaguccagu

SEQ ID NO: 1695312 - RNA, 19 nt, Artificial Sequence
  Description of Artificial Sequence: Synthetic oligonucleotide
  Antisense strand to SEQ ID NO: 1695311
acuggacugaucaagguac

SEQ ID NO: 1695313 - RNA, 19 nt, Artificial Sequence
  Description of Artificial Sequence: Synthetic oligonucleotide
  Sense strand starting at position 535 of SEQ ID NO: 1561747
ccuugaucaguccaguagu

SEQ ID NO: 1695314 - RNA, 19 nt, Artificial Sequence
  Description of Artificial Sequence: Synthetic oligonucleotide
  Antisense strand to SEQ ID NO: 1695313
acuacuggacugaucaagg

SEQ ID NO: 1695315 - RNA, 19 nt, Artificial Sequence
  Description of Artificial Sequence: Synthetic oligonucleotide
  Sense strand starting at position 538 of SEQ ID NO: 1561747
ugaucaguccaguaguuuc

SEQ ID NO: 1695316 - RNA, 19 nt, Artificial Sequence
  Description of Artificial Sequence: Synthetic oligonucleotide
  Antisense strand to SEQ ID NO: 1695315
gaaacuacuggacugauca

SEQ ID NO: 1695317 - RNA, 19 nt, Artificial Sequence
  Description of Artificial Sequence: Synthetic oligonucleotide
  Sense strand starting at position 653 of SEQ ID NO: 1561747
cagcucuugcuggauacua

SEQ ID NO: 1695318 - RNA, 19 nt, Artificial Sequence
  Description of Artificial Sequence: Synthetic oligonucleotide
  Antisense strand to SEQ ID NO: 1695317
uaguauccagcaagagcug

SEQ ID NO: 1695319 - RNA, 19 nt, Artificial Sequence
  Description of Artificial Sequence: Synthetic oligonucleotide
  Sense strand starting at position 655 of SEQ ID NO: 1561747
gcucuugcuggauacuaau

SEQ ID NO: 1695320 - RNA, 19 nt, Artificial Sequence
  Description of Artificial Sequence: Synthetic oligonucleotide
  Antisense strand to SEQ ID NO: 1695319
auuaguauccagcaagagc

SEQ ID NO: 1695321 - RNA, 19 nt, Artificial Sequence
  Description of Artificial Sequence: Synthetic oligonucleotide
  Sense strand starting at position 769 of SEQ ID NO: 1561747
gcuguaugcucagcaagcu

SEQ ID NO: 1695322 - RNA, 19 nt, Artificial Sequence
  Description of Artificial Sequence: Synthetic oligonucleotide
  Antisense strand to SEQ ID NO: 1695321
agcuugcugagcauacagc

SEQ ID NO: 1695323 - RNA, 19 nt, Artificial Sequence
  Description of Artificial Sequence: Synthetic oligonucleotide
  Sense strand starting at position 957 of SEQ ID NO: 1561747
uggucuuucucucugcaca

SEQ ID NO: 1695324 - RNA, 19 nt, Artificial Sequence
  Description of Artificial Sequence: Synthetic oligonucleotide
  Antisense strand to SEQ ID NO: 1695323
ugugcagagagaaagacca

SEQ ID NO: 1695325 - RNA, 19 nt, Artificial Sequence
  Description of Artificial Sequence: Synthetic oligonucleotide
  Sense strand starting at position 1018 of SEQ ID NO: 1561747
acucgaguucuuugaucuu

SEQ ID NO: 1695326 - RNA, 19 nt, Artificial Sequence
  Description of Artificial Sequence: Synthetic oligonucleotide
  Antisense strand to SEQ ID NO: 1695325
aagaucaaagaacucgagu

SEQ ID NO: 1695327 - RNA, 19 nt, Artificial Sequence
  Description of Artificial Sequence: Synthetic oligonucleotide
  Sense strand starting at position 1021 of SEQ ID NO: 1561747
cgaguucuuugaucuuggu

SEQ ID NO: 1695328 - RNA, 19 nt, Artificial Sequence
  Description of Artificial Sequence: Synthetic oligonucleotide
  Antisense strand to SEQ ID NO: 1695327
accaagaucaaagaacucg

SEQ ID NO: 1695329 - RNA, 19 nt, Artificial Sequence
  Description of Artificial Sequence: Synthetic oligonucleotide
  Sense strand starting at position 1024 of SEQ ID NO: 1561747
guucuuugaucuuggugaa

SEQ ID NO: 1695330 - RNA, 19 nt, Artificial Sequence
  Description of Artificial Sequence: Synthetic oligonucleotide
  Antisense strand to SEQ ID NO: 1695329
uucaccaagaucaaagaac

SEQ ID NO: 1695331 - RNA, 19 nt, Artificial Sequence
  Description of Artificial Sequence: Synthetic oligonucleotide
  Sense strand starting at position 1025 of SEQ ID NO: 1561747
uucuuugaucuuggugaau

SEQ ID NO: 1695332 - RNA, 19 nt, Artificial Sequence
  Description of Artificial Sequence: Synthetic oligonucleotide
  Antisense strand to SEQ ID NO: 1695331
auucaccaagaucaaagaa

SEQ ID NO: 1695333 - RNA, 19 nt, Artificial Sequence
  Description of Artificial Sequence: Synthetic oligonucleotide
  Sense strand starting at position 1027 of SEQ ID NO: 1561747
cuuugaucuuggugaauug

SEQ ID NO: 1695334 - RNA, 19 nt, Artificial Sequence
  Description of Artificial Sequence: Synthetic oligonucleotide
  Antisense strand to SEQ ID NO: 1695333
caauucaccaagaucaaag

SEQ ID NO: 1695335 - RNA, 19 nt, Artificial Sequence
  Description of Artificial Sequence: Synthetic oligonucleotide
  Sense strand starting at position 1034 of SEQ ID NO: 1561747
cuuggugaauugcucagaa

SEQ ID NO: 1695336 - RNA, 19 nt, Artificial Sequence
  Description of Artificial Sequence: Synthetic oligonucleotide
  Antisense strand to SEQ ID NO: 1695335
uucugagcaauucaccaag

SEQ ID NO: 1695337 - RNA, 19 nt, Artificial Sequence
  Description of Artificial Sequence: Synthetic oligonucleotide
  Sense strand starting at position 1038 of SEQ ID NO: 1561747
gugaauugcucagaaagga

SEQ ID NO: 1695338 - RNA, 19 nt, Artificial Sequence
  Description of Artificial Sequence: Synthetic oligonucleotide
  Antisense strand to SEQ ID NO: 1695337
uccuuucugagcaauucac

SEQ ID NO: 1695339 - RNA, 19 nt, Artificial Sequence
  Description of Artificial Sequence: Synthetic oligonucleotide
  Sense strand starting at position 1079 of SEQ ID NO: 1561747
aaugacuuggccuguuuga

SEQ ID NO: 1695340 - RNA, 19 nt, Artificial Sequence
  Description of Artificial Sequence: Synthetic oligonucleotide
  Antisense strand to SEQ ID NO: 1695339
ucaaacaggccaagucauu

SEQ ID NO: 1695341 - RNA, 19 nt, Artificial Sequence
  Description of Artificial Sequence: Synthetic oligonucleotide
  Sense strand starting at position 1174 of SEQ ID NO: 1561747
aggcuuuggaguugaaaca

SEQ ID NO: 1695342 - RNA, 19 nt, Artificial Sequence
  Description of Artificial Sequence: Synthetic oligonucleotide
  Antisense strand to SEQ ID NO: 1695341
uguuucaacuccaaagccu

SEQ ID NO: 1695343 - RNA, 19 nt, Artificial Sequence
  Description of Artificial Sequence: Synthetic oligonucleotide
  Sense strand starting at position 1214 of SEQ ID NO: 1561747
uggacuuaguagggucaga

SEQ ID NO: 1695344 - RNA, 19 nt, Artificial Sequence
  Description of Artificial Sequence: Synthetic oligonucleotide
  Antisense strand to SEQ ID NO: 1695343
ucugacccuacuaagucca

SEQ ID NO: 1695345 - RNA, 19 nt, Artificial Sequence
  Description of Artificial Sequence: Synthetic oligonucleotide
  Sense strand starting at position 1219 of SEQ ID NO: 1561747
uuaguagggucagaacaau

SEQ ID NO: 1695346 - RNA, 19 nt, Artificial Sequence
  Description of Artificial Sequence: Synthetic oligonucleotide
  Antisense strand to SEQ ID NO: 1695345
auuguucugacccuacuaa

SEQ ID NO: 1695347 - RNA, 19 nt, Artificial Sequence
  Description of Artificial Sequence: Synthetic oligonucleotide
  Sense strand starting at position 1437 of SEQ ID NO: 1561747
ccgguucagucagugaaca

SEQ ID NO: 1695348 - RNA, 19 nt, Artificial Sequence
  Description of Artificial Sequence: Synthetic oligonucleotide
  Antisense strand to SEQ ID NO: 1695347
uguucacugacugaaccgg

SEQ ID NO: 1695349 - RNA, 19 nt, Artificial Sequence
  Description of Artificial Sequence: Synthetic oligonucleotide
  Sense strand starting at position 1438 of SEQ ID NO: 1561747
cgguucagucagugaacau

SEQ ID NO: 1695350 - RNA, 19 nt, Artificial Sequence
  Description of Artificial Sequence: Synthetic oligonucleotide
  Antisense strand to SEQ ID NO: 1695349
auguucacugacugaaccg

SEQ ID NO: 1695351 - RNA, 19 nt, Artificial Sequence
  Description of Artificial Sequence: Synthetic oligonucleotide
  Sense strand starting at position 2592 of SEQ ID NO: 1561747
ggugguggguaauggauaa

SEQ ID NO: 1695352 - RNA, 19 nt, Artificial Sequence
  Description of Artificial Sequence: Synthetic oligonucleotide
  Antisense strand to SEQ ID NO: 1695351
uuauccauuacccaccacc

SEQ ID NO: 1695353 - RNA, 19 nt, Artificial Sequence
  Description of Artificial Sequence: Synthetic oligonucleotide
  Sense strand starting at position 2759 of SEQ ID NO: 1561747
aggugaggguaauggauaa

SEQ ID NO: 1695354 - RNA, 19 nt, Artificial Sequence
  Description of Artificial Sequence: Synthetic oligonucleotide
  Antisense strand to SEQ ID NO: 1695353
uuauccauuacccucaccu

SEQ ID NO: 1695355 - RNA, 19 nt, Artificial Sequence
  Description of Artificial Sequence: Synthetic oligonucleotide
  Sense strand starting at position 20 of SEQ ID NO: 1561748
guagguugauccucuuguu

SEQ ID NO: 1695356 - RNA, 19 nt, Artificial Sequence
  Description of Artificial Sequence: Synthetic oligonucleotide
  Antisense strand to SEQ ID NO: 1695355
aacaagaggaucaaccuac

SEQ ID NO: 1695357 - RNA, 19 nt, Artificial Sequence
  Description of Artificial Sequence: Synthetic oligonucleotide
  Sense strand starting at position 23 of SEQ ID NO: 1561748
gguugauccucuuguucuu

SEQ ID NO: 1695358 - RNA, 19 nt, Artificial Sequence
  Description of Artificial Sequence: Synthetic oligonucleotide
  Antisense strand to SEQ ID NO: 1695357
aagaacaagaggaucaacc

SEQ ID NO: 1695359 - RNA, 19 nt, Artificial Sequence
  Description of Artificial Sequence: Synthetic oligonucleotide
  Sense strand starting at position 52 of SEQ ID NO: 1561748
auuugaaacugugagaaca

SEQ ID NO: 1695360 - RNA, 19 nt, Artificial Sequence
  Description of Artificial Sequence: Synthetic oligonucleotide
  Antisense strand to SEQ ID NO: 1695359
uguucucacaguuucaaau

SEQ ID NO: 1695361 - RNA, 19 nt, Artificial Sequence
  Description of Artificial Sequence: Synthetic oligonucleotide
  Sense strand starting at position 54 of SEQ ID NO: 1561748
uugaaacugugagaacaau

SEQ ID NO: 1695362 - RNA, 19 nt, Artificial Sequence
  Description of Artificial Sequence: Synthetic oligonucleotide
  Antisense strand to SEQ ID NO: 1695361
auuguucucacaguuucaa

SEQ ID NO: 1695363 - RNA, 19 nt, Artificial Sequence
  Description of Artificial Sequence: Synthetic oligonucleotide
  Sense strand starting at position 63 of SEQ ID NO: 1561748
ugagaacaauuucgucacu

SEQ ID NO: 1695364 - RNA, 19 nt, Artificial Sequence
  Description of Artificial Sequence: Synthetic oligonucleotide
  Antisense strand to SEQ ID NO: 1695363
agugacgaaauuguucuca

SEQ ID NO: 1695365 - RNA, 19 nt, Artificial Sequence
  Description of Artificial Sequence: Synthetic oligonucleotide
  Sense strand starting at position 91 of SEQ ID NO: 1561748
uccugacauuguuuccaca

SEQ ID NO: 1695366 - RNA, 19 nt, Artificial Sequence
  Description of Artificial Sequence: Synthetic oligonucleotide
  Antisense strand to SEQ ID NO: 1695365
uguggaaacaaugucagga

SEQ ID NO: 1695367 - RNA, 19 nt, Artificial Sequence
  Description of Artificial Sequence: Synthetic oligonucleotide
  Sense strand starting at position 156 of SEQ ID NO: 1561748
ccugcucuuccucgagcua

SEQ ID NO: 1695368 - RNA, 19 nt, Artificial Sequence
  Description of Artificial Sequence: Synthetic oligonucleotide
  Antisense strand to SEQ ID NO: 1695367
uagcucgaggaagagcagg

SEQ ID NO: 1695369 - RNA, 19 nt, Artificial Sequence
  Description of Artificial Sequence: Synthetic oligonucleotide
  Sense strand starting at position 157 of SEQ ID NO: 1561748
cugcucuuccucgagcuaa

SEQ ID NO: 1695370 - RNA, 19 nt, Artificial Sequence
  Description of Artificial Sequence: Synthetic oligonucleotide
  Antisense strand to SEQ ID NO: 1695369
uuagcucgaggaagagcag

SEQ ID NO: 1695371 - RNA, 19 nt, Artificial Sequence
  Description of Artificial Sequence: Synthetic oligonucleotide
  Sense strand starting at position 267 of SEQ ID NO: 1561748
aguggaagauuaugcauca

SEQ ID NO: 1695372 - RNA, 19 nt, Artificial Sequence
  Description of Artificial Sequence: Synthetic oligonucleotide
  Antisense strand to SEQ ID NO: 1695371
ugaugcauaaucuuccacu

SEQ ID NO: 1695373 - RNA, 19 nt, Artificial Sequence
  Description of Artificial Sequence: Synthetic oligonucleotide
  Sense strand starting at position 289 of SEQ ID NO: 1561748
uguuaauuauuucgcauca

SEQ ID NO: 1695374 - RNA, 19 nt, Artificial Sequence
  Description of Artificial Sequence: Synthetic oligonucleotide
  Antisense strand to SEQ ID NO: 1695373
ugaugcgaaauaauuaaca

SEQ ID NO: 1695375 - RNA, 19 nt, Artificial Sequence
  Description of Artificial Sequence: Synthetic oligonucleotide
  Sense strand starting at position 309 of SEQ ID NO: 1561748
gguuguggcagugaaacuu

SEQ ID NO: 1695376 - RNA, 19 nt, Artificial Sequence
  Description of Artificial Sequence: Synthetic oligonucleotide
  Antisense strand to SEQ ID NO: 1695375
aaguuucacugccacaacc

SEQ ID NO: 1695377 - RNA, 19 nt, Artificial Sequence
  Description of Artificial Sequence: Synthetic oligonucleotide
  Sense strand starting at position 552 of SEQ ID NO: 1561748
guaccuugaucaguccagu

SEQ ID NO: 1695378 - RNA, 19 nt, Artificial Sequence
  Description of Artificial Sequence: Synthetic oligonucleotide
  Antisense strand to SEQ ID NO: 1695377
acuggacugaucaagguac

SEQ ID NO: 1695379 - RNA, 19 nt, Artificial Sequence
  Description of Artificial Sequence: Synthetic oligonucleotide
  Sense strand starting at position 555 of SEQ ID NO: 1561748
ccuugaucaguccaguagu

SEQ ID NO: 1695380 - RNA, 19 nt, Artificial Sequence
  Description of Artificial Sequence: Synthetic oligonucleotide
  Antisense strand to SEQ ID NO: 1695379
acuacuggacugaucaagg

SEQ ID NO: 1695381 - RNA, 19 nt, Artificial Sequence
  Description of Artificial Sequence: Synthetic oligonucleotide
  Sense strand starting at position 558 of SEQ ID NO: 1561748
ugaucaguccaguaguuuc

SEQ ID NO: 1695382 - RNA, 19 nt, Artificial Sequence
  Description of Artificial Sequence: Synthetic oligonucleotide
  Antisense strand to SEQ ID NO: 1695381
gaaacuacuggacugauca

SEQ ID NO: 1695383 - RNA, 19 nt, Artificial Sequence
  Description of Artificial Sequence: Synthetic oligonucleotide
  Sense strand starting at position 673 of SEQ ID NO: 1561748
cagcucuugcuggauacua

SEQ ID NO: 1695384 - RNA, 19 nt, Artificial Sequence
  Description of Artificial Sequence: Synthetic oligonucleotide
  Antisense strand to SEQ ID NO: 1695383
uaguauccagcaagagcug

SEQ ID NO: 1695385 - RNA, 19 nt, Artificial Sequence
  Description of Artificial Sequence: Synthetic oligonucleotide
  Sense strand starting at position 675 of SEQ ID NO: 1561748
gcucuugcuggauacuaau

SEQ ID NO: 1695386 - RNA, 19 nt, Artificial Sequence
  Description of Artificial Sequence: Synthetic oligonucleotide
  Antisense strand to SEQ ID NO: 1695385
auuaguauccagcaagagc

SEQ ID NO: 1695387 - RNA, 19 nt, Artificial Sequence
  Description of Artificial Sequence: Synthetic oligonucleotide
  Sense strand starting at position 789 of SEQ ID NO: 1561748
gcuguaugcucagcaagcu

SEQ ID NO: 1695388 - RNA, 19 nt, Artificial Sequence
  Description of Artificial Sequence: Synthetic oligonucleotide
  Antisense strand to SEQ ID NO: 1695387
agcuugcugagcauacagc

SEQ ID NO: 1695389 - RNA, 19 nt, Artificial Sequence
  Description of Artificial Sequence: Synthetic oligonucleotide
  Sense strand starting at position 977 of SEQ ID NO: 1561748
uggucuuucucucugcaca

SEQ ID NO: 1695390 - RNA, 19 nt, Artificial Sequence
  Description of Artificial Sequence: Synthetic oligonucleotide
  Antisense strand to SEQ ID NO: 1695389
ugugcagagagaaagacca

SEQ ID NO: 1695391 - RNA, 19 nt, Artificial Sequence
  Description of Artificial Sequence: Synthetic oligonucleotide
  Sense strand starting at position 1038 of SEQ ID NO: 1561748
acucgaguucuuugaucuu

SEQ ID NO: 1695392 - RNA, 19 nt, Artificial Sequence
  Description of Artificial Sequence: Synthetic oligonucleotide
  Antisense strand to SEQ ID NO: 1695391
aagaucaaagaacucgagu

SEQ ID NO: 1695393 - RNA, 19 nt, Artificial Sequence
  Description of Artificial Sequence: Synthetic oligonucleotide
  Sense strand starting at position 1041 of SEQ ID NO: 1561748
cgaguucuuugaucuuggu

SEQ ID NO: 1695394 - RNA, 19 nt, Artificial Sequence
  Description of Artificial Sequence: Synthetic oligonucleotide
  Antisense strand to SEQ ID NO: 1695393
accaagaucaaagaacucg

SEQ ID NO: 1695395 - RNA, 19 nt, Artificial Sequence
  Description of Artificial Sequence: Synthetic oligonucleotide
  Sense strand starting at position 1044 of SEQ ID NO: 1561748
guucuuugaucuuggugaa

SEQ ID NO: 1695396 - RNA, 19 nt, Artificial Sequence
  Description of Artificial Sequence: Synthetic oligonucleotide
  Antisense strand to SEQ ID NO: 1695395
uucaccaagaucaaagaac

SEQ ID NO: 1695397 - RNA, 19 nt, Artificial Sequence
  Description of Artificial Sequence: Synthetic oligonucleotide
  Sense strand starting at position 1045 of SEQ ID NO: 1561748
uucuuugaucuuggugaau

SEQ ID NO: 1695398 - RNA, 19 nt, Artificial Sequence
  Description of Artificial Sequence: Synthetic oligonucleotide
  Antisense strand to SEQ ID NO: 1695397
auucaccaagaucaaagaa

SEQ ID NO: 1695399 - RNA, 19 nt, Artificial Sequence
  Description of Artificial Sequence: Synthetic oligonucleotide
  Sense strand starting at position 1047 of SEQ ID NO: 1561748
cuuugaucuuggugaauug

SEQ ID NO: 1695400 - RNA, 19 nt, Artificial Sequence
  Description of Artificial Sequence: Synthetic oligonucleotide
  Antisense strand to SEQ ID NO: 1695399
caauucaccaagaucaaag

SEQ ID NO: 1695401 - RNA, 19 nt, Artificial Sequence
  Description of Artificial Sequence: Synthetic oligonucleotide
  Sense strand starting at position 1054 of SEQ ID NO: 1561748
cuuggugaauugcucagaa

SEQ ID NO: 1695402 - RNA, 19 nt, Artificial Sequence
  Description of Artificial Sequence: Synthetic oligonucleotide
  Antisense strand to SEQ ID NO: 1695401
uucugagcaauucaccaag

SEQ ID NO: 1695403 - RNA, 19 nt, Artificial Sequence
  Description of Artificial Sequence: Synthetic oligonucleotide
  Sense strand starting at position 1058 of SEQ ID NO: 1561748
gugaauugcucagaaagga

SEQ ID NO: 1695404 - RNA, 19 nt, Artificial Sequence
  Description of Artificial Sequence: Synthetic oligonucleotide
  Antisense strand to SEQ ID NO: 1695403
uccuuucugagcaauucac

SEQ ID NO: 1695405 - RNA, 19 nt, Artificial Sequence
  Description of Artificial Sequence: Synthetic oligonucleotide
  Sense strand starting at position 1099 of SEQ ID NO: 1561748
aaugacuuggccuguuuga

SEQ ID NO: 1695406 - RNA, 19 nt, Artificial Sequence
  Description of Artificial Sequence: Synthetic oligonucleotide
  Antisense strand to SEQ ID NO: 1695405
ucaaacaggccaagucauu

SEQ ID NO: 1695407 - RNA, 19 nt, Artificial Sequence
  Description of Artificial Sequence: Synthetic oligonucleotide
  Sense strand starting at position 1194 of SEQ ID NO: 1561748
aggcuuuggaguugaaaca

SEQ ID NO: 1695408 - RNA, 19 nt, Artificial Sequence
  Description of Artificial Sequence: Synthetic oligonucleotide
  Antisense strand to SEQ ID NO: 1695407
uguuucaacuccaaagccu

SEQ ID NO: 1695409 - RNA, 19 nt, Artificial Sequence
  Description of Artificial Sequence: Synthetic oligonucleotide
  Sense strand starting at position 1234 of SEQ ID NO: 1561748
uggacuuaguagggucaga

SEQ ID NO: 1695410 - RNA, 19 nt, Artificial Sequence
  Description of Artificial Sequence: Synthetic oligonucleotide
  Antisense strand to SEQ ID NO: 1695409
ucugacccuacuaagucca

SEQ ID NO: 1695411 - RNA, 19 nt, Artificial Sequence
  Description of Artificial Sequence: Synthetic oligonucleotide
  Sense strand starting at position 1239 of SEQ ID NO: 1561748
uuaguagggucagaacaau

SEQ ID NO: 1695412 - RNA, 19 nt, Artificial Sequence
  Description of Artificial Sequence: Synthetic oligonucleotide
  Antisense strand to SEQ ID NO: 1695411
auuguucugacccuacuaa

SEQ ID NO: 1695413 - RNA, 19 nt, Artificial Sequence
  Description of Artificial Sequence: Synthetic oligonucleotide
  Sense strand starting at position 1457 of SEQ ID NO: 1561748
ccgguucagucagugaaca

SEQ ID NO: 1695414 - RNA, 19 nt, Artificial Sequence
  Description of Artificial Sequence: Synthetic oligonucleotide
  Antisense strand to SEQ ID NO: 1695413
uguucacugacugaaccgg

SEQ ID NO: 1695415 - RNA, 19 nt, Artificial Sequence
  Description of Artificial Sequence: Synthetic oligonucleotide
  Sense strand starting at position 1458 of SEQ ID NO: 1561748
cgguucagucagugaacau

SEQ ID NO: 1695416 - RNA, 19 nt, Artificial Sequence
  Description of Artificial Sequence: Synthetic oligonucleotide
  Antisense strand to SEQ ID NO: 1695415
auguucacugacugaaccg

SEQ ID NO: 1695417 - RNA, 19 nt, Artificial Sequence
  Description of Artificial Sequence: Synthetic oligonucleotide
  Sense strand starting at position 2612 of SEQ ID NO: 1561748
ggugguggguaauggauaa

SEQ ID NO: 1695418 - RNA, 19 nt, Artificial Sequence
  Description of Artificial Sequence: Synthetic oligonucleotide
  Antisense strand to SEQ ID NO: 1695417
uuauccauuacccaccacc

SEQ ID NO: 1695419 - RNA, 19 nt, Artificial Sequence
  Description of Artificial Sequence: Synthetic oligonucleotide
  Sense strand starting at position 2779 of SEQ ID NO: 1561748
aggugaggguaauggauaa

SEQ ID NO: 1695420 - RNA, 19 nt, Artificial Sequence
  Description of Artificial Sequence: Synthetic oligonucleotide
  Antisense strand to SEQ ID NO: 1695419
uuauccauuacccucaccu

SEQ ID NO: 1695421 - RNA, 19 nt, Artificial Sequence
  Description of Artificial Sequence: Synthetic oligonucleotide
  Sense strand starting at position 21 of SEQ ID NO: 1561749
guucuuucccaugaugucu

SEQ ID NO: 1695422 - RNA, 19 nt, Artificial Sequence
  Description of Artificial Sequence: Synthetic oligonucleotide
  Antisense strand to SEQ ID NO: 1695421
agacaucaugggaaagaac

SEQ ID NO: 1695423 - RNA, 19 nt, Artificial Sequence
  Description of Artificial Sequence: Synthetic oligonucleotide
  Sense strand starting at position 61 of SEQ ID NO: 1561749
uuguacuuuggcugaggga

SEQ ID NO: 1695424 - RNA, 19 nt, Artificial Sequence
  Description of Artificial Sequence: Synthetic oligonucleotide
  Antisense strand to SEQ ID NO: 1695423
ucccucagccaaaguacaa

SEQ ID NO: 1695425 - RNA, 19 nt, Artificial Sequence
  Description of Artificial Sequence: Synthetic oligonucleotide
  Sense strand starting at position 306 of SEQ ID NO: 1561749
ccagacucauggcucuuaa

SEQ ID NO: 1695426 - RNA, 19 nt, Artificial Sequence
  Description of Artificial Sequence: Synthetic oligonucleotide
  Antisense strand to SEQ ID NO: 1695425
uuaagagccaugagucugg

SEQ ID NO: 1695427 - RNA, 19 nt, Artificial Sequence
  Description of Artificial Sequence: Synthetic oligonucleotide
  Sense strand starting at position 645 of SEQ ID NO: 1561749
accuuagaccuaggaguuu

SEQ ID NO: 1695428 - RNA, 19 nt, Artificial Sequence
  Description of Artificial Sequence: Synthetic oligonucleotide
  Antisense strand to SEQ ID NO: 1695427
aaacuccuaggucuaaggu

SEQ ID NO: 1695429 - RNA, 19 nt, Artificial Sequence
  Description of Artificial Sequence: Synthetic oligonucleotide
  Sense strand starting at position 665 of SEQ ID NO: 1561749
aggcuacugugagcaauga

SEQ ID NO: 1695430 - RNA, 19 nt, Artificial Sequence
  Description of Artificial Sequence: Synthetic oligonucleotide
  Antisense strand to SEQ ID NO: 1695429
ucauugcucacaguagccu

SEQ ID NO: 1695431 - RNA, 19 nt, Artificial Sequence
  Description of Artificial Sequence: Synthetic oligonucleotide
  Sense strand starting at position 666 of SEQ ID NO: 1561749
ggcuacugugagcaaugau

SEQ ID NO: 1695432 - RNA, 19 nt, Artificial Sequence
  Description of Artificial Sequence: Synthetic oligonucleotide
  Antisense strand to SEQ ID NO: 1695431
aucauugcucacaguagcc

SEQ ID NO: 1695433 - RNA, 19 nt, Artificial Sequence
  Description of Artificial Sequence: Synthetic oligonucleotide
  Sense strand starting at position 835 of SEQ ID NO: 1561749
uugauauaaucaguacgau

SEQ ID NO: 1695434 - RNA, 19 nt, Artificial Sequence
  Description of Artificial Sequence: Synthetic oligonucleotide
  Antisense strand to SEQ ID NO: 1695433
aucguacugauuauaucaa

SEQ ID NO: 1695435 - RNA, 19 nt, Artificial Sequence
  Description of Artificial Sequence: Synthetic oligonucleotide
  Sense strand starting at position 836 of SEQ ID NO: 1561749
ugauauaaucaguacgauc

SEQ ID NO: 1695436 - RNA, 19 nt, Artificial Sequence
  Description of Artificial Sequence: Synthetic oligonucleotide
  Antisense strand to SEQ ID NO: 1695435
gaucguacugauuauauca

SEQ ID NO: 1695437 - RNA, 19 nt, Artificial Sequence
  Description of Artificial Sequence: Synthetic oligonucleotide
  Sense strand starting at position 838 of SEQ ID NO: 1561749
auauaaucaguacgaucau

SEQ ID NO: 1695438 - RNA, 19 nt, Artificial Sequence
  Description of Artificial Sequence: Synthetic oligonucleotide
  Antisense strand to SEQ ID NO: 1695437
augaucguacugauuauau

SEQ ID NO: 1695439 - RNA, 19 nt, Artificial Sequence
  Description of Artificial Sequence: Synthetic oligonucleotide
  Sense strand starting at position 849 of SEQ ID NO: 1561749
acgaucauguaaucaauau

SEQ ID NO: 1695440 - RNA, 19 nt, Artificial Sequence
  Description of Artificial Sequence: Synthetic oligonucleotide
  Antisense strand to SEQ ID NO: 1695439
auauugauuacaugaucgu

SEQ ID NO: 1695441 - RNA, 19 nt, Artificial Sequence
  Description of Artificial Sequence: Synthetic oligonucleotide
  Sense strand starting at position 899 of SEQ ID NO: 1561749
acccaaaugugucuuuaua

SEQ ID NO: 1695442 - RNA, 19 nt, Artificial Sequence
  Description of Artificial Sequence: Synthetic oligonucleotide
  Antisense strand to SEQ ID NO: 1695441
uauaaagacacauuugggu

SEQ ID NO: 1695443 - RNA, 19 nt, Artificial Sequence
  Description of Artificial Sequence: Synthetic oligonucleotide
  Sense strand starting at position 901 of SEQ ID NO: 1561749
ccaaaugugucuuuauacu

SEQ ID NO: 1695444 - RNA, 19 nt, Artificial Sequence
  Description of Artificial Sequence: Synthetic oligonucleotide
  Antisense strand to SEQ ID NO: 1695443
aguauaaagacacauuugg

SEQ ID NO: 1695445 - RNA, 19 nt, Artificial Sequence
  Description of Artificial Sequence: Synthetic oligonucleotide
  Sense strand starting at position 1101 of SEQ ID NO: 1561749
guuucugagugacuuugga

SEQ ID NO: 1695446 - RNA, 19 nt, Artificial Sequence
  Description of Artificial Sequence: Synthetic oligonucleotide
  Antisense strand to SEQ ID NO: 1695445
uccaaagucacucagaaac

SEQ ID NO: 1695447 - RNA, 19 nt, Artificial Sequence
  Description of Artificial Sequence: Synthetic oligonucleotide
  Sense strand starting at position 1286 of SEQ ID NO: 1561749
ucauacauaucaguuggua

SEQ ID NO: 1695448 - RNA, 19 nt, Artificial Sequence
  Description of Artificial Sequence: Synthetic oligonucleotide
  Antisense strand to SEQ ID NO: 1695447
uaccaacugauauguauga

SEQ ID NO: 1695449 - RNA, 19 nt, Artificial Sequence
  Description of Artificial Sequence: Synthetic oligonucleotide
  Sense strand starting at position 1299 of SEQ ID NO: 1561749
uugguacaguccucaaaca

SEQ ID NO: 1695450 - RNA, 19 nt, Artificial Sequence
  Description of Artificial Sequence: Synthetic oligonucleotide
  Antisense strand to SEQ ID NO: 1695449
uguuugaggacuguaccaa

SEQ ID NO: 1695451 - RNA, 19 nt, Artificial Sequence
  Description of Artificial Sequence: Synthetic oligonucleotide
  Sense strand starting at position 1300 of SEQ ID NO: 1561749
ugguacaguccucaaacaa

SEQ ID NO: 1695452 - RNA, 19 nt, Artificial Sequence
  Description of Artificial Sequence: Synthetic oligonucleotide
  Antisense strand to SEQ ID NO: 1695451
uuguuugaggacuguacca

SEQ ID NO: 1695453 - RNA, 19 nt, Artificial Sequence
  Description of Artificial Sequence: Synthetic oligonucleotide
  Sense strand starting at position 1339 of SEQ ID NO: 1561749
gugucuccacuauauagau

SEQ ID NO: 1695454 - RNA, 19 nt, Artificial Sequence
  Description of Artificial Sequence: Synthetic oligonucleotide
  Antisense strand to SEQ ID NO: 1695453
aucuauauaguggagacac

SEQ ID NO: 1695455 - RNA, 19 nt, Artificial Sequence
  Description of Artificial Sequence: Synthetic oligonucleotide
  Sense strand starting at position 1510 of SEQ ID NO: 1561749
agaggacaugguugugaaa

SEQ ID NO: 1695456 - RNA, 19 nt, Artificial Sequence
  Description of Artificial Sequence: Synthetic oligonucleotide
  Antisense strand to SEQ ID NO: 1695455
uuucacaaccauguccucu

SEQ ID NO: 1695457 - RNA, 19 nt, Artificial Sequence
  Description of Artificial Sequence: Synthetic oligonucleotide
  Sense strand starting at position 1638 of SEQ ID NO: 1561749
gagggcuucggagagcaaa

SEQ ID NO: 1695458 - RNA, 19 nt, Artificial Sequence
  Description of Artificial Sequence: Synthetic oligonucleotide
  Antisense strand to SEQ ID NO: 1695457
uuugcucuccgaagcccuc

SEQ ID NO: 1695459 - RNA, 19 nt, Artificial Sequence
  Description of Artificial Sequence: Synthetic oligonucleotide
  Sense strand starting at position 2128 of SEQ ID NO: 1561749
acuugauugcgcgucccua

SEQ ID NO: 1695460 - RNA, 19 nt, Artificial Sequence
  Description of Artificial Sequence: Synthetic oligonucleotide
  Antisense strand to SEQ ID NO: 1695459
uagggacgcgcaaucaagu

SEQ ID NO: 1695461 - RNA, 19 nt, Artificial Sequence
  Description of Artificial Sequence: Synthetic oligonucleotide
  Sense strand starting at position 2187 of SEQ ID NO: 1561749
acgagcuuccagugauuua

SEQ ID NO: 1695462 - RNA, 19 nt, Artificial Sequence
  Description of Artificial Sequence: Synthetic oligonucleotide
  Antisense strand to SEQ ID NO: 1695461
uaaaucacuggaagcucgu

SEQ ID NO: 1695463 - RNA, 19 nt, Artificial Sequence
  Description of Artificial Sequence: Synthetic oligonucleotide
  Sense strand starting at position 2279 of SEQ ID NO: 1561749
gcuaccgagcgcuugagau

SEQ ID NO: 1695464 - RNA, 19 nt, Artificial Sequence
  Description of Artificial Sequence: Synthetic oligonucleotide
  Antisense strand to SEQ ID NO: 1695463
aucucaagcgcucgguagc

SEQ ID NO: 1695465 - RNA, 19 nt, Artificial Sequence
  Description of Artificial Sequence: Synthetic oligonucleotide
  Sense strand starting at position 2319 of SEQ ID NO: 1561749
gugccauaaguguaaauaa

SEQ ID NO: 1695466 - RNA, 19 nt, Artificial Sequence
  Description of Artificial Sequence: Synthetic oligonucleotide
  Antisense strand to SEQ ID NO: 1695465
uuauuuacacuuauggcac

SEQ ID NO: 1695467 - RNA, 19 nt, Artificial Sequence
  Description of Artificial Sequence: Synthetic oligonucleotide
  Sense strand starting at position 2450 of SEQ ID NO: 1561749
ucuuaaaugugguuaguag

SEQ ID NO: 1695468 - RNA, 19 nt, Artificial Sequence
  Description of Artificial Sequence: Synthetic oligonucleotide
  Antisense strand to SEQ ID NO: 1695467
cuacuaaccacauuuaaga

SEQ ID NO: 1695469 - RNA, 19 nt, Artificial Sequence
  Description of Artificial Sequence: Synthetic oligonucleotide
  Sense strand starting at position 2451 of SEQ ID NO: 1561749
cuuaaaugugguuaguaga

SEQ ID NO: 1695470 - RNA, 19 nt, Artificial Sequence
  Description of Artificial Sequence: Synthetic oligonucleotide
  Antisense strand to SEQ ID NO: 1695469
ucuacuaaccacauuuaag

SEQ ID NO: 1695471 - RNA, 19 nt, Artificial Sequence
  Description of Artificial Sequence: Synthetic oligonucleotide
  Sense strand starting at position 2493 of SEQ ID NO: 1561749
ucucauuugugguucccau

SEQ ID NO: 1695472 - RNA, 19 nt, Artificial Sequence
  Description of Artificial Sequence: Synthetic oligonucleotide
  Antisense strand to SEQ ID NO: 1695471
augggaaccacaaaugaga

SEQ ID NO: 1695473 - RNA, 19 nt, Artificial Sequence
  Description of Artificial Sequence: Synthetic oligonucleotide
  Sense strand starting at position 2578 of SEQ ID NO: 1561749
ugagaaacuauuggugauc

SEQ ID NO: 1695474 - RNA, 19 nt, Artificial Sequence
  Description of Artificial Sequence: Synthetic oligonucleotide
  Antisense strand to SEQ ID NO: 1695473
gaucaccaauaguuucuca

SEQ ID NO: 1695475 - RNA, 19 nt, Artificial Sequence
  Description of Artificial Sequence: Synthetic oligonucleotide
  Sense strand starting at position 2583 of SEQ ID NO: 1561749
aacuauuggugaucacaug

SEQ ID NO: 1695476 - RNA, 19 nt, Artificial Sequence
  Description of Artificial Sequence: Synthetic oligonucleotide
  Antisense strand to SEQ ID NO: 1695475
caugugaucaccaauaguu

SEQ ID NO: 1695477 - RNA, 19 nt, Artificial Sequence
  Description of Artificial Sequence: Synthetic oligonucleotide
  Sense strand starting at position 2636 of SEQ ID NO: 1561749
aagucuaacggucacuaga

SEQ ID NO: 1695478 - RNA, 19 nt, Artificial Sequence
  Description of Artificial Sequence: Synthetic oligonucleotide
  Antisense strand to SEQ ID NO: 1695477
ucuagugaccguuagacuu

SEQ ID NO: 1695479 - RNA, 19 nt, Artificial Sequence
  Description of Artificial Sequence: Synthetic oligonucleotide
  Sense strand starting at position 2638 of SEQ ID NO: 1561749
gucuaacggucacuagaug

SEQ ID NO: 1695480 - RNA, 19 nt, Artificial Sequence
  Description of Artificial Sequence: Synthetic oligonucleotide
  Antisense strand to SEQ ID NO: 1695479
caucuagugaccguuagac

SEQ ID NO: 1695481 - RNA, 19 nt, Artificial Sequence
  Description of Artificial Sequence: Synthetic oligonucleotide
  Sense strand starting at position 2695 of SEQ ID NO: 1561749
aggagaaaguugcccauaa

SEQ ID NO: 1695482 - RNA, 19 nt, Artificial Sequence
  Description of Artificial Sequence: Synthetic oligonucleotide
  Antisense strand to SEQ ID NO: 1695481
uuaugggcaacuuucuccu

SEQ ID NO: 1695483 - RNA, 19 nt, Artificial Sequence
  Description of Artificial Sequence: Synthetic oligonucleotide
  Sense strand starting at position 2696 of SEQ ID NO: 1561749
ggagaaaguugcccauaau

SEQ ID NO: 1695484 - RNA, 19 nt, Artificial Sequence
  Description of Artificial Sequence: Synthetic oligonucleotide
  Antisense strand to SEQ ID NO: 1695483
auuaugggcaacuuucucc

SEQ ID NO: 1695485 - RNA, 19 nt, Artificial Sequence
  Description of Artificial Sequence: Synthetic oligonucleotide
  Sense strand starting at position 2697 of SEQ ID NO: 1561749
gagaaaguugcccauaauu

SEQ ID NO: 1695486 - RNA, 19 nt, Artificial Sequence
  Description of Artificial Sequence: Synthetic oligonucleotide
  Antisense strand to SEQ ID NO: 1695485
aauuaugggcaacuuucuc

SEQ ID NO: 1695487 - RNA, 19 nt, Artificial Sequence
  Description of Artificial Sequence: Synthetic oligonucleotide
  Sense strand starting at position 2699 of SEQ ID NO: 1561749
gaaaguugcccauaauugg

SEQ ID NO: 1695488 - RNA, 19 nt, Artificial Sequence
  Description of Artificial Sequence: Synthetic oligonucleotide
  Antisense strand to SEQ ID NO: 1695487
ccaauuaugggcaacuuuc

SEQ ID NO: 1695489 - RNA, 19 nt, Artificial Sequence
  Description of Artificial Sequence: Synthetic oligonucleotide
  Sense strand starting at position 2732 of SEQ ID NO: 1561749
gagugcaucugaucuuaaa

SEQ ID NO: 1695490 - RNA, 19 nt, Artificial Sequence
  Description of Artificial Sequence: Synthetic oligonucleotide
  Antisense strand to SEQ ID NO: 1695489
uuuaagaucagaugcacuc

SEQ ID NO: 1695491 - RNA, 19 nt, Artificial Sequence
  Description of Artificial Sequence: Synthetic oligonucleotide
  Sense strand starting at position 2756 of SEQ ID NO: 1561749
ucagaaugcaccugggacu

SEQ ID NO: 1695492 - RNA, 19 nt, Artificial Sequence
  Description of Artificial Sequence: Synthetic oligonucleotide
  Antisense strand to SEQ ID NO: 1695491
agucccaggugcauucuga

SEQ ID NO: 1695493 - RNA, 19 nt, Artificial Sequence
  Description of Artificial Sequence: Synthetic oligonucleotide
  Sense strand starting at position 3143 of SEQ ID NO: 1561749
ugcuuaaugguugacuauu

SEQ ID NO: 1695494 - RNA, 19 nt, Artificial Sequence
  Description of Artificial Sequence: Synthetic oligonucleotide
  Antisense strand to SEQ ID NO: 1695493
aauagucaaccauuaagca

SEQ ID NO: 1695495 - RNA, 19 nt, Artificial Sequence
  Description of Artificial Sequence: Synthetic oligonucleotide
  Sense strand starting at position 3151 of SEQ ID NO: 1561749
gguugacuauuuguuucuu

SEQ ID NO: 1695496 - RNA, 19 nt, Artificial Sequence
  Description of Artificial Sequence: Synthetic oligonucleotide
  Antisense strand to SEQ ID NO: 1695495
aagaaacaaauagucaacc

SEQ ID NO: 1695497 - RNA, 19 nt, Artificial Sequence
  Description of Artificial Sequence: Synthetic oligonucleotide
  Sense strand starting at position 3713 of SEQ ID NO: 1561749
cuaugcaaucugcauugaa

SEQ ID NO: 1695498 - RNA, 19 nt, Artificial Sequence
  Description of Artificial Sequence: Synthetic oligonucleotide
  Antisense strand to SEQ ID NO: 1695497
uucaaugcagauugcauag

SEQ ID NO: 1695499 - RNA, 19 nt, Artificial Sequence
  Description of Artificial Sequence: Synthetic oligonucleotide
  Sense strand starting at position 3735 of SEQ ID NO: 1561749
agucuauuugggugucuuu

SEQ ID NO: 1695500 - RNA, 19 nt, Artificial Sequence
  Description of Artificial Sequence: Synthetic oligonucleotide
  Antisense strand to SEQ ID NO: 1695499
aaagacacccaaauagacu

SEQ ID NO: 1695501 - RNA, 19 nt, Artificial Sequence
  Description of Artificial Sequence: Synthetic oligonucleotide
  Sense strand starting at position 312 of SEQ ID NO: 1561750
ccacccuauuugugcaaga

SEQ ID NO: 1695502 - RNA, 19 nt, Artificial Sequence
  Description of Artificial Sequence: Synthetic oligonucleotide
  Antisense strand to SEQ ID NO: 1695501
ucuugcacaaauagggugg

SEQ ID NO: 1695503 - RNA, 19 nt, Artificial Sequence
  Description of Artificial Sequence: Synthetic oligonucleotide
  Sense strand starting at position 408 of SEQ ID NO: 1561750
gcaucaugccauggaugga

SEQ ID NO: 1695504 - RNA, 19 nt, Artificial Sequence
  Description of Artificial Sequence: Synthetic oligonucleotide
  Antisense strand to SEQ ID NO: 1695503
uccauccauggcaugaugc

SEQ ID NO: 1695505 - RNA, 19 nt, Artificial Sequence
  Description of Artificial Sequence: Synthetic oligonucleotide
  Sense strand starting at position 461 of SEQ ID NO: 1561750
agacucaccucagugucau

SEQ ID NO: 1695506 - RNA, 19 nt, Artificial Sequence
  Description of Artificial Sequence: Synthetic oligonucleotide
  Antisense strand to SEQ ID NO: 1695505
augacacugaggugagucu

SEQ ID NO: 1695507 - RNA, 19 nt, Artificial Sequence
  Description of Artificial Sequence: Synthetic oligonucleotide
  Sense strand starting at position 752 of SEQ ID NO: 1561750
gcacuuuacauguggguaa

SEQ ID NO: 1695508 - RNA, 19 nt, Artificial Sequence
  Description of Artificial Sequence: Synthetic oligonucleotide
  Antisense strand to SEQ ID NO: 1695507
uuacccacauguaaagugc

SEQ ID NO: 1695509 - RNA, 19 nt, Artificial Sequence
  Description of Artificial Sequence: Synthetic oligonucleotide
  Sense strand starting at position 753 of SEQ ID NO: 1561750
cacuuuacauguggguaaa

SEQ ID NO: 1695510 - RNA, 19 nt, Artificial Sequence
  Description of Artificial Sequence: Synthetic oligonucleotide
  Antisense strand to SEQ ID NO: 1695509
uuuacccacauguaaagug

SEQ ID NO: 1695511 - RNA, 19 nt, Artificial Sequence
  Description of Artificial Sequence: Synthetic oligonucleotide
  Sense strand starting at position 1378 of SEQ ID NO: 1561750
ggaucaucuacgggaggca

SEQ ID NO: 1695512 - RNA, 19 nt, Artificial Sequence
  Description of Artificial Sequence: Synthetic oligonucleotide
  Antisense strand to SEQ ID NO: 1695511
ugccucccguagaugaucc

SEQ ID NO: 1695513 - RNA, 19 nt, Artificial Sequence
  Description of Artificial Sequence: Synthetic oligonucleotide
  Sense strand starting at position 2152 of SEQ ID NO: 1561750
aggucuuccuggucgagau

SEQ ID NO: 1695514 - RNA, 19 nt, Artificial Sequence
  Description of Artificial Sequence: Synthetic oligonucleotide
  Antisense strand to SEQ ID NO: 1695513
aucucgaccaggaagaccu

SEQ ID NO: 1695515 - RNA, 19 nt, Artificial Sequence
  Description of Artificial Sequence: Synthetic oligonucleotide
  Sense strand starting at position 2153 of SEQ ID NO: 1561750
ggucuuccuggucgagauc

SEQ ID NO: 1695516 - RNA, 19 nt, Artificial Sequence
  Description of Artificial Sequence: Synthetic oligonucleotide
  Antisense strand to SEQ ID NO: 1695515
gaucucgaccaggaagacc

SEQ ID NO: 1695517 - RNA, 19 nt, Artificial Sequence
  Description of Artificial Sequence: Synthetic oligonucleotide
  Sense strand starting at position 2162 of SEQ ID NO: 1561750
ggucgagaucgaggagaaa

SEQ ID NO: 1695518 - RNA, 19 nt, Artificial Sequence
  Description of Artificial Sequence: Synthetic oligonucleotide
  Antisense strand to SEQ ID NO: 1695517
uuucuccucgaucucgacc

SEQ ID NO: 1695519 - RNA, 19 nt, Artificial Sequence
  Description of Artificial Sequence: Synthetic oligonucleotide
  Sense strand starting at position 2390 of SEQ ID NO: 1561750
ggaaccauaucugcgcauu

SEQ ID NO: 1695520 - RNA, 19 nt, Artificial Sequence
  Description of Artificial Sequence: Synthetic oligonucleotide
  Antisense strand to SEQ ID NO: 1695519
aaugcgcagauaugguucc

SEQ ID NO: 1695521 - RNA, 19 nt, Artificial Sequence
  Description of Artificial Sequence: Synthetic oligonucleotide
  Sense strand starting at position 2482 of SEQ ID NO: 1561750
agcucuaugagcugaacgu

SEQ ID NO: 1695522 - RNA, 19 nt, Artificial Sequence
  Description of Artificial Sequence: Synthetic oligonucleotide
  Antisense strand to SEQ ID NO: 1695521
acguucagcucauagagcu

SEQ ID NO: 1695523 - RNA, 19 nt, Artificial Sequence
  Description of Artificial Sequence: Synthetic oligonucleotide
  Sense strand starting at position 2651 of SEQ ID NO: 1561750
ggacguguuugcuuccaca

SEQ ID NO: 1695524 - RNA, 19 nt, Artificial Sequence
  Description of Artificial Sequence: Synthetic oligonucleotide
  Antisense strand to SEQ ID NO: 1695523
uguggaagcaaacacgucc

SEQ ID NO: 1695525 - RNA, 19 nt, Artificial Sequence
  Description of Artificial Sequence: Synthetic oligonucleotide
  Sense strand starting at position 2654 of SEQ ID NO: 1561750
cguguuugcuuccacaaag

SEQ ID NO: 1695526 - RNA, 19 nt, Artificial Sequence
  Description of Artificial Sequence: Synthetic oligonucleotide
  Antisense strand to SEQ ID NO: 1695525
cuuuguggaagcaaacacg

SEQ ID NO: 1695527 - RNA, 19 nt, Artificial Sequence
  Description of Artificial Sequence: Synthetic oligonucleotide
  Sense strand starting at position 2681 of SEQ ID NO: 1561750
ccuuguccagcucgaguau

SEQ ID NO: 1695528 - RNA, 19 nt, Artificial Sequence
  Description of Artificial Sequence: Synthetic oligonucleotide
  Antisense strand to SEQ ID NO: 1695527
auacucgagcuggacaagg

SEQ ID NO: 1695529 - RNA, 19 nt, Artificial Sequence
  Description of Artificial Sequence: Synthetic oligonucleotide
  Sense strand starting at position 2693 of SEQ ID NO: 1561750
cgaguauggcuguagguau

SEQ ID NO: 1695530 - RNA, 19 nt, Artificial Sequence
  Description of Artificial Sequence: Synthetic oligonucleotide
  Antisense strand to SEQ ID NO: 1695529
auaccuacagccauacucg

SEQ ID NO: 1695531 - RNA, 19 nt, Artificial Sequence
  Description of Artificial Sequence: Synthetic oligonucleotide
  Sense strand starting at position 2796 of SEQ ID NO: 1561750
ccggcacuaguuuaagagu

SEQ ID NO: 1695532 - RNA, 19 nt, Artificial Sequence
  Description of Artificial Sequence: Synthetic oligonucleotide
  Antisense strand to SEQ ID NO: 1695531
acucuuaaacuagugccgg

SEQ ID NO: 1695533 - RNA, 19 nt, Artificial Sequence
  Description of Artificial Sequence: Synthetic oligonucleotide
  Sense strand starting at position 2885 of SEQ ID NO: 1561750
gguaccuaucuugguugau

SEQ ID NO: 1695534 - RNA, 19 nt, Artificial Sequence
  Description of Artificial Sequence: Synthetic oligonucleotide
  Antisense strand to SEQ ID NO: 1695533
aucaaccaagauagguacc

SEQ ID NO: 1695535 - RNA, 19 nt, Artificial Sequence
  Description of Artificial Sequence: Synthetic oligonucleotide
  Sense strand starting at position 2886 of SEQ ID NO: 1561750
guaccuaucuugguugauu

SEQ ID NO: 1695536 - RNA, 19 nt, Artificial Sequence
  Description of Artificial Sequence: Synthetic oligonucleotide
  Antisense strand to SEQ ID NO: 1695535
aaucaaccaagauagguac

SEQ ID NO: 1695537 - RNA, 19 nt, Artificial Sequence
  Description of Artificial Sequence: Synthetic oligonucleotide
  Sense strand starting at position 2887 of SEQ ID NO: 1561750
uaccuaucuugguugauug

SEQ ID NO: 1695538 - RNA, 19 nt, Artificial Sequence
  Description of Artificial Sequence: Synthetic oligonucleotide
  Antisense strand to SEQ ID NO: 1695537
caaucaaccaagauaggua

SEQ ID NO: 1695539 - RNA, 19 nt, Artificial Sequence
  Description of Artificial Sequence: Synthetic oligonucleotide
  Sense strand starting at position 2888 of SEQ ID NO: 1561750
accuaucuugguugauuga

SEQ ID NO: 1695540 - RNA, 19 nt, Artificial Sequence
  Description of Artificial Sequence: Synthetic oligonucleotide
  Antisense strand to SEQ ID NO: 1695539
ucaaucaaccaagauaggu

SEQ ID NO: 1695541 - RNA, 19 nt, Artificial Sequence
  Description of Artificial Sequence: Synthetic oligonucleotide
  Sense strand starting at position 2889 of SEQ ID NO: 1561750
ccuaucuugguugauugau

SEQ ID NO: 1695542 - RNA, 19 nt, Artificial Sequence
  Description of Artificial Sequence: Synthetic oligonucleotide
  Antisense strand to SEQ ID NO: 1695541
aucaaucaaccaagauagg

SEQ ID NO: 1695543 - RNA, 19 nt, Artificial Sequence
  Description of Artificial Sequence: Synthetic oligonucleotide
  Sense strand starting at position 2891 of SEQ ID NO: 1561750
uaucuugguugauugauua

SEQ ID NO: 1695544 - RNA, 19 nt, Artificial Sequence
  Description of Artificial Sequence: Synthetic oligonucleotide
  Antisense strand to SEQ ID NO: 1695543
uaaucaaucaaccaagaua

SEQ ID NO: 1695545 - RNA, 19 nt, Artificial Sequence
  Description of Artificial Sequence: Synthetic oligonucleotide
  Sense strand starting at position 2895 of SEQ ID NO: 1561750
uugguugauugauuaagau

SEQ ID NO: 1695546 - RNA, 19 nt, Artificial Sequence
  Description of Artificial Sequence: Synthetic oligonucleotide
  Antisense strand to SEQ ID NO: 1695545
aucuuaaucaaucaaccaa

SEQ ID NO: 1695547 - RNA, 19 nt, Artificial Sequence
  Description of Artificial Sequence: Synthetic oligonucleotide
  Sense strand starting at position 2937 of SEQ ID NO: 1561750
uugauaguguuuccuguau

SEQ ID NO: 1695548 - RNA, 19 nt, Artificial Sequence
  Description of Artificial Sequence: Synthetic oligonucleotide
  Antisense strand to SEQ ID NO: 1695547
auacaggaaacacuaucaa

SEQ ID NO: 1695549 - RNA, 19 nt, Artificial Sequence
  Description of Artificial Sequence: Synthetic oligonucleotide
  Sense strand starting at position 2939 of SEQ ID NO: 1561750
gauaguguuuccuguauuc

SEQ ID NO: 1695550 - RNA, 19 nt, Artificial Sequence
  Description of Artificial Sequence: Synthetic oligonucleotide
  Antisense strand to SEQ ID NO: 1695549
gaauacaggaaacacuauc

SEQ ID NO: 1695551 - RNA, 19 nt, Artificial Sequence
  Description of Artificial Sequence: Synthetic oligonucleotide
  Sense strand starting at position 3615 of SEQ ID NO: 1561750
ugcucauagacuugggcau

SEQ ID NO: 1695552 - RNA, 19 nt, Artificial Sequence
  Description of Artificial Sequence: Synthetic oligonucleotide
  Antisense strand to SEQ ID NO: 1695551
augcccaagucuaugagca

SEQ ID NO: 1695553 - RNA, 19 nt, Artificial Sequence
  Description of Artificial Sequence: Synthetic oligonucleotide
  Sense strand starting at position 3616 of SEQ ID NO: 1561750
gcucauagacuugggcaua

SEQ ID NO: 1695554 - RNA, 19 nt, Artificial Sequence
  Description of Artificial Sequence: Synthetic oligonucleotide
  Antisense strand to SEQ ID NO: 1695553
uaugcccaagucuaugagc

SEQ ID NO: 1695555 - RNA, 19 nt, Artificial Sequence
  Description of Artificial Sequence: Synthetic oligonucleotide
  Sense strand starting at position 3617 of SEQ ID NO: 1561750
cucauagacuugggcauau

SEQ ID NO: 1695556 - RNA, 19 nt, Artificial Sequence
  Description of Artificial Sequence: Synthetic oligonucleotide
  Antisense strand to SEQ ID NO: 1695555
auaugcccaagucuaugag

SEQ ID NO: 1695557 - RNA, 19 nt, Artificial Sequence
  Description of Artificial Sequence: Synthetic oligonucleotide
  Sense strand starting at position 3637 of SEQ ID NO: 1561750
ggcuauuggcuucgaggca

SEQ ID NO: 1695558 - RNA, 19 nt, Artificial Sequence
  Description of Artificial Sequence: Synthetic oligonucleotide
  Antisense strand to SEQ ID NO: 1695557
ugccucgaagccaauagcc

SEQ ID NO: 1695559 - RNA, 19 nt, Artificial Sequence
  Description of Artificial Sequence: Synthetic oligonucleotide
  Sense strand starting at position 3638 of SEQ ID NO: 1561750
gcuauuggcuucgaggcau

SEQ ID NO: 1695560 - RNA, 19 nt, Artificial Sequence
  Description of Artificial Sequence: Synthetic oligonucleotide
  Antisense strand to SEQ ID NO: 1695559
augccucgaagccaauagc

SEQ ID NO: 1695561 - RNA, 19 nt, Artificial Sequence
  Description of Artificial Sequence: Synthetic oligonucleotide
  Sense strand starting at position 3642 of SEQ ID NO: 1561750
uuggcuucgaggcauaaca

SEQ ID NO: 1695562 - RNA, 19 nt, Artificial Sequence
  Description of Artificial Sequence: Synthetic oligonucleotide
  Antisense strand to SEQ ID NO: 1695561
uguuaugccucgaagccaa

SEQ ID NO: 1695563 - RNA, 19 nt, Artificial Sequence
  Description of Artificial Sequence: Synthetic oligonucleotide
  Sense strand starting at position 3644 of SEQ ID NO: 1561750
ggcuucgaggcauaacaaa

SEQ ID NO: 1695564 - RNA, 19 nt, Artificial Sequence
  Description of Artificial Sequence: Synthetic oligonucleotide
  Antisense strand to SEQ ID NO: 1695563
uuuguuaugccucgaagcc

SEQ ID NO: 1695565 - RNA, 19 nt, Artificial Sequence
  Description of Artificial Sequence: Synthetic oligonucleotide
  Sense strand starting at position 3670 of SEQ ID NO: 1561750
cugagagcuucuuaaugcu

SEQ ID NO: 1695566 - RNA, 19 nt, Artificial Sequence
  Description of Artificial Sequence: Synthetic oligonucleotide
  Antisense strand to SEQ ID NO: 1695565
agcauuaagaagcucucag

SEQ ID NO: 1695567 - RNA, 19 nt, Artificial Sequence
  Description of Artificial Sequence: Synthetic oligonucleotide
  Sense strand starting at position 3679 of SEQ ID NO: 1561750
ucuuaaugcugaguaugau

SEQ ID NO: 1695568 - RNA, 19 nt, Artificial Sequence
  Description of Artificial Sequence: Synthetic oligonucleotide
  Antisense strand to SEQ ID NO: 1695567
aucauacucagcauuaaga

SEQ ID NO: 1695569 - RNA, 19 nt, Artificial Sequence
  Description of Artificial Sequence: Synthetic oligonucleotide
  Sense strand starting at position 3680 of SEQ ID NO: 1561750
cuuaaugcugaguaugauu

SEQ ID NO: 1695570 - RNA, 19 nt, Artificial Sequence
  Description of Artificial Sequence: Synthetic oligonucleotide
  Antisense strand to SEQ ID NO: 1695569
aaucauacucagcauuaag

SEQ ID NO: 1695571 - RNA, 19 nt, Artificial Sequence
  Description of Artificial Sequence: Synthetic oligonucleotide
  Sense strand starting at position 3698 of SEQ ID NO: 1561750
ucauuauagcccugguaag

SEQ ID NO: 1695572 - RNA, 19 nt, Artificial Sequence
  Description of Artificial Sequence: Synthetic oligonucleotide
  Antisense strand to SEQ ID NO: 1695571
cuuaccagggcuauaauga

SEQ ID NO: 1695573 - RNA, 19 nt, Artificial Sequence
  Description of Artificial Sequence: Synthetic oligonucleotide
  Sense strand starting at position 3708 of SEQ ID NO: 1561750
ccugguaagcauugcaguu

SEQ ID NO: 1695574 - RNA, 19 nt, Artificial Sequence
  Description of Artificial Sequence: Synthetic oligonucleotide
  Antisense strand to SEQ ID NO: 1695573
aacugcaaugcuuaccagg

SEQ ID NO: 1695575 - RNA, 19 nt, Artificial Sequence
  Description of Artificial Sequence: Synthetic oligonucleotide
  Sense strand starting at position 3710 of SEQ ID NO: 1561750
ugguaagcauugcaguuau

SEQ ID NO: 1695576 - RNA, 19 nt, Artificial Sequence
  Description of Artificial Sequence: Synthetic oligonucleotide
  Antisense strand to SEQ ID NO: 1695575
auaacugcaaugcuuacca

SEQ ID NO: 1695577 - RNA, 19 nt, Artificial Sequence
  Description of Artificial Sequence: Synthetic oligonucleotide
  Sense strand starting at position 3857 of SEQ ID NO: 1561750
aagggauugugcuaagugu

SEQ ID NO: 1695578 - RNA, 19 nt, Artificial Sequence
  Description of Artificial Sequence: Synthetic oligonucleotide
  Antisense strand to SEQ ID NO: 1695577
acacuuagcacaaucccuu

SEQ ID NO: 1695579 - RNA, 19 nt, Artificial Sequence
  Description of Artificial Sequence: Synthetic oligonucleotide
  Sense strand starting at position 3861 of SEQ ID NO: 1561750
gauugugcuaaguguuaug

SEQ ID NO: 1695580 - RNA, 19 nt, Artificial Sequence
  Description of Artificial Sequence: Synthetic oligonucleotide
  Antisense strand to SEQ ID NO: 1695579
cauaacacuuagcacaauc

SEQ ID NO: 1695581 - RNA, 19 nt, Artificial Sequence
  Description of Artificial Sequence: Synthetic oligonucleotide
  Sense strand starting at position 520 of SEQ ID NO: 1561751
ugcagcagccucguugaua

SEQ ID NO: 1695582 - RNA, 19 nt, Artificial Sequence
  Description of Artificial Sequence: Synthetic oligonucleotide
  Antisense strand to SEQ ID NO: 1695581
uaucaacgaggcugcugca

SEQ ID NO: 1695583 - RNA, 19 nt, Artificial Sequence
  Description of Artificial Sequence: Synthetic oligonucleotide
  Sense strand starting at position 521 of SEQ ID NO: 1561751
gcagcagccucguugauag

SEQ ID NO: 1695584 - RNA, 19 nt, Artificial Sequence
  Description of Artificial Sequence: Synthetic oligonucleotide
  Antisense strand to SEQ ID NO: 1695583
cuaucaacgaggcugcugc

SEQ ID NO: 1695585 - RNA, 19 nt, Artificial Sequence
  Description of Artificial Sequence: Synthetic oligonucleotide
  Sense strand starting at position 626 of SEQ ID NO: 1561751
ggagguagugaccagguua

SEQ ID NO: 1695586 - RNA, 19 nt, Artificial Sequence
  Description of Artificial Sequence: Synthetic oligonucleotide
  Antisense strand to SEQ ID NO: 1695585
uaaccuggucacuaccucc

SEQ ID NO: 1695587 - RNA, 19 nt, Artificial Sequence
  Description of Artificial Sequence: Synthetic oligonucleotide
  Sense strand starting at position 714 of SEQ ID NO: 1561751
gaagcaguuuacuucugua

SEQ ID NO: 1695588 - RNA, 19 nt, Artificial Sequence
  Description of Artificial Sequence: Synthetic oligonucleotide
  Antisense strand to SEQ ID NO: 1695587
uacagaaguaaacugcuuc

SEQ ID NO: 1695589 - RNA, 19 nt, Artificial Sequence
  Description of Artificial Sequence: Synthetic oligonucleotide
  Sense strand starting at position 828 of SEQ ID NO: 1561751
agccacuugucacugggau

SEQ ID NO: 1695590 - RNA, 19 nt, Artificial Sequence
  Description of Artificial Sequence: Synthetic oligonucleotide
  Antisense strand to SEQ ID NO: 1695589
aucccagugacaaguggcu

SEQ ID NO: 1695591 - RNA, 19 nt, Artificial Sequence
  Description of Artificial Sequence: Synthetic oligonucleotide
  Sense strand starting at position 829 of SEQ ID NO: 1561751
gccacuugucacugggauu

SEQ ID NO: 1695592 - RNA, 19 nt, Artificial Sequence
  Description of Artificial Sequence: Synthetic oligonucleotide
  Antisense strand to SEQ ID NO: 1695591
aaucccagugacaaguggc

SEQ ID NO: 1695593 - RNA, 19 nt, Artificial Sequence
  Description of Artificial Sequence: Synthetic oligonucleotide
  Sense strand starting at position 955 of SEQ ID NO: 1561751
cugaccuggccuugaauca

SEQ ID NO: 1695594 - RNA, 19 nt, Artificial Sequence
  Description of Artificial Sequence: Synthetic oligonucleotide
  Antisense strand to SEQ ID NO: 1695593
ugauucaaggccaggucag

SEQ ID NO: 1695595 - RNA, 19 nt, Artificial Sequence
  Description of Artificial Sequence: Synthetic oligonucleotide
  Sense strand starting at position 1406 of SEQ ID NO: 1561751
gcucucagaaugugaagga

SEQ ID NO: 1695596 - RNA, 19 nt, Artificial Sequence
  Description of Artificial Sequence: Synthetic oligonucleotide
  Antisense strand to SEQ ID NO: 1695595
uccuucacauucugagagc

SEQ ID NO: 1695597 - RNA, 19 nt, Artificial Sequence
  Description of Artificial Sequence: Synthetic oligonucleotide
  Sense strand starting at position 2551 of SEQ ID NO: 1561751
ggcaucaggaguuauccaa

SEQ ID NO: 1695598 - RNA, 19 nt, Artificial Sequence
  Description of Artificial Sequence: Synthetic oligonucleotide
  Antisense strand to SEQ ID NO: 1695597
uuggauaacuccugaugcc

SEQ ID NO: 1695599 - RNA, 19 nt, Artificial Sequence
  Description of Artificial Sequence: Synthetic oligonucleotide
  Sense strand starting at position 2555 of SEQ ID NO: 1561751
ucaggaguuauccaaugug

SEQ ID NO: 1695600 - RNA, 19 nt, Artificial Sequence
  Description of Artificial Sequence: Synthetic oligonucleotide
  Antisense strand to SEQ ID NO: 1695599
cacauuggauaacuccuga

SEQ ID NO: 1695601 - RNA, 19 nt, Artificial Sequence
  Description of Artificial Sequence: Synthetic oligonucleotide
  Sense strand starting at position 2558 of SEQ ID NO: 1561751
ggaguuauccaaugugacu

SEQ ID NO: 1695602 - RNA, 19 nt, Artificial Sequence
  Description of Artificial Sequence: Synthetic oligonucleotide
  Antisense strand to SEQ ID NO: 1695601
agucacauuggauaacucc

SEQ ID NO: 1695603 - RNA, 19 nt, Artificial Sequence
  Description of Artificial Sequence: Synthetic oligonucleotide
  Sense strand starting at position 2608 of SEQ ID NO: 1561751
acgaaacucuucuuaguca

SEQ ID NO: 1695604 - RNA, 19 nt, Artificial Sequence
  Description of Artificial Sequence: Synthetic oligonucleotide
  Antisense strand to SEQ ID NO: 1695603
ugacuaagaagaguuucgu

SEQ ID NO: 1695605 - RNA, 19 nt, Artificial Sequence
  Description of Artificial Sequence: Synthetic oligonucleotide
  Sense strand starting at position 2609 of SEQ ID NO: 1561751
cgaaacucuucuuagucaa

SEQ ID NO: 1695606 - RNA, 19 nt, Artificial Sequence
  Description of Artificial Sequence: Synthetic oligonucleotide
  Antisense strand to SEQ ID NO: 1695605
uugacuaagaagaguuucg

SEQ ID NO: 1695607 - RNA, 19 nt, Artificial Sequence
  Description of Artificial Sequence: Synthetic oligonucleotide
  Sense strand starting at position 2738 of SEQ ID NO: 1561751
uggccuucuucucugguaa

SEQ ID NO: 1695608 - RNA, 19 nt, Artificial Sequence
  Description of Artificial Sequence: Synthetic oligonucleotide
  Antisense strand to SEQ ID NO: 1695607
uuaccagagaagaaggcca

SEQ ID NO: 1695609 - RNA, 19 nt, Artificial Sequence
  Description of Artificial Sequence: Synthetic oligonucleotide
  Sense strand starting at position 2739 of SEQ ID NO: 1561751
ggccuucuucucugguaag

SEQ ID NO: 1695610 - RNA, 19 nt, Artificial Sequence
  Description of Artificial Sequence: Synthetic oligonucleotide
  Antisense strand to SEQ ID NO: 1695609
cuuaccagagaagaaggcc

SEQ ID NO: 1695611 - RNA, 19 nt, Artificial Sequence
  Description of Artificial Sequence: Synthetic oligonucleotide
  Sense strand starting at position 2742 of SEQ ID NO: 1561751
cuucuucucugguaagaac

SEQ ID NO: 1695612 - RNA, 19 nt, Artificial Sequence
  Description of Artificial Sequence: Synthetic oligonucleotide
  Antisense strand to SEQ ID NO: 1695611
guucuuaccagagaagaag

SEQ ID NO: 1695613 - RNA, 19 nt, Artificial Sequence
  Description of Artificial Sequence: Synthetic oligonucleotide
  Sense strand starting at position 2823 of SEQ ID NO: 1561751
cacagaugagcuugccuga

SEQ ID NO: 1695614 - RNA, 19 nt, Artificial Sequence
  Description of Artificial Sequence: Synthetic oligonucleotide
  Antisense strand to SEQ ID NO: 1695613
ucaggcaagcucaucugug

SEQ ID NO: 1695615 - RNA, 19 nt, Artificial Sequence
  Description of Artificial Sequence: Synthetic oligonucleotide
  Sense strand starting at position 2916 of SEQ ID NO: 1561751
uccugacuuccagaagcuu

SEQ ID NO: 1695616 - RNA, 19 nt, Artificial Sequence
  Description of Artificial Sequence: Synthetic oligonucleotide
  Antisense strand to SEQ ID NO: 1695615
aagcuucuggaagucagga

SEQ ID NO: 1695617 - RNA, 19 nt, Artificial Sequence
  Description of Artificial Sequence: Synthetic oligonucleotide
  Sense strand starting at position 2927 of SEQ ID NO: 1561751
agaagcuuccaugaccauu

SEQ ID NO: 1695618 - RNA, 19 nt, Artificial Sequence
  Description of Artificial Sequence: Synthetic oligonucleotide
  Antisense strand to SEQ ID NO: 1695617
aauggucauggaagcuucu

SEQ ID NO: 1695619 - RNA, 19 nt, Artificial Sequence
  Description of Artificial Sequence: Synthetic oligonucleotide
  Sense strand starting at position 3017 of SEQ ID NO: 1561751
uucgucagcccagaaguuu

SEQ ID NO: 1695620 - RNA, 19 nt, Artificial Sequence
  Description of Artificial Sequence: Synthetic oligonucleotide
  Antisense strand to SEQ ID NO: 1695619
aaacuucugggcugacgaa

SEQ ID NO: 1695621 - RNA, 19 nt, Artificial Sequence
  Description of Artificial Sequence: Synthetic oligonucleotide
  Sense strand starting at position 3097 of SEQ ID NO: 1561751
ugaugugucucuuauuugu

SEQ ID NO: 1695622 - RNA, 19 nt, Artificial Sequence
  Description of Artificial Sequence: Synthetic oligonucleotide
  Antisense strand to SEQ ID NO: 1695621
acaaauaagagacacauca

SEQ ID NO: 1695623 - RNA, 19 nt, Artificial Sequence
  Description of Artificial Sequence: Synthetic oligonucleotide
  Sense strand starting at position 3099 of SEQ ID NO: 1561751
augugucucuuauuuguuu

SEQ ID NO: 1695624 - RNA, 19 nt, Artificial Sequence
  Description of Artificial Sequence: Synthetic oligonucleotide
  Antisense strand to SEQ ID NO: 1695623
aaacaaauaagagacacau

SEQ ID NO: 1695625 - RNA, 19 nt, Artificial Sequence
  Description of Artificial Sequence: Synthetic oligonucleotide
  Sense strand starting at position 3103 of SEQ ID NO: 1561751
gucucuuauuuguuuggca

SEQ ID NO: 1695626 - RNA, 19 nt, Artificial Sequence
  Description of Artificial Sequence: Synthetic oligonucleotide
  Antisense strand to SEQ ID NO: 1695625
ugccaaacaaauaagagac

SEQ ID NO: 1695627 - RNA, 19 nt, Artificial Sequence
  Description of Artificial Sequence: Synthetic oligonucleotide
  Sense strand starting at position 3104 of SEQ ID NO: 1561751
ucucuuauuuguuuggcaa

SEQ ID NO: 1695628 - RNA, 19 nt, Artificial Sequence
  Description of Artificial Sequence: Synthetic oligonucleotide
  Antisense strand to SEQ ID NO: 1695627
uugccaaacaaauaagaga

SEQ ID NO: 1695629 - RNA, 19 nt, Artificial Sequence
  Description of Artificial Sequence: Synthetic oligonucleotide
  Sense strand starting at position 3105 of SEQ ID NO: 1561751
cucuuauuuguuuggcaag

SEQ ID NO: 1695630 - RNA, 19 nt, Artificial Sequence
  Description of Artificial Sequence: Synthetic oligonucleotide
  Antisense strand to SEQ ID NO: 1695629
cuugccaaacaaauaagag

SEQ ID NO: 1695631 - RNA, 19 nt, Artificial Sequence
  Description of Artificial Sequence: Synthetic oligonucleotide
  Sense strand starting at position 3106 of SEQ ID NO: 1561751
ucuuauuuguuuggcaagu

SEQ ID NO: 1695632 - RNA, 19 nt, Artificial Sequence
  Description of Artificial Sequence: Synthetic oligonucleotide
  Antisense strand to SEQ ID NO: 1695631
acuugccaaacaaauaaga

SEQ ID NO: 1695633 - RNA, 19 nt, Artificial Sequence
  Description of Artificial Sequence: Synthetic oligonucleotide
  Sense strand starting at position 3117 of SEQ ID NO: 1561751
uggcaagucgcucauggaa

SEQ ID NO: 1695634 - RNA, 19 nt, Artificial Sequence
  Description of Artificial Sequence: Synthetic oligonucleotide
  Antisense strand to SEQ ID NO: 1695633
uuccaugagcgacuugcca

SEQ ID NO: 1695635 - RNA, 19 nt, Artificial Sequence
  Description of Artificial Sequence: Synthetic oligonucleotide
  Sense strand starting at position 3132 of SEQ ID NO: 1561751
ggaaaccauuaguguccau

SEQ ID NO: 1695636 - RNA, 19 nt, Artificial Sequence
  Description of Artificial Sequence: Synthetic oligonucleotide
  Antisense strand to SEQ ID NO: 1695635
auggacacuaaugguuucc

SEQ ID NO: 1695637 - RNA, 19 nt, Artificial Sequence
  Description of Artificial Sequence: Synthetic oligonucleotide
  Sense strand starting at position 3136 of SEQ ID NO: 1561751
accauuaguguccaucagu

SEQ ID NO: 1695638 - RNA, 19 nt, Artificial Sequence
  Description of Artificial Sequence: Synthetic oligonucleotide
  Antisense strand to SEQ ID NO: 1695637
acugauggacacuaauggu

SEQ ID NO: 1695639 - RNA, 19 nt, Artificial Sequence
  Description of Artificial Sequence: Synthetic oligonucleotide
  Sense strand starting at position 3139 of SEQ ID NO: 1561751
auuaguguccaucagucau

SEQ ID NO: 1695640 - RNA, 19 nt, Artificial Sequence
  Description of Artificial Sequence: Synthetic oligonucleotide
  Antisense strand to SEQ ID NO: 1695639
augacugauggacacuaau

SEQ ID NO: 1695641 - RNA, 19 nt, Artificial Sequence
  Description of Artificial Sequence: Synthetic oligonucleotide
  Sense strand starting at position 3143 of SEQ ID NO: 1561751
guguccaucagucaucaga

SEQ ID NO: 1695642 - RNA, 19 nt, Artificial Sequence
  Description of Artificial Sequence: Synthetic oligonucleotide
  Antisense strand to SEQ ID NO: 1695641
ucugaugacugauggacac

SEQ ID NO: 1695643 - RNA, 19 nt, Artificial Sequence
  Description of Artificial Sequence: Synthetic oligonucleotide
  Sense strand starting at position 3145 of SEQ ID NO: 1561751
guccaucagucaucagaag

SEQ ID NO: 1695644 - RNA, 19 nt, Artificial Sequence
  Description of Artificial Sequence: Synthetic oligonucleotide
  Antisense strand to SEQ ID NO: 1695643
cuucugaugacugauggac

SEQ ID NO: 1695645 - RNA, 19 nt, Artificial Sequence
  Description of Artificial Sequence: Synthetic oligonucleotide
  Sense strand starting at position 3175 of SEQ ID NO: 1561751
uggccauccugggagaagu

SEQ ID NO: 1695646 - RNA, 19 nt, Artificial Sequence
  Description of Artificial Sequence: Synthetic oligonucleotide
  Antisense strand to SEQ ID NO: 1695645
acuucucccaggauggcca

SEQ ID NO: 1695647 - RNA, 19 nt, Artificial Sequence
  Description of Artificial Sequence: Synthetic oligonucleotide
  Sense strand starting at position 3332 of SEQ ID NO: 1561751
ggguccuugugaggaagaa

SEQ ID NO: 1695648 - RNA, 19 nt, Artificial Sequence
  Description of Artificial Sequence: Synthetic oligonucleotide
  Antisense strand to SEQ ID NO: 1695647
uucuuccucacaaggaccc

SEQ ID NO: 1695649 - RNA, 19 nt, Artificial Sequence
  Description of Artificial Sequence: Synthetic oligonucleotide
  Sense strand starting at position 3409 of SEQ ID NO: 1561751
uuuggcuucuucuaaagaa

SEQ ID NO: 1695650 - RNA, 19 nt, Artificial Sequence
  Description of Artificial Sequence: Synthetic oligonucleotide
  Antisense strand to SEQ ID NO: 1695649
uucuuuagaagaagccaaa

SEQ ID NO: 1695651 - RNA, 19 nt, Artificial Sequence
  Description of Artificial Sequence: Synthetic oligonucleotide
  Sense strand starting at position 3491 of SEQ ID NO: 1561751
aguuaugauccagguacug

SEQ ID NO: 1695652 - RNA, 19 nt, Artificial Sequence
  Description of Artificial Sequence: Synthetic oligonucleotide
  Antisense strand to SEQ ID NO: 1695651
caguaccuggaucauaacu

SEQ ID NO: 1695653 - RNA, 19 nt, Artificial Sequence
  Description of Artificial Sequence: Synthetic oligonucleotide
  Sense strand starting at position 3724 of SEQ ID NO: 1561751
gcauguagaagguaugaca

SEQ ID NO: 1695654 - RNA, 19 nt, Artificial Sequence
  Description of Artificial Sequence: Synthetic oligonucleotide
  Antisense strand to SEQ ID NO: 1695653
ugucauaccuucuacaugc

SEQ ID NO: 1695655 - RNA, 19 nt, Artificial Sequence
  Description of Artificial Sequence: Synthetic oligonucleotide
  Sense strand starting at position 3788 of SEQ ID NO: 1561751
gcccuaaguccagaagugu

SEQ ID NO: 1695656 - RNA, 19 nt, Artificial Sequence
  Description of Artificial Sequence: Synthetic oligonucleotide
  Antisense strand to SEQ ID NO: 1695655
acacuucuggacuuagggc

SEQ ID NO: 1695657 - RNA, 19 nt, Artificial Sequence
  Description of Artificial Sequence: Synthetic oligonucleotide
  Sense strand starting at position 3801 of SEQ ID NO: 1561751
aaguguaaugcagagcuga

SEQ ID NO: 1695658 - RNA, 19 nt, Artificial Sequence
  Description of Artificial Sequence: Synthetic oligonucleotide
  Antisense strand to SEQ ID NO: 1695657
ucagcucugcauuacacuu

SEQ ID NO: 1695659 - RNA, 19 nt, Artificial Sequence
  Description of Artificial Sequence: Synthetic oligonucleotide
  Sense strand starting at position 3903 of SEQ ID NO: 1561751
ucacaaguccuguacauca

SEQ ID NO: 1695660 - RNA, 19 nt, Artificial Sequence
  Description of Artificial Sequence: Synthetic oligonucleotide
  Antisense strand to SEQ ID NO: 1695659
ugauguacaggacuuguga

SEQ ID NO: 1695661 - RNA, 19 nt, Artificial Sequence
  Description of Artificial Sequence: Synthetic oligonucleotide
  Sense strand starting at position 56 of SEQ ID NO: 1561752
cucagaucuguuugaggga

SEQ ID NO: 1695662 - RNA, 19 nt, Artificial Sequence
  Description of Artificial Sequence: Synthetic oligonucleotide
  Antisense strand to SEQ ID NO: 1695661
ucccucaaacagaucugag

SEQ ID NO: 1695663 - RNA, 19 nt, Artificial Sequence
  Description of Artificial Sequence: Synthetic oligonucleotide
  Sense strand starting at position 57 of SEQ ID NO: 1561752
ucagaucuguuugagggaa

SEQ ID NO: 1695664 - RNA, 19 nt, Artificial Sequence
  Description of Artificial Sequence: Synthetic oligonucleotide
  Antisense strand to SEQ ID NO: 1695663
uucccucaaacagaucuga

SEQ ID NO: 1695665 - RNA, 19 nt, Artificial Sequence
  Description of Artificial Sequence: Synthetic oligonucleotide
  Sense strand starting at position 72 of SEQ ID NO: 1561752
ggaagaaucuugucuucuu

SEQ ID NO: 1695666 - RNA, 19 nt, Artificial Sequence
  Description of Artificial Sequence: Synthetic oligonucleotide
  Antisense strand to SEQ ID NO: 1695665
aagaagacaagauucuucc

SEQ ID NO: 1695667 - RNA, 19 nt, Artificial Sequence
  Description of Artificial Sequence: Synthetic oligonucleotide
  Sense strand starting at position 144 of SEQ ID NO: 1561752
ugccaucgccuccaaauaa

SEQ ID NO: 1695668 - RNA, 19 nt, Artificial Sequence
  Description of Artificial Sequence: Synthetic oligonucleotide
  Antisense strand to SEQ ID NO: 1695667
uuauuuggaggcgauggca

SEQ ID NO: 1695669 - RNA, 19 nt, Artificial Sequence
  Description of Artificial Sequence: Synthetic oligonucleotide
  Sense strand starting at position 174 of SEQ ID NO: 1561752
cagagagucacuggaguaa

SEQ ID NO: 1695670 - RNA, 19 nt, Artificial Sequence
  Description of Artificial Sequence: Synthetic oligonucleotide
  Antisense strand to SEQ ID NO: 1695669
uuacuccagugacucucug

SEQ ID NO: 1695671 - RNA, 19 nt, Artificial Sequence
  Description of Artificial Sequence: Synthetic oligonucleotide
  Sense strand starting at position 253 of SEQ ID NO: 1561752
ugugaagcaccgugaauua

SEQ ID NO: 1695672 - RNA, 19 nt, Artificial Sequence
  Description of Artificial Sequence: Synthetic oligonucleotide
  Antisense strand to SEQ ID NO: 1695671
uaauucacggugcuucaca

SEQ ID NO: 1695673 - RNA, 19 nt, Artificial Sequence
  Description of Artificial Sequence: Synthetic oligonucleotide
  Sense strand starting at position 313 of SEQ ID NO: 1561752
acgauuaggcauuacaguu

SEQ ID NO: 1695674 - RNA, 19 nt, Artificial Sequence
  Description of Artificial Sequence: Synthetic oligonucleotide
  Antisense strand to SEQ ID NO: 1695673
aacuguaaugccuaaucgu

SEQ ID NO: 1695675 - RNA, 19 nt, Artificial Sequence
  Description of Artificial Sequence: Synthetic oligonucleotide
  Sense strand starting at position 346 of SEQ ID NO: 1561752
ggugcuaacuuguuaaaug

SEQ ID NO: 1695676 - RNA, 19 nt, Artificial Sequence
  Description of Artificial Sequence: Synthetic oligonucleotide
  Antisense strand to SEQ ID NO: 1695675
cauuuaacaaguuagcacc

SEQ ID NO: 1695677 - RNA, 19 nt, Artificial Sequence
  Description of Artificial Sequence: Synthetic oligonucleotide
  Sense strand starting at position 516 of SEQ ID NO: 1561752
gaggcuaacuccucgcuuu

SEQ ID NO: 1695678 - RNA, 19 nt, Artificial Sequence
  Description of Artificial Sequence: Synthetic oligonucleotide
  Antisense strand to SEQ ID NO: 1695677
aaagcgaggaguuagccuc

SEQ ID NO: 1695679 - RNA, 19 nt, Artificial Sequence
  Description of Artificial Sequence: Synthetic oligonucleotide
  Sense strand starting at position 583 of SEQ ID NO: 1561752
auaagauguuugccuggua

SEQ ID NO: 1695680 - RNA, 19 nt, Artificial Sequence
  Description of Artificial Sequence: Synthetic oligonucleotide
  Antisense strand to SEQ ID NO: 1695679
uaccaggcaaacaucuuau

SEQ ID NO: 1695681 - RNA, 19 nt, Artificial Sequence
  Description of Artificial Sequence: Synthetic oligonucleotide
  Sense strand starting at position 669 of SEQ ID NO: 1561752
guuucuuugaugggagggu

SEQ ID NO: 1695682 - RNA, 19 nt, Artificial Sequence
  Description of Artificial Sequence: Synthetic oligonucleotide
  Antisense strand to SEQ ID NO: 1695681
acccucccaucaaagaaac

SEQ ID NO: 1695683 - RNA, 19 nt, Artificial Sequence
  Description of Artificial Sequence: Synthetic oligonucleotide
  Sense strand starting at position 2027 of SEQ ID NO: 1561752
ccaugcauuuauggagaca

SEQ ID NO: 1695684 - RNA, 19 nt, Artificial Sequence
  Description of Artificial Sequence: Synthetic oligonucleotide
  Antisense strand to SEQ ID NO: 1695683
ugucuccauaaaugcaugg

SEQ ID NO: 1695685 - RNA, 19 nt, Artificial Sequence
  Description of Artificial Sequence: Synthetic oligonucleotide
  Sense strand starting at position 2573 of SEQ ID NO: 1561752
ggauuugagucuuacugaa

SEQ ID NO: 1695686 - RNA, 19 nt, Artificial Sequence
  Description of Artificial Sequence: Synthetic oligonucleotide
  Antisense strand to SEQ ID NO: 1695685
uucaguaagacucaaaucc

SEQ ID NO: 1695687 - RNA, 19 nt, Artificial Sequence
  Description of Artificial Sequence: Synthetic oligonucleotide
  Sense strand starting at position 2604 of SEQ ID NO: 1561752
aggagacuuucuuaacuug

SEQ ID NO: 1695688 - RNA, 19 nt, Artificial Sequence
  Description of Artificial Sequence: Synthetic oligonucleotide
  Antisense strand to SEQ ID NO: 1695687
caaguuaagaaagucuccu

SEQ ID NO: 1695689 - RNA, 19 nt, Artificial Sequence
  Description of Artificial Sequence: Synthetic oligonucleotide
  Sense strand starting at position 2612 of SEQ ID NO: 1561752
uucuuaacuugagcaagaa

SEQ ID NO: 1695690 - RNA, 19 nt, Artificial Sequence
  Description of Artificial Sequence: Synthetic oligonucleotide
  Antisense strand to SEQ ID NO: 1695689
uucuugcucaaguuaagaa

SEQ ID NO: 1695691 - RNA, 19 nt, Artificial Sequence
  Description of Artificial Sequence: Synthetic oligonucleotide
  Sense strand starting at position 2689 of SEQ ID NO: 1561752
ugaauuaaugcacguaaag

SEQ ID NO: 1695692 - RNA, 19 nt, Artificial Sequence
  Description of Artificial Sequence: Synthetic oligonucleotide
  Antisense strand to SEQ ID NO: 1695691
cuuuacgugcauuaauuca

SEQ ID NO: 1695693 - RNA, 19 nt, Artificial Sequence
  Description of Artificial Sequence: Synthetic oligonucleotide
  Sense strand starting at position 2726 of SEQ ID NO: 1561752
gucuauagucaacagucaa

SEQ ID NO: 1695694 - RNA, 19 nt, Artificial Sequence
  Description of Artificial Sequence: Synthetic oligonucleotide
  Antisense strand to SEQ ID NO: 1695693
uugacuguugacuauagac

SEQ ID NO: 1695695 - RNA, 19 nt, Artificial Sequence
  Description of Artificial Sequence: Synthetic oligonucleotide
  Sense strand starting at position 2759 of SEQ ID NO: 1561752
uguuguuacuucuuuagga

SEQ ID NO: 1695696 - RNA, 19 nt, Artificial Sequence
  Description of Artificial Sequence: Synthetic oligonucleotide
  Antisense strand to SEQ ID NO: 1695695
uccuaaagaaguaacaaca

SEQ ID NO: 1695697 - RNA, 19 nt, Artificial Sequence
  Description of Artificial Sequence: Synthetic oligonucleotide
  Sense strand starting at position 2760 of SEQ ID NO: 1561752
guuguuacuucuuuaggaa

SEQ ID NO: 1695698 - RNA, 19 nt, Artificial Sequence
  Description of Artificial Sequence: Synthetic oligonucleotide
  Antisense strand to SEQ ID NO: 1695697
uuccuaaagaaguaacaac

SEQ ID NO: 1695699 - RNA, 19 nt, Artificial Sequence
  Description of Artificial Sequence: Synthetic oligonucleotide
  Sense strand starting at position 2761 of SEQ ID NO: 1561752
uuguuacuucuuuaggaag

SEQ ID NO: 1695700 - RNA, 19 nt, Artificial Sequence
  Description of Artificial Sequence: Synthetic oligonucleotide
  Antisense strand to SEQ ID NO: 1695699
cuuccuaaagaaguaacaa

SEQ ID NO: 1695701 - RNA, 19 nt, Artificial Sequence
  Description of Artificial Sequence: Synthetic oligonucleotide
  Sense strand starting at position 2877 of SEQ ID NO: 1561752
caccgacuaccuugugcaa

SEQ ID NO: 1695702 - RNA, 19 nt, Artificial Sequence
  Description of Artificial Sequence: Synthetic oligonucleotide
  Antisense strand to SEQ ID NO: 1695701
uugcacaagguagucggug

SEQ ID NO: 1695703 - RNA, 19 nt, Artificial Sequence
  Description of Artificial Sequence: Synthetic oligonucleotide
  Sense strand starting at position 3019 of SEQ ID NO: 1561752
agaacucgcuuugcuaauu

SEQ ID NO: 1695704 - RNA, 19 nt, Artificial Sequence
  Description of Artificial Sequence: Synthetic oligonucleotide
  Antisense strand to SEQ ID NO: 1695703
aauuagcaaagcgaguucu

SEQ ID NO: 1695705 - RNA, 19 nt, Artificial Sequence
  Description of Artificial Sequence: Synthetic oligonucleotide
  Sense strand starting at position 3170 of SEQ ID NO: 1561752
uuacgugucucagucauuu

SEQ ID NO: 1695706 - RNA, 19 nt, Artificial Sequence
  Description of Artificial Sequence: Synthetic oligonucleotide
  Antisense strand to SEQ ID NO: 1695705
aaaugacugagacacguaa

SEQ ID NO: 1695707 - RNA, 19 nt, Artificial Sequence
  Description of Artificial Sequence: Synthetic oligonucleotide
  Sense strand starting at position 3203 of SEQ ID NO: 1561752
ggcaaauccuucccuggua

SEQ ID NO: 1695708 - RNA, 19 nt, Artificial Sequence
  Description of Artificial Sequence: Synthetic oligonucleotide
  Antisense strand to SEQ ID NO: 1695707
uaccagggaaggauuugcc

SEQ ID NO: 1695709 - RNA, 19 nt, Artificial Sequence
  Description of Artificial Sequence: Synthetic oligonucleotide
  Sense strand starting at position 3204 of SEQ ID NO: 1561752
gcaaauccuucccugguaa

SEQ ID NO: 1695710 - RNA, 19 nt, Artificial Sequence
  Description of Artificial Sequence: Synthetic oligonucleotide
  Antisense strand to SEQ ID NO: 1695709
uuaccagggaaggauuugc

SEQ ID NO: 1695711 - RNA, 19 nt, Artificial Sequence
  Description of Artificial Sequence: Synthetic oligonucleotide
  Sense strand starting at position 3235 of SEQ ID NO: 1561752
gccucuaguuuguuucuua

SEQ ID NO: 1695712 - RNA, 19 nt, Artificial Sequence
  Description of Artificial Sequence: Synthetic oligonucleotide
  Antisense strand to SEQ ID NO: 1695711
uaagaaacaaacuagaggc

SEQ ID NO: 1695713 - RNA, 19 nt, Artificial Sequence
  Description of Artificial Sequence: Synthetic oligonucleotide
  Sense strand starting at position 3236 of SEQ ID NO: 1561752
ccucuaguuuguuucuuaa

SEQ ID NO: 1695714 - RNA, 19 nt, Artificial Sequence
  Description of Artificial Sequence: Synthetic oligonucleotide
  Antisense strand to SEQ ID NO: 1695713
uuaagaaacaaacuagagg

SEQ ID NO: 1695715 - RNA, 19 nt, Artificial Sequence
  Description of Artificial Sequence: Synthetic oligonucleotide
  Sense strand starting at position 3286 of SEQ ID NO: 1561752
accaucauuucugauuugu

SEQ ID NO: 1695716 - RNA, 19 nt, Artificial Sequence
  Description of Artificial Sequence: Synthetic oligonucleotide
  Antisense strand to SEQ ID NO: 1695715
acaaaucagaaaugauggu

SEQ ID NO: 1695717 - RNA, 19 nt, Artificial Sequence
  Description of Artificial Sequence: Synthetic oligonucleotide
  Sense strand starting at position 3313 of SEQ ID NO: 1561752
gcuaaugacuguuuauguu

SEQ ID NO: 1695718 - RNA, 19 nt, Artificial Sequence
  Description of Artificial Sequence: Synthetic oligonucleotide
  Antisense strand to SEQ ID NO: 1695717
aacauaaacagucauuagc

SEQ ID NO: 1695719 - RNA, 19 nt, Artificial Sequence
  Description of Artificial Sequence: Synthetic oligonucleotide
  Sense strand starting at position 3394 of SEQ ID NO: 1561752
cauuguaugguauauaugu

SEQ ID NO: 1695720 - RNA, 19 nt, Artificial Sequence
  Description of Artificial Sequence: Synthetic oligonucleotide
  Antisense strand to SEQ ID NO: 1695719
acauauauaccauacaaug

SEQ ID NO: 1695721 - RNA, 19 nt, Artificial Sequence
  Description of Artificial Sequence: Synthetic oligonucleotide
  Sense strand starting at position 3478 of SEQ ID NO: 1561752
ugcauacaguauguagauu

SEQ ID NO: 1695722 - RNA, 19 nt, Artificial Sequence
  Description of Artificial Sequence: Synthetic oligonucleotide
  Antisense strand to SEQ ID NO: 1695721
aaucuacauacuguaugca

SEQ ID NO: 1695723 - RNA, 19 nt, Artificial Sequence
  Description of Artificial Sequence: Synthetic oligonucleotide
  Sense strand starting at position 3521 of SEQ ID NO: 1561752
gaaagcuuucuagggcuua

SEQ ID NO: 1695724 - RNA, 19 nt, Artificial Sequence
  Description of Artificial Sequence: Synthetic oligonucleotide
  Antisense strand to SEQ ID NO: 1695723
uaagcccuagaaagcuuuc

SEQ ID NO: 1695725 - RNA, 19 nt, Artificial Sequence
  Description of Artificial Sequence: Synthetic oligonucleotide
  Sense strand starting at position 3526 of SEQ ID NO: 1561752
cuuucuagggcuuaugaua

SEQ ID NO: 1695726 - RNA, 19 nt, Artificial Sequence
  Description of Artificial Sequence: Synthetic oligonucleotide
  Antisense strand to SEQ ID NO: 1695725
uaucauaagcccuagaaag

SEQ ID NO: 1695727 - RNA, 19 nt, Artificial Sequence
  Description of Artificial Sequence: Synthetic oligonucleotide
  Sense strand starting at position 3663 of SEQ ID NO: 1561752
acccuugacucuuacagag

SEQ ID NO: 1695728 - RNA, 19 nt, Artificial Sequence
  Description of Artificial Sequence: Synthetic oligonucleotide
  Antisense strand to SEQ ID NO: 1695727
cucuguaagagucaagggu

SEQ ID NO: 1695729 - RNA, 19 nt, Artificial Sequence
  Description of Artificial Sequence: Synthetic oligonucleotide
  Sense strand starting at position 3705 of SEQ ID NO: 1561752
agacguuaccauuggcuca

SEQ ID NO: 1695730 - RNA, 19 nt, Artificial Sequence
  Description of Artificial Sequence: Synthetic oligonucleotide
  Antisense strand to SEQ ID NO: 1695729
ugagccaaugguaacgucu

SEQ ID NO: 1695731 - RNA, 19 nt, Artificial Sequence
  Description of Artificial Sequence: Synthetic oligonucleotide
  Sense strand starting at position 3785 of SEQ ID NO: 1561752
acaucaugcuauguuaugu

SEQ ID NO: 1695732 - RNA, 19 nt, Artificial Sequence
  Description of Artificial Sequence: Synthetic oligonucleotide
  Antisense strand to SEQ ID NO: 1695731
acauaacauagcaugaugu

SEQ ID NO: 1695733 - RNA, 19 nt, Artificial Sequence
  Description of Artificial Sequence: Synthetic oligonucleotide
  Sense strand starting at position 3827 of SEQ ID NO: 1561752
cucagaauauuggaaguau

SEQ ID NO: 1695734 - RNA, 19 nt, Artificial Sequence
  Description of Artificial Sequence: Synthetic oligonucleotide
  Antisense strand to SEQ ID NO: 1695733
auacuuccaauauucugag

SEQ ID NO: 1695735 - RNA, 19 nt, Artificial Sequence
  Description of Artificial Sequence: Synthetic oligonucleotide
  Sense strand starting at position 3884 of SEQ ID NO: 1561752
ggaucagaaugccuaccau

SEQ ID NO: 1695736 - RNA, 19 nt, Artificial Sequence
  Description of Artificial Sequence: Synthetic oligonucleotide
  Antisense strand to SEQ ID NO: 1695735
augguaggcauucugaucc

SEQ ID NO: 1695737 - RNA, 19 nt, Artificial Sequence
  Description of Artificial Sequence: Synthetic oligonucleotide
  Sense strand starting at position 3896 of SEQ ID NO: 1561752
cuaccaugucaguaugugu

SEQ ID NO: 1695738 - RNA, 19 nt, Artificial Sequence
  Description of Artificial Sequence: Synthetic oligonucleotide
  Antisense strand to SEQ ID NO: 1695737
acacauacugacaugguag

SEQ ID NO: 1695739 - RNA, 19 nt, Artificial Sequence
  Description of Artificial Sequence: Synthetic oligonucleotide
  Sense strand starting at position 3958 of SEQ ID NO: 1561752
aaagaauagcucuggcuga

SEQ ID NO: 1695740 - RNA, 19 nt, Artificial Sequence
  Description of Artificial Sequence: Synthetic oligonucleotide
  Antisense strand to SEQ ID NO: 1695739
ucagccagagcuauucuuu

SEQ ID NO: 1695741 - RNA, 19 nt, Artificial Sequence
  Description of Artificial Sequence: Synthetic oligonucleotide
  Sense strand starting at position 148 of SEQ ID NO: 1561753
aggccugacuuccagacua

SEQ ID NO: 1695742 - RNA, 19 nt, Artificial Sequence
  Description of Artificial Sequence: Synthetic oligonucleotide
  Antisense strand to SEQ ID NO: 1695741
uagucuggaagucaggccu

SEQ ID NO: 1695743 - RNA, 19 nt, Artificial Sequence
  Description of Artificial Sequence: Synthetic oligonucleotide
  Sense strand starting at position 186 of SEQ ID NO: 1561753
ucaccuuucuggucuuagu

SEQ ID NO: 1695744 - RNA, 19 nt, Artificial Sequence
  Description of Artificial Sequence: Synthetic oligonucleotide
  Antisense strand to SEQ ID NO: 1695743
acuaagaccagaaagguga

SEQ ID NO: 1695745 - RNA, 19 nt, Artificial Sequence
  Description of Artificial Sequence: Synthetic oligonucleotide
  Sense strand starting at position 248 of SEQ ID NO: 1561753
acaagacccugcuugugaa

SEQ ID NO: 1695746 - RNA, 19 nt, Artificial Sequence
  Description of Artificial Sequence: Synthetic oligonucleotide
  Antisense strand to SEQ ID NO: 1695745
uucacaagcagggucuugu

SEQ ID NO: 1695747 - RNA, 19 nt, Artificial Sequence
  Description of Artificial Sequence: Synthetic oligonucleotide
  Sense strand starting at position 258 of SEQ ID NO: 1561753
gcuugugaaggugagcuau

SEQ ID NO: 1695748 - RNA, 19 nt, Artificial Sequence
  Description of Artificial Sequence: Synthetic oligonucleotide
  Antisense strand to SEQ ID NO: 1695747
auagcucaccuucacaagc

SEQ ID NO: 1695749 - RNA, 19 nt, Artificial Sequence
  Description of Artificial Sequence: Synthetic oligonucleotide
  Sense strand starting at position 268 of SEQ ID NO: 1561753
gugagcuauuuaggagacu

SEQ ID NO: 1695750 - RNA, 19 nt, Artificial Sequence
  Description of Artificial Sequence: Synthetic oligonucleotide
  Antisense strand to SEQ ID NO: 1695749
agucuccuaaauagcucac

SEQ ID NO: 1695751 - RNA, 19 nt, Artificial Sequence
  Description of Artificial Sequence: Synthetic oligonucleotide
  Sense strand starting at position 269 of SEQ ID NO: 1561753
ugagcuauuuaggagacua

SEQ ID NO: 1695752 - RNA, 19 nt, Artificial Sequence
  Description of Artificial Sequence: Synthetic oligonucleotide
  Antisense strand to SEQ ID NO: 1695751
uagucuccuaaauagcuca

SEQ ID NO: 1695753 - RNA, 19 nt, Artificial Sequence
  Description of Artificial Sequence: Synthetic oligonucleotide
  Sense strand starting at position 277 of SEQ ID NO: 1561753
uuaggagacuaccaucuuu

SEQ ID NO: 1695754 - RNA, 19 nt, Artificial Sequence
  Description of Artificial Sequence: Synthetic oligonucleotide
  Antisense strand to SEQ ID NO: 1695753
aaagaugguagucuccuaa

SEQ ID NO: 1695755 - RNA, 19 nt, Artificial Sequence
  Description of Artificial Sequence: Synthetic oligonucleotide
  Sense strand starting at position 335 of SEQ ID NO: 1561753
ggacacaucucacugacuu

SEQ ID NO: 1695756 - RNA, 19 nt, Artificial Sequence
  Description of Artificial Sequence: Synthetic oligonucleotide
  Antisense strand to SEQ ID NO: 1695755
aagucagugagaugugucc

SEQ ID NO: 1695757 - RNA, 19 nt, Artificial Sequence
  Description of Artificial Sequence: Synthetic oligonucleotide
  Sense strand starting at position 359 of SEQ ID NO: 1561753
cccauuagucagugaggag

SEQ ID NO: 1695758 - RNA, 19 nt, Artificial Sequence
  Description of Artificial Sequence: Synthetic oligonucleotide
  Antisense strand to SEQ ID NO: 1695757
cuccucacugacuaauggg

SEQ ID NO: 1695759 - RNA, 19 nt, Artificial Sequence
  Description of Artificial Sequence: Synthetic oligonucleotide
  Sense strand starting at position 555 of SEQ ID NO: 1561753
gaguuucuagcuugaggau

SEQ ID NO: 1695760 - RNA, 19 nt, Artificial Sequence
  Description of Artificial Sequence: Synthetic oligonucleotide
  Antisense strand to SEQ ID NO: 1695759
auccucaagcuagaaacuc

SEQ ID NO: 1695761 - RNA, 19 nt, Artificial Sequence
  Description of Artificial Sequence: Synthetic oligonucleotide
  Sense strand starting at position 577 of SEQ ID NO: 1561753
acgucauccuccgcagacu

SEQ ID NO: 1695762 - RNA, 19 nt, Artificial Sequence
  Description of Artificial Sequence: Synthetic oligonucleotide
  Antisense strand to SEQ ID NO: 1695761
agucugcggaggaugacgu

SEQ ID NO: 1695763 - RNA, 19 nt, Artificial Sequence
  Description of Artificial Sequence: Synthetic oligonucleotide
  Sense strand starting at position 939 of SEQ ID NO: 1561753
ccgaucucacgagacugaa

SEQ ID NO: 1695764 - RNA, 19 nt, Artificial Sequence
  Description of Artificial Sequence: Synthetic oligonucleotide
  Antisense strand to SEQ ID NO: 1695763
uucagucucgugagaucgg

SEQ ID NO: 1695765 - RNA, 19 nt, Artificial Sequence
  Description of Artificial Sequence: Synthetic oligonucleotide
  Sense strand starting at position 995 of SEQ ID NO: 1561753
gagaaagggaguuguuuac

SEQ ID NO: 1695766 - RNA, 19 nt, Artificial Sequence
  Description of Artificial Sequence: Synthetic oligonucleotide
  Antisense strand to SEQ ID NO: 1695765
guaaacaacucccuuucuc

SEQ ID NO: 1695767 - RNA, 19 nt, Artificial Sequence
  Description of Artificial Sequence: Synthetic oligonucleotide
  Sense strand starting at position 1004 of SEQ ID NO: 1561753
aguuguuuacgcgaccuau

SEQ ID NO: 1695768 - RNA, 19 nt, Artificial Sequence
  Description of Artificial Sequence: Synthetic oligonucleotide
  Antisense strand to SEQ ID NO: 1695767
auaggucgcguaaacaacu

SEQ ID NO: 1695769 - RNA, 19 nt, Artificial Sequence
  Description of Artificial Sequence: Synthetic oligonucleotide
  Sense strand starting at position 2170 of SEQ ID NO: 1561753
gagaaacguuugcccucuu

SEQ ID NO: 1695770 - RNA, 19 nt, Artificial Sequence
  Description of Artificial Sequence: Synthetic oligonucleotide
  Antisense strand to SEQ ID NO: 1695769
aagagggcaaacguuucuc

SEQ ID NO: 1695771 - RNA, 19 nt, Artificial Sequence
  Description of Artificial Sequence: Synthetic oligonucleotide
  Sense strand starting at position 2204 of SEQ ID NO: 1561753
ggcucagaccagugcuaga

SEQ ID NO: 1695772 - RNA, 19 nt, Artificial Sequence
  Description of Artificial Sequence: Synthetic oligonucleotide
  Antisense strand to SEQ ID NO: 1695771
ucuagcacuggucugagcc

SEQ ID NO: 1695773 - RNA, 19 nt, Artificial Sequence
  Description of Artificial Sequence: Synthetic oligonucleotide
  Sense strand starting at position 2209 of SEQ ID NO: 1561753
agaccagugcuagaagugu

SEQ ID NO: 1695774 - RNA, 19 nt, Artificial Sequence
  Description of Artificial Sequence: Synthetic oligonucleotide
  Antisense strand to SEQ ID NO: 1695773
acacuucuagcacuggucu

SEQ ID NO: 1695775 - RNA, 19 nt, Artificial Sequence
  Description of Artificial Sequence: Synthetic oligonucleotide
  Sense strand starting at position 2217 of SEQ ID NO: 1561753
gcuagaaguguccagucua

SEQ ID NO: 1695776 - RNA, 19 nt, Artificial Sequence
  Description of Artificial Sequence: Synthetic oligonucleotide
  Antisense strand to SEQ ID NO: 1695775
uagacuggacacuucuagc

SEQ ID NO: 1695777 - RNA, 19 nt, Artificial Sequence
  Description of Artificial Sequence: Synthetic oligonucleotide
  Sense strand starting at position 2248 of SEQ ID NO: 1561753
ccaagacuccguggccauu

SEQ ID NO: 1695778 - RNA, 19 nt, Artificial Sequence
  Description of Artificial Sequence: Synthetic oligonucleotide
  Antisense strand to SEQ ID NO: 1695777
aauggccacggagucuugg

SEQ ID NO: 1695779 - RNA, 19 nt, Artificial Sequence
  Description of Artificial Sequence: Synthetic oligonucleotide
  Sense strand starting at position 2350 of SEQ ID NO: 1561753
ggaucucucugagauacuu

SEQ ID NO: 1695780 - RNA, 19 nt, Artificial Sequence
  Description of Artificial Sequence: Synthetic oligonucleotide
  Antisense strand to SEQ ID NO: 1695779
aaguaucucagagagaucc

SEQ ID NO: 1695781 - RNA, 19 nt, Artificial Sequence
  Description of Artificial Sequence: Synthetic oligonucleotide
  Sense strand starting at position 2398 of SEQ ID NO: 1561753
gacaaacauccgcgagcaa

SEQ ID NO: 1695782 - RNA, 19 nt, Artificial Sequence
  Description of Artificial Sequence: Synthetic oligonucleotide
  Antisense strand to SEQ ID NO: 1695781
uugcucgcggauguuuguc

SEQ ID NO: 1695783 - RNA, 19 nt, Artificial Sequence
  Description of Artificial Sequence: Synthetic oligonucleotide
  Sense strand starting at position 2489 of SEQ ID NO: 1561753
ugucgauucucuuuccuaa

SEQ ID NO: 1695784 - RNA, 19 nt, Artificial Sequence
  Description of Artificial Sequence: Synthetic oligonucleotide
  Antisense strand to SEQ ID NO: 1695783
uuaggaaagagaaucgaca

SEQ ID NO: 1695785 - RNA, 19 nt, Artificial Sequence
  Description of Artificial Sequence: Synthetic oligonucleotide
  Sense strand starting at position 3061 of SEQ ID NO: 1561753
gcugauaucugagcuaagu

SEQ ID NO: 1695786 - RNA, 19 nt, Artificial Sequence
  Description of Artificial Sequence: Synthetic oligonucleotide
  Antisense strand to SEQ ID NO: 1695785
acuuagcucagauaucagc

SEQ ID NO: 1695787 - RNA, 19 nt, Artificial Sequence
  Description of Artificial Sequence: Synthetic oligonucleotide
  Sense strand starting at position 3070 of SEQ ID NO: 1561753
ugagcuaagucuugaagac

SEQ ID NO: 1695788 - RNA, 19 nt, Artificial Sequence
  Description of Artificial Sequence: Synthetic oligonucleotide
  Antisense strand to SEQ ID NO: 1695787
gucuucaagacuuagcuca

SEQ ID NO: 1695789 - RNA, 19 nt, Artificial Sequence
  Description of Artificial Sequence: Synthetic oligonucleotide
  Sense strand starting at position 3212 of SEQ ID NO: 1561753
cucuuaacauuauugggau

SEQ ID NO: 1695790 - RNA, 19 nt, Artificial Sequence
  Description of Artificial Sequence: Synthetic oligonucleotide
  Antisense strand to SEQ ID NO: 1695789
aucccaauaauguuaagag

SEQ ID NO: 1695791 - RNA, 19 nt, Artificial Sequence
  Description of Artificial Sequence: Synthetic oligonucleotide
  Sense strand starting at position 3294 of SEQ ID NO: 1561753
acuaguuugugggaggcaa

SEQ ID NO: 1695792 - RNA, 19 nt, Artificial Sequence
  Description of Artificial Sequence: Synthetic oligonucleotide
  Antisense strand to SEQ ID NO: 1695791
uugccucccacaaacuagu

SEQ ID NO: 1695793 - RNA, 19 nt, Artificial Sequence
  Description of Artificial Sequence: Synthetic oligonucleotide
  Sense strand starting at position 3392 of SEQ ID NO: 1561753
gguaaacacuucucugauc

SEQ ID NO: 1695794 - RNA, 19 nt, Artificial Sequence
  Description of Artificial Sequence: Synthetic oligonucleotide
  Antisense strand to SEQ ID NO: 1695793
gaucagagaaguguuuacc

SEQ ID NO: 1695795 - RNA, 19 nt, Artificial Sequence
  Description of Artificial Sequence: Synthetic oligonucleotide
  Sense strand starting at position 3501 of SEQ ID NO: 1561753
uuuggaaaugcucaguaau

SEQ ID NO: 1695796 - RNA, 19 nt, Artificial Sequence
  Description of Artificial Sequence: Synthetic oligonucleotide
  Antisense strand to SEQ ID NO: 1695795
auuacugagcauuuccaaa

SEQ ID NO: 1695797 - RNA, 19 nt, Artificial Sequence
  Description of Artificial Sequence: Synthetic oligonucleotide
  Sense strand starting at position 3503 of SEQ ID NO: 1561753
uggaaaugcucaguaaucg

SEQ ID NO: 1695798 - RNA, 19 nt, Artificial Sequence
  Description of Artificial Sequence: Synthetic oligonucleotide
  Antisense strand to SEQ ID NO: 1695797
cgauuacugagcauuucca

SEQ ID NO: 1695799 - RNA, 19 nt, Artificial Sequence
  Description of Artificial Sequence: Synthetic oligonucleotide
  Sense strand starting at position 3504 of SEQ ID NO: 1561753
ggaaaugcucaguaaucgu

SEQ ID NO: 1695800 - RNA, 19 nt, Artificial Sequence
  Description of Artificial Sequence: Synthetic oligonucleotide
  Antisense strand to SEQ ID NO: 1695799
acgauuacugagcauuucc

SEQ ID NO: 1695801 - RNA, 19 nt, Artificial Sequence
  Description of Artificial Sequence: Synthetic oligonucleotide
  Sense strand starting at position 3513 of SEQ ID NO: 1561753
caguaaucguuagcuguuu

SEQ ID NO: 1695802 - RNA, 19 nt, Artificial Sequence
  Description of Artificial Sequence: Synthetic oligonucleotide
  Antisense strand to SEQ ID NO: 1695801
aaacagcuaacgauuacug

SEQ ID NO: 1695803 - RNA, 19 nt, Artificial Sequence
  Description of Artificial Sequence: Synthetic oligonucleotide
  Sense strand starting at position 3536 of SEQ ID NO: 1561753
gguaauggguucugagaaa

SEQ ID NO: 1695804 - RNA, 19 nt, Artificial Sequence
  Description of Artificial Sequence: Synthetic oligonucleotide
  Antisense strand to SEQ ID NO: 1695803
uuucucagaacccauuacc

SEQ ID NO: 1695805 - RNA, 19 nt, Artificial Sequence
  Description of Artificial Sequence: Synthetic oligonucleotide
  Sense strand starting at position 3584 of SEQ ID NO: 1561753
cugaaauuauaggaaguaa

SEQ ID NO: 1695806 - RNA, 19 nt, Artificial Sequence
  Description of Artificial Sequence: Synthetic oligonucleotide
  Antisense strand to SEQ ID NO: 1695805
uuacuuccuauaauuucag

SEQ ID NO: 1695807 - RNA, 19 nt, Artificial Sequence
  Description of Artificial Sequence: Synthetic oligonucleotide
  Sense strand starting at position 3595 of SEQ ID NO: 1561753
ggaaguaagcccuaauugu

SEQ ID NO: 1695808 - RNA, 19 nt, Artificial Sequence
  Description of Artificial Sequence: Synthetic oligonucleotide
  Antisense strand to SEQ ID NO: 1695807
acaauuagggcuuacuucc

SEQ ID NO: 1695809 - RNA, 19 nt, Artificial Sequence
  Description of Artificial Sequence: Synthetic oligonucleotide
  Sense strand starting at position 3637 of SEQ ID NO: 1561753
ugugccagucacuauuaua

SEQ ID NO: 1695810 - RNA, 19 nt, Artificial Sequence
  Description of Artificial Sequence: Synthetic oligonucleotide
  Antisense strand to SEQ ID NO: 1695809
uauaauagugacuggcaca

SEQ ID NO: 1695811 - RNA, 19 nt, Artificial Sequence
  Description of Artificial Sequence: Synthetic oligonucleotide
  Sense strand starting at position 3739 of SEQ ID NO: 1561753
gaacuugucccaggcccua

SEQ ID NO: 1695812 - RNA, 19 nt, Artificial Sequence
  Description of Artificial Sequence: Synthetic oligonucleotide
  Antisense strand to SEQ ID NO: 1695811
uagggccugggacaaguuc

SEQ ID NO: 1695813 - RNA, 19 nt, Artificial Sequence
  Description of Artificial Sequence: Synthetic oligonucleotide
  Sense strand starting at position 3804 of SEQ ID NO: 1561753
ucuagagacugugcuuaca

SEQ ID NO: 1695814 - RNA, 19 nt, Artificial Sequence
  Description of Artificial Sequence: Synthetic oligonucleotide
  Antisense strand to SEQ ID NO: 1695813
uguaagcacagucucuaga

SEQ ID NO: 1695815 - RNA, 19 nt, Artificial Sequence
  Description of Artificial Sequence: Synthetic oligonucleotide
  Sense strand starting at position 3806 of SEQ ID NO: 1561753
uagagacugugcuuacaac

SEQ ID NO: 1695816 - RNA, 19 nt, Artificial Sequence
  Description of Artificial Sequence: Synthetic oligonucleotide
  Antisense strand to SEQ ID NO: 1695815
guuguaagcacagucucua

SEQ ID NO: 1695817 - RNA, 19 nt, Artificial Sequence
  Description of Artificial Sequence: Synthetic oligonucleotide
  Sense strand starting at position 3896 of SEQ ID NO: 1561753
ugguuugauucuuauuucu

SEQ ID NO: 1695818 - RNA, 19 nt, Artificial Sequence
  Description of Artificial Sequence: Synthetic oligonucleotide
  Antisense strand to SEQ ID NO: 1695817
agaaauaagaaucaaacca

SEQ ID NO: 1695819 - RNA, 19 nt, Artificial Sequence
  Description of Artificial Sequence: Synthetic oligonucleotide
  Sense strand starting at position 3974 of SEQ ID NO: 1561753
ucaggaguacaguggauaa

SEQ ID NO: 1695820 - RNA, 19 nt, Artificial Sequence
  Description of Artificial Sequence: Synthetic oligonucleotide
  Antisense strand to SEQ ID NO: 1695819
uuauccacuguacuccuga

SEQ ID NO: 1695821 - RNA, 19 nt, Artificial Sequence
  Description of Artificial Sequence: Synthetic oligonucleotide
  Sense strand starting at position 721 of SEQ ID NO: 1561754
aggccugacuuccagacua

SEQ ID NO: 1695822 - RNA, 19 nt, Artificial Sequence
  Description of Artificial Sequence: Synthetic oligonucleotide
  Antisense strand to SEQ ID NO: 1695821
uagucuggaagucaggccu

SEQ ID NO: 1695823 - RNA, 19 nt, Artificial Sequence
  Description of Artificial Sequence: Synthetic oligonucleotide
  Sense strand starting at position 759 of SEQ ID NO: 1561754
ucaccuuucuggucuuagu

SEQ ID NO: 1695824 - RNA, 19 nt, Artificial Sequence
  Description of Artificial Sequence: Synthetic oligonucleotide
  Antisense strand to SEQ ID NO: 1695823
acuaagaccagaaagguga

SEQ ID NO: 1695825 - RNA, 19 nt, Artificial Sequence
  Description of Artificial Sequence: Synthetic oligonucleotide
  Sense strand starting at position 821 of SEQ ID NO: 1561754
acaagacccugcuugugaa

SEQ ID NO: 1695826 - RNA, 19 nt, Artificial Sequence
  Description of Artificial Sequence: Synthetic oligonucleotide
  Antisense strand to SEQ ID NO: 1695825
uucacaagcagggucuugu

SEQ ID NO: 1695827 - RNA, 19 nt, Artificial Sequence
  Description of Artificial Sequence: Synthetic oligonucleotide
  Sense strand starting at position 831 of SEQ ID NO: 1561754
gcuugugaaggugagcuau

SEQ ID NO: 1695828 - RNA, 19 nt, Artificial Sequence
  Description of Artificial Sequence: Synthetic oligonucleotide
  Antisense strand to SEQ ID NO: 1695827
auagcucaccuucacaagc

SEQ ID NO: 1695829 - RNA, 19 nt, Artificial Sequence
  Description of Artificial Sequence: Synthetic oligonucleotide
  Sense strand starting at position 841 of SEQ ID NO: 1561754
gugagcuauuuaggagacu

SEQ ID NO: 1695830 - RNA, 19 nt, Artificial Sequence
  Description of Artificial Sequence: Synthetic oligonucleotide
  Antisense strand to SEQ ID NO: 1695829
agucuccuaaauagcucac

SEQ ID NO: 1695831 - RNA, 19 nt, Artificial Sequence
  Description of Artificial Sequence: Synthetic oligonucleotide
  Sense strand starting at position 842 of SEQ ID NO: 1561754
ugagcuauuuaggagacua

SEQ ID NO: 1695832 - RNA, 19 nt, Artificial Sequence
  Description of Artificial Sequence: Synthetic oligonucleotide
  Antisense strand to SEQ ID NO: 1695831
uagucuccuaaauagcuca

SEQ ID NO: 1695833 - RNA, 19 nt, Artificial Sequence
  Description of Artificial Sequence: Synthetic oligonucleotide
  Sense strand starting at position 850 of SEQ ID NO: 1561754
uuaggagacuaccaucuuu

SEQ ID NO: 1695834 - RNA, 19 nt, Artificial Sequence
  Description of Artificial Sequence: Synthetic oligonucleotide
  Antisense strand to SEQ ID NO: 1695833
aaagaugguagucuccuaa

SEQ ID NO: 1695835 - RNA, 19 nt, Artificial Sequence
  Description of Artificial Sequence: Synthetic oligonucleotide
  Sense strand starting at position 908 of SEQ ID NO: 1561754
ggacacaucucacugacuu

SEQ ID NO: 1695836 - RNA, 19 nt, Artificial Sequence
  Description of Artificial Sequence: Synthetic oligonucleotide
  Antisense strand to SEQ ID NO: 1695835
aagucagugagaugugucc

SEQ ID NO: 1695837 - RNA, 19 nt, Artificial Sequence
  Description of Artificial Sequence: Synthetic oligonucleotide
  Sense strand starting at position 932 of SEQ ID NO: 1561754
cccauuagucagugaggag

SEQ ID NO: 1695838 - RNA, 19 nt, Artificial Sequence
  Description of Artificial Sequence: Synthetic oligonucleotide
  Antisense strand to SEQ ID NO: 1695837
cuccucacugacuaauggg

SEQ ID NO: 1695839 - RNA, 19 nt, Artificial Sequence
  Description of Artificial Sequence: Synthetic oligonucleotide
  Sense strand starting at position 1128 of SEQ ID NO: 1561754
gaguuucuagcuugaggau

SEQ ID NO: 1695840 - RNA, 19 nt, Artificial Sequence
  Description of Artificial Sequence: Synthetic oligonucleotide
  Antisense strand to SEQ ID NO: 1695839
auccucaagcuagaaacuc

SEQ ID NO: 1695841 - RNA, 19 nt, Artificial Sequence
  Description of Artificial Sequence: Synthetic oligonucleotide
  Sense strand starting at position 1150 of SEQ ID NO: 1561754
acgucauccuccgcagacu

SEQ ID NO: 1695842 - RNA, 19 nt, Artificial Sequence
  Description of Artificial Sequence: Synthetic oligonucleotide
  Antisense strand to SEQ ID NO: 1695841
agucugcggaggaugacgu

SEQ ID NO: 1695843 - RNA, 19 nt, Artificial Sequence
  Description of Artificial Sequence: Synthetic oligonucleotide
  Sense strand starting at position 1512 of SEQ ID NO: 1561754
ccgaucucacgagacugaa

SEQ ID NO: 1695844 - RNA, 19 nt, Artificial Sequence
  Description of Artificial Sequence: Synthetic oligonucleotide
  Antisense strand to SEQ ID NO: 1695843
uucagucucgugagaucgg

SEQ ID NO: 1695845 - RNA, 19 nt, Artificial Sequence
  Description of Artificial Sequence: Synthetic oligonucleotide
  Sense strand starting at position 1568 of SEQ ID NO: 1561754
gagaaagggaguuguuuac

SEQ ID NO: 1695846 - RNA, 19 nt, Artificial Sequence
  Description of Artificial Sequence: Synthetic oligonucleotide
  Antisense strand to SEQ ID NO: 1695845
guaaacaacucccuuucuc

SEQ ID NO: 1695847 - RNA, 19 nt, Artificial Sequence
  Description of Artificial Sequence: Synthetic oligonucleotide
  Sense strand starting at position 1577 of SEQ ID NO: 1561754
aguuguuuacgcgaccuau

SEQ ID NO: 1695848 - RNA, 19 nt, Artificial Sequence
  Description of Artificial Sequence: Synthetic oligonucleotide
  Antisense strand to SEQ ID NO: 1695847
auaggucgcguaaacaacu

SEQ ID NO: 1695849 - RNA, 19 nt, Artificial Sequence
  Description of Artificial Sequence: Synthetic oligonucleotide
  Sense strand starting at position 2743 of SEQ ID NO: 1561754
gagaaacguuugcccucuu

SEQ ID NO: 1695850 - RNA, 19 nt, Artificial Sequence
  Description of Artificial Sequence: Synthetic oligonucleotide
  Antisense strand to SEQ ID NO: 1695849
aagagggcaaacguuucuc

SEQ ID NO: 1695851 - RNA, 19 nt, Artificial Sequence
  Description of Artificial Sequence: Synthetic oligonucleotide
  Sense strand starting at position 2777 of SEQ ID NO: 1561754
ggcucagaccagugcuaga

SEQ ID NO: 1695852 - RNA, 19 nt, Artificial Sequence
  Description of Artificial Sequence: Synthetic oligonucleotide
  Antisense strand to SEQ ID NO: 1695851
ucuagcacuggucugagcc

SEQ ID NO: 1695853 - RNA, 19 nt, Artificial Sequence
  Description of Artificial Sequence: Synthetic oligonucleotide
  Sense strand starting at position 2782 of SEQ ID NO: 1561754
agaccagugcuagaagugu

SEQ ID NO: 1695854 - RNA, 19 nt, Artificial Sequence
  Description of Artificial Sequence: Synthetic oligonucleotide
  Antisense strand to SEQ ID NO: 1695853
acacuucuagcacuggucu

SEQ ID NO: 1695855 - RNA, 19 nt, Artificial Sequence
  Description of Artificial Sequence: Synthetic oligonucleotide
  Sense strand starting at position 2790 of SEQ ID NO: 1561754
gcuagaaguguccagucua

SEQ ID NO: 1695856 - RNA, 19 nt, Artificial Sequence
  Description of Artificial Sequence: Synthetic oligonucleotide
  Antisense strand to SEQ ID NO: 1695855
uagacuggacacuucuagc

SEQ ID NO: 1695857 - RNA, 19 nt, Artificial Sequence
  Description of Artificial Sequence: Synthetic oligonucleotide
  Sense strand starting at position 2821 of SEQ ID NO: 1561754
ccaagacuccguggccauu

SEQ ID NO: 1695858 - RNA, 19 nt, Artificial Sequence
  Description of Artificial Sequence: Synthetic oligonucleotide
  Antisense strand to SEQ ID NO: 1695857
aauggccacggagucuugg

SEQ ID NO: 1695859 - RNA, 19 nt, Artificial Sequence
  Description of Artificial Sequence: Synthetic oligonucleotide
  Sense strand starting at position 2923 of SEQ ID NO: 1561754
ggaucucucugagauacuu

SEQ ID NO: 1695860 - RNA, 19 nt, Artificial Sequence
  Description of Artificial Sequence: Synthetic oligonucleotide
  Antisense strand to SEQ ID NO: 1695859
aaguaucucagagagaucc

SEQ ID NO: 1695861 - RNA, 19 nt, Artificial Sequence
  Description of Artificial Sequence: Synthetic oligonucleotide
  Sense strand starting at position 2931 of SEQ ID NO: 1561754
cugagauacuucugccuug

SEQ ID NO: 1695862 - RNA, 19 nt, Artificial Sequence
  Description of Artificial Sequence: Synthetic oligonucleotide
  Antisense strand to SEQ ID NO: 1695861
caaggcagaaguaucucag

SEQ ID NO: 1695863 - RNA, 19 nt, Artificial Sequence
  Description of Artificial Sequence: Synthetic oligonucleotide
  Sense strand starting at position 2971 of SEQ ID NO: 1561754
gacaaacauccgcgagcaa

SEQ ID NO: 1695864 - RNA, 19 nt, Artificial Sequence
  Description of Artificial Sequence: Synthetic oligonucleotide
  Antisense strand to SEQ ID NO: 1695863
uugcucgcggauguuuguc

SEQ ID NO: 1695865 - RNA, 19 nt, Artificial Sequence
  Description of Artificial Sequence: Synthetic oligonucleotide
  Sense strand starting at position 3062 of SEQ ID NO: 1561754
ugucgauucucuuuccuaa

SEQ ID NO: 1695866 - RNA, 19 nt, Artificial Sequence
  Description of Artificial Sequence: Synthetic oligonucleotide
  Antisense strand to SEQ ID NO: 1695865
uuaggaaagagaaucgaca

SEQ ID NO: 1695867 - RNA, 19 nt, Artificial Sequence
  Description of Artificial Sequence: Synthetic oligonucleotide
  Sense strand starting at position 3634 of SEQ ID NO: 1561754
gcugauaucugagcuaagu

SEQ ID NO: 1695868 - RNA, 19 nt, Artificial Sequence
  Description of Artificial Sequence: Synthetic oligonucleotide
  Antisense strand to SEQ ID NO: 1695867
acuuagcucagauaucagc

SEQ ID NO: 1695869 - RNA, 19 nt, Artificial Sequence
  Description of Artificial Sequence: Synthetic oligonucleotide
  Sense strand starting at position 3643 of SEQ ID NO: 1561754
ugagcuaagucuugaagac

SEQ ID NO: 1695870 - RNA, 19 nt, Artificial Sequence
  Description of Artificial Sequence: Synthetic oligonucleotide
  Antisense strand to SEQ ID NO: 1695869
gucuucaagacuuagcuca

SEQ ID NO: 1695871 - RNA, 19 nt, Artificial Sequence
  Description of Artificial Sequence: Synthetic oligonucleotide
  Sense strand starting at position 3785 of SEQ ID NO: 1561754
cucuuaacauuauugggau

SEQ ID NO: 1695872 - RNA, 19 nt, Artificial Sequence
  Description of Artificial Sequence: Synthetic oligonucleotide
  Antisense strand to SEQ ID NO: 1695871
aucccaauaauguuaagag

SEQ ID NO: 1695873 - RNA, 19 nt, Artificial Sequence
  Description of Artificial Sequence: Synthetic oligonucleotide
  Sense strand starting at position 3867 of SEQ ID NO: 1561754
acuaguuugugggaggcaa

SEQ ID NO: 1695874 - RNA, 19 nt, Artificial Sequence
  Description of Artificial Sequence: Synthetic oligonucleotide
  Antisense strand to SEQ ID NO: 1695873
uugccucccacaaacuagu

SEQ ID NO: 1695875 - RNA, 19 nt, Artificial Sequence
  Description of Artificial Sequence: Synthetic oligonucleotide
  Sense strand starting at position 3965 of SEQ ID NO: 1561754
gguaaacacuucucugauc

SEQ ID NO: 1695876 - RNA, 19 nt, Artificial Sequence
  Description of Artificial Sequence: Synthetic oligonucleotide
  Antisense strand to SEQ ID NO: 1695875
gaucagagaaguguuuacc

SEQ ID NO: 1695877 - RNA, 19 nt, Artificial Sequence
  Description of Artificial Sequence: Synthetic oligonucleotide
  Sense strand starting at position 113 of SEQ ID NO: 1561755
aagauuaucuggccaggag

SEQ ID NO: 1695878 - RNA, 19 nt, Artificial Sequence
  Description of Artificial Sequence: Synthetic oligonucleotide
  Antisense strand to SEQ ID NO: 1695877
cuccuggccagauaaucuu

SEQ ID NO: 1695879 - RNA, 19 nt, Artificial Sequence
  Description of Artificial Sequence: Synthetic oligonucleotide
  Sense strand starting at position 114 of SEQ ID NO: 1561755
agauuaucuggccaggagu

SEQ ID NO: 1695880 - RNA, 19 nt, Artificial Sequence
  Description of Artificial Sequence: Synthetic oligonucleotide
  Antisense strand to SEQ ID NO: 1695879
acuccuggccagauaaucu

SEQ ID NO: 1695881 - RNA, 19 nt, Artificial Sequence
  Description of Artificial Sequence: Synthetic oligonucleotide
  Sense strand starting at position 116 of SEQ ID NO: 1561755
auuaucuggccaggaguaa

SEQ ID NO: 1695882 - RNA, 19 nt, Artificial Sequence
  Description of Artificial Sequence: Synthetic oligonucleotide
  Antisense strand to SEQ ID NO: 1695881
uuacuccuggccagauaau

SEQ ID NO: 1695883 - RNA, 19 nt, Artificial Sequence
  Description of Artificial Sequence: Synthetic oligonucleotide
  Sense strand starting at position 151 of SEQ ID NO: 1561755
ggcagagacuuguccaaag

SEQ ID NO: 1695884 - RNA, 19 nt, Artificial Sequence
  Description of Artificial Sequence: Synthetic oligonucleotide
  Antisense strand to SEQ ID NO: 1695883
cuuuggacaagucucugcc

SEQ ID NO: 1695885 - RNA, 19 nt, Artificial Sequence
  Description of Artificial Sequence: Synthetic oligonucleotide
  Sense strand starting at position 185 of SEQ ID NO: 1561755
agcaaagagccaggauuaa

SEQ ID NO: 1695886 - RNA, 19 nt, Artificial Sequence
  Description of Artificial Sequence: Synthetic oligonucleotide
  Antisense strand to SEQ ID NO: 1695885
uuaauccuggcucuuugcu

SEQ ID NO: 1695887 - RNA, 19 nt, Artificial Sequence
  Description of Artificial Sequence: Synthetic oligonucleotide
  Sense strand starting at position 243 of SEQ ID NO: 1561755
acaccaugucugggaucua

SEQ ID NO: 1695888 - RNA, 19 nt, Artificial Sequence
  Description of Artificial Sequence: Synthetic oligonucleotide
  Antisense strand to SEQ ID NO: 1695887
uagaucccagacauggugu

SEQ ID NO: 1695889 - RNA, 19 nt, Artificial Sequence
  Description of Artificial Sequence: Synthetic oligonucleotide
  Sense strand starting at position 256 of SEQ ID NO: 1561755
gaucuacagucaggucaau

SEQ ID NO: 1695890 - RNA, 19 nt, Artificial Sequence
  Description of Artificial Sequence: Synthetic oligonucleotide
  Antisense strand to SEQ ID NO: 1695889
auugaccugacuguagauc

SEQ ID NO: 1695891 - RNA, 19 nt, Artificial Sequence
  Description of Artificial Sequence: Synthetic oligonucleotide
  Sense strand starting at position 269 of SEQ ID NO: 1561755
gucaaugaauggcaagagu

SEQ ID NO: 1695892 - RNA, 19 nt, Artificial Sequence
  Description of Artificial Sequence: Synthetic oligonucleotide
  Antisense strand to SEQ ID NO: 1695891
acucuugccauucauugac

SEQ ID NO: 1695893 - RNA, 19 nt, Artificial Sequence
  Description of Artificial Sequence: Synthetic oligonucleotide
  Sense strand starting at position 434 of SEQ ID NO: 1561755
aaaugucuggcauaguaag

SEQ ID NO: 1695894 - RNA, 19 nt, Artificial Sequence
  Description of Artificial Sequence: Synthetic oligonucleotide
  Antisense strand to SEQ ID NO: 1695893
cuuacuaugccagacauuu

SEQ ID NO: 1695895 - RNA, 19 nt, Artificial Sequence
  Description of Artificial Sequence: Synthetic oligonucleotide
  Sense strand starting at position 530 of SEQ ID NO: 1561755
agacaugaauuccaguuua

SEQ ID NO: 1695896 - RNA, 19 nt, Artificial Sequence
  Description of Artificial Sequence: Synthetic oligonucleotide
  Antisense strand to SEQ ID NO: 1695895
uaaacuggaauucaugucu

SEQ ID NO: 1695897 - RNA, 19 nt, Artificial Sequence
  Description of Artificial Sequence: Synthetic oligonucleotide
  Sense strand starting at position 558 of SEQ ID NO: 1561755
uggcuacaaugugacuuaa

SEQ ID NO: 1695898 - RNA, 19 nt, Artificial Sequence
  Description of Artificial Sequence: Synthetic oligonucleotide
  Antisense strand to SEQ ID NO: 1695897
uuaagucacauuguagcca

SEQ ID NO: 1695899 - RNA, 19 nt, Artificial Sequence
  Description of Artificial Sequence: Synthetic oligonucleotide
  Sense strand starting at position 560 of SEQ ID NO: 1561755
gcuacaaugugacuuaacu

SEQ ID NO: 1695900 - RNA, 19 nt, Artificial Sequence
  Description of Artificial Sequence: Synthetic oligonucleotide
  Antisense strand to SEQ ID NO: 1695899
aguuaagucacauuguagc

SEQ ID NO: 1695901 - RNA, 19 nt, Artificial Sequence
  Description of Artificial Sequence: Synthetic oligonucleotide
  Sense strand starting at position 661 of SEQ ID NO: 1561755
uguaaaguacuuuaguaca

SEQ ID NO: 1695902 - RNA, 19 nt, Artificial Sequence
  Description of Artificial Sequence: Synthetic oligonucleotide
  Antisense strand to SEQ ID NO: 1695901
uguacuaaaguacuuuaca

SEQ ID NO: 1695903 - RNA, 19 nt, Artificial Sequence
  Description of Artificial Sequence: Synthetic oligonucleotide
  Sense strand starting at position 666 of SEQ ID NO: 1561755
aguacuuuaguacaguauu

SEQ ID NO: 1695904 - RNA, 19 nt, Artificial Sequence
  Description of Artificial Sequence: Synthetic oligonucleotide
  Antisense strand to SEQ ID NO: 1695903
aauacuguacuaaaguacu

SEQ ID NO: 1695905 - RNA, 19 nt, Artificial Sequence
  Description of Artificial Sequence: Synthetic oligonucleotide
  Sense strand starting at position 682 of SEQ ID NO: 1561755
auuggaaccuacuaaagua

SEQ ID NO: 1695906 - RNA, 19 nt, Artificial Sequence
  Description of Artificial Sequence: Synthetic oligonucleotide
  Antisense strand to SEQ ID NO: 1695905
uacuuuaguagguuccaau

SEQ ID NO: 1695907 - RNA, 19 nt, Artificial Sequence
  Description of Artificial Sequence: Synthetic oligonucleotide
  Sense strand starting at position 831 of SEQ ID NO: 1561755
gauugaccguucccagaau

SEQ ID NO: 1695908 - RNA, 19 nt, Artificial Sequence
  Description of Artificial Sequence: Synthetic oligonucleotide
  Antisense strand to SEQ ID NO: 1695907
auucugggaacggucaauc

SEQ ID NO: 1695909 - RNA, 19 nt, Artificial Sequence
  Description of Artificial Sequence: Synthetic oligonucleotide
  Sense strand starting at position 832 of SEQ ID NO: 1561755
auugaccguucccagaauu

SEQ ID NO: 1695910 - RNA, 19 nt, Artificial Sequence
  Description of Artificial Sequence: Synthetic oligonucleotide
  Antisense strand to SEQ ID NO: 1695909
aauucugggaacggucaau

SEQ ID NO: 1695911 - RNA, 19 nt, Artificial Sequence
  Description of Artificial Sequence: Synthetic oligonucleotide
  Sense strand starting at position 851 of SEQ ID NO: 1561755
uuggauuagagauguguaa

SEQ ID NO: 1695912 - RNA, 19 nt, Artificial Sequence
  Description of Artificial Sequence: Synthetic oligonucleotide
  Antisense strand to SEQ ID NO: 1695911
uuacacaucucuaauccaa

SEQ ID NO: 1695913 - RNA, 19 nt, Artificial Sequence
  Description of Artificial Sequence: Synthetic oligonucleotide
  Sense strand starting at position 853 of SEQ ID NO: 1561755
ggauuagagauguguaacc

SEQ ID NO: 1695914 - RNA, 19 nt, Artificial Sequence
  Description of Artificial Sequence: Synthetic oligonucleotide
  Antisense strand to SEQ ID NO: 1695913
gguuacacaucucuaaucc

SEQ ID NO: 1695915 - RNA, 19 nt, Artificial Sequence
  Description of Artificial Sequence: Synthetic oligonucleotide
  Sense strand starting at position 858 of SEQ ID NO: 1561755
agagauguguaacccaguu

SEQ ID NO: 1695916 - RNA, 19 nt, Artificial Sequence
  Description of Artificial Sequence: Synthetic oligonucleotide
  Antisense strand to SEQ ID NO: 1695915
aacuggguuacacaucucu

SEQ ID NO: 1695917 - RNA, 19 nt, Artificial Sequence
  Description of Artificial Sequence: Synthetic oligonucleotide
  Sense strand starting at position 912 of SEQ ID NO: 1561755
gcagcuguuucauugguag

SEQ ID NO: 1695918 - RNA, 19 nt, Artificial Sequence
  Description of Artificial Sequence: Synthetic oligonucleotide
  Antisense strand to SEQ ID NO: 1695917
cuaccaaugaaacagcugc

SEQ ID NO: 1695919 - RNA, 19 nt, Artificial Sequence
  Description of Artificial Sequence: Synthetic oligonucleotide
  Sense strand starting at position 1239 of SEQ ID NO: 1561755
gacagugagaguuacaugu

SEQ ID NO: 1695920 - RNA, 19 nt, Artificial Sequence
  Description of Artificial Sequence: Synthetic oligonucleotide
  Antisense strand to SEQ ID NO: 1695919
acauguaacucucacuguc

SEQ ID NO: 1695921 - RNA, 19 nt, Artificial Sequence
  Description of Artificial Sequence: Synthetic oligonucleotide
  Sense strand starting at position 1241 of SEQ ID NO: 1561755
cagugagaguuacauguca

SEQ ID NO: 1695922 - RNA, 19 nt, Artificial Sequence
  Description of Artificial Sequence: Synthetic oligonucleotide
  Antisense strand to SEQ ID NO: 1695921
ugacauguaacucucacug

SEQ ID NO: 1695923 - RNA, 19 nt, Artificial Sequence
  Description of Artificial Sequence: Synthetic oligonucleotide
  Sense strand starting at position 1243 of SEQ ID NO: 1561755
gugagaguuacaugucagg

SEQ ID NO: 1695924 - RNA, 19 nt, Artificial Sequence
  Description of Artificial Sequence: Synthetic oligonucleotide
  Antisense strand to SEQ ID NO: 1695923
ccugacauguaacucucac

SEQ ID NO: 1695925 - RNA, 19 nt, Artificial Sequence
  Description of Artificial Sequence: Synthetic oligonucleotide
  Sense strand starting at position 1253 of SEQ ID NO: 1561755
caugucaggucccaaguua

SEQ ID NO: 1695926 - RNA, 19 nt, Artificial Sequence
  Description of Artificial Sequence: Synthetic oligonucleotide
  Antisense strand to SEQ ID NO: 1695925
uaacuugggaccugacaug

SEQ ID NO: 1695927 - RNA, 19 nt, Artificial Sequence
  Description of Artificial Sequence: Synthetic oligonucleotide
  Sense strand starting at position 1377 of SEQ ID NO: 1561755
gacuuacgucucugcgacu

SEQ ID NO: 1695928 - RNA, 19 nt, Artificial Sequence
  Description of Artificial Sequence: Synthetic oligonucleotide
  Antisense strand to SEQ ID NO: 1695927
agucgcagagacguaaguc

SEQ ID NO: 1695929 - RNA, 19 nt, Artificial Sequence
  Description of Artificial Sequence: Synthetic oligonucleotide
  Sense strand starting at position 2122 of SEQ ID NO: 1561755
aggccugacuuccagacua

SEQ ID NO: 1695930 - RNA, 19 nt, Artificial Sequence
  Description of Artificial Sequence: Synthetic oligonucleotide
  Antisense strand to SEQ ID NO: 1695929
uagucuggaagucaggccu

SEQ ID NO: 1695931 - RNA, 19 nt, Artificial Sequence
  Description of Artificial Sequence: Synthetic oligonucleotide
  Sense strand starting at position 2160 of SEQ ID NO: 1561755
ucaccuuucuggucuuagu

SEQ ID NO: 1695932 - RNA, 19 nt, Artificial Sequence
  Description of Artificial Sequence: Synthetic oligonucleotide
  Antisense strand to SEQ ID NO: 1695931
acuaagaccagaaagguga

SEQ ID NO: 1695933 - RNA, 19 nt, Artificial Sequence
  Description of Artificial Sequence: Synthetic oligonucleotide
  Sense strand starting at position 2222 of SEQ ID NO: 1561755
acaagacccugcuugugaa

SEQ ID NO: 1695934 - RNA, 19 nt, Artificial Sequence
  Description of Artificial Sequence: Synthetic oligonucleotide
  Antisense strand to SEQ ID NO: 1695933
uucacaagcagggucuugu

SEQ ID NO: 1695935 - RNA, 19 nt, Artificial Sequence
  Description of Artificial Sequence: Synthetic oligonucleotide
  Sense strand starting at position 2232 of SEQ ID NO: 1561755
gcuugugaaggugagcuau

SEQ ID NO: 1695936 - RNA, 19 nt, Artificial Sequence
  Description of Artificial Sequence: Synthetic oligonucleotide
  Antisense strand to SEQ ID NO: 1695935
auagcucaccuucacaagc

SEQ ID NO: 1695937 - RNA, 19 nt, Artificial Sequence
  Description of Artificial Sequence: Synthetic oligonucleotide
  Sense strand starting at position 2242 of SEQ ID NO: 1561755
gugagcuauuuaggagacu

SEQ ID NO: 1695938 - RNA, 19 nt, Artificial Sequence
  Description of Artificial Sequence: Synthetic oligonucleotide
  Antisense strand to SEQ ID NO: 1695937
agucuccuaaauagcucac

SEQ ID NO: 1695939 - RNA, 19 nt, Artificial Sequence
  Description of Artificial Sequence: Synthetic oligonucleotide
  Sense strand starting at position 2243 of SEQ ID NO: 1561755
ugagcuauuuaggagacua

SEQ ID NO: 1695940 - RNA, 19 nt, Artificial Sequence
  Description of Artificial Sequence: Synthetic oligonucleotide
  Antisense strand to SEQ ID NO: 1695939
uagucuccuaaauagcuca

SEQ ID NO: 1695941 - RNA, 19 nt, Artificial Sequence
  Description of Artificial Sequence: Synthetic oligonucleotide
  Sense strand starting at position 2251 of SEQ ID NO: 1561755
uuaggagacuaccaucuuu

SEQ ID NO: 1695942 - RNA, 19 nt, Artificial Sequence
  Description of Artificial Sequence: Synthetic oligonucleotide
  Antisense strand to SEQ ID NO: 1695941
aaagaugguagucuccuaa

SEQ ID NO: 1695943 - RNA, 19 nt, Artificial Sequence
  Description of Artificial Sequence: Synthetic oligonucleotide
  Sense strand starting at position 2309 of SEQ ID NO: 1561755
ggacacaucucacugacuu

SEQ ID NO: 1695944 - RNA, 19 nt, Artificial Sequence
  Description of Artificial Sequence: Synthetic oligonucleotide
  Antisense strand to SEQ ID NO: 1695943
aagucagugagaugugucc

SEQ ID NO: 1695945 - RNA, 19 nt, Artificial Sequence
  Description of Artificial Sequence: Synthetic oligonucleotide
  Sense strand starting at position 2333 of SEQ ID NO: 1561755
cccauuagucagugaggag

SEQ ID NO: 1695946 - RNA, 19 nt, Artificial Sequence
  Description of Artificial Sequence: Synthetic oligonucleotide
  Antisense strand to SEQ ID NO: 1695945
cuccucacugacuaauggg

SEQ ID NO: 1695947 - RNA, 19 nt, Artificial Sequence
  Description of Artificial Sequence: Synthetic oligonucleotide
  Sense strand starting at position 2529 of SEQ ID NO: 1561755
gaguuucuagcuugaggau

SEQ ID NO: 1695948 - RNA, 19 nt, Artificial Sequence
  Description of Artificial Sequence: Synthetic oligonucleotide
  Antisense strand to SEQ ID NO: 1695947
auccucaagcuagaaacuc

SEQ ID NO: 1695949 - RNA, 19 nt, Artificial Sequence
  Description of Artificial Sequence: Synthetic oligonucleotide
  Sense strand starting at position 2551 of SEQ ID NO: 1561755
acgucauccuccgcagacu

SEQ ID NO: 1695950 - RNA, 19 nt, Artificial Sequence
  Description of Artificial Sequence: Synthetic oligonucleotide
  Antisense strand to SEQ ID NO: 1695949
agucugcggaggaugacgu

SEQ ID NO: 1695951 - RNA, 19 nt, Artificial Sequence
  Description of Artificial Sequence: Synthetic oligonucleotide
  Sense strand starting at position 2913 of SEQ ID NO: 1561755
ccgaucucacgagacugaa

SEQ ID NO: 1695952 - RNA, 19 nt, Artificial Sequence
  Description of Artificial Sequence: Synthetic oligonucleotide
  Antisense strand to SEQ ID NO: 1695951
uucagucucgugagaucgg

SEQ ID NO: 1695953 - RNA, 19 nt, Artificial Sequence
  Description of Artificial Sequence: Synthetic oligonucleotide
  Sense strand starting at position 2969 of SEQ ID NO: 1561755
gagaaagggaguuguuuac

SEQ ID NO: 1695954 - RNA, 19 nt, Artificial Sequence
  Description of Artificial Sequence: Synthetic oligonucleotide
  Antisense strand to SEQ ID NO: 1695953
guaaacaacucccuuucuc

SEQ ID NO: 1695955 - RNA, 19 nt, Artificial Sequence
  Description of Artificial Sequence: Synthetic oligonucleotide
  Sense strand starting at position 2978 of SEQ ID NO: 1561755
aguuguuuacgcgaccuau

SEQ ID NO: 1695956 - RNA, 19 nt, Artificial Sequence
  Description of Artificial Sequence: Synthetic oligonucleotide
  Antisense strand to SEQ ID NO: 1695955
auaggucgcguaaacaacu

SEQ ID NO: 1695957 - RNA, 19 nt, Artificial Sequence
  Description of Artificial Sequence: Synthetic oligonucleotide
  Sense strand starting at position 126 of SEQ ID NO: 1561756
aggccugacuuccagacua

SEQ ID NO: 1695958 - RNA, 19 nt, Artificial Sequence
  Description of Artificial Sequence: Synthetic oligonucleotide
  Antisense strand to SEQ ID NO: 1695957
uagucuggaagucaggccu

SEQ ID NO: 1695959 - RNA, 19 nt, Artificial Sequence
  Description of Artificial Sequence: Synthetic oligonucleotide
  Sense strand starting at position 164 of SEQ ID NO: 1561756
ucaccuuucuggucuuagu

SEQ ID NO: 1695960 - RNA, 19 nt, Artificial Sequence
  Description of Artificial Sequence: Synthetic oligonucleotide
  Antisense strand to SEQ ID NO: 1695959
acuaagaccagaaagguga

SEQ ID NO: 1695961 - RNA, 19 nt, Artificial Sequence
  Description of Artificial Sequence: Synthetic oligonucleotide
  Sense strand starting at position 226 of SEQ ID NO: 1561756
acaagacccugcuugugaa

SEQ ID NO: 1695962 - RNA, 19 nt, Artificial Sequence
  Description of Artificial Sequence: Synthetic oligonucleotide
  Antisense strand to SEQ ID NO: 1695961
uucacaagcagggucuugu

SEQ ID NO: 1695963 - RNA, 19 nt, Artificial Sequence
  Description of Artificial Sequence: Synthetic oligonucleotide
  Sense strand starting at position 236 of SEQ ID NO: 1561756
gcuugugaaggugagcuau

SEQ ID NO: 1695964 - RNA, 19 nt, Artificial Sequence
  Description of Artificial Sequence: Synthetic oligonucleotide
  Antisense strand to SEQ ID NO: 1695963
auagcucaccuucacaagc

SEQ ID NO: 1695965 - RNA, 19 nt, Artificial Sequence
  Description of Artificial Sequence: Synthetic oligonucleotide
  Sense strand starting at position 246 of SEQ ID NO: 1561756
gugagcuauuuaggagacu

SEQ ID NO: 1695966 - RNA, 19 nt, Artificial Sequence
  Description of Artificial Sequence: Synthetic oligonucleotide
  Antisense strand to SEQ ID NO: 1695965
agucuccuaaauagcucac

SEQ ID NO: 1695967 - RNA, 19 nt, Artificial Sequence
  Description of Artificial Sequence: Synthetic oligonucleotide
  Sense strand starting at position 247 of SEQ ID NO: 1561756
ugagcuauuuaggagacua

SEQ ID NO: 1695968 - RNA, 19 nt, Artificial Sequence
  Description of Artificial Sequence: Synthetic oligonucleotide
  Antisense strand to SEQ ID NO: 1695967
uagucuccuaaauagcuca

SEQ ID NO: 1695969 - RNA, 19 nt, Artificial Sequence
  Description of Artificial Sequence: Synthetic oligonucleotide
  Sense strand starting at position 255 of SEQ ID NO: 1561756
uuaggagacuaccaucuuu

SEQ ID NO: 1695970 - RNA, 19 nt, Artificial Sequence
  Description of Artificial Sequence: Synthetic oligonucleotide
  Antisense strand to SEQ ID NO: 1695969
aaagaugguagucuccuaa

SEQ ID NO: 1695971 - RNA, 19 nt, Artificial Sequence
  Description of Artificial Sequence: Synthetic oligonucleotide
  Sense strand starting at position 313 of SEQ ID NO: 1561756
ggacacaucucacugacuu

SEQ ID NO: 1695972 - RNA, 19 nt, Artificial Sequence
  Description of Artificial Sequence: Synthetic oligonucleotide
  Antisense strand to SEQ ID NO: 1695971
aagucagugagaugugucc

SEQ ID NO: 1695973 - RNA, 19 nt, Artificial Sequence
  Description of Artificial Sequence: Synthetic oligonucleotide
  Sense strand starting at position 337 of SEQ ID NO: 1561756
cccauuagucagugaggag

SEQ ID NO: 1695974 - RNA, 19 nt, Artificial Sequence
  Description of Artificial Sequence: Synthetic oligonucleotide
  Antisense strand to SEQ ID NO: 1695973
cuccucacugacuaauggg

SEQ ID NO: 1695975 - RNA, 19 nt, Artificial Sequence
  Description of Artificial Sequence: Synthetic oligonucleotide
  Sense strand starting at position 533 of SEQ ID NO: 1561756
gaguuucuagcuugaggau

SEQ ID NO: 1695976 - RNA, 19 nt, Artificial Sequence
  Description of Artificial Sequence: Synthetic oligonucleotide
  Antisense strand to SEQ ID NO: 1695975
auccucaagcuagaaacuc

SEQ ID NO: 1695977 - RNA, 19 nt, Artificial Sequence
  Description of Artificial Sequence: Synthetic oligonucleotide
  Sense strand starting at position 555 of SEQ ID NO: 1561756
acgucauccuccgcagacu

SEQ ID NO: 1695978 - RNA, 19 nt, Artificial Sequence
  Description of Artificial Sequence: Synthetic oligonucleotide
  Antisense strand to SEQ ID NO: 1695977
agucugcggaggaugacgu

SEQ ID NO: 1695979 - RNA, 19 nt, Artificial Sequence
  Description of Artificial Sequence: Synthetic oligonucleotide
  Sense strand starting at position 917 of SEQ ID NO: 1561756
ccgaucucacgagacugaa

SEQ ID NO: 1695980 - RNA, 19 nt, Artificial Sequence
  Description of Artificial Sequence: Synthetic oligonucleotide
  Antisense strand to SEQ ID NO: 1695979
uucagucucgugagaucgg

SEQ ID NO: 1695981 - RNA, 19 nt, Artificial Sequence
  Description of Artificial Sequence: Synthetic oligonucleotide
  Sense strand starting at position 973 of SEQ ID NO: 1561756
gagaaagggaguuguuuac

SEQ ID NO: 1695982 - RNA, 19 nt, Artificial Sequence
  Description of Artificial Sequence: Synthetic oligonucleotide
  Antisense strand to SEQ ID NO: 1695981
guaaacaacucccuuucuc

SEQ ID NO: 1695983 - RNA, 19 nt, Artificial Sequence
  Description of Artificial Sequence: Synthetic oligonucleotide
  Sense strand starting at position 982 of SEQ ID NO: 1561756
aguuguuuacgcgaccuau

SEQ ID NO: 1695984 - RNA, 19 nt, Artificial Sequence
  Description of Artificial Sequence: Synthetic oligonucleotide
  Antisense strand to SEQ ID NO: 1695983
auaggucgcguaaacaacu

SEQ ID NO: 1695985 - RNA, 19 nt, Artificial Sequence
  Description of Artificial Sequence: Synthetic oligonucleotide
  Sense strand starting at position 2148 of SEQ ID NO: 1561756
gagaaacguuugcccucuu

SEQ ID NO: 1695986 - RNA, 19 nt, Artificial Sequence
  Description of Artificial Sequence: Synthetic oligonucleotide
  Antisense strand to SEQ ID NO: 1695985
aagagggcaaacguuucuc

SEQ ID NO: 1695987 - RNA, 19 nt, Artificial Sequence
  Description of Artificial Sequence: Synthetic oligonucleotide
  Sense strand starting at position 2182 of SEQ ID NO: 1561756
ggcucagaccagugcuaga

SEQ ID NO: 1695988 - RNA, 19 nt, Artificial Sequence
  Description of Artificial Sequence: Synthetic oligonucleotide
  Antisense strand to SEQ ID NO: 1695987
ucuagcacuggucugagcc

SEQ ID NO: 1695989 - RNA, 19 nt, Artificial Sequence
  Description of Artificial Sequence: Synthetic oligonucleotide
  Sense strand starting at position 2187 of SEQ ID NO: 1561756
agaccagugcuagaagugu

SEQ ID NO: 1695990 - RNA, 19 nt, Artificial Sequence
  Description of Artificial Sequence: Synthetic oligonucleotide
  Antisense strand to SEQ ID NO: 1695989
acacuucuagcacuggucu

SEQ ID NO: 1695991 - RNA, 19 nt, Artificial Sequence
  Description of Artificial Sequence: Synthetic oligonucleotide
  Sense strand starting at position 2195 of SEQ ID NO: 1561756
gcuagaaguguccagucua

SEQ ID NO: 1695992 - RNA, 19 nt, Artificial Sequence
  Description of Artificial Sequence: Synthetic oligonucleotide
  Antisense strand to SEQ ID NO: 1695991
uagacuggacacuucuagc

SEQ ID NO: 1695993 - RNA, 19 nt, Artificial Sequence
  Description of Artificial Sequence: Synthetic oligonucleotide
  Sense strand starting at position 2226 of SEQ ID NO: 1561756
ccaagacuccguggccauu

SEQ ID NO: 1695994 - RNA, 19 nt, Artificial Sequence
  Description of Artificial Sequence: Synthetic oligonucleotide
  Antisense strand to SEQ ID NO: 1695993
aauggccacggagucuugg

SEQ ID NO: 1695995 - RNA, 19 nt, Artificial Sequence
  Description of Artificial Sequence: Synthetic oligonucleotide
  Sense strand starting at position 2328 of SEQ ID NO: 1561756
ggaucucucugagauacuu

SEQ ID NO: 1695996 - RNA, 19 nt, Artificial Sequence
  Description of Artificial Sequence: Synthetic oligonucleotide
  Antisense strand to SEQ ID NO: 1695995
aaguaucucagagagaucc

SEQ ID NO: 1695997 - RNA, 19 nt, Artificial Sequence
  Description of Artificial Sequence: Synthetic oligonucleotide
  Sense strand starting at position 2376 of SEQ ID NO: 1561756
gacaaacauccgcgagcaa

SEQ ID NO: 1695998 - RNA, 19 nt, Artificial Sequence
  Description of Artificial Sequence: Synthetic oligonucleotide
  Antisense strand to SEQ ID NO: 1695997
uugcucgcggauguuuguc

SEQ ID NO: 1695999 - RNA, 19 nt, Artificial Sequence
  Description of Artificial Sequence: Synthetic oligonucleotide
  Sense strand starting at position 2467 of SEQ ID NO: 1561756
ugucgauucucuuuccuaa

SEQ ID NO: 1696000 - RNA, 19 nt, Artificial Sequence
  Description of Artificial Sequence: Synthetic oligonucleotide
  Antisense strand to SEQ ID NO: 1695999
uuaggaaagagaaucgaca

SEQ ID NO: 1696001 - RNA, 19 nt, Artificial Sequence
  Description of Artificial Sequence: Synthetic oligonucleotide
  Sense strand starting at position 3039 of SEQ ID NO: 1561756
gcugauaucugagcuaagu

SEQ ID NO: 1696002 - RNA, 19 nt, Artificial Sequence
  Description of Artificial Sequence: Synthetic oligonucleotide
  Antisense strand to SEQ ID NO: 1696001
acuuagcucagauaucagc

SEQ ID NO: 1696003 - RNA, 19 nt, Artificial Sequence
  Description of Artificial Sequence: Synthetic oligonucleotide
  Sense strand starting at position 3190 of SEQ ID NO: 1561756
cucuuaacauuauugggau

SEQ ID NO: 1696004 - RNA, 19 nt, Artificial Sequence
  Description of Artificial Sequence: Synthetic oligonucleotide
  Antisense strand to SEQ ID NO: 1696003
aucccaauaauguuaagag

SEQ ID NO: 1696005 - RNA, 19 nt, Artificial Sequence
  Description of Artificial Sequence: Synthetic oligonucleotide
  Sense strand starting at position 3272 of SEQ ID NO: 1561756
acuaguuugugggaggcaa

SEQ ID NO: 1696006 - RNA, 19 nt, Artificial Sequence
  Description of Artificial Sequence: Synthetic oligonucleotide
  Antisense strand to SEQ ID NO: 1696005
uugccucccacaaacuagu

SEQ ID NO: 1696007 - RNA, 19 nt, Artificial Sequence
  Description of Artificial Sequence: Synthetic oligonucleotide
  Sense strand starting at position 3370 of SEQ ID NO: 1561756
gguaaacacuucucugauc

SEQ ID NO: 1696008 - RNA, 19 nt, Artificial Sequence
  Description of Artificial Sequence: Synthetic oligonucleotide
  Antisense strand to SEQ ID NO: 1696007
gaucagagaaguguuuacc

SEQ ID NO: 1696009 - RNA, 19 nt, Artificial Sequence
  Description of Artificial Sequence: Synthetic oligonucleotide
  Sense strand starting at position 3479 of SEQ ID NO: 1561756
uuuggaaaugcucaguaau

SEQ ID NO: 1696010 - RNA, 19 nt, Artificial Sequence
  Description of Artificial Sequence: Synthetic oligonucleotide
  Antisense strand to SEQ ID NO: 1696009
auuacugagcauuuccaaa

SEQ ID NO: 1696011 - RNA, 19 nt, Artificial Sequence
  Description of Artificial Sequence: Synthetic oligonucleotide
  Sense strand starting at position 3481 of SEQ ID NO: 1561756
uggaaaugcucaguaaucg

SEQ ID NO: 1696012 - RNA, 19 nt, Artificial Sequence
  Description of Artificial Sequence: Synthetic oligonucleotide
  Antisense strand to SEQ ID NO: 1696011
cgauuacugagcauuucca

SEQ ID NO: 1696013 - RNA, 19 nt, Artificial Sequence
  Description of Artificial Sequence: Synthetic oligonucleotide
  Sense strand starting at position 3482 of SEQ ID NO: 1561756
ggaaaugcucaguaaucgu

SEQ ID NO: 1696014 - RNA, 19 nt, Artificial Sequence
  Description of Artificial Sequence: Synthetic oligonucleotide
  Antisense strand to SEQ ID NO: 1696013
acgauuacugagcauuucc

SEQ ID NO: 1696015 - RNA, 19 nt, Artificial Sequence
  Description of Artificial Sequence: Synthetic oligonucleotide
  Sense strand starting at position 3491 of SEQ ID NO: 1561756
caguaaucguuagcuguuu

SEQ ID NO: 1696016 - RNA, 19 nt, Artificial Sequence
  Description of Artificial Sequence: Synthetic oligonucleotide
  Antisense strand to SEQ ID NO: 1696015
aaacagcuaacgauuacug

SEQ ID NO: 1696017 - RNA, 19 nt, Artificial Sequence
  Description of Artificial Sequence: Synthetic oligonucleotide
  Sense strand starting at position 3514 of SEQ ID NO: 1561756
gguaauggguucugagaaa

SEQ ID NO: 1696018 - RNA, 19 nt, Artificial Sequence
  Description of Artificial Sequence: Synthetic oligonucleotide
  Antisense strand to SEQ ID NO: 1696017
uuucucagaacccauuacc

SEQ ID NO: 1696019 - RNA, 19 nt, Artificial Sequence
  Description of Artificial Sequence: Synthetic oligonucleotide
  Sense strand starting at position 3562 of SEQ ID NO: 1561756
cugaaauuauaggaaguaa

SEQ ID NO: 1696020 - RNA, 19 nt, Artificial Sequence
  Description of Artificial Sequence: Synthetic oligonucleotide
  Antisense strand to SEQ ID NO: 1696019
uuacuuccuauaauuucag

SEQ ID NO: 1696021 - RNA, 19 nt, Artificial Sequence
  Description of Artificial Sequence: Synthetic oligonucleotide
  Sense strand starting at position 3573 of SEQ ID NO: 1561756
ggaaguaagcccuaauugu

SEQ ID NO: 1696022 - RNA, 19 nt, Artificial Sequence
  Description of Artificial Sequence: Synthetic oligonucleotide
  Antisense strand to SEQ ID NO: 1696021
acaauuagggcuuacuucc

SEQ ID NO: 1696023 - RNA, 19 nt, Artificial Sequence
  Description of Artificial Sequence: Synthetic oligonucleotide
  Sense strand starting at position 3615 of SEQ ID NO: 1561756
ugugccagucacuauuaua

SEQ ID NO: 1696024 - RNA, 19 nt, Artificial Sequence
  Description of Artificial Sequence: Synthetic oligonucleotide
  Antisense strand to SEQ ID NO: 1696023
uauaauagugacuggcaca

SEQ ID NO: 1696025 - RNA, 19 nt, Artificial Sequence
  Description of Artificial Sequence: Synthetic oligonucleotide
  Sense strand starting at position 3717 of SEQ ID NO: 1561756
gaacuugucccaggcccua

SEQ ID NO: 1696026 - RNA, 19 nt, Artificial Sequence
  Description of Artificial Sequence: Synthetic oligonucleotide
  Antisense strand to SEQ ID NO: 1696025
uagggccugggacaaguuc

SEQ ID NO: 1696027 - RNA, 19 nt, Artificial Sequence
  Description of Artificial Sequence: Synthetic oligonucleotide
  Sense strand starting at position 3782 of SEQ ID NO: 1561756
ucuagagacugugcuuaca

SEQ ID NO: 1696028 - RNA, 19 nt, Artificial Sequence
  Description of Artificial Sequence: Synthetic oligonucleotide
  Antisense strand to SEQ ID NO: 1696027
uguaagcacagucucuaga

SEQ ID NO: 1696029 - RNA, 19 nt, Artificial Sequence
  Description of Artificial Sequence: Synthetic oligonucleotide
  Sense strand starting at position 3784 of SEQ ID NO: 1561756
uagagacugugcuuacaac

SEQ ID NO: 1696030 - RNA, 19 nt, Artificial Sequence
  Description of Artificial Sequence: Synthetic oligonucleotide
  Antisense strand to SEQ ID NO: 1696029
guuguaagcacagucucua

SEQ ID NO: 1696031 - RNA, 19 nt, Artificial Sequence
  Description of Artificial Sequence: Synthetic oligonucleotide
  Sense strand starting at position 3874 of SEQ ID NO: 1561756
ugguuugauucuuauuucu

SEQ ID NO: 1696032 - RNA, 19 nt, Artificial Sequence
  Description of Artificial Sequence: Synthetic oligonucleotide
  Antisense strand to SEQ ID NO: 1696031
agaaauaagaaucaaacca

SEQ ID NO: 1696033 - RNA, 19 nt, Artificial Sequence
  Description of Artificial Sequence: Synthetic oligonucleotide
  Sense strand starting at position 3952 of SEQ ID NO: 1561756
ucaggaguacaguggauaa

SEQ ID NO: 1696034 - RNA, 19 nt, Artificial Sequence
  Description of Artificial Sequence: Synthetic oligonucleotide
  Antisense strand to SEQ ID NO: 1696033
uuauccacuguacuccuga

SEQ ID NO: 1696035 - RNA, 19 nt, Artificial Sequence
  Description of Artificial Sequence: Synthetic oligonucleotide
  Sense strand starting at position 3964 of SEQ ID NO: 1561756
uggauaagagcuuagcuca

SEQ ID NO: 1696036 - RNA, 19 nt, Artificial Sequence
  Description of Artificial Sequence: Synthetic oligonucleotide
  Antisense strand to SEQ ID NO: 1696035
ugagcuaagcucuuaucca

SEQ ID NO: 1696037 - RNA, 19 nt, Artificial Sequence
  Description of Artificial Sequence: Synthetic oligonucleotide
  Sense strand starting at position 314 of SEQ ID NO: 1561757
aggccugacuuccagacua

SEQ ID NO: 1696038 - RNA, 19 nt, Artificial Sequence
  Description of Artificial Sequence: Synthetic oligonucleotide
  Antisense strand to SEQ ID NO: 1696037
uagucuggaagucaggccu

SEQ ID NO: 1696039 - RNA, 19 nt, Artificial Sequence
  Description of Artificial Sequence: Synthetic oligonucleotide
  Sense strand starting at position 352 of SEQ ID NO: 1561757
ucaccuuucuggucuuagu

SEQ ID NO: 1696040 - RNA, 19 nt, Artificial Sequence
  Description of Artificial Sequence: Synthetic oligonucleotide
  Antisense strand to SEQ ID NO: 1696039
acuaagaccagaaagguga

SEQ ID NO: 1696041 - RNA, 19 nt, Artificial Sequence
  Description of Artificial Sequence: Synthetic oligonucleotide
  Sense strand starting at position 414 of SEQ ID NO: 1561757
acaagacccugcuugugaa

SEQ ID NO: 1696042 - RNA, 19 nt, Artificial Sequence
  Description of Artificial Sequence: Synthetic oligonucleotide
  Antisense strand to SEQ ID NO: 1696041
uucacaagcagggucuugu

SEQ ID NO: 1696043 - RNA, 19 nt, Artificial Sequence
  Description of Artificial Sequence: Synthetic oligonucleotide
  Sense strand starting at position 424 of SEQ ID NO: 1561757
gcuugugaaggugagcuau

SEQ ID NO: 1696044 - RNA, 19 nt, Artificial Sequence
  Description of Artificial Sequence: Synthetic oligonucleotide
  Antisense strand to SEQ ID NO: 1696043
auagcucaccuucacaagc

SEQ ID NO: 1696045 - RNA, 19 nt, Artificial Sequence
  Description of Artificial Sequence: Synthetic oligonucleotide
  Sense strand starting at position 434 of SEQ ID NO: 1561757
gugagcuauuuaggagacu

SEQ ID NO: 1696046 - RNA, 19 nt, Artificial Sequence
  Description of Artificial Sequence: Synthetic oligonucleotide
  Antisense strand to SEQ ID NO: 1696045
agucuccuaaauagcucac

SEQ ID NO: 1696047 - RNA, 19 nt, Artificial Sequence
  Description of Artificial Sequence: Synthetic oligonucleotide
  Sense strand starting at position 435 of SEQ ID NO: 1561757
ugagcuauuuaggagacua

SEQ ID NO: 1696048 - RNA, 19 nt, Artificial Sequence
  Description of Artificial Sequence: Synthetic oligonucleotide
  Antisense strand to SEQ ID NO: 1696047
uagucuccuaaauagcuca

SEQ ID NO: 1696049 - RNA, 19 nt, Artificial Sequence
  Description of Artificial Sequence: Synthetic oligonucleotide
  Sense strand starting at position 443 of SEQ ID NO: 1561757
uuaggagacuaccaucuuu

SEQ ID NO: 1696050 - RNA, 19 nt, Artificial Sequence
  Description of Artificial Sequence: Synthetic oligonucleotide
  Antisense strand to SEQ ID NO: 1696049
aaagaugguagucuccuaa

SEQ ID NO: 1696051 - RNA, 19 nt, Artificial Sequence
  Description of Artificial Sequence: Synthetic oligonucleotide
  Sense strand starting at position 501 of SEQ ID NO: 1561757
ggacacaucucacugacuu

SEQ ID NO: 1696052 - RNA, 19 nt, Artificial Sequence
  Description of Artificial Sequence: Synthetic oligonucleotide
  Antisense strand to SEQ ID NO: 1696051
aagucagugagaugugucc

SEQ ID NO: 1696053 - RNA, 19 nt, Artificial Sequence
  Description of Artificial Sequence: Synthetic oligonucleotide
  Sense strand starting at position 525 of SEQ ID NO: 1561757
cccauuagucagugaggag

SEQ ID NO: 1696054 - RNA, 19 nt, Artificial Sequence
  Description of Artificial Sequence: Synthetic oligonucleotide
  Antisense strand to SEQ ID NO: 1696053
cuccucacugacuaauggg

SEQ ID NO: 1696055 - RNA, 19 nt, Artificial Sequence
  Description of Artificial Sequence: Synthetic oligonucleotide
  Sense strand starting at position 721 of SEQ ID NO: 1561757
gaguuucuagcuugaggau

SEQ ID NO: 1696056 - RNA, 19 nt, Artificial Sequence
  Description of Artificial Sequence: Synthetic oligonucleotide
  Antisense strand to SEQ ID NO: 1696055
auccucaagcuagaaacuc

SEQ ID NO: 1696057 - RNA, 19 nt, Artificial Sequence
  Description of Artificial Sequence: Synthetic oligonucleotide
  Sense strand starting at position 743 of SEQ ID NO: 1561757
acgucauccuccgcagacu

SEQ ID NO: 1696058 - RNA, 19 nt, Artificial Sequence
  Description of Artificial Sequence: Synthetic oligonucleotide
  Antisense strand to SEQ ID NO: 1696057
agucugcggaggaugacgu

SEQ ID NO: 1696059 - RNA, 19 nt, Artificial Sequence
  Description of Artificial Sequence: Synthetic oligonucleotide
  Sense strand starting at position 1105 of SEQ ID NO: 1561757
ccgaucucacgagacugaa

SEQ ID NO: 1696060 - RNA, 19 nt, Artificial Sequence
  Description of Artificial Sequence: Synthetic oligonucleotide
  Antisense strand to SEQ ID NO: 1696059
uucagucucgugagaucgg

SEQ ID NO: 1696061 - RNA, 19 nt, Artificial Sequence
  Description of Artificial Sequence: Synthetic oligonucleotide
  Sense strand starting at position 1161 of SEQ ID NO: 1561757
gagaaagggaguuguuuac

SEQ ID NO: 1696062 - RNA, 19 nt, Artificial Sequence
  Description of Artificial Sequence: Synthetic oligonucleotide
  Antisense strand to SEQ ID NO: 1696061
guaaacaacucccuuucuc

SEQ ID NO: 1696063 - RNA, 19 nt, Artificial Sequence
  Description of Artificial Sequence: Synthetic oligonucleotide
  Sense strand starting at position 1170 of SEQ ID NO: 1561757
aguuguuuacgcgaccuau

SEQ ID NO: 1696064 - RNA, 19 nt, Artificial Sequence
  Description of Artificial Sequence: Synthetic oligonucleotide
  Antisense strand to SEQ ID NO: 1696063
auaggucgcguaaacaacu

SEQ ID NO: 1696065 - RNA, 19 nt, Artificial Sequence
  Description of Artificial Sequence: Synthetic oligonucleotide
  Sense strand starting at position 2336 of SEQ ID NO: 1561757
gagaaacguuugcccucuu

SEQ ID NO: 1696066 - RNA, 19 nt, Artificial Sequence
  Description of Artificial Sequence: Synthetic oligonucleotide
  Antisense strand to SEQ ID NO: 1696065
aagagggcaaacguuucuc

SEQ ID NO: 1696067 - RNA, 19 nt, Artificial Sequence
  Description of Artificial Sequence: Synthetic oligonucleotide
  Sense strand starting at position 2370 of SEQ ID NO: 1561757
ggcucagaccagugcuaga

SEQ ID NO: 1696068 - RNA, 19 nt, Artificial Sequence
  Description of Artificial Sequence: Synthetic oligonucleotide
  Antisense strand to SEQ ID NO: 1696067
ucuagcacuggucugagcc

SEQ ID NO: 1696069 - RNA, 19 nt, Artificial Sequence
  Description of Artificial Sequence: Synthetic oligonucleotide
  Sense strand starting at position 2375 of SEQ ID NO: 1561757
agaccagugcuagaagugu

SEQ ID NO: 1696070 - RNA, 19 nt, Artificial Sequence
  Description of Artificial Sequence: Synthetic oligonucleotide
  Antisense strand to SEQ ID NO: 1696069
acacuucuagcacuggucu

SEQ ID NO: 1696071 - RNA, 19 nt, Artificial Sequence
  Description of Artificial Sequence: Synthetic oligonucleotide
  Sense strand starting at position 2383 of SEQ ID NO: 1561757
gcuagaaguguccagucua

SEQ ID NO: 1696072 - RNA, 19 nt, Artificial Sequence
  Description of Artificial Sequence: Synthetic oligonucleotide
  Antisense strand to SEQ ID NO: 1696071
uagacuggacacuucuagc

SEQ ID NO: 1696073 - RNA, 19 nt, Artificial Sequence
  Description of Artificial Sequence: Synthetic oligonucleotide
  Sense strand starting at position 2414 of SEQ ID NO: 1561757
ccaagacuccguggccauu

SEQ ID NO: 1696074 - RNA, 19 nt, Artificial Sequence
  Description of Artificial Sequence: Synthetic oligonucleotide
  Antisense strand to SEQ ID NO: 1696073
aauggccacggagucuugg

SEQ ID NO: 1696075 - RNA, 19 nt, Artificial Sequence
  Description of Artificial Sequence: Synthetic oligonucleotide
  Sense strand starting at position 2516 of SEQ ID NO: 1561757
ggaucucucugagauacuu

SEQ ID NO: 1696076 - RNA, 19 nt, Artificial Sequence
  Description of Artificial Sequence: Synthetic oligonucleotide
  Antisense strand to SEQ ID NO: 1696075
aaguaucucagagagaucc

SEQ ID NO: 1696077 - RNA, 19 nt, Artificial Sequence
  Description of Artificial Sequence: Synthetic oligonucleotide
  Sense strand starting at position 2524 of SEQ ID NO: 1561757
cugagauacuucugccuug

SEQ ID NO: 1696078 - RNA, 19 nt, Artificial Sequence
  Description of Artificial Sequence: Synthetic oligonucleotide
  Antisense strand to SEQ ID NO: 1696077
caaggcagaaguaucucag

SEQ ID NO: 1696079 - RNA, 19 nt, Artificial Sequence
  Description of Artificial Sequence: Synthetic oligonucleotide
  Sense strand starting at position 2564 of SEQ ID NO: 1561757
gacaaacauccgcgagcaa

SEQ ID NO: 1696080 - RNA, 19 nt, Artificial Sequence
  Description of Artificial Sequence: Synthetic oligonucleotide
  Antisense strand to SEQ ID NO: 1696079
uugcucgcggauguuuguc

SEQ ID NO: 1696081 - RNA, 19 nt, Artificial Sequence
  Description of Artificial Sequence: Synthetic oligonucleotide
  Sense strand starting at position 2655 of SEQ ID NO: 1561757
ugucgauucucuuuccuaa

SEQ ID NO: 1696082 - RNA, 19 nt, Artificial Sequence
  Description of Artificial Sequence: Synthetic oligonucleotide
  Antisense strand to SEQ ID NO: 1696081
uuaggaaagagaaucgaca

SEQ ID NO: 1696083 - RNA, 19 nt, Artificial Sequence
  Description of Artificial Sequence: Synthetic oligonucleotide
  Sense strand starting at position 3227 of SEQ ID NO: 1561757
gcugauaucugagcuaagu

SEQ ID NO: 1696084 - RNA, 19 nt, Artificial Sequence
  Description of Artificial Sequence: Synthetic oligonucleotide
  Antisense strand to SEQ ID NO: 1696083
acuuagcucagauaucagc

SEQ ID NO: 1696085 - RNA, 19 nt, Artificial Sequence
  Description of Artificial Sequence: Synthetic oligonucleotide
  Sense strand starting at position 3236 of SEQ ID NO: 1561757
ugagcuaagucuugaagac

SEQ ID NO: 1696086 - RNA, 19 nt, Artificial Sequence
  Description of Artificial Sequence: Synthetic oligonucleotide
  Antisense strand to SEQ ID NO: 1696085
gucuucaagacuuagcuca

SEQ ID NO: 1696087 - RNA, 19 nt, Artificial Sequence
  Description of Artificial Sequence: Synthetic oligonucleotide
  Sense strand starting at position 3378 of SEQ ID NO: 1561757
cucuuaacauuauugggau

SEQ ID NO: 1696088 - RNA, 19 nt, Artificial Sequence
  Description of Artificial Sequence: Synthetic oligonucleotide
  Antisense strand to SEQ ID NO: 1696087
aucccaauaauguuaagag

SEQ ID NO: 1696089 - RNA, 19 nt, Artificial Sequence
  Description of Artificial Sequence: Synthetic oligonucleotide
  Sense strand starting at position 3460 of SEQ ID NO: 1561757
acuaguuugugggaggcaa

SEQ ID NO: 1696090 - RNA, 19 nt, Artificial Sequence
  Description of Artificial Sequence: Synthetic oligonucleotide
  Antisense strand to SEQ ID NO: 1696089
uugccucccacaaacuagu

SEQ ID NO: 1696091 - RNA, 19 nt, Artificial Sequence
  Description of Artificial Sequence: Synthetic oligonucleotide
  Sense strand starting at position 3558 of SEQ ID NO: 1561757
gguaaacacuucucugauc

SEQ ID NO: 1696092 - RNA, 19 nt, Artificial Sequence
  Description of Artificial Sequence: Synthetic oligonucleotide
  Antisense strand to SEQ ID NO: 1696091
gaucagagaaguguuuacc

SEQ ID NO: 1696093 - RNA, 19 nt, Artificial Sequence
  Description of Artificial Sequence: Synthetic oligonucleotide
  Sense strand starting at position 3667 of SEQ ID NO: 1561757
uuuggaaaugcucaguaau

SEQ ID NO: 1696094 - RNA, 19 nt, Artificial Sequence
  Description of Artificial Sequence: Synthetic oligonucleotide
  Antisense strand to SEQ ID NO: 1696093
auuacugagcauuuccaaa

SEQ ID NO: 1696095 - RNA, 19 nt, Artificial Sequence
  Description of Artificial Sequence: Synthetic oligonucleotide
  Sense strand starting at position 3669 of SEQ ID NO: 1561757
uggaaaugcucaguaaucg

SEQ ID NO: 1696096 - RNA, 19 nt, Artificial Sequence
  Description of Artificial Sequence: Synthetic oligonucleotide
  Antisense strand to SEQ ID NO: 1696095
cgauuacugagcauuucca

SEQ ID NO: 1696097 - RNA, 19 nt, Artificial Sequence
  Description of Artificial Sequence: Synthetic oligonucleotide
  Sense strand starting at position 3670 of SEQ ID NO: 1561757
ggaaaugcucaguaaucgu

SEQ ID NO: 1696098 - RNA, 19 nt, Artificial Sequence
  Description of Artificial Sequence: Synthetic oligonucleotide
  Antisense strand to SEQ ID NO: 1696097
acgauuacugagcauuucc

SEQ ID NO: 1696099 - RNA, 19 nt, Artificial Sequence
  Description of Artificial Sequence: Synthetic oligonucleotide
  Sense strand starting at position 3679 of SEQ ID NO: 1561757
caguaaucguuagcuguuu

SEQ ID NO: 1696100 - RNA, 19 nt, Artificial Sequence
  Description of Artificial Sequence: Synthetic oligonucleotide
  Antisense strand to SEQ ID NO: 1696099
aaacagcuaacgauuacug

SEQ ID NO: 1696101 - RNA, 19 nt, Artificial Sequence
  Description of Artificial Sequence: Synthetic oligonucleotide
  Sense strand starting at position 3702 of SEQ ID NO: 1561757
gguaauggguucugagaaa

SEQ ID NO: 1696102 - RNA, 19 nt, Artificial Sequence
  Description of Artificial Sequence: Synthetic oligonucleotide
  Antisense strand to SEQ ID NO: 1696101
uuucucagaacccauuacc

SEQ ID NO: 1696103 - RNA, 19 nt, Artificial Sequence
  Description of Artificial Sequence: Synthetic oligonucleotide
  Sense strand starting at position 3750 of SEQ ID NO: 1561757
cugaaauuauaggaaguaa

SEQ ID NO: 1696104 - RNA, 19 nt, Artificial Sequence
  Description of Artificial Sequence: Synthetic oligonucleotide
  Antisense strand to SEQ ID NO: 1696103
uuacuuccuauaauuucag

SEQ ID NO: 1696105 - RNA, 19 nt, Artificial Sequence
  Description of Artificial Sequence: Synthetic oligonucleotide
  Sense strand starting at position 3761 of SEQ ID NO: 1561757
ggaaguaagcccuaauugu

SEQ ID NO: 1696106 - RNA, 19 nt, Artificial Sequence
  Description of Artificial Sequence: Synthetic oligonucleotide
  Antisense strand to SEQ ID NO: 1696105
acaauuagggcuuacuucc

SEQ ID NO: 1696107 - RNA, 19 nt, Artificial Sequence
  Description of Artificial Sequence: Synthetic oligonucleotide
  Sense strand starting at position 3803 of SEQ ID NO: 1561757
ugugccagucacuauuaua

SEQ ID NO: 1696108 - RNA, 19 nt, Artificial Sequence
  Description of Artificial Sequence: Synthetic oligonucleotide
  Antisense strand to SEQ ID NO: 1696107
uauaauagugacuggcaca

SEQ ID NO: 1696109 - RNA, 19 nt, Artificial Sequence
  Description of Artificial Sequence: Synthetic oligonucleotide
  Sense strand starting at position 3905 of SEQ ID NO: 1561757
gaacuugucccaggcccua

SEQ ID NO: 1696110 - RNA, 19 nt, Artificial Sequence
  Description of Artificial Sequence: Synthetic oligonucleotide
  Antisense strand to SEQ ID NO: 1696109
uagggccugggacaaguuc

SEQ ID NO: 1696111 - RNA, 19 nt, Artificial Sequence
  Description of Artificial Sequence: Synthetic oligonucleotide
  Sense strand starting at position 3970 of SEQ ID NO: 1561757
ucuagagacugugcuuaca

SEQ ID NO: 1696112 - RNA, 19 nt, Artificial Sequence
  Description of Artificial Sequence: Synthetic oligonucleotide
  Antisense strand to SEQ ID NO: 1696111
uguaagcacagucucuaga

SEQ ID NO: 1696113 - RNA, 19 nt, Artificial Sequence
  Description of Artificial Sequence: Synthetic oligonucleotide
  Sense strand starting at position 3972 of SEQ ID NO: 1561757
uagagacugugcuuacaac

SEQ ID NO: 1696114 - RNA, 19 nt, Artificial Sequence
  Description of Artificial Sequence: Synthetic oligonucleotide
  Antisense strand to SEQ ID NO: 1696113
guuguaagcacagucucua

SEQ ID NO: 1696115 - RNA, 19 nt, Artificial Sequence
  Description of Artificial Sequence: Synthetic oligonucleotide
  Sense strand starting at position 354 of SEQ ID NO: 1561758
aggccugacuuccagacua

SEQ ID NO: 1696116 - RNA, 19 nt, Artificial Sequence
  Description of Artificial Sequence: Synthetic oligonucleotide
  Antisense strand to SEQ ID NO: 1696115
uagucuggaagucaggccu

SEQ ID NO: 1696117 - RNA, 19 nt, Artificial Sequence
  Description of Artificial Sequence: Synthetic oligonucleotide
  Sense strand starting at position 392 of SEQ ID NO: 1561758
ucaccuuucuggucuuagu

SEQ ID NO: 1696118 - RNA, 19 nt, Artificial Sequence
  Description of Artificial Sequence: Synthetic oligonucleotide
  Antisense strand to SEQ ID NO: 1696117
acuaagaccagaaagguga

SEQ ID NO: 1696119 - RNA, 19 nt, Artificial Sequence
  Description of Artificial Sequence: Synthetic oligonucleotide
  Sense strand starting at position 454 of SEQ ID NO: 1561758
acaagacccugcuugugaa

SEQ ID NO: 1696120 - RNA, 19 nt, Artificial Sequence
  Description of Artificial Sequence: Synthetic oligonucleotide
  Antisense strand to SEQ ID NO: 1696119
uucacaagcagggucuugu

SEQ ID NO: 1696121 - RNA, 19 nt, Artificial Sequence
  Description of Artificial Sequence: Synthetic oligonucleotide
  Sense strand starting at position 464 of SEQ ID NO: 1561758
gcuugugaaggugagcuau

SEQ ID NO: 1696122 - RNA, 19 nt, Artificial Sequence
  Description of Artificial Sequence: Synthetic oligonucleotide
  Antisense strand to SEQ ID NO: 1696121
auagcucaccuucacaagc

SEQ ID NO: 1696123 - RNA, 19 nt, Artificial Sequence
  Description of Artificial Sequence: Synthetic oligonucleotide
  Sense strand starting at position 474 of SEQ ID NO: 1561758
gugagcuauuuaggagacu

SEQ ID NO: 1696124 - RNA, 19 nt, Artificial Sequence
  Description of Artificial Sequence: Synthetic oligonucleotide
  Antisense strand to SEQ ID NO: 1696123
agucuccuaaauagcucac

SEQ ID NO: 1696125 - RNA, 19 nt, Artificial Sequence
  Description of Artificial Sequence: Synthetic oligonucleotide
  Sense strand starting at position 475 of SEQ ID NO: 1561758
ugagcuauuuaggagacua

SEQ ID NO: 1696126 - RNA, 19 nt, Artificial Sequence
  Description of Artificial Sequence: Synthetic oligonucleotide
  Antisense strand to SEQ ID NO: 1696125
uagucuccuaaauagcuca

SEQ ID NO: 1696127 - RNA, 19 nt, Artificial Sequence
  Description of Artificial Sequence: Synthetic oligonucleotide
  Sense strand starting at position 483 of SEQ ID NO: 1561758
uuaggagacuaccaucuuu

SEQ ID NO: 1696128 - RNA, 19 nt, Artificial Sequence
  Description of Artificial Sequence: Synthetic oligonucleotide
  Antisense strand to SEQ ID NO: 1696127
aaagaugguagucuccuaa

SEQ ID NO: 1696129 - RNA, 19 nt, Artificial Sequence
  Description of Artificial Sequence: Synthetic oligonucleotide
  Sense strand starting at position 541 of SEQ ID NO: 1561758
ggacacaucucacugacuu

SEQ ID NO: 1696130 - RNA, 19 nt, Artificial Sequence
  Description of Artificial Sequence: Synthetic oligonucleotide
  Antisense strand to SEQ ID NO: 1696129
aagucagugagaugugucc

SEQ ID NO: 1696131 - RNA, 19 nt, Artificial Sequence
  Description of Artificial Sequence: Synthetic oligonucleotide
  Sense strand starting at position 565 of SEQ ID NO: 1561758
cccauuagucagugaggag

SEQ ID NO: 1696132 - RNA, 19 nt, Artificial Sequence
  Description of Artificial Sequence: Synthetic oligonucleotide
  Antisense strand to SEQ ID NO: 1696131
cuccucacugacuaauggg

SEQ ID NO: 1696133 - RNA, 19 nt, Artificial Sequence
  Description of Artificial Sequence: Synthetic oligonucleotide
  Sense strand starting at position 761 of SEQ ID NO: 1561758
gaguuucuagcuugaggau

SEQ ID NO: 1696134 - RNA, 19 nt, Artificial Sequence
  Description of Artificial Sequence: Synthetic oligonucleotide
  Antisense strand to SEQ ID NO: 1696133
auccucaagcuagaaacuc

SEQ ID NO: 1696135 - RNA, 19 nt, Artificial Sequence
  Description of Artificial Sequence: Synthetic oligonucleotide
  Sense strand starting at position 783 of SEQ ID NO: 1561758
acgucauccuccgcagacu

SEQ ID NO: 1696136 - RNA, 19 nt, Artificial Sequence
  Description of Artificial Sequence: Synthetic oligonucleotide
  Antisense strand to SEQ ID NO: 1696135
agucugcggaggaugacgu

SEQ ID NO: 1696137 - RNA, 19 nt, Artificial Sequence
  Description of Artificial Sequence: Synthetic oligonucleotide
  Sense strand starting at position 1145 of SEQ ID NO: 1561758
ccgaucucacgagacugaa

SEQ ID NO: 1696138 - RNA, 19 nt, Artificial Sequence
  Description of Artificial Sequence: Synthetic oligonucleotide
  Antisense strand to SEQ ID NO: 1696137
uucagucucgugagaucgg

SEQ ID NO: 1696139 - RNA, 19 nt, Artificial Sequence
  Description of Artificial Sequence: Synthetic oligonucleotide
  Sense strand starting at position 1201 of SEQ ID NO: 1561758
gagaaagggaguuguuuac

SEQ ID NO: 1696140 - RNA, 19 nt, Artificial Sequence
  Description of Artificial Sequence: Synthetic oligonucleotide
  Antisense strand to SEQ ID NO: 1696139
guaaacaacucccuuucuc

SEQ ID NO: 1696141 - RNA, 19 nt, Artificial Sequence
  Description of Artificial Sequence: Synthetic oligonucleotide
  Sense strand starting at position 1210 of SEQ ID NO: 1561758
aguuguuuacgcgaccuau

SEQ ID NO: 1696142 - RNA, 19 nt, Artificial Sequence
  Description of Artificial Sequence: Synthetic oligonucleotide
  Antisense strand to SEQ ID NO: 1696141
auaggucgcguaaacaacu

SEQ ID NO: 1696143 - RNA, 19 nt, Artificial Sequence
  Description of Artificial Sequence: Synthetic oligonucleotide
  Sense strand starting at position 2376 of SEQ ID NO: 1561758
gagaaacguuugcccucuu

SEQ ID NO: 1696144 - RNA, 19 nt, Artificial Sequence
  Description of Artificial Sequence: Synthetic oligonucleotide
  Antisense strand to SEQ ID NO: 1696143
aagagggcaaacguuucuc

SEQ ID NO: 1696145 - RNA, 19 nt, Artificial Sequence
  Description of Artificial Sequence: Synthetic oligonucleotide
  Sense strand starting at position 2410 of SEQ ID NO: 1561758
ggcucagaccagugcuaga

SEQ ID NO: 1696146 - RNA, 19 nt, Artificial Sequence
  Description of Artificial Sequence: Synthetic oligonucleotide
  Antisense strand to SEQ ID NO: 1696145
ucuagcacuggucugagcc

SEQ ID NO: 1696147 - RNA, 19 nt, Artificial Sequence
  Description of Artificial Sequence: Synthetic oligonucleotide
  Sense strand starting at position 2415 of SEQ ID NO: 1561758
agaccagugcuagaagugu

SEQ ID NO: 1696148 - RNA, 19 nt, Artificial Sequence
  Description of Artificial Sequence: Synthetic oligonucleotide
  Antisense strand to SEQ ID NO: 1696147
acacuucuagcacuggucu

SEQ ID NO: 1696149 - RNA, 19 nt, Artificial Sequence
  Description of Artificial Sequence: Synthetic oligonucleotide
  Sense strand starting at position 2423 of SEQ ID NO: 1561758
gcuagaaguguccagucua

SEQ ID NO: 1696150 - RNA, 19 nt, Artificial Sequence
  Description of Artificial Sequence: Synthetic oligonucleotide
  Antisense strand to SEQ ID NO: 1696149
uagacuggacacuucuagc

SEQ ID NO: 1696151 - RNA, 19 nt, Artificial Sequence
  Description of Artificial Sequence: Synthetic oligonucleotide
  Sense strand starting at position 2454 of SEQ ID NO: 1561758
ccaagacuccguggccauu

SEQ ID NO: 1696152 - RNA, 19 nt, Artificial Sequence
  Description of Artificial Sequence: Synthetic oligonucleotide
  Antisense strand to SEQ ID NO: 1696151
aauggccacggagucuugg

SEQ ID NO: 1696153 - RNA, 19 nt, Artificial Sequence
  Description of Artificial Sequence: Synthetic oligonucleotide
  Sense strand starting at position 2556 of SEQ ID NO: 1561758
ggaucucucugagauacuu

SEQ ID NO: 1696154 - RNA, 19 nt, Artificial Sequence
  Description of Artificial Sequence: Synthetic oligonucleotide
  Antisense strand to SEQ ID NO: 1696153
aaguaucucagagagaucc

SEQ ID NO: 1696155 - RNA, 19 nt, Artificial Sequence
  Description of Artificial Sequence: Synthetic oligonucleotide
  Sense strand starting at position 2564 of SEQ ID NO: 1561758
cugagauacuucugccuug

SEQ ID NO: 1696156 - RNA, 19 nt, Artificial Sequence
  Description of Artificial Sequence: Synthetic oligonucleotide
  Antisense strand to SEQ ID NO: 1696155
caaggcagaaguaucucag

SEQ ID NO: 1696157 - RNA, 19 nt, Artificial Sequence
  Description of Artificial Sequence: Synthetic oligonucleotide
  Sense strand starting at position 2604 of SEQ ID NO: 1561758
gacaaacauccgcgagcaa

SEQ ID NO: 1696158 - RNA, 19 nt, Artificial Sequence
  Description of Artificial Sequence: Synthetic oligonucleotide
  Antisense strand to SEQ ID NO: 1696157
uugcucgcggauguuuguc

SEQ ID NO: 1696159 - RNA, 19 nt, Artificial Sequence
  Description of Artificial Sequence: Synthetic oligonucleotide
  Sense strand starting at position 2695 of SEQ ID NO: 1561758
ugucgauucucuuuccuaa

SEQ ID NO: 1696160 - RNA, 19 nt, Artificial Sequence
  Description of Artificial Sequence: Synthetic oligonucleotide
  Antisense strand to SEQ ID NO: 1696159
uuaggaaagagaaucgaca

SEQ ID NO: 1696161 - RNA, 19 nt, Artificial Sequence
  Description of Artificial Sequence: Synthetic oligonucleotide
  Sense strand starting at position 3267 of SEQ ID NO: 1561758
gcugauaucugagcuaagu

SEQ ID NO: 1696162 - RNA, 19 nt, Artificial Sequence
  Description of Artificial Sequence: Synthetic oligonucleotide
  Antisense strand to SEQ ID NO: 1696161
acuuagcucagauaucagc

SEQ ID NO: 1696163 - RNA, 19 nt, Artificial Sequence
  Description of Artificial Sequence: Synthetic oligonucleotide
  Sense strand starting at position 3276 of SEQ ID NO: 1561758
ugagcuaagucuugaagac

SEQ ID NO: 1696164 - RNA, 19 nt, Artificial Sequence
  Description of Artificial Sequence: Synthetic oligonucleotide
  Antisense strand to SEQ ID NO: 1696163
gucuucaagacuuagcuca

SEQ ID NO: 1696165 - RNA, 19 nt, Artificial Sequence
  Description of Artificial Sequence: Synthetic oligonucleotide
  Sense strand starting at position 3418 of SEQ ID NO: 1561758
cucuuaacauuauugggau

SEQ ID NO: 1696166 - RNA, 19 nt, Artificial Sequence
  Description of Artificial Sequence: Synthetic oligonucleotide
  Antisense strand to SEQ ID NO: 1696165
aucccaauaauguuaagag

SEQ ID NO: 1696167 - RNA, 19 nt, Artificial Sequence
  Description of Artificial Sequence: Synthetic oligonucleotide
  Sense strand starting at position 3500 of SEQ ID NO: 1561758
acuaguuugugggaggcaa

SEQ ID NO: 1696168 - RNA, 19 nt, Artificial Sequence
  Description of Artificial Sequence: Synthetic oligonucleotide
  Antisense strand to SEQ ID NO: 1696167
uugccucccacaaacuagu

SEQ ID NO: 1696169 - RNA, 19 nt, Artificial Sequence
  Description of Artificial Sequence: Synthetic oligonucleotide
  Sense strand starting at position 3598 of SEQ ID NO: 1561758
gguaaacacuucucugauc

SEQ ID NO: 1696170 - RNA, 19 nt, Artificial Sequence
  Description of Artificial Sequence: Synthetic oligonucleotide
  Antisense strand to SEQ ID NO: 1696169
gaucagagaaguguuuacc

SEQ ID NO: 1696171 - RNA, 19 nt, Artificial Sequence
  Description of Artificial Sequence: Synthetic oligonucleotide
  Sense strand starting at position 3707 of SEQ ID NO: 1561758
uuuggaaaugcucaguaau

SEQ ID NO: 1696172 - RNA, 19 nt, Artificial Sequence
  Description of Artificial Sequence: Synthetic oligonucleotide
  Antisense strand to SEQ ID NO: 1696171
auuacugagcauuuccaaa

SEQ ID NO: 1696173 - RNA, 19 nt, Artificial Sequence
  Description of Artificial Sequence: Synthetic oligonucleotide
  Sense strand starting at position 3709 of SEQ ID NO: 1561758
uggaaaugcucaguaaucg

SEQ ID NO: 1696174 - RNA, 19 nt, Artificial Sequence
  Description of Artificial Sequence: Synthetic oligonucleotide
  Antisense strand to SEQ ID NO: 1696173
cgauuacugagcauuucca

SEQ ID NO: 1696175 - RNA, 19 nt, Artificial Sequence
  Description of Artificial Sequence: Synthetic oligonucleotide
  Sense strand starting at position 3710 of SEQ ID NO: 1561758
ggaaaugcucaguaaucgu

SEQ ID NO: 1696176 - RNA, 19 nt, Artificial Sequence
  Description of Artificial Sequence: Synthetic oligonucleotide
  Antisense strand to SEQ ID NO: 1696175
acgauuacugagcauuucc

SEQ ID NO: 1696177 - RNA, 19 nt, Artificial Sequence
  Description of Artificial Sequence: Synthetic oligonucleotide
  Sense strand starting at position 3719 of SEQ ID NO: 1561758
caguaaucguuagcuguuu

SEQ ID NO: 1696178 - RNA, 19 nt, Artificial Sequence
  Description of Artificial Sequence: Synthetic oligonucleotide
  Antisense strand to SEQ ID NO: 1696177
aaacagcuaacgauuacug

SEQ ID NO: 1696179 - RNA, 19 nt, Artificial Sequence
  Description of Artificial Sequence: Synthetic oligonucleotide
  Sense strand starting at position 3742 of SEQ ID NO: 1561758
gguaauggguucugagaaa

SEQ ID NO: 1696180 - RNA, 19 nt, Artificial Sequence
  Description of Artificial Sequence: Synthetic oligonucleotide
  Antisense strand to SEQ ID NO: 1696179
uuucucagaacccauuacc

SEQ ID NO: 1696181 - RNA, 19 nt, Artificial Sequence
  Description of Artificial Sequence: Synthetic oligonucleotide
  Sense strand starting at position 3790 of SEQ ID NO: 1561758
cugaaauuauaggaaguaa

SEQ ID NO: 1696182 - RNA, 19 nt, Artificial Sequence
  Description of Artificial Sequence: Synthetic oligonucleotide
  Antisense strand to SEQ ID NO: 1696181
uuacuuccuauaauuucag

SEQ ID NO: 1696183 - RNA, 19 nt, Artificial Sequence
  Description of Artificial Sequence: Synthetic oligonucleotide
  Sense strand starting at position 3801 of SEQ ID NO: 1561758
ggaaguaagcccuaauugu

SEQ ID NO: 1696184 - RNA, 19 nt, Artificial Sequence
  Description of Artificial Sequence: Synthetic oligonucleotide
  Antisense strand to SEQ ID NO: 1696183
acaauuagggcuuacuucc

SEQ ID NO: 1696185 - RNA, 19 nt, Artificial Sequence
  Description of Artificial Sequence: Synthetic oligonucleotide
  Sense strand starting at position 3843 of SEQ ID NO: 1561758
ugugccagucacuauuaua

SEQ ID NO: 1696186 - RNA, 19 nt, Artificial Sequence
  Description of Artificial Sequence: Synthetic oligonucleotide
  Antisense strand to SEQ ID NO: 1696185
uauaauagugacuggcaca

SEQ ID NO: 1696187 - RNA, 19 nt, Artificial Sequence
  Description of Artificial Sequence: Synthetic oligonucleotide
  Sense strand starting at position 3945 of SEQ ID NO: 1561758
gaacuugucccaggcccua

SEQ ID NO: 1696188 - RNA, 19 nt, Artificial Sequence
  Description of Artificial Sequence: Synthetic oligonucleotide
  Antisense strand to SEQ ID NO: 1696187
uagggccugggacaaguuc

SEQ ID NO: 1696189 - RNA, 19 nt, Artificial Sequence
  Description of Artificial Sequence: Synthetic oligonucleotide
  Sense strand starting at position 140 of SEQ ID NO: 1561759
aggccucugugucaacaga

SEQ ID NO: 1696190 - RNA, 19 nt, Artificial Sequence
  Description of Artificial Sequence: Synthetic oligonucleotide
  Antisense strand to SEQ ID NO: 1696189
ucuguugacacagaggccu

SEQ ID NO: 1696191 - RNA, 19 nt, Artificial Sequence
  Description of Artificial Sequence: Synthetic oligonucleotide
  Sense strand starting at position 239 of SEQ ID NO: 1561759
cugccucuagggugaaauc

SEQ ID NO: 1696192 - RNA, 19 nt, Artificial Sequence
  Description of Artificial Sequence: Synthetic oligonucleotide
  Antisense strand to SEQ ID NO: 1696191
gauuucacccuagaggcag

SEQ ID NO: 1696193 - RNA, 19 nt, Artificial Sequence
  Description of Artificial Sequence: Synthetic oligonucleotide
  Sense strand starting at position 250 of SEQ ID NO: 1561759
gugaaauccucagggaaua

SEQ ID NO: 1696194 - RNA, 19 nt, Artificial Sequence
  Description of Artificial Sequence: Synthetic oligonucleotide
  Antisense strand to SEQ ID NO: 1696193
uauucccugaggauuucac

SEQ ID NO: 1696195 - RNA, 19 nt, Artificial Sequence
  Description of Artificial Sequence: Synthetic oligonucleotide
  Sense strand starting at position 261 of SEQ ID NO: 1561759
agggaauaagugugcccau

SEQ ID NO: 1696196 - RNA, 19 nt, Artificial Sequence
  Description of Artificial Sequence: Synthetic oligonucleotide
  Antisense strand to SEQ ID NO: 1696195
augggcacacuuauucccu

SEQ ID NO: 1696197 - RNA, 19 nt, Artificial Sequence
  Description of Artificial Sequence: Synthetic oligonucleotide
  Sense strand starting at position 262 of SEQ ID NO: 1561759
gggaauaagugugcccaua

SEQ ID NO: 1696198 - RNA, 19 nt, Artificial Sequence
  Description of Artificial Sequence: Synthetic oligonucleotide
  Antisense strand to SEQ ID NO: 1696197
uaugggcacacuuauuccc

SEQ ID NO: 1696199 - RNA, 19 nt, Artificial Sequence
  Description of Artificial Sequence: Synthetic oligonucleotide
  Sense strand starting at position 264 of SEQ ID NO: 1561759
gaauaagugugcccauaac

SEQ ID NO: 1696200 - RNA, 19 nt, Artificial Sequence
  Description of Artificial Sequence: Synthetic oligonucleotide
  Antisense strand to SEQ ID NO: 1696199
guuaugggcacacuuauuc

SEQ ID NO: 1696201 - RNA, 19 nt, Artificial Sequence
  Description of Artificial Sequence: Synthetic oligonucleotide
  Sense strand starting at position 313 of SEQ ID NO: 1561759
ugaggaacauucugaauca

SEQ ID NO: 1696202 - RNA, 19 nt, Artificial Sequence
  Description of Artificial Sequence: Synthetic oligonucleotide
  Antisense strand to SEQ ID NO: 1696201
ugauucagaauguuccuca

SEQ ID NO: 1696203 - RNA, 19 nt, Artificial Sequence
  Description of Artificial Sequence: Synthetic oligonucleotide
  Sense strand starting at position 786 of SEQ ID NO: 1561759
ugacaaugcugccuauaag

SEQ ID NO: 1696204 - RNA, 19 nt, Artificial Sequence
  Description of Artificial Sequence: Synthetic oligonucleotide
  Antisense strand to SEQ ID NO: 1696203
cuuauaggcagcauuguca

SEQ ID NO: 1696205 - RNA, 19 nt, Artificial Sequence
  Description of Artificial Sequence: Synthetic oligonucleotide
  Sense strand starting at position 1079 of SEQ ID NO: 1561759
uccacugauuucucgccua

SEQ ID NO: 1696206 - RNA, 19 nt, Artificial Sequence
  Description of Artificial Sequence: Synthetic oligonucleotide
  Antisense strand to SEQ ID NO: 1696205
uaggcgagaaaucagugga

SEQ ID NO: 1696207 - RNA, 19 nt, Artificial Sequence
  Description of Artificial Sequence: Synthetic oligonucleotide
  Sense strand starting at position 1314 of SEQ ID NO: 1561759
ggaggauggguguaucugu

SEQ ID NO: 1696208 - RNA, 19 nt, Artificial Sequence
  Description of Artificial Sequence: Synthetic oligonucleotide
  Antisense strand to SEQ ID NO: 1696207
acagauacacccauccucc

SEQ ID NO: 1696209 - RNA, 19 nt, Artificial Sequence
  Description of Artificial Sequence: Synthetic oligonucleotide
  Sense strand starting at position 1673 of SEQ ID NO: 1561759
cuggcuuggagucgagaga

SEQ ID NO: 1696210 - RNA, 19 nt, Artificial Sequence
  Description of Artificial Sequence: Synthetic oligonucleotide
  Antisense strand to SEQ ID NO: 1696209
ucucucgacuccaagccag

SEQ ID NO: 1696211 - RNA, 19 nt, Artificial Sequence
  Description of Artificial Sequence: Synthetic oligonucleotide
  Sense strand starting at position 1674 of SEQ ID NO: 1561759
uggcuuggagucgagagaa

SEQ ID NO: 1696212 - RNA, 19 nt, Artificial Sequence
  Description of Artificial Sequence: Synthetic oligonucleotide
  Antisense strand to SEQ ID NO: 1696211
uucucucgacuccaagcca

SEQ ID NO: 1696213 - RNA, 19 nt, Artificial Sequence
  Description of Artificial Sequence: Synthetic oligonucleotide
  Sense strand starting at position 2104 of SEQ ID NO: 1561759
aggcuuuaaugucagacau

SEQ ID NO: 1696214 - RNA, 19 nt, Artificial Sequence
  Description of Artificial Sequence: Synthetic oligonucleotide
  Antisense strand to SEQ ID NO: 1696213
augucugacauuaaagccu

SEQ ID NO: 1696215 - RNA, 19 nt, Artificial Sequence
  Description of Artificial Sequence: Synthetic oligonucleotide
  Sense strand starting at position 2106 of SEQ ID NO: 1561759
gcuuuaaugucagacauua

SEQ ID NO: 1696216 - RNA, 19 nt, Artificial Sequence
  Description of Artificial Sequence: Synthetic oligonucleotide
  Antisense strand to SEQ ID NO: 1696215
uaaugucugacauuaaagc

SEQ ID NO: 1696217 - RNA, 19 nt, Artificial Sequence
  Description of Artificial Sequence: Synthetic oligonucleotide
  Sense strand starting at position 2152 of SEQ ID NO: 1561759
ccacaauguuaagaggaaa

SEQ ID NO: 1696218 - RNA, 19 nt, Artificial Sequence
  Description of Artificial Sequence: Synthetic oligonucleotide
  Antisense strand to SEQ ID NO: 1696217
uuuccucuuaacauugugg

SEQ ID NO: 1696219 - RNA, 19 nt, Artificial Sequence
  Description of Artificial Sequence: Synthetic oligonucleotide
  Sense strand starting at position 2167 of SEQ ID NO: 1561759
gaaauuauagcagacggua

SEQ ID NO: 1696220 - RNA, 19 nt, Artificial Sequence
  Description of Artificial Sequence: Synthetic oligonucleotide
  Antisense strand to SEQ ID NO: 1696219
uaccgucugcuauaauuuc

SEQ ID NO: 1696221 - RNA, 19 nt, Artificial Sequence
  Description of Artificial Sequence: Synthetic oligonucleotide
  Sense strand starting at position 2530 of SEQ ID NO: 1561759
cccacauaguguuuaugga

SEQ ID NO: 1696222 - RNA, 19 nt, Artificial Sequence
  Description of Artificial Sequence: Synthetic oligonucleotide
  Antisense strand to SEQ ID NO: 1696221
uccauaaacacuauguggg

SEQ ID NO: 1696223 - RNA, 19 nt, Artificial Sequence
  Description of Artificial Sequence: Synthetic oligonucleotide
  Sense strand starting at position 2531 of SEQ ID NO: 1561759
ccacauaguguuuauggaa

SEQ ID NO: 1696224 - RNA, 19 nt, Artificial Sequence
  Description of Artificial Sequence: Synthetic oligonucleotide
  Antisense strand to SEQ ID NO: 1696223
uuccauaaacacuaugugg

SEQ ID NO: 1696225 - RNA, 19 nt, Artificial Sequence
  Description of Artificial Sequence: Synthetic oligonucleotide
  Sense strand starting at position 2534 of SEQ ID NO: 1561759
cauaguguuuauggaaaca

SEQ ID NO: 1696226 - RNA, 19 nt, Artificial Sequence
  Description of Artificial Sequence: Synthetic oligonucleotide
  Antisense strand to SEQ ID NO: 1696225
uguuuccauaaacacuaug

SEQ ID NO: 1696227 - RNA, 19 nt, Artificial Sequence
  Description of Artificial Sequence: Synthetic oligonucleotide
  Sense strand starting at position 2649 of SEQ ID NO: 1561759
cuguaucugugacacugaa

SEQ ID NO: 1696228 - RNA, 19 nt, Artificial Sequence
  Description of Artificial Sequence: Synthetic oligonucleotide
  Antisense strand to SEQ ID NO: 1696227
uucagugucacagauacag

SEQ ID NO: 1696229 - RNA, 19 nt, Artificial Sequence
  Description of Artificial Sequence: Synthetic oligonucleotide
  Sense strand starting at position 2722 of SEQ ID NO: 1561759
acuggaauuuauuaagcuu

SEQ ID NO: 1696230 - RNA, 19 nt, Artificial Sequence
  Description of Artificial Sequence: Synthetic oligonucleotide
  Antisense strand to SEQ ID NO: 1696229
aagcuuaauaaauuccagu

SEQ ID NO: 1696231 - RNA, 19 nt, Artificial Sequence
  Description of Artificial Sequence: Synthetic oligonucleotide
  Sense strand starting at position 2742 of SEQ ID NO: 1561759
uuguauacaugauaacaga

SEQ ID NO: 1696232 - RNA, 19 nt, Artificial Sequence
  Description of Artificial Sequence: Synthetic oligonucleotide
  Antisense strand to SEQ ID NO: 1696231
ucuguuaucauguauacaa

SEQ ID NO: 1696233 - RNA, 19 nt, Artificial Sequence
  Description of Artificial Sequence: Synthetic oligonucleotide
  Sense strand starting at position 2787 of SEQ ID NO: 1561759
cacagaggcucgucuguua

SEQ ID NO: 1696234 - RNA, 19 nt, Artificial Sequence
  Description of Artificial Sequence: Synthetic oligonucleotide
  Antisense strand to SEQ ID NO: 1696233
uaacagacgagccucugug

SEQ ID NO: 1696235 - RNA, 19 nt, Artificial Sequence
  Description of Artificial Sequence: Synthetic oligonucleotide
  Sense strand starting at position 2795 of SEQ ID NO: 1561759
cucgucuguuaacccaaua

SEQ ID NO: 1696236 - RNA, 19 nt, Artificial Sequence
  Description of Artificial Sequence: Synthetic oligonucleotide
  Antisense strand to SEQ ID NO: 1696235
uauuggguuaacagacgag

SEQ ID NO: 1696237 - RNA, 19 nt, Artificial Sequence
  Description of Artificial Sequence: Synthetic oligonucleotide
  Sense strand starting at position 2806 of SEQ ID NO: 1561759
acccaauacuuugggaagu

SEQ ID NO: 1696238 - RNA, 19 nt, Artificial Sequence
  Description of Artificial Sequence: Synthetic oligonucleotide
  Antisense strand to SEQ ID NO: 1696237
acuucccaaaguauugggu

SEQ ID NO: 1696239 - RNA, 19 nt, Artificial Sequence
  Description of Artificial Sequence: Synthetic oligonucleotide
  Sense strand starting at position 3087 of SEQ ID NO: 1561759
aaugaacaauggugagaaa

SEQ ID NO: 1696240 - RNA, 19 nt, Artificial Sequence
  Description of Artificial Sequence: Synthetic oligonucleotide
  Antisense strand to SEQ ID NO: 1696239
uuucucaccauuguucauu

SEQ ID NO: 1696241 - RNA, 19 nt, Artificial Sequence
  Description of Artificial Sequence: Synthetic oligonucleotide
  Sense strand starting at position 3212 of SEQ ID NO: 1561759
ccuagcugacgugaugaaa

SEQ ID NO: 1696242 - RNA, 19 nt, Artificial Sequence
  Description of Artificial Sequence: Synthetic oligonucleotide
  Antisense strand to SEQ ID NO: 1696241
uuucaucacgucagcuagg

SEQ ID NO: 1696243 - RNA, 19 nt, Artificial Sequence
  Description of Artificial Sequence: Synthetic oligonucleotide
  Sense strand starting at position 365 of SEQ ID NO: 1561760
agcugugagagaugaaagu

SEQ ID NO: 1696244 - RNA, 19 nt, Artificial Sequence
  Description of Artificial Sequence: Synthetic oligonucleotide
  Antisense strand to SEQ ID NO: 1696243
acuuucaucucucacagcu

SEQ ID NO: 1696245 - RNA, 19 nt, Artificial Sequence
  Description of Artificial Sequence: Synthetic oligonucleotide
  Sense strand starting at position 412 of SEQ ID NO: 1561760
ccuugaaagccacgugaaa

SEQ ID NO: 1696246 - RNA, 19 nt, Artificial Sequence
  Description of Artificial Sequence: Synthetic oligonucleotide
  Antisense strand to SEQ ID NO: 1696245
uuucacguggcuuucaagg

SEQ ID NO: 1696247 - RNA, 19 nt, Artificial Sequence
  Description of Artificial Sequence: Synthetic oligonucleotide
  Sense strand starting at position 518 of SEQ ID NO: 1561760
ccgcaucaugggugugaca

SEQ ID NO: 1696248 - RNA, 19 nt, Artificial Sequence
  Description of Artificial Sequence: Synthetic oligonucleotide
  Antisense strand to SEQ ID NO: 1696247
ugucacacccaugaugcgg

SEQ ID NO: 1696249 - RNA, 19 nt, Artificial Sequence
  Description of Artificial Sequence: Synthetic oligonucleotide
  Sense strand starting at position 520 of SEQ ID NO: 1561760
gcaucaugggugugacaaa

SEQ ID NO: 1696250 - RNA, 19 nt, Artificial Sequence
  Description of Artificial Sequence: Synthetic oligonucleotide
  Antisense strand to SEQ ID NO: 1696249
uuugucacacccaugaugc

SEQ ID NO: 1696251 - RNA, 19 nt, Artificial Sequence
  Description of Artificial Sequence: Synthetic oligonucleotide
  Sense strand starting at position 698 of SEQ ID NO: 1561760
gggaaauggcgacagugua

SEQ ID NO: 1696252 - RNA, 19 nt, Artificial Sequence
  Description of Artificial Sequence: Synthetic oligonucleotide
  Antisense strand to SEQ ID NO: 1696251
uacacugucgccauuuccc

SEQ ID NO: 1696253 - RNA, 19 nt, Artificial Sequence
  Description of Artificial Sequence: Synthetic oligonucleotide
  Sense strand starting at position 735 of SEQ ID NO: 1561760
ugaggagucuuugcaaggu

SEQ ID NO: 1696254 - RNA, 19 nt, Artificial Sequence
  Description of Artificial Sequence: Synthetic oligonucleotide
  Antisense strand to SEQ ID NO: 1696253
accuugcaaagacuccuca

SEQ ID NO: 1696255 - RNA, 19 nt, Artificial Sequence
  Description of Artificial Sequence: Synthetic oligonucleotide
  Sense strand starting at position 828 of SEQ ID NO: 1561760
agagaucccucugcugcua

SEQ ID NO: 1696256 - RNA, 19 nt, Artificial Sequence
  Description of Artificial Sequence: Synthetic oligonucleotide
  Antisense strand to SEQ ID NO: 1696255
uagcagcagagggaucucu

SEQ ID NO: 1696257 - RNA, 19 nt, Artificial Sequence
  Description of Artificial Sequence: Synthetic oligonucleotide
  Sense strand starting at position 841 of SEQ ID NO: 1561760
cugcuaagcgaagaauaca

SEQ ID NO: 1696258 - RNA, 19 nt, Artificial Sequence
  Description of Artificial Sequence: Synthetic oligonucleotide
  Antisense strand to SEQ ID NO: 1696257
uguauucuucgcuuagcag

SEQ ID NO: 1696259 - RNA, 19 nt, Artificial Sequence
  Description of Artificial Sequence: Synthetic oligonucleotide
  Sense strand starting at position 849 of SEQ ID NO: 1561760
cgaagaauacacuggaagu

SEQ ID NO: 1696260 - RNA, 19 nt, Artificial Sequence
  Description of Artificial Sequence: Synthetic oligonucleotide
  Antisense strand to SEQ ID NO: 1696259
acuuccaguguauucuucg

SEQ ID NO: 1696261 - RNA, 19 nt, Artificial Sequence
  Description of Artificial Sequence: Synthetic oligonucleotide
  Sense strand starting at position 888 of SEQ ID NO: 1561760
gaugaaguauguuuggacu

SEQ ID NO: 1696262 - RNA, 19 nt, Artificial Sequence
  Description of Artificial Sequence: Synthetic oligonucleotide
  Antisense strand to SEQ ID NO: 1696261
aguccaaacauacuucauc

SEQ ID NO: 1696263 - RNA, 19 nt, Artificial Sequence
  Description of Artificial Sequence: Synthetic oligonucleotide
  Sense strand starting at position 953 of SEQ ID NO: 1561760
ggguggguacagugugaau

SEQ ID NO: 1696264 - RNA, 19 nt, Artificial Sequence
  Description of Artificial Sequence: Synthetic oligonucleotide
  Antisense strand to SEQ ID NO: 1696263
auucacacuguacccaccc

SEQ ID NO: 1696265 - RNA, 19 nt, Artificial Sequence
  Description of Artificial Sequence: Synthetic oligonucleotide
  Sense strand starting at position 980 of SEQ ID NO: 1561760
gcgggagaagcuuaagaga

SEQ ID NO: 1696266 - RNA, 19 nt, Artificial Sequence
  Description of Artificial Sequence: Synthetic oligonucleotide
  Antisense strand to SEQ ID NO: 1696265
ucucuuaagcuucucccgc

SEQ ID NO: 1696267 - RNA, 19 nt, Artificial Sequence
  Description of Artificial Sequence: Synthetic oligonucleotide
  Sense strand starting at position 983 of SEQ ID NO: 1561760
ggagaagcuuaagagagau

SEQ ID NO: 1696268 - RNA, 19 nt, Artificial Sequence
  Description of Artificial Sequence: Synthetic oligonucleotide
  Antisense strand to SEQ ID NO: 1696267
aucucucuuaagcuucucc

SEQ ID NO: 1696269 - RNA, 19 nt, Artificial Sequence
  Description of Artificial Sequence: Synthetic oligonucleotide
  Sense strand starting at position 1064 of SEQ ID NO: 1561760
uaagguuucuggcuugaga

SEQ ID NO: 1696270 - RNA, 19 nt, Artificial Sequence
  Description of Artificial Sequence: Synthetic oligonucleotide
  Antisense strand to SEQ ID NO: 1696269
ucucaagccagaaaccuua

SEQ ID NO: 1696271 - RNA, 19 nt, Artificial Sequence
  Description of Artificial Sequence: Synthetic oligonucleotide
  Sense strand starting at position 1193 of SEQ ID NO: 1561760
gacaacaucugggcugaau

SEQ ID NO: 1696272 - RNA, 19 nt, Artificial Sequence
  Description of Artificial Sequence: Synthetic oligonucleotide
  Antisense strand to SEQ ID NO: 1696271
auucagcccagauguuguc

SEQ ID NO: 1696273 - RNA, 19 nt, Artificial Sequence
  Description of Artificial Sequence: Synthetic oligonucleotide
  Sense strand starting at position 1257 of SEQ ID NO: 1561760
uugccauacugcuuaaugu

SEQ ID NO: 1696274 - RNA, 19 nt, Artificial Sequence
  Description of Artificial Sequence: Synthetic oligonucleotide
  Antisense strand to SEQ ID NO: 1696273
acauuaagcaguauggcaa

SEQ ID NO: 1696275 - RNA, 19 nt, Artificial Sequence
  Description of Artificial Sequence: Synthetic oligonucleotide
  Sense strand starting at position 1359 of SEQ ID NO: 1561760
ucuagcaggcguuaaguau

SEQ ID NO: 1696276 - RNA, 19 nt, Artificial Sequence
  Description of Artificial Sequence: Synthetic oligonucleotide
  Antisense strand to SEQ ID NO: 1696275
auacuuaacgccugcuaga

SEQ ID NO: 1696277 - RNA, 19 nt, Artificial Sequence
  Description of Artificial Sequence: Synthetic oligonucleotide
  Sense strand starting at position 1382 of SEQ ID NO: 1561760
uaaacacuggcucgaugaa

SEQ ID NO: 1696278 - RNA, 19 nt, Artificial Sequence
  Description of Artificial Sequence: Synthetic oligonucleotide
  Antisense strand to SEQ ID NO: 1696277
uucaucgagccaguguuua

SEQ ID NO: 1696279 - RNA, 19 nt, Artificial Sequence
  Description of Artificial Sequence: Synthetic oligonucleotide
  Sense strand starting at position 1391 of SEQ ID NO: 1561760
gcucgaugaacauacgaaa

SEQ ID NO: 1696280 - RNA, 19 nt, Artificial Sequence
  Description of Artificial Sequence: Synthetic oligonucleotide
  Antisense strand to SEQ ID NO: 1696279
uuucguauguucaucgagc

SEQ ID NO: 1696281 - RNA, 19 nt, Artificial Sequence
  Description of Artificial Sequence: Synthetic oligonucleotide
  Sense strand starting at position 1734 of SEQ ID NO: 1561760
agaccagaaccgugcucau

SEQ ID NO: 1696282 - RNA, 19 nt, Artificial Sequence
  Description of Artificial Sequence: Synthetic oligonucleotide
  Antisense strand to SEQ ID NO: 1696281
augagcacgguucuggucu

SEQ ID NO: 1696283 - RNA, 19 nt, Artificial Sequence
  Description of Artificial Sequence: Synthetic oligonucleotide
  Sense strand starting at position 2025 of SEQ ID NO: 1561760
uuucgugugacgccaucaa

SEQ ID NO: 1696284 - RNA, 19 nt, Artificial Sequence
  Description of Artificial Sequence: Synthetic oligonucleotide
  Antisense strand to SEQ ID NO: 1696283
uugauggcgucacacgaaa

SEQ ID NO: 1696285 - RNA, 19 nt, Artificial Sequence
  Description of Artificial Sequence: Synthetic oligonucleotide
  Sense strand starting at position 2097 of SEQ ID NO: 1561760
ggcaguauuugaggagggu

SEQ ID NO: 1696286 - RNA, 19 nt, Artificial Sequence
  Description of Artificial Sequence: Synthetic oligonucleotide
  Antisense strand to SEQ ID NO: 1696285
acccuccucaaauacugcc

SEQ ID NO: 1696287 - RNA, 19 nt, Artificial Sequence
  Description of Artificial Sequence: Synthetic oligonucleotide
  Sense strand starting at position 2131 of SEQ ID NO: 1561760
ucuaaagaguugcauuuau

SEQ ID NO: 1696288 - RNA, 19 nt, Artificial Sequence
  Description of Artificial Sequence: Synthetic oligonucleotide
  Antisense strand to SEQ ID NO: 1696287
auaaaugcaacucuuuaga

SEQ ID NO: 1696289 - RNA, 19 nt, Artificial Sequence
  Description of Artificial Sequence: Synthetic oligonucleotide
  Sense strand starting at position 2146 of SEQ ID NO: 1561760
uuauaaacucuagaugugu

SEQ ID NO: 1696290 - RNA, 19 nt, Artificial Sequence
  Description of Artificial Sequence: Synthetic oligonucleotide
  Antisense strand to SEQ ID NO: 1696289
acacaucuagaguuuauaa

SEQ ID NO: 1696291 - RNA, 19 nt, Artificial Sequence
  Description of Artificial Sequence: Synthetic oligonucleotide
  Sense strand starting at position 2219 of SEQ ID NO: 1561760
gauugcuucugggugguaa

SEQ ID NO: 1696292 - RNA, 19 nt, Artificial Sequence
  Description of Artificial Sequence: Synthetic oligonucleotide
  Antisense strand to SEQ ID NO: 1696291
uuaccacccagaagcaauc

SEQ ID NO: 1696293 - RNA, 19 nt, Artificial Sequence
  Description of Artificial Sequence: Synthetic oligonucleotide
  Sense strand starting at position 2384 of SEQ ID NO: 1561760
uucugaguaacuggaggua

SEQ ID NO: 1696294 - RNA, 19 nt, Artificial Sequence
  Description of Artificial Sequence: Synthetic oligonucleotide
  Antisense strand to SEQ ID NO: 1696293
uaccuccaguuacucagaa

SEQ ID NO: 1696295 - RNA, 19 nt, Artificial Sequence
  Description of Artificial Sequence: Synthetic oligonucleotide
  Sense strand starting at position 3071 of SEQ ID NO: 1561760
gggcuuuguagggagugau

SEQ ID NO: 1696296 - RNA, 19 nt, Artificial Sequence
  Description of Artificial Sequence: Synthetic oligonucleotide
  Antisense strand to SEQ ID NO: 1696295
aucacucccuacaaagccc

SEQ ID NO: 1696297 - RNA, 19 nt, Artificial Sequence
  Description of Artificial Sequence: Synthetic oligonucleotide
  Sense strand starting at position 3074 of SEQ ID NO: 1561760
cuuuguagggagugaugga

SEQ ID NO: 1696298 - RNA, 19 nt, Artificial Sequence
  Description of Artificial Sequence: Synthetic oligonucleotide
  Antisense strand to SEQ ID NO: 1696297
uccaucacucccuacaaag

SEQ ID NO: 1696299 - RNA, 19 nt, Artificial Sequence
  Description of Artificial Sequence: Synthetic oligonucleotide
  Sense strand starting at position 3221 of SEQ ID NO: 1561760
uggugaaacuccgucugca

SEQ ID NO: 1696300 - RNA, 19 nt, Artificial Sequence
  Description of Artificial Sequence: Synthetic oligonucleotide
  Antisense strand to SEQ ID NO: 1696299
ugcagacggaguuucacca

SEQ ID NO: 1696301 - RNA, 19 nt, Artificial Sequence
  Description of Artificial Sequence: Synthetic oligonucleotide
  Sense strand starting at position 3225 of SEQ ID NO: 1561760
gaaacuccgucugcacuaa

SEQ ID NO: 1696302 - RNA, 19 nt, Artificial Sequence
  Description of Artificial Sequence: Synthetic oligonucleotide
  Antisense strand to SEQ ID NO: 1696301
uuagugcagacggaguuuc

SEQ ID NO: 1696303 - RNA, 19 nt, Artificial Sequence
  Description of Artificial Sequence: Synthetic oligonucleotide
  Sense strand starting at position 3694 of SEQ ID NO: 1561760
cuguguggucuuggguaac

SEQ ID NO: 1696304 - RNA, 19 nt, Artificial Sequence
  Description of Artificial Sequence: Synthetic oligonucleotide
  Antisense strand to SEQ ID NO: 1696303
guuacccaagaccacacag

SEQ ID NO: 1696305 - RNA, 19 nt, Artificial Sequence
  Description of Artificial Sequence: Synthetic oligonucleotide
  Sense strand starting at position 3704 of SEQ ID NO: 1561760
uuggguaacuuccuaguua

SEQ ID NO: 1696306 - RNA, 19 nt, Artificial Sequence
  Description of Artificial Sequence: Synthetic oligonucleotide
  Antisense strand to SEQ ID NO: 1696305
uaacuaggaaguuacccaa

SEQ ID NO: 1696307 - RNA, 19 nt, Artificial Sequence
  Description of Artificial Sequence: Synthetic oligonucleotide
  Sense strand starting at position 3821 of SEQ ID NO: 1561760
guucuugguucuuugugua

SEQ ID NO: 1696308 - RNA, 19 nt, Artificial Sequence
  Description of Artificial Sequence: Synthetic oligonucleotide
  Antisense strand to SEQ ID NO: 1696307
uacacaaagaaccaagaac

SEQ ID NO: 1696309 - RNA, 19 nt, Artificial Sequence
  Description of Artificial Sequence: Synthetic oligonucleotide
  Sense strand starting at position 3866 of SEQ ID NO: 1561760
uaagcugugcccguuauua

SEQ ID NO: 1696310 - RNA, 19 nt, Artificial Sequence
  Description of Artificial Sequence: Synthetic oligonucleotide
  Antisense strand to SEQ ID NO: 1696309
uaauaacgggcacagcuua

SEQ ID NO: 1696311 - RNA, 19 nt, Artificial Sequence
  Description of Artificial Sequence: Synthetic oligonucleotide
  Sense strand starting at position 3948 of SEQ ID NO: 1561760
ggaaccauguuuguacuuu

SEQ ID NO: 1696312 - RNA, 19 nt, Artificial Sequence
  Description of Artificial Sequence: Synthetic oligonucleotide
  Antisense strand to SEQ ID NO: 1696311
aaaguacaaacaugguucc

SEQ ID NO: 1696313 - RNA, 19 nt, Artificial Sequence
  Description of Artificial Sequence: Synthetic oligonucleotide
  Sense strand starting at position 3952 of SEQ ID NO: 1561760
ccauguuuguacuuugcca

SEQ ID NO: 1696314 - RNA, 19 nt, Artificial Sequence
  Description of Artificial Sequence: Synthetic oligonucleotide
  Antisense strand to SEQ ID NO: 1696313
uggcaaaguacaaacaugg

SEQ ID NO: 1696315 - RNA, 19 nt, Artificial Sequence
  Description of Artificial Sequence: Synthetic oligonucleotide
  Sense strand starting at position 3956 of SEQ ID NO: 1561760
guuuguacuuugccaucaa

SEQ ID NO: 1696316 - RNA, 19 nt, Artificial Sequence
  Description of Artificial Sequence: Synthetic oligonucleotide
  Antisense strand to SEQ ID NO: 1696315
uugauggcaaaguacaaac

SEQ ID NO: 1696317 - RNA, 19 nt, Artificial Sequence
  Description of Artificial Sequence: Synthetic oligonucleotide
  Sense strand starting at position 3960 of SEQ ID NO: 1561760
guacuuugccaucaaguuc

SEQ ID NO: 1696318 - RNA, 19 nt, Artificial Sequence
  Description of Artificial Sequence: Synthetic oligonucleotide
  Antisense strand to SEQ ID NO: 1696317
gaacuugauggcaaaguac

SEQ ID NO: 1696319 - RNA, 19 nt, Artificial Sequence
  Description of Artificial Sequence: Synthetic oligonucleotide
  Sense strand starting at position 3967 of SEQ ID NO: 1561760
gccaucaaguuccuuguua

SEQ ID NO: 1696320 - RNA, 19 nt, Artificial Sequence
  Description of Artificial Sequence: Synthetic oligonucleotide
  Antisense strand to SEQ ID NO: 1696319
uaacaaggaacuugauggc

SEQ ID NO: 1696321 - RNA, 19 nt, Artificial Sequence
  Description of Artificial Sequence: Synthetic oligonucleotide
  Sense strand starting at position 3971 of SEQ ID NO: 1561760
ucaaguuccuuguuaggau

SEQ ID NO: 1696322 - RNA, 19 nt, Artificial Sequence
  Description of Artificial Sequence: Synthetic oligonucleotide
  Antisense strand to SEQ ID NO: 1696321
auccuaacaaggaacuuga

SEQ ID NO: 1696323 - RNA, 19 nt, Artificial Sequence
  Description of Artificial Sequence: Synthetic oligonucleotide
  Sense strand starting at position 16 of SEQ ID NO: 1561761
ugaauuaggagucgcaacu

SEQ ID NO: 1696324 - RNA, 19 nt, Artificial Sequence
  Description of Artificial Sequence: Synthetic oligonucleotide
  Antisense strand to SEQ ID NO: 1696323
aguugcgacuccuaauuca

SEQ ID NO: 1696325 - RNA, 19 nt, Artificial Sequence
  Description of Artificial Sequence: Synthetic oligonucleotide
  Sense strand starting at position 22 of SEQ ID NO: 1561761
aggagucgcaacuagauau

SEQ ID NO: 1696326 - RNA, 19 nt, Artificial Sequence
  Description of Artificial Sequence: Synthetic oligonucleotide
  Antisense strand to SEQ ID NO: 1696325
auaucuaguugcgacuccu

SEQ ID NO: 1696327 - RNA, 19 nt, Artificial Sequence
  Description of Artificial Sequence: Synthetic oligonucleotide
  Sense strand starting at position 26 of SEQ ID NO: 1561761
gucgcaacuagauauauag

SEQ ID NO: 1696328 - RNA, 19 nt, Artificial Sequence
  Description of Artificial Sequence: Synthetic oligonucleotide
  Antisense strand to SEQ ID NO: 1696327
cuauauaucuaguugcgac

SEQ ID NO: 1696329 - RNA, 19 nt, Artificial Sequence
  Description of Artificial Sequence: Synthetic oligonucleotide
  Sense strand starting at position 282 of SEQ ID NO: 1561761
uaguaauaaugguuagagu

SEQ ID NO: 1696330 - RNA, 19 nt, Artificial Sequence
  Description of Artificial Sequence: Synthetic oligonucleotide
  Antisense strand to SEQ ID NO: 1696329
acucuaaccauuauuacua

SEQ ID NO: 1696331 - RNA, 19 nt, Artificial Sequence
  Description of Artificial Sequence: Synthetic oligonucleotide
  Sense strand starting at position 347 of SEQ ID NO: 1561761
auuugugcauguuuaauga

SEQ ID NO: 1696332 - RNA, 19 nt, Artificial Sequence
  Description of Artificial Sequence: Synthetic oligonucleotide
  Antisense strand to SEQ ID NO: 1696331
ucauuaaacaugcacaaau

SEQ ID NO: 1696333 - RNA, 19 nt, Artificial Sequence
  Description of Artificial Sequence: Synthetic oligonucleotide
  Sense strand starting at position 357 of SEQ ID NO: 1561761
guuuaaugacuaggaguag

SEQ ID NO: 1696334 - RNA, 19 nt, Artificial Sequence
  Description of Artificial Sequence: Synthetic oligonucleotide
  Antisense strand to SEQ ID NO: 1696333
cuacuccuagucauuaaac

SEQ ID NO: 1696335 - RNA, 19 nt, Artificial Sequence
  Description of Artificial Sequence: Synthetic oligonucleotide
  Sense strand starting at position 742 of SEQ ID NO: 1561761
ugugcccuucucugauuua

SEQ ID NO: 1696336 - RNA, 19 nt, Artificial Sequence
  Description of Artificial Sequence: Synthetic oligonucleotide
  Antisense strand to SEQ ID NO: 1696335
uaaaucagagaagggcaca

SEQ ID NO: 1696337 - RNA, 19 nt, Artificial Sequence
  Description of Artificial Sequence: Synthetic oligonucleotide
  Sense strand starting at position 883 of SEQ ID NO: 1561761
acucuucuucugggagaua

SEQ ID NO: 1696338 - RNA, 19 nt, Artificial Sequence
  Description of Artificial Sequence: Synthetic oligonucleotide
  Antisense strand to SEQ ID NO: 1696337
uaucucccagaagaagagu

SEQ ID NO: 1696339 - RNA, 19 nt, Artificial Sequence
  Description of Artificial Sequence: Synthetic oligonucleotide
  Sense strand starting at position 990 of SEQ ID NO: 1561761
agucaauauguagauucuu

SEQ ID NO: 1696340 - RNA, 19 nt, Artificial Sequence
  Description of Artificial Sequence: Synthetic oligonucleotide
  Antisense strand to SEQ ID NO: 1696339
aagaaucuacauauugacu

SEQ ID NO: 1696341 - RNA, 19 nt, Artificial Sequence
  Description of Artificial Sequence: Synthetic oligonucleotide
  Sense strand starting at position 1126 of SEQ ID NO: 1561761
acaacugagugauuggcaa

SEQ ID NO: 1696342 - RNA, 19 nt, Artificial Sequence
  Description of Artificial Sequence: Synthetic oligonucleotide
  Antisense strand to SEQ ID NO: 1696341
uugccaaucacucaguugu

SEQ ID NO: 1696343 - RNA, 19 nt, Artificial Sequence
  Description of Artificial Sequence: Synthetic oligonucleotide
  Sense strand starting at position 1156 of SEQ ID NO: 1561761
uugaauagcugcuccaaga

SEQ ID NO: 1696344 - RNA, 19 nt, Artificial Sequence
  Description of Artificial Sequence: Synthetic oligonucleotide
  Antisense strand to SEQ ID NO: 1696343
ucuuggagcagcuauucaa

SEQ ID NO: 1696345 - RNA, 19 nt, Artificial Sequence
  Description of Artificial Sequence: Synthetic oligonucleotide
  Sense strand starting at position 1324 of SEQ ID NO: 1561761
agcuuugagcguguucaac

SEQ ID NO: 1696346 - RNA, 19 nt, Artificial Sequence
  Description of Artificial Sequence: Synthetic oligonucleotide
  Antisense strand to SEQ ID NO: 1696345
guugaacacgcucaaagcu

SEQ ID NO: 1696347 - RNA, 19 nt, Artificial Sequence
  Description of Artificial Sequence: Synthetic oligonucleotide
  Sense strand starting at position 1528 of SEQ ID NO: 1561761
gagacugauuauuagaaga

SEQ ID NO: 1696348 - RNA, 19 nt, Artificial Sequence
  Description of Artificial Sequence: Synthetic oligonucleotide
  Antisense strand to SEQ ID NO: 1696347
ucuucuaauaaucagucuc

SEQ ID NO: 1696349 - RNA, 19 nt, Artificial Sequence
  Description of Artificial Sequence: Synthetic oligonucleotide
  Sense strand starting at position 1535 of SEQ ID NO: 1561761
auuauuagaagagguagua

SEQ ID NO: 1696350 - RNA, 19 nt, Artificial Sequence
  Description of Artificial Sequence: Synthetic oligonucleotide
  Antisense strand to SEQ ID NO: 1696349
uacuaccucuucuaauaau

SEQ ID NO: 1696351 - RNA, 19 nt, Artificial Sequence
  Description of Artificial Sequence: Synthetic oligonucleotide
  Sense strand starting at position 1547 of SEQ ID NO: 1561761
gguaguaucaacugaaagu

SEQ ID NO: 1696352 - RNA, 19 nt, Artificial Sequence
  Description of Artificial Sequence: Synthetic oligonucleotide
  Antisense strand to SEQ ID NO: 1696351
acuuucaguugauacuacc

SEQ ID NO: 1696353 - RNA, 19 nt, Artificial Sequence
  Description of Artificial Sequence: Synthetic oligonucleotide
  Sense strand starting at position 1548 of SEQ ID NO: 1561761
guaguaucaacugaaagug

SEQ ID NO: 1696354 - RNA, 19 nt, Artificial Sequence
  Description of Artificial Sequence: Synthetic oligonucleotide
  Antisense strand to SEQ ID NO: 1696353
cacuuucaguugauacuac

SEQ ID NO: 1696355 - RNA, 19 nt, Artificial Sequence
  Description of Artificial Sequence: Synthetic oligonucleotide
  Sense strand starting at position 1692 of SEQ ID NO: 1561761
gcagauauucuccagguuc

SEQ ID NO: 1696356 - RNA, 19 nt, Artificial Sequence
  Description of Artificial Sequence: Synthetic oligonucleotide
  Antisense strand to SEQ ID NO: 1696355
gaaccuggagaauaucugc

SEQ ID NO: 1696357 - RNA, 19 nt, Artificial Sequence
  Description of Artificial Sequence: Synthetic oligonucleotide
  Sense strand starting at position 2120 of SEQ ID NO: 1561761
gccacucagcaguauaaac

SEQ ID NO: 1696358 - RNA, 19 nt, Artificial Sequence
  Description of Artificial Sequence: Synthetic oligonucleotide
  Antisense strand to SEQ ID NO: 1696357
guuuauacugcugaguggc

SEQ ID NO: 1696359 - RNA, 19 nt, Artificial Sequence
  Description of Artificial Sequence: Synthetic oligonucleotide
  Sense strand starting at position 2155 of SEQ ID NO: 1561761
aggguccugcucuagauau

SEQ ID NO: 1696360 - RNA, 19 nt, Artificial Sequence
  Description of Artificial Sequence: Synthetic oligonucleotide
  Antisense strand to SEQ ID NO: 1696359
auaucuagagcaggacccu

SEQ ID NO: 1696361 - RNA, 19 nt, Artificial Sequence
  Description of Artificial Sequence: Synthetic oligonucleotide
  Sense strand starting at position 2205 of SEQ ID NO: 1561761
agguacaaguccucuccaa

SEQ ID NO: 1696362 - RNA, 19 nt, Artificial Sequence
  Description of Artificial Sequence: Synthetic oligonucleotide
  Antisense strand to SEQ ID NO: 1696361
uuggagaggacuuguaccu

SEQ ID NO: 1696363 - RNA, 19 nt, Artificial Sequence
  Description of Artificial Sequence: Synthetic oligonucleotide
  Sense strand starting at position 2340 of SEQ ID NO: 1561761
uguguuuaucaugacacac

SEQ ID NO: 1696364 - RNA, 19 nt, Artificial Sequence
  Description of Artificial Sequence: Synthetic oligonucleotide
  Antisense strand to SEQ ID NO: 1696363
gugugucaugauaaacaca

SEQ ID NO: 1696365 - RNA, 19 nt, Artificial Sequence
  Description of Artificial Sequence: Synthetic oligonucleotide
  Sense strand starting at position 2444 of SEQ ID NO: 1561761
uuaggaacaggcugucauu

SEQ ID NO: 1696366 - RNA, 19 nt, Artificial Sequence
  Description of Artificial Sequence: Synthetic oligonucleotide
  Antisense strand to SEQ ID NO: 1696365
aaugacagccuguuccuaa

SEQ ID NO: 1696367 - RNA, 19 nt, Artificial Sequence
  Description of Artificial Sequence: Synthetic oligonucleotide
  Sense strand starting at position 2482 of SEQ ID NO: 1561761
cagugaacauguguugaaa

SEQ ID NO: 1696368 - RNA, 19 nt, Artificial Sequence
  Description of Artificial Sequence: Synthetic oligonucleotide
  Antisense strand to SEQ ID NO: 1696367
uuucaacacauguucacug

SEQ ID NO: 1696369 - RNA, 19 nt, Artificial Sequence
  Description of Artificial Sequence: Synthetic oligonucleotide
  Sense strand starting at position 2519 of SEQ ID NO: 1561761
gcacauguggcauauaauu

SEQ ID NO: 1696370 - RNA, 19 nt, Artificial Sequence
  Description of Artificial Sequence: Synthetic oligonucleotide
  Antisense strand to SEQ ID NO: 1696369
aauuauaugccacaugugc

SEQ ID NO: 1696371 - RNA, 19 nt, Artificial Sequence
  Description of Artificial Sequence: Synthetic oligonucleotide
  Sense strand starting at position 2530 of SEQ ID NO: 1561761
auauaauuguaucccagua

SEQ ID NO: 1696372 - RNA, 19 nt, Artificial Sequence
  Description of Artificial Sequence: Synthetic oligonucleotide
  Antisense strand to SEQ ID NO: 1696371
uacugggauacaauuauau

SEQ ID NO: 1696373 - RNA, 19 nt, Artificial Sequence
  Description of Artificial Sequence: Synthetic oligonucleotide
  Sense strand starting at position 3139 of SEQ ID NO: 1561761
aggguuacacagugacuau

SEQ ID NO: 1696374 - RNA, 19 nt, Artificial Sequence
  Description of Artificial Sequence: Synthetic oligonucleotide
  Antisense strand to SEQ ID NO: 1696373
auagucacuguguaacccu

SEQ ID NO: 1696375 - RNA, 19 nt, Artificial Sequence
  Description of Artificial Sequence: Synthetic oligonucleotide
  Sense strand starting at position 3156 of SEQ ID NO: 1561761
augagugaggucuggauuc

SEQ ID NO: 1696376 - RNA, 19 nt, Artificial Sequence
  Description of Artificial Sequence: Synthetic oligonucleotide
  Antisense strand to SEQ ID NO: 1696375
gaauccagaccucacucau

SEQ ID NO: 1696377 - RNA, 19 nt, Artificial Sequence
  Description of Artificial Sequence: Synthetic oligonucleotide
  Sense strand starting at position 3211 of SEQ ID NO: 1561761
ucugucaucccagaggauu

SEQ ID NO: 1696378 - RNA, 19 nt, Artificial Sequence
  Description of Artificial Sequence: Synthetic oligonucleotide
  Antisense strand to SEQ ID NO: 1696377
aauccucugggaugacaga

SEQ ID NO: 1696379 - RNA, 19 nt, Artificial Sequence
  Description of Artificial Sequence: Synthetic oligonucleotide
  Sense strand starting at position 3222 of SEQ ID NO: 1561761
agaggauuaugccugagca

SEQ ID NO: 1696380 - RNA, 19 nt, Artificial Sequence
  Description of Artificial Sequence: Synthetic oligonucleotide
  Antisense strand to SEQ ID NO: 1696379
ugcucaggcauaauccucu

SEQ ID NO: 1696381 - RNA, 19 nt, Artificial Sequence
  Description of Artificial Sequence: Synthetic oligonucleotide
  Sense strand starting at position 3223 of SEQ ID NO: 1561761
gaggauuaugccugagcaa

SEQ ID NO: 1696382 - RNA, 19 nt, Artificial Sequence
  Description of Artificial Sequence: Synthetic oligonucleotide
  Antisense strand to SEQ ID NO: 1696381
uugcucaggcauaauccuc

SEQ ID NO: 1696383 - RNA, 19 nt, Artificial Sequence
  Description of Artificial Sequence: Synthetic oligonucleotide
  Sense strand starting at position 3226 of SEQ ID NO: 1561761
gauuaugccugagcaauga

SEQ ID NO: 1696384 - RNA, 19 nt, Artificial Sequence
  Description of Artificial Sequence: Synthetic oligonucleotide
  Antisense strand to SEQ ID NO: 1696383
ucauugcucaggcauaauc

SEQ ID NO: 1696385 - RNA, 19 nt, Artificial Sequence
  Description of Artificial Sequence: Synthetic oligonucleotide
  Sense strand starting at position 3247 of SEQ ID NO: 1561761
gaaggagaggucuguuuaa

SEQ ID NO: 1696386 - RNA, 19 nt, Artificial Sequence
  Description of Artificial Sequence: Synthetic oligonucleotide
  Antisense strand to SEQ ID NO: 1696385
uuaaacagaccucuccuuc

SEQ ID NO: 1696387 - RNA, 19 nt, Artificial Sequence
  Description of Artificial Sequence: Synthetic oligonucleotide
  Sense strand starting at position 3254 of SEQ ID NO: 1561761
aggucuguuuaacuugaaa

SEQ ID NO: 1696388 - RNA, 19 nt, Artificial Sequence
  Description of Artificial Sequence: Synthetic oligonucleotide
  Antisense strand to SEQ ID NO: 1696387
uuucaaguuaaacagaccu

SEQ ID NO: 1696389 - RNA, 19 nt, Artificial Sequence
  Description of Artificial Sequence: Synthetic oligonucleotide
  Sense strand starting at position 3528 of SEQ ID NO: 1561761
cagggaggauggcugaauu

SEQ ID NO: 1696390 - RNA, 19 nt, Artificial Sequence
  Description of Artificial Sequence: Synthetic oligonucleotide
  Antisense strand to SEQ ID NO: 1696389
aauucagccauccucccug

SEQ ID NO: 1696391 - RNA, 19 nt, Artificial Sequence
  Description of Artificial Sequence: Synthetic oligonucleotide
  Sense strand starting at position 3571 of SEQ ID NO: 1561761
gcacaauucuaggcacuga

SEQ ID NO: 1696392 - RNA, 19 nt, Artificial Sequence
  Description of Artificial Sequence: Synthetic oligonucleotide
  Antisense strand to SEQ ID NO: 1696391
ucagugccuagaauugugc

SEQ ID NO: 1696393 - RNA, 19 nt, Artificial Sequence
  Description of Artificial Sequence: Synthetic oligonucleotide
  Sense strand starting at position 3613 of SEQ ID NO: 1561761
cggccauucuaauuaggga

SEQ ID NO: 1696394 - RNA, 19 nt, Artificial Sequence
  Description of Artificial Sequence: Synthetic oligonucleotide
  Antisense strand to SEQ ID NO: 1696393
ucccuaauuagaauggccg

SEQ ID NO: 1696395 - RNA, 19 nt, Artificial Sequence
  Description of Artificial Sequence: Synthetic oligonucleotide
  Sense strand starting at position 3763 of SEQ ID NO: 1561761
caggauugaguguagagua

SEQ ID NO: 1696396 - RNA, 19 nt, Artificial Sequence
  Description of Artificial Sequence: Synthetic oligonucleotide
  Antisense strand to SEQ ID NO: 1696395
uacucuacacucaauccug

SEQ ID NO: 1696397 - RNA, 19 nt, Artificial Sequence
  Description of Artificial Sequence: Synthetic oligonucleotide
  Sense strand starting at position 3798 of SEQ ID NO: 1561761
uugauauacaucugugggu

SEQ ID NO: 1696398 - RNA, 19 nt, Artificial Sequence
  Description of Artificial Sequence: Synthetic oligonucleotide
  Antisense strand to SEQ ID NO: 1696397
acccacagauguauaucaa

SEQ ID NO: 1696399 - RNA, 19 nt, Artificial Sequence
  Description of Artificial Sequence: Synthetic oligonucleotide
  Sense strand starting at position 3827 of SEQ ID NO: 1561761
guguaaggcacauaggauu

SEQ ID NO: 1696400 - RNA, 19 nt, Artificial Sequence
  Description of Artificial Sequence: Synthetic oligonucleotide
  Antisense strand to SEQ ID NO: 1696399
aauccuaugugccuuacac

SEQ ID NO: 1696401 - RNA, 19 nt, Artificial Sequence
  Description of Artificial Sequence: Synthetic oligonucleotide
  Sense strand starting at position 3839 of SEQ ID NO: 1561761
uaggauugagugcaguaua

SEQ ID NO: 1696402 - RNA, 19 nt, Artificial Sequence
  Description of Artificial Sequence: Synthetic oligonucleotide
  Antisense strand to SEQ ID NO: 1696401
uauacugcacucaauccua

SEQ ID NO: 1696403 - RNA, 19 nt, Artificial Sequence
  Description of Artificial Sequence: Synthetic oligonucleotide
  Sense strand starting at position 1 of SEQ ID NO: 1561762
gagaacaaaugucucuuga

SEQ ID NO: 1696404 - RNA, 19 nt, Artificial Sequence
  Description of Artificial Sequence: Synthetic oligonucleotide
  Antisense strand to SEQ ID NO: 1696403
ucaagagacauuuguucuc

SEQ ID NO: 1696405 - RNA, 19 nt, Artificial Sequence
  Description of Artificial Sequence: Synthetic oligonucleotide
  Sense strand starting at position 3 of SEQ ID NO: 1561762
gaacaaaugucucuugagc

SEQ ID NO: 1696406 - RNA, 19 nt, Artificial Sequence
  Description of Artificial Sequence: Synthetic oligonucleotide
  Antisense strand to SEQ ID NO: 1696405
gcucaagagacauuuguuc

SEQ ID NO: 1696407 - RNA, 19 nt, Artificial Sequence
  Description of Artificial Sequence: Synthetic oligonucleotide
  Sense strand starting at position 694 of SEQ ID NO: 1561762
aacuguguuguacaguaga

SEQ ID NO: 1696408 - RNA, 19 nt, Artificial Sequence
  Description of Artificial Sequence: Synthetic oligonucleotide
  Antisense strand to SEQ ID NO: 1696407
ucuacuguacaacacaguu

SEQ ID NO: 1696409 - RNA, 19 nt, Artificial Sequence
  Description of Artificial Sequence: Synthetic oligonucleotide
  Sense strand starting at position 705 of SEQ ID NO: 1561762
acaguagauuucuaggaca

SEQ ID NO: 1696410 - RNA, 19 nt, Artificial Sequence
  Description of Artificial Sequence: Synthetic oligonucleotide
  Antisense strand to SEQ ID NO: 1696409
uguccuagaaaucuacugu

SEQ ID NO: 1696411 - RNA, 19 nt, Artificial Sequence
  Description of Artificial Sequence: Synthetic oligonucleotide
  Sense strand starting at position 708 of SEQ ID NO: 1561762
guagauuucuaggacauau

SEQ ID NO: 1696412 - RNA, 19 nt, Artificial Sequence
  Description of Artificial Sequence: Synthetic oligonucleotide
  Antisense strand to SEQ ID NO: 1696411
auauguccuagaaaucuac

SEQ ID NO: 1696413 - RNA, 19 nt, Artificial Sequence
  Description of Artificial Sequence: Synthetic oligonucleotide
  Sense strand starting at position 985 of SEQ ID NO: 1561762
ugcagcaaucuagaaaguu

SEQ ID NO: 1696414 - RNA, 19 nt, Artificial Sequence
  Description of Artificial Sequence: Synthetic oligonucleotide
  Antisense strand to SEQ ID NO: 1696413
aacuuucuagauugcugca

SEQ ID NO: 1696415 - RNA, 19 nt, Artificial Sequence
  Description of Artificial Sequence: Synthetic oligonucleotide
  Sense strand starting at position 993 of SEQ ID NO: 1561762
ucuagaaaguuucugcaca

SEQ ID NO: 1696416 - RNA, 19 nt, Artificial Sequence
  Description of Artificial Sequence: Synthetic oligonucleotide
  Antisense strand to SEQ ID NO: 1696415
ugugcagaaacuuucuaga

SEQ ID NO: 1696417 - RNA, 19 nt, Artificial Sequence
  Description of Artificial Sequence: Synthetic oligonucleotide
  Sense strand starting at position 1709 of SEQ ID NO: 1561762
uccacuaugccaggaucaa

SEQ ID NO: 1696418 - RNA, 19 nt, Artificial Sequence
  Description of Artificial Sequence: Synthetic oligonucleotide
  Antisense strand to SEQ ID NO: 1696417
uugauccuggcauagugga

SEQ ID NO: 1696419 - RNA, 19 nt, Artificial Sequence
  Description of Artificial Sequence: Synthetic oligonucleotide
  Sense strand starting at position 1844 of SEQ ID NO: 1561762
acuauaugugaguaggagu

SEQ ID NO: 1696420 - RNA, 19 nt, Artificial Sequence
  Description of Artificial Sequence: Synthetic oligonucleotide
  Antisense strand to SEQ ID NO: 1696419
acuccuacucacauauagu

SEQ ID NO: 1696421 - RNA, 19 nt, Artificial Sequence
  Description of Artificial Sequence: Synthetic oligonucleotide
  Sense strand starting at position 1925 of SEQ ID NO: 1561762
cugaguuaccuggagucuu

SEQ ID NO: 1696422 - RNA, 19 nt, Artificial Sequence
  Description of Artificial Sequence: Synthetic oligonucleotide
  Antisense strand to SEQ ID NO: 1696421
aagacuccagguaacucag

SEQ ID NO: 1696423 - RNA, 19 nt, Artificial Sequence
  Description of Artificial Sequence: Synthetic oligonucleotide
  Sense strand starting at position 1958 of SEQ ID NO: 1561762
uaaggauggcaauggucau

SEQ ID NO: 1696424 - RNA, 19 nt, Artificial Sequence
  Description of Artificial Sequence: Synthetic oligonucleotide
  Antisense strand to SEQ ID NO: 1696423
augaccauugccauccuua

SEQ ID NO: 1696425 - RNA, 19 nt, Artificial Sequence
  Description of Artificial Sequence: Synthetic oligonucleotide
  Sense strand starting at position 1964 of SEQ ID NO: 1561762
uggcaauggucauuaaaca

SEQ ID NO: 1696426 - RNA, 19 nt, Artificial Sequence
  Description of Artificial Sequence: Synthetic oligonucleotide
  Antisense strand to SEQ ID NO: 1696425
uguuuaaugaccauugcca

SEQ ID NO: 1696427 - RNA, 19 nt, Artificial Sequence
  Description of Artificial Sequence: Synthetic oligonucleotide
  Sense strand starting at position 2038 of SEQ ID NO: 1561762
aacagagaucacuguagca

SEQ ID NO: 1696428 - RNA, 19 nt, Artificial Sequence
  Description of Artificial Sequence: Synthetic oligonucleotide
  Antisense strand to SEQ ID NO: 1696427
ugcuacagugaucucuguu

SEQ ID NO: 1696429 - RNA, 19 nt, Artificial Sequence
  Description of Artificial Sequence: Synthetic oligonucleotide
  Sense strand starting at position 2059 of SEQ ID NO: 1561762
gcaguagcccgccuuuauu

SEQ ID NO: 1696430 - RNA, 19 nt, Artificial Sequence
  Description of Artificial Sequence: Synthetic oligonucleotide
  Antisense strand to SEQ ID NO: 1696429
aauaaaggcgggcuacugc

SEQ ID NO: 1696431 - RNA, 19 nt, Artificial Sequence
  Description of Artificial Sequence: Synthetic oligonucleotide
  Sense strand starting at position 2082 of SEQ ID NO: 1561762
uuggaaaugcgucaggguu

SEQ ID NO: 1696432 - RNA, 19 nt, Artificial Sequence
  Description of Artificial Sequence: Synthetic oligonucleotide
  Antisense strand to SEQ ID NO: 1696431
aacccugacgcauuuccaa

SEQ ID NO: 1696433 - RNA, 19 nt, Artificial Sequence
  Description of Artificial Sequence: Synthetic oligonucleotide
  Sense strand starting at position 2094 of SEQ ID NO: 1561762
caggguucugugcagugaa

SEQ ID NO: 1696434 - RNA, 19 nt, Artificial Sequence
  Description of Artificial Sequence: Synthetic oligonucleotide
  Antisense strand to SEQ ID NO: 1696433
uucacugcacagaacccug

SEQ ID NO: 1696435 - RNA, 19 nt, Artificial Sequence
  Description of Artificial Sequence: Synthetic oligonucleotide
  Sense strand starting at position 2134 of SEQ ID NO: 1561762
ugaugucaggcaggaagaa

SEQ ID NO: 1696436 - RNA, 19 nt, Artificial Sequence
  Description of Artificial Sequence: Synthetic oligonucleotide
  Antisense strand to SEQ ID NO: 1696435
uucuuccugccugacauca

SEQ ID NO: 1696437 - RNA, 19 nt, Artificial Sequence
  Description of Artificial Sequence: Synthetic oligonucleotide
  Sense strand starting at position 2287 of SEQ ID NO: 1561762
ugaaacgaauuugaaugaa

SEQ ID NO: 1696438 - RNA, 19 nt, Artificial Sequence
  Description of Artificial Sequence: Synthetic oligonucleotide
  Antisense strand to SEQ ID NO: 1696437
uucauucaaauucguuuca

SEQ ID NO: 1696439 - RNA, 19 nt, Artificial Sequence
  Description of Artificial Sequence: Synthetic oligonucleotide
  Sense strand starting at position 2358 of SEQ ID NO: 1561762
aagaaauaagcacguguau

SEQ ID NO: 1696440 - RNA, 19 nt, Artificial Sequence
  Description of Artificial Sequence: Synthetic oligonucleotide
  Antisense strand to SEQ ID NO: 1696439
auacacgugcuuauuucuu

SEQ ID NO: 1696441 - RNA, 19 nt, Artificial Sequence
  Description of Artificial Sequence: Synthetic oligonucleotide
  Sense strand starting at position 2438 of SEQ ID NO: 1561762
gcacuuaaaguauaauugu

SEQ ID NO: 1696442 - RNA, 19 nt, Artificial Sequence
  Description of Artificial Sequence: Synthetic oligonucleotide
  Antisense strand to SEQ ID NO: 1696441
acaauuauacuuuaagugc

SEQ ID NO: 1696443 - RNA, 19 nt, Artificial Sequence
  Description of Artificial Sequence: Synthetic oligonucleotide
  Sense strand starting at position 2601 of SEQ ID NO: 1561762
ugguaacaaccaugcuaau

SEQ ID NO: 1696444 - RNA, 19 nt, Artificial Sequence
  Description of Artificial Sequence: Synthetic oligonucleotide
  Antisense strand to SEQ ID NO: 1696443
auuagcaugguuguuacca

SEQ ID NO: 1696445 - RNA, 19 nt, Artificial Sequence
  Description of Artificial Sequence: Synthetic oligonucleotide
  Sense strand starting at position 2617 of SEQ ID NO: 1561762
aaucucuacgucuaugagu

SEQ ID NO: 1696446 - RNA, 19 nt, Artificial Sequence
  Description of Artificial Sequence: Synthetic oligonucleotide
  Antisense strand to SEQ ID NO: 1696445
acucauagacguagagauu

SEQ ID NO: 1696447 - RNA, 19 nt, Artificial Sequence
  Description of Artificial Sequence: Synthetic oligonucleotide
  Sense strand starting at position 2774 of SEQ ID NO: 1561762
ugaauaguacuccaguauc

SEQ ID NO: 1696448 - RNA, 19 nt, Artificial Sequence
  Description of Artificial Sequence: Synthetic oligonucleotide
  Antisense strand to SEQ ID NO: 1696447
gauacuggaguacuauuca

SEQ ID NO: 1696449 - RNA, 19 nt, Artificial Sequence
  Description of Artificial Sequence: Synthetic oligonucleotide
  Sense strand starting at position 2777 of SEQ ID NO: 1561762
auaguacuccaguaucuau

SEQ ID NO: 1696450 - RNA, 19 nt, Artificial Sequence
  Description of Artificial Sequence: Synthetic oligonucleotide
  Antisense strand to SEQ ID NO: 1696449
auagauacuggaguacuau

SEQ ID NO: 1696451 - RNA, 19 nt, Artificial Sequence
  Description of Artificial Sequence: Synthetic oligonucleotide
  Sense strand starting at position 2875 of SEQ ID NO: 1561762
uggacaugcugaucucuca

SEQ ID NO: 1696452 - RNA, 19 nt, Artificial Sequence
  Description of Artificial Sequence: Synthetic oligonucleotide
  Antisense strand to SEQ ID NO: 1696451
ugagagaucagcaugucca

SEQ ID NO: 1696453 - RNA, 19 nt, Artificial Sequence
  Description of Artificial Sequence: Synthetic oligonucleotide
  Sense strand starting at position 3070 of SEQ ID NO: 1561762
ugaaaugagucucuuguaa

SEQ ID NO: 1696454 - RNA, 19 nt, Artificial Sequence
  Description of Artificial Sequence: Synthetic oligonucleotide
  Antisense strand to SEQ ID NO: 1696453
uuacaagagacucauuuca

SEQ ID NO: 1696455 - RNA, 19 nt, Artificial Sequence
  Description of Artificial Sequence: Synthetic oligonucleotide
  Sense strand starting at position 3265 of SEQ ID NO: 1561762
uuccuuugugauuagauua

SEQ ID NO: 1696456 - RNA, 19 nt, Artificial Sequence
  Description of Artificial Sequence: Synthetic oligonucleotide
  Antisense strand to SEQ ID NO: 1696455
uaaucuaaucacaaaggaa

SEQ ID NO: 1696457 - RNA, 19 nt, Artificial Sequence
  Description of Artificial Sequence: Synthetic oligonucleotide
  Sense strand starting at position 3346 of SEQ ID NO: 1561762
uugcuuugugauuacuaua

SEQ ID NO: 1696458 - RNA, 19 nt, Artificial Sequence
  Description of Artificial Sequence: Synthetic oligonucleotide
  Antisense strand to SEQ ID NO: 1696457
uauaguaaucacaaagcaa

SEQ ID NO: 1696459 - RNA, 19 nt, Artificial Sequence
  Description of Artificial Sequence: Synthetic oligonucleotide
  Sense strand starting at position 3351 of SEQ ID NO: 1561762
uugugauuacuauaagggu

SEQ ID NO: 1696460 - RNA, 19 nt, Artificial Sequence
  Description of Artificial Sequence: Synthetic oligonucleotide
  Antisense strand to SEQ ID NO: 1696459
acccuuauaguaaucacaa

SEQ ID NO: 1696461 - RNA, 19 nt, Artificial Sequence
  Description of Artificial Sequence: Synthetic oligonucleotide
  Sense strand starting at position 3417 of SEQ ID NO: 1561762
acuuaacuuugguugcaaa

SEQ ID NO: 1696462 - RNA, 19 nt, Artificial Sequence
  Description of Artificial Sequence: Synthetic oligonucleotide
  Antisense strand to SEQ ID NO: 1696461
uuugcaaccaaaguuaagu

SEQ ID NO: 1696463 - RNA, 19 nt, Artificial Sequence
  Description of Artificial Sequence: Synthetic oligonucleotide
  Sense strand starting at position 3509 of SEQ ID NO: 1561762
guguguaucccuuaucaga

SEQ ID NO: 1696464 - RNA, 19 nt, Artificial Sequence
  Description of Artificial Sequence: Synthetic oligonucleotide
  Antisense strand to SEQ ID NO: 1696463
ucugauaagggauacacac

SEQ ID NO: 1696465 - RNA, 19 nt, Artificial Sequence
  Description of Artificial Sequence: Synthetic oligonucleotide
  Sense strand starting at position 3517 of SEQ ID NO: 1561762
cccuuaucagauuauugua

SEQ ID NO: 1696466 - RNA, 19 nt, Artificial Sequence
  Description of Artificial Sequence: Synthetic oligonucleotide
  Antisense strand to SEQ ID NO: 1696465
uacaauaaucugauaaggg

SEQ ID NO: 1696467 - RNA, 19 nt, Artificial Sequence
  Description of Artificial Sequence: Synthetic oligonucleotide
  Sense strand starting at position 3578 of SEQ ID NO: 1561762
auuagugacuuaucaucuu

SEQ ID NO: 1696468 - RNA, 19 nt, Artificial Sequence
  Description of Artificial Sequence: Synthetic oligonucleotide
  Antisense strand to SEQ ID NO: 1696467
aagaugauaagucacuaau

SEQ ID NO: 1696469 - RNA, 19 nt, Artificial Sequence
  Description of Artificial Sequence: Synthetic oligonucleotide
  Sense strand starting at position 3581 of SEQ ID NO: 1561762
agugacuuaucaucuuuac

SEQ ID NO: 1696470 - RNA, 19 nt, Artificial Sequence
  Description of Artificial Sequence: Synthetic oligonucleotide
  Antisense strand to SEQ ID NO: 1696469
guaaagaugauaagucacu

SEQ ID NO: 1696471 - RNA, 19 nt, Artificial Sequence
  Description of Artificial Sequence: Synthetic oligonucleotide
  Sense strand starting at position 3715 of SEQ ID NO: 1561762
uuuagcauuccuugauaga

SEQ ID NO: 1696472 - RNA, 19 nt, Artificial Sequence
  Description of Artificial Sequence: Synthetic oligonucleotide
  Antisense strand to SEQ ID NO: 1696471
ucuaucaaggaaugcuaaa

SEQ ID NO: 1696473 - RNA, 19 nt, Artificial Sequence
  Description of Artificial Sequence: Synthetic oligonucleotide
  Sense strand starting at position 3716 of SEQ ID NO: 1561762
uuagcauuccuugauagac

SEQ ID NO: 1696474 - RNA, 19 nt, Artificial Sequence
  Description of Artificial Sequence: Synthetic oligonucleotide
  Antisense strand to SEQ ID NO: 1696473
gucuaucaaggaaugcuaa

SEQ ID NO: 1696475 - RNA, 19 nt, Artificial Sequence
  Description of Artificial Sequence: Synthetic oligonucleotide
  Sense strand starting at position 3728 of SEQ ID NO: 1561762
gauagacuggccugguaga

SEQ ID NO: 1696476 - RNA, 19 nt, Artificial Sequence
  Description of Artificial Sequence: Synthetic oligonucleotide
  Antisense strand to SEQ ID NO: 1696475
ucuaccaggccagucuauc

SEQ ID NO: 1696477 - RNA, 19 nt, Artificial Sequence
  Description of Artificial Sequence: Synthetic oligonucleotide
  Sense strand starting at position 3729 of SEQ ID NO: 1561762
auagacuggccugguagaa

SEQ ID NO: 1696478 - RNA, 19 nt, Artificial Sequence
  Description of Artificial Sequence: Synthetic oligonucleotide
  Antisense strand to SEQ ID NO: 1696477
uucuaccaggccagucuau

SEQ ID NO: 1696479 - RNA, 19 nt, Artificial Sequence
  Description of Artificial Sequence: Synthetic oligonucleotide
  Sense strand starting at position 3808 of SEQ ID NO: 1561762
caaggacuugcucaguaaa

SEQ ID NO: 1696480 - RNA, 19 nt, Artificial Sequence
  Description of Artificial Sequence: Synthetic oligonucleotide
  Antisense strand to SEQ ID NO: 1696479
uuuacugagcaaguccuug

SEQ ID NO: 1696481 - RNA, 19 nt, Artificial Sequence
  Description of Artificial Sequence: Synthetic oligonucleotide
  Sense strand starting at position 3940 of SEQ ID NO: 1561762
guaugcgauaugcuucuuu

SEQ ID NO: 1696482 - RNA, 19 nt, Artificial Sequence
  Description of Artificial Sequence: Synthetic oligonucleotide
  Antisense strand to SEQ ID NO: 1696481
aaagaagcauaucgcauac

SEQ ID NO: 1696483 - RNA, 19 nt, Artificial Sequence
  Description of Artificial Sequence: Synthetic oligonucleotide
  Sense strand starting at position 48 of SEQ ID NO: 1561763
gcaucaagacuuuaugcuu

SEQ ID NO: 1696484 - RNA, 19 nt, Artificial Sequence
  Description of Artificial Sequence: Synthetic oligonucleotide
  Antisense strand to SEQ ID NO: 1696483
aagcauaaagucuugaugc

SEQ ID NO: 1696485 - RNA, 19 nt, Artificial Sequence
  Description of Artificial Sequence: Synthetic oligonucleotide
  Sense strand starting at position 291 of SEQ ID NO: 1561763
acagaauuauuccuguuug

SEQ ID NO: 1696486 - RNA, 19 nt, Artificial Sequence
  Description of Artificial Sequence: Synthetic oligonucleotide
  Antisense strand to SEQ ID NO: 1696485
caaacaggaauaauucugu

SEQ ID NO: 1696487 - RNA, 19 nt, Artificial Sequence
  Description of Artificial Sequence: Synthetic oligonucleotide
  Sense strand starting at position 367 of SEQ ID NO: 1561763
ggcaguguccuuuaagaua

SEQ ID NO: 1696488 - RNA, 19 nt, Artificial Sequence
  Description of Artificial Sequence: Synthetic oligonucleotide
  Antisense strand to SEQ ID NO: 1696487
uaucuuaaaggacacugcc

SEQ ID NO: 1696489 - RNA, 19 nt, Artificial Sequence
  Description of Artificial Sequence: Synthetic oligonucleotide
  Sense strand starting at position 400 of SEQ ID NO: 1561763
acugacuucugguuaccca

SEQ ID NO: 1696490 - RNA, 19 nt, Artificial Sequence
  Description of Artificial Sequence: Synthetic oligonucleotide
  Antisense strand to SEQ ID NO: 1696489
uggguaaccagaagucagu

SEQ ID NO: 1696491 - RNA, 19 nt, Artificial Sequence
  Description of Artificial Sequence: Synthetic oligonucleotide
  Sense strand starting at position 403 of SEQ ID NO: 1561763
gacuucugguuacccagaa

SEQ ID NO: 1696492 - RNA, 19 nt, Artificial Sequence
  Description of Artificial Sequence: Synthetic oligonucleotide
  Antisense strand to SEQ ID NO: 1696491
uucuggguaaccagaaguc

SEQ ID NO: 1696493 - RNA, 19 nt, Artificial Sequence
  Description of Artificial Sequence: Synthetic oligonucleotide
  Sense strand starting at position 404 of SEQ ID NO: 1561763
acuucugguuacccagaau

SEQ ID NO: 1696494 - RNA, 19 nt, Artificial Sequence
  Description of Artificial Sequence: Synthetic oligonucleotide
  Antisense strand to SEQ ID NO: 1696493
auucuggguaaccagaagu

SEQ ID NO: 1696495 - RNA, 19 nt, Artificial Sequence
  Description of Artificial Sequence: Synthetic oligonucleotide
  Sense strand starting at position 676 of SEQ ID NO: 1561763
cuugguuauuugcccucua

SEQ ID NO: 1696496 - RNA, 19 nt, Artificial Sequence
  Description of Artificial Sequence: Synthetic oligonucleotide
  Antisense strand to SEQ ID NO: 1696495
uagagggcaaauaaccaag

SEQ ID NO: 1696497 - RNA, 19 nt, Artificial Sequence
  Description of Artificial Sequence: Synthetic oligonucleotide
  Sense strand starting at position 712 of SEQ ID NO: 1561763
agcccauauccauauaugu

SEQ ID NO: 1696498 - RNA, 19 nt, Artificial Sequence
  Description of Artificial Sequence: Synthetic oligonucleotide
  Antisense strand to SEQ ID NO: 1696497
acauauauggauaugggcu

SEQ ID NO: 1696499 - RNA, 19 nt, Artificial Sequence
  Description of Artificial Sequence: Synthetic oligonucleotide
  Sense strand starting at position 789 of SEQ ID NO: 1561763
ugucucaaauggcuauaua

SEQ ID NO: 1696500 - RNA, 19 nt, Artificial Sequence
  Description of Artificial Sequence: Synthetic oligonucleotide
  Antisense strand to SEQ ID NO: 1696499
uauauagccauuugagaca

SEQ ID NO: 1696501 - RNA, 19 nt, Artificial Sequence
  Description of Artificial Sequence: Synthetic oligonucleotide
  Sense strand starting at position 790 of SEQ ID NO: 1561763
gucucaaauggcuauauau

SEQ ID NO: 1696502 - RNA, 19 nt, Artificial Sequence
  Description of Artificial Sequence: Synthetic oligonucleotide
  Antisense strand to SEQ ID NO: 1696501
auauauagccauuugagac

SEQ ID NO: 1696503 - RNA, 19 nt, Artificial Sequence
  Description of Artificial Sequence: Synthetic oligonucleotide
  Sense strand starting at position 818 of SEQ ID NO: 1561763
uggcuuauccuacagcaga

SEQ ID NO: 1696504 - RNA, 19 nt, Artificial Sequence
  Description of Artificial Sequence: Synthetic oligonucleotide
  Antisense strand to SEQ ID NO: 1696503
ucugcuguaggauaagcca

SEQ ID NO: 1696505 - RNA, 19 nt, Artificial Sequence
  Description of Artificial Sequence: Synthetic oligonucleotide
  Sense strand starting at position 864 of SEQ ID NO: 1561763
agaucuuuagauggugaca

SEQ ID NO: 1696506 - RNA, 19 nt, Artificial Sequence
  Description of Artificial Sequence: Synthetic oligonucleotide
  Antisense strand to SEQ ID NO: 1696505
ugucaccaucuaaagaucu

SEQ ID NO: 1696507 - RNA, 19 nt, Artificial Sequence
  Description of Artificial Sequence: Synthetic oligonucleotide
  Sense strand starting at position 1316 of SEQ ID NO: 1561763
ucgaucauacauugaaaug

SEQ ID NO: 1696508 - RNA, 19 nt, Artificial Sequence
  Description of Artificial Sequence: Synthetic oligonucleotide
  Antisense strand to SEQ ID NO: 1696507
cauuucaauguaugaucga

SEQ ID NO: 1696509 - RNA, 19 nt, Artificial Sequence
  Description of Artificial Sequence: Synthetic oligonucleotide
  Sense strand starting at position 1391 of SEQ ID NO: 1561763
uggucaugccuuuagauau

SEQ ID NO: 1696510 - RNA, 19 nt, Artificial Sequence
  Description of Artificial Sequence: Synthetic oligonucleotide
  Antisense strand to SEQ ID NO: 1696509
auaucuaaaggcaugacca

SEQ ID NO: 1696511 - RNA, 19 nt, Artificial Sequence
  Description of Artificial Sequence: Synthetic oligonucleotide
  Sense strand starting at position 1412 of SEQ ID NO: 1561763
uuaagaaagcagugauuau

SEQ ID NO: 1696512 - RNA, 19 nt, Artificial Sequence
  Description of Artificial Sequence: Synthetic oligonucleotide
  Antisense strand to SEQ ID NO: 1696511
auaaucacugcuuucuuaa

SEQ ID NO: 1696513 - RNA, 19 nt, Artificial Sequence
  Description of Artificial Sequence: Synthetic oligonucleotide
  Sense strand starting at position 1471 of SEQ ID NO: 1561763
caguucugucuuccgugua

SEQ ID NO: 1696514 - RNA, 19 nt, Artificial Sequence
  Description of Artificial Sequence: Synthetic oligonucleotide
  Antisense strand to SEQ ID NO: 1696513
uacacggaagacagaacug

SEQ ID NO: 1696515 - RNA, 19 nt, Artificial Sequence
  Description of Artificial Sequence: Synthetic oligonucleotide
  Sense strand starting at position 1747 of SEQ ID NO: 1561763
aggauaacuugcucuacuc

SEQ ID NO: 1696516 - RNA, 19 nt, Artificial Sequence
  Description of Artificial Sequence: Synthetic oligonucleotide
  Antisense strand to SEQ ID NO: 1696515
gaguagagcaaguuauccu

SEQ ID NO: 1696517 - RNA, 19 nt, Artificial Sequence
  Description of Artificial Sequence: Synthetic oligonucleotide
  Sense strand starting at position 1901 of SEQ ID NO: 1561763
cucugauuaccugggauca

SEQ ID NO: 1696518 - RNA, 19 nt, Artificial Sequence
  Description of Artificial Sequence: Synthetic oligonucleotide
  Antisense strand to SEQ ID NO: 1696517
ugaucccagguaaucagag

SEQ ID NO: 1696519 - RNA, 19 nt, Artificial Sequence
  Description of Artificial Sequence: Synthetic oligonucleotide
  Sense strand starting at position 2083 of SEQ ID NO: 1561763
gaaccagccggauaucuaa

SEQ ID NO: 1696520 - RNA, 19 nt, Artificial Sequence
  Description of Artificial Sequence: Synthetic oligonucleotide
  Antisense strand to SEQ ID NO: 1696519
uuagauauccggcugguuc

SEQ ID NO: 1696521 - RNA, 19 nt, Artificial Sequence
  Description of Artificial Sequence: Synthetic oligonucleotide
  Sense strand starting at position 2101 of SEQ ID NO: 1561763
agagcuuauccaugcauaa

SEQ ID NO: 1696522 - RNA, 19 nt, Artificial Sequence
  Description of Artificial Sequence: Synthetic oligonucleotide
  Antisense strand to SEQ ID NO: 1696521
uuaugcauggauaagcucu

SEQ ID NO: 1696523 - RNA, 19 nt, Artificial Sequence
  Description of Artificial Sequence: Synthetic oligonucleotide
  Sense strand starting at position 2136 of SEQ ID NO: 1561763
ggcacauaagcugagcauu

SEQ ID NO: 1696524 - RNA, 19 nt, Artificial Sequence
  Description of Artificial Sequence: Synthetic oligonucleotide
  Antisense strand to SEQ ID NO: 1696523
aaugcucagcuuaugugcc

SEQ ID NO: 1696525 - RNA, 19 nt, Artificial Sequence
  Description of Artificial Sequence: Synthetic oligonucleotide
  Sense strand starting at position 2208 of SEQ ID NO: 1561763
agguguuuggagcaaugga

SEQ ID NO: 1696526 - RNA, 19 nt, Artificial Sequence
  Description of Artificial Sequence: Synthetic oligonucleotide
  Antisense strand to SEQ ID NO: 1696525
uccauugcuccaaacaccu

SEQ ID NO: 1696527 - RNA, 19 nt, Artificial Sequence
  Description of Artificial Sequence: Synthetic oligonucleotide
  Sense strand starting at position 2245 of SEQ ID NO: 1561763
ggacaucuucccuagcuuu

SEQ ID NO: 1696528 - RNA, 19 nt, Artificial Sequence
  Description of Artificial Sequence: Synthetic oligonucleotide
  Antisense strand to SEQ ID NO: 1696527
aaagcuagggaagaugucc

SEQ ID NO: 1696529 - RNA, 19 nt, Artificial Sequence
  Description of Artificial Sequence: Synthetic oligonucleotide
  Sense strand starting at position 2388 of SEQ ID NO: 1561763
gggaacgugucuuucauuu

SEQ ID NO: 1696530 - RNA, 19 nt, Artificial Sequence
  Description of Artificial Sequence: Synthetic oligonucleotide
  Antisense strand to SEQ ID NO: 1696529
aaaugaaagacacguuccc

SEQ ID NO: 1696531 - RNA, 19 nt, Artificial Sequence
  Description of Artificial Sequence: Synthetic oligonucleotide
  Sense strand starting at position 2436 of SEQ ID NO: 1561763
cagugaagguuuguggaaa

SEQ ID NO: 1696532 - RNA, 19 nt, Artificial Sequence
  Description of Artificial Sequence: Synthetic oligonucleotide
  Antisense strand to SEQ ID NO: 1696531
uuuccacaaaccuucacug

SEQ ID NO: 1696533 - RNA, 19 nt, Artificial Sequence
  Description of Artificial Sequence: Synthetic oligonucleotide
  Sense strand starting at position 2447 of SEQ ID NO: 1561763
uguggaaauaaacgauaau

SEQ ID NO: 1696534 - RNA, 19 nt, Artificial Sequence
  Description of Artificial Sequence: Synthetic oligonucleotide
  Antisense strand to SEQ ID NO: 1696533
auuaucguuuauuuccaca

SEQ ID NO: 1696535 - RNA, 19 nt, Artificial Sequence
  Description of Artificial Sequence: Synthetic oligonucleotide
  Sense strand starting at position 2525 of SEQ ID NO: 1561763
ugacuugcccaagaaguca

SEQ ID NO: 1696536 - RNA, 19 nt, Artificial Sequence
  Description of Artificial Sequence: Synthetic oligonucleotide
  Antisense strand to SEQ ID NO: 1696535
ugacuucuugggcaaguca

SEQ ID NO: 1696537 - RNA, 19 nt, Artificial Sequence
  Description of Artificial Sequence: Synthetic oligonucleotide
  Sense strand starting at position 2563 of SEQ ID NO: 1561763
ggagaucauuuauaagacu

SEQ ID NO: 1696538 - RNA, 19 nt, Artificial Sequence
  Description of Artificial Sequence: Synthetic oligonucleotide
  Antisense strand to SEQ ID NO: 1696537
agucuuauaaaugaucucc

SEQ ID NO: 1696539 - RNA, 19 nt, Artificial Sequence
  Description of Artificial Sequence: Synthetic oligonucleotide
  Sense strand starting at position 2809 of SEQ ID NO: 1561763
acaauaauuugggauguua

SEQ ID NO: 1696540 - RNA, 19 nt, Artificial Sequence
  Description of Artificial Sequence: Synthetic oligonucleotide
  Antisense strand to SEQ ID NO: 1696539
uaacaucccaaauuauugu

SEQ ID NO: 1696541 - RNA, 19 nt, Artificial Sequence
  Description of Artificial Sequence: Synthetic oligonucleotide
  Sense strand starting at position 2820 of SEQ ID NO: 1561763
ggauguuaccuuugacaac

SEQ ID NO: 1696542 - RNA, 19 nt, Artificial Sequence
  Description of Artificial Sequence: Synthetic oligonucleotide
  Antisense strand to SEQ ID NO: 1696541
guugucaaagguaacaucc

SEQ ID NO: 1696543 - RNA, 19 nt, Artificial Sequence
  Description of Artificial Sequence: Synthetic oligonucleotide
  Sense strand starting at position 2865 of SEQ ID NO: 1561763
gggagcuguccaugaagac

SEQ ID NO: 1696544 - RNA, 19 nt, Artificial Sequence
  Description of Artificial Sequence: Synthetic oligonucleotide
  Antisense strand to SEQ ID NO: 1696543
gucuucauggacagcuccc

SEQ ID NO: 1696545 - RNA, 19 nt, Artificial Sequence
  Description of Artificial Sequence: Synthetic oligonucleotide
  Sense strand starting at position 3113 of SEQ ID NO: 1561763
ugccaugugauugaggaga

SEQ ID NO: 1696546 - RNA, 19 nt, Artificial Sequence
  Description of Artificial Sequence: Synthetic oligonucleotide
  Antisense strand to SEQ ID NO: 1696545
ucuccucaaucacauggca

SEQ ID NO: 1696547 - RNA, 19 nt, Artificial Sequence
  Description of Artificial Sequence: Synthetic oligonucleotide
  Sense strand starting at position 3127 of SEQ ID NO: 1561763
ggagacuucucuucuggau

SEQ ID NO: 1696548 - RNA, 19 nt, Artificial Sequence
  Description of Artificial Sequence: Synthetic oligonucleotide
  Antisense strand to SEQ ID NO: 1696547
auccagaagagaagucucc

SEQ ID NO: 1696549 - RNA, 19 nt, Artificial Sequence
  Description of Artificial Sequence: Synthetic oligonucleotide
  Sense strand starting at position 3384 of SEQ ID NO: 1561763
uugggagagacaggucuua

SEQ ID NO: 1696550 - RNA, 19 nt, Artificial Sequence
  Description of Artificial Sequence: Synthetic oligonucleotide
  Antisense strand to SEQ ID NO: 1696549
uaagaccugucucucccaa

SEQ ID NO: 1696551 - RNA, 19 nt, Artificial Sequence
  Description of Artificial Sequence: Synthetic oligonucleotide
  Sense strand starting at position 3519 of SEQ ID NO: 1561763
agauuaguauguucuaaca

SEQ ID NO: 1696552 - RNA, 19 nt, Artificial Sequence
  Description of Artificial Sequence: Synthetic oligonucleotide
  Antisense strand to SEQ ID NO: 1696551
uguuagaacauacuaaucu

SEQ ID NO: 1696553 - RNA, 19 nt, Artificial Sequence
  Description of Artificial Sequence: Synthetic oligonucleotide
  Sense strand starting at position 3609 of SEQ ID NO: 1561763
gggucuaagugauuaaaua

SEQ ID NO: 1696554 - RNA, 19 nt, Artificial Sequence
  Description of Artificial Sequence: Synthetic oligonucleotide
  Antisense strand to SEQ ID NO: 1696553
uauuuaaucacuuagaccc

SEQ ID NO: 1696555 - RNA, 19 nt, Artificial Sequence
  Description of Artificial Sequence: Synthetic oligonucleotide
  Sense strand starting at position 3703 of SEQ ID NO: 1561763
augaaugguuucucuacau

SEQ ID NO: 1696556 - RNA, 19 nt, Artificial Sequence
  Description of Artificial Sequence: Synthetic oligonucleotide
  Antisense strand to SEQ ID NO: 1696555
auguagagaaaccauucau

SEQ ID NO: 1696557 - RNA, 19 nt, Artificial Sequence
  Description of Artificial Sequence: Synthetic oligonucleotide
  Sense strand starting at position 3715 of SEQ ID NO: 1561763
ucuacauguccugauaagu

SEQ ID NO: 1696558 - RNA, 19 nt, Artificial Sequence
  Description of Artificial Sequence: Synthetic oligonucleotide
  Antisense strand to SEQ ID NO: 1696557
acuuaucaggacauguaga

SEQ ID NO: 1696559 - RNA, 19 nt, Artificial Sequence
  Description of Artificial Sequence: Synthetic oligonucleotide
  Sense strand starting at position 3723 of SEQ ID NO: 1561763
uccugauaagugcagagau

SEQ ID NO: 1696560 - RNA, 19 nt, Artificial Sequence
  Description of Artificial Sequence: Synthetic oligonucleotide
  Antisense strand to SEQ ID NO: 1696559
aucucugcacuuaucagga

SEQ ID NO: 1696561 - RNA, 19 nt, Artificial Sequence
  Description of Artificial Sequence: Synthetic oligonucleotide
  Sense strand starting at position 3733 of SEQ ID NO: 1561763
ugcagagaucccugacccu

SEQ ID NO: 1696562 - RNA, 19 nt, Artificial Sequence
  Description of Artificial Sequence: Synthetic oligonucleotide
  Antisense strand to SEQ ID NO: 1696561
agggucagggaucucugca

SEQ ID NO: 1696563 - RNA, 19 nt, Artificial Sequence
  Description of Artificial Sequence: Synthetic oligonucleotide
  Sense strand starting at position 55 of SEQ ID NO: 1561764
gccuaaggauucucccacu

SEQ ID NO: 1696564 - RNA, 19 nt, Artificial Sequence
  Description of Artificial Sequence: Synthetic oligonucleotide
  Antisense strand to SEQ ID NO: 1696563
agugggagaauccuuaggc

SEQ ID NO: 1696565 - RNA, 19 nt, Artificial Sequence
  Description of Artificial Sequence: Synthetic oligonucleotide
  Sense strand starting at position 285 of SEQ ID NO: 1561764
aguaucauuccuuaugauu

SEQ ID NO: 1696566 - RNA, 19 nt, Artificial Sequence
  Description of Artificial Sequence: Synthetic oligonucleotide
  Antisense strand to SEQ ID NO: 1696565
aaucauaaggaaugauacu

SEQ ID NO: 1696567 - RNA, 19 nt, Artificial Sequence
  Description of Artificial Sequence: Synthetic oligonucleotide
  Sense strand starting at position 291 of SEQ ID NO: 1561764
auuccuuaugauugacaga

SEQ ID NO: 1696568 - RNA, 19 nt, Artificial Sequence
  Description of Artificial Sequence: Synthetic oligonucleotide
  Antisense strand to SEQ ID NO: 1696567
ucugucaaucauaaggaau

SEQ ID NO: 1696569 - RNA, 19 nt, Artificial Sequence
  Description of Artificial Sequence: Synthetic oligonucleotide
  Sense strand starting at position 315 of SEQ ID NO: 1561764
gaaacaaauuugugaguuu

SEQ ID NO: 1696570 - RNA, 19 nt, Artificial Sequence
  Description of Artificial Sequence: Synthetic oligonucleotide
  Antisense strand to SEQ ID NO: 1696569
aaacucacaaauuuguuuc

SEQ ID NO: 1696571 - RNA, 19 nt, Artificial Sequence
  Description of Artificial Sequence: Synthetic oligonucleotide
  Sense strand starting at position 409 of SEQ ID NO: 1561764
agcuguuguggacaucuga

SEQ ID NO: 1696572 - RNA, 19 nt, Artificial Sequence
  Description of Artificial Sequence: Synthetic oligonucleotide
  Antisense strand to SEQ ID NO: 1696571
ucagauguccacaacagcu

SEQ ID NO: 1696573 - RNA, 19 nt, Artificial Sequence
  Description of Artificial Sequence: Synthetic oligonucleotide
  Sense strand starting at position 425 of SEQ ID NO: 1561764
ugaggagugguccagccaa

SEQ ID NO: 1696574 - RNA, 19 nt, Artificial Sequence
  Description of Artificial Sequence: Synthetic oligonucleotide
  Antisense strand to SEQ ID NO: 1696573
uuggcuggaccacuccuca

SEQ ID NO: 1696575 - RNA, 19 nt, Artificial Sequence
  Description of Artificial Sequence: Synthetic oligonucleotide
  Sense strand starting at position 452 of SEQ ID NO: 1561764
ugaauuguuacugguugga

SEQ ID NO: 1696576 - RNA, 19 nt, Artificial Sequence
  Description of Artificial Sequence: Synthetic oligonucleotide
  Antisense strand to SEQ ID NO: 1696575
uccaaccaguaacaauuca

SEQ ID NO: 1696577 - RNA, 19 nt, Artificial Sequence
  Description of Artificial Sequence: Synthetic oligonucleotide
  Sense strand starting at position 454 of SEQ ID NO: 1561764
aauuguuacugguuggauu

SEQ ID NO: 1696578 - RNA, 19 nt, Artificial Sequence
  Description of Artificial Sequence: Synthetic oligonucleotide
  Antisense strand to SEQ ID NO: 1696577
aauccaaccaguaacaauu

SEQ ID NO: 1696579 - RNA, 19 nt, Artificial Sequence
  Description of Artificial Sequence: Synthetic oligonucleotide
  Sense strand starting at position 462 of SEQ ID NO: 1561764
cugguuggauuguuaaaua

SEQ ID NO: 1696580 - RNA, 19 nt, Artificial Sequence
  Description of Artificial Sequence: Synthetic oligonucleotide
  Antisense strand to SEQ ID NO: 1696579
uauuuaacaauccaaccag

SEQ ID NO: 1696581 - RNA, 19 nt, Artificial Sequence
  Description of Artificial Sequence: Synthetic oligonucleotide
  Sense strand starting at position 503 of SEQ ID NO: 1561764
uuacgauuucggcagcgua

SEQ ID NO: 1696582 - RNA, 19 nt, Artificial Sequence
  Description of Artificial Sequence: Synthetic oligonucleotide
  Antisense strand to SEQ ID NO: 1696581
uacgcugccgaaaucguaa

SEQ ID NO: 1696583 - RNA, 19 nt, Artificial Sequence
  Description of Artificial Sequence: Synthetic oligonucleotide
  Sense strand starting at position 506 of SEQ ID NO: 1561764
cgauuucggcagcguauga

SEQ ID NO: 1696584 - RNA, 19 nt, Artificial Sequence
  Description of Artificial Sequence: Synthetic oligonucleotide
  Antisense strand to SEQ ID NO: 1696583
ucauacgcugccgaaaucg

SEQ ID NO: 1696585 - RNA, 19 nt, Artificial Sequence
  Description of Artificial Sequence: Synthetic oligonucleotide
  Sense strand starting at position 517 of SEQ ID NO: 1561764
gcguaugaugcugucuuca

SEQ ID NO: 1696586 - RNA, 19 nt, Artificial Sequence
  Description of Artificial Sequence: Synthetic oligonucleotide
  Antisense strand to SEQ ID NO: 1696585
ugaagacagcaucauacgc

SEQ ID NO: 1696587 - RNA, 19 nt, Artificial Sequence
  Description of Artificial Sequence: Synthetic oligonucleotide
  Sense strand starting at position 610 of SEQ ID NO: 1561764
agauguuaguaucccucaa

SEQ ID NO: 1696588 - RNA, 19 nt, Artificial Sequence
  Description of Artificial Sequence: Synthetic oligonucleotide
  Antisense strand to SEQ ID NO: 1696587
uugagggauacuaacaucu

SEQ ID NO: 1696589 - RNA, 19 nt, Artificial Sequence
  Description of Artificial Sequence: Synthetic oligonucleotide
  Sense strand starting at position 771 of SEQ ID NO: 1561764
aacugagagcuccgaaguu

SEQ ID NO: 1696590 - RNA, 19 nt, Artificial Sequence
  Description of Artificial Sequence: Synthetic oligonucleotide
  Antisense strand to SEQ ID NO: 1696589
aacuucggagcucucaguu

SEQ ID NO: 1696591 - RNA, 19 nt, Artificial Sequence
  Description of Artificial Sequence: Synthetic oligonucleotide
  Sense strand starting at position 916 of SEQ ID NO: 1561764
aggacaugaucaccuguaa

SEQ ID NO: 1696592 - RNA, 19 nt, Artificial Sequence
  Description of Artificial Sequence: Synthetic oligonucleotide
  Antisense strand to SEQ ID NO: 1696591
uuacaggugaucauguccu

SEQ ID NO: 1696593 - RNA, 19 nt, Artificial Sequence
  Description of Artificial Sequence: Synthetic oligonucleotide
  Sense strand starting at position 1221 of SEQ ID NO: 1561764
agcaguaugccaugaccaa

SEQ ID NO: 1696594 - RNA, 19 nt, Artificial Sequence
  Description of Artificial Sequence: Synthetic oligonucleotide
  Antisense strand to SEQ ID NO: 1696593
uuggucauggcauacugcu

SEQ ID NO: 1696595 - RNA, 19 nt, Artificial Sequence
  Description of Artificial Sequence: Synthetic oligonucleotide
  Sense strand starting at position 1638 of SEQ ID NO: 1561764
ugagaugauccugggcaaa

SEQ ID NO: 1696596 - RNA, 19 nt, Artificial Sequence
  Description of Artificial Sequence: Synthetic oligonucleotide
  Antisense strand to SEQ ID NO: 1696595
uuugcccaggaucaucuca

SEQ ID NO: 1696597 - RNA, 19 nt, Artificial Sequence
  Description of Artificial Sequence: Synthetic oligonucleotide
  Sense strand starting at position 1754 of SEQ ID NO: 1561764
ccgagagagguucacguua

SEQ ID NO: 1696598 - RNA, 19 nt, Artificial Sequence
  Description of Artificial Sequence: Synthetic oligonucleotide
  Antisense strand to SEQ ID NO: 1696597
uaacgugaaccucucucgg

SEQ ID NO: 1696599 - RNA, 19 nt, Artificial Sequence
  Description of Artificial Sequence: Synthetic oligonucleotide
  Sense strand starting at position 1759 of SEQ ID NO: 1561764
agagguucacguuaccuga

SEQ ID NO: 1696600 - RNA, 19 nt, Artificial Sequence
  Description of Artificial Sequence: Synthetic oligonucleotide
  Antisense strand to SEQ ID NO: 1696599
ucagguaacgugaaccucu

SEQ ID NO: 1696601 - RNA, 19 nt, Artificial Sequence
  Description of Artificial Sequence: Synthetic oligonucleotide
  Sense strand starting at position 1961 of SEQ ID NO: 1561764
ggauuuauaugaggucauc

SEQ ID NO: 1696602 - RNA, 19 nt, Artificial Sequence
  Description of Artificial Sequence: Synthetic oligonucleotide
  Antisense strand to SEQ ID NO: 1696601
gaugaccucauauaaaucc

SEQ ID NO: 1696603 - RNA, 19 nt, Artificial Sequence
  Description of Artificial Sequence: Synthetic oligonucleotide
  Sense strand starting at position 1970 of SEQ ID NO: 1561764
ugaggucauccaggccaaa

SEQ ID NO: 1696604 - RNA, 19 nt, Artificial Sequence
  Description of Artificial Sequence: Synthetic oligonucleotide
  Antisense strand to SEQ ID NO: 1696603
uuuggccuggaugaccuca

SEQ ID NO: 1696605 - RNA, 19 nt, Artificial Sequence
  Description of Artificial Sequence: Synthetic oligonucleotide
  Sense strand starting at position 2037 of SEQ ID NO: 1561764
gaaacuggccaguaccaau

SEQ ID NO: 1696606 - RNA, 19 nt, Artificial Sequence
  Description of Artificial Sequence: Synthetic oligonucleotide
  Antisense strand to SEQ ID NO: 1696605
auugguacuggccaguuuc

SEQ ID NO: 1696607 - RNA, 19 nt, Artificial Sequence
  Description of Artificial Sequence: Synthetic oligonucleotide
  Sense strand starting at position 2081 of SEQ ID NO: 1561764
agccauuuggccugugaga

SEQ ID NO: 1696608 - RNA, 19 nt, Artificial Sequence
  Description of Artificial Sequence: Synthetic oligonucleotide
  Antisense strand to SEQ ID NO: 1696607
ucucacaggccaaauggcu

SEQ ID NO: 1696609 - RNA, 19 nt, Artificial Sequence
  Description of Artificial Sequence: Synthetic oligonucleotide
  Sense strand starting at position 2281 of SEQ ID NO: 1561764
gguacuugcugauuugcaa

SEQ ID NO: 1696610 - RNA, 19 nt, Artificial Sequence
  Description of Artificial Sequence: Synthetic oligonucleotide
  Antisense strand to SEQ ID NO: 1696609
uugcaaaucagcaaguacc

SEQ ID NO: 1696611 - RNA, 19 nt, Artificial Sequence
  Description of Artificial Sequence: Synthetic oligonucleotide
  Sense strand starting at position 2333 of SEQ ID NO: 1561764
uugucauguuuggugacaa

SEQ ID NO: 1696612 - RNA, 19 nt, Artificial Sequence
  Description of Artificial Sequence: Synthetic oligonucleotide
  Antisense strand to SEQ ID NO: 1696611
uugucaccaaacaugacaa

SEQ ID NO: 1696613 - RNA, 19 nt, Artificial Sequence
  Description of Artificial Sequence: Synthetic oligonucleotide
  Sense strand starting at position 2345 of SEQ ID NO: 1561764
gugacaauauuguucucca

SEQ ID NO: 1696614 - RNA, 19 nt, Artificial Sequence
  Description of Artificial Sequence: Synthetic oligonucleotide
  Antisense strand to SEQ ID NO: 1696613
uggagaacaauauugucac

SEQ ID NO: 1696615 - RNA, 19 nt, Artificial Sequence
  Description of Artificial Sequence: Synthetic oligonucleotide
  Sense strand starting at position 2353 of SEQ ID NO: 1561764
auuguucuccaugauuaug

SEQ ID NO: 1696616 - RNA, 19 nt, Artificial Sequence
  Description of Artificial Sequence: Synthetic oligonucleotide
  Antisense strand to SEQ ID NO: 1696615
cauaaucauggagaacaau

SEQ ID NO: 1696617 - RNA, 19 nt, Artificial Sequence
  Description of Artificial Sequence: Synthetic oligonucleotide
  Sense strand starting at position 2355 of SEQ ID NO: 1561764
uguucuccaugauuauguu

SEQ ID NO: 1696618 - RNA, 19 nt, Artificial Sequence
  Description of Artificial Sequence: Synthetic oligonucleotide
  Antisense strand to SEQ ID NO: 1696617
aacauaaucauggagaaca

SEQ ID NO: 1696619 - RNA, 19 nt, Artificial Sequence
  Description of Artificial Sequence: Synthetic oligonucleotide
  Sense strand starting at position 2361 of SEQ ID NO: 1561764
ccaugauuauguucuguuu

SEQ ID NO: 1696620 - RNA, 19 nt, Artificial Sequence
  Description of Artificial Sequence: Synthetic oligonucleotide
  Antisense strand to SEQ ID NO: 1696619
aaacagaacauaaucaugg

SEQ ID NO: 1696621 - RNA, 19 nt, Artificial Sequence
  Description of Artificial Sequence: Synthetic oligonucleotide
  Sense strand starting at position 2890 of SEQ ID NO: 1561764
aucuguucucccuguaaag

SEQ ID NO: 1696622 - RNA, 19 nt, Artificial Sequence
  Description of Artificial Sequence: Synthetic oligonucleotide
  Antisense strand to SEQ ID NO: 1696621
cuuuacagggagaacagau

SEQ ID NO: 1696623 - RNA, 19 nt, Artificial Sequence
  Description of Artificial Sequence: Synthetic oligonucleotide
  Sense strand starting at position 2892 of SEQ ID NO: 1561764
cuguucucccuguaaagcu

SEQ ID NO: 1696624 - RNA, 19 nt, Artificial Sequence
  Description of Artificial Sequence: Synthetic oligonucleotide
  Antisense strand to SEQ ID NO: 1696623
agcuuuacagggagaacag

SEQ ID NO: 1696625 - RNA, 19 nt, Artificial Sequence
  Description of Artificial Sequence: Synthetic oligonucleotide
  Sense strand starting at position 2980 of SEQ ID NO: 1561764
gagagacuuucccuggcca

SEQ ID NO: 1696626 - RNA, 19 nt, Artificial Sequence
  Description of Artificial Sequence: Synthetic oligonucleotide
  Antisense strand to SEQ ID NO: 1696625
uggccagggaaagucucuc

SEQ ID NO: 1696627 - RNA, 19 nt, Artificial Sequence
  Description of Artificial Sequence: Synthetic oligonucleotide
  Sense strand starting at position 3027 of SEQ ID NO: 1561764
gucacucuggacuguaaua

SEQ ID NO: 1696628 - RNA, 19 nt, Artificial Sequence
  Description of Artificial Sequence: Synthetic oligonucleotide
  Antisense strand to SEQ ID NO: 1696627
uauuacaguccagagugac

SEQ ID NO: 1696629 - RNA, 19 nt, Artificial Sequence
  Description of Artificial Sequence: Synthetic oligonucleotide
  Sense strand starting at position 3038 of SEQ ID NO: 1561764
cuguaauaacuugguuuau

SEQ ID NO: 1696630 - RNA, 19 nt, Artificial Sequence
  Description of Artificial Sequence: Synthetic oligonucleotide
  Antisense strand to SEQ ID NO: 1696629
auaaaccaaguuauuacag

SEQ ID NO: 1696631 - RNA, 19 nt, Artificial Sequence
  Description of Artificial Sequence: Synthetic oligonucleotide
  Sense strand starting at position 3039 of SEQ ID NO: 1561764
uguaauaacuugguuuaug

SEQ ID NO: 1696632 - RNA, 19 nt, Artificial Sequence
  Description of Artificial Sequence: Synthetic oligonucleotide
  Antisense strand to SEQ ID NO: 1696631
cauaaaccaaguuauuaca

SEQ ID NO: 1696633 - RNA, 19 nt, Artificial Sequence
  Description of Artificial Sequence: Synthetic oligonucleotide
  Sense strand starting at position 3040 of SEQ ID NO: 1561764
guaauaacuugguuuauga

SEQ ID NO: 1696634 - RNA, 19 nt, Artificial Sequence
  Description of Artificial Sequence: Synthetic oligonucleotide
  Antisense strand to SEQ ID NO: 1696633
ucauaaaccaaguuauuac

SEQ ID NO: 1696635 - RNA, 19 nt, Artificial Sequence
  Description of Artificial Sequence: Synthetic oligonucleotide
  Sense strand starting at position 3115 of SEQ ID NO: 1561764
cuccacuuagaaugucaga

SEQ ID NO: 1696636 - RNA, 19 nt, Artificial Sequence
  Description of Artificial Sequence: Synthetic oligonucleotide
  Antisense strand to SEQ ID NO: 1696635
ucugacauucuaaguggag

SEQ ID NO: 1696637 - RNA, 19 nt, Artificial Sequence
  Description of Artificial Sequence: Synthetic oligonucleotide
  Sense strand starting at position 3129 of SEQ ID NO: 1561764
ucagaaaccuggcuuauaa

SEQ ID NO: 1696638 - RNA, 19 nt, Artificial Sequence
  Description of Artificial Sequence: Synthetic oligonucleotide
  Antisense strand to SEQ ID NO: 1696637
uuauaagccagguuucuga

SEQ ID NO: 1696639 - RNA, 19 nt, Artificial Sequence
  Description of Artificial Sequence: Synthetic oligonucleotide
  Sense strand starting at position 3159 of SEQ ID NO: 1561764
auaacaucaccugguguau

SEQ ID NO: 1696640 - RNA, 19 nt, Artificial Sequence
  Description of Artificial Sequence: Synthetic oligonucleotide
  Antisense strand to SEQ ID NO: 1696639
auacaccaggugauguuau

SEQ ID NO: 1696641 - RNA, 19 nt, Artificial Sequence
  Description of Artificial Sequence: Synthetic oligonucleotide
  Sense strand starting at position 3270 of SEQ ID NO: 1561764
uggguaugcaguuaagugu

SEQ ID NO: 1696642 - RNA, 19 nt, Artificial Sequence
  Description of Artificial Sequence: Synthetic oligonucleotide
  Antisense strand to SEQ ID NO: 1696641
acacuuaacugcauaccca

SEQ ID NO: 1696643 - RNA, 19 nt, Artificial Sequence
  Description of Artificial Sequence: Synthetic oligonucleotide
  Sense strand starting at position 21 of SEQ ID NO: 1561765
aagaauggguucuuguguu

SEQ ID NO: 1696644 - RNA, 19 nt, Artificial Sequence
  Description of Artificial Sequence: Synthetic oligonucleotide
  Antisense strand to SEQ ID NO: 1696643
aacacaagaacccauucuu

SEQ ID NO: 1696645 - RNA, 19 nt, Artificial Sequence
  Description of Artificial Sequence: Synthetic oligonucleotide
  Sense strand starting at position 289 of SEQ ID NO: 1561765
uccaucauggcagaauguu

SEQ ID NO: 1696646 - RNA, 19 nt, Artificial Sequence
  Description of Artificial Sequence: Synthetic oligonucleotide
  Antisense strand to SEQ ID NO: 1696645
aacauucugccaugaugga

SEQ ID NO: 1696647 - RNA, 19 nt, Artificial Sequence
  Description of Artificial Sequence: Synthetic oligonucleotide
  Sense strand starting at position 316 of SEQ ID NO: 1561765
agugcuggucuagaagaaa

SEQ ID NO: 1696648 - RNA, 19 nt, Artificial Sequence
  Description of Artificial Sequence: Synthetic oligonucleotide
  Antisense strand to SEQ ID NO: 1696647
uuucuucuagaccagcacu

SEQ ID NO: 1696649 - RNA, 19 nt, Artificial Sequence
  Description of Artificial Sequence: Synthetic oligonucleotide
  Sense strand starting at position 424 of SEQ ID NO: 1561765
uuuagauuguuaccaccua

SEQ ID NO: 1696650 - RNA, 19 nt, Artificial Sequence
  Description of Artificial Sequence: Synthetic oligonucleotide
  Antisense strand to SEQ ID NO: 1696649
uaggugguaacaaucuaaa

SEQ ID NO: 1696651 - RNA, 19 nt, Artificial Sequence
  Description of Artificial Sequence: Synthetic oligonucleotide
  Sense strand starting at position 552 of SEQ ID NO: 1561765
guggaacuaucagacagaa

SEQ ID NO: 1696652 - RNA, 19 nt, Artificial Sequence
  Description of Artificial Sequence: Synthetic oligonucleotide
  Antisense strand to SEQ ID NO: 1696651
uucugucugauaguuccac

SEQ ID NO: 1696653 - RNA, 19 nt, Artificial Sequence
  Description of Artificial Sequence: Synthetic oligonucleotide
  Sense strand starting at position 574 of SEQ ID NO: 1561765
ggguguugccaagaaugau

SEQ ID NO: 1696654 - RNA, 19 nt, Artificial Sequence
  Description of Artificial Sequence: Synthetic oligonucleotide
  Antisense strand to SEQ ID NO: 1696653
aucauucuuggcaacaccc

SEQ ID NO: 1696655 - RNA, 19 nt, Artificial Sequence
  Description of Artificial Sequence: Synthetic oligonucleotide
  Sense strand starting at position 616 of SEQ ID NO: 1561765
gauguugagacucaagguu

SEQ ID NO: 1696656 - RNA, 19 nt, Artificial Sequence
  Description of Artificial Sequence: Synthetic oligonucleotide
  Antisense strand to SEQ ID NO: 1696655
aaccuugagucucaacauc

SEQ ID NO: 1696657 - RNA, 19 nt, Artificial Sequence
  Description of Artificial Sequence: Synthetic oligonucleotide
  Sense strand starting at position 633 of SEQ ID NO: 1561765
uuggaagagaggugucaga

SEQ ID NO: 1696658 - RNA, 19 nt, Artificial Sequence
  Description of Artificial Sequence: Synthetic oligonucleotide
  Antisense strand to SEQ ID NO: 1696657
ucugacaccucucuuccaa

SEQ ID NO: 1696659 - RNA, 19 nt, Artificial Sequence
  Description of Artificial Sequence: Synthetic oligonucleotide
  Sense strand starting at position 662 of SEQ ID NO: 1561765
ugauuccaggcuuguauuu

SEQ ID NO: 1696660 - RNA, 19 nt, Artificial Sequence
  Description of Artificial Sequence: Synthetic oligonucleotide
  Antisense strand to SEQ ID NO: 1696659
aaauacaagccuggaauca

SEQ ID NO: 1696661 - RNA, 19 nt, Artificial Sequence
  Description of Artificial Sequence: Synthetic oligonucleotide
  Sense strand starting at position 671 of SEQ ID NO: 1561765
gcuuguauuugugucuguu

SEQ ID NO: 1696662 - RNA, 19 nt, Artificial Sequence
  Description of Artificial Sequence: Synthetic oligonucleotide
  Antisense strand to SEQ ID NO: 1696661
aacagacacaaauacaagc

SEQ ID NO: 1696663 - RNA, 19 nt, Artificial Sequence
  Description of Artificial Sequence: Synthetic oligonucleotide
  Sense strand starting at position 673 of SEQ ID NO: 1561765
uuguauuugugucuguuaa

SEQ ID NO: 1696664 - RNA, 19 nt, Artificial Sequence
  Description of Artificial Sequence: Synthetic oligonucleotide
  Antisense strand to SEQ ID NO: 1696663
uuaacagacacaaauacaa

SEQ ID NO: 1696665 - RNA, 19 nt, Artificial Sequence
  Description of Artificial Sequence: Synthetic oligonucleotide
  Sense strand starting at position 675 of SEQ ID NO: 1561765
guauuugugucuguuaauu

SEQ ID NO: 1696666 - RNA, 19 nt, Artificial Sequence
  Description of Artificial Sequence: Synthetic oligonucleotide
  Antisense strand to SEQ ID NO: 1696665
aauuaacagacacaaauac

SEQ ID NO: 1696667 - RNA, 19 nt, Artificial Sequence
  Description of Artificial Sequence: Synthetic oligonucleotide
  Sense strand starting at position 1447 of SEQ ID NO: 1561765
ucagaaauuugagaaccau

SEQ ID NO: 1696668 - RNA, 19 nt, Artificial Sequence
  Description of Artificial Sequence: Synthetic oligonucleotide
  Antisense strand to SEQ ID NO: 1696667
augguucucaaauuucuga

SEQ ID NO: 1696669 - RNA, 19 nt, Artificial Sequence
  Description of Artificial Sequence: Synthetic oligonucleotide
  Sense strand starting at position 1659 of SEQ ID NO: 1561765
accauuugguaccagagaa

SEQ ID NO: 1696670 - RNA, 19 nt, Artificial Sequence
  Description of Artificial Sequence: Synthetic oligonucleotide
  Antisense strand to SEQ ID NO: 1696669
uucucugguaccaaauggu

SEQ ID NO: 1696671 - RNA, 19 nt, Artificial Sequence
  Description of Artificial Sequence: Synthetic oligonucleotide
  Sense strand starting at position 1764 of SEQ ID NO: 1561765
cccagaguucucugaacau

SEQ ID NO: 1696672 - RNA, 19 nt, Artificial Sequence
  Description of Artificial Sequence: Synthetic oligonucleotide
  Antisense strand to SEQ ID NO: 1696671
auguucagagaacucuggg

SEQ ID NO: 1696673 - RNA, 19 nt, Artificial Sequence
  Description of Artificial Sequence: Synthetic oligonucleotide
  Sense strand starting at position 1768 of SEQ ID NO: 1561765
gaguucucugaacaugcau

SEQ ID NO: 1696674 - RNA, 19 nt, Artificial Sequence
  Description of Artificial Sequence: Synthetic oligonucleotide
  Antisense strand to SEQ ID NO: 1696673
augcauguucagagaacuc

SEQ ID NO: 1696675 - RNA, 19 nt, Artificial Sequence
  Description of Artificial Sequence: Synthetic oligonucleotide
  Sense strand starting at position 1956 of SEQ ID NO: 1561765
ggcaguccagacugguauu

SEQ ID NO: 1696676 - RNA, 19 nt, Artificial Sequence
  Description of Artificial Sequence: Synthetic oligonucleotide
  Antisense strand to SEQ ID NO: 1696675
aauaccagucuggacugcc

SEQ ID NO: 1696677 - RNA, 19 nt, Artificial Sequence
  Description of Artificial Sequence: Synthetic oligonucleotide
  Sense strand starting at position 1957 of SEQ ID NO: 1561765
gcaguccagacugguauuu

SEQ ID NO: 1696678 - RNA, 19 nt, Artificial Sequence
  Description of Artificial Sequence: Synthetic oligonucleotide
  Antisense strand to SEQ ID NO: 1696677
aaauaccagucuggacugc

SEQ ID NO: 1696679 - RNA, 19 nt, Artificial Sequence
  Description of Artificial Sequence: Synthetic oligonucleotide
  Sense strand starting at position 1959 of SEQ ID NO: 1561765
aguccagacugguauuuau

SEQ ID NO: 1696680 - RNA, 19 nt, Artificial Sequence
  Description of Artificial Sequence: Synthetic oligonucleotide
  Antisense strand to SEQ ID NO: 1696679
auaaauaccagucuggacu

SEQ ID NO: 1696681 - RNA, 19 nt, Artificial Sequence
  Description of Artificial Sequence: Synthetic oligonucleotide
  Sense strand starting at position 1998 of SEQ ID NO: 1561765
agccaagaucagugaacca

SEQ ID NO: 1696682 - RNA, 19 nt, Artificial Sequence
  Description of Artificial Sequence: Synthetic oligonucleotide
  Antisense strand to SEQ ID NO: 1696681
ugguucacugaucuuggcu

SEQ ID NO: 1696683 - RNA, 19 nt, Artificial Sequence
  Description of Artificial Sequence: Synthetic oligonucleotide
  Sense strand starting at position 2025 of SEQ ID NO: 1561765
acagucauuugagaucaga

SEQ ID NO: 1696684 - RNA, 19 nt, Artificial Sequence
  Description of Artificial Sequence: Synthetic oligonucleotide
  Antisense strand to SEQ ID NO: 1696683
ucugaucucaaaugacugu

SEQ ID NO: 1696685 - RNA, 19 nt, Artificial Sequence
  Description of Artificial Sequence: Synthetic oligonucleotide
  Sense strand starting at position 2298 of SEQ ID NO: 1561765
uaggaugucccauauguug

SEQ ID NO: 1696686 - RNA, 19 nt, Artificial Sequence
  Description of Artificial Sequence: Synthetic oligonucleotide
  Antisense strand to SEQ ID NO: 1696685
caacauaugggacauccua

SEQ ID NO: 1696687 - RNA, 19 nt, Artificial Sequence
  Description of Artificial Sequence: Synthetic oligonucleotide
  Sense strand starting at position 2300 of SEQ ID NO: 1561765
ggaugucccauauguugau

SEQ ID NO: 1696688 - RNA, 19 nt, Artificial Sequence
  Description of Artificial Sequence: Synthetic oligonucleotide
  Antisense strand to SEQ ID NO: 1696687
aucaacauaugggacaucc

SEQ ID NO: 1696689 - RNA, 19 nt, Artificial Sequence
  Description of Artificial Sequence: Synthetic oligonucleotide
  Sense strand starting at position 2304 of SEQ ID NO: 1561765
gucccauauguugaugauu

SEQ ID NO: 1696690 - RNA, 19 nt, Artificial Sequence
  Description of Artificial Sequence: Synthetic oligonucleotide
  Antisense strand to SEQ ID NO: 1696689
aaucaucaacauaugggac

SEQ ID NO: 1696691 - RNA, 19 nt, Artificial Sequence
  Description of Artificial Sequence: Synthetic oligonucleotide
  Sense strand starting at position 2364 of SEQ ID NO: 1561765
uuaauagcuccauggccau

SEQ ID NO: 1696692 - RNA, 19 nt, Artificial Sequence
  Description of Artificial Sequence: Synthetic oligonucleotide
  Antisense strand to SEQ ID NO: 1696691
auggccauggagcuauuaa

SEQ ID NO: 1696693 - RNA, 19 nt, Artificial Sequence
  Description of Artificial Sequence: Synthetic oligonucleotide
  Sense strand starting at position 2406 of SEQ ID NO: 1561765
guauucauggaguggaaug

SEQ ID NO: 1696694 - RNA, 19 nt, Artificial Sequence
  Description of Artificial Sequence: Synthetic oligonucleotide
  Antisense strand to SEQ ID NO: 1696693
cauuccacuccaugaauac

SEQ ID NO: 1696695 - RNA, 19 nt, Artificial Sequence
  Description of Artificial Sequence: Synthetic oligonucleotide
  Sense strand starting at position 2456 of SEQ ID NO: 1561765
guacauauuuaauaggaac

SEQ ID NO: 1696696 - RNA, 19 nt, Artificial Sequence
  Description of Artificial Sequence: Synthetic oligonucleotide
  Antisense strand to SEQ ID NO: 1696695
guuccuauuaaauauguac

SEQ ID NO: 1696697 - RNA, 19 nt, Artificial Sequence
  Description of Artificial Sequence: Synthetic oligonucleotide
  Sense strand starting at position 3007 of SEQ ID NO: 1561765
gauuguaaucuuggcccua

SEQ ID NO: 1696698 - RNA, 19 nt, Artificial Sequence
  Description of Artificial Sequence: Synthetic oligonucleotide
  Antisense strand to SEQ ID NO: 1696697
uagggccaagauuacaauc

SEQ ID NO: 1696699 - RNA, 19 nt, Artificial Sequence
  Description of Artificial Sequence: Synthetic oligonucleotide
  Sense strand starting at position 3009 of SEQ ID NO: 1561765
uuguaaucuuggcccuacu

SEQ ID NO: 1696700 - RNA, 19 nt, Artificial Sequence
  Description of Artificial Sequence: Synthetic oligonucleotide
  Antisense strand to SEQ ID NO: 1696699
aguagggccaagauuacaa

SEQ ID NO: 1696701 - RNA, 19 nt, Artificial Sequence
  Description of Artificial Sequence: Synthetic oligonucleotide
  Sense strand starting at position 3062 of SEQ ID NO: 1561765
ggucucauccuaggagaac

SEQ ID NO: 1696702 - RNA, 19 nt, Artificial Sequence
  Description of Artificial Sequence: Synthetic oligonucleotide
  Antisense strand to SEQ ID NO: 1696701
guucuccuaggaugagacc

SEQ ID NO: 1696703 - RNA, 19 nt, Artificial Sequence
  Description of Artificial Sequence: Synthetic oligonucleotide
  Sense strand starting at position 3131 of SEQ ID NO: 1561765
uagugauaugugggcagaa

SEQ ID NO: 1696704 - RNA, 19 nt, Artificial Sequence
  Description of Artificial Sequence: Synthetic oligonucleotide
  Antisense strand to SEQ ID NO: 1696703
uucugcccacauaucacua

SEQ ID NO: 1696705 - RNA, 19 nt, Artificial Sequence
  Description of Artificial Sequence: Synthetic oligonucleotide
  Sense strand starting at position 3133 of SEQ ID NO: 1561765
gugauaugugggcagaagu

SEQ ID NO: 1696706 - RNA, 19 nt, Artificial Sequence
  Description of Artificial Sequence: Synthetic oligonucleotide
  Antisense strand to SEQ ID NO: 1696705
acuucugcccacauaucac

SEQ ID NO: 1696707 - RNA, 19 nt, Artificial Sequence
  Description of Artificial Sequence: Synthetic oligonucleotide
  Sense strand starting at position 3152 of SEQ ID NO: 1561765
gacggugugccgguuguaa

SEQ ID NO: 1696708 - RNA, 19 nt, Artificial Sequence
  Description of Artificial Sequence: Synthetic oligonucleotide
  Antisense strand to SEQ ID NO: 1696707
uuacaaccggcacaccguc

SEQ ID NO: 1696709 - RNA, 19 nt, Artificial Sequence
  Description of Artificial Sequence: Synthetic oligonucleotide
  Sense strand starting at position 3218 of SEQ ID NO: 1561765
cucugccaucacuaugaga

SEQ ID NO: 1696710 - RNA, 19 nt, Artificial Sequence
  Description of Artificial Sequence: Synthetic oligonucleotide
  Antisense strand to SEQ ID NO: 1696709
ucucauagugauggcagag

SEQ ID NO: 1696711 - RNA, 19 nt, Artificial Sequence
  Description of Artificial Sequence: Synthetic oligonucleotide
  Sense strand starting at position 3220 of SEQ ID NO: 1561765
cugccaucacuaugagaag

SEQ ID NO: 1696712 - RNA, 19 nt, Artificial Sequence
  Description of Artificial Sequence: Synthetic oligonucleotide
  Antisense strand to SEQ ID NO: 1696711
cuucucauagugauggcag

SEQ ID NO: 1696713 - RNA, 19 nt, Artificial Sequence
  Description of Artificial Sequence: Synthetic oligonucleotide
  Sense strand starting at position 3352 of SEQ ID NO: 1561765
agggcaaucuagccaaaua

SEQ ID NO: 1696714 - RNA, 19 nt, Artificial Sequence
  Description of Artificial Sequence: Synthetic oligonucleotide
  Antisense strand to SEQ ID NO: 1696713
uauuuggcuagauugcccu

SEQ ID NO: 1696715 - RNA, 19 nt, Artificial Sequence
  Description of Artificial Sequence: Synthetic oligonucleotide
  Sense strand starting at position 3489 of SEQ ID NO: 1561765
aaugguaaggucuaucuuu

SEQ ID NO: 1696716 - RNA, 19 nt, Artificial Sequence
  Description of Artificial Sequence: Synthetic oligonucleotide
  Antisense strand to SEQ ID NO: 1696715
aaagauagaccuuaccauu

SEQ ID NO: 1696717 - RNA, 19 nt, Artificial Sequence
  Description of Artificial Sequence: Synthetic oligonucleotide
  Sense strand starting at position 3847 of SEQ ID NO: 1561765
acauacuaauaagaggaau

SEQ ID NO: 1696718 - RNA, 19 nt, Artificial Sequence
  Description of Artificial Sequence: Synthetic oligonucleotide
  Antisense strand to SEQ ID NO: 1696717
auuccucuuauuaguaugu

SEQ ID NO: 1696719 - RNA, 19 nt, Artificial Sequence
  Description of Artificial Sequence: Synthetic oligonucleotide
  Sense strand starting at position 3858 of SEQ ID NO: 1561765
agaggaauaucuucuuucu

SEQ ID NO: 1696720 - RNA, 19 nt, Artificial Sequence
  Description of Artificial Sequence: Synthetic oligonucleotide
  Antisense strand to SEQ ID NO: 1696719
agaaagaagauauuccucu

SEQ ID NO: 1696721 - RNA, 19 nt, Artificial Sequence
  Description of Artificial Sequence: Synthetic oligonucleotide
  Sense strand starting at position 3926 of SEQ ID NO: 1561765
cccacaauucgggaggcua

SEQ ID NO: 1696722 - RNA, 19 nt, Artificial Sequence
  Description of Artificial Sequence: Synthetic oligonucleotide
  Antisense strand to SEQ ID NO: 1696721
uagccucccgaauuguggg

SEQ ID NO: 1696723 - RNA, 19 nt, Artificial Sequence
  Description of Artificial Sequence: Synthetic oligonucleotide
  Sense strand starting at position 53 of SEQ ID NO: 1561766
agucuuagucuagaaggua

SEQ ID NO: 1696724 - RNA, 19 nt, Artificial Sequence
  Description of Artificial Sequence: Synthetic oligonucleotide
  Antisense strand to SEQ ID NO: 1696723
uaccuucuagacuaagacu

SEQ ID NO: 1696725 - RNA, 19 nt, Artificial Sequence
  Description of Artificial Sequence: Synthetic oligonucleotide
  Sense strand starting at position 67 of SEQ ID NO: 1561766
agguacuuucuuuaugcau

SEQ ID NO: 1696726 - RNA, 19 nt, Artificial Sequence
  Description of Artificial Sequence: Synthetic oligonucleotide
  Antisense strand to SEQ ID NO: 1696725
augcauaaagaaaguaccu

SEQ ID NO: 1696727 - RNA, 19 nt, Artificial Sequence
  Description of Artificial Sequence: Synthetic oligonucleotide
  Sense strand starting at position 182 of SEQ ID NO: 1561766
ugcucuugugaacacugau

SEQ ID NO: 1696728 - RNA, 19 nt, Artificial Sequence
  Description of Artificial Sequence: Synthetic oligonucleotide
  Antisense strand to SEQ ID NO: 1696727
aucaguguucacaagagca

SEQ ID NO: 1696729 - RNA, 19 nt, Artificial Sequence
  Description of Artificial Sequence: Synthetic oligonucleotide
  Sense strand starting at position 185 of SEQ ID NO: 1561766
ucuugugaacacugauaag

SEQ ID NO: 1696730 - RNA, 19 nt, Artificial Sequence
  Description of Artificial Sequence: Synthetic oligonucleotide
  Antisense strand to SEQ ID NO: 1696729
cuuaucaguguucacaaga

SEQ ID NO: 1696731 - RNA, 19 nt, Artificial Sequence
  Description of Artificial Sequence: Synthetic oligonucleotide
  Sense strand starting at position 238 of SEQ ID NO: 1561766
auccauuaugugcaugauu

SEQ ID NO: 1696732 - RNA, 19 nt, Artificial Sequence
  Description of Artificial Sequence: Synthetic oligonucleotide
  Antisense strand to SEQ ID NO: 1696731
aaucaugcacauaauggau

SEQ ID NO: 1696733 - RNA, 19 nt, Artificial Sequence
  Description of Artificial Sequence: Synthetic oligonucleotide
  Sense strand starting at position 409 of SEQ ID NO: 1561766
uggaguguccaccauucuu

SEQ ID NO: 1696734 - RNA, 19 nt, Artificial Sequence
  Description of Artificial Sequence: Synthetic oligonucleotide
  Antisense strand to SEQ ID NO: 1696733
aagaaugguggacacucca

SEQ ID NO: 1696735 - RNA, 19 nt, Artificial Sequence
  Description of Artificial Sequence: Synthetic oligonucleotide
  Sense strand starting at position 414 of SEQ ID NO: 1561766
uguccaccauucuuagauu

SEQ ID NO: 1696736 - RNA, 19 nt, Artificial Sequence
  Description of Artificial Sequence: Synthetic oligonucleotide
  Antisense strand to SEQ ID NO: 1696735
aaucuaagaaugguggaca

SEQ ID NO: 1696737 - RNA, 19 nt, Artificial Sequence
  Description of Artificial Sequence: Synthetic oligonucleotide
  Sense strand starting at position 425 of SEQ ID NO: 1561766
cuuagauucugcuuaagau

SEQ ID NO: 1696738 - RNA, 19 nt, Artificial Sequence
  Description of Artificial Sequence: Synthetic oligonucleotide
  Antisense strand to SEQ ID NO: 1696737
aucuuaagcagaaucuaag

SEQ ID NO: 1696739 - RNA, 19 nt, Artificial Sequence
  Description of Artificial Sequence: Synthetic oligonucleotide
  Sense strand starting at position 426 of SEQ ID NO: 1561766
uuagauucugcuuaagauu

SEQ ID NO: 1696740 - RNA, 19 nt, Artificial Sequence
  Description of Artificial Sequence: Synthetic oligonucleotide
  Antisense strand to SEQ ID NO: 1696739
aaucuuaagcagaaucuaa

SEQ ID NO: 1696741 - RNA, 19 nt, Artificial Sequence
  Description of Artificial Sequence: Synthetic oligonucleotide
  Sense strand starting at position 509 of SEQ ID NO: 1561766
gaaauaaucugauuggcug

SEQ ID NO: 1696742 - RNA, 19 nt, Artificial Sequence
  Description of Artificial Sequence: Synthetic oligonucleotide
  Antisense strand to SEQ ID NO: 1696741
cagccaaucagauuauuuc

SEQ ID NO: 1696743 - RNA, 19 nt, Artificial Sequence
  Description of Artificial Sequence: Synthetic oligonucleotide
  Sense strand starting at position 523 of SEQ ID NO: 1561766
ggcugaacauaaucuuauu

SEQ ID NO: 1696744 - RNA, 19 nt, Artificial Sequence
  Description of Artificial Sequence: Synthetic oligonucleotide
  Antisense strand to SEQ ID NO: 1696743
aauaagauuauguucagcc

SEQ ID NO: 1696745 - RNA, 19 nt, Artificial Sequence
  Description of Artificial Sequence: Synthetic oligonucleotide
  Sense strand starting at position 746 of SEQ ID NO: 1561766
gcgauaaagaucugaggag

SEQ ID NO: 1696746 - RNA, 19 nt, Artificial Sequence
  Description of Artificial Sequence: Synthetic oligonucleotide
  Antisense strand to SEQ ID NO: 1696745
cuccucagaucuuuaucgc

SEQ ID NO: 1696747 - RNA, 19 nt, Artificial Sequence
  Description of Artificial Sequence: Synthetic oligonucleotide
  Sense strand starting at position 753 of SEQ ID NO: 1561766
agaucugaggagcgaauau

SEQ ID NO: 1696748 - RNA, 19 nt, Artificial Sequence
  Description of Artificial Sequence: Synthetic oligonucleotide
  Antisense strand to SEQ ID NO: 1696747
auauucgcuccucagaucu

SEQ ID NO: 1696749 - RNA, 19 nt, Artificial Sequence
  Description of Artificial Sequence: Synthetic oligonucleotide
  Sense strand starting at position 870 of SEQ ID NO: 1561766
aagguugguacugaugagu

SEQ ID NO: 1696750 - RNA, 19 nt, Artificial Sequence
  Description of Artificial Sequence: Synthetic oligonucleotide
  Antisense strand to SEQ ID NO: 1696749
acucaucaguaccaaccuu

SEQ ID NO: 1696751 - RNA, 19 nt, Artificial Sequence
  Description of Artificial Sequence: Synthetic oligonucleotide
  Sense strand starting at position 941 of SEQ ID NO: 1561766
cgcaguuaccuggaccuaa

SEQ ID NO: 1696752 - RNA, 19 nt, Artificial Sequence
  Description of Artificial Sequence: Synthetic oligonucleotide
  Antisense strand to SEQ ID NO: 1696751
uuagguccagguaacugcg

SEQ ID NO: 1696753 - RNA, 19 nt, Artificial Sequence
  Description of Artificial Sequence: Synthetic oligonucleotide
  Sense strand starting at position 1063 of SEQ ID NO: 1561766
ccaucucuggcuuaguaga

SEQ ID NO: 1696754 - RNA, 19 nt, Artificial Sequence
  Description of Artificial Sequence: Synthetic oligonucleotide
  Antisense strand to SEQ ID NO: 1696753
ucuacuaagccagagaugg

SEQ ID NO: 1696755 - RNA, 19 nt, Artificial Sequence
  Description of Artificial Sequence: Synthetic oligonucleotide
  Sense strand starting at position 1085 of SEQ ID NO: 1561766
uagggugguaucugaaauu

SEQ ID NO: 1696756 - RNA, 19 nt, Artificial Sequence
  Description of Artificial Sequence: Synthetic oligonucleotide
  Antisense strand to SEQ ID NO: 1696755
aauuucagauaccacccua

SEQ ID NO: 1696757 - RNA, 19 nt, Artificial Sequence
  Description of Artificial Sequence: Synthetic oligonucleotide
  Sense strand starting at position 1358 of SEQ ID NO: 1561766
ccaaauaaggcuuggaaau

SEQ ID NO: 1696758 - RNA, 19 nt, Artificial Sequence
  Description of Artificial Sequence: Synthetic oligonucleotide
  Antisense strand to SEQ ID NO: 1696757
auuuccaagccuuauuugg

SEQ ID NO: 1696759 - RNA, 19 nt, Artificial Sequence
  Description of Artificial Sequence: Synthetic oligonucleotide
  Sense strand starting at position 1474 of SEQ ID NO: 1561766
ugaagugacguuugacaau

SEQ ID NO: 1696760 - RNA, 19 nt, Artificial Sequence
  Description of Artificial Sequence: Synthetic oligonucleotide
  Antisense strand to SEQ ID NO: 1696759
auugucaaacgucacuuca

SEQ ID NO: 1696761 - RNA, 19 nt, Artificial Sequence
  Description of Artificial Sequence: Synthetic oligonucleotide
  Sense strand starting at position 1699 of SEQ ID NO: 1561766
gcuuguaaagcucagggaa

SEQ ID NO: 1696762 - RNA, 19 nt, Artificial Sequence
  Description of Artificial Sequence: Synthetic oligonucleotide
  Antisense strand to SEQ ID NO: 1696761
uucccugagcuuuacaagc

SEQ ID NO: 1696763 - RNA, 19 nt, Artificial Sequence
  Description of Artificial Sequence: Synthetic oligonucleotide
  Sense strand starting at position 1732 of SEQ ID NO: 1561766
gaggaaagccucugacaac

SEQ ID NO: 1696764 - RNA, 19 nt, Artificial Sequence
  Description of Artificial Sequence: Synthetic oligonucleotide
  Antisense strand to SEQ ID NO: 1696763
guugucagaggcuuuccuc

SEQ ID NO: 1696765 - RNA, 19 nt, Artificial Sequence
  Description of Artificial Sequence: Synthetic oligonucleotide
  Sense strand starting at position 1859 of SEQ ID NO: 1561766
acagucaacgcucaauaca

SEQ ID NO: 1696766 - RNA, 19 nt, Artificial Sequence
  Description of Artificial Sequence: Synthetic oligonucleotide
  Antisense strand to SEQ ID NO: 1696765
uguauugagcguugacugu

SEQ ID NO: 1696767 - RNA, 19 nt, Artificial Sequence
  Description of Artificial Sequence: Synthetic oligonucleotide
  Sense strand starting at position 1880 of SEQ ID NO: 1561766
ggacauuaggauuggcagu

SEQ ID NO: 1696768 - RNA, 19 nt, Artificial Sequence
  Description of Artificial Sequence: Synthetic oligonucleotide
  Antisense strand to SEQ ID NO: 1696767
acugccaauccuaaugucc

SEQ ID NO: 1696769 - RNA, 19 nt, Artificial Sequence
  Description of Artificial Sequence: Synthetic oligonucleotide
  Sense strand starting at position 1891 of SEQ ID NO: 1561766
uuggcaguagcucagagau

SEQ ID NO: 1696770 - RNA, 19 nt, Artificial Sequence
  Description of Artificial Sequence: Synthetic oligonucleotide
  Antisense strand to SEQ ID NO: 1696769
aucucugagcuacugccaa

SEQ ID NO: 1696771 - RNA, 19 nt, Artificial Sequence
  Description of Artificial Sequence: Synthetic oligonucleotide
  Sense strand starting at position 2206 of SEQ ID NO: 1561766
ucauuugucuucuugucca

SEQ ID NO: 1696772 - RNA, 19 nt, Artificial Sequence
  Description of Artificial Sequence: Synthetic oligonucleotide
  Antisense strand to SEQ ID NO: 1696771
uggacaagaagacaaauga

SEQ ID NO: 1696773 - RNA, 19 nt, Artificial Sequence
  Description of Artificial Sequence: Synthetic oligonucleotide
  Sense strand starting at position 2211 of SEQ ID NO: 1561766
ugucuucuuguccaggaau

SEQ ID NO: 1696774 - RNA, 19 nt, Artificial Sequence
  Description of Artificial Sequence: Synthetic oligonucleotide
  Antisense strand to SEQ ID NO: 1696773
auuccuggacaagaagaca

SEQ ID NO: 1696775 - RNA, 19 nt, Artificial Sequence
  Description of Artificial Sequence: Synthetic oligonucleotide
  Sense strand starting at position 2213 of SEQ ID NO: 1561766
ucuucuuguccaggaauga

SEQ ID NO: 1696776 - RNA, 19 nt, Artificial Sequence
  Description of Artificial Sequence: Synthetic oligonucleotide
  Antisense strand to SEQ ID NO: 1696775
ucauuccuggacaagaaga

SEQ ID NO: 1696777 - RNA, 19 nt, Artificial Sequence
  Description of Artificial Sequence: Synthetic oligonucleotide
  Sense strand starting at position 2379 of SEQ ID NO: 1561766
gguuucugucccuaacaug

SEQ ID NO: 1696778 - RNA, 19 nt, Artificial Sequence
  Description of Artificial Sequence: Synthetic oligonucleotide
  Antisense strand to SEQ ID NO: 1696777
cauguuagggacagaaacc

SEQ ID NO: 1696779 - RNA, 19 nt, Artificial Sequence
  Description of Artificial Sequence: Synthetic oligonucleotide
  Sense strand starting at position 2557 of SEQ ID NO: 1561766
aggauacuguccucuaaca

SEQ ID NO: 1696780 - RNA, 19 nt, Artificial Sequence
  Description of Artificial Sequence: Synthetic oligonucleotide
  Antisense strand to SEQ ID NO: 1696779
uguuagaggacaguauccu

SEQ ID NO: 1696781 - RNA, 19 nt, Artificial Sequence
  Description of Artificial Sequence: Synthetic oligonucleotide
  Sense strand starting at position 2623 of SEQ ID NO: 1561766
agaagaaucuugguggcuu

SEQ ID NO: 1696782 - RNA, 19 nt, Artificial Sequence
  Description of Artificial Sequence: Synthetic oligonucleotide
  Antisense strand to SEQ ID NO: 1696781
aagccaccaagauucuucu

SEQ ID NO: 1696783 - RNA, 19 nt, Artificial Sequence
  Description of Artificial Sequence: Synthetic oligonucleotide
  Sense strand starting at position 2651 of SEQ ID NO: 1561766
gaggucuguuugucuauuu

SEQ ID NO: 1696784 - RNA, 19 nt, Artificial Sequence
  Description of Artificial Sequence: Synthetic oligonucleotide
  Antisense strand to SEQ ID NO: 1696783
aaauagacaaacagaccuc

SEQ ID NO: 1696785 - RNA, 19 nt, Artificial Sequence
  Description of Artificial Sequence: Synthetic oligonucleotide
  Sense strand starting at position 2715 of SEQ ID NO: 1561766
cccauaucucaguguggaa

SEQ ID NO: 1696786 - RNA, 19 nt, Artificial Sequence
  Description of Artificial Sequence: Synthetic oligonucleotide
  Antisense strand to SEQ ID NO: 1696785
uuccacacugagauauggg

SEQ ID NO: 1696787 - RNA, 19 nt, Artificial Sequence
  Description of Artificial Sequence: Synthetic oligonucleotide
  Sense strand starting at position 2878 of SEQ ID NO: 1561766
gugacauggcuccauccaa

SEQ ID NO: 1696788 - RNA, 19 nt, Artificial Sequence
  Description of Artificial Sequence: Synthetic oligonucleotide
  Antisense strand to SEQ ID NO: 1696787
uuggauggagccaugucac

SEQ ID NO: 1696789 - RNA, 19 nt, Artificial Sequence
  Description of Artificial Sequence: Synthetic oligonucleotide
  Sense strand starting at position 2939 of SEQ ID NO: 1561766
ugcagaaagccagaauuau

SEQ ID NO: 1696790 - RNA, 19 nt, Artificial Sequence
  Description of Artificial Sequence: Synthetic oligonucleotide
  Antisense strand to SEQ ID NO: 1696789
auaauucuggcuuucugca

SEQ ID NO: 1696791 - RNA, 19 nt, Artificial Sequence
  Description of Artificial Sequence: Synthetic oligonucleotide
  Sense strand starting at position 3692 of SEQ ID NO: 1561766
ggaauucugcaacauguga

SEQ ID NO: 1696792 - RNA, 19 nt, Artificial Sequence
  Description of Artificial Sequence: Synthetic oligonucleotide
  Antisense strand to SEQ ID NO: 1696791
ucacauguugcagaauucc

SEQ ID NO: 1696793 - RNA, 19 nt, Artificial Sequence
  Description of Artificial Sequence: Synthetic oligonucleotide
  Sense strand starting at position 3700 of SEQ ID NO: 1561766
gcaacaugugaugacguga

SEQ ID NO: 1696794 - RNA, 19 nt, Artificial Sequence
  Description of Artificial Sequence: Synthetic oligonucleotide
  Antisense strand to SEQ ID NO: 1696793
ucacgucaucacauguugc

SEQ ID NO: 1696795 - RNA, 19 nt, Artificial Sequence
  Description of Artificial Sequence: Synthetic oligonucleotide
  Sense strand starting at position 3705 of SEQ ID NO: 1561766
augugaugacgugaaugag

SEQ ID NO: 1696796 - RNA, 19 nt, Artificial Sequence
  Description of Artificial Sequence: Synthetic oligonucleotide
  Antisense strand to SEQ ID NO: 1696795
cucauucacgucaucacau

SEQ ID NO: 1696797 - RNA, 19 nt, Artificial Sequence
  Description of Artificial Sequence: Synthetic oligonucleotide
  Sense strand starting at position 3826 of SEQ ID NO: 1561766
caaagaguggcaugaugau

SEQ ID NO: 1696798 - RNA, 19 nt, Artificial Sequence
  Description of Artificial Sequence: Synthetic oligonucleotide
  Antisense strand to SEQ ID NO: 1696797
aucaucaugccacucuuug

SEQ ID NO: 1696799 - RNA, 19 nt, Artificial Sequence
  Description of Artificial Sequence: Synthetic oligonucleotide
  Sense strand starting at position 3835 of SEQ ID NO: 1561766
gcaugaugauugucaggag

SEQ ID NO: 1696800 - RNA, 19 nt, Artificial Sequence
  Description of Artificial Sequence: Synthetic oligonucleotide
  Antisense strand to SEQ ID NO: 1696799
cuccugacaaucaucaugc

SEQ ID NO: 1696801 - RNA, 19 nt, Artificial Sequence
  Description of Artificial Sequence: Synthetic oligonucleotide
  Sense strand starting at position 3899 of SEQ ID NO: 1561766
guuucuguuaagcaagaug

SEQ ID NO: 1696802 - RNA, 19 nt, Artificial Sequence
  Description of Artificial Sequence: Synthetic oligonucleotide
  Antisense strand to SEQ ID NO: 1696801
caucuugcuuaacagaaac

SEQ ID NO: 1696803 - RNA, 19 nt, Artificial Sequence
  Description of Artificial Sequence: Synthetic oligonucleotide
  Sense strand starting at position 116 of SEQ ID NO: 1561767
caucacagugcuuggaaca

SEQ ID NO: 1696804 - RNA, 19 nt, Artificial Sequence
  Description of Artificial Sequence: Synthetic oligonucleotide
  Antisense strand to SEQ ID NO: 1696803
uguuccaagcacugugaug

SEQ ID NO: 1696805 - RNA, 19 nt, Artificial Sequence
  Description of Artificial Sequence: Synthetic oligonucleotide
  Sense strand starting at position 117 of SEQ ID NO: 1561767
aucacagugcuuggaacaa

SEQ ID NO: 1696806 - RNA, 19 nt, Artificial Sequence
  Description of Artificial Sequence: Synthetic oligonucleotide
  Antisense strand to SEQ ID NO: 1696805
uuguuccaagcacugugau

SEQ ID NO: 1696807 - RNA, 19 nt, Artificial Sequence
  Description of Artificial Sequence: Synthetic oligonucleotide
  Sense strand starting at position 286 of SEQ ID NO: 1561767
gagauugaauuagcuuaga

SEQ ID NO: 1696808 - RNA, 19 nt, Artificial Sequence
  Description of Artificial Sequence: Synthetic oligonucleotide
  Antisense strand to SEQ ID NO: 1696807
ucuaagcuaauucaaucuc

SEQ ID NO: 1696809 - RNA, 19 nt, Artificial Sequence
  Description of Artificial Sequence: Synthetic oligonucleotide
  Sense strand starting at position 423 of SEQ ID NO: 1561767
ggugccaugucauuuaucu

SEQ ID NO: 1696810 - RNA, 19 nt, Artificial Sequence
  Description of Artificial Sequence: Synthetic oligonucleotide
  Antisense strand to SEQ ID NO: 1696809
agauaaaugacauggcacc

SEQ ID NO: 1696811 - RNA, 19 nt, Artificial Sequence
  Description of Artificial Sequence: Synthetic oligonucleotide
  Sense strand starting at position 430 of SEQ ID NO: 1561767
ugucauuuaucucuguagu

SEQ ID NO: 1696812 - RNA, 19 nt, Artificial Sequence
  Description of Artificial Sequence: Synthetic oligonucleotide
  Antisense strand to SEQ ID NO: 1696811
acuacagagauaaaugaca

SEQ ID NO: 1696813 - RNA, 19 nt, Artificial Sequence
  Description of Artificial Sequence: Synthetic oligonucleotide
  Sense strand starting at position 431 of SEQ ID NO: 1561767
gucauuuaucucuguaguc

SEQ ID NO: 1696814 - RNA, 19 nt, Artificial Sequence
  Description of Artificial Sequence: Synthetic oligonucleotide
  Antisense strand to SEQ ID NO: 1696813
gacuacagagauaaaugac

SEQ ID NO: 1696815 - RNA, 19 nt, Artificial Sequence
  Description of Artificial Sequence: Synthetic oligonucleotide
  Sense strand starting at position 494 of SEQ ID NO: 1561767
ugggaaaguuuggugaguu

SEQ ID NO: 1696816 - RNA, 19 nt, Artificial Sequence
  Description of Artificial Sequence: Synthetic oligonucleotide
  Antisense strand to SEQ ID NO: 1696815
aacucaccaaacuuuccca

SEQ ID NO: 1696817 - RNA, 19 nt, Artificial Sequence
  Description of Artificial Sequence: Synthetic oligonucleotide
  Sense strand starting at position 498 of SEQ ID NO: 1561767
aaaguuuggugaguuagag

SEQ ID NO: 1696818 - RNA, 19 nt, Artificial Sequence
  Description of Artificial Sequence: Synthetic oligonucleotide
  Antisense strand to SEQ ID NO: 1696817
cucuaacucaccaaacuuu

SEQ ID NO: 1696819 - RNA, 19 nt, Artificial Sequence
  Description of Artificial Sequence: Synthetic oligonucleotide
  Sense strand starting at position 605 of SEQ ID NO: 1561767
guuauugcaguuugagaaa

SEQ ID NO: 1696820 - RNA, 19 nt, Artificial Sequence
  Description of Artificial Sequence: Synthetic oligonucleotide
  Antisense strand to SEQ ID NO: 1696819
uuucucaaacugcaauaac

SEQ ID NO: 1696821 - RNA, 19 nt, Artificial Sequence
  Description of Artificial Sequence: Synthetic oligonucleotide
  Sense strand starting at position 771 of SEQ ID NO: 1561767
gaggucagcuuguuuagga

SEQ ID NO: 1696822 - RNA, 19 nt, Artificial Sequence
  Description of Artificial Sequence: Synthetic oligonucleotide
  Antisense strand to SEQ ID NO: 1696821
uccuaaacaagcugaccuc

SEQ ID NO: 1696823 - RNA, 19 nt, Artificial Sequence
  Description of Artificial Sequence: Synthetic oligonucleotide
  Sense strand starting at position 772 of SEQ ID NO: 1561767
aggucagcuuguuuaggaa

SEQ ID NO: 1696824 - RNA, 19 nt, Artificial Sequence
  Description of Artificial Sequence: Synthetic oligonucleotide
  Antisense strand to SEQ ID NO: 1696823
uuccuaaacaagcugaccu

SEQ ID NO: 1696825 - RNA, 19 nt, Artificial Sequence
  Description of Artificial Sequence: Synthetic oligonucleotide
  Sense strand starting at position 799 of SEQ ID NO: 1561767
guuucugacucuguagaaa

SEQ ID NO: 1696826 - RNA, 19 nt, Artificial Sequence
  Description of Artificial Sequence: Synthetic oligonucleotide
  Antisense strand to SEQ ID NO: 1696825
uuucuacagagucagaaac

SEQ ID NO: 1696827 - RNA, 19 nt, Artificial Sequence
  Description of Artificial Sequence: Synthetic oligonucleotide
  Sense strand starting at position 887 of SEQ ID NO: 1561767
cuggaauugguggguggua

SEQ ID NO: 1696828 - RNA, 19 nt, Artificial Sequence
  Description of Artificial Sequence: Synthetic oligonucleotide
  Antisense strand to SEQ ID NO: 1696827
uaccacccaccaauuccag

SEQ ID NO: 1696829 - RNA, 19 nt, Artificial Sequence
  Description of Artificial Sequence: Synthetic oligonucleotide
  Sense strand starting at position 916 of SEQ ID NO: 1561767
gggucuuucucuguuuaaa

SEQ ID NO: 1696830 - RNA, 19 nt, Artificial Sequence
  Description of Artificial Sequence: Synthetic oligonucleotide
  Antisense strand to SEQ ID NO: 1696829
uuuaaacagagaaagaccc

SEQ ID NO: 1696831 - RNA, 19 nt, Artificial Sequence
  Description of Artificial Sequence: Synthetic oligonucleotide
  Sense strand starting at position 1260 of SEQ ID NO: 1561767
gucacccuggguuauaaau

SEQ ID NO: 1696832 - RNA, 19 nt, Artificial Sequence
  Description of Artificial Sequence: Synthetic oligonucleotide
  Antisense strand to SEQ ID NO: 1696831
auuuauaacccagggugac

SEQ ID NO: 1696833 - RNA, 19 nt, Artificial Sequence
  Description of Artificial Sequence: Synthetic oligonucleotide
  Sense strand starting at position 1312 of SEQ ID NO: 1561767
ggcaccaugucauuuaucu

SEQ ID NO: 1696834 - RNA, 19 nt, Artificial Sequence
  Description of Artificial Sequence: Synthetic oligonucleotide
  Antisense strand to SEQ ID NO: 1696833
agauaaaugacauggugcc

SEQ ID NO: 1696835 - RNA, 19 nt, Artificial Sequence
  Description of Artificial Sequence: Synthetic oligonucleotide
  Sense strand starting at position 1320 of SEQ ID NO: 1561767
gucauuuaucuccgugguc

SEQ ID NO: 1696836 - RNA, 19 nt, Artificial Sequence
  Description of Artificial Sequence: Synthetic oligonucleotide
  Antisense strand to SEQ ID NO: 1696835
gaccacggagauaaaugac

SEQ ID NO: 1696837 - RNA, 19 nt, Artificial Sequence
  Description of Artificial Sequence: Synthetic oligonucleotide
  Sense strand starting at position 1322 of SEQ ID NO: 1561767
cauuuaucuccgugguccu

SEQ ID NO: 1696838 - RNA, 19 nt, Artificial Sequence
  Description of Artificial Sequence: Synthetic oligonucleotide
  Antisense strand to SEQ ID NO: 1696837
aggaccacggagauaaaug

SEQ ID NO: 1696839 - RNA, 19 nt, Artificial Sequence
  Description of Artificial Sequence: Synthetic oligonucleotide
  Sense strand starting at position 1323 of SEQ ID NO: 1561767
auuuaucuccgugguccua

SEQ ID NO: 1696840 - RNA, 19 nt, Artificial Sequence
  Description of Artificial Sequence: Synthetic oligonucleotide
  Antisense strand to SEQ ID NO: 1696839
uaggaccacggagauaaau

SEQ ID NO: 1696841 - RNA, 19 nt, Artificial Sequence
  Description of Artificial Sequence: Synthetic oligonucleotide
  Sense strand starting at position 1397 of SEQ ID NO: 1561767
ccauuaagguagcugugau

SEQ ID NO: 1696842 - RNA, 19 nt, Artificial Sequence
  Description of Artificial Sequence: Synthetic oligonucleotide
  Antisense strand to SEQ ID NO: 1696841
aucacagcuaccuuaaugg

SEQ ID NO: 1696843 - RNA, 19 nt, Artificial Sequence
  Description of Artificial Sequence: Synthetic oligonucleotide
  Sense strand starting at position 1957 of SEQ ID NO: 1561767
cucccuuugucauuuaggu

SEQ ID NO: 1696844 - RNA, 19 nt, Artificial Sequence
  Description of Artificial Sequence: Synthetic oligonucleotide
  Antisense strand to SEQ ID NO: 1696843
accuaaaugacaaagggag

SEQ ID NO: 1696845 - RNA, 19 nt, Artificial Sequence
  Description of Artificial Sequence: Synthetic oligonucleotide
  Sense strand starting at position 2179 of SEQ ID NO: 1561767
ggaggaaugucuguacaaa

SEQ ID NO: 1696846 - RNA, 19 nt, Artificial Sequence
  Description of Artificial Sequence: Synthetic oligonucleotide
  Antisense strand to SEQ ID NO: 1696845
uuuguacagacauuccucc

SEQ ID NO: 1696847 - RNA, 19 nt, Artificial Sequence
  Description of Artificial Sequence: Synthetic oligonucleotide
  Sense strand starting at position 2356 of SEQ ID NO: 1561767
cgcuuccucagagaucuga

SEQ ID NO: 1696848 - RNA, 19 nt, Artificial Sequence
  Description of Artificial Sequence: Synthetic oligonucleotide
  Antisense strand to SEQ ID NO: 1696847
ucagaucucugaggaagcg

SEQ ID NO: 1696849 - RNA, 19 nt, Artificial Sequence
  Description of Artificial Sequence: Synthetic oligonucleotide
  Sense strand starting at position 2800 of SEQ ID NO: 1561767
gcuugaaacagaugucaag

SEQ ID NO: 1696850 - RNA, 19 nt, Artificial Sequence
  Description of Artificial Sequence: Synthetic oligonucleotide
  Antisense strand to SEQ ID NO: 1696849
cuugacaucuguuucaagc

SEQ ID NO: 1696851 - RNA, 19 nt, Artificial Sequence
  Description of Artificial Sequence: Synthetic oligonucleotide
  Sense strand starting at position 2806 of SEQ ID NO: 1561767
aacagaugucaaggguaua

SEQ ID NO: 1696852 - RNA, 19 nt, Artificial Sequence
  Description of Artificial Sequence: Synthetic oligonucleotide
  Antisense strand to SEQ ID NO: 1696851
uauacccuugacaucuguu

SEQ ID NO: 1696853 - RNA, 19 nt, Artificial Sequence
  Description of Artificial Sequence: Synthetic oligonucleotide
  Sense strand starting at position 2807 of SEQ ID NO: 1561767
acagaugucaaggguauaa

SEQ ID NO: 1696854 - RNA, 19 nt, Artificial Sequence
  Description of Artificial Sequence: Synthetic oligonucleotide
  Antisense strand to SEQ ID NO: 1696853
uuauacccuugacaucugu

SEQ ID NO: 1696855 - RNA, 19 nt, Artificial Sequence
  Description of Artificial Sequence: Synthetic oligonucleotide
  Sense strand starting at position 2940 of SEQ ID NO: 1561767
cagugaggucagcaagugu

SEQ ID NO: 1696856 - RNA, 19 nt, Artificial Sequence
  Description of Artificial Sequence: Synthetic oligonucleotide
  Antisense strand to SEQ ID NO: 1696855
acacuugcugaccucacug

SEQ ID NO: 1696857 - RNA, 19 nt, Artificial Sequence
  Description of Artificial Sequence: Synthetic oligonucleotide
  Sense strand starting at position 2944 of SEQ ID NO: 1561767
gaggucagcaaguguaaau

SEQ ID NO: 1696858 - RNA, 19 nt, Artificial Sequence
  Description of Artificial Sequence: Synthetic oligonucleotide
  Antisense strand to SEQ ID NO: 1696857
auuuacacuugcugaccuc

SEQ ID NO: 1696859 - RNA, 19 nt, Artificial Sequence
  Description of Artificial Sequence: Synthetic oligonucleotide
  Sense strand starting at position 3167 of SEQ ID NO: 1561767
ugcccaggccuggagaaau

SEQ ID NO: 1696860 - RNA, 19 nt, Artificial Sequence
  Description of Artificial Sequence: Synthetic oligonucleotide
  Antisense strand to SEQ ID NO: 1696859
auuucuccaggccugggca

SEQ ID NO: 1696861 - RNA, 19 nt, Artificial Sequence
  Description of Artificial Sequence: Synthetic oligonucleotide
  Sense strand starting at position 3183 of SEQ ID NO: 1561767
aauaauguaucuguuggau

SEQ ID NO: 1696862 - RNA, 19 nt, Artificial Sequence
  Description of Artificial Sequence: Synthetic oligonucleotide
  Antisense strand to SEQ ID NO: 1696861
auccaacagauacauuauu

SEQ ID NO: 1696863 - RNA, 19 nt, Artificial Sequence
  Description of Artificial Sequence: Synthetic oligonucleotide
  Sense strand starting at position 3186 of SEQ ID NO: 1561767
aauguaucuguuggauucu

SEQ ID NO: 1696864 - RNA, 19 nt, Artificial Sequence
  Description of Artificial Sequence: Synthetic oligonucleotide
  Antisense strand to SEQ ID NO: 1696863
agaauccaacagauacauu

SEQ ID NO: 1696865 - RNA, 19 nt, Artificial Sequence
  Description of Artificial Sequence: Synthetic oligonucleotide
  Sense strand starting at position 3236 of SEQ ID NO: 1561767
ccugaaaugccaggauaua

SEQ ID NO: 1696866 - RNA, 19 nt, Artificial Sequence
  Description of Artificial Sequence: Synthetic oligonucleotide
  Antisense strand to SEQ ID NO: 1696865
uauauccuggcauuucagg

SEQ ID NO: 1696867 - RNA, 19 nt, Artificial Sequence
  Description of Artificial Sequence: Synthetic oligonucleotide
  Sense strand starting at position 3400 of SEQ ID NO: 1561767
gcagaugugcaguagggau

SEQ ID NO: 1696868 - RNA, 19 nt, Artificial Sequence
  Description of Artificial Sequence: Synthetic oligonucleotide
  Antisense strand to SEQ ID NO: 1696867
aucccuacugcacaucugc

SEQ ID NO: 1696869 - RNA, 19 nt, Artificial Sequence
  Description of Artificial Sequence: Synthetic oligonucleotide
  Sense strand starting at position 3404 of SEQ ID NO: 1561767
augugcaguagggaucaau

SEQ ID NO: 1696870 - RNA, 19 nt, Artificial Sequence
  Description of Artificial Sequence: Synthetic oligonucleotide
  Antisense strand to SEQ ID NO: 1696869
auugaucccuacugcacau

SEQ ID NO: 1696871 - RNA, 19 nt, Artificial Sequence
  Description of Artificial Sequence: Synthetic oligonucleotide
  Sense strand starting at position 3710 of SEQ ID NO: 1561767
uguaguccuccugaggacu

SEQ ID NO: 1696872 - RNA, 19 nt, Artificial Sequence
  Description of Artificial Sequence: Synthetic oligonucleotide
  Antisense strand to SEQ ID NO: 1696871
aguccucaggaggacuaca

SEQ ID NO: 1696873 - RNA, 19 nt, Artificial Sequence
  Description of Artificial Sequence: Synthetic oligonucleotide
  Sense strand starting at position 3718 of SEQ ID NO: 1561767
uccugaggacucuggagua

SEQ ID NO: 1696874 - RNA, 19 nt, Artificial Sequence
  Description of Artificial Sequence: Synthetic oligonucleotide
  Antisense strand to SEQ ID NO: 1696873
uacuccagaguccucagga

SEQ ID NO: 1696875 - RNA, 19 nt, Artificial Sequence
  Description of Artificial Sequence: Synthetic oligonucleotide
  Sense strand starting at position 3766 of SEQ ID NO: 1561767
gggagaugucaagggagca

SEQ ID NO: 1696876 - RNA, 19 nt, Artificial Sequence
  Description of Artificial Sequence: Synthetic oligonucleotide
  Antisense strand to SEQ ID NO: 1696875
ugcucccuugacaucuccc

SEQ ID NO: 1696877 - RNA, 19 nt, Artificial Sequence
  Description of Artificial Sequence: Synthetic oligonucleotide
  Sense strand starting at position 3787 of SEQ ID NO: 1561767
gggagacuuauaugugcac

SEQ ID NO: 1696878 - RNA, 19 nt, Artificial Sequence
  Description of Artificial Sequence: Synthetic oligonucleotide
  Antisense strand to SEQ ID NO: 1696877
gugcacauauaagucuccc

SEQ ID NO: 1696879 - RNA, 19 nt, Artificial Sequence
  Description of Artificial Sequence: Synthetic oligonucleotide
  Sense strand starting at position 3859 of SEQ ID NO: 1561767
uguucauggugagucagaa

SEQ ID NO: 1696880 - RNA, 19 nt, Artificial Sequence
  Description of Artificial Sequence: Synthetic oligonucleotide
  Antisense strand to SEQ ID NO: 1696879
uucugacucaccaugaaca

SEQ ID NO: 1696881 - RNA, 19 nt, Artificial Sequence
  Description of Artificial Sequence: Synthetic oligonucleotide
  Sense strand starting at position 3920 of SEQ ID NO: 1561767
uucagaugacagugaggua

SEQ ID NO: 1696882 - RNA, 19 nt, Artificial Sequence
  Description of Artificial Sequence: Synthetic oligonucleotide
  Antisense strand to SEQ ID NO: 1696881
uaccucacugucaucugaa

SEQ ID NO: 1696883 - RNA, 19 nt, Artificial Sequence
  Description of Artificial Sequence: Synthetic oligonucleotide
  Sense strand starting at position 1630 of SEQ ID NO: 1561768
acuaaagugucagcugcau

SEQ ID NO: 1696884 - RNA, 19 nt, Artificial Sequence
  Description of Artificial Sequence: Synthetic oligonucleotide
  Antisense strand to SEQ ID NO: 1696883
augcagcugacacuuuagu

SEQ ID NO: 1696885 - RNA, 19 nt, Artificial Sequence
  Description of Artificial Sequence: Synthetic oligonucleotide
  Sense strand starting at position 1634 of SEQ ID NO: 1561768
aagugucagcugcaugaaa

SEQ ID NO: 1696886 - RNA, 19 nt, Artificial Sequence
  Description of Artificial Sequence: Synthetic oligonucleotide
  Antisense strand to SEQ ID NO: 1696885
uuucaugcagcugacacuu

SEQ ID NO: 1696887 - RNA, 19 nt, Artificial Sequence
  Description of Artificial Sequence: Synthetic oligonucleotide
  Sense strand starting at position 1782 of SEQ ID NO: 1561768
uuagcaacuugcucuaagu

SEQ ID NO: 1696888 - RNA, 19 nt, Artificial Sequence
  Description of Artificial Sequence: Synthetic oligonucleotide
  Antisense strand to SEQ ID NO: 1696887
acuuagagcaaguugcuaa

SEQ ID NO: 1696889 - RNA, 19 nt, Artificial Sequence
  Description of Artificial Sequence: Synthetic oligonucleotide
  Sense strand starting at position 1867 of SEQ ID NO: 1561768
cugagagucuaguccucau

SEQ ID NO: 1696890 - RNA, 19 nt, Artificial Sequence
  Description of Artificial Sequence: Synthetic oligonucleotide
  Antisense strand to SEQ ID NO: 1696889
augaggacuagacucucag

SEQ ID NO: 1696891 - RNA, 19 nt, Artificial Sequence
  Description of Artificial Sequence: Synthetic oligonucleotide
  Sense strand starting at position 2085 of SEQ ID NO: 1561768
gcuuuauugagcugcagau

SEQ ID NO: 1696892 - RNA, 19 nt, Artificial Sequence
  Description of Artificial Sequence: Synthetic oligonucleotide
  Antisense strand to SEQ ID NO: 1696891
aucugcagcucaauaaagc

SEQ ID NO: 1696893 - RNA, 19 nt, Artificial Sequence
  Description of Artificial Sequence: Synthetic oligonucleotide
  Sense strand starting at position 2087 of SEQ ID NO: 1561768
uuuauugagcugcagauga

SEQ ID NO: 1696894 - RNA, 19 nt, Artificial Sequence
  Description of Artificial Sequence: Synthetic oligonucleotide
  Antisense strand to SEQ ID NO: 1696893
ucaucugcagcucaauaaa

SEQ ID NO: 1696895 - RNA, 19 nt, Artificial Sequence
  Description of Artificial Sequence: Synthetic oligonucleotide
  Sense strand starting at position 2350 of SEQ ID NO: 1561768
cccuaacugcugugagaca

SEQ ID NO: 1696896 - RNA, 19 nt, Artificial Sequence
  Description of Artificial Sequence: Synthetic oligonucleotide
  Antisense strand to SEQ ID NO: 1696895
ugucucacagcaguuaggg

SEQ ID NO: 1696897 - RNA, 19 nt, Artificial Sequence
  Description of Artificial Sequence: Synthetic oligonucleotide
  Sense strand starting at position 2355 of SEQ ID NO: 1561768
acugcugugagacaucaga

SEQ ID NO: 1696898 - RNA, 19 nt, Artificial Sequence
  Description of Artificial Sequence: Synthetic oligonucleotide
  Antisense strand to SEQ ID NO: 1696897
ucugaugucucacagcagu

SEQ ID NO: 1696899 - RNA, 19 nt, Artificial Sequence
  Description of Artificial Sequence: Synthetic oligonucleotide
  Sense strand starting at position 2398 of SEQ ID NO: 1561768
ucaggcuguugucuaugaa

SEQ ID NO: 1696900 - RNA, 19 nt, Artificial Sequence
  Description of Artificial Sequence: Synthetic oligonucleotide
  Antisense strand to SEQ ID NO: 1696899
uucauagacaacagccuga

SEQ ID NO: 1696901 - RNA, 19 nt, Artificial Sequence
  Description of Artificial Sequence: Synthetic oligonucleotide
  Sense strand starting at position 2399 of SEQ ID NO: 1561768
caggcuguugucuaugaaa

SEQ ID NO: 1696902 - RNA, 19 nt, Artificial Sequence
  Description of Artificial Sequence: Synthetic oligonucleotide
  Antisense strand to SEQ ID NO: 1696901
uuucauagacaacagccug

SEQ ID NO: 1696903 - RNA, 19 nt, Artificial Sequence
  Description of Artificial Sequence: Synthetic oligonucleotide
  Sense strand starting at position 2401 of SEQ ID NO: 1561768
ggcuguugucuaugaaaug

SEQ ID NO: 1696904 - RNA, 19 nt, Artificial Sequence
  Description of Artificial Sequence: Synthetic oligonucleotide
  Antisense strand to SEQ ID NO: 1696903
cauuucauagacaacagcc

SEQ ID NO: 1696905 - RNA, 19 nt, Artificial Sequence
  Description of Artificial Sequence: Synthetic oligonucleotide
  Sense strand starting at position 2412 of SEQ ID NO: 1561768
augaaaugaugacaagcau

SEQ ID NO: 1696906 - RNA, 19 nt, Artificial Sequence
  Description of Artificial Sequence: Synthetic oligonucleotide
  Antisense strand to SEQ ID NO: 1696905
augcuugucaucauuucau

SEQ ID NO: 1696907 - RNA, 19 nt, Artificial Sequence
  Description of Artificial Sequence: Synthetic oligonucleotide
  Sense strand starting at position 2442 of SEQ ID NO: 1561768
ccaagugaacagcauguau

SEQ ID NO: 1696908 - RNA, 19 nt, Artificial Sequence
  Description of Artificial Sequence: Synthetic oligonucleotide
  Antisense strand to SEQ ID NO: 1696907
auacaugcuguucacuugg

SEQ ID NO: 1696909 - RNA, 19 nt, Artificial Sequence
  Description of Artificial Sequence: Synthetic oligonucleotide
  Sense strand starting at position 2484 of SEQ ID NO: 1561768
gaguaauaguacccauguc

SEQ ID NO: 1696910 - RNA, 19 nt, Artificial Sequence
  Description of Artificial Sequence: Synthetic oligonucleotide
  Antisense strand to SEQ ID NO: 1696909
gacauggguacuauuacuc

SEQ ID NO: 1696911 - RNA, 19 nt, Artificial Sequence
  Description of Artificial Sequence: Synthetic oligonucleotide
  Sense strand starting at position 2594 of SEQ ID NO: 1561768
acaccugggacuuguuaga

SEQ ID NO: 1696912 - RNA, 19 nt, Artificial Sequence
  Description of Artificial Sequence: Synthetic oligonucleotide
  Antisense strand to SEQ ID NO: 1696911
ucuaacaagucccaggugu

SEQ ID NO: 1696913 - RNA, 19 nt, Artificial Sequence
  Description of Artificial Sequence: Synthetic oligonucleotide
  Sense strand starting at position 2757 of SEQ ID NO: 1561768
caaguuagcucucugguca

SEQ ID NO: 1696914 - RNA, 19 nt, Artificial Sequence
  Description of Artificial Sequence: Synthetic oligonucleotide
  Antisense strand to SEQ ID NO: 1696913
ugaccagagagcuaacuug

SEQ ID NO: 1696915 - RNA, 19 nt, Artificial Sequence
  Description of Artificial Sequence: Synthetic oligonucleotide
  Sense strand starting at position 2758 of SEQ ID NO: 1561768
aaguuagcucucuggucau

SEQ ID NO: 1696916 - RNA, 19 nt, Artificial Sequence
  Description of Artificial Sequence: Synthetic oligonucleotide
  Antisense strand to SEQ ID NO: 1696915
augaccagagagcuaacuu

SEQ ID NO: 1696917 - RNA, 19 nt, Artificial Sequence
  Description of Artificial Sequence: Synthetic oligonucleotide
  Sense strand starting at position 2764 of SEQ ID NO: 1561768
gcucucuggucauuuguua

SEQ ID NO: 1696918 - RNA, 19 nt, Artificial Sequence
  Description of Artificial Sequence: Synthetic oligonucleotide
  Antisense strand to SEQ ID NO: 1696917
uaacaaaugaccagagagc

SEQ ID NO: 1696919 - RNA, 19 nt, Artificial Sequence
  Description of Artificial Sequence: Synthetic oligonucleotide
  Sense strand starting at position 2769 of SEQ ID NO: 1561768
cuggucauuuguuagauca

SEQ ID NO: 1696920 - RNA, 19 nt, Artificial Sequence
  Description of Artificial Sequence: Synthetic oligonucleotide
  Antisense strand to SEQ ID NO: 1696919
ugaucuaacaaaugaccag

SEQ ID NO: 1696921 - RNA, 19 nt, Artificial Sequence
  Description of Artificial Sequence: Synthetic oligonucleotide
  Sense strand starting at position 2771 of SEQ ID NO: 1561768
ggucauuuguuagaucacu

SEQ ID NO: 1696922 - RNA, 19 nt, Artificial Sequence
  Description of Artificial Sequence: Synthetic oligonucleotide
  Antisense strand to SEQ ID NO: 1696921
agugaucuaacaaaugacc

SEQ ID NO: 1696923 - RNA, 19 nt, Artificial Sequence
  Description of Artificial Sequence: Synthetic oligonucleotide
  Sense strand starting at position 2776 of SEQ ID NO: 1561768
uuuguuagaucacuaguca

SEQ ID NO: 1696924 - RNA, 19 nt, Artificial Sequence
  Description of Artificial Sequence: Synthetic oligonucleotide
  Antisense strand to SEQ ID NO: 1696923
ugacuagugaucuaacaaa

SEQ ID NO: 1696925 - RNA, 19 nt, Artificial Sequence
  Description of Artificial Sequence: Synthetic oligonucleotide
  Sense strand starting at position 2777 of SEQ ID NO: 1561768
uuguuagaucacuagucau

SEQ ID NO: 1696926 - RNA, 19 nt, Artificial Sequence
  Description of Artificial Sequence: Synthetic oligonucleotide
  Antisense strand to SEQ ID NO: 1696925
augacuagugaucuaacaa

SEQ ID NO: 1696927 - RNA, 19 nt, Artificial Sequence
  Description of Artificial Sequence: Synthetic oligonucleotide
  Sense strand starting at position 2780 of SEQ ID NO: 1561768
uuagaucacuagucauaga

SEQ ID NO: 1696928 - RNA, 19 nt, Artificial Sequence
  Description of Artificial Sequence: Synthetic oligonucleotide
  Antisense strand to SEQ ID NO: 1696927
ucuaugacuagugaucuaa

SEQ ID NO: 1696929 - RNA, 19 nt, Artificial Sequence
  Description of Artificial Sequence: Synthetic oligonucleotide
  Sense strand starting at position 2783 of SEQ ID NO: 1561768
gaucacuagucauagauga

SEQ ID NO: 1696930 - RNA, 19 nt, Artificial Sequence
  Description of Artificial Sequence: Synthetic oligonucleotide
  Antisense strand to SEQ ID NO: 1696929
ucaucuaugacuagugauc

SEQ ID NO: 1696931 - RNA, 19 nt, Artificial Sequence
  Description of Artificial Sequence: Synthetic oligonucleotide
  Sense strand starting at position 2787 of SEQ ID NO: 1561768
acuagucauagaugagagu

SEQ ID NO: 1696932 - RNA, 19 nt, Artificial Sequence
  Description of Artificial Sequence: Synthetic oligonucleotide
  Antisense strand to SEQ ID NO: 1696931
acucucaucuaugacuagu

SEQ ID NO: 1696933 - RNA, 19 nt, Artificial Sequence
  Description of Artificial Sequence: Synthetic oligonucleotide
  Sense strand starting at position 2884 of SEQ ID NO: 1561768
gagauaauauccgugcaga

SEQ ID NO: 1696934 - RNA, 19 nt, Artificial Sequence
  Description of Artificial Sequence: Synthetic oligonucleotide
  Antisense strand to SEQ ID NO: 1696933
ucugcacggauauuaucuc

SEQ ID NO: 1696935 - RNA, 19 nt, Artificial Sequence
  Description of Artificial Sequence: Synthetic oligonucleotide
  Sense strand starting at position 2885 of SEQ ID NO: 1561768
agauaauauccgugcagag

SEQ ID NO: 1696936 - RNA, 19 nt, Artificial Sequence
  Description of Artificial Sequence: Synthetic oligonucleotide
  Antisense strand to SEQ ID NO: 1696935
cucugcacggauauuaucu

SEQ ID NO: 1696937 - RNA, 19 nt, Artificial Sequence
  Description of Artificial Sequence: Synthetic oligonucleotide
  Sense strand starting at position 2887 of SEQ ID NO: 1561768
auaauauccgugcagagcu

SEQ ID NO: 1696938 - RNA, 19 nt, Artificial Sequence
  Description of Artificial Sequence: Synthetic oligonucleotide
  Antisense strand to SEQ ID NO: 1696937
agcucugcacggauauuau

SEQ ID NO: 1696939 - RNA, 19 nt, Artificial Sequence
  Description of Artificial Sequence: Synthetic oligonucleotide
  Sense strand starting at position 2913 of SEQ ID NO: 1561768
gugucugguacacaggaau

SEQ ID NO: 1696940 - RNA, 19 nt, Artificial Sequence
  Description of Artificial Sequence: Synthetic oligonucleotide
  Antisense strand to SEQ ID NO: 1696939
auuccuguguaccagacac

SEQ ID NO: 1696941 - RNA, 19 nt, Artificial Sequence
  Description of Artificial Sequence: Synthetic oligonucleotide
  Sense strand starting at position 2924 of SEQ ID NO: 1561768
acaggaaucuaaguugcau

SEQ ID NO: 1696942 - RNA, 19 nt, Artificial Sequence
  Description of Artificial Sequence: Synthetic oligonucleotide
  Antisense strand to SEQ ID NO: 1696941
augcaacuuagauuccugu

SEQ ID NO: 1696943 - RNA, 19 nt, Artificial Sequence
  Description of Artificial Sequence: Synthetic oligonucleotide
  Sense strand starting at position 2963 of SEQ ID NO: 1561768
aaagguaucccgggcagaa

SEQ ID NO: 1696944 - RNA, 19 nt, Artificial Sequence
  Description of Artificial Sequence: Synthetic oligonucleotide
  Antisense strand to SEQ ID NO: 1696943
uucugcccgggauaccuuu

SEQ ID NO: 1696945 - RNA, 19 nt, Artificial Sequence
  Description of Artificial Sequence: Synthetic oligonucleotide
  Sense strand starting at position 2984 of SEQ ID NO: 1561768
aauagaaugugccuagaag

SEQ ID NO: 1696946 - RNA, 19 nt, Artificial Sequence
  Description of Artificial Sequence: Synthetic oligonucleotide
  Antisense strand to SEQ ID NO: 1696945
cuucuaggcacauucuauu

SEQ ID NO: 1696947 - RNA, 19 nt, Artificial Sequence
  Description of Artificial Sequence: Synthetic oligonucleotide
  Sense strand starting at position 3046 of SEQ ID NO: 1561768
ugaaaugauucugcagaga

SEQ ID NO: 1696948 - RNA, 19 nt, Artificial Sequence
  Description of Artificial Sequence: Synthetic oligonucleotide
  Antisense strand to SEQ ID NO: 1696947
ucucugcagaaucauuuca

SEQ ID NO: 1696949 - RNA, 19 nt, Artificial Sequence
  Description of Artificial Sequence: Synthetic oligonucleotide
  Sense strand starting at position 3212 of SEQ ID NO: 1561768
gcaauugugcugcagagau

SEQ ID NO: 1696950 - RNA, 19 nt, Artificial Sequence
  Description of Artificial Sequence: Synthetic oligonucleotide
  Antisense strand to SEQ ID NO: 1696949
aucucugcagcacaauugc

SEQ ID NO: 1696951 - RNA, 19 nt, Artificial Sequence
  Description of Artificial Sequence: Synthetic oligonucleotide
  Sense strand starting at position 3352 of SEQ ID NO: 1561768
gguucuguaucagcuccaa

SEQ ID NO: 1696952 - RNA, 19 nt, Artificial Sequence
  Description of Artificial Sequence: Synthetic oligonucleotide
  Antisense strand to SEQ ID NO: 1696951
uuggagcugauacagaacc

SEQ ID NO: 1696953 - RNA, 19 nt, Artificial Sequence
  Description of Artificial Sequence: Synthetic oligonucleotide
  Sense strand starting at position 3634 of SEQ ID NO: 1561768
agccaucaguaauagaaac

SEQ ID NO: 1696954 - RNA, 19 nt, Artificial Sequence
  Description of Artificial Sequence: Synthetic oligonucleotide
  Antisense strand to SEQ ID NO: 1696953
guuucuauuacugauggcu

SEQ ID NO: 1696955 - RNA, 19 nt, Artificial Sequence
  Description of Artificial Sequence: Synthetic oligonucleotide
  Sense strand starting at position 3695 of SEQ ID NO: 1561768
gccucaguuggugaaugaa

SEQ ID NO: 1696956 - RNA, 19 nt, Artificial Sequence
  Description of Artificial Sequence: Synthetic oligonucleotide
  Antisense strand to SEQ ID NO: 1696955
uucauucaccaacugaggc

SEQ ID NO: 1696957 - RNA, 19 nt, Artificial Sequence
  Description of Artificial Sequence: Synthetic oligonucleotide
  Sense strand starting at position 3698 of SEQ ID NO: 1561768
ucaguuggugaaugaauga

SEQ ID NO: 1696958 - RNA, 19 nt, Artificial Sequence
  Description of Artificial Sequence: Synthetic oligonucleotide
  Antisense strand to SEQ ID NO: 1696957
ucauucauucaccaacuga

SEQ ID NO: 1696959 - RNA, 19 nt, Artificial Sequence
  Description of Artificial Sequence: Synthetic oligonucleotide
  Sense strand starting at position 3810 of SEQ ID NO: 1561768
agagcagaguuucuuaaag

SEQ ID NO: 1696960 - RNA, 19 nt, Artificial Sequence
  Description of Artificial Sequence: Synthetic oligonucleotide
  Antisense strand to SEQ ID NO: 1696959
cuuuaagaaacucugcucu

SEQ ID NO: 1696961 - RNA, 19 nt, Artificial Sequence
  Description of Artificial Sequence: Synthetic oligonucleotide
  Sense strand starting at position 3909 of SEQ ID NO: 1561768
cguggaauccgccucucuu

SEQ ID NO: 1696962 - RNA, 19 nt, Artificial Sequence
  Description of Artificial Sequence: Synthetic oligonucleotide
  Antisense strand to SEQ ID NO: 1696961
aagagaggcggauuccacg

SEQ ID NO: 1696963 - RNA, 19 nt, Artificial Sequence
  Description of Artificial Sequence: Synthetic oligonucleotide
  Sense strand starting at position 143 of SEQ ID NO: 1561769
uuuauacagucauuggaaa

SEQ ID NO: 1696964 - RNA, 19 nt, Artificial Sequence
  Description of Artificial Sequence: Synthetic oligonucleotide
  Antisense strand to SEQ ID NO: 1696963
uuuccaaugacuguauaaa

SEQ ID NO: 1696965 - RNA, 19 nt, Artificial Sequence
  Description of Artificial Sequence: Synthetic oligonucleotide
  Sense strand starting at position 144 of SEQ ID NO: 1561769
uuauacagucauuggaaau

SEQ ID NO: 1696966 - RNA, 19 nt, Artificial Sequence
  Description of Artificial Sequence: Synthetic oligonucleotide
  Antisense strand to SEQ ID NO: 1696965
auuuccaaugacuguauaa

SEQ ID NO: 1696967 - RNA, 19 nt, Artificial Sequence
  Description of Artificial Sequence: Synthetic oligonucleotide
  Sense strand starting at position 354 of SEQ ID NO: 1561769
agcaguuuauaaucagaaa

SEQ ID NO: 1696968 - RNA, 19 nt, Artificial Sequence
  Description of Artificial Sequence: Synthetic oligonucleotide
  Antisense strand to SEQ ID NO: 1696967
uuucugauuauaaacugcu

SEQ ID NO: 1696969 - RNA, 19 nt, Artificial Sequence
  Description of Artificial Sequence: Synthetic oligonucleotide
  Sense strand starting at position 432 of SEQ ID NO: 1561769
agaucauaggcacaguuau

SEQ ID NO: 1696970 - RNA, 19 nt, Artificial Sequence
  Description of Artificial Sequence: Synthetic oligonucleotide
  Antisense strand to SEQ ID NO: 1696969
auaacugugccuaugaucu

SEQ ID NO: 1696971 - RNA, 19 nt, Artificial Sequence
  Description of Artificial Sequence: Synthetic oligonucleotide
  Sense strand starting at position 895 of SEQ ID NO: 1561769
ucaucaguagcggaguaau

SEQ ID NO: 1696972 - RNA, 19 nt, Artificial Sequence
  Description of Artificial Sequence: Synthetic oligonucleotide
  Antisense strand to SEQ ID NO: 1696971
auuacuccgcuacugauga

SEQ ID NO: 1696973 - RNA, 19 nt, Artificial Sequence
  Description of Artificial Sequence: Synthetic oligonucleotide
  Sense strand starting at position 898 of SEQ ID NO: 1561769
ucaguagcggaguaauuaa

SEQ ID NO: 1696974 - RNA, 19 nt, Artificial Sequence
  Description of Artificial Sequence: Synthetic oligonucleotide
  Antisense strand to SEQ ID NO: 1696973
uuaauuacuccgcuacuga

SEQ ID NO: 1696975 - RNA, 19 nt, Artificial Sequence
  Description of Artificial Sequence: Synthetic oligonucleotide
  Sense strand starting at position 970 of SEQ ID NO: 1561769
augaacuagguuuauguau

SEQ ID NO: 1696976 - RNA, 19 nt, Artificial Sequence
  Description of Artificial Sequence: Synthetic oligonucleotide
  Antisense strand to SEQ ID NO: 1696975
auacauaaaccuaguucau

SEQ ID NO: 1696977 - RNA, 19 nt, Artificial Sequence
  Description of Artificial Sequence: Synthetic oligonucleotide
  Sense strand starting at position 976 of SEQ ID NO: 1561769
uagguuuauguauggauaa

SEQ ID NO: 1696978 - RNA, 19 nt, Artificial Sequence
  Description of Artificial Sequence: Synthetic oligonucleotide
  Antisense strand to SEQ ID NO: 1696977
uuauccauacauaaaccua

SEQ ID NO: 1696979 - RNA, 19 nt, Artificial Sequence
  Description of Artificial Sequence: Synthetic oligonucleotide
  Sense strand starting at position 988 of SEQ ID NO: 1561769
uggauaagaugucucuaau

SEQ ID NO: 1696980 - RNA, 19 nt, Artificial Sequence
  Description of Artificial Sequence: Synthetic oligonucleotide
  Antisense strand to SEQ ID NO: 1696979
auuagagacaucuuaucca

SEQ ID NO: 1696981 - RNA, 19 nt, Artificial Sequence
  Description of Artificial Sequence: Synthetic oligonucleotide
  Sense strand starting at position 1100 of SEQ ID NO: 1561769
auuuguauuugcuaggaua

SEQ ID NO: 1696982 - RNA, 19 nt, Artificial Sequence
  Description of Artificial Sequence: Synthetic oligonucleotide
  Antisense strand to SEQ ID NO: 1696981
uauccuagcaaauacaaau

SEQ ID NO: 1696983 - RNA, 19 nt, Artificial Sequence
  Description of Artificial Sequence: Synthetic oligonucleotide
  Sense strand starting at position 1130 of SEQ ID NO: 1561769
gguaacauugauugauucu

SEQ ID NO: 1696984 - RNA, 19 nt, Artificial Sequence
  Description of Artificial Sequence: Synthetic oligonucleotide
  Antisense strand to SEQ ID NO: 1696983
agaaucaaucaauguuacc

SEQ ID NO: 1696985 - RNA, 19 nt, Artificial Sequence
  Description of Artificial Sequence: Synthetic oligonucleotide
  Sense strand starting at position 1167 of SEQ ID NO: 1561769
acugguauucuuggacaga

SEQ ID NO: 1696986 - RNA, 19 nt, Artificial Sequence
  Description of Artificial Sequence: Synthetic oligonucleotide
  Antisense strand to SEQ ID NO: 1696985
ucuguccaagaauaccagu

SEQ ID NO: 1696987 - RNA, 19 nt, Artificial Sequence
  Description of Artificial Sequence: Synthetic oligonucleotide
  Sense strand starting at position 1220 of SEQ ID NO: 1561769
caucgauugcuugauacau

SEQ ID NO: 1696988 - RNA, 19 nt, Artificial Sequence
  Description of Artificial Sequence: Synthetic oligonucleotide
  Antisense strand to SEQ ID NO: 1696987
auguaucaagcaaucgaug

SEQ ID NO: 1696989 - RNA, 19 nt, Artificial Sequence
  Description of Artificial Sequence: Synthetic oligonucleotide
  Sense strand starting at position 1429 of SEQ ID NO: 1561769
augauagugcuacagaauc

SEQ ID NO: 1696990 - RNA, 19 nt, Artificial Sequence
  Description of Artificial Sequence: Synthetic oligonucleotide
  Antisense strand to SEQ ID NO: 1696989
gauucuguagcacuaucau

SEQ ID NO: 1696991 - RNA, 19 nt, Artificial Sequence
  Description of Artificial Sequence: Synthetic oligonucleotide
  Sense strand starting at position 1621 of SEQ ID NO: 1561769
aacauuggauaguuaugua

SEQ ID NO: 1696992 - RNA, 19 nt, Artificial Sequence
  Description of Artificial Sequence: Synthetic oligonucleotide
  Antisense strand to SEQ ID NO: 1696991
uacauaacuauccaauguu

SEQ ID NO: 1696993 - RNA, 19 nt, Artificial Sequence
  Description of Artificial Sequence: Synthetic oligonucleotide
  Sense strand starting at position 1625 of SEQ ID NO: 1561769
uuggauaguuauguagaga

SEQ ID NO: 1696994 - RNA, 19 nt, Artificial Sequence
  Description of Artificial Sequence: Synthetic oligonucleotide
  Antisense strand to SEQ ID NO: 1696993
ucucuacauaacuauccaa

SEQ ID NO: 1696995 - RNA, 19 nt, Artificial Sequence
  Description of Artificial Sequence: Synthetic oligonucleotide
  Sense strand starting at position 1671 of SEQ ID NO: 1561769
ggaaauucuugucuuugga

SEQ ID NO: 1696996 - RNA, 19 nt, Artificial Sequence
  Description of Artificial Sequence: Synthetic oligonucleotide
  Antisense strand to SEQ ID NO: 1696995
uccaaagacaagaauuucc

SEQ ID NO: 1696997 - RNA, 19 nt, Artificial Sequence
  Description of Artificial Sequence: Synthetic oligonucleotide
  Sense strand starting at position 1674 of SEQ ID NO: 1561769
aauucuugucuuuggagaa

SEQ ID NO: 1696998 - RNA, 19 nt, Artificial Sequence
  Description of Artificial Sequence: Synthetic oligonucleotide
  Antisense strand to SEQ ID NO: 1696997
uucuccaaagacaagaauu

SEQ ID NO: 1696999 - RNA, 19 nt, Artificial Sequence
  Description of Artificial Sequence: Synthetic oligonucleotide
  Sense strand starting at position 2037 of SEQ ID NO: 1561769
ccuuuacuggucuaucaug

SEQ ID NO: 1697000 - RNA, 19 nt, Artificial Sequence
  Description of Artificial Sequence: Synthetic oligonucleotide
  Antisense strand to SEQ ID NO: 1696999
caugauagaccaguaaagg

SEQ ID NO: 1697001 - RNA, 19 nt, Artificial Sequence
  Description of Artificial Sequence: Synthetic oligonucleotide
  Sense strand starting at position 2043 of SEQ ID NO: 1561769
cuggucuaucaugggugau

SEQ ID NO: 1697002 - RNA, 19 nt, Artificial Sequence
  Description of Artificial Sequence: Synthetic oligonucleotide
  Antisense strand to SEQ ID NO: 1697001
aucacccaugauagaccag

SEQ ID NO: 1697003 - RNA, 19 nt, Artificial Sequence
  Description of Artificial Sequence: Synthetic oligonucleotide
  Sense strand starting at position 2044 of SEQ ID NO: 1561769
uggucuaucaugggugaug

SEQ ID NO: 1697004 - RNA, 19 nt, Artificial Sequence
  Description of Artificial Sequence: Synthetic oligonucleotide
  Antisense strand to SEQ ID NO: 1697003
caucacccaugauagacca

SEQ ID NO: 1697005 - RNA, 19 nt, Artificial Sequence
  Description of Artificial Sequence: Synthetic oligonucleotide
  Sense strand starting at position 2045 of SEQ ID NO: 1561769
ggucuaucaugggugauga

SEQ ID NO: 1697006 - RNA, 19 nt, Artificial Sequence
  Description of Artificial Sequence: Synthetic oligonucleotide
  Antisense strand to SEQ ID NO: 1697005
ucaucacccaugauagacc

SEQ ID NO: 1697007 - RNA, 19 nt, Artificial Sequence
  Description of Artificial Sequence: Synthetic oligonucleotide
  Sense strand starting at position 2046 of SEQ ID NO: 1561769
gucuaucaugggugaugaa

SEQ ID NO: 1697008 - RNA, 19 nt, Artificial Sequence
  Description of Artificial Sequence: Synthetic oligonucleotide
  Antisense strand to SEQ ID NO: 1697007
uucaucacccaugauagac

SEQ ID NO: 1697009 - RNA, 19 nt, Artificial Sequence
  Description of Artificial Sequence: Synthetic oligonucleotide
  Sense strand starting at position 2121 of SEQ ID NO: 1561769
cugagugugcaugacacaa

SEQ ID NO: 1697010 - RNA, 19 nt, Artificial Sequence
  Description of Artificial Sequence: Synthetic oligonucleotide
  Antisense strand to SEQ ID NO: 1697009
uugugucaugcacacucag

SEQ ID NO: 1697011 - RNA, 19 nt, Artificial Sequence
  Description of Artificial Sequence: Synthetic oligonucleotide
  Sense strand starting at position 2176 of SEQ ID NO: 1561769
ggccuuaugagauaagcua

SEQ ID NO: 1697012 - RNA, 19 nt, Artificial Sequence
  Description of Artificial Sequence: Synthetic oligonucleotide
  Antisense strand to SEQ ID NO: 1697011
uagcuuaucucauaaggcc

SEQ ID NO: 1697013 - RNA, 19 nt, Artificial Sequence
  Description of Artificial Sequence: Synthetic oligonucleotide
  Sense strand starting at position 2206 of SEQ ID NO: 1561769
aacuguaaggucugaugga

SEQ ID NO: 1697014 - RNA, 19 nt, Artificial Sequence
  Description of Artificial Sequence: Synthetic oligonucleotide
  Antisense strand to SEQ ID NO: 1697013
uccaucagaccuuacaguu

SEQ ID NO: 1697015 - RNA, 19 nt, Artificial Sequence
  Description of Artificial Sequence: Synthetic oligonucleotide
  Sense strand starting at position 2258 of SEQ ID NO: 1561769
uuuagaugggcucaauugu

SEQ ID NO: 1697016 - RNA, 19 nt, Artificial Sequence
  Description of Artificial Sequence: Synthetic oligonucleotide
  Antisense strand to SEQ ID NO: 1697015
acaauugagcccaucuaaa

SEQ ID NO: 1697017 - RNA, 19 nt, Artificial Sequence
  Description of Artificial Sequence: Synthetic oligonucleotide
  Sense strand starting at position 2322 of SEQ ID NO: 1561769
agcagaaugguguguaaag

SEQ ID NO: 1697018 - RNA, 19 nt, Artificial Sequence
  Description of Artificial Sequence: Synthetic oligonucleotide
  Antisense strand to SEQ ID NO: 1697017
cuuuacacaccauucugcu

SEQ ID NO: 1697019 - RNA, 19 nt, Artificial Sequence
  Description of Artificial Sequence: Synthetic oligonucleotide
  Sense strand starting at position 2323 of SEQ ID NO: 1561769
gcagaaugguguguaaaga

SEQ ID NO: 1697020 - RNA, 19 nt, Artificial Sequence
  Description of Artificial Sequence: Synthetic oligonucleotide
  Antisense strand to SEQ ID NO: 1697019
ucuuuacacaccauucugc

SEQ ID NO: 1697021 - RNA, 19 nt, Artificial Sequence
  Description of Artificial Sequence: Synthetic oligonucleotide
  Sense strand starting at position 2324 of SEQ ID NO: 1561769
cagaaugguguguaaagau

SEQ ID NO: 1697022 - RNA, 19 nt, Artificial Sequence
  Description of Artificial Sequence: Synthetic oligonucleotide
  Antisense strand to SEQ ID NO: 1697021
aucuuuacacaccauucug

SEQ ID NO: 1697023 - RNA, 19 nt, Artificial Sequence
  Description of Artificial Sequence: Synthetic oligonucleotide
  Sense strand starting at position 2408 of SEQ ID NO: 1561769
cgauaugaauuccugugaa

SEQ ID NO: 1697024 - RNA, 19 nt, Artificial Sequence
  Description of Artificial Sequence: Synthetic oligonucleotide
  Antisense strand to SEQ ID NO: 1697023
uucacaggaauucauaucg

SEQ ID NO: 1697025 - RNA, 19 nt, Artificial Sequence
  Description of Artificial Sequence: Synthetic oligonucleotide
  Sense strand starting at position 2717 of SEQ ID NO: 1561769
aggagacauuugugaaauu

SEQ ID NO: 1697026 - RNA, 19 nt, Artificial Sequence
  Description of Artificial Sequence: Synthetic oligonucleotide
  Antisense strand to SEQ ID NO: 1697025
aauuucacaaaugucuccu

SEQ ID NO: 1697027 - RNA, 19 nt, Artificial Sequence
  Description of Artificial Sequence: Synthetic oligonucleotide
  Sense strand starting at position 2718 of SEQ ID NO: 1561769
ggagacauuugugaaauug

SEQ ID NO: 1697028 - RNA, 19 nt, Artificial Sequence
  Description of Artificial Sequence: Synthetic oligonucleotide
  Antisense strand to SEQ ID NO: 1697027
caauuucacaaaugucucc

SEQ ID NO: 1697029 - RNA, 19 nt, Artificial Sequence
  Description of Artificial Sequence: Synthetic oligonucleotide
  Sense strand starting at position 2730 of SEQ ID NO: 1561769
gaaauugcccaguaggagu

SEQ ID NO: 1697030 - RNA, 19 nt, Artificial Sequence
  Description of Artificial Sequence: Synthetic oligonucleotide
  Antisense strand to SEQ ID NO: 1697029
acuccuacugggcaauuuc

SEQ ID NO: 1697031 - RNA, 19 nt, Artificial Sequence
  Description of Artificial Sequence: Synthetic oligonucleotide
  Sense strand starting at position 2782 of SEQ ID NO: 1561769
agcuguauuucucccacau

SEQ ID NO: 1697032 - RNA, 19 nt, Artificial Sequence
  Description of Artificial Sequence: Synthetic oligonucleotide
  Antisense strand to SEQ ID NO: 1697031
augugggagaaauacagcu

SEQ ID NO: 1697033 - RNA, 19 nt, Artificial Sequence
  Description of Artificial Sequence: Synthetic oligonucleotide
  Sense strand starting at position 3156 of SEQ ID NO: 1561769
uggaaauaccacugcuaac

SEQ ID NO: 1697034 - RNA, 19 nt, Artificial Sequence
  Description of Artificial Sequence: Synthetic oligonucleotide
  Antisense strand to SEQ ID NO: 1697033
guuagcagugguauuucca

SEQ ID NO: 1697035 - RNA, 19 nt, Artificial Sequence
  Description of Artificial Sequence: Synthetic oligonucleotide
  Sense strand starting at position 3219 of SEQ ID NO: 1561769
gauauauuagaacgaugug

SEQ ID NO: 1697036 - RNA, 19 nt, Artificial Sequence
  Description of Artificial Sequence: Synthetic oligonucleotide
  Antisense strand to SEQ ID NO: 1697035
cacaucguucuaauauauc

SEQ ID NO: 1697037 - RNA, 19 nt, Artificial Sequence
  Description of Artificial Sequence: Synthetic oligonucleotide
  Sense strand starting at position 3222 of SEQ ID NO: 1561769
auauuagaacgaugugaaa

SEQ ID NO: 1697038 - RNA, 19 nt, Artificial Sequence
  Description of Artificial Sequence: Synthetic oligonucleotide
  Antisense strand to SEQ ID NO: 1697037
uuucacaucguucuaauau

SEQ ID NO: 1697039 - RNA, 19 nt, Artificial Sequence
  Description of Artificial Sequence: Synthetic oligonucleotide
  Sense strand starting at position 3733 of SEQ ID NO: 1561769
ggaaucucuccaggauguu

SEQ ID NO: 1697040 - RNA, 19 nt, Artificial Sequence
  Description of Artificial Sequence: Synthetic oligonucleotide
  Antisense strand to SEQ ID NO: 1697039
aacauccuggagagauucc

SEQ ID NO: 1697041 - RNA, 19 nt, Artificial Sequence
  Description of Artificial Sequence: Synthetic oligonucleotide
  Sense strand starting at position 3734 of SEQ ID NO: 1561769
gaaucucuccaggauguuu

SEQ ID NO: 1697042 - RNA, 19 nt, Artificial Sequence
  Description of Artificial Sequence: Synthetic oligonucleotide
  Antisense strand to SEQ ID NO: 1697041
aaacauccuggagagauuc

SEQ ID NO: 1697043 - RNA, 19 nt, Artificial Sequence
  Description of Artificial Sequence: Synthetic oligonucleotide
  Sense strand starting at position 7 of SEQ ID NO: 1561770
cugcaagaugcagggaaua

SEQ ID NO: 1697044 - RNA, 19 nt, Artificial Sequence
  Description of Artificial Sequence: Synthetic oligonucleotide
  Antisense strand to SEQ ID NO: 1697043
uauucccugcaucuugcag

SEQ ID NO: 1697045 - RNA, 19 nt, Artificial Sequence
  Description of Artificial Sequence: Synthetic oligonucleotide
  Sense strand starting at position 148 of SEQ ID NO: 1561770
auaugagguaauugacagu

SEQ ID NO: 1697046 - RNA, 19 nt, Artificial Sequence
  Description of Artificial Sequence: Synthetic oligonucleotide
  Antisense strand to SEQ ID NO: 1697045
acugucaauuaccucauau

SEQ ID NO: 1697047 - RNA, 19 nt, Artificial Sequence
  Description of Artificial Sequence: Synthetic oligonucleotide
  Sense strand starting at position 154 of SEQ ID NO: 1561770
gguaauugacaguaaguga

SEQ ID NO: 1697048 - RNA, 19 nt, Artificial Sequence
  Description of Artificial Sequence: Synthetic oligonucleotide
  Antisense strand to SEQ ID NO: 1697047
ucacuuacugucaauuacc

SEQ ID NO: 1697049 - RNA, 19 nt, Artificial Sequence
  Description of Artificial Sequence: Synthetic oligonucleotide
  Sense strand starting at position 226 of SEQ ID NO: 1561770
guuuaauccuccucugaug

SEQ ID NO: 1697050 - RNA, 19 nt, Artificial Sequence
  Description of Artificial Sequence: Synthetic oligonucleotide
  Antisense strand to SEQ ID NO: 1697049
caucagaggaggauuaaac

SEQ ID NO: 1697051 - RNA, 19 nt, Artificial Sequence
  Description of Artificial Sequence: Synthetic oligonucleotide
  Sense strand starting at position 234 of SEQ ID NO: 1561770
cuccucugaugauugaguu

SEQ ID NO: 1697052 - RNA, 19 nt, Artificial Sequence
  Description of Artificial Sequence: Synthetic oligonucleotide
  Antisense strand to SEQ ID NO: 1697051
aacucaaucaucagaggag

SEQ ID NO: 1697053 - RNA, 19 nt, Artificial Sequence
  Description of Artificial Sequence: Synthetic oligonucleotide
  Sense strand starting at position 235 of SEQ ID NO: 1561770
uccucugaugauugaguuu

SEQ ID NO: 1697054 - RNA, 19 nt, Artificial Sequence
  Description of Artificial Sequence: Synthetic oligonucleotide
  Antisense strand to SEQ ID NO: 1697053
aaacucaaucaucagagga

SEQ ID NO: 1697055 - RNA, 19 nt, Artificial Sequence
  Description of Artificial Sequence: Synthetic oligonucleotide
  Sense strand starting at position 343 of SEQ ID NO: 1561770
gauguaugucacuaauguu

SEQ ID NO: 1697056 - RNA, 19 nt, Artificial Sequence
  Description of Artificial Sequence: Synthetic oligonucleotide
  Antisense strand to SEQ ID NO: 1697055
aacauuagugacauacauc

SEQ ID NO: 1697057 - RNA, 19 nt, Artificial Sequence
  Description of Artificial Sequence: Synthetic oligonucleotide
  Sense strand starting at position 412 of SEQ ID NO: 1561770
augcaauaggccugaaaca

SEQ ID NO: 1697058 - RNA, 19 nt, Artificial Sequence
  Description of Artificial Sequence: Synthetic oligonucleotide
  Antisense strand to SEQ ID NO: 1697057
uguuucaggccuauugcau

SEQ ID NO: 1697059 - RNA, 19 nt, Artificial Sequence
  Description of Artificial Sequence: Synthetic oligonucleotide
  Sense strand starting at position 413 of SEQ ID NO: 1561770
ugcaauaggccugaaacau

SEQ ID NO: 1697060 - RNA, 19 nt, Artificial Sequence
  Description of Artificial Sequence: Synthetic oligonucleotide
  Antisense strand to SEQ ID NO: 1697059
auguuucaggccuauugca

SEQ ID NO: 1697061 - RNA, 19 nt, Artificial Sequence
  Description of Artificial Sequence: Synthetic oligonucleotide
  Sense strand starting at position 531 of SEQ ID NO: 1561770
gggcuauggaguuauuaua

SEQ ID NO: 1697062 - RNA, 19 nt, Artificial Sequence
  Description of Artificial Sequence: Synthetic oligonucleotide
  Antisense strand to SEQ ID NO: 1697061
uauaauaacuccauagccc

SEQ ID NO: 1697063 - RNA, 19 nt, Artificial Sequence
  Description of Artificial Sequence: Synthetic oligonucleotide
  Sense strand starting at position 648 of SEQ ID NO: 1561770
gugaauaacuguucucaac

SEQ ID NO: 1697064 - RNA, 19 nt, Artificial Sequence
  Description of Artificial Sequence: Synthetic oligonucleotide
  Antisense strand to SEQ ID NO: 1697063
guugagaacaguuauucac

SEQ ID NO: 1697065 - RNA, 19 nt, Artificial Sequence
  Description of Artificial Sequence: Synthetic oligonucleotide
  Sense strand starting at position 656 of SEQ ID NO: 1561770
cuguucucaacacggagaa

SEQ ID NO: 1697066 - RNA, 19 nt, Artificial Sequence
  Description of Artificial Sequence: Synthetic oligonucleotide
  Antisense strand to SEQ ID NO: 1697065
uucuccguguugagaacag

SEQ ID NO: 1697067 - RNA, 19 nt, Artificial Sequence
  Description of Artificial Sequence: Synthetic oligonucleotide
  Sense strand starting at position 711 of SEQ ID NO: 1561770
accaauagauuugacauga

SEQ ID NO: 1697068 - RNA, 19 nt, Artificial Sequence
  Description of Artificial Sequence: Synthetic oligonucleotide
  Antisense strand to SEQ ID NO: 1697067
ucaugucaaaucuauuggu

SEQ ID NO: 1697069 - RNA, 19 nt, Artificial Sequence
  Description of Artificial Sequence: Synthetic oligonucleotide
  Sense strand starting at position 1155 of SEQ ID NO: 1561770
agguuauaagcucauauau

SEQ ID NO: 1697070 - RNA, 19 nt, Artificial Sequence
  Description of Artificial Sequence: Synthetic oligonucleotide
  Antisense strand to SEQ ID NO: 1697069
auauaugagcuuauaaccu

SEQ ID NO: 1697071 - RNA, 19 nt, Artificial Sequence
  Description of Artificial Sequence: Synthetic oligonucleotide
  Sense strand starting at position 1168 of SEQ ID NO: 1561770
auauaucaguugguuacaa

SEQ ID NO: 1697072 - RNA, 19 nt, Artificial Sequence
  Description of Artificial Sequence: Synthetic oligonucleotide
  Antisense strand to SEQ ID NO: 1697071
uuguaaccaacugauauau

SEQ ID NO: 1697073 - RNA, 19 nt, Artificial Sequence
  Description of Artificial Sequence: Synthetic oligonucleotide
  Sense strand starting at position 1170 of SEQ ID NO: 1561770
auaucaguugguuacaagu

SEQ ID NO: 1697074 - RNA, 19 nt, Artificial Sequence
  Description of Artificial Sequence: Synthetic oligonucleotide
  Antisense strand to SEQ ID NO: 1697073
acuuguaaccaacugauau

SEQ ID NO: 1697075 - RNA, 19 nt, Artificial Sequence
  Description of Artificial Sequence: Synthetic oligonucleotide
  Sense strand starting at position 1197 of SEQ ID NO: 1561770
gcaagcagugaugaaaugu

SEQ ID NO: 1697076 - RNA, 19 nt, Artificial Sequence
  Description of Artificial Sequence: Synthetic oligonucleotide
  Antisense strand to SEQ ID NO: 1697075
acauuucaucacugcuugc

SEQ ID NO: 1697077 - RNA, 19 nt, Artificial Sequence
  Description of Artificial Sequence: Synthetic oligonucleotide
  Sense strand starting at position 1456 of SEQ ID NO: 1561770
cagagaccucucuguaaga

SEQ ID NO: 1697078 - RNA, 19 nt, Artificial Sequence
  Description of Artificial Sequence: Synthetic oligonucleotide
  Antisense strand to SEQ ID NO: 1697077
ucuuacagagaggucucug

SEQ ID NO: 1697079 - RNA, 19 nt, Artificial Sequence
  Description of Artificial Sequence: Synthetic oligonucleotide
  Sense strand starting at position 1457 of SEQ ID NO: 1561770
agagaccucucuguaagac

SEQ ID NO: 1697080 - RNA, 19 nt, Artificial Sequence
  Description of Artificial Sequence: Synthetic oligonucleotide
  Antisense strand to SEQ ID NO: 1697079
gucuuacagagaggucucu

SEQ ID NO: 1697081 - RNA, 19 nt, Artificial Sequence
  Description of Artificial Sequence: Synthetic oligonucleotide
  Sense strand starting at position 1519 of SEQ ID NO: 1561770
gagggaauaucggcagcaa

SEQ ID NO: 1697082 - RNA, 19 nt, Artificial Sequence
  Description of Artificial Sequence: Synthetic oligonucleotide
  Antisense strand to SEQ ID NO: 1697081
uugcugccgauauucccuc

SEQ ID NO: 1697083 - RNA, 19 nt, Artificial Sequence
  Description of Artificial Sequence: Synthetic oligonucleotide
  Sense strand starting at position 1520 of SEQ ID NO: 1561770
agggaauaucggcagcaaa

SEQ ID NO: 1697084 - RNA, 19 nt, Artificial Sequence
  Description of Artificial Sequence: Synthetic oligonucleotide
  Antisense strand to SEQ ID NO: 1697083
uuugcugccgauauucccu

SEQ ID NO: 1697085 - RNA, 19 nt, Artificial Sequence
  Description of Artificial Sequence: Synthetic oligonucleotide
  Sense strand starting at position 1630 of SEQ ID NO: 1561770
gaggcaacuguaugggauu

SEQ ID NO: 1697086 - RNA, 19 nt, Artificial Sequence
  Description of Artificial Sequence: Synthetic oligonucleotide
  Antisense strand to SEQ ID NO: 1697085
aaucccauacaguugccuc

SEQ ID NO: 1697087 - RNA, 19 nt, Artificial Sequence
  Description of Artificial Sequence: Synthetic oligonucleotide
  Sense strand starting at position 1858 of SEQ ID NO: 1561770
uucuguuuaccugagacca

SEQ ID NO: 1697088 - RNA, 19 nt, Artificial Sequence
  Description of Artificial Sequence: Synthetic oligonucleotide
  Antisense strand to SEQ ID NO: 1697087
uggucucagguaaacagaa

SEQ ID NO: 1697089 - RNA, 19 nt, Artificial Sequence
  Description of Artificial Sequence: Synthetic oligonucleotide
  Sense strand starting at position 2040 of SEQ ID NO: 1561770
guaggauauugugccaaca

SEQ ID NO: 1697090 - RNA, 19 nt, Artificial Sequence
  Description of Artificial Sequence: Synthetic oligonucleotide
  Antisense strand to SEQ ID NO: 1697089
uguuggcacaauauccuac

SEQ ID NO: 1697091 - RNA, 19 nt, Artificial Sequence
  Description of Artificial Sequence: Synthetic oligonucleotide
  Sense strand starting at position 2139 of SEQ ID NO: 1561770
gauaaagacuuagaagaga

SEQ ID NO: 1697092 - RNA, 19 nt, Artificial Sequence
  Description of Artificial Sequence: Synthetic oligonucleotide
  Antisense strand to SEQ ID NO: 1697091
ucucuucuaagucuuuauc

SEQ ID NO: 1697093 - RNA, 19 nt, Artificial Sequence
  Description of Artificial Sequence: Synthetic oligonucleotide
  Sense strand starting at position 2451 of SEQ ID NO: 1561770
aauuaaugcuuuguugaug

SEQ ID NO: 1697094 - RNA, 19 nt, Artificial Sequence
  Description of Artificial Sequence: Synthetic oligonucleotide
  Antisense strand to SEQ ID NO: 1697093
caucaacaaagcauuaauu

SEQ ID NO: 1697095 - RNA, 19 nt, Artificial Sequence
  Description of Artificial Sequence: Synthetic oligonucleotide
  Sense strand starting at position 2452 of SEQ ID NO: 1561770
auuaaugcuuuguugauga

SEQ ID NO: 1697096 - RNA, 19 nt, Artificial Sequence
  Description of Artificial Sequence: Synthetic oligonucleotide
  Antisense strand to SEQ ID NO: 1697095
ucaucaacaaagcauuaau

SEQ ID NO: 1697097 - RNA, 19 nt, Artificial Sequence
  Description of Artificial Sequence: Synthetic oligonucleotide
  Sense strand starting at position 2459 of SEQ ID NO: 1561770
cuuuguugaugaucuggaa

SEQ ID NO: 1697098 - RNA, 19 nt, Artificial Sequence
  Description of Artificial Sequence: Synthetic oligonucleotide
  Antisense strand to SEQ ID NO: 1697097
uuccagaucaucaacaaag

SEQ ID NO: 1697099 - RNA, 19 nt, Artificial Sequence
  Description of Artificial Sequence: Synthetic oligonucleotide
  Sense strand starting at position 2502 of SEQ ID NO: 1561770
auaaauaagugcucaaaga

SEQ ID NO: 1697100 - RNA, 19 nt, Artificial Sequence
  Description of Artificial Sequence: Synthetic oligonucleotide
  Antisense strand to SEQ ID NO: 1697099
ucuuugagcacuuauuuau

SEQ ID NO: 1697101 - RNA, 19 nt, Artificial Sequence
  Description of Artificial Sequence: Synthetic oligonucleotide
  Sense strand starting at position 2538 of SEQ ID NO: 1561770
cuugucacucuguagagua

SEQ ID NO: 1697102 - RNA, 19 nt, Artificial Sequence
  Description of Artificial Sequence: Synthetic oligonucleotide
  Antisense strand to SEQ ID NO: 1697101
uacucuacagagugacaag

SEQ ID NO: 1697103 - RNA, 19 nt, Artificial Sequence
  Description of Artificial Sequence: Synthetic oligonucleotide
  Sense strand starting at position 2781 of SEQ ID NO: 1561770
ucuggaugggauugaguuu

SEQ ID NO: 1697104 - RNA, 19 nt, Artificial Sequence
  Description of Artificial Sequence: Synthetic oligonucleotide
  Antisense strand to SEQ ID NO: 1697103
aaacucaaucccauccaga

SEQ ID NO: 1697105 - RNA, 19 nt, Artificial Sequence
  Description of Artificial Sequence: Synthetic oligonucleotide
  Sense strand starting at position 2854 of SEQ ID NO: 1561770
acuauauugugacugaaag

SEQ ID NO: 1697106 - RNA, 19 nt, Artificial Sequence
  Description of Artificial Sequence: Synthetic oligonucleotide
  Antisense strand to SEQ ID NO: 1697105
cuuucagucacaauauagu

SEQ ID NO: 1697107 - RNA, 19 nt, Artificial Sequence
  Description of Artificial Sequence: Synthetic oligonucleotide
  Sense strand starting at position 2855 of SEQ ID NO: 1561770
cuauauugugacugaaagc

SEQ ID NO: 1697108 - RNA, 19 nt, Artificial Sequence
  Description of Artificial Sequence: Synthetic oligonucleotide
  Antisense strand to SEQ ID NO: 1697107
gcuuucagucacaauauag

SEQ ID NO: 1697109 - RNA, 19 nt, Artificial Sequence
  Description of Artificial Sequence: Synthetic oligonucleotide
  Sense strand starting at position 2971 of SEQ ID NO: 1561770
aguguauaauuugaugaac

SEQ ID NO: 1697110 - RNA, 19 nt, Artificial Sequence
  Description of Artificial Sequence: Synthetic oligonucleotide
  Antisense strand to SEQ ID NO: 1697109
guucaucaaauuauacacu

SEQ ID NO: 1697111 - RNA, 19 nt, Artificial Sequence
  Description of Artificial Sequence: Synthetic oligonucleotide
  Sense strand starting at position 3140 of SEQ ID NO: 1561770
ccugcuauuuguucuugua

SEQ ID NO: 1697112 - RNA, 19 nt, Artificial Sequence
  Description of Artificial Sequence: Synthetic oligonucleotide
  Antisense strand to SEQ ID NO: 1697111
uacaagaacaaauagcagg

SEQ ID NO: 1697113 - RNA, 19 nt, Artificial Sequence
  Description of Artificial Sequence: Synthetic oligonucleotide
  Sense strand starting at position 3166 of SEQ ID NO: 1561770
uggcauucucuugaauauu

SEQ ID NO: 1697114 - RNA, 19 nt, Artificial Sequence
  Description of Artificial Sequence: Synthetic oligonucleotide
  Antisense strand to SEQ ID NO: 1697113
aauauucaagagaaugcca

SEQ ID NO: 1697115 - RNA, 19 nt, Artificial Sequence
  Description of Artificial Sequence: Synthetic oligonucleotide
  Sense strand starting at position 3195 of SEQ ID NO: 1561770
aguaauauagcauguauac

SEQ ID NO: 1697116 - RNA, 19 nt, Artificial Sequence
  Description of Artificial Sequence: Synthetic oligonucleotide
  Antisense strand to SEQ ID NO: 1697115
guauacaugcuauauuacu

SEQ ID NO: 1697117 - RNA, 19 nt, Artificial Sequence
  Description of Artificial Sequence: Synthetic oligonucleotide
  Sense strand starting at position 3593 of SEQ ID NO: 1561770
auaaguaaauguuccaugu

SEQ ID NO: 1697118 - RNA, 19 nt, Artificial Sequence
  Description of Artificial Sequence: Synthetic oligonucleotide
  Antisense strand to SEQ ID NO: 1697117
acauggaacauuuacuuau

SEQ ID NO: 1697119 - RNA, 19 nt, Artificial Sequence
  Description of Artificial Sequence: Synthetic oligonucleotide
  Sense strand starting at position 3603 of SEQ ID NO: 1561770
guuccauguuaauuaugga

SEQ ID NO: 1697120 - RNA, 19 nt, Artificial Sequence
  Description of Artificial Sequence: Synthetic oligonucleotide
  Antisense strand to SEQ ID NO: 1697119
uccauaauuaacauggaac

SEQ ID NO: 1697121 - RNA, 19 nt, Artificial Sequence
  Description of Artificial Sequence: Synthetic oligonucleotide
  Sense strand starting at position 3958 of SEQ ID NO: 1561770
guguaaccaucaucagaau

SEQ ID NO: 1697122 - RNA, 19 nt, Artificial Sequence
  Description of Artificial Sequence: Synthetic oligonucleotide
  Antisense strand to SEQ ID NO: 1697121
auucugaugaugguuacac

SEQ ID NO: 1697123 - RNA, 19 nt, Artificial Sequence
  Description of Artificial Sequence: Synthetic oligonucleotide
  Sense strand starting at position 256 of SEQ ID NO: 1561771
cuaguauauaaugaguguu

SEQ ID NO: 1697124 - RNA, 19 nt, Artificial Sequence
  Description of Artificial Sequence: Synthetic oligonucleotide
  Antisense strand to SEQ ID NO: 1697123
aacacucauuauauacuag

SEQ ID NO: 1697125 - RNA, 19 nt, Artificial Sequence
  Description of Artificial Sequence: Synthetic oligonucleotide
  Sense strand starting at position 720 of SEQ ID NO: 1561771
gaacaauaucaguguuuga

SEQ ID NO: 1697126 - RNA, 19 nt, Artificial Sequence
  Description of Artificial Sequence: Synthetic oligonucleotide
  Antisense strand to SEQ ID NO: 1697125
ucaaacacugauauuguuc

SEQ ID NO: 1697127 - RNA, 19 nt, Artificial Sequence
  Description of Artificial Sequence: Synthetic oligonucleotide
  Sense strand starting at position 723 of SEQ ID NO: 1561771
caauaucaguguuugagac

SEQ ID NO: 1697128 - RNA, 19 nt, Artificial Sequence
  Description of Artificial Sequence: Synthetic oligonucleotide
  Antisense strand to SEQ ID NO: 1697127
gucucaaacacugauauug

SEQ ID NO: 1697129 - RNA, 19 nt, Artificial Sequence
  Description of Artificial Sequence: Synthetic oligonucleotide
  Sense strand starting at position 724 of SEQ ID NO: 1561771
aauaucaguguuugagacu

SEQ ID NO: 1697130 - RNA, 19 nt, Artificial Sequence
  Description of Artificial Sequence: Synthetic oligonucleotide
  Antisense strand to SEQ ID NO: 1697129
agucucaaacacugauauu

SEQ ID NO: 1697131 - RNA, 19 nt, Artificial Sequence
  Description of Artificial Sequence: Synthetic oligonucleotide
  Sense strand starting at position 854 of SEQ ID NO: 1561771
accucaguguuuguauuua

SEQ ID NO: 1697132 - RNA, 19 nt, Artificial Sequence
  Description of Artificial Sequence: Synthetic oligonucleotide
  Antisense strand to SEQ ID NO: 1697131
uaaauacaaacacugaggu

SEQ ID NO: 1697133 - RNA, 19 nt, Artificial Sequence
  Description of Artificial Sequence: Synthetic oligonucleotide
  Sense strand starting at position 858 of SEQ ID NO: 1561771
caguguuuguauuuaacug

SEQ ID NO: 1697134 - RNA, 19 nt, Artificial Sequence
  Description of Artificial Sequence: Synthetic oligonucleotide
  Antisense strand to SEQ ID NO: 1697133
caguuaaauacaaacacug

SEQ ID NO: 1697135 - RNA, 19 nt, Artificial Sequence
  Description of Artificial Sequence: Synthetic oligonucleotide
  Sense strand starting at position 924 of SEQ ID NO: 1561771
cugauagacucugccaaga

SEQ ID NO: 1697136 - RNA, 19 nt, Artificial Sequence
  Description of Artificial Sequence: Synthetic oligonucleotide
  Antisense strand to SEQ ID NO: 1697135
ucuuggcagagucuaucag

SEQ ID NO: 1697137 - RNA, 19 nt, Artificial Sequence
  Description of Artificial Sequence: Synthetic oligonucleotide
  Sense strand starting at position 972 of SEQ ID NO: 1561771
agcugaacccuugauucua

SEQ ID NO: 1697138 - RNA, 19 nt, Artificial Sequence
  Description of Artificial Sequence: Synthetic oligonucleotide
  Antisense strand to SEQ ID NO: 1697137
uagaaucaaggguucagcu

SEQ ID NO: 1697139 - RNA, 19 nt, Artificial Sequence
  Description of Artificial Sequence: Synthetic oligonucleotide
  Sense strand starting at position 995 of SEQ ID NO: 1561771
auggaacuaugcucuacau

SEQ ID NO: 1697140 - RNA, 19 nt, Artificial Sequence
  Description of Artificial Sequence: Synthetic oligonucleotide
  Antisense strand to SEQ ID NO: 1697139
auguagagcauaguuccau

SEQ ID NO: 1697141 - RNA, 19 nt, Artificial Sequence
  Description of Artificial Sequence: Synthetic oligonucleotide
  Sense strand starting at position 1076 of SEQ ID NO: 1561771
uccucugaugcccagagaa

SEQ ID NO: 1697142 - RNA, 19 nt, Artificial Sequence
  Description of Artificial Sequence: Synthetic oligonucleotide
  Antisense strand to SEQ ID NO: 1697141
uucucugggcaucagagga

SEQ ID NO: 1697143 - RNA, 19 nt, Artificial Sequence
  Description of Artificial Sequence: Synthetic oligonucleotide
  Sense strand starting at position 1178 of SEQ ID NO: 1561771
cauguuauccaguaaggua

SEQ ID NO: 1697144 - RNA, 19 nt, Artificial Sequence
  Description of Artificial Sequence: Synthetic oligonucleotide
  Antisense strand to SEQ ID NO: 1697143
uaccuuacuggauaacaug

SEQ ID NO: 1697145 - RNA, 19 nt, Artificial Sequence
  Description of Artificial Sequence: Synthetic oligonucleotide
  Sense strand starting at position 1207 of SEQ ID NO: 1561771
gggucuuaggaauguagag

SEQ ID NO: 1697146 - RNA, 19 nt, Artificial Sequence
  Description of Artificial Sequence: Synthetic oligonucleotide
  Antisense strand to SEQ ID NO: 1697145
cucuacauuccuaagaccc

SEQ ID NO: 1697147 - RNA, 19 nt, Artificial Sequence
  Description of Artificial Sequence: Synthetic oligonucleotide
  Sense strand starting at position 1378 of SEQ ID NO: 1561771
ugucauuaucuccauagau

SEQ ID NO: 1697148 - RNA, 19 nt, Artificial Sequence
  Description of Artificial Sequence: Synthetic oligonucleotide
  Antisense strand to SEQ ID NO: 1697147
aucuauggagauaaugaca

SEQ ID NO: 1697149 - RNA, 19 nt, Artificial Sequence
  Description of Artificial Sequence: Synthetic oligonucleotide
  Sense strand starting at position 1558 of SEQ ID NO: 1561771
aggaaauauagcugagcau

SEQ ID NO: 1697150 - RNA, 19 nt, Artificial Sequence
  Description of Artificial Sequence: Synthetic oligonucleotide
  Antisense strand to SEQ ID NO: 1697149
augcucagcuauauuuccu

SEQ ID NO: 1697151 - RNA, 19 nt, Artificial Sequence
  Description of Artificial Sequence: Synthetic oligonucleotide
  Sense strand starting at position 1559 of SEQ ID NO: 1561771
ggaaauauagcugagcauc

SEQ ID NO: 1697152 - RNA, 19 nt, Artificial Sequence
  Description of Artificial Sequence: Synthetic oligonucleotide
  Antisense strand to SEQ ID NO: 1697151
gaugcucagcuauauuucc

SEQ ID NO: 1697153 - RNA, 19 nt, Artificial Sequence
  Description of Artificial Sequence: Synthetic oligonucleotide
  Sense strand starting at position 1689 of SEQ ID NO: 1561771
gaguacuccucuuuaagga

SEQ ID NO: 1697154 - RNA, 19 nt, Artificial Sequence
  Description of Artificial Sequence: Synthetic oligonucleotide
  Antisense strand to SEQ ID NO: 1697153
uccuuaaagaggaguacuc

SEQ ID NO: 1697155 - RNA, 19 nt, Artificial Sequence
  Description of Artificial Sequence: Synthetic oligonucleotide
  Sense strand starting at position 1690 of SEQ ID NO: 1561771
aguacuccucuuuaaggau

SEQ ID NO: 1697156 - RNA, 19 nt, Artificial Sequence
  Description of Artificial Sequence: Synthetic oligonucleotide
  Antisense strand to SEQ ID NO: 1697155
auccuuaaagaggaguacu

SEQ ID NO: 1697157 - RNA, 19 nt, Artificial Sequence
  Description of Artificial Sequence: Synthetic oligonucleotide
  Sense strand starting at position 1734 of SEQ ID NO: 1561771
agaggaaauuucugaugau

SEQ ID NO: 1697158 - RNA, 19 nt, Artificial Sequence
  Description of Artificial Sequence: Synthetic oligonucleotide
  Antisense strand to SEQ ID NO: 1697157
aucaucagaaauuuccucu

SEQ ID NO: 1697159 - RNA, 19 nt, Artificial Sequence
  Description of Artificial Sequence: Synthetic oligonucleotide
  Sense strand starting at position 1744 of SEQ ID NO: 1561771
ucugaugauguuggauaaa

SEQ ID NO: 1697160 - RNA, 19 nt, Artificial Sequence
  Description of Artificial Sequence: Synthetic oligonucleotide
  Antisense strand to SEQ ID NO: 1697159
uuuauccaacaucaucaga

SEQ ID NO: 1697161 - RNA, 19 nt, Artificial Sequence
  Description of Artificial Sequence: Synthetic oligonucleotide
  Sense strand starting at position 1754 of SEQ ID NO: 1561771
uuggauaaacuuuagccau

SEQ ID NO: 1697162 - RNA, 19 nt, Artificial Sequence
  Description of Artificial Sequence: Synthetic oligonucleotide
  Antisense strand to SEQ ID NO: 1697161
auggcuaaaguuuauccaa

SEQ ID NO: 1697163 - RNA, 19 nt, Artificial Sequence
  Description of Artificial Sequence: Synthetic oligonucleotide
  Sense strand starting at position 1756 of SEQ ID NO: 1561771
ggauaaacuuuagccaucu

SEQ ID NO: 1697164 - RNA, 19 nt, Artificial Sequence
  Description of Artificial Sequence: Synthetic oligonucleotide
  Antisense strand to SEQ ID NO: 1697163
agauggcuaaaguuuaucc

SEQ ID NO: 1697165 - RNA, 19 nt, Artificial Sequence
  Description of Artificial Sequence: Synthetic oligonucleotide
  Sense strand starting at position 1780 of SEQ ID NO: 1561771
ggcucuauuucccuuuagu

SEQ ID NO: 1697166 - RNA, 19 nt, Artificial Sequence
  Description of Artificial Sequence: Synthetic oligonucleotide
  Antisense strand to SEQ ID NO: 1697165
acuaaagggaaauagagcc

SEQ ID NO: 1697167 - RNA, 19 nt, Artificial Sequence
  Description of Artificial Sequence: Synthetic oligonucleotide
  Sense strand starting at position 1845 of SEQ ID NO: 1561771
uguugauuugagugagcuu

SEQ ID NO: 1697168 - RNA, 19 nt, Artificial Sequence
  Description of Artificial Sequence: Synthetic oligonucleotide
  Antisense strand to SEQ ID NO: 1697167
aagcucacucaaaucaaca

SEQ ID NO: 1697169 - RNA, 19 nt, Artificial Sequence
  Description of Artificial Sequence: Synthetic oligonucleotide
  Sense strand starting at position 1984 of SEQ ID NO: 1561771
augcuaccuuccucagaga

SEQ ID NO: 1697170 - RNA, 19 nt, Artificial Sequence
  Description of Artificial Sequence: Synthetic oligonucleotide
  Antisense strand to SEQ ID NO: 1697169
ucucugaggaagguagcau

SEQ ID NO: 1697171 - RNA, 19 nt, Artificial Sequence
  Description of Artificial Sequence: Synthetic oligonucleotide
  Sense strand starting at position 2000 of SEQ ID NO: 1561771
agacuuagauucuuaugca

SEQ ID NO: 1697172 - RNA, 19 nt, Artificial Sequence
  Description of Artificial Sequence: Synthetic oligonucleotide
  Antisense strand to SEQ ID NO: 1697171
ugcauaagaaucuaagucu

SEQ ID NO: 1697173 - RNA, 19 nt, Artificial Sequence
  Description of Artificial Sequence: Synthetic oligonucleotide
  Sense strand starting at position 2004 of SEQ ID NO: 1561771
uuagauucuuaugcacuga

SEQ ID NO: 1697174 - RNA, 19 nt, Artificial Sequence
  Description of Artificial Sequence: Synthetic oligonucleotide
  Antisense strand to SEQ ID NO: 1697173
ucagugcauaagaaucuaa

SEQ ID NO: 1697175 - RNA, 19 nt, Artificial Sequence
  Description of Artificial Sequence: Synthetic oligonucleotide
  Sense strand starting at position 2187 of SEQ ID NO: 1561771
uguagacugcugggaagaa

SEQ ID NO: 1697176 - RNA, 19 nt, Artificial Sequence
  Description of Artificial Sequence: Synthetic oligonucleotide
  Antisense strand to SEQ ID NO: 1697175
uucuucccagcagucuaca

SEQ ID NO: 1697177 - RNA, 19 nt, Artificial Sequence
  Description of Artificial Sequence: Synthetic oligonucleotide
  Sense strand starting at position 2196 of SEQ ID NO: 1561771
cugggaagaaucugugauu

SEQ ID NO: 1697178 - RNA, 19 nt, Artificial Sequence
  Description of Artificial Sequence: Synthetic oligonucleotide
  Antisense strand to SEQ ID NO: 1697177
aaucacagauucuucccag

SEQ ID NO: 1697179 - RNA, 19 nt, Artificial Sequence
  Description of Artificial Sequence: Synthetic oligonucleotide
  Sense strand starting at position 2760 of SEQ ID NO: 1561771
ggaaguagagaguaguguu

SEQ ID NO: 1697180 - RNA, 19 nt, Artificial Sequence
  Description of Artificial Sequence: Synthetic oligonucleotide
  Antisense strand to SEQ ID NO: 1697179
aacacuacucucuacuucc

SEQ ID NO: 1697181 - RNA, 19 nt, Artificial Sequence
  Description of Artificial Sequence: Synthetic oligonucleotide
  Sense strand starting at position 2788 of SEQ ID NO: 1561771
aauauuagaggcugguaau

SEQ ID NO: 1697182 - RNA, 19 nt, Artificial Sequence
  Description of Artificial Sequence: Synthetic oligonucleotide
  Antisense strand to SEQ ID NO: 1697181
auuaccagccucuaauauu

SEQ ID NO: 1697183 - RNA, 19 nt, Artificial Sequence
  Description of Artificial Sequence: Synthetic oligonucleotide
  Sense strand starting at position 3224 of SEQ ID NO: 1561771
ccacaaggaaucgauguuu

SEQ ID NO: 1697184 - RNA, 19 nt, Artificial Sequence
  Description of Artificial Sequence: Synthetic oligonucleotide
  Antisense strand to SEQ ID NO: 1697183
aaacaucgauuccuugugg

SEQ ID NO: 1697185 - RNA, 19 nt, Artificial Sequence
  Description of Artificial Sequence: Synthetic oligonucleotide
  Sense strand starting at position 3229 of SEQ ID NO: 1561771
aggaaucgauguuuaccua

SEQ ID NO: 1697186 - RNA, 19 nt, Artificial Sequence
  Description of Artificial Sequence: Synthetic oligonucleotide
  Antisense strand to SEQ ID NO: 1697185
uagguaaacaucgauuccu

SEQ ID NO: 1697187 - RNA, 19 nt, Artificial Sequence
  Description of Artificial Sequence: Synthetic oligonucleotide
  Sense strand starting at position 3232 of SEQ ID NO: 1561771
aaucgauguuuaccuagau

SEQ ID NO: 1697188 - RNA, 19 nt, Artificial Sequence
  Description of Artificial Sequence: Synthetic oligonucleotide
  Antisense strand to SEQ ID NO: 1697187
aucuagguaaacaucgauu

SEQ ID NO: 1697189 - RNA, 19 nt, Artificial Sequence
  Description of Artificial Sequence: Synthetic oligonucleotide
  Sense strand starting at position 3292 of SEQ ID NO: 1561771
ccuguuaaccacugagaug

SEQ ID NO: 1697190 - RNA, 19 nt, Artificial Sequence
  Description of Artificial Sequence: Synthetic oligonucleotide
  Antisense strand to SEQ ID NO: 1697189
caucucagugguuaacagg

SEQ ID NO: 1697191 - RNA, 19 nt, Artificial Sequence
  Description of Artificial Sequence: Synthetic oligonucleotide
  Sense strand starting at position 3569 of SEQ ID NO: 1561771
gcaaacuuuccuuauaggu

SEQ ID NO: 1697192 - RNA, 19 nt, Artificial Sequence
  Description of Artificial Sequence: Synthetic oligonucleotide
  Antisense strand to SEQ ID NO: 1697191
accuauaaggaaaguuugc

SEQ ID NO: 1697193 - RNA, 19 nt, Artificial Sequence
  Description of Artificial Sequence: Synthetic oligonucleotide
  Sense strand starting at position 3865 of SEQ ID NO: 1561771
guccuaauagaucaguagu

SEQ ID NO: 1697194 - RNA, 19 nt, Artificial Sequence
  Description of Artificial Sequence: Synthetic oligonucleotide
  Antisense strand to SEQ ID NO: 1697193
acuacugaucuauuaggac

SEQ ID NO: 1697195 - RNA, 19 nt, Artificial Sequence
  Description of Artificial Sequence: Synthetic oligonucleotide
  Sense strand starting at position 3867 of SEQ ID NO: 1561771
ccuaauagaucaguaguua

SEQ ID NO: 1697196 - RNA, 19 nt, Artificial Sequence
  Description of Artificial Sequence: Synthetic oligonucleotide
  Antisense strand to SEQ ID NO: 1697195
uaacuacugaucuauuagg

SEQ ID NO: 1697197 - RNA, 19 nt, Artificial Sequence
  Description of Artificial Sequence: Synthetic oligonucleotide
  Sense strand starting at position 3868 of SEQ ID NO: 1561771
cuaauagaucaguaguuau

SEQ ID NO: 1697198 - RNA, 19 nt, Artificial Sequence
  Description of Artificial Sequence: Synthetic oligonucleotide
  Antisense strand to SEQ ID NO: 1697197
auaacuacugaucuauuag

SEQ ID NO: 1697199 - RNA, 19 nt, Artificial Sequence
  Description of Artificial Sequence: Synthetic oligonucleotide
  Sense strand starting at position 3900 of SEQ ID NO: 1561771
ggcuuaaacucacugauua

SEQ ID NO: 1697200 - RNA, 19 nt, Artificial Sequence
  Description of Artificial Sequence: Synthetic oligonucleotide
  Antisense strand to SEQ ID NO: 1697199
uaaucagugaguuuaagcc

SEQ ID NO: 1697201 - RNA, 19 nt, Artificial Sequence
  Description of Artificial Sequence: Synthetic oligonucleotide
  Sense strand starting at position 3901 of SEQ ID NO: 1561771
gcuuaaacucacugauuag

SEQ ID NO: 1697202 - RNA, 19 nt, Artificial Sequence
  Description of Artificial Sequence: Synthetic oligonucleotide
  Antisense strand to SEQ ID NO: 1697201
cuaaucagugaguuuaagc

SEQ ID NO: 1697203 - RNA, 19 nt, Artificial Sequence
  Description of Artificial Sequence: Synthetic oligonucleotide
  Sense strand starting at position 190 of SEQ ID NO: 1561772
gggcuagauuuaggauuag

SEQ ID NO: 1697204 - RNA, 19 nt, Artificial Sequence
  Description of Artificial Sequence: Synthetic oligonucleotide
  Antisense strand to SEQ ID NO: 1697203
cuaauccuaaaucuagccc

SEQ ID NO: 1697205 - RNA, 19 nt, Artificial Sequence
  Description of Artificial Sequence: Synthetic oligonucleotide
  Sense strand starting at position 219 of SEQ ID NO: 1561772
uggugaugguggguaagau

SEQ ID NO: 1697206 - RNA, 19 nt, Artificial Sequence
  Description of Artificial Sequence: Synthetic oligonucleotide
  Antisense strand to SEQ ID NO: 1697205
aucuuacccaccaucacca

SEQ ID NO: 1697207 - RNA, 19 nt, Artificial Sequence
  Description of Artificial Sequence: Synthetic oligonucleotide
  Sense strand starting at position 238 of SEQ ID NO: 1561772
gauguaauccugcagcaca

SEQ ID NO: 1697208 - RNA, 19 nt, Artificial Sequence
  Description of Artificial Sequence: Synthetic oligonucleotide
  Antisense strand to SEQ ID NO: 1697207
ugugcugcaggauuacauc

SEQ ID NO: 1697209 - RNA, 19 nt, Artificial Sequence
  Description of Artificial Sequence: Synthetic oligonucleotide
  Sense strand starting at position 260 of SEQ ID NO: 1561772
agcuucucaccagaauguu

SEQ ID NO: 1697210 - RNA, 19 nt, Artificial Sequence
  Description of Artificial Sequence: Synthetic oligonucleotide
  Antisense strand to SEQ ID NO: 1697209
aacauucuggugagaagcu

SEQ ID NO: 1697211 - RNA, 19 nt, Artificial Sequence
  Description of Artificial Sequence: Synthetic oligonucleotide
  Sense strand starting at position 278 of SEQ ID NO: 1561772
ugauguggcuucuuaaaug

SEQ ID NO: 1697212 - RNA, 19 nt, Artificial Sequence
  Description of Artificial Sequence: Synthetic oligonucleotide
  Antisense strand to SEQ ID NO: 1697211
cauuuaagaagccacauca

SEQ ID NO: 1697213 - RNA, 19 nt, Artificial Sequence
  Description of Artificial Sequence: Synthetic oligonucleotide
  Sense strand starting at position 433 of SEQ ID NO: 1561772
cccgucugugcauaggaaa

SEQ ID NO: 1697214 - RNA, 19 nt, Artificial Sequence
  Description of Artificial Sequence: Synthetic oligonucleotide
  Antisense strand to SEQ ID NO: 1697213
uuuccuaugcacagacggg

SEQ ID NO: 1697215 - RNA, 19 nt, Artificial Sequence
  Description of Artificial Sequence: Synthetic oligonucleotide
  Sense strand starting at position 464 of SEQ ID NO: 1561772
aagguuagugcguaaggaa

SEQ ID NO: 1697216 - RNA, 19 nt, Artificial Sequence
  Description of Artificial Sequence: Synthetic oligonucleotide
  Antisense strand to SEQ ID NO: 1697215
uuccuuacgcacuaaccuu

SEQ ID NO: 1697217 - RNA, 19 nt, Artificial Sequence
  Description of Artificial Sequence: Synthetic oligonucleotide
  Sense strand starting at position 538 of SEQ ID NO: 1561772
agugaacauuaugcugaua

SEQ ID NO: 1697218 - RNA, 19 nt, Artificial Sequence
  Description of Artificial Sequence: Synthetic oligonucleotide
  Antisense strand to SEQ ID NO: 1697217
uaucagcauaauguucacu

SEQ ID NO: 1697219 - RNA, 19 nt, Artificial Sequence
  Description of Artificial Sequence: Synthetic oligonucleotide
  Sense strand starting at position 681 of SEQ ID NO: 1561772
agaacucaauuccugguua

SEQ ID NO: 1697220 - RNA, 19 nt, Artificial Sequence
  Description of Artificial Sequence: Synthetic oligonucleotide
  Antisense strand to SEQ ID NO: 1697219
uaaccaggaauugaguucu

SEQ ID NO: 1697221 - RNA, 19 nt, Artificial Sequence
  Description of Artificial Sequence: Synthetic oligonucleotide
  Sense strand starting at position 695 of SEQ ID NO: 1561772
gguuaucaaccagagccaa

SEQ ID NO: 1697222 - RNA, 19 nt, Artificial Sequence
  Description of Artificial Sequence: Synthetic oligonucleotide
  Antisense strand to SEQ ID NO: 1697221
uuggcucugguugauaacc

SEQ ID NO: 1697223 - RNA, 19 nt, Artificial Sequence
  Description of Artificial Sequence: Synthetic oligonucleotide
  Sense strand starting at position 1055 of SEQ ID NO: 1561772
aaauguguugcccagggau

SEQ ID NO: 1697224 - RNA, 19 nt, Artificial Sequence
  Description of Artificial Sequence: Synthetic oligonucleotide
  Antisense strand to SEQ ID NO: 1697223
aucccugggcaacacauuu

SEQ ID NO: 1697225 - RNA, 19 nt, Artificial Sequence
  Description of Artificial Sequence: Synthetic oligonucleotide
  Sense strand starting at position 1111 of SEQ ID NO: 1561772
auugucaccuucucagagu

SEQ ID NO: 1697226 - RNA, 19 nt, Artificial Sequence
  Description of Artificial Sequence: Synthetic oligonucleotide
  Antisense strand to SEQ ID NO: 1697225
acucugagaaggugacaau

SEQ ID NO: 1697227 - RNA, 19 nt, Artificial Sequence
  Description of Artificial Sequence: Synthetic oligonucleotide
  Sense strand starting at position 1117 of SEQ ID NO: 1561772
accuucucagaguaaugca

SEQ ID NO: 1697228 - RNA, 19 nt, Artificial Sequence
  Description of Artificial Sequence: Synthetic oligonucleotide
  Antisense strand to SEQ ID NO: 1697227
ugcauuacucugagaaggu

SEQ ID NO: 1697229 - RNA, 19 nt, Artificial Sequence
  Description of Artificial Sequence: Synthetic oligonucleotide
  Sense strand starting at position 1125 of SEQ ID NO: 1561772
agaguaaugcacugaaauu

SEQ ID NO: 1697230 - RNA, 19 nt, Artificial Sequence
  Description of Artificial Sequence: Synthetic oligonucleotide
  Antisense strand to SEQ ID NO: 1697229
aauuucagugcauuacucu

SEQ ID NO: 1697231 - RNA, 19 nt, Artificial Sequence
  Description of Artificial Sequence: Synthetic oligonucleotide
  Sense strand starting at position 1203 of SEQ ID NO: 1561772
agaauaagguuggagaaga

SEQ ID NO: 1697232 - RNA, 19 nt, Artificial Sequence
  Description of Artificial Sequence: Synthetic oligonucleotide
  Antisense strand to SEQ ID NO: 1697231
ucuucuccaaccuuauucu

SEQ ID NO: 1697233 - RNA, 19 nt, Artificial Sequence
  Description of Artificial Sequence: Synthetic oligonucleotide
  Sense strand starting at position 1260 of SEQ ID NO: 1561772
aacaucuuugaggguuaga

SEQ ID NO: 1697234 - RNA, 19 nt, Artificial Sequence
  Description of Artificial Sequence: Synthetic oligonucleotide
  Antisense strand to SEQ ID NO: 1697233
ucuaacccucaaagauguu

SEQ ID NO: 1697235 - RNA, 19 nt, Artificial Sequence
  Description of Artificial Sequence: Synthetic oligonucleotide
  Sense strand starting at position 1352 of SEQ ID NO: 1561772
gggcuucuacgaugaacuu

SEQ ID NO: 1697236 - RNA, 19 nt, Artificial Sequence
  Description of Artificial Sequence: Synthetic oligonucleotide
  Antisense strand to SEQ ID NO: 1697235
aaguucaucguagaagccc

SEQ ID NO: 1697237 - RNA, 19 nt, Artificial Sequence
  Description of Artificial Sequence: Synthetic oligonucleotide
  Sense strand starting at position 1353 of SEQ ID NO: 1561772
ggcuucuacgaugaacuuu

SEQ ID NO: 1697238 - RNA, 19 nt, Artificial Sequence
  Description of Artificial Sequence: Synthetic oligonucleotide
  Antisense strand to SEQ ID NO: 1697237
aaaguucaucguagaagcc

SEQ ID NO: 1697239 - RNA, 19 nt, Artificial Sequence
  Description of Artificial Sequence: Synthetic oligonucleotide
  Sense strand starting at position 1370 of SEQ ID NO: 1561772
uugugcuucgugcuuguaa

SEQ ID NO: 1697240 - RNA, 19 nt, Artificial Sequence
  Description of Artificial Sequence: Synthetic oligonucleotide
  Antisense strand to SEQ ID NO: 1697239
uuacaagcacgaagcacaa

SEQ ID NO: 1697241 - RNA, 19 nt, Artificial Sequence
  Description of Artificial Sequence: Synthetic oligonucleotide
  Sense strand starting at position 1373 of SEQ ID NO: 1561772
ugcuucgugcuuguaaguu

SEQ ID NO: 1697242 - RNA, 19 nt, Artificial Sequence
  Description of Artificial Sequence: Synthetic oligonucleotide
  Antisense strand to SEQ ID NO: 1697241
aacuuacaagcacgaagca

SEQ ID NO: 1697243 - RNA, 19 nt, Artificial Sequence
  Description of Artificial Sequence: Synthetic oligonucleotide
  Sense strand starting at position 1391 of SEQ ID NO: 1561772
ucauguaaccuguacauca

SEQ ID NO: 1697244 - RNA, 19 nt, Artificial Sequence
  Description of Artificial Sequence: Synthetic oligonucleotide
  Antisense strand to SEQ ID NO: 1697243
ugauguacagguuacauga

SEQ ID NO: 1697245 - RNA, 19 nt, Artificial Sequence
  Description of Artificial Sequence: Synthetic oligonucleotide
  Sense strand starting at position 1469 of SEQ ID NO: 1561772
aggaaauaaugugcuuaau

SEQ ID NO: 1697246 - RNA, 19 nt, Artificial Sequence
  Description of Artificial Sequence: Synthetic oligonucleotide
  Antisense strand to SEQ ID NO: 1697245
auuaagcacauuauuuccu

SEQ ID NO: 1697247 - RNA, 19 nt, Artificial Sequence
  Description of Artificial Sequence: Synthetic oligonucleotide
  Sense strand starting at position 1849 of SEQ ID NO: 1561772
auaguaauaucucuuagga

SEQ ID NO: 1697248 - RNA, 19 nt, Artificial Sequence
  Description of Artificial Sequence: Synthetic oligonucleotide
  Antisense strand to SEQ ID NO: 1697247
uccuaagagauauuacuau

SEQ ID NO: 1697249 - RNA, 19 nt, Artificial Sequence
  Description of Artificial Sequence: Synthetic oligonucleotide
  Sense strand starting at position 1885 of SEQ ID NO: 1561772
acaaguuaccugugaguac

SEQ ID NO: 1697250 - RNA, 19 nt, Artificial Sequence
  Description of Artificial Sequence: Synthetic oligonucleotide
  Antisense strand to SEQ ID NO: 1697249
guacucacagguaacuugu

SEQ ID NO: 1697251 - RNA, 19 nt, Artificial Sequence
  Description of Artificial Sequence: Synthetic oligonucleotide
  Sense strand starting at position 1997 of SEQ ID NO: 1561772
ugccacaggucuuuaaaga

SEQ ID NO: 1697252 - RNA, 19 nt, Artificial Sequence
  Description of Artificial Sequence: Synthetic oligonucleotide
  Antisense strand to SEQ ID NO: 1697251
ucuuuaaagaccuguggca

SEQ ID NO: 1697253 - RNA, 19 nt, Artificial Sequence
  Description of Artificial Sequence: Synthetic oligonucleotide
  Sense strand starting at position 1998 of SEQ ID NO: 1561772
gccacaggucuuuaaagau

SEQ ID NO: 1697254 - RNA, 19 nt, Artificial Sequence
  Description of Artificial Sequence: Synthetic oligonucleotide
  Antisense strand to SEQ ID NO: 1697253
aucuuuaaagaccuguggc

SEQ ID NO: 1697255 - RNA, 19 nt, Artificial Sequence
  Description of Artificial Sequence: Synthetic oligonucleotide
  Sense strand starting at position 2132 of SEQ ID NO: 1561772
cucacagucccagaauguu

SEQ ID NO: 1697256 - RNA, 19 nt, Artificial Sequence
  Description of Artificial Sequence: Synthetic oligonucleotide
  Antisense strand to SEQ ID NO: 1697255
aacauucugggacugugag

SEQ ID NO: 1697257 - RNA, 19 nt, Artificial Sequence
  Description of Artificial Sequence: Synthetic oligonucleotide
  Sense strand starting at position 2267 of SEQ ID NO: 1561772
uuggguugugugggauaau

SEQ ID NO: 1697258 - RNA, 19 nt, Artificial Sequence
  Description of Artificial Sequence: Synthetic oligonucleotide
  Antisense strand to SEQ ID NO: 1697257
auuaucccacacaacccaa

SEQ ID NO: 1697259 - RNA, 19 nt, Artificial Sequence
  Description of Artificial Sequence: Synthetic oligonucleotide
  Sense strand starting at position 2270 of SEQ ID NO: 1561772
gguugugugggauaauccu

SEQ ID NO: 1697260 - RNA, 19 nt, Artificial Sequence
  Description of Artificial Sequence: Synthetic oligonucleotide
  Antisense strand to SEQ ID NO: 1697259
aggauuaucccacacaacc

SEQ ID NO: 1697261 - RNA, 19 nt, Artificial Sequence
  Description of Artificial Sequence: Synthetic oligonucleotide
  Sense strand starting at position 2279 of SEQ ID NO: 1561772
ggauaauccugucuuauuc

SEQ ID NO: 1697262 - RNA, 19 nt, Artificial Sequence
  Description of Artificial Sequence: Synthetic oligonucleotide
  Antisense strand to SEQ ID NO: 1697261
gaauaagacaggauuaucc

SEQ ID NO: 1697263 - RNA, 19 nt, Artificial Sequence
  Description of Artificial Sequence: Synthetic oligonucleotide
  Sense strand starting at position 2362 of SEQ ID NO: 1561772
aaauuaagucauuagucga

SEQ ID NO: 1697264 - RNA, 19 nt, Artificial Sequence
  Description of Artificial Sequence: Synthetic oligonucleotide
  Antisense strand to SEQ ID NO: 1697263
ucgacuaaugacuuaauuu

SEQ ID NO: 1697265 - RNA, 19 nt, Artificial Sequence
  Description of Artificial Sequence: Synthetic oligonucleotide
  Sense strand starting at position 2369 of SEQ ID NO: 1561772
gucauuagucgacacagaa

SEQ ID NO: 1697266 - RNA, 19 nt, Artificial Sequence
  Description of Artificial Sequence: Synthetic oligonucleotide
  Antisense strand to SEQ ID NO: 1697265
uucugugucgacuaaugac

SEQ ID NO: 1697267 - RNA, 19 nt, Artificial Sequence
  Description of Artificial Sequence: Synthetic oligonucleotide
  Sense strand starting at position 2429 of SEQ ID NO: 1561772
auagucauucuaggaguaa

SEQ ID NO: 1697268 - RNA, 19 nt, Artificial Sequence
  Description of Artificial Sequence: Synthetic oligonucleotide
  Antisense strand to SEQ ID NO: 1697267
uuacuccuagaaugacuau

SEQ ID NO: 1697269 - RNA, 19 nt, Artificial Sequence
  Description of Artificial Sequence: Synthetic oligonucleotide
  Sense strand starting at position 2457 of SEQ ID NO: 1561772
uagguuuggcuagauaaau

SEQ ID NO: 1697270 - RNA, 19 nt, Artificial Sequence
  Description of Artificial Sequence: Synthetic oligonucleotide
  Antisense strand to SEQ ID NO: 1697269
auuuaucuagccaaaccua

SEQ ID NO: 1697271 - RNA, 19 nt, Artificial Sequence
  Description of Artificial Sequence: Synthetic oligonucleotide
  Sense strand starting at position 2477 of SEQ ID NO: 1561772
gauauuauuugagaguuuc

SEQ ID NO: 1697272 - RNA, 19 nt, Artificial Sequence
  Description of Artificial Sequence: Synthetic oligonucleotide
  Antisense strand to SEQ ID NO: 1697271
gaaacucucaaauaauauc

SEQ ID NO: 1697273 - RNA, 19 nt, Artificial Sequence
  Description of Artificial Sequence: Synthetic oligonucleotide
  Sense strand starting at position 2508 of SEQ ID NO: 1561772
guccaucuaguagagcaaa

SEQ ID NO: 1697274 - RNA, 19 nt, Artificial Sequence
  Description of Artificial Sequence: Synthetic oligonucleotide
  Antisense strand to SEQ ID NO: 1697273
uuugcucuacuagauggac

SEQ ID NO: 1697275 - RNA, 19 nt, Artificial Sequence
  Description of Artificial Sequence: Synthetic oligonucleotide
  Sense strand starting at position 2921 of SEQ ID NO: 1561772
uuuguuuaucugcaauagu

SEQ ID NO: 1697276 - RNA, 19 nt, Artificial Sequence
  Description of Artificial Sequence: Synthetic oligonucleotide
  Antisense strand to SEQ ID NO: 1697275
acuauugcagauaaacaaa

SEQ ID NO: 1697277 - RNA, 19 nt, Artificial Sequence
  Description of Artificial Sequence: Synthetic oligonucleotide
  Sense strand starting at position 3212 of SEQ ID NO: 1561772
cuaccugauuggucacaug

SEQ ID NO: 1697278 - RNA, 19 nt, Artificial Sequence
  Description of Artificial Sequence: Synthetic oligonucleotide
  Antisense strand to SEQ ID NO: 1697277
caugugaccaaucagguag

SEQ ID NO: 1697279 - RNA, 19 nt, Artificial Sequence
  Description of Artificial Sequence: Synthetic oligonucleotide
  Sense strand starting at position 3743 of SEQ ID NO: 1561772
aucugauaguugcuaucaa

SEQ ID NO: 1697280 - RNA, 19 nt, Artificial Sequence
  Description of Artificial Sequence: Synthetic oligonucleotide
  Antisense strand to SEQ ID NO: 1697279
uugauagcaacuaucagau

SEQ ID NO: 1697281 - RNA, 19 nt, Artificial Sequence
  Description of Artificial Sequence: Synthetic oligonucleotide
  Sense strand starting at position 3767 of SEQ ID NO: 1561772
aagugaaagguuugguaaa

SEQ ID NO: 1697282 - RNA, 19 nt, Artificial Sequence
  Description of Artificial Sequence: Synthetic oligonucleotide
  Antisense strand to SEQ ID NO: 1697281
uuuaccaaaccuuucacuu

SEQ ID NO: 1697283 - RNA, 19 nt, Artificial Sequence
  Description of Artificial Sequence: Synthetic oligonucleotide
  Sense strand starting at position 67 of SEQ ID NO: 1561773
gagagaguuuacucauacu

SEQ ID NO: 1697284 - RNA, 19 nt, Artificial Sequence
  Description of Artificial Sequence: Synthetic oligonucleotide
  Antisense strand to SEQ ID NO: 1697283
aguaugaguaaacucucuc

SEQ ID NO: 1697285 - RNA, 19 nt, Artificial Sequence
  Description of Artificial Sequence: Synthetic oligonucleotide
  Sense strand starting at position 93 of SEQ ID NO: 1561773
aagcccaguguuuaggaau

SEQ ID NO: 1697286 - RNA, 19 nt, Artificial Sequence
  Description of Artificial Sequence: Synthetic oligonucleotide
  Antisense strand to SEQ ID NO: 1697285
auuccuaaacacugggcuu

SEQ ID NO: 1697287 - RNA, 19 nt, Artificial Sequence
  Description of Artificial Sequence: Synthetic oligonucleotide
  Sense strand starting at position 99 of SEQ ID NO: 1561773
aguguuuaggaauguugau

SEQ ID NO: 1697288 - RNA, 19 nt, Artificial Sequence
  Description of Artificial Sequence: Synthetic oligonucleotide
  Antisense strand to SEQ ID NO: 1697287
aucaacauuccuaaacacu

SEQ ID NO: 1697289 - RNA, 19 nt, Artificial Sequence
  Description of Artificial Sequence: Synthetic oligonucleotide
  Sense strand starting at position 109 of SEQ ID NO: 1561773
aauguugaugaaggcaaau

SEQ ID NO: 1697290 - RNA, 19 nt, Artificial Sequence
  Description of Artificial Sequence: Synthetic oligonucleotide
  Antisense strand to SEQ ID NO: 1697289
auuugccuucaucaacauu

SEQ ID NO: 1697291 - RNA, 19 nt, Artificial Sequence
  Description of Artificial Sequence: Synthetic oligonucleotide
  Sense strand starting at position 314 of SEQ ID NO: 1561773
cuccauaaucuugggaaau

SEQ ID NO: 1697292 - RNA, 19 nt, Artificial Sequence
  Description of Artificial Sequence: Synthetic oligonucleotide
  Antisense strand to SEQ ID NO: 1697291
auuucccaagauuauggag

SEQ ID NO: 1697293 - RNA, 19 nt, Artificial Sequence
  Description of Artificial Sequence: Synthetic oligonucleotide
  Sense strand starting at position 339 of SEQ ID NO: 1561773
gagagccaaguccaucaua

SEQ ID NO: 1697294 - RNA, 19 nt, Artificial Sequence
  Description of Artificial Sequence: Synthetic oligonucleotide
  Antisense strand to SEQ ID NO: 1697293
uaugauggacuuggcucuc

SEQ ID NO: 1697295 - RNA, 19 nt, Artificial Sequence
  Description of Artificial Sequence: Synthetic oligonucleotide
  Sense strand starting at position 463 of SEQ ID NO: 1561773
cuagaucugugauuccuga

SEQ ID NO: 1697296 - RNA, 19 nt, Artificial Sequence
  Description of Artificial Sequence: Synthetic oligonucleotide
  Antisense strand to SEQ ID NO: 1697295
ucaggaaucacagaucuag

SEQ ID NO: 1697297 - RNA, 19 nt, Artificial Sequence
  Description of Artificial Sequence: Synthetic oligonucleotide
  Sense strand starting at position 572 of SEQ ID NO: 1561773
agguaacuucuguauuguu

SEQ ID NO: 1697298 - RNA, 19 nt, Artificial Sequence
  Description of Artificial Sequence: Synthetic oligonucleotide
  Antisense strand to SEQ ID NO: 1697297
aacaauacagaaguuaccu

SEQ ID NO: 1697299 - RNA, 19 nt, Artificial Sequence
  Description of Artificial Sequence: Synthetic oligonucleotide
  Sense strand starting at position 659 of SEQ ID NO: 1561773
uaaugucucguguuucuuu

SEQ ID NO: 1697300 - RNA, 19 nt, Artificial Sequence
  Description of Artificial Sequence: Synthetic oligonucleotide
  Antisense strand to SEQ ID NO: 1697299
aaagaaacacgagacauua

SEQ ID NO: 1697301 - RNA, 19 nt, Artificial Sequence
  Description of Artificial Sequence: Synthetic oligonucleotide
  Sense strand starting at position 840 of SEQ ID NO: 1561773
uggaaucagcugcauugau

SEQ ID NO: 1697302 - RNA, 19 nt, Artificial Sequence
  Description of Artificial Sequence: Synthetic oligonucleotide
  Antisense strand to SEQ ID NO: 1697301
aucaaugcagcugauucca

SEQ ID NO: 1697303 - RNA, 19 nt, Artificial Sequence
  Description of Artificial Sequence: Synthetic oligonucleotide
  Sense strand starting at position 994 of SEQ ID NO: 1561773
uuagaagcaucuuugacac

SEQ ID NO: 1697304 - RNA, 19 nt, Artificial Sequence
  Description of Artificial Sequence: Synthetic oligonucleotide
  Antisense strand to SEQ ID NO: 1697303
gugucaaagaugcuucuaa

SEQ ID NO: 1697305 - RNA, 19 nt, Artificial Sequence
  Description of Artificial Sequence: Synthetic oligonucleotide
  Sense strand starting at position 1064 of SEQ ID NO: 1561773
ugauucuuguauucugaaa

SEQ ID NO: 1697306 - RNA, 19 nt, Artificial Sequence
  Description of Artificial Sequence: Synthetic oligonucleotide
  Antisense strand to SEQ ID NO: 1697305
uuucagaauacaagaauca

SEQ ID NO: 1697307 - RNA, 19 nt, Artificial Sequence
  Description of Artificial Sequence: Synthetic oligonucleotide
  Sense strand starting at position 1159 of SEQ ID NO: 1561773
ccuagaugcccuuauggua

SEQ ID NO: 1697308 - RNA, 19 nt, Artificial Sequence
  Description of Artificial Sequence: Synthetic oligonucleotide
  Antisense strand to SEQ ID NO: 1697307
uaccauaagggcaucuagg

SEQ ID NO: 1697309 - RNA, 19 nt, Artificial Sequence
  Description of Artificial Sequence: Synthetic oligonucleotide
  Sense strand starting at position 1203 of SEQ ID NO: 1561773
gucugagagaagcgauaaa

SEQ ID NO: 1697310 - RNA, 19 nt, Artificial Sequence
  Description of Artificial Sequence: Synthetic oligonucleotide
  Antisense strand to SEQ ID NO: 1697309
uuuaucgcuucucucagac

SEQ ID NO: 1697311 - RNA, 19 nt, Artificial Sequence
  Description of Artificial Sequence: Synthetic oligonucleotide
  Sense strand starting at position 1265 of SEQ ID NO: 1561773
cuguuuacuugaucuugaa

SEQ ID NO: 1697312 - RNA, 19 nt, Artificial Sequence
  Description of Artificial Sequence: Synthetic oligonucleotide
  Antisense strand to SEQ ID NO: 1697311
uucaagaucaaguaaacag

SEQ ID NO: 1697313 - RNA, 19 nt, Artificial Sequence
  Description of Artificial Sequence: Synthetic oligonucleotide
  Sense strand starting at position 1306 of SEQ ID NO: 1561773
ggaagaacuuccuccuuuc

SEQ ID NO: 1697314 - RNA, 19 nt, Artificial Sequence
  Description of Artificial Sequence: Synthetic oligonucleotide
  Antisense strand to SEQ ID NO: 1697313
gaaaggaggaaguucuucc

SEQ ID NO: 1697315 - RNA, 19 nt, Artificial Sequence
  Description of Artificial Sequence: Synthetic oligonucleotide
  Sense strand starting at position 1594 of SEQ ID NO: 1561773
ggagguagaccugggcuua

SEQ ID NO: 1697316 - RNA, 19 nt, Artificial Sequence
  Description of Artificial Sequence: Synthetic oligonucleotide
  Antisense strand to SEQ ID NO: 1697315
uaagcccaggucuaccucc

SEQ ID NO: 1697317 - RNA, 19 nt, Artificial Sequence
  Description of Artificial Sequence: Synthetic oligonucleotide
  Sense strand starting at position 1610 of SEQ ID NO: 1561773
uuagucuuagcaugauaga

SEQ ID NO: 1697318 - RNA, 19 nt, Artificial Sequence
  Description of Artificial Sequence: Synthetic oligonucleotide
  Antisense strand to SEQ ID NO: 1697317
ucuaucaugcuaagacuaa

SEQ ID NO: 1697319 - RNA, 19 nt, Artificial Sequence
  Description of Artificial Sequence: Synthetic oligonucleotide
  Sense strand starting at position 1611 of SEQ ID NO: 1561773
uagucuuagcaugauagac

SEQ ID NO: 1697320 - RNA, 19 nt, Artificial Sequence
  Description of Artificial Sequence: Synthetic oligonucleotide
  Antisense strand to SEQ ID NO: 1697319
gucuaucaugcuaagacua

SEQ ID NO: 1697321 - RNA, 19 nt, Artificial Sequence
  Description of Artificial Sequence: Synthetic oligonucleotide
  Sense strand starting at position 1659 of SEQ ID NO: 1561773
uuuggauaguuucugaaua

SEQ ID NO: 1697322 - RNA, 19 nt, Artificial Sequence
  Description of Artificial Sequence: Synthetic oligonucleotide
  Antisense strand to SEQ ID NO: 1697321
uauucagaaacuauccaaa

SEQ ID NO: 1697323 - RNA, 19 nt, Artificial Sequence
  Description of Artificial Sequence: Synthetic oligonucleotide
  Sense strand starting at position 1713 of SEQ ID NO: 1561773
gguguuuccacuggacaca

SEQ ID NO: 1697324 - RNA, 19 nt, Artificial Sequence
  Description of Artificial Sequence: Synthetic oligonucleotide
  Antisense strand to SEQ ID NO: 1697323
uguguccaguggaaacacc

SEQ ID NO: 1697325 - RNA, 19 nt, Artificial Sequence
  Description of Artificial Sequence: Synthetic oligonucleotide
  Sense strand starting at position 1745 of SEQ ID NO: 1561773
ggccuaugagaauguauca

SEQ ID NO: 1697326 - RNA, 19 nt, Artificial Sequence
  Description of Artificial Sequence: Synthetic oligonucleotide
  Antisense strand to SEQ ID NO: 1697325
ugauacauucucauaggcc

SEQ ID NO: 1697327 - RNA, 19 nt, Artificial Sequence
  Description of Artificial Sequence: Synthetic oligonucleotide
  Sense strand starting at position 1752 of SEQ ID NO: 1561773
gagaauguaucagugcaug

SEQ ID NO: 1697328 - RNA, 19 nt, Artificial Sequence
  Description of Artificial Sequence: Synthetic oligonucleotide
  Antisense strand to SEQ ID NO: 1697327
caugcacugauacauucuc

SEQ ID NO: 1697329 - RNA, 19 nt, Artificial Sequence
  Description of Artificial Sequence: Synthetic oligonucleotide
  Sense strand starting at position 1755 of SEQ ID NO: 1561773
aauguaucagugcaugacu

SEQ ID NO: 1697330 - RNA, 19 nt, Artificial Sequence
  Description of Artificial Sequence: Synthetic oligonucleotide
  Antisense strand to SEQ ID NO: 1697329
agucaugcacugauacauu

SEQ ID NO: 1697331 - RNA, 19 nt, Artificial Sequence
  Description of Artificial Sequence: Synthetic oligonucleotide
  Sense strand starting at position 1758 of SEQ ID NO: 1561773
guaucagugcaugacugau

SEQ ID NO: 1697332 - RNA, 19 nt, Artificial Sequence
  Description of Artificial Sequence: Synthetic oligonucleotide
  Antisense strand to SEQ ID NO: 1697331
aucagucaugcacugauac

SEQ ID NO: 1697333 - RNA, 19 nt, Artificial Sequence
  Description of Artificial Sequence: Synthetic oligonucleotide
  Sense strand starting at position 1992 of SEQ ID NO: 1561773
ccuugaaucuggguugaug

SEQ ID NO: 1697334 - RNA, 19 nt, Artificial Sequence
  Description of Artificial Sequence: Synthetic oligonucleotide
  Antisense strand to SEQ ID NO: 1697333
caucaacccagauucaagg

SEQ ID NO: 1697335 - RNA, 19 nt, Artificial Sequence
  Description of Artificial Sequence: Synthetic oligonucleotide
  Sense strand starting at position 2171 of SEQ ID NO: 1561773
gcucuugauccuggaggaa

SEQ ID NO: 1697336 - RNA, 19 nt, Artificial Sequence
  Description of Artificial Sequence: Synthetic oligonucleotide
  Antisense strand to SEQ ID NO: 1697335
uuccuccaggaucaagagc

SEQ ID NO: 1697337 - RNA, 19 nt, Artificial Sequence
  Description of Artificial Sequence: Synthetic oligonucleotide
  Sense strand starting at position 2199 of SEQ ID NO: 1561773
uagguaagaugagaaagaa

SEQ ID NO: 1697338 - RNA, 19 nt, Artificial Sequence
  Description of Artificial Sequence: Synthetic oligonucleotide
  Antisense strand to SEQ ID NO: 1697337
uucuuucucaucuuaccua

SEQ ID NO: 1697339 - RNA, 19 nt, Artificial Sequence
  Description of Artificial Sequence: Synthetic oligonucleotide
  Sense strand starting at position 2541 of SEQ ID NO: 1561773
gucgcaugucucuuucuua

SEQ ID NO: 1697340 - RNA, 19 nt, Artificial Sequence
  Description of Artificial Sequence: Synthetic oligonucleotide
  Antisense strand to SEQ ID NO: 1697339
uaagaaagagacaugcgac

SEQ ID NO: 1697341 - RNA, 19 nt, Artificial Sequence
  Description of Artificial Sequence: Synthetic oligonucleotide
  Sense strand starting at position 2571 of SEQ ID NO: 1561773
ggauaagaguuagauauuu

SEQ ID NO: 1697342 - RNA, 19 nt, Artificial Sequence
  Description of Artificial Sequence: Synthetic oligonucleotide
  Antisense strand to SEQ ID NO: 1697341
aaauaucuaacucuuaucc

SEQ ID NO: 1697343 - RNA, 19 nt, Artificial Sequence
  Description of Artificial Sequence: Synthetic oligonucleotide
  Sense strand starting at position 2627 of SEQ ID NO: 1561773
cacuuagugcaugagaauu

SEQ ID NO: 1697344 - RNA, 19 nt, Artificial Sequence
  Description of Artificial Sequence: Synthetic oligonucleotide
  Antisense strand to SEQ ID NO: 1697343
aauucucaugcacuaagug

SEQ ID NO: 1697345 - RNA, 19 nt, Artificial Sequence
  Description of Artificial Sequence: Synthetic oligonucleotide
  Sense strand starting at position 2724 of SEQ ID NO: 1561773
auacaaagucaguacguuu

SEQ ID NO: 1697346 - RNA, 19 nt, Artificial Sequence
  Description of Artificial Sequence: Synthetic oligonucleotide
  Antisense strand to SEQ ID NO: 1697345
aaacguacugacuuuguau

SEQ ID NO: 1697347 - RNA, 19 nt, Artificial Sequence
  Description of Artificial Sequence: Synthetic oligonucleotide
  Sense strand starting at position 3500 of SEQ ID NO: 1561773
agcugauugauccaggugu

SEQ ID NO: 1697348 - RNA, 19 nt, Artificial Sequence
  Description of Artificial Sequence: Synthetic oligonucleotide
  Antisense strand to SEQ ID NO: 1697347
acaccuggaucaaucagcu

SEQ ID NO: 1697349 - RNA, 19 nt, Artificial Sequence
  Description of Artificial Sequence: Synthetic oligonucleotide
  Sense strand starting at position 3502 of SEQ ID NO: 1561773
cugauugauccagguguaa

SEQ ID NO: 1697350 - RNA, 19 nt, Artificial Sequence
  Description of Artificial Sequence: Synthetic oligonucleotide
  Antisense strand to SEQ ID NO: 1697349
uuacaccuggaucaaucag

SEQ ID NO: 1697351 - RNA, 19 nt, Artificial Sequence
  Description of Artificial Sequence: Synthetic oligonucleotide
  Sense strand starting at position 3506 of SEQ ID NO: 1561773
uugauccagguguaacaau

SEQ ID NO: 1697352 - RNA, 19 nt, Artificial Sequence
  Description of Artificial Sequence: Synthetic oligonucleotide
  Antisense strand to SEQ ID NO: 1697351
auuguuacaccuggaucaa

SEQ ID NO: 1697353 - RNA, 19 nt, Artificial Sequence
  Description of Artificial Sequence: Synthetic oligonucleotide
  Sense strand starting at position 3565 of SEQ ID NO: 1561773
ugggacauuuccuaagaaa

SEQ ID NO: 1697354 - RNA, 19 nt, Artificial Sequence
  Description of Artificial Sequence: Synthetic oligonucleotide
  Antisense strand to SEQ ID NO: 1697353
uuucuuaggaaauguccca

SEQ ID NO: 1697355 - RNA, 19 nt, Artificial Sequence
  Description of Artificial Sequence: Synthetic oligonucleotide
  Sense strand starting at position 3601 of SEQ ID NO: 1561773
auuggcucugaauauuauu

SEQ ID NO: 1697356 - RNA, 19 nt, Artificial Sequence
  Description of Artificial Sequence: Synthetic oligonucleotide
  Antisense strand to SEQ ID NO: 1697355
aauaauauucagagccaau

SEQ ID NO: 1697357 - RNA, 19 nt, Artificial Sequence
  Description of Artificial Sequence: Synthetic oligonucleotide
  Sense strand starting at position 3881 of SEQ ID NO: 1561773
ggaaucaguuaauccugaa

SEQ ID NO: 1697358 - RNA, 19 nt, Artificial Sequence
  Description of Artificial Sequence: Synthetic oligonucleotide
  Antisense strand to SEQ ID NO: 1697357
uucaggauuaacugauucc

SEQ ID NO: 1697359 - RNA, 19 nt, Artificial Sequence
  Description of Artificial Sequence: Synthetic oligonucleotide
  Sense strand starting at position 3888 of SEQ ID NO: 1561773
guuaauccugaauaucgca

SEQ ID NO: 1697360 - RNA, 19 nt, Artificial Sequence
  Description of Artificial Sequence: Synthetic oligonucleotide
  Antisense strand to SEQ ID NO: 1697359
ugcgauauucaggauuaac

SEQ ID NO: 1697361 - RNA, 19 nt, Artificial Sequence
  Description of Artificial Sequence: Synthetic oligonucleotide
  Sense strand starting at position 3895 of SEQ ID NO: 1561773
cugaauaucgcauauuaau

SEQ ID NO: 1697362 - RNA, 19 nt, Artificial Sequence
  Description of Artificial Sequence: Synthetic oligonucleotide
  Antisense strand to SEQ ID NO: 1697361
auuaauaugcgauauucag

SEQ ID NO: 1697363 - RNA, 19 nt, Artificial Sequence
  Description of Artificial Sequence: Synthetic oligonucleotide
  Sense strand starting at position 681 of SEQ ID NO: 1561774
cagagaagucaugguuaga

SEQ ID NO: 1697364 - RNA, 19 nt, Artificial Sequence
  Description of Artificial Sequence: Synthetic oligonucleotide
  Antisense strand to SEQ ID NO: 1697363
ucuaaccaugacuucucug

SEQ ID NO: 1697365 - RNA, 19 nt, Artificial Sequence
  Description of Artificial Sequence: Synthetic oligonucleotide
  Sense strand starting at position 726 of SEQ ID NO: 1561774
gcgccagaugggaguguuu

SEQ ID NO: 1697366 - RNA, 19 nt, Artificial Sequence
  Description of Artificial Sequence: Synthetic oligonucleotide
  Antisense strand to SEQ ID NO: 1697365
aaacacucccaucuggcgc

SEQ ID NO: 1697367 - RNA, 19 nt, Artificial Sequence
  Description of Artificial Sequence: Synthetic oligonucleotide
  Sense strand starting at position 757 of SEQ ID NO: 1561774
ugagguguauccuuaggau

SEQ ID NO: 1697368 - RNA, 19 nt, Artificial Sequence
  Description of Artificial Sequence: Synthetic oligonucleotide
  Antisense strand to SEQ ID NO: 1697367
auccuaaggauacaccuca

SEQ ID NO: 1697369 - RNA, 19 nt, Artificial Sequence
  Description of Artificial Sequence: Synthetic oligonucleotide
  Sense strand starting at position 770 of SEQ ID NO: 1561774
uaggauguugugcaaauga

SEQ ID NO: 1697370 - RNA, 19 nt, Artificial Sequence
  Description of Artificial Sequence: Synthetic oligonucleotide
  Antisense strand to SEQ ID NO: 1697369
ucauuugcacaacauccua

SEQ ID NO: 1697371 - RNA, 19 nt, Artificial Sequence
  Description of Artificial Sequence: Synthetic oligonucleotide
  Sense strand starting at position 1041 of SEQ ID NO: 1561774
agguguuucuaccuuacuu

SEQ ID NO: 1697372 - RNA, 19 nt, Artificial Sequence
  Description of Artificial Sequence: Synthetic oligonucleotide
  Antisense strand to SEQ ID NO: 1697371
aaguaagguagaaacaccu

SEQ ID NO: 1697373 - RNA, 19 nt, Artificial Sequence
  Description of Artificial Sequence: Synthetic oligonucleotide
  Sense strand starting at position 1113 of SEQ ID NO: 1561774
ggagucaaaucuuucucca

SEQ ID NO: 1697374 - RNA, 19 nt, Artificial Sequence
  Description of Artificial Sequence: Synthetic oligonucleotide
  Antisense strand to SEQ ID NO: 1697373
uggagaaagauuugacucc

SEQ ID NO: 1697375 - RNA, 19 nt, Artificial Sequence
  Description of Artificial Sequence: Synthetic oligonucleotide
  Sense strand starting at position 1477 of SEQ ID NO: 1561774
gccagcugucuguugagca

SEQ ID NO: 1697376 - RNA, 19 nt, Artificial Sequence
  Description of Artificial Sequence: Synthetic oligonucleotide
  Antisense strand to SEQ ID NO: 1697375
ugcucaacagacagcuggc

SEQ ID NO: 1697377 - RNA, 19 nt, Artificial Sequence
  Description of Artificial Sequence: Synthetic oligonucleotide
  Sense strand starting at position 1484 of SEQ ID NO: 1561774
gucuguugagcauagggau

SEQ ID NO: 1697378 - RNA, 19 nt, Artificial Sequence
  Description of Artificial Sequence: Synthetic oligonucleotide
  Antisense strand to SEQ ID NO: 1697377
aucccuaugcucaacagac

SEQ ID NO: 1697379 - RNA, 19 nt, Artificial Sequence
  Description of Artificial Sequence: Synthetic oligonucleotide
  Sense strand starting at position 1601 of SEQ ID NO: 1561774
ugugucuuaggagguuaga

SEQ ID NO: 1697380 - RNA, 19 nt, Artificial Sequence
  Description of Artificial Sequence: Synthetic oligonucleotide
  Antisense strand to SEQ ID NO: 1697379
ucuaaccuccuaagacaca

SEQ ID NO: 1697381 - RNA, 19 nt, Artificial Sequence
  Description of Artificial Sequence: Synthetic oligonucleotide
  Sense strand starting at position 1662 of SEQ ID NO: 1561774
gguugagggugacuaucau

SEQ ID NO: 1697382 - RNA, 19 nt, Artificial Sequence
  Description of Artificial Sequence: Synthetic oligonucleotide
  Antisense strand to SEQ ID NO: 1697381
augauagucacccucaacc

SEQ ID NO: 1697383 - RNA, 19 nt, Artificial Sequence
  Description of Artificial Sequence: Synthetic oligonucleotide
  Sense strand starting at position 1733 of SEQ ID NO: 1561774
gugggauaucaaggcuagu

SEQ ID NO: 1697384 - RNA, 19 nt, Artificial Sequence
  Description of Artificial Sequence: Synthetic oligonucleotide
  Antisense strand to SEQ ID NO: 1697383
acuagccuugauaucccac

SEQ ID NO: 1697385 - RNA, 19 nt, Artificial Sequence
  Description of Artificial Sequence: Synthetic oligonucleotide
  Sense strand starting at position 1763 of SEQ ID NO: 1561774
ggagaucucuaccuuagac

SEQ ID NO: 1697386 - RNA, 19 nt, Artificial Sequence
  Description of Artificial Sequence: Synthetic oligonucleotide
  Antisense strand to SEQ ID NO: 1697385
gucuaagguagagaucucc

SEQ ID NO: 1697387 - RNA, 19 nt, Artificial Sequence
  Description of Artificial Sequence: Synthetic oligonucleotide
  Sense strand starting at position 1891 of SEQ ID NO: 1561774
uccaguuuaccugggauca

SEQ ID NO: 1697388 - RNA, 19 nt, Artificial Sequence
  Description of Artificial Sequence: Synthetic oligonucleotide
  Antisense strand to SEQ ID NO: 1697387
ugaucccagguaaacugga

SEQ ID NO: 1697389 - RNA, 19 nt, Artificial Sequence
  Description of Artificial Sequence: Synthetic oligonucleotide
  Sense strand starting at position 2024 of SEQ ID NO: 1561774
uggagcuacugccuuuaua

SEQ ID NO: 1697390 - RNA, 19 nt, Artificial Sequence
  Description of Artificial Sequence: Synthetic oligonucleotide
  Antisense strand to SEQ ID NO: 1697389
uauaaaggcaguagcucca

SEQ ID NO: 1697391 - RNA, 19 nt, Artificial Sequence
  Description of Artificial Sequence: Synthetic oligonucleotide
  Sense strand starting at position 2090 of SEQ ID NO: 1561774
uucuguuacccagagcagu

SEQ ID NO: 1697392 - RNA, 19 nt, Artificial Sequence
  Description of Artificial Sequence: Synthetic oligonucleotide
  Antisense strand to SEQ ID NO: 1697391
acugcucuggguaacagaa

SEQ ID NO: 1697393 - RNA, 19 nt, Artificial Sequence
  Description of Artificial Sequence: Synthetic oligonucleotide
  Sense strand starting at position 2148 of SEQ ID NO: 1561774
ugauuuauugagcgccugu

SEQ ID NO: 1697394 - RNA, 19 nt, Artificial Sequence
  Description of Artificial Sequence: Synthetic oligonucleotide
  Antisense strand to SEQ ID NO: 1697393
acaggcgcucaauaaauca

SEQ ID NO: 1697395 - RNA, 19 nt, Artificial Sequence
  Description of Artificial Sequence: Synthetic oligonucleotide
  Sense strand starting at position 2290 of SEQ ID NO: 1561774
guuguugcugggaguguua

SEQ ID NO: 1697396 - RNA, 19 nt, Artificial Sequence
  Description of Artificial Sequence: Synthetic oligonucleotide
  Antisense strand to SEQ ID NO: 1697395
uaacacucccagcaacaac

SEQ ID NO: 1697397 - RNA, 19 nt, Artificial Sequence
  Description of Artificial Sequence: Synthetic oligonucleotide
  Sense strand starting at position 2299 of SEQ ID NO: 1561774
gggaguguuaauugguaca

SEQ ID NO: 1697398 - RNA, 19 nt, Artificial Sequence
  Description of Artificial Sequence: Synthetic oligonucleotide
  Antisense strand to SEQ ID NO: 1697397
uguaccaauuaacacuccc

SEQ ID NO: 1697399 - RNA, 19 nt, Artificial Sequence
  Description of Artificial Sequence: Synthetic oligonucleotide
  Sense strand starting at position 2301 of SEQ ID NO: 1561774
gaguguuaauugguacagu

SEQ ID NO: 1697400 - RNA, 19 nt, Artificial Sequence
  Description of Artificial Sequence: Synthetic oligonucleotide
  Antisense strand to SEQ ID NO: 1697399
acuguaccaauuaacacuc

SEQ ID NO: 1697401 - RNA, 19 nt, Artificial Sequence
  Description of Artificial Sequence: Synthetic oligonucleotide
  Sense strand starting at position 2586 of SEQ ID NO: 1561774
gcuacaagauaugcaucua

SEQ ID NO: 1697402 - RNA, 19 nt, Artificial Sequence
  Description of Artificial Sequence: Synthetic oligonucleotide
  Antisense strand to SEQ ID NO: 1697401
uagaugcauaucuuguagc

SEQ ID NO: 1697403 - RNA, 19 nt, Artificial Sequence
  Description of Artificial Sequence: Synthetic oligonucleotide
  Sense strand starting at position 2641 of SEQ ID NO: 1561774
ccaacauauguagguauau

SEQ ID NO: 1697404 - RNA, 19 nt, Artificial Sequence
  Description of Artificial Sequence: Synthetic oligonucleotide
  Antisense strand to SEQ ID NO: 1697403
auauaccuacauauguugg

SEQ ID NO: 1697405 - RNA, 19 nt, Artificial Sequence
  Description of Artificial Sequence: Synthetic oligonucleotide
  Sense strand starting at position 2653 of SEQ ID NO: 1561774
gguauauauguauguagua

SEQ ID NO: 1697406 - RNA, 19 nt, Artificial Sequence
  Description of Artificial Sequence: Synthetic oligonucleotide
  Antisense strand to SEQ ID NO: 1697405
uacuacauacauauauacc

SEQ ID NO: 1697407 - RNA, 19 nt, Artificial Sequence
  Description of Artificial Sequence: Synthetic oligonucleotide
  Sense strand starting at position 2873 of SEQ ID NO: 1561774
gcuuucuuucccuagaguu

SEQ ID NO: 1697408 - RNA, 19 nt, Artificial Sequence
  Description of Artificial Sequence: Synthetic oligonucleotide
  Antisense strand to SEQ ID NO: 1697407
aacucuagggaaagaaagc

SEQ ID NO: 1697409 - RNA, 19 nt, Artificial Sequence
  Description of Artificial Sequence: Synthetic oligonucleotide
  Sense strand starting at position 2875 of SEQ ID NO: 1561774
uuucuuucccuagaguuua

SEQ ID NO: 1697410 - RNA, 19 nt, Artificial Sequence
  Description of Artificial Sequence: Synthetic oligonucleotide
  Antisense strand to SEQ ID NO: 1697409
uaaacucuagggaaagaaa

SEQ ID NO: 1697411 - RNA, 19 nt, Artificial Sequence
  Description of Artificial Sequence: Synthetic oligonucleotide
  Sense strand starting at position 2893 of SEQ ID NO: 1561774
aagguuucuggaggcuaga

SEQ ID NO: 1697412 - RNA, 19 nt, Artificial Sequence
  Description of Artificial Sequence: Synthetic oligonucleotide
  Antisense strand to SEQ ID NO: 1697411
ucuagccuccagaaaccuu

SEQ ID NO: 1697413 - RNA, 19 nt, Artificial Sequence
  Description of Artificial Sequence: Synthetic oligonucleotide
  Sense strand starting at position 2906 of SEQ ID NO: 1561774
gcuagagacuuugccauuu

SEQ ID NO: 1697414 - RNA, 19 nt, Artificial Sequence
  Description of Artificial Sequence: Synthetic oligonucleotide
  Antisense strand to SEQ ID NO: 1697413
aaauggcaaagucucuagc

SEQ ID NO: 1697415 - RNA, 19 nt, Artificial Sequence
  Description of Artificial Sequence: Synthetic oligonucleotide
  Sense strand starting at position 2979 of SEQ ID NO: 1561774
ggagucuguuucccauuga

SEQ ID NO: 1697416 - RNA, 19 nt, Artificial Sequence
  Description of Artificial Sequence: Synthetic oligonucleotide
  Antisense strand to SEQ ID NO: 1697415
ucaaugggaaacagacucc

SEQ ID NO: 1697417 - RNA, 19 nt, Artificial Sequence
  Description of Artificial Sequence: Synthetic oligonucleotide
  Sense strand starting at position 2983 of SEQ ID NO: 1561774
ucuguuucccauugagaca

SEQ ID NO: 1697418 - RNA, 19 nt, Artificial Sequence
  Description of Artificial Sequence: Synthetic oligonucleotide
  Antisense strand to SEQ ID NO: 1697417
ugucucaaugggaaacaga

SEQ ID NO: 1697419 - RNA, 19 nt, Artificial Sequence
  Description of Artificial Sequence: Synthetic oligonucleotide
  Sense strand starting at position 3064 of SEQ ID NO: 1561774
agggaauaaucuccggagu

SEQ ID NO: 1697420 - RNA, 19 nt, Artificial Sequence
  Description of Artificial Sequence: Synthetic oligonucleotide
  Antisense strand to SEQ ID NO: 1697419
acuccggagauuauucccu

SEQ ID NO: 1697421 - RNA, 19 nt, Artificial Sequence
  Description of Artificial Sequence: Synthetic oligonucleotide
  Sense strand starting at position 3065 of SEQ ID NO: 1561774
gggaauaaucuccggaguc

SEQ ID NO: 1697422 - RNA, 19 nt, Artificial Sequence
  Description of Artificial Sequence: Synthetic oligonucleotide
  Antisense strand to SEQ ID NO: 1697421
gacuccggagauuauuccc

SEQ ID NO: 1697423 - RNA, 19 nt, Artificial Sequence
  Description of Artificial Sequence: Synthetic oligonucleotide
  Sense strand starting at position 3067 of SEQ ID NO: 1561774
gaauaaucuccggaguccu

SEQ ID NO: 1697424 - RNA, 19 nt, Artificial Sequence
  Description of Artificial Sequence: Synthetic oligonucleotide
  Antisense strand to SEQ ID NO: 1697423
aggacuccggagauuauuc

SEQ ID NO: 1697425 - RNA, 19 nt, Artificial Sequence
  Description of Artificial Sequence: Synthetic oligonucleotide
  Sense strand starting at position 3194 of SEQ ID NO: 1561774
ugguaagaauaugucccaa

SEQ ID NO: 1697426 - RNA, 19 nt, Artificial Sequence
  Description of Artificial Sequence: Synthetic oligonucleotide
  Antisense strand to SEQ ID NO: 1697425
uugggacauauucuuacca

SEQ ID NO: 1697427 - RNA, 19 nt, Artificial Sequence
  Description of Artificial Sequence: Synthetic oligonucleotide
  Sense strand starting at position 3196 of SEQ ID NO: 1561774
guaagaauaugucccaaga

SEQ ID NO: 1697428 - RNA, 19 nt, Artificial Sequence
  Description of Artificial Sequence: Synthetic oligonucleotide
  Antisense strand to SEQ ID NO: 1697427
ucuugggacauauucuuac

SEQ ID NO: 1697429 - RNA, 19 nt, Artificial Sequence
  Description of Artificial Sequence: Synthetic oligonucleotide
  Sense strand starting at position 3224 of SEQ ID NO: 1561774
ucuuuacagucacucagau

SEQ ID NO: 1697430 - RNA, 19 nt, Artificial Sequence
  Description of Artificial Sequence: Synthetic oligonucleotide
  Antisense strand to SEQ ID NO: 1697429
aucugagugacuguaaaga

SEQ ID NO: 1697431 - RNA, 19 nt, Artificial Sequence
  Description of Artificial Sequence: Synthetic oligonucleotide
  Sense strand starting at position 3465 of SEQ ID NO: 1561774
caguccauuggaugucaua

SEQ ID NO: 1697432 - RNA, 19 nt, Artificial Sequence
  Description of Artificial Sequence: Synthetic oligonucleotide
  Antisense strand to SEQ ID NO: 1697431
uaugacauccaauggacug

SEQ ID NO: 1697433 - RNA, 19 nt, Artificial Sequence
  Description of Artificial Sequence: Synthetic oligonucleotide
  Sense strand starting at position 3718 of SEQ ID NO: 1561774
gaaucuauugagcauaagu

SEQ ID NO: 1697434 - RNA, 19 nt, Artificial Sequence
  Description of Artificial Sequence: Synthetic oligonucleotide
  Antisense strand to SEQ ID NO: 1697433
acuuaugcucaauagauuc

SEQ ID NO: 1697435 - RNA, 19 nt, Artificial Sequence
  Description of Artificial Sequence: Synthetic oligonucleotide
  Sense strand starting at position 3720 of SEQ ID NO: 1561774
aucuauugagcauaaguua

SEQ ID NO: 1697436 - RNA, 19 nt, Artificial Sequence
  Description of Artificial Sequence: Synthetic oligonucleotide
  Antisense strand to SEQ ID NO: 1697435
uaacuuaugcucaauagau

SEQ ID NO: 1697437 - RNA, 19 nt, Artificial Sequence
  Description of Artificial Sequence: Synthetic oligonucleotide
  Sense strand starting at position 3806 of SEQ ID NO: 1561774
uagggauauucuccuguau

SEQ ID NO: 1697438 - RNA, 19 nt, Artificial Sequence
  Description of Artificial Sequence: Synthetic oligonucleotide
  Antisense strand to SEQ ID NO: 1697437
auacaggagaauaucccua

SEQ ID NO: 1697439 - RNA, 19 nt, Artificial Sequence
  Description of Artificial Sequence: Synthetic oligonucleotide
  Sense strand starting at position 3818 of SEQ ID NO: 1561774
ccuguaugacaguauaguu

SEQ ID NO: 1697440 - RNA, 19 nt, Artificial Sequence
  Description of Artificial Sequence: Synthetic oligonucleotide
  Antisense strand to SEQ ID NO: 1697439
aacuauacugucauacagg

SEQ ID NO: 1697441 - RNA, 19 nt, Artificial Sequence
  Description of Artificial Sequence: Synthetic oligonucleotide
  Sense strand starting at position 3823 of SEQ ID NO: 1561774
augacaguauaguuacuaa

SEQ ID NO: 1697442 - RNA, 19 nt, Artificial Sequence
  Description of Artificial Sequence: Synthetic oligonucleotide
  Antisense strand to SEQ ID NO: 1697441
uuaguaacuauacugucau

SEQ ID NO: 1697443 - RNA, 19 nt, Artificial Sequence
  Description of Artificial Sequence: Synthetic oligonucleotide
  Sense strand starting at position 36 of SEQ ID NO: 1561775
ucacacugcucuguuauuu

SEQ ID NO: 1697444 - RNA, 19 nt, Artificial Sequence
  Description of Artificial Sequence: Synthetic oligonucleotide
  Antisense strand to SEQ ID NO: 1697443
aaauaacagagcaguguga

SEQ ID NO: 1697445 - RNA, 19 nt, Artificial Sequence
  Description of Artificial Sequence: Synthetic oligonucleotide
  Sense strand starting at position 55 of SEQ ID NO: 1561775
uggcuuucuggacauucua

SEQ ID NO: 1697446 - RNA, 19 nt, Artificial Sequence
  Description of Artificial Sequence: Synthetic oligonucleotide
  Antisense strand to SEQ ID NO: 1697445
uagaauguccagaaagcca

SEQ ID NO: 1697447 - RNA, 19 nt, Artificial Sequence
  Description of Artificial Sequence: Synthetic oligonucleotide
  Sense strand starting at position 108 of SEQ ID NO: 1561775
gcacccuuugcuucgaguu

SEQ ID NO: 1697448 - RNA, 19 nt, Artificial Sequence
  Description of Artificial Sequence: Synthetic oligonucleotide
  Antisense strand to SEQ ID NO: 1697447
aacucgaagcaaagggugc

SEQ ID NO: 1697449 - RNA, 19 nt, Artificial Sequence
  Description of Artificial Sequence: Synthetic oligonucleotide
  Sense strand starting at position 278 of SEQ ID NO: 1561775
uccuguuguguguuauucu

SEQ ID NO: 1697450 - RNA, 19 nt, Artificial Sequence
  Description of Artificial Sequence: Synthetic oligonucleotide
  Antisense strand to SEQ ID NO: 1697449
agaauaacacacaacagga

SEQ ID NO: 1697451 - RNA, 19 nt, Artificial Sequence
  Description of Artificial Sequence: Synthetic oligonucleotide
  Sense strand starting at position 561 of SEQ ID NO: 1561775
aucuguauuugucuccuga

SEQ ID NO: 1697452 - RNA, 19 nt, Artificial Sequence
  Description of Artificial Sequence: Synthetic oligonucleotide
  Antisense strand to SEQ ID NO: 1697451
ucaggagacaaauacagau

SEQ ID NO: 1697453 - RNA, 19 nt, Artificial Sequence
  Description of Artificial Sequence: Synthetic oligonucleotide
  Sense strand starting at position 563 of SEQ ID NO: 1561775
cuguauuugucuccugaac

SEQ ID NO: 1697454 - RNA, 19 nt, Artificial Sequence
  Description of Artificial Sequence: Synthetic oligonucleotide
  Antisense strand to SEQ ID NO: 1697453
guucaggagacaaauacag

SEQ ID NO: 1697455 - RNA, 19 nt, Artificial Sequence
  Description of Artificial Sequence: Synthetic oligonucleotide
  Sense strand starting at position 674 of SEQ ID NO: 1561775
auaguacccuggucugauu

SEQ ID NO: 1697456 - RNA, 19 nt, Artificial Sequence
  Description of Artificial Sequence: Synthetic oligonucleotide
  Antisense strand to SEQ ID NO: 1697455
aaucagaccaggguacuau

SEQ ID NO: 1697457 - RNA, 19 nt, Artificial Sequence
  Description of Artificial Sequence: Synthetic oligonucleotide
  Sense strand starting at position 815 of SEQ ID NO: 1561775
auggauaauuggcugauga

SEQ ID NO: 1697458 - RNA, 19 nt, Artificial Sequence
  Description of Artificial Sequence: Synthetic oligonucleotide
  Antisense strand to SEQ ID NO: 1697457
ucaucagccaauuauccau

SEQ ID NO: 1697459 - RNA, 19 nt, Artificial Sequence
  Description of Artificial Sequence: Synthetic oligonucleotide
  Sense strand starting at position 816 of SEQ ID NO: 1561775
uggauaauuggcugaugac

SEQ ID NO: 1697460 - RNA, 19 nt, Artificial Sequence
  Description of Artificial Sequence: Synthetic oligonucleotide
  Antisense strand to SEQ ID NO: 1697459
gucaucagccaauuaucca

SEQ ID NO: 1697461 - RNA, 19 nt, Artificial Sequence
  Description of Artificial Sequence: Synthetic oligonucleotide
  Sense strand starting at position 822 of SEQ ID NO: 1561775
auuggcugaugacuugaaa

SEQ ID NO: 1697462 - RNA, 19 nt, Artificial Sequence
  Description of Artificial Sequence: Synthetic oligonucleotide
  Antisense strand to SEQ ID NO: 1697461
uuucaagucaucagccaau

SEQ ID NO: 1697463 - RNA, 19 nt, Artificial Sequence
  Description of Artificial Sequence: Synthetic oligonucleotide
  Sense strand starting at position 908 of SEQ ID NO: 1561775
uuggguuuaucucucacau

SEQ ID NO: 1697464 - RNA, 19 nt, Artificial Sequence
  Description of Artificial Sequence: Synthetic oligonucleotide
  Antisense strand to SEQ ID NO: 1697463
augugagagauaaacccaa

SEQ ID NO: 1697465 - RNA, 19 nt, Artificial Sequence
  Description of Artificial Sequence: Synthetic oligonucleotide
  Sense strand starting at position 928 of SEQ ID NO: 1561775
acuuauaugcauggucaga

SEQ ID NO: 1697466 - RNA, 19 nt, Artificial Sequence
  Description of Artificial Sequence: Synthetic oligonucleotide
  Antisense strand to SEQ ID NO: 1697465
ucugaccaugcauauaagu

SEQ ID NO: 1697467 - RNA, 19 nt, Artificial Sequence
  Description of Artificial Sequence: Synthetic oligonucleotide
  Sense strand starting at position 930 of SEQ ID NO: 1561775
uuauaugcauggucagaau

SEQ ID NO: 1697468 - RNA, 19 nt, Artificial Sequence
  Description of Artificial Sequence: Synthetic oligonucleotide
  Antisense strand to SEQ ID NO: 1697467
auucugaccaugcauauaa

SEQ ID NO: 1697469 - RNA, 19 nt, Artificial Sequence
  Description of Artificial Sequence: Synthetic oligonucleotide
  Sense strand starting at position 1107 of SEQ ID NO: 1561775
acaagaaacuguuugcaga

SEQ ID NO: 1697470 - RNA, 19 nt, Artificial Sequence
  Description of Artificial Sequence: Synthetic oligonucleotide
  Antisense strand to SEQ ID NO: 1697469
ucugcaaacaguuucuugu

SEQ ID NO: 1697471 - RNA, 19 nt, Artificial Sequence
  Description of Artificial Sequence: Synthetic oligonucleotide
  Sense strand starting at position 1220 of SEQ ID NO: 1561775
ugugauugugauucguguu

SEQ ID NO: 1697472 - RNA, 19 nt, Artificial Sequence
  Description of Artificial Sequence: Synthetic oligonucleotide
  Antisense strand to SEQ ID NO: 1697471
aacacgaaucacaaucaca

SEQ ID NO: 1697473 - RNA, 19 nt, Artificial Sequence
  Description of Artificial Sequence: Synthetic oligonucleotide
  Sense strand starting at position 1225 of SEQ ID NO: 1561775
uugugauucguguuagucu

SEQ ID NO: 1697474 - RNA, 19 nt, Artificial Sequence
  Description of Artificial Sequence: Synthetic oligonucleotide
  Antisense strand to SEQ ID NO: 1697473
agacuaacacgaaucacaa

SEQ ID NO: 1697475 - RNA, 19 nt, Artificial Sequence
  Description of Artificial Sequence: Synthetic oligonucleotide
  Sense strand starting at position 1297 of SEQ ID NO: 1561775
agacauucggaguggacaa

SEQ ID NO: 1697476 - RNA, 19 nt, Artificial Sequence
  Description of Artificial Sequence: Synthetic oligonucleotide
  Antisense strand to SEQ ID NO: 1697475
uuguccacuccgaaugucu

SEQ ID NO: 1697477 - RNA, 19 nt, Artificial Sequence
  Description of Artificial Sequence: Synthetic oligonucleotide
  Sense strand starting at position 1520 of SEQ ID NO: 1561775
cggacagucugacuccaua

SEQ ID NO: 1697478 - RNA, 19 nt, Artificial Sequence
  Description of Artificial Sequence: Synthetic oligonucleotide
  Antisense strand to SEQ ID NO: 1697477
uauggagucagacuguccg

SEQ ID NO: 1697479 - RNA, 19 nt, Artificial Sequence
  Description of Artificial Sequence: Synthetic oligonucleotide
  Sense strand starting at position 2371 of SEQ ID NO: 1561775
cagugcuuucuggauuaaa

SEQ ID NO: 1697480 - RNA, 19 nt, Artificial Sequence
  Description of Artificial Sequence: Synthetic oligonucleotide
  Antisense strand to SEQ ID NO: 1697479
uuuaauccagaaagcacug

SEQ ID NO: 1697481 - RNA, 19 nt, Artificial Sequence
  Description of Artificial Sequence: Synthetic oligonucleotide
  Sense strand starting at position 2374 of SEQ ID NO: 1561775
ugcuuucuggauuaaauac

SEQ ID NO: 1697482 - RNA, 19 nt, Artificial Sequence
  Description of Artificial Sequence: Synthetic oligonucleotide
  Antisense strand to SEQ ID NO: 1697481
guauuuaauccagaaagca

SEQ ID NO: 1697483 - RNA, 19 nt, Artificial Sequence
  Description of Artificial Sequence: Synthetic oligonucleotide
  Sense strand starting at position 2481 of SEQ ID NO: 1561775
guggguuguauuugucagu

SEQ ID NO: 1697484 - RNA, 19 nt, Artificial Sequence
  Description of Artificial Sequence: Synthetic oligonucleotide
  Antisense strand to SEQ ID NO: 1697483
acugacaaauacaacccac

SEQ ID NO: 1697485 - RNA, 19 nt, Artificial Sequence
  Description of Artificial Sequence: Synthetic oligonucleotide
  Sense strand starting at position 2482 of SEQ ID NO: 1561775
uggguuguauuugucagua

SEQ ID NO: 1697486 - RNA, 19 nt, Artificial Sequence
  Description of Artificial Sequence: Synthetic oligonucleotide
  Antisense strand to SEQ ID NO: 1697485
uacugacaaauacaaccca

SEQ ID NO: 1697487 - RNA, 19 nt, Artificial Sequence
  Description of Artificial Sequence: Synthetic oligonucleotide
  Sense strand starting at position 2559 of SEQ ID NO: 1561775
ugcgaaaugauauggaagu

SEQ ID NO: 1697488 - RNA, 19 nt, Artificial Sequence
  Description of Artificial Sequence: Synthetic oligonucleotide
  Antisense strand to SEQ ID NO: 1697487
acuuccauaucauuucgca

SEQ ID NO: 1697489 - RNA, 19 nt, Artificial Sequence
  Description of Artificial Sequence: Synthetic oligonucleotide
  Sense strand starting at position 2572 of SEQ ID NO: 1561775
ggaagucuucagggaccuu

SEQ ID NO: 1697490 - RNA, 19 nt, Artificial Sequence
  Description of Artificial Sequence: Synthetic oligonucleotide
  Antisense strand to SEQ ID NO: 1697489
aaggucccugaagacuucc

SEQ ID NO: 1697491 - RNA, 19 nt, Artificial Sequence
  Description of Artificial Sequence: Synthetic oligonucleotide
  Sense strand starting at position 2704 of SEQ ID NO: 1561775
uuugauacccuugagucaa

SEQ ID NO: 1697492 - RNA, 19 nt, Artificial Sequence
  Description of Artificial Sequence: Synthetic oligonucleotide
  Antisense strand to SEQ ID NO: 1697491
uugacucaaggguaucaaa

SEQ ID NO: 1697493 - RNA, 19 nt, Artificial Sequence
  Description of Artificial Sequence: Synthetic oligonucleotide
  Sense strand starting at position 2706 of SEQ ID NO: 1561775
ugauacccuugagucaaau

SEQ ID NO: 1697494 - RNA, 19 nt, Artificial Sequence
  Description of Artificial Sequence: Synthetic oligonucleotide
  Antisense strand to SEQ ID NO: 1697493
auuugacucaaggguauca

SEQ ID NO: 1697495 - RNA, 19 nt, Artificial Sequence
  Description of Artificial Sequence: Synthetic oligonucleotide
  Sense strand starting at position 2737 of SEQ ID NO: 1561775
cacagauucuaggccuuga

SEQ ID NO: 1697496 - RNA, 19 nt, Artificial Sequence
  Description of Artificial Sequence: Synthetic oligonucleotide
  Antisense strand to SEQ ID NO: 1697495
ucaaggccuagaaucugug

SEQ ID NO: 1697497 - RNA, 19 nt, Artificial Sequence
  Description of Artificial Sequence: Synthetic oligonucleotide
  Sense strand starting at position 2741 of SEQ ID NO: 1561775
gauucuaggccuugaucca

SEQ ID NO: 1697498 - RNA, 19 nt, Artificial Sequence
  Description of Artificial Sequence: Synthetic oligonucleotide
  Antisense strand to SEQ ID NO: 1697497
uggaucaaggccuagaauc

SEQ ID NO: 1697499 - RNA, 19 nt, Artificial Sequence
  Description of Artificial Sequence: Synthetic oligonucleotide
  Sense strand starting at position 2742 of SEQ ID NO: 1561775
auucuaggccuugauccaa

SEQ ID NO: 1697500 - RNA, 19 nt, Artificial Sequence
  Description of Artificial Sequence: Synthetic oligonucleotide
  Antisense strand to SEQ ID NO: 1697499
uuggaucaaggccuagaau

SEQ ID NO: 1697501 - RNA, 19 nt, Artificial Sequence
  Description of Artificial Sequence: Synthetic oligonucleotide
  Sense strand starting at position 2804 of SEQ ID NO: 1561775
ugagaagcuccugaauucu

SEQ ID NO: 1697502 - RNA, 19 nt, Artificial Sequence
  Description of Artificial Sequence: Synthetic oligonucleotide
  Antisense strand to SEQ ID NO: 1697501
agaauucaggagcuucuca

SEQ ID NO: 1697503 - RNA, 19 nt, Artificial Sequence
  Description of Artificial Sequence: Synthetic oligonucleotide
  Sense strand starting at position 2828 of SEQ ID NO: 1561775
uuaacaaauuugggaaaga

SEQ ID NO: 1697504 - RNA, 19 nt, Artificial Sequence
  Description of Artificial Sequence: Synthetic oligonucleotide
  Antisense strand to SEQ ID NO: 1697503
ucuuucccaaauuuguuaa

SEQ ID NO: 1697505 - RNA, 19 nt, Artificial Sequence
  Description of Artificial Sequence: Synthetic oligonucleotide
  Sense strand starting at position 2941 of SEQ ID NO: 1561775
ggaaauaacuuucuaggua

SEQ ID NO: 1697506 - RNA, 19 nt, Artificial Sequence
  Description of Artificial Sequence: Synthetic oligonucleotide
  Antisense strand to SEQ ID NO: 1697505
uaccuagaaaguuauuucc

SEQ ID NO: 1697507 - RNA, 19 nt, Artificial Sequence
  Description of Artificial Sequence: Synthetic oligonucleotide
  Sense strand starting at position 3024 of SEQ ID NO: 1561775
uucugaauucuuugaaaga

SEQ ID NO: 1697508 - RNA, 19 nt, Artificial Sequence
  Description of Artificial Sequence: Synthetic oligonucleotide
  Antisense strand to SEQ ID NO: 1697507
ucuuucaaagaauucagaa

SEQ ID NO: 1697509 - RNA, 19 nt, Artificial Sequence
  Description of Artificial Sequence: Synthetic oligonucleotide
  Sense strand starting at position 3232 of SEQ ID NO: 1561775
guuagcucucauuaccuca

SEQ ID NO: 1697510 - RNA, 19 nt, Artificial Sequence
  Description of Artificial Sequence: Synthetic oligonucleotide
  Antisense strand to SEQ ID NO: 1697509
ugagguaaugagagcuaac

SEQ ID NO: 1697511 - RNA, 19 nt, Artificial Sequence
  Description of Artificial Sequence: Synthetic oligonucleotide
  Sense strand starting at position 3305 of SEQ ID NO: 1561775
auguaagaaucuucuuuga

SEQ ID NO: 1697512 - RNA, 19 nt, Artificial Sequence
  Description of Artificial Sequence: Synthetic oligonucleotide
  Antisense strand to SEQ ID NO: 1697511
ucaaagaagauucuuacau

SEQ ID NO: 1697513 - RNA, 19 nt, Artificial Sequence
  Description of Artificial Sequence: Synthetic oligonucleotide
  Sense strand starting at position 3307 of SEQ ID NO: 1561775
guaagaaucuucuuugauu

SEQ ID NO: 1697514 - RNA, 19 nt, Artificial Sequence
  Description of Artificial Sequence: Synthetic oligonucleotide
  Antisense strand to SEQ ID NO: 1697513
aaucaaagaagauucuuac

SEQ ID NO: 1697515 - RNA, 19 nt, Artificial Sequence
  Description of Artificial Sequence: Synthetic oligonucleotide
  Sense strand starting at position 3471 of SEQ ID NO: 1561775
ggaacuguauucucacuuu

SEQ ID NO: 1697516 - RNA, 19 nt, Artificial Sequence
  Description of Artificial Sequence: Synthetic oligonucleotide
  Antisense strand to SEQ ID NO: 1697515
aaagugagaauacaguucc

SEQ ID NO: 1697517 - RNA, 19 nt, Artificial Sequence
  Description of Artificial Sequence: Synthetic oligonucleotide
  Sense strand starting at position 3608 of SEQ ID NO: 1561775
gccuauugaguguagauaa

SEQ ID NO: 1697518 - RNA, 19 nt, Artificial Sequence
  Description of Artificial Sequence: Synthetic oligonucleotide
  Antisense strand to SEQ ID NO: 1697517
uuaucuacacucaauaggc

SEQ ID NO: 1697519 - RNA, 19 nt, Artificial Sequence
  Description of Artificial Sequence: Synthetic oligonucleotide
  Sense strand starting at position 3619 of SEQ ID NO: 1561775
guagauaaacaucaugcuu

SEQ ID NO: 1697520 - RNA, 19 nt, Artificial Sequence
  Description of Artificial Sequence: Synthetic oligonucleotide
  Antisense strand to SEQ ID NO: 1697519
aagcaugauguuuaucuac

SEQ ID NO: 1697521 - RNA, 19 nt, Artificial Sequence
  Description of Artificial Sequence: Synthetic oligonucleotide
  Sense strand starting at position 3649 of SEQ ID NO: 1561775
uuaguugaucuguaguuua

SEQ ID NO: 1697522 - RNA, 19 nt, Artificial Sequence
  Description of Artificial Sequence: Synthetic oligonucleotide
  Antisense strand to SEQ ID NO: 1697521
uaaacuacagaucaacuaa

SEQ ID NO: 1697523 - RNA, 19 nt, Artificial Sequence
  Description of Artificial Sequence: Synthetic oligonucleotide
  Sense strand starting at position 264 of SEQ ID NO: 1561776
augagcucugcuugacaua

SEQ ID NO: 1697524 - RNA, 19 nt, Artificial Sequence
  Description of Artificial Sequence: Synthetic oligonucleotide
  Antisense strand to SEQ ID NO: 1697523
uaugucaagcagagcucau

SEQ ID NO: 1697525 - RNA, 19 nt, Artificial Sequence
  Description of Artificial Sequence: Synthetic oligonucleotide
  Sense strand starting at position 375 of SEQ ID NO: 1561776
uuaugaaacuugcugaaac

SEQ ID NO: 1697526 - RNA, 19 nt, Artificial Sequence
  Description of Artificial Sequence: Synthetic oligonucleotide
  Antisense strand to SEQ ID NO: 1697525
guuucagcaaguuucauaa

SEQ ID NO: 1697527 - RNA, 19 nt, Artificial Sequence
  Description of Artificial Sequence: Synthetic oligonucleotide
  Sense strand starting at position 451 of SEQ ID NO: 1561776
ugcauuaagcagggaguuu

SEQ ID NO: 1697528 - RNA, 19 nt, Artificial Sequence
  Description of Artificial Sequence: Synthetic oligonucleotide
  Antisense strand to SEQ ID NO: 1697527
aaacucccugcuuaaugca

SEQ ID NO: 1697529 - RNA, 19 nt, Artificial Sequence
  Description of Artificial Sequence: Synthetic oligonucleotide
  Sense strand starting at position 512 of SEQ ID NO: 1561776
augucuaugccguauuuaa

SEQ ID NO: 1697530 - RNA, 19 nt, Artificial Sequence
  Description of Artificial Sequence: Synthetic oligonucleotide
  Antisense strand to SEQ ID NO: 1697529
uuaaauacggcauagacau

SEQ ID NO: 1697531 - RNA, 19 nt, Artificial Sequence
  Description of Artificial Sequence: Synthetic oligonucleotide
  Sense strand starting at position 641 of SEQ ID NO: 1561776
cuggaauaaucucucaagu

SEQ ID NO: 1697532 - RNA, 19 nt, Artificial Sequence
  Description of Artificial Sequence: Synthetic oligonucleotide
  Antisense strand to SEQ ID NO: 1697531
acuugagagauuauuccag

SEQ ID NO: 1697533 - RNA, 19 nt, Artificial Sequence
  Description of Artificial Sequence: Synthetic oligonucleotide
  Sense strand starting at position 667 of SEQ ID NO: 1561776
ugaacuugucuccaggacu

SEQ ID NO: 1697534 - RNA, 19 nt, Artificial Sequence
  Description of Artificial Sequence: Synthetic oligonucleotide
  Antisense strand to SEQ ID NO: 1697533
aguccuggagacaaguuca

SEQ ID NO: 1697535 - RNA, 19 nt, Artificial Sequence
  Description of Artificial Sequence: Synthetic oligonucleotide
  Sense strand starting at position 710 of SEQ ID NO: 1561776
gcuguaucccucgugcuaa

SEQ ID NO: 1697536 - RNA, 19 nt, Artificial Sequence
  Description of Artificial Sequence: Synthetic oligonucleotide
  Antisense strand to SEQ ID NO: 1697535
uuagcacgagggauacagc

SEQ ID NO: 1697537 - RNA, 19 nt, Artificial Sequence
  Description of Artificial Sequence: Synthetic oligonucleotide
  Sense strand starting at position 720 of SEQ ID NO: 1561776
ucgugcuaacaguaagcaa

SEQ ID NO: 1697538 - RNA, 19 nt, Artificial Sequence
  Description of Artificial Sequence: Synthetic oligonucleotide
  Antisense strand to SEQ ID NO: 1697537
uugcuuacuguuagcacga

SEQ ID NO: 1697539 - RNA, 19 nt, Artificial Sequence
  Description of Artificial Sequence: Synthetic oligonucleotide
  Sense strand starting at position 862 of SEQ ID NO: 1561776
uagcaaaguuaugugaaua

SEQ ID NO: 1697540 - RNA, 19 nt, Artificial Sequence
  Description of Artificial Sequence: Synthetic oligonucleotide
  Antisense strand to SEQ ID NO: 1697539
uauucacauaacuuugcua

SEQ ID NO: 1697541 - RNA, 19 nt, Artificial Sequence
  Description of Artificial Sequence: Synthetic oligonucleotide
  Sense strand starting at position 912 of SEQ ID NO: 1561776
uccucuaagucccugagua

SEQ ID NO: 1697542 - RNA, 19 nt, Artificial Sequence
  Description of Artificial Sequence: Synthetic oligonucleotide
  Antisense strand to SEQ ID NO: 1697541
uacucagggacuuagagga

SEQ ID NO: 1697543 - RNA, 19 nt, Artificial Sequence
  Description of Artificial Sequence: Synthetic oligonucleotide
  Sense strand starting at position 913 of SEQ ID NO: 1561776
ccucuaagucccugaguac

SEQ ID NO: 1697544 - RNA, 19 nt, Artificial Sequence
  Description of Artificial Sequence: Synthetic oligonucleotide
  Antisense strand to SEQ ID NO: 1697543
guacucagggacuuagagg

SEQ ID NO: 1697545 - RNA, 19 nt, Artificial Sequence
  Description of Artificial Sequence: Synthetic oligonucleotide
  Sense strand starting at position 914 of SEQ ID NO: 1561776
cucuaagucccugaguaca

SEQ ID NO: 1697546 - RNA, 19 nt, Artificial Sequence
  Description of Artificial Sequence: Synthetic oligonucleotide
  Antisense strand to SEQ ID NO: 1697545
uguacucagggacuuagag

SEQ ID NO: 1697547 - RNA, 19 nt, Artificial Sequence
  Description of Artificial Sequence: Synthetic oligonucleotide
  Sense strand starting at position 925 of SEQ ID NO: 1561776
ugaguacacuaggcucaaa

SEQ ID NO: 1697548 - RNA, 19 nt, Artificial Sequence
  Description of Artificial Sequence: Synthetic oligonucleotide
  Antisense strand to SEQ ID NO: 1697547
uuugagccuaguguacuca

SEQ ID NO: 1697549 - RNA, 19 nt, Artificial Sequence
  Description of Artificial Sequence: Synthetic oligonucleotide
  Sense strand starting at position 1074 of SEQ ID NO: 1561776
guccuuuauuuagagcaga

SEQ ID NO: 1697550 - RNA, 19 nt, Artificial Sequence
  Description of Artificial Sequence: Synthetic oligonucleotide
  Antisense strand to SEQ ID NO: 1697549
ucugcucuaaauaaaggac

SEQ ID NO: 1697551 - RNA, 19 nt, Artificial Sequence
  Description of Artificial Sequence: Synthetic oligonucleotide
  Sense strand starting at position 1459 of SEQ ID NO: 1561776
cgagaaugccuagggaaac

SEQ ID NO: 1697552 - RNA, 19 nt, Artificial Sequence
  Description of Artificial Sequence: Synthetic oligonucleotide
  Antisense strand to SEQ ID NO: 1697551
guuucccuaggcauucucg

SEQ ID NO: 1697553 - RNA, 19 nt, Artificial Sequence
  Description of Artificial Sequence: Synthetic oligonucleotide
  Sense strand starting at position 2109 of SEQ ID NO: 1561776
ucgggucugcacugacaau

SEQ ID NO: 1697554 - RNA, 19 nt, Artificial Sequence
  Description of Artificial Sequence: Synthetic oligonucleotide
  Antisense strand to SEQ ID NO: 1697553
auugucagugcagacccga

SEQ ID NO: 1697555 - RNA, 19 nt, Artificial Sequence
  Description of Artificial Sequence: Synthetic oligonucleotide
  Sense strand starting at position 2281 of SEQ ID NO: 1561776
cgcucuuaagaccgauaaa

SEQ ID NO: 1697556 - RNA, 19 nt, Artificial Sequence
  Description of Artificial Sequence: Synthetic oligonucleotide
  Antisense strand to SEQ ID NO: 1697555
uuuaucggucuuaagagcg

SEQ ID NO: 1697557 - RNA, 19 nt, Artificial Sequence
  Description of Artificial Sequence: Synthetic oligonucleotide
  Sense strand starting at position 2319 of SEQ ID NO: 1561776
uagaaagcuccugggcuaa

SEQ ID NO: 1697558 - RNA, 19 nt, Artificial Sequence
  Description of Artificial Sequence: Synthetic oligonucleotide
  Antisense strand to SEQ ID NO: 1697557
uuagcccaggagcuuucua

SEQ ID NO: 1697559 - RNA, 19 nt, Artificial Sequence
  Description of Artificial Sequence: Synthetic oligonucleotide
  Sense strand starting at position 2321 of SEQ ID NO: 1561776
gaaagcuccugggcuaaau

SEQ ID NO: 1697560 - RNA, 19 nt, Artificial Sequence
  Description of Artificial Sequence: Synthetic oligonucleotide
  Antisense strand to SEQ ID NO: 1697559
auuuagcccaggagcuuuc

SEQ ID NO: 1697561 - RNA, 19 nt, Artificial Sequence
  Description of Artificial Sequence: Synthetic oligonucleotide
  Sense strand starting at position 2334 of SEQ ID NO: 1561776
cuaaauuuguaagaggugu

SEQ ID NO: 1697562 - RNA, 19 nt, Artificial Sequence
  Description of Artificial Sequence: Synthetic oligonucleotide
  Antisense strand to SEQ ID NO: 1697561
acaccucuuacaaauuuag

SEQ ID NO: 1697563 - RNA, 19 nt, Artificial Sequence
  Description of Artificial Sequence: Synthetic oligonucleotide
  Sense strand starting at position 2402 of SEQ ID NO: 1561776
uccagauuguguuucucaa

SEQ ID NO: 1697564 - RNA, 19 nt, Artificial Sequence
  Description of Artificial Sequence: Synthetic oligonucleotide
  Antisense strand to SEQ ID NO: 1697563
uugagaaacacaaucugga

SEQ ID NO: 1697565 - RNA, 19 nt, Artificial Sequence
  Description of Artificial Sequence: Synthetic oligonucleotide
  Sense strand starting at position 2782 of SEQ ID NO: 1561776
gaaagugagguaugguaga

SEQ ID NO: 1697566 - RNA, 19 nt, Artificial Sequence
  Description of Artificial Sequence: Synthetic oligonucleotide
  Antisense strand to SEQ ID NO: 1697565
ucuaccauaccucacuuuc

SEQ ID NO: 1697567 - RNA, 19 nt, Artificial Sequence
  Description of Artificial Sequence: Synthetic oligonucleotide
  Sense strand starting at position 2787 of SEQ ID NO: 1561776
ugagguaugguagauguca

SEQ ID NO: 1697568 - RNA, 19 nt, Artificial Sequence
  Description of Artificial Sequence: Synthetic oligonucleotide
  Antisense strand to SEQ ID NO: 1697567
ugacaucuaccauaccuca

SEQ ID NO: 1697569 - RNA, 19 nt, Artificial Sequence
  Description of Artificial Sequence: Synthetic oligonucleotide
  Sense strand starting at position 2789 of SEQ ID NO: 1561776
agguaugguagaugucaac

SEQ ID NO: 1697570 - RNA, 19 nt, Artificial Sequence
  Description of Artificial Sequence: Synthetic oligonucleotide
  Antisense strand to SEQ ID NO: 1697569
guugacaucuaccauaccu

SEQ ID NO: 1697571 - RNA, 19 nt, Artificial Sequence
  Description of Artificial Sequence: Synthetic oligonucleotide
  Sense strand starting at position 2833 of SEQ ID NO: 1561776
gcucaauaguaacuagagu

SEQ ID NO: 1697572 - RNA, 19 nt, Artificial Sequence
  Description of Artificial Sequence: Synthetic oligonucleotide
  Antisense strand to SEQ ID NO: 1697571
acucuaguuacuauugagc

SEQ ID NO: 1697573 - RNA, 19 nt, Artificial Sequence
  Description of Artificial Sequence: Synthetic oligonucleotide
  Sense strand starting at position 3064 of SEQ ID NO: 1561776
ggcccuggccaagaguaaa

SEQ ID NO: 1697574 - RNA, 19 nt, Artificial Sequence
  Description of Artificial Sequence: Synthetic oligonucleotide
  Antisense strand to SEQ ID NO: 1697573
uuuacucuuggccagggcc

SEQ ID NO: 1697575 - RNA, 19 nt, Artificial Sequence
  Description of Artificial Sequence: Synthetic oligonucleotide
  Sense strand starting at position 3271 of SEQ ID NO: 1561776
gcccauuaggaccacauua

SEQ ID NO: 1697576 - RNA, 19 nt, Artificial Sequence
  Description of Artificial Sequence: Synthetic oligonucleotide
  Antisense strand to SEQ ID NO: 1697575
uaaugugguccuaaugggc

SEQ ID NO: 1697577 - RNA, 19 nt, Artificial Sequence
  Description of Artificial Sequence: Synthetic oligonucleotide
  Sense strand starting at position 3279 of SEQ ID NO: 1561776
ggaccacauuaauagaauc

SEQ ID NO: 1697578 - RNA, 19 nt, Artificial Sequence
  Description of Artificial Sequence: Synthetic oligonucleotide
  Antisense strand to SEQ ID NO: 1697577
gauucuauuaauguggucc

SEQ ID NO: 1697579 - RNA, 19 nt, Artificial Sequence
  Description of Artificial Sequence: Synthetic oligonucleotide
  Sense strand starting at position 3301 of SEQ ID NO: 1561776
cagggaugggcuugacagu

SEQ ID NO: 1697580 - RNA, 19 nt, Artificial Sequence
  Description of Artificial Sequence: Synthetic oligonucleotide
  Antisense strand to SEQ ID NO: 1697579
acugucaagcccaucccug

SEQ ID NO: 1697581 - RNA, 19 nt, Artificial Sequence
  Description of Artificial Sequence: Synthetic oligonucleotide
  Sense strand starting at position 3320 of SEQ ID NO: 1561776
cuuccaucuugagugugau

SEQ ID NO: 1697582 - RNA, 19 nt, Artificial Sequence
  Description of Artificial Sequence: Synthetic oligonucleotide
  Antisense strand to SEQ ID NO: 1697581
aucacacucaagauggaag

SEQ ID NO: 1697583 - RNA, 19 nt, Artificial Sequence
  Description of Artificial Sequence: Synthetic oligonucleotide
  Sense strand starting at position 3321 of SEQ ID NO: 1561776
uuccaucuugagugugauc

SEQ ID NO: 1697584 - RNA, 19 nt, Artificial Sequence
  Description of Artificial Sequence: Synthetic oligonucleotide
  Antisense strand to SEQ ID NO: 1697583
gaucacacucaagauggaa

SEQ ID NO: 1697585 - RNA, 19 nt, Artificial Sequence
  Description of Artificial Sequence: Synthetic oligonucleotide
  Sense strand starting at position 3334 of SEQ ID NO: 1561776
gugaucucagguugcaaag

SEQ ID NO: 1697586 - RNA, 19 nt, Artificial Sequence
  Description of Artificial Sequence: Synthetic oligonucleotide
  Antisense strand to SEQ ID NO: 1697585
cuuugcaaccugagaucac

SEQ ID NO: 1697587 - RNA, 19 nt, Artificial Sequence
  Description of Artificial Sequence: Synthetic oligonucleotide
  Sense strand starting at position 3439 of SEQ ID NO: 1561776
gggcaagcucucuguuaaa

SEQ ID NO: 1697588 - RNA, 19 nt, Artificial Sequence
  Description of Artificial Sequence: Synthetic oligonucleotide
  Antisense strand to SEQ ID NO: 1697587
uuuaacagagagcuugccc

SEQ ID NO: 1697589 - RNA, 19 nt, Artificial Sequence
  Description of Artificial Sequence: Synthetic oligonucleotide
  Sense strand starting at position 3554 of SEQ ID NO: 1561776
agucucuuuagcugaggau

SEQ ID NO: 1697590 - RNA, 19 nt, Artificial Sequence
  Description of Artificial Sequence: Synthetic oligonucleotide
  Antisense strand to SEQ ID NO: 1697589
auccucagcuaaagagacu

SEQ ID NO: 1697591 - RNA, 19 nt, Artificial Sequence
  Description of Artificial Sequence: Synthetic oligonucleotide
  Sense strand starting at position 3583 of SEQ ID NO: 1561776
gccacaauuuguuucugca

SEQ ID NO: 1697592 - RNA, 19 nt, Artificial Sequence
  Description of Artificial Sequence: Synthetic oligonucleotide
  Antisense strand to SEQ ID NO: 1697591
ugcagaaacaaauuguggc

SEQ ID NO: 1697593 - RNA, 19 nt, Artificial Sequence
  Description of Artificial Sequence: Synthetic oligonucleotide
  Sense strand starting at position 3596 of SEQ ID NO: 1561776
ucugcaagacggugagauu

SEQ ID NO: 1697594 - RNA, 19 nt, Artificial Sequence
  Description of Artificial Sequence: Synthetic oligonucleotide
  Antisense strand to SEQ ID NO: 1697593
aaucucaccgucuugcaga

SEQ ID NO: 1697595 - RNA, 19 nt, Artificial Sequence
  Description of Artificial Sequence: Synthetic oligonucleotide
  Sense strand starting at position 3819 of SEQ ID NO: 1561776
ccugcaaguccagaggaua

SEQ ID NO: 1697596 - RNA, 19 nt, Artificial Sequence
  Description of Artificial Sequence: Synthetic oligonucleotide
  Antisense strand to SEQ ID NO: 1697595
uauccucuggacuugcagg

SEQ ID NO: 1697597 - RNA, 19 nt, Artificial Sequence
  Description of Artificial Sequence: Synthetic oligonucleotide
  Sense strand starting at position 3946 of SEQ ID NO: 1561776
cgaagucagcuuuauccca

SEQ ID NO: 1697598 - RNA, 19 nt, Artificial Sequence
  Description of Artificial Sequence: Synthetic oligonucleotide
  Antisense strand to SEQ ID NO: 1697597
ugggauaaagcugacuucg

SEQ ID NO: 1697599 - RNA, 19 nt, Artificial Sequence
  Description of Artificial Sequence: Synthetic oligonucleotide
  Sense strand starting at position 3976 of SEQ ID NO: 1561776
gucacuauuccugggagcu

SEQ ID NO: 1697600 - RNA, 19 nt, Artificial Sequence
  Description of Artificial Sequence: Synthetic oligonucleotide
  Antisense strand to SEQ ID NO: 1697599
agcucccaggaauagugac

SEQ ID NO: 1697601 - RNA, 19 nt, Artificial Sequence
  Description of Artificial Sequence: Synthetic oligonucleotide
  Sense strand starting at position 3977 of SEQ ID NO: 1561776
ucacuauuccugggagcug

SEQ ID NO: 1697602 - RNA, 19 nt, Artificial Sequence
  Description of Artificial Sequence: Synthetic oligonucleotide
  Antisense strand to SEQ ID NO: 1697601
cagcucccaggaauaguga

SEQ ID NO: 1697603 - RNA, 19 nt, Artificial Sequence
  Description of Artificial Sequence: Synthetic oligonucleotide
  Sense strand starting at position 43 of SEQ ID NO: 1561777
agcauuaaccugugaccca

SEQ ID NO: 1697604 - RNA, 19 nt, Artificial Sequence
  Description of Artificial Sequence: Synthetic oligonucleotide
  Antisense strand to SEQ ID NO: 1697603
ugggucacagguuaaugcu

SEQ ID NO: 1697605 - RNA, 19 nt, Artificial Sequence
  Description of Artificial Sequence: Synthetic oligonucleotide
  Sense strand starting at position 74 of SEQ ID NO: 1561777
gagacagccucuuuggacu

SEQ ID NO: 1697606 - RNA, 19 nt, Artificial Sequence
  Description of Artificial Sequence: Synthetic oligonucleotide
  Antisense strand to SEQ ID NO: 1697605
aguccaaagaggcugucuc

SEQ ID NO: 1697607 - RNA, 19 nt, Artificial Sequence
  Description of Artificial Sequence: Synthetic oligonucleotide
  Sense strand starting at position 100 of SEQ ID NO: 1561777
uaaggaaugucgccuuaag

SEQ ID NO: 1697608 - RNA, 19 nt, Artificial Sequence
  Description of Artificial Sequence: Synthetic oligonucleotide
  Antisense strand to SEQ ID NO: 1697607
cuuaaggcgacauuccuua

SEQ ID NO: 1697609 - RNA, 19 nt, Artificial Sequence
  Description of Artificial Sequence: Synthetic oligonucleotide
  Sense strand starting at position 158 of SEQ ID NO: 1561777
acacuuucuccuugacguu

SEQ ID NO: 1697610 - RNA, 19 nt, Artificial Sequence
  Description of Artificial Sequence: Synthetic oligonucleotide
  Antisense strand to SEQ ID NO: 1697609
aacgucaaggagaaagugu

SEQ ID NO: 1697611 - RNA, 19 nt, Artificial Sequence
  Description of Artificial Sequence: Synthetic oligonucleotide
  Sense strand starting at position 937 of SEQ ID NO: 1561777
aacuguuucccauaggguu

SEQ ID NO: 1697612 - RNA, 19 nt, Artificial Sequence
  Description of Artificial Sequence: Synthetic oligonucleotide
  Antisense strand to SEQ ID NO: 1697611
aacccuaugggaaacaguu

SEQ ID NO: 1697613 - RNA, 19 nt, Artificial Sequence
  Description of Artificial Sequence: Synthetic oligonucleotide
  Sense strand starting at position 950 of SEQ ID NO: 1561777
aggguuauguaguugcaaa

SEQ ID NO: 1697614 - RNA, 19 nt, Artificial Sequence
  Description of Artificial Sequence: Synthetic oligonucleotide
  Antisense strand to SEQ ID NO: 1697613
uuugcaacuacauaacccu

SEQ ID NO: 1697615 - RNA, 19 nt, Artificial Sequence
  Description of Artificial Sequence: Synthetic oligonucleotide
  Sense strand starting at position 951 of SEQ ID NO: 1561777
ggguuauguaguugcaaau

SEQ ID NO: 1697616 - RNA, 19 nt, Artificial Sequence
  Description of Artificial Sequence: Synthetic oligonucleotide
  Antisense strand to SEQ ID NO: 1697615
auuugcaacuacauaaccc

SEQ ID NO: 1697617 - RNA, 19 nt, Artificial Sequence
  Description of Artificial Sequence: Synthetic oligonucleotide
  Sense strand starting at position 1036 of SEQ ID NO: 1561777
agauuuagcucuuucgauu

SEQ ID NO: 1697618 - RNA, 19 nt, Artificial Sequence
  Description of Artificial Sequence: Synthetic oligonucleotide
  Antisense strand to SEQ ID NO: 1697617
aaucgaaagagcuaaaucu

SEQ ID NO: 1697619 - RNA, 19 nt, Artificial Sequence
  Description of Artificial Sequence: Synthetic oligonucleotide
  Sense strand starting at position 1042 of SEQ ID NO: 1561777
agcucuuucgauuaacgga

SEQ ID NO: 1697620 - RNA, 19 nt, Artificial Sequence
  Description of Artificial Sequence: Synthetic oligonucleotide
  Antisense strand to SEQ ID NO: 1697619
uccguuaaucgaaagagcu

SEQ ID NO: 1697621 - RNA, 19 nt, Artificial Sequence
  Description of Artificial Sequence: Synthetic oligonucleotide
  Sense strand starting at position 1105 of SEQ ID NO: 1561777
cuuacugucgcugaguaga

SEQ ID NO: 1697622 - RNA, 19 nt, Artificial Sequence
  Description of Artificial Sequence: Synthetic oligonucleotide
  Antisense strand to SEQ ID NO: 1697621
ucuacucagcgacaguaag

SEQ ID NO: 1697623 - RNA, 19 nt, Artificial Sequence
  Description of Artificial Sequence: Synthetic oligonucleotide
  Sense strand starting at position 1211 of SEQ ID NO: 1561777
ccgugaauuccucacagau

SEQ ID NO: 1697624 - RNA, 19 nt, Artificial Sequence
  Description of Artificial Sequence: Synthetic oligonucleotide
  Antisense strand to SEQ ID NO: 1697623
aucugugaggaauucacgg

SEQ ID NO: 1697625 - RNA, 19 nt, Artificial Sequence
  Description of Artificial Sequence: Synthetic oligonucleotide
  Sense strand starting at position 1264 of SEQ ID NO: 1561777
uuccuucggcucuaucaaa

SEQ ID NO: 1697626 - RNA, 19 nt, Artificial Sequence
  Description of Artificial Sequence: Synthetic oligonucleotide
  Antisense strand to SEQ ID NO: 1697625
uuugauagagccgaaggaa

SEQ ID NO: 1697627 - RNA, 19 nt, Artificial Sequence
  Description of Artificial Sequence: Synthetic oligonucleotide
  Sense strand starting at position 1422 of SEQ ID NO: 1561777
gucuccagucaccgaguaa

SEQ ID NO: 1697628 - RNA, 19 nt, Artificial Sequence
  Description of Artificial Sequence: Synthetic oligonucleotide
  Antisense strand to SEQ ID NO: 1697627
uuacucggugacuggagac

SEQ ID NO: 1697629 - RNA, 19 nt, Artificial Sequence
  Description of Artificial Sequence: Synthetic oligonucleotide
  Sense strand starting at position 1882 of SEQ ID NO: 1561777
uccagauuuccgcgcucca

SEQ ID NO: 1697630 - RNA, 19 nt, Artificial Sequence
  Description of Artificial Sequence: Synthetic oligonucleotide
  Antisense strand to SEQ ID NO: 1697629
uggagcgcggaaaucugga

SEQ ID NO: 1697631 - RNA, 19 nt, Artificial Sequence
  Description of Artificial Sequence: Synthetic oligonucleotide
  Sense strand starting at position 1982 of SEQ ID NO: 1561777
gggaguucugcgcaaguac

SEQ ID NO: 1697632 - RNA, 19 nt, Artificial Sequence
  Description of Artificial Sequence: Synthetic oligonucleotide
  Antisense strand to SEQ ID NO: 1697631
guacuugcgcagaacuccc

SEQ ID NO: 1697633 - RNA, 19 nt, Artificial Sequence
  Description of Artificial Sequence: Synthetic oligonucleotide
  Sense strand starting at position 2668 of SEQ ID NO: 1561777
uaaaguguggcauggaaag

SEQ ID NO: 1697634 - RNA, 19 nt, Artificial Sequence
  Description of Artificial Sequence: Synthetic oligonucleotide
  Antisense strand to SEQ ID NO: 1697633
cuuuccaugccacacuuua

SEQ ID NO: 1697635 - RNA, 19 nt, Artificial Sequence
  Description of Artificial Sequence: Synthetic oligonucleotide
  Sense strand starting at position 2670 of SEQ ID NO: 1561777
aaguguggcauggaaagua

SEQ ID NO: 1697636 - RNA, 19 nt, Artificial Sequence
  Description of Artificial Sequence: Synthetic oligonucleotide
  Antisense strand to SEQ ID NO: 1697635
uacuuuccaugccacacuu

SEQ ID NO: 1697637 - RNA, 19 nt, Artificial Sequence
  Description of Artificial Sequence: Synthetic oligonucleotide
  Sense strand starting at position 2775 of SEQ ID NO: 1561777
uggccaguucuacaaaguu

SEQ ID NO: 1697638 - RNA, 19 nt, Artificial Sequence
  Description of Artificial Sequence: Synthetic oligonucleotide
  Antisense strand to SEQ ID NO: 1697637
aacuuuguagaacuggcca

SEQ ID NO: 1697639 - RNA, 19 nt, Artificial Sequence
  Description of Artificial Sequence: Synthetic oligonucleotide
  Sense strand starting at position 3190 of SEQ ID NO: 1561777
guccuuaaguuaccauuaa

SEQ ID NO: 1697640 - RNA, 19 nt, Artificial Sequence
  Description of Artificial Sequence: Synthetic oligonucleotide
  Antisense strand to SEQ ID NO: 1697639
uuaaugguaacuuaaggac

SEQ ID NO: 1697641 - RNA, 19 nt, Artificial Sequence
  Description of Artificial Sequence: Synthetic oligonucleotide
  Sense strand starting at position 3200 of SEQ ID NO: 1561777
uaccauuaauugucgugaa

SEQ ID NO: 1697642 - RNA, 19 nt, Artificial Sequence
  Description of Artificial Sequence: Synthetic oligonucleotide
  Antisense strand to SEQ ID NO: 1697641
uucacgacaauuaauggua

SEQ ID NO: 1697643 - RNA, 19 nt, Artificial Sequence
  Description of Artificial Sequence: Synthetic oligonucleotide
  Sense strand starting at position 3243 of SEQ ID NO: 1561777
ugcaguugacaacgaaaga

SEQ ID NO: 1697644 - RNA, 19 nt, Artificial Sequence
  Description of Artificial Sequence: Synthetic oligonucleotide
  Antisense strand to SEQ ID NO: 1697643
ucuuucguugucaacugca

SEQ ID NO: 1697645 - RNA, 19 nt, Artificial Sequence
  Description of Artificial Sequence: Synthetic oligonucleotide
  Sense strand starting at position 3244 of SEQ ID NO: 1561777
gcaguugacaacgaaagau

SEQ ID NO: 1697646 - RNA, 19 nt, Artificial Sequence
  Description of Artificial Sequence: Synthetic oligonucleotide
  Antisense strand to SEQ ID NO: 1697645
aucuuucguugucaacugc

SEQ ID NO: 1697647 - RNA, 19 nt, Artificial Sequence
  Description of Artificial Sequence: Synthetic oligonucleotide
  Sense strand starting at position 3254 of SEQ ID NO: 1561777
acgaaagauggguguucgu

SEQ ID NO: 1697648 - RNA, 19 nt, Artificial Sequence
  Description of Artificial Sequence: Synthetic oligonucleotide
  Antisense strand to SEQ ID NO: 1697647
acgaacacccaucuuucgu

SEQ ID NO: 1697649 - RNA, 19 nt, Artificial Sequence
  Description of Artificial Sequence: Synthetic oligonucleotide
  Sense strand starting at position 3289 of SEQ ID NO: 1561777
ugguuucuccuccacuuua

SEQ ID NO: 1697650 - RNA, 19 nt, Artificial Sequence
  Description of Artificial Sequence: Synthetic oligonucleotide
  Antisense strand to SEQ ID NO: 1697649
uaaaguggaggagaaacca

SEQ ID NO: 1697651 - RNA, 19 nt, Artificial Sequence
  Description of Artificial Sequence: Synthetic oligonucleotide
  Sense strand starting at position 3368 of SEQ ID NO: 1561777
guuggcauccuccaaguaa

SEQ ID NO: 1697652 - RNA, 19 nt, Artificial Sequence
  Description of Artificial Sequence: Synthetic oligonucleotide
  Antisense strand to SEQ ID NO: 1697651
uuacuuggaggaugccaac

SEQ ID NO: 1697653 - RNA, 19 nt, Artificial Sequence
  Description of Artificial Sequence: Synthetic oligonucleotide
  Sense strand starting at position 3376 of SEQ ID NO: 1561777
ccuccaaguaauggcgauu

SEQ ID NO: 1697654 - RNA, 19 nt, Artificial Sequence
  Description of Artificial Sequence: Synthetic oligonucleotide
  Antisense strand to SEQ ID NO: 1697653
aaucgccauuacuuggagg

SEQ ID NO: 1697655 - RNA, 19 nt, Artificial Sequence
  Description of Artificial Sequence: Synthetic oligonucleotide
  Sense strand starting at position 3387 of SEQ ID NO: 1561777
uggcgauucucauucccua

SEQ ID NO: 1697656 - RNA, 19 nt, Artificial Sequence
  Description of Artificial Sequence: Synthetic oligonucleotide
  Antisense strand to SEQ ID NO: 1697655
uagggaaugagaaucgcca

SEQ ID NO: 1697657 - RNA, 19 nt, Artificial Sequence
  Description of Artificial Sequence: Synthetic oligonucleotide
  Sense strand starting at position 3415 of SEQ ID NO: 1561777
uuccuauggucuuugcuga

SEQ ID NO: 1697658 - RNA, 19 nt, Artificial Sequence
  Description of Artificial Sequence: Synthetic oligonucleotide
  Antisense strand to SEQ ID NO: 1697657
ucagcaaagaccauaggaa

SEQ ID NO: 1697659 - RNA, 19 nt, Artificial Sequence
  Description of Artificial Sequence: Synthetic oligonucleotide
  Sense strand starting at position 3416 of SEQ ID NO: 1561777
uccuauggucuuugcugaa

SEQ ID NO: 1697660 - RNA, 19 nt, Artificial Sequence
  Description of Artificial Sequence: Synthetic oligonucleotide
  Antisense strand to SEQ ID NO: 1697659
uucagcaaagaccauagga

SEQ ID NO: 1697661 - RNA, 19 nt, Artificial Sequence
  Description of Artificial Sequence: Synthetic oligonucleotide
  Sense strand starting at position 3428 of SEQ ID NO: 1561777
ugcugaauucuuggcuuua

SEQ ID NO: 1697662 - RNA, 19 nt, Artificial Sequence
  Description of Artificial Sequence: Synthetic oligonucleotide
  Antisense strand to SEQ ID NO: 1697661
uaaagccaagaauucagca

SEQ ID NO: 1697663 - RNA, 19 nt, Artificial Sequence
  Description of Artificial Sequence: Synthetic oligonucleotide
  Sense strand starting at position 3429 of SEQ ID NO: 1561777
gcugaauucuuggcuuuaa

SEQ ID NO: 1697664 - RNA, 19 nt, Artificial Sequence
  Description of Artificial Sequence: Synthetic oligonucleotide
  Antisense strand to SEQ ID NO: 1697663
uuaaagccaagaauucagc

SEQ ID NO: 1697665 - RNA, 19 nt, Artificial Sequence
  Description of Artificial Sequence: Synthetic oligonucleotide
  Sense strand starting at position 3430 of SEQ ID NO: 1561777
cugaauucuuggcuuuaaa

SEQ ID NO: 1697666 - RNA, 19 nt, Artificial Sequence
  Description of Artificial Sequence: Synthetic oligonucleotide
  Antisense strand to SEQ ID NO: 1697665
uuuaaagccaagaauucag

SEQ ID NO: 1697667 - RNA, 19 nt, Artificial Sequence
  Description of Artificial Sequence: Synthetic oligonucleotide
  Sense strand starting at position 3548 of SEQ ID NO: 1561777
ucuccagacgcaugucuaa

SEQ ID NO: 1697668 - RNA, 19 nt, Artificial Sequence
  Description of Artificial Sequence: Synthetic oligonucleotide
  Antisense strand to SEQ ID NO: 1697667
uuagacaugcgucuggaga

SEQ ID NO: 1697669 - RNA, 19 nt, Artificial Sequence
  Description of Artificial Sequence: Synthetic oligonucleotide
  Sense strand starting at position 3647 of SEQ ID NO: 1561777
ggccucucaugcuugaaac

SEQ ID NO: 1697670 - RNA, 19 nt, Artificial Sequence
  Description of Artificial Sequence: Synthetic oligonucleotide
  Antisense strand to SEQ ID NO: 1697669
guuucaagcaugagaggcc

SEQ ID NO: 1697671 - RNA, 19 nt, Artificial Sequence
  Description of Artificial Sequence: Synthetic oligonucleotide
  Sense strand starting at position 3657 of SEQ ID NO: 1561777
gcuugaaaccugugaccau

SEQ ID NO: 1697672 - RNA, 19 nt, Artificial Sequence
  Description of Artificial Sequence: Synthetic oligonucleotide
  Antisense strand to SEQ ID NO: 1697671
auggucacagguuucaagc

SEQ ID NO: 1697673 - RNA, 19 nt, Artificial Sequence
  Description of Artificial Sequence: Synthetic oligonucleotide
  Sense strand starting at position 3881 of SEQ ID NO: 1561777
auugaaacacuuuagcagu

SEQ ID NO: 1697674 - RNA, 19 nt, Artificial Sequence
  Description of Artificial Sequence: Synthetic oligonucleotide
  Antisense strand to SEQ ID NO: 1697673
acugcuaaaguguuucaau

SEQ ID NO: 1697675 - RNA, 19 nt, Artificial Sequence
  Description of Artificial Sequence: Synthetic oligonucleotide
  Sense strand starting at position 3896 of SEQ ID NO: 1561777
caguacuucguauaaagua

SEQ ID NO: 1697676 - RNA, 19 nt, Artificial Sequence
  Description of Artificial Sequence: Synthetic oligonucleotide
  Antisense strand to SEQ ID NO: 1697675
uacuuuauacgaaguacug

SEQ ID NO: 1697677 - RNA, 19 nt, Artificial Sequence
  Description of Artificial Sequence: Synthetic oligonucleotide
  Sense strand starting at position 3915 of SEQ ID NO: 1561777
guauguguaacguauguau

SEQ ID NO: 1697678 - RNA, 19 nt, Artificial Sequence
  Description of Artificial Sequence: Synthetic oligonucleotide
  Antisense strand to SEQ ID NO: 1697677
auacauacguuacacauac

SEQ ID NO: 1697679 - RNA, 19 nt, Artificial Sequence
  Description of Artificial Sequence: Synthetic oligonucleotide
  Sense strand starting at position 3919 of SEQ ID NO: 1561777
guguaacguauguaucagu

SEQ ID NO: 1697680 - RNA, 19 nt, Artificial Sequence
  Description of Artificial Sequence: Synthetic oligonucleotide
  Antisense strand to SEQ ID NO: 1697679
acugauacauacguuacac

SEQ ID NO: 1697681 - RNA, 19 nt, Artificial Sequence
  Description of Artificial Sequence: Synthetic oligonucleotide
  Sense strand starting at position 3924 of SEQ ID NO: 1561777
acguauguaucaguggcaa

SEQ ID NO: 1697682 - RNA, 19 nt, Artificial Sequence
  Description of Artificial Sequence: Synthetic oligonucleotide
  Antisense strand to SEQ ID NO: 1697681
uugccacugauacauacgu

SEQ ID NO: 1697683 - RNA, 19 nt, Artificial Sequence
  Description of Artificial Sequence: Synthetic oligonucleotide
  Sense strand starting at position 91 of SEQ ID NO: 1561778
ugaucaucaugacaacagu

SEQ ID NO: 1697684 - RNA, 19 nt, Artificial Sequence
  Description of Artificial Sequence: Synthetic oligonucleotide
  Antisense strand to SEQ ID NO: 1697683
acuguugucaugaugauca

SEQ ID NO: 1697685 - RNA, 19 nt, Artificial Sequence
  Description of Artificial Sequence: Synthetic oligonucleotide
  Sense strand starting at position 108 of SEQ ID NO: 1561778
gugugaggccagcacaauu

SEQ ID NO: 1697686 - RNA, 19 nt, Artificial Sequence
  Description of Artificial Sequence: Synthetic oligonucleotide
  Antisense strand to SEQ ID NO: 1697685
aauugugcuggccucacac

SEQ ID NO: 1697687 - RNA, 19 nt, Artificial Sequence
  Description of Artificial Sequence: Synthetic oligonucleotide
  Sense strand starting at position 161 of SEQ ID NO: 1561778
ggacaagggucucgcucaa

SEQ ID NO: 1697688 - RNA, 19 nt, Artificial Sequence
  Description of Artificial Sequence: Synthetic oligonucleotide
  Antisense strand to SEQ ID NO: 1697687
uugagcgagacccuugucc

SEQ ID NO: 1697689 - RNA, 19 nt, Artificial Sequence
  Description of Artificial Sequence: Synthetic oligonucleotide
  Sense strand starting at position 240 of SEQ ID NO: 1561778
uccucaggguggucagauu

SEQ ID NO: 1697690 - RNA, 19 nt, Artificial Sequence
  Description of Artificial Sequence: Synthetic oligonucleotide
  Antisense strand to SEQ ID NO: 1697689
aaucugaccacccugagga

SEQ ID NO: 1697691 - RNA, 19 nt, Artificial Sequence
  Description of Artificial Sequence: Synthetic oligonucleotide
  Sense strand starting at position 286 of SEQ ID NO: 1561778
aucgaaucucagcaagauc

SEQ ID NO: 1697692 - RNA, 19 nt, Artificial Sequence
  Description of Artificial Sequence: Synthetic oligonucleotide
  Antisense strand to SEQ ID NO: 1697691
gaucuugcugagauucgau

SEQ ID NO: 1697693 - RNA, 19 nt, Artificial Sequence
  Description of Artificial Sequence: Synthetic oligonucleotide
  Sense strand starting at position 337 of SEQ ID NO: 1561778
ucugguguucugcaaaguu

SEQ ID NO: 1697694 - RNA, 19 nt, Artificial Sequence
  Description of Artificial Sequence: Synthetic oligonucleotide
  Antisense strand to SEQ ID NO: 1697693
aacuuugcagaacaccaga

SEQ ID NO: 1697695 - RNA, 19 nt, Artificial Sequence
  Description of Artificial Sequence: Synthetic oligonucleotide
  Sense strand starting at position 345 of SEQ ID NO: 1561778
ucugcaaaguucuggccau

SEQ ID NO: 1697696 - RNA, 19 nt, Artificial Sequence
  Description of Artificial Sequence: Synthetic oligonucleotide
  Antisense strand to SEQ ID NO: 1697695
auggccagaacuuugcaga

SEQ ID NO: 1697697 - RNA, 19 nt, Artificial Sequence
  Description of Artificial Sequence: Synthetic oligonucleotide
  Sense strand starting at position 349 of SEQ ID NO: 1561778
caaaguucuggccaugaac

SEQ ID NO: 1697698 - RNA, 19 nt, Artificial Sequence
  Description of Artificial Sequence: Synthetic oligonucleotide
  Antisense strand to SEQ ID NO: 1697697
guucauggccagaacuuug

SEQ ID NO: 1697699 - RNA, 19 nt, Artificial Sequence
  Description of Artificial Sequence: Synthetic oligonucleotide
  Sense strand starting at position 465 of SEQ ID NO: 1561778
gggcuaaauaaacguccaa

SEQ ID NO: 1697700 - RNA, 19 nt, Artificial Sequence
  Description of Artificial Sequence: Synthetic oligonucleotide
  Antisense strand to SEQ ID NO: 1697699
uuggacguuuauuuagccc

SEQ ID NO: 1697701 - RNA, 19 nt, Artificial Sequence
  Description of Artificial Sequence: Synthetic oligonucleotide
  Sense strand starting at position 476 of SEQ ID NO: 1561778
acguccaaaugauaucaca

SEQ ID NO: 1697702 - RNA, 19 nt, Artificial Sequence
  Description of Artificial Sequence: Synthetic oligonucleotide
  Antisense strand to SEQ ID NO: 1697701
ugugauaucauuuggacgu

SEQ ID NO: 1697703 - RNA, 19 nt, Artificial Sequence
  Description of Artificial Sequence: Synthetic oligonucleotide
  Sense strand starting at position 2320 of SEQ ID NO: 1561778
cagcgacaccucgcuguaa

SEQ ID NO: 1697704 - RNA, 19 nt, Artificial Sequence
  Description of Artificial Sequence: Synthetic oligonucleotide
  Antisense strand to SEQ ID NO: 1697703
uuacagcgaggugucgcug

SEQ ID NO: 1697705 - RNA, 19 nt, Artificial Sequence
  Description of Artificial Sequence: Synthetic oligonucleotide
  Sense strand starting at position 2480 of SEQ ID NO: 1561778
aacccagaguccuagagau

SEQ ID NO: 1697706 - RNA, 19 nt, Artificial Sequence
  Description of Artificial Sequence: Synthetic oligonucleotide
  Antisense strand to SEQ ID NO: 1697705
aucucuaggacucuggguu

SEQ ID NO: 1697707 - RNA, 19 nt, Artificial Sequence
  Description of Artificial Sequence: Synthetic oligonucleotide
  Sense strand starting at position 2490 of SEQ ID NO: 1561778
ccuagagauuggguuccaa

SEQ ID NO: 1697708 - RNA, 19 nt, Artificial Sequence
  Description of Artificial Sequence: Synthetic oligonucleotide
  Antisense strand to SEQ ID NO: 1697707
uuggaacccaaucucuagg

SEQ ID NO: 1697709 - RNA, 19 nt, Artificial Sequence
  Description of Artificial Sequence: Synthetic oligonucleotide
  Sense strand starting at position 2522 of SEQ ID NO: 1561778
ucuggaggccugugugauc

SEQ ID NO: 1697710 - RNA, 19 nt, Artificial Sequence
  Description of Artificial Sequence: Synthetic oligonucleotide
  Antisense strand to SEQ ID NO: 1697709
gaucacacaggccuccaga

SEQ ID NO: 1697711 - RNA, 19 nt, Artificial Sequence
  Description of Artificial Sequence: Synthetic oligonucleotide
  Sense strand starting at position 2527 of SEQ ID NO: 1561778
aggccugugugaucuugaa

SEQ ID NO: 1697712 - RNA, 19 nt, Artificial Sequence
  Description of Artificial Sequence: Synthetic oligonucleotide
  Antisense strand to SEQ ID NO: 1697711
uucaagaucacacaggccu

SEQ ID NO: 1697713 - RNA, 19 nt, Artificial Sequence
  Description of Artificial Sequence: Synthetic oligonucleotide
  Sense strand starting at position 2931 of SEQ ID NO: 1561778
agaugauaguguuuccaau

SEQ ID NO: 1697714 - RNA, 19 nt, Artificial Sequence
  Description of Artificial Sequence: Synthetic oligonucleotide
  Antisense strand to SEQ ID NO: 1697713
auuggaaacacuaucaucu

SEQ ID NO: 1697715 - RNA, 19 nt, Artificial Sequence
  Description of Artificial Sequence: Synthetic oligonucleotide
  Sense strand starting at position 2933 of SEQ ID NO: 1561778
augauaguguuuccaauac

SEQ ID NO: 1697716 - RNA, 19 nt, Artificial Sequence
  Description of Artificial Sequence: Synthetic oligonucleotide
  Antisense strand to SEQ ID NO: 1697715
guauuggaaacacuaucau

SEQ ID NO: 1697717 - RNA, 19 nt, Artificial Sequence
  Description of Artificial Sequence: Synthetic oligonucleotide
  Sense strand starting at position 3069 of SEQ ID NO: 1561778
uuaugcuacgccuguacua

SEQ ID NO: 1697718 - RNA, 19 nt, Artificial Sequence
  Description of Artificial Sequence: Synthetic oligonucleotide
  Antisense strand to SEQ ID NO: 1697717
uaguacaggcguagcauaa

SEQ ID NO: 1697719 - RNA, 19 nt, Artificial Sequence
  Description of Artificial Sequence: Synthetic oligonucleotide
  Sense strand starting at position 3071 of SEQ ID NO: 1561778
augcuacgccuguacuauu

SEQ ID NO: 1697720 - RNA, 19 nt, Artificial Sequence
  Description of Artificial Sequence: Synthetic oligonucleotide
  Antisense strand to SEQ ID NO: 1697719
aauaguacaggcguagcau

SEQ ID NO: 1697721 - RNA, 19 nt, Artificial Sequence
  Description of Artificial Sequence: Synthetic oligonucleotide
  Sense strand starting at position 3089 of SEQ ID NO: 1561778
ucacuuuaaguugguuauu

SEQ ID NO: 1697722 - RNA, 19 nt, Artificial Sequence
  Description of Artificial Sequence: Synthetic oligonucleotide
  Antisense strand to SEQ ID NO: 1697721
aauaaccaacuuaaaguga

SEQ ID NO: 1697723 - RNA, 19 nt, Artificial Sequence
  Description of Artificial Sequence: Synthetic oligonucleotide
  Sense strand starting at position 3210 of SEQ ID NO: 1561778
ggcgugagccaagguugau

SEQ ID NO: 1697724 - RNA, 19 nt, Artificial Sequence
  Description of Artificial Sequence: Synthetic oligonucleotide
  Antisense strand to SEQ ID NO: 1697723
aucaaccuuggcucacgcc

SEQ ID NO: 1697725 - RNA, 19 nt, Artificial Sequence
  Description of Artificial Sequence: Synthetic oligonucleotide
  Sense strand starting at position 3256 of SEQ ID NO: 1561778
uguuaugggcccugacaac

SEQ ID NO: 1697726 - RNA, 19 nt, Artificial Sequence
  Description of Artificial Sequence: Synthetic oligonucleotide
  Antisense strand to SEQ ID NO: 1697725
guugucagggcccauaaca

SEQ ID NO: 1697727 - RNA, 19 nt, Artificial Sequence
  Description of Artificial Sequence: Synthetic oligonucleotide
  Sense strand starting at position 3397 of SEQ ID NO: 1561778
ccuaucuguuuccuggaga

SEQ ID NO: 1697728 - RNA, 19 nt, Artificial Sequence
  Description of Artificial Sequence: Synthetic oligonucleotide
  Antisense strand to SEQ ID NO: 1697727
ucuccaggaaacagauagg

SEQ ID NO: 1697729 - RNA, 19 nt, Artificial Sequence
  Description of Artificial Sequence: Synthetic oligonucleotide
  Sense strand starting at position 3398 of SEQ ID NO: 1561778
cuaucuguuuccuggagag

SEQ ID NO: 1697730 - RNA, 19 nt, Artificial Sequence
  Description of Artificial Sequence: Synthetic oligonucleotide
  Antisense strand to SEQ ID NO: 1697729
cucuccaggaaacagauag

SEQ ID NO: 1697731 - RNA, 19 nt, Artificial Sequence
  Description of Artificial Sequence: Synthetic oligonucleotide
  Sense strand starting at position 3441 of SEQ ID NO: 1561778
caaacuguggaccgugauu

SEQ ID NO: 1697732 - RNA, 19 nt, Artificial Sequence
  Description of Artificial Sequence: Synthetic oligonucleotide
  Antisense strand to SEQ ID NO: 1697731
aaucacgguccacaguuug

SEQ ID NO: 1697733 - RNA, 19 nt, Artificial Sequence
  Description of Artificial Sequence: Synthetic oligonucleotide
  Sense strand starting at position 3443 of SEQ ID NO: 1561778
aacuguggaccgugauuga

SEQ ID NO: 1697734 - RNA, 19 nt, Artificial Sequence
  Description of Artificial Sequence: Synthetic oligonucleotide
  Antisense strand to SEQ ID NO: 1697733
ucaaucacgguccacaguu

SEQ ID NO: 1697735 - RNA, 19 nt, Artificial Sequence
  Description of Artificial Sequence: Synthetic oligonucleotide
  Sense strand starting at position 448 of SEQ ID NO: 1561779
aggagaugguccuguacaa

SEQ ID NO: 1697736 - RNA, 19 nt, Artificial Sequence
  Description of Artificial Sequence: Synthetic oligonucleotide
  Antisense strand to SEQ ID NO: 1697735
uuguacaggaccaucuccu

SEQ ID NO: 1697737 - RNA, 19 nt, Artificial Sequence
  Description of Artificial Sequence: Synthetic oligonucleotide
  Sense strand starting at position 1451 of SEQ ID NO: 1561779
uuuggcagccgcuugauau

SEQ ID NO: 1697738 - RNA, 19 nt, Artificial Sequence
  Description of Artificial Sequence: Synthetic oligonucleotide
  Antisense strand to SEQ ID NO: 1697737
auaucaagcggcugccaaa

SEQ ID NO: 1697739 - RNA, 19 nt, Artificial Sequence
  Description of Artificial Sequence: Synthetic oligonucleotide
  Sense strand starting at position 2235 of SEQ ID NO: 1561779
ggaagagcgcuuggaaauc

SEQ ID NO: 1697740 - RNA, 19 nt, Artificial Sequence
  Description of Artificial Sequence: Synthetic oligonucleotide
  Antisense strand to SEQ ID NO: 1697739
gauuuccaagcgcucuucc

SEQ ID NO: 1697741 - RNA, 19 nt, Artificial Sequence
  Description of Artificial Sequence: Synthetic oligonucleotide
  Sense strand starting at position 2475 of SEQ ID NO: 1561779
ggcuccugccucuaggaau

SEQ ID NO: 1697742 - RNA, 19 nt, Artificial Sequence
  Description of Artificial Sequence: Synthetic oligonucleotide
  Antisense strand to SEQ ID NO: 1697741
auuccuagaggcaggagcc

SEQ ID NO: 1697743 - RNA, 19 nt, Artificial Sequence
  Description of Artificial Sequence: Synthetic oligonucleotide
  Sense strand starting at position 2624 of SEQ ID NO: 1561779
cuggcucugugguuacaga

SEQ ID NO: 1697744 - RNA, 19 nt, Artificial Sequence
  Description of Artificial Sequence: Synthetic oligonucleotide
  Antisense strand to SEQ ID NO: 1697743
ucuguaaccacagagccag

SEQ ID NO: 1697745 - RNA, 19 nt, Artificial Sequence
  Description of Artificial Sequence: Synthetic oligonucleotide
  Sense strand starting at position 2743 of SEQ ID NO: 1561779
guaugagcucuuuaccggu

SEQ ID NO: 1697746 - RNA, 19 nt, Artificial Sequence
  Description of Artificial Sequence: Synthetic oligonucleotide
  Antisense strand to SEQ ID NO: 1697745
accgguaaagagcucauac

SEQ ID NO: 1697747 - RNA, 19 nt, Artificial Sequence
  Description of Artificial Sequence: Synthetic oligonucleotide
  Sense strand starting at position 2766 of SEQ ID NO: 1561779
ggcauucaguaggugucaa

SEQ ID NO: 1697748 - RNA, 19 nt, Artificial Sequence
  Description of Artificial Sequence: Synthetic oligonucleotide
  Antisense strand to SEQ ID NO: 1697747
uugacaccuacugaaugcc

SEQ ID NO: 1697749 - RNA, 19 nt, Artificial Sequence
  Description of Artificial Sequence: Synthetic oligonucleotide
  Sense strand starting at position 2774 of SEQ ID NO: 1561779
guaggugucaaaugaaugu

SEQ ID NO: 1697750 - RNA, 19 nt, Artificial Sequence
  Description of Artificial Sequence: Synthetic oligonucleotide
  Antisense strand to SEQ ID NO: 1697749
acauucauuugacaccuac

SEQ ID NO: 1697751 - RNA, 19 nt, Artificial Sequence
  Description of Artificial Sequence: Synthetic oligonucleotide
  Sense strand starting at position 2826 of SEQ ID NO: 1561779
uccagagaaugccucugaa

SEQ ID NO: 1697752 - RNA, 19 nt, Artificial Sequence
  Description of Artificial Sequence: Synthetic oligonucleotide
  Antisense strand to SEQ ID NO: 1697751
uucagaggcauucucugga

SEQ ID NO: 1697753 - RNA, 19 nt, Artificial Sequence
  Description of Artificial Sequence: Synthetic oligonucleotide
  Sense strand starting at position 2829 of SEQ ID NO: 1561779
agagaaugccucugaaugc

SEQ ID NO: 1697754 - RNA, 19 nt, Artificial Sequence
  Description of Artificial Sequence: Synthetic oligonucleotide
  Antisense strand to SEQ ID NO: 1697753
gcauucagaggcauucucu

SEQ ID NO: 1697755 - RNA, 19 nt, Artificial Sequence
  Description of Artificial Sequence: Synthetic oligonucleotide
  Sense strand starting at position 2830 of SEQ ID NO: 1561779
gagaaugccucugaaugca

SEQ ID NO: 1697756 - RNA, 19 nt, Artificial Sequence
  Description of Artificial Sequence: Synthetic oligonucleotide
  Antisense strand to SEQ ID NO: 1697755
ugcauucagaggcauucuc

SEQ ID NO: 1697757 - RNA, 19 nt, Artificial Sequence
  Description of Artificial Sequence: Synthetic oligonucleotide
  Sense strand starting at position 2852 of SEQ ID NO: 1561779
gggucagaauggcgugaaa

SEQ ID NO: 1697758 - RNA, 19 nt, Artificial Sequence
  Description of Artificial Sequence: Synthetic oligonucleotide
  Antisense strand to SEQ ID NO: 1697757
uuucacgccauucugaccc

SEQ ID NO: 1697759 - RNA, 19 nt, Artificial Sequence
  Description of Artificial Sequence: Synthetic oligonucleotide
  Sense strand starting at position 2948 of SEQ ID NO: 1561779
agugaugacuguuucagug

SEQ ID NO: 1697760 - RNA, 19 nt, Artificial Sequence
  Description of Artificial Sequence: Synthetic oligonucleotide
  Antisense strand to SEQ ID NO: 1697759
cacugaaacagucaucacu

SEQ ID NO: 1697761 - RNA, 19 nt, Artificial Sequence
  Description of Artificial Sequence: Synthetic oligonucleotide
  Sense strand starting at position 3047 of SEQ ID NO: 1561779
agagcaaucuguuucguac

SEQ ID NO: 1697762 - RNA, 19 nt, Artificial Sequence
  Description of Artificial Sequence: Synthetic oligonucleotide
  Antisense strand to SEQ ID NO: 1697761
guacgaaacagauugcucu

SEQ ID NO: 1697763 - RNA, 19 nt, Artificial Sequence
  Description of Artificial Sequence: Synthetic oligonucleotide
  Sense strand starting at position 3144 of SEQ ID NO: 1561779
cuggguuugucucuaucuu

SEQ ID NO: 1697764 - RNA, 19 nt, Artificial Sequence
  Description of Artificial Sequence: Synthetic oligonucleotide
  Antisense strand to SEQ ID NO: 1697763
aagauagagacaaacccag

SEQ ID NO: 1697765 - RNA, 19 nt, Artificial Sequence
  Description of Artificial Sequence: Synthetic oligonucleotide
  Sense strand starting at position 3189 of SEQ ID NO: 1561779
ggaggucacucagaggaga

SEQ ID NO: 1697766 - RNA, 19 nt, Artificial Sequence
  Description of Artificial Sequence: Synthetic oligonucleotide
  Antisense strand to SEQ ID NO: 1697765
ucuccucugagugaccucc

SEQ ID NO: 1697767 - RNA, 19 nt, Artificial Sequence
  Description of Artificial Sequence: Synthetic oligonucleotide
  Sense strand starting at position 3262 of SEQ ID NO: 1561779
ucaguaaagccuggaugga

SEQ ID NO: 1697768 - RNA, 19 nt, Artificial Sequence
  Description of Artificial Sequence: Synthetic oligonucleotide
  Antisense strand to SEQ ID NO: 1697767
uccauccaggcuuuacuga

SEQ ID NO: 1697769 - RNA, 19 nt, Artificial Sequence
  Description of Artificial Sequence: Synthetic oligonucleotide
  Sense strand starting at position 3371 of SEQ ID NO: 1561779
gugggaagaucuuggcgaa

SEQ ID NO: 1697770 - RNA, 19 nt, Artificial Sequence
  Description of Artificial Sequence: Synthetic oligonucleotide
  Antisense strand to SEQ ID NO: 1697769
uucgccaagaucuucccac

SEQ ID NO: 1697771 - RNA, 19 nt, Artificial Sequence
  Description of Artificial Sequence: Synthetic oligonucleotide
  Sense strand starting at position 3372 of SEQ ID NO: 1561779
ugggaagaucuuggcgaau

SEQ ID NO: 1697772 - RNA, 19 nt, Artificial Sequence
  Description of Artificial Sequence: Synthetic oligonucleotide
  Antisense strand to SEQ ID NO: 1697771
auucgccaagaucuuccca

SEQ ID NO: 1697773 - RNA, 19 nt, Artificial Sequence
  Description of Artificial Sequence: Synthetic oligonucleotide
  Sense strand starting at position 3374 of SEQ ID NO: 1561779
ggaagaucuuggcgaauga

SEQ ID NO: 1697774 - RNA, 19 nt, Artificial Sequence
  Description of Artificial Sequence: Synthetic oligonucleotide
  Antisense strand to SEQ ID NO: 1697773
ucauucgccaagaucuucc

SEQ ID NO: 1697775 - RNA, 19 nt, Artificial Sequence
  Description of Artificial Sequence: Synthetic oligonucleotide
  Sense strand starting at position 3425 of SEQ ID NO: 1561779
gcgaccuggcgguauauau

SEQ ID NO: 1697776 - RNA, 19 nt, Artificial Sequence
  Description of Artificial Sequence: Synthetic oligonucleotide
  Antisense strand to SEQ ID NO: 1697775
auauauaccgccaggucgc

SEQ ID NO: 1697777 - RNA, 19 nt, Artificial Sequence
  Description of Artificial Sequence: Synthetic oligonucleotide
  Sense strand starting at position 3439 of SEQ ID NO: 1561779
uauauaugaucagguugaa

SEQ ID NO: 1697778 - RNA, 19 nt, Artificial Sequence
  Description of Artificial Sequence: Synthetic oligonucleotide
  Antisense strand to SEQ ID NO: 1697777
uucaaccugaucauauaua

SEQ ID NO: 1697779 - RNA, 19 nt, Artificial Sequence
  Description of Artificial Sequence: Synthetic oligonucleotide
  Sense strand starting at position 3465 of SEQ ID NO: 1561779
aggcuuugcccucgagaac

SEQ ID NO: 1697780 - RNA, 19 nt, Artificial Sequence
  Description of Artificial Sequence: Synthetic oligonucleotide
  Antisense strand to SEQ ID NO: 1697779
guucucgagggcaaagccu

SEQ ID NO: 1697781 - RNA, 19 nt, Artificial Sequence
  Description of Artificial Sequence: Synthetic oligonucleotide
  Sense strand starting at position 3466 of SEQ ID NO: 1561779
ggcuuugcccucgagaaca

SEQ ID NO: 1697782 - RNA, 19 nt, Artificial Sequence
  Description of Artificial Sequence: Synthetic oligonucleotide
  Antisense strand to SEQ ID NO: 1697781
uguucucgagggcaaagcc

SEQ ID NO: 1697783 - RNA, 19 nt, Artificial Sequence
  Description of Artificial Sequence: Synthetic oligonucleotide
  Sense strand starting at position 3524 of SEQ ID NO: 1561779
auagcagcaucguuuguaa

SEQ ID NO: 1697784 - RNA, 19 nt, Artificial Sequence
  Description of Artificial Sequence: Synthetic oligonucleotide
  Antisense strand to SEQ ID NO: 1697783
uuacaaacgaugcugcuau

SEQ ID NO: 1697785 - RNA, 19 nt, Artificial Sequence
  Description of Artificial Sequence: Synthetic oligonucleotide
  Sense strand starting at position 3526 of SEQ ID NO: 1561779
agcagcaucguuuguaaua

SEQ ID NO: 1697786 - RNA, 19 nt, Artificial Sequence
  Description of Artificial Sequence: Synthetic oligonucleotide
  Antisense strand to SEQ ID NO: 1697785
uauuacaaacgaugcugcu

SEQ ID NO: 1697787 - RNA, 19 nt, Artificial Sequence
  Description of Artificial Sequence: Synthetic oligonucleotide
  Sense strand starting at position 3528 of SEQ ID NO: 1561779
cagcaucguuuguaauagu

SEQ ID NO: 1697788 - RNA, 19 nt, Artificial Sequence
  Description of Artificial Sequence: Synthetic oligonucleotide
  Antisense strand to SEQ ID NO: 1697787
acuauuacaaacgaugcug

SEQ ID NO: 1697789 - RNA, 19 nt, Artificial Sequence
  Description of Artificial Sequence: Synthetic oligonucleotide
  Sense strand starting at position 3531 of SEQ ID NO: 1561779
caucguuuguaauagugaa

SEQ ID NO: 1697790 - RNA, 19 nt, Artificial Sequence
  Description of Artificial Sequence: Synthetic oligonucleotide
  Antisense strand to SEQ ID NO: 1697789
uucacuauuacaaacgaug

SEQ ID NO: 1697791 - RNA, 19 nt, Artificial Sequence
  Description of Artificial Sequence: Synthetic oligonucleotide
  Sense strand starting at position 3569 of SEQ ID NO: 1561779
uguccaucauuuggaaacu

SEQ ID NO: 1697792 - RNA, 19 nt, Artificial Sequence
  Description of Artificial Sequence: Synthetic oligonucleotide
  Antisense strand to SEQ ID NO: 1697791
aguuuccaaaugauggaca

SEQ ID NO: 1697793 - RNA, 19 nt, Artificial Sequence
  Description of Artificial Sequence: Synthetic oligonucleotide
  Sense strand starting at position 3623 of SEQ ID NO: 1561779
gucugugauccacaauccu

SEQ ID NO: 1697794 - RNA, 19 nt, Artificial Sequence
  Description of Artificial Sequence: Synthetic oligonucleotide
  Antisense strand to SEQ ID NO: 1697793
aggauuguggaucacagac

SEQ ID NO: 1697795 - RNA, 19 nt, Artificial Sequence
  Description of Artificial Sequence: Synthetic oligonucleotide
  Sense strand starting at position 3663 of SEQ ID NO: 1561779
uaugcauugugaggcugaa

SEQ ID NO: 1697796 - RNA, 19 nt, Artificial Sequence
  Description of Artificial Sequence: Synthetic oligonucleotide
  Antisense strand to SEQ ID NO: 1697795
uucagccucacaaugcaua

SEQ ID NO: 1697797 - RNA, 19 nt, Artificial Sequence
  Description of Artificial Sequence: Synthetic oligonucleotide
  Sense strand starting at position 3732 of SEQ ID NO: 1561779
uuacaauuugugugcucuu

SEQ ID NO: 1697798 - RNA, 19 nt, Artificial Sequence
  Description of Artificial Sequence: Synthetic oligonucleotide
  Antisense strand to SEQ ID NO: 1697797
aagagcacacaaauuguaa

SEQ ID NO: 1697799 - RNA, 19 nt, Artificial Sequence
  Description of Artificial Sequence: Synthetic oligonucleotide
  Sense strand starting at position 3735 of SEQ ID NO: 1561779
caauuugugugcucuuugu

SEQ ID NO: 1697800 - RNA, 19 nt, Artificial Sequence
  Description of Artificial Sequence: Synthetic oligonucleotide
  Antisense strand to SEQ ID NO: 1697799
acaaagagcacacaaauug

SEQ ID NO: 1697801 - RNA, 19 nt, Artificial Sequence
  Description of Artificial Sequence: Synthetic oligonucleotide
  Sense strand starting at position 3741 of SEQ ID NO: 1561779
gugugcucuuuguaugaau

SEQ ID NO: 1697802 - RNA, 19 nt, Artificial Sequence
  Description of Artificial Sequence: Synthetic oligonucleotide
  Antisense strand to SEQ ID NO: 1697801
auucauacaaagagcacac

SEQ ID NO: 1697803 - RNA, 19 nt, Artificial Sequence
  Description of Artificial Sequence: Synthetic oligonucleotide
  Sense strand starting at position 3750 of SEQ ID NO: 1561779
uuguaugaaugcuauacuu

SEQ ID NO: 1697804 - RNA, 19 nt, Artificial Sequence
  Description of Artificial Sequence: Synthetic oligonucleotide
  Antisense strand to SEQ ID NO: 1697803
aaguauagcauucauacaa

SEQ ID NO: 1697805 - RNA, 19 nt, Artificial Sequence
  Description of Artificial Sequence: Synthetic oligonucleotide
  Sense strand starting at position 3792 of SEQ ID NO: 1561779
uauauauuguuggauggaa

SEQ ID NO: 1697806 - RNA, 19 nt, Artificial Sequence
  Description of Artificial Sequence: Synthetic oligonucleotide
  Antisense strand to SEQ ID NO: 1697805
uuccauccaacaauauaua

SEQ ID NO: 1697807 - RNA, 19 nt, Artificial Sequence
  Description of Artificial Sequence: Synthetic oligonucleotide
  Sense strand starting at position 3880 of SEQ ID NO: 1561779
accauauauuguuuagcga

SEQ ID NO: 1697808 - RNA, 19 nt, Artificial Sequence
  Description of Artificial Sequence: Synthetic oligonucleotide
  Antisense strand to SEQ ID NO: 1697807
ucgcuaaacaauauauggu

SEQ ID NO: 1697809 - RNA, 19 nt, Artificial Sequence
  Description of Artificial Sequence: Synthetic oligonucleotide
  Sense strand starting at position 3928 of SEQ ID NO: 1561779
caugcaugggagugauaga

SEQ ID NO: 1697810 - RNA, 19 nt, Artificial Sequence
  Description of Artificial Sequence: Synthetic oligonucleotide
  Antisense strand to SEQ ID NO: 1697809
ucuaucacucccaugcaug

SEQ ID NO: 1697811 - RNA, 19 nt, Artificial Sequence
  Description of Artificial Sequence: Synthetic oligonucleotide
  Sense strand starting at position 262 of SEQ ID NO: 1561780
gcaggugcauucucgaaua

SEQ ID NO: 1697812 - RNA, 19 nt, Artificial Sequence
  Description of Artificial Sequence: Synthetic oligonucleotide
  Antisense strand to SEQ ID NO: 1697811
uauucgagaaugcaccugc

SEQ ID NO: 1697813 - RNA, 19 nt, Artificial Sequence
  Description of Artificial Sequence: Synthetic oligonucleotide
  Sense strand starting at position 264 of SEQ ID NO: 1561780
aggugcauucucgaauaac

SEQ ID NO: 1697814 - RNA, 19 nt, Artificial Sequence
  Description of Artificial Sequence: Synthetic oligonucleotide
  Antisense strand to SEQ ID NO: 1697813
guuauucgagaaugcaccu

SEQ ID NO: 1697815 - RNA, 19 nt, Artificial Sequence
  Description of Artificial Sequence: Synthetic oligonucleotide
  Sense strand starting at position 315 of SEQ ID NO: 1561780
acuguaauguccuaguccu

SEQ ID NO: 1697816 - RNA, 19 nt, Artificial Sequence
  Description of Artificial Sequence: Synthetic oligonucleotide
  Antisense strand to SEQ ID NO: 1697815
aggacuaggacauuacagu

SEQ ID NO: 1697817 - RNA, 19 nt, Artificial Sequence
  Description of Artificial Sequence: Synthetic oligonucleotide
  Sense strand starting at position 368 of SEQ ID NO: 1561780
gcuguuuacccuugggcaa

SEQ ID NO: 1697818 - RNA, 19 nt, Artificial Sequence
  Description of Artificial Sequence: Synthetic oligonucleotide
  Antisense strand to SEQ ID NO: 1697817
uugcccaaggguaaacagc

SEQ ID NO: 1697819 - RNA, 19 nt, Artificial Sequence
  Description of Artificial Sequence: Synthetic oligonucleotide
  Sense strand starting at position 459 of SEQ ID NO: 1561780
ugaucaucaugacaacagu

SEQ ID NO: 1697820 - RNA, 19 nt, Artificial Sequence
  Description of Artificial Sequence: Synthetic oligonucleotide
  Antisense strand to SEQ ID NO: 1697819
acuguugucaugaugauca

SEQ ID NO: 1697821 - RNA, 19 nt, Artificial Sequence
  Description of Artificial Sequence: Synthetic oligonucleotide
  Sense strand starting at position 476 of SEQ ID NO: 1561780
gugugaggccagcacaauu

SEQ ID NO: 1697822 - RNA, 19 nt, Artificial Sequence
  Description of Artificial Sequence: Synthetic oligonucleotide
  Antisense strand to SEQ ID NO: 1697821
aauugugcuggccucacac

SEQ ID NO: 1697823 - RNA, 19 nt, Artificial Sequence
  Description of Artificial Sequence: Synthetic oligonucleotide
  Sense strand starting at position 529 of SEQ ID NO: 1561780
ggacaagggucucgcucaa

SEQ ID NO: 1697824 - RNA, 19 nt, Artificial Sequence
  Description of Artificial Sequence: Synthetic oligonucleotide
  Antisense strand to SEQ ID NO: 1697823
uugagcgagacccuugucc

SEQ ID NO: 1697825 - RNA, 19 nt, Artificial Sequence
  Description of Artificial Sequence: Synthetic oligonucleotide
  Sense strand starting at position 608 of SEQ ID NO: 1561780
uccucaggguggucagauu

SEQ ID NO: 1697826 - RNA, 19 nt, Artificial Sequence
  Description of Artificial Sequence: Synthetic oligonucleotide
  Antisense strand to SEQ ID NO: 1697825
aaucugaccacccugagga

SEQ ID NO: 1697827 - RNA, 19 nt, Artificial Sequence
  Description of Artificial Sequence: Synthetic oligonucleotide
  Sense strand starting at position 654 of SEQ ID NO: 1561780
aucgaaucucagcaagauc

SEQ ID NO: 1697828 - RNA, 19 nt, Artificial Sequence
  Description of Artificial Sequence: Synthetic oligonucleotide
  Antisense strand to SEQ ID NO: 1697827
gaucuugcugagauucgau

SEQ ID NO: 1697829 - RNA, 19 nt, Artificial Sequence
  Description of Artificial Sequence: Synthetic oligonucleotide
  Sense strand starting at position 705 of SEQ ID NO: 1561780
ucugguguucugcaaaguu

SEQ ID NO: 1697830 - RNA, 19 nt, Artificial Sequence
  Description of Artificial Sequence: Synthetic oligonucleotide
  Antisense strand to SEQ ID NO: 1697829
aacuuugcagaacaccaga

SEQ ID NO: 1697831 - RNA, 19 nt, Artificial Sequence
  Description of Artificial Sequence: Synthetic oligonucleotide
  Sense strand starting at position 713 of SEQ ID NO: 1561780
ucugcaaaguucuggccau

SEQ ID NO: 1697832 - RNA, 19 nt, Artificial Sequence
  Description of Artificial Sequence: Synthetic oligonucleotide
  Antisense strand to SEQ ID NO: 1697831
auggccagaacuuugcaga

SEQ ID NO: 1697833 - RNA, 19 nt, Artificial Sequence
  Description of Artificial Sequence: Synthetic oligonucleotide
  Sense strand starting at position 717 of SEQ ID NO: 1561780
caaaguucuggccaugaac

SEQ ID NO: 1697834 - RNA, 19 nt, Artificial Sequence
  Description of Artificial Sequence: Synthetic oligonucleotide
  Antisense strand to SEQ ID NO: 1697833
guucauggccagaacuuug

SEQ ID NO: 1697835 - RNA, 19 nt, Artificial Sequence
  Description of Artificial Sequence: Synthetic oligonucleotide
  Sense strand starting at position 833 of SEQ ID NO: 1561780
gggcuaaauaaacguccaa

SEQ ID NO: 1697836 - RNA, 19 nt, Artificial Sequence
  Description of Artificial Sequence: Synthetic oligonucleotide
  Antisense strand to SEQ ID NO: 1697835
uuggacguuuauuuagccc

SEQ ID NO: 1697837 - RNA, 19 nt, Artificial Sequence
  Description of Artificial Sequence: Synthetic oligonucleotide
  Sense strand starting at position 844 of SEQ ID NO: 1561780
acguccaaaugauaucaca

SEQ ID NO: 1697838 - RNA, 19 nt, Artificial Sequence
  Description of Artificial Sequence: Synthetic oligonucleotide
  Antisense strand to SEQ ID NO: 1697837
ugugauaucauuuggacgu

SEQ ID NO: 1697839 - RNA, 19 nt, Artificial Sequence
  Description of Artificial Sequence: Synthetic oligonucleotide
  Sense strand starting at position 2688 of SEQ ID NO: 1561780
cagcgacaccucgcuguaa

SEQ ID NO: 1697840 - RNA, 19 nt, Artificial Sequence
  Description of Artificial Sequence: Synthetic oligonucleotide
  Antisense strand to SEQ ID NO: 1697839
uuacagcgaggugucgcug

SEQ ID NO: 1697841 - RNA, 19 nt, Artificial Sequence
  Description of Artificial Sequence: Synthetic oligonucleotide
  Sense strand starting at position 2848 of SEQ ID NO: 1561780
aacccagaguccuagagau

SEQ ID NO: 1697842 - RNA, 19 nt, Artificial Sequence
  Description of Artificial Sequence: Synthetic oligonucleotide
  Antisense strand to SEQ ID NO: 1697841
aucucuaggacucuggguu

SEQ ID NO: 1697843 - RNA, 19 nt, Artificial Sequence
  Description of Artificial Sequence: Synthetic oligonucleotide
  Sense strand starting at position 2858 of SEQ ID NO: 1561780
ccuagagauuggguuccaa

SEQ ID NO: 1697844 - RNA, 19 nt, Artificial Sequence
  Description of Artificial Sequence: Synthetic oligonucleotide
  Antisense strand to SEQ ID NO: 1697843
uuggaacccaaucucuagg

SEQ ID NO: 1697845 - RNA, 19 nt, Artificial Sequence
  Description of Artificial Sequence: Synthetic oligonucleotide
  Sense strand starting at position 2890 of SEQ ID NO: 1561780
ucuggaggccugugugauc

SEQ ID NO: 1697846 - RNA, 19 nt, Artificial Sequence
  Description of Artificial Sequence: Synthetic oligonucleotide
  Antisense strand to SEQ ID NO: 1697845
gaucacacaggccuccaga

SEQ ID NO: 1697847 - RNA, 19 nt, Artificial Sequence
  Description of Artificial Sequence: Synthetic oligonucleotide
  Sense strand starting at position 2895 of SEQ ID NO: 1561780
aggccugugugaucuugaa

SEQ ID NO: 1697848 - RNA, 19 nt, Artificial Sequence
  Description of Artificial Sequence: Synthetic oligonucleotide
  Antisense strand to SEQ ID NO: 1697847
uucaagaucacacaggccu

SEQ ID NO: 1697849 - RNA, 19 nt, Artificial Sequence
  Description of Artificial Sequence: Synthetic oligonucleotide
  Sense strand starting at position 3299 of SEQ ID NO: 1561780
agaugauaguguuuccaau

SEQ ID NO: 1697850 - RNA, 19 nt, Artificial Sequence
  Description of Artificial Sequence: Synthetic oligonucleotide
  Antisense strand to SEQ ID NO: 1697849
auuggaaacacuaucaucu

SEQ ID NO: 1697851 - RNA, 19 nt, Artificial Sequence
  Description of Artificial Sequence: Synthetic oligonucleotide
  Sense strand starting at position 3301 of SEQ ID NO: 1561780
augauaguguuuccaauac

SEQ ID NO: 1697852 - RNA, 19 nt, Artificial Sequence
  Description of Artificial Sequence: Synthetic oligonucleotide
  Antisense strand to SEQ ID NO: 1697851
guauuggaaacacuaucau

SEQ ID NO: 1697853 - RNA, 19 nt, Artificial Sequence
  Description of Artificial Sequence: Synthetic oligonucleotide
  Sense strand starting at position 3437 of SEQ ID NO: 1561780
uuaugcuacgccuguacua

SEQ ID NO: 1697854 - RNA, 19 nt, Artificial Sequence
  Description of Artificial Sequence: Synthetic oligonucleotide
  Antisense strand to SEQ ID NO: 1697853
uaguacaggcguagcauaa

SEQ ID NO: 1697855 - RNA, 19 nt, Artificial Sequence
  Description of Artificial Sequence: Synthetic oligonucleotide
  Sense strand starting at position 3439 of SEQ ID NO: 1561780
augcuacgccuguacuauu

SEQ ID NO: 1697856 - RNA, 19 nt, Artificial Sequence
  Description of Artificial Sequence: Synthetic oligonucleotide
  Antisense strand to SEQ ID NO: 1697855
aauaguacaggcguagcau

SEQ ID NO: 1697857 - RNA, 19 nt, Artificial Sequence
  Description of Artificial Sequence: Synthetic oligonucleotide
  Sense strand starting at position 3457 of SEQ ID NO: 1561780
ucacuuuaaguugguuauu

SEQ ID NO: 1697858 - RNA, 19 nt, Artificial Sequence
  Description of Artificial Sequence: Synthetic oligonucleotide
  Antisense strand to SEQ ID NO: 1697857
aauaaccaacuuaaaguga

SEQ ID NO: 1697859 - RNA, 19 nt, Artificial Sequence
  Description of Artificial Sequence: Synthetic oligonucleotide
  Sense strand starting at position 3578 of SEQ ID NO: 1561780
ggcgugagccaagguugau

SEQ ID NO: 1697860 - RNA, 19 nt, Artificial Sequence
  Description of Artificial Sequence: Synthetic oligonucleotide
  Antisense strand to SEQ ID NO: 1697859
aucaaccuuggcucacgcc

SEQ ID NO: 1697861 - RNA, 19 nt, Artificial Sequence
  Description of Artificial Sequence: Synthetic oligonucleotide
  Sense strand starting at position 3624 of SEQ ID NO: 1561780
uguuaugggcccugacaac

SEQ ID NO: 1697862 - RNA, 19 nt, Artificial Sequence
  Description of Artificial Sequence: Synthetic oligonucleotide
  Antisense strand to SEQ ID NO: 1697861
guugucagggcccauaaca

SEQ ID NO: 1697863 - RNA, 19 nt, Artificial Sequence
  Description of Artificial Sequence: Synthetic oligonucleotide
  Sense strand starting at position 3765 of SEQ ID NO: 1561780
ccuaucuguuuccuggaga

SEQ ID NO: 1697864 - RNA, 19 nt, Artificial Sequence
  Description of Artificial Sequence: Synthetic oligonucleotide
  Antisense strand to SEQ ID NO: 1697863
ucuccaggaaacagauagg

SEQ ID NO: 1697865 - RNA, 19 nt, Artificial Sequence
  Description of Artificial Sequence: Synthetic oligonucleotide
  Sense strand starting at position 3766 of SEQ ID NO: 1561780
cuaucuguuuccuggagag

SEQ ID NO: 1697866 - RNA, 19 nt, Artificial Sequence
  Description of Artificial Sequence: Synthetic oligonucleotide
  Antisense strand to SEQ ID NO: 1697865
cucuccaggaaacagauag

SEQ ID NO: 1697867 - RNA, 19 nt, Artificial Sequence
  Description of Artificial Sequence: Synthetic oligonucleotide
  Sense strand starting at position 3809 of SEQ ID NO: 1561780
caaacuguggaccgugauu

SEQ ID NO: 1697868 - RNA, 19 nt, Artificial Sequence
  Description of Artificial Sequence: Synthetic oligonucleotide
  Antisense strand to SEQ ID NO: 1697867
aaucacgguccacaguuug

SEQ ID NO: 1697869 - RNA, 19 nt, Artificial Sequence
  Description of Artificial Sequence: Synthetic oligonucleotide
  Sense strand starting at position 3811 of SEQ ID NO: 1561780
aacuguggaccgugauuga

SEQ ID NO: 1697870 - RNA, 19 nt, Artificial Sequence
  Description of Artificial Sequence: Synthetic oligonucleotide
  Antisense strand to SEQ ID NO: 1697869
ucaaucacgguccacaguu

SEQ ID NO: 1697871 - RNA, 19 nt, Artificial Sequence
  Description of Artificial Sequence: Synthetic oligonucleotide
  Sense strand starting at position 107 of SEQ ID NO: 1561781
ccucauugggcaggugaga

SEQ ID NO: 1697872 - RNA, 19 nt, Artificial Sequence
  Description of Artificial Sequence: Synthetic oligonucleotide
  Antisense strand to SEQ ID NO: 1697871
ucucaccugcccaaugagg

SEQ ID NO: 1697873 - RNA, 19 nt, Artificial Sequence
  Description of Artificial Sequence: Synthetic oligonucleotide
  Sense strand starting at position 196 of SEQ ID NO: 1561781
caaggacuuccgggugaca

SEQ ID NO: 1697874 - RNA, 19 nt, Artificial Sequence
  Description of Artificial Sequence: Synthetic oligonucleotide
  Antisense strand to SEQ ID NO: 1697873
ugucacccggaaguccuug

SEQ ID NO: 1697875 - RNA, 19 nt, Artificial Sequence
  Description of Artificial Sequence: Synthetic oligonucleotide
  Sense strand starting at position 198 of SEQ ID NO: 1561781
aggacuuccgggugacaag

SEQ ID NO: 1697876 - RNA, 19 nt, Artificial Sequence
  Description of Artificial Sequence: Synthetic oligonucleotide
  Antisense strand to SEQ ID NO: 1697875
cuugucacccggaaguccu

SEQ ID NO: 1697877 - RNA, 19 nt, Artificial Sequence
  Description of Artificial Sequence: Synthetic oligonucleotide
  Sense strand starting at position 392 of SEQ ID NO: 1561781
aggauucagcgcuguggga

SEQ ID NO: 1697878 - RNA, 19 nt, Artificial Sequence
  Description of Artificial Sequence: Synthetic oligonucleotide
  Antisense strand to SEQ ID NO: 1697877
ucccacagcgcugaauccu

SEQ ID NO: 1697879 - RNA, 19 nt, Artificial Sequence
  Description of Artificial Sequence: Synthetic oligonucleotide
  Sense strand starting at position 394 of SEQ ID NO: 1561781
gauucagcgcugugggaaa

SEQ ID NO: 1697880 - RNA, 19 nt, Artificial Sequence
  Description of Artificial Sequence: Synthetic oligonucleotide
  Antisense strand to SEQ ID NO: 1697879
uuucccacagcgcugaauc

SEQ ID NO: 1697881 - RNA, 19 nt, Artificial Sequence
  Description of Artificial Sequence: Synthetic oligonucleotide
  Sense strand starting at position 479 of SEQ ID NO: 1561781
ccaggcauuccaggaagau

SEQ ID NO: 1697882 - RNA, 19 nt, Artificial Sequence
  Description of Artificial Sequence: Synthetic oligonucleotide
  Antisense strand to SEQ ID NO: 1697881
aucuuccuggaaugccugg

SEQ ID NO: 1697883 - RNA, 19 nt, Artificial Sequence
  Description of Artificial Sequence: Synthetic oligonucleotide
  Sense strand starting at position 509 of SEQ ID NO: 1561781
gcauguggcucuguucaga

SEQ ID NO: 1697884 - RNA, 19 nt, Artificial Sequence
  Description of Artificial Sequence: Synthetic oligonucleotide
  Antisense strand to SEQ ID NO: 1697883
ucugaacagagccacaugc

SEQ ID NO: 1697885 - RNA, 19 nt, Artificial Sequence
  Description of Artificial Sequence: Synthetic oligonucleotide
  Sense strand starting at position 792 of SEQ ID NO: 1561781
ucaucucuuguuugacaga

SEQ ID NO: 1697886 - RNA, 19 nt, Artificial Sequence
  Description of Artificial Sequence: Synthetic oligonucleotide
  Antisense strand to SEQ ID NO: 1697885
ucugucaaacaagagauga

SEQ ID NO: 1697887 - RNA, 19 nt, Artificial Sequence
  Description of Artificial Sequence: Synthetic oligonucleotide
  Sense strand starting at position 819 of SEQ ID NO: 1561781
uccugaaacucagcugaca

SEQ ID NO: 1697888 - RNA, 19 nt, Artificial Sequence
  Description of Artificial Sequence: Synthetic oligonucleotide
  Antisense strand to SEQ ID NO: 1697887
ugucagcugaguuucagga

SEQ ID NO: 1697889 - RNA, 19 nt, Artificial Sequence
  Description of Artificial Sequence: Synthetic oligonucleotide
  Sense strand starting at position 876 of SEQ ID NO: 1561781
cucagaagcuuugaguaaa

SEQ ID NO: 1697890 - RNA, 19 nt, Artificial Sequence
  Description of Artificial Sequence: Synthetic oligonucleotide
  Antisense strand to SEQ ID NO: 1697889
uuuacucaaagcuucugag

SEQ ID NO: 1697891 - RNA, 19 nt, Artificial Sequence
  Description of Artificial Sequence: Synthetic oligonucleotide
  Sense strand starting at position 879 of SEQ ID NO: 1561781
agaagcuuugaguaaacuu

SEQ ID NO: 1697892 - RNA, 19 nt, Artificial Sequence
  Description of Artificial Sequence: Synthetic oligonucleotide
  Antisense strand to SEQ ID NO: 1697891
aaguuuacucaaagcuucu

SEQ ID NO: 1697893 - RNA, 19 nt, Artificial Sequence
  Description of Artificial Sequence: Synthetic oligonucleotide
  Sense strand starting at position 915 of SEQ ID NO: 1561781
ugacaauagugggagcaau

SEQ ID NO: 1697894 - RNA, 19 nt, Artificial Sequence
  Description of Artificial Sequence: Synthetic oligonucleotide
  Antisense strand to SEQ ID NO: 1697893
auugcucccacuauuguca

SEQ ID NO: 1697895 - RNA, 19 nt, Artificial Sequence
  Description of Artificial Sequence: Synthetic oligonucleotide
  Sense strand starting at position 944 of SEQ ID NO: 1561781
uugucauuagaauagguuu

SEQ ID NO: 1697896 - RNA, 19 nt, Artificial Sequence
  Description of Artificial Sequence: Synthetic oligonucleotide
  Antisense strand to SEQ ID NO: 1697895
aaaccuauucuaaugacaa

SEQ ID NO: 1697897 - RNA, 19 nt, Artificial Sequence
  Description of Artificial Sequence: Synthetic oligonucleotide
  Sense strand starting at position 985 of SEQ ID NO: 1561781
agacgugucuaaccaccau

SEQ ID NO: 1697898 - RNA, 19 nt, Artificial Sequence
  Description of Artificial Sequence: Synthetic oligonucleotide
  Antisense strand to SEQ ID NO: 1697897
auggugguuagacacgucu

SEQ ID NO: 1697899 - RNA, 19 nt, Artificial Sequence
  Description of Artificial Sequence: Synthetic oligonucleotide
  Sense strand starting at position 989 of SEQ ID NO: 1561781
gugucuaaccaccaucaaa

SEQ ID NO: 1697900 - RNA, 19 nt, Artificial Sequence
  Description of Artificial Sequence: Synthetic oligonucleotide
  Antisense strand to SEQ ID NO: 1697899
uuugauggugguuagacac

SEQ ID NO: 1697901 - RNA, 19 nt, Artificial Sequence
  Description of Artificial Sequence: Synthetic oligonucleotide
  Sense strand starting at position 1102 of SEQ ID NO: 1561781
auggcuucggcacacgaaa

SEQ ID NO: 1697902 - RNA, 19 nt, Artificial Sequence
  Description of Artificial Sequence: Synthetic oligonucleotide
  Antisense strand to SEQ ID NO: 1697901
uuucgugugccgaagccau

SEQ ID NO: 1697903 - RNA, 19 nt, Artificial Sequence
  Description of Artificial Sequence: Synthetic oligonucleotide
  Sense strand starting at position 1123 of SEQ ID NO: 1561781
gagagucuuuaauccagac

SEQ ID NO: 1697904 - RNA, 19 nt, Artificial Sequence
  Description of Artificial Sequence: Synthetic oligonucleotide
  Antisense strand to SEQ ID NO: 1697903
gucuggauuaaagacucuc

SEQ ID NO: 1697905 - RNA, 19 nt, Artificial Sequence
  Description of Artificial Sequence: Synthetic oligonucleotide
  Sense strand starting at position 1296 of SEQ ID NO: 1561781
agauuaauuuacgaugcgu

SEQ ID NO: 1697906 - RNA, 19 nt, Artificial Sequence
  Description of Artificial Sequence: Synthetic oligonucleotide
  Antisense strand to SEQ ID NO: 1697905
acgcaucguaaauuaaucu

SEQ ID NO: 1697907 - RNA, 19 nt, Artificial Sequence
  Description of Artificial Sequence: Synthetic oligonucleotide
  Sense strand starting at position 1298 of SEQ ID NO: 1561781
auuaauuuacgaugcguua

SEQ ID NO: 1697908 - RNA, 19 nt, Artificial Sequence
  Description of Artificial Sequence: Synthetic oligonucleotide
  Antisense strand to SEQ ID NO: 1697907
uaacgcaucguaaauuaau

SEQ ID NO: 1697909 - RNA, 19 nt, Artificial Sequence
  Description of Artificial Sequence: Synthetic oligonucleotide
  Sense strand starting at position 1307 of SEQ ID NO: 1561781
cgaugcguuacagaacaau

SEQ ID NO: 1697910 - RNA, 19 nt, Artificial Sequence
  Description of Artificial Sequence: Synthetic oligonucleotide
  Antisense strand to SEQ ID NO: 1697909
auuguucuguaacgcaucg

SEQ ID NO: 1697911 - RNA, 19 nt, Artificial Sequence
  Description of Artificial Sequence: Synthetic oligonucleotide
  Sense strand starting at position 2093 of SEQ ID NO: 1561781
ggcggagucccgagugaca

SEQ ID NO: 1697912 - RNA, 19 nt, Artificial Sequence
  Description of Artificial Sequence: Synthetic oligonucleotide
  Antisense strand to SEQ ID NO: 1697911
ugucacucgggacuccgcc

SEQ ID NO: 1697913 - RNA, 19 nt, Artificial Sequence
  Description of Artificial Sequence: Synthetic oligonucleotide
  Sense strand starting at position 2274 of SEQ ID NO: 1561781
gcuggucuugcaggugagu

SEQ ID NO: 1697914 - RNA, 19 nt, Artificial Sequence
  Description of Artificial Sequence: Synthetic oligonucleotide
  Antisense strand to SEQ ID NO: 1697913
acucaccugcaagaccagc

SEQ ID NO: 1697915 - RNA, 19 nt, Artificial Sequence
  Description of Artificial Sequence: Synthetic oligonucleotide
  Sense strand starting at position 2276 of SEQ ID NO: 1561781
uggucuugcaggugaguuu

SEQ ID NO: 1697916 - RNA, 19 nt, Artificial Sequence
  Description of Artificial Sequence: Synthetic oligonucleotide
  Antisense strand to SEQ ID NO: 1697915
aaacucaccugcaagacca

SEQ ID NO: 1697917 - RNA, 19 nt, Artificial Sequence
  Description of Artificial Sequence: Synthetic oligonucleotide
  Sense strand starting at position 2277 of SEQ ID NO: 1561781
ggucuugcaggugaguuua

SEQ ID NO: 1697918 - RNA, 19 nt, Artificial Sequence
  Description of Artificial Sequence: Synthetic oligonucleotide
  Antisense strand to SEQ ID NO: 1697917
uaaacucaccugcaagacc

SEQ ID NO: 1697919 - RNA, 19 nt, Artificial Sequence
  Description of Artificial Sequence: Synthetic oligonucleotide
  Sense strand starting at position 2288 of SEQ ID NO: 1561781
ugaguuuacucagcgcuuu

SEQ ID NO: 1697920 - RNA, 19 nt, Artificial Sequence
  Description of Artificial Sequence: Synthetic oligonucleotide
  Antisense strand to SEQ ID NO: 1697919
aaagcgcugaguaaacuca

SEQ ID NO: 1697921 - RNA, 19 nt, Artificial Sequence
  Description of Artificial Sequence: Synthetic oligonucleotide
  Sense strand starting at position 2289 of SEQ ID NO: 1561781
gaguuuacucagcgcuuua

SEQ ID NO: 1697922 - RNA, 19 nt, Artificial Sequence
  Description of Artificial Sequence: Synthetic oligonucleotide
  Antisense strand to SEQ ID NO: 1697921
uaaagcgcugaguaaacuc

SEQ ID NO: 1697923 - RNA, 19 nt, Artificial Sequence
  Description of Artificial Sequence: Synthetic oligonucleotide
  Sense strand starting at position 2294 of SEQ ID NO: 1561781
uacucagcgcuuuaaguaa

SEQ ID NO: 1697924 - RNA, 19 nt, Artificial Sequence
  Description of Artificial Sequence: Synthetic oligonucleotide
  Antisense strand to SEQ ID NO: 1697923
uuacuuaaagcgcugagua

SEQ ID NO: 1697925 - RNA, 19 nt, Artificial Sequence
  Description of Artificial Sequence: Synthetic oligonucleotide
  Sense strand starting at position 2323 of SEQ ID NO: 1561781
acguaaucguucucaucaa

SEQ ID NO: 1697926 - RNA, 19 nt, Artificial Sequence
  Description of Artificial Sequence: Synthetic oligonucleotide
  Antisense strand to SEQ ID NO: 1697925
uugaugagaacgauuacgu

SEQ ID NO: 1697927 - RNA, 19 nt, Artificial Sequence
  Description of Artificial Sequence: Synthetic oligonucleotide
  Sense strand starting at position 2514 of SEQ ID NO: 1561781
ccggaaucaucuccaaaca

SEQ ID NO: 1697928 - RNA, 19 nt, Artificial Sequence
  Description of Artificial Sequence: Synthetic oligonucleotide
  Antisense strand to SEQ ID NO: 1697927
uguuuggagaugauuccgg

SEQ ID NO: 1697929 - RNA, 19 nt, Artificial Sequence
  Description of Artificial Sequence: Synthetic oligonucleotide
  Sense strand starting at position 2742 of SEQ ID NO: 1561781
ccguuuaccugaguucagu

SEQ ID NO: 1697930 - RNA, 19 nt, Artificial Sequence
  Description of Artificial Sequence: Synthetic oligonucleotide
  Antisense strand to SEQ ID NO: 1697929
acugaacucagguaaacgg

SEQ ID NO: 1697931 - RNA, 19 nt, Artificial Sequence
  Description of Artificial Sequence: Synthetic oligonucleotide
  Sense strand starting at position 2753 of SEQ ID NO: 1561781
aguucagugcggucaucuu

SEQ ID NO: 1697932 - RNA, 19 nt, Artificial Sequence
  Description of Artificial Sequence: Synthetic oligonucleotide
  Antisense strand to SEQ ID NO: 1697931
aagaugaccgcacugaacu

SEQ ID NO: 1697933 - RNA, 19 nt, Artificial Sequence
  Description of Artificial Sequence: Synthetic oligonucleotide
  Sense strand starting at position 2795 of SEQ ID NO: 1561781
caaggcuucccgugacaca

SEQ ID NO: 1697934 - RNA, 19 nt, Artificial Sequence
  Description of Artificial Sequence: Synthetic oligonucleotide
  Antisense strand to SEQ ID NO: 1697933
ugugucacgggaagccuug

SEQ ID NO: 1697935 - RNA, 19 nt, Artificial Sequence
  Description of Artificial Sequence: Synthetic oligonucleotide
  Sense strand starting at position 2960 of SEQ ID NO: 1561781
gucauuaagcugcgcaaca

SEQ ID NO: 1697936 - RNA, 19 nt, Artificial Sequence
  Description of Artificial Sequence: Synthetic oligonucleotide
  Antisense strand to SEQ ID NO: 1697935
uguugcgcagcuuaaugac

SEQ ID NO: 1697937 - RNA, 19 nt, Artificial Sequence
  Description of Artificial Sequence: Synthetic oligonucleotide
  Sense strand starting at position 2961 of SEQ ID NO: 1561781
ucauuaagcugcgcaacau

SEQ ID NO: 1697938 - RNA, 19 nt, Artificial Sequence
  Description of Artificial Sequence: Synthetic oligonucleotide
  Antisense strand to SEQ ID NO: 1697937
auguugcgcagcuuaauga

SEQ ID NO: 1697939 - RNA, 19 nt, Artificial Sequence
  Description of Artificial Sequence: Synthetic oligonucleotide
  Sense strand starting at position 3018 of SEQ ID NO: 1561781
gcagaaaggccagguucau

SEQ ID NO: 1697940 - RNA, 19 nt, Artificial Sequence
  Description of Artificial Sequence: Synthetic oligonucleotide
  Antisense strand to SEQ ID NO: 1697939
augaaccuggccuuucugc

SEQ ID NO: 1697941 - RNA, 19 nt, Artificial Sequence
  Description of Artificial Sequence: Synthetic oligonucleotide
  Sense strand starting at position 3117 of SEQ ID NO: 1561781
cgaucucagauugaagcua

SEQ ID NO: 1697942 - RNA, 19 nt, Artificial Sequence
  Description of Artificial Sequence: Synthetic oligonucleotide
  Antisense strand to SEQ ID NO: 1697941
uagcuucaaucugagaucg

SEQ ID NO: 1697943 - RNA, 19 nt, Artificial Sequence
  Description of Artificial Sequence: Synthetic oligonucleotide
  Sense strand starting at position 3217 of SEQ ID NO: 1561781
gggacauucuuccaaagaa

SEQ ID NO: 1697944 - RNA, 19 nt, Artificial Sequence
  Description of Artificial Sequence: Synthetic oligonucleotide
  Antisense strand to SEQ ID NO: 1697943
uucuuuggaagaauguccc

SEQ ID NO: 1697945 - RNA, 19 nt, Artificial Sequence
  Description of Artificial Sequence: Synthetic oligonucleotide
  Sense strand starting at position 3257 of SEQ ID NO: 1561781
agguauaugcacugaaaua

SEQ ID NO: 1697946 - RNA, 19 nt, Artificial Sequence
  Description of Artificial Sequence: Synthetic oligonucleotide
  Antisense strand to SEQ ID NO: 1697945
uauuucagugcauauaccu

SEQ ID NO: 1697947 - RNA, 19 nt, Artificial Sequence
  Description of Artificial Sequence: Synthetic oligonucleotide
  Sense strand starting at position 3571 of SEQ ID NO: 1561781
gugggaagucaaggcugua

SEQ ID NO: 1697948 - RNA, 19 nt, Artificial Sequence
  Description of Artificial Sequence: Synthetic oligonucleotide
  Antisense strand to SEQ ID NO: 1697947
uacagccuugacuucccac

SEQ ID NO: 1697949 - RNA, 19 nt, Artificial Sequence
  Description of Artificial Sequence: Synthetic oligonucleotide
  Sense strand starting at position 3723 of SEQ ID NO: 1561781
augagcacgaugcaugaua

SEQ ID NO: 1697950 - RNA, 19 nt, Artificial Sequence
  Description of Artificial Sequence: Synthetic oligonucleotide
  Antisense strand to SEQ ID NO: 1697949
uaucaugcaucgugcucau

SEQ ID NO: 1697951 - RNA, 19 nt, Artificial Sequence
  Description of Artificial Sequence: Synthetic oligonucleotide
  Sense strand starting at position 51 of SEQ ID NO: 1561782
agaggcuauuaugccuaaa

SEQ ID NO: 1697952 - RNA, 19 nt, Artificial Sequence
  Description of Artificial Sequence: Synthetic oligonucleotide
  Antisense strand to SEQ ID NO: 1697951
uuuaggcauaauagccucu

SEQ ID NO: 1697953 - RNA, 19 nt, Artificial Sequence
  Description of Artificial Sequence: Synthetic oligonucleotide
  Sense strand starting at position 53 of SEQ ID NO: 1561782
aggcuauuaugccuaaaca

SEQ ID NO: 1697954 - RNA, 19 nt, Artificial Sequence
  Description of Artificial Sequence: Synthetic oligonucleotide
  Antisense strand to SEQ ID NO: 1697953
uguuuaggcauaauagccu

SEQ ID NO: 1697955 - RNA, 19 nt, Artificial Sequence
  Description of Artificial Sequence: Synthetic oligonucleotide
  Sense strand starting at position 54 of SEQ ID NO: 1561782
ggcuauuaugccuaaacau

SEQ ID NO: 1697956 - RNA, 19 nt, Artificial Sequence
  Description of Artificial Sequence: Synthetic oligonucleotide
  Antisense strand to SEQ ID NO: 1697955
auguuuaggcauaauagcc

SEQ ID NO: 1697957 - RNA, 19 nt, Artificial Sequence
  Description of Artificial Sequence: Synthetic oligonucleotide
  Sense strand starting at position 63 of SEQ ID NO: 1561782
gccuaaacaucugaggaag

SEQ ID NO: 1697958 - RNA, 19 nt, Artificial Sequence
  Description of Artificial Sequence: Synthetic oligonucleotide
  Antisense strand to SEQ ID NO: 1697957
cuuccucagauguuuaggc

SEQ ID NO: 1697959 - RNA, 19 nt, Artificial Sequence
  Description of Artificial Sequence: Synthetic oligonucleotide
  Sense strand starting at position 65 of SEQ ID NO: 1561782
cuaaacaucugaggaagau

SEQ ID NO: 1697960 - RNA, 19 nt, Artificial Sequence
  Description of Artificial Sequence: Synthetic oligonucleotide
  Antisense strand to SEQ ID NO: 1697959
aucuuccucagauguuuag

SEQ ID NO: 1697961 - RNA, 19 nt, Artificial Sequence
  Description of Artificial Sequence: Synthetic oligonucleotide
  Sense strand starting at position 135 of SEQ ID NO: 1561782
acccuauuaguaggacuau

SEQ ID NO: 1697962 - RNA, 19 nt, Artificial Sequence
  Description of Artificial Sequence: Synthetic oligonucleotide
  Antisense strand to SEQ ID NO: 1697961
auaguccuacuaauagggu

SEQ ID NO: 1697963 - RNA, 19 nt, Artificial Sequence
  Description of Artificial Sequence: Synthetic oligonucleotide
  Sense strand starting at position 136 of SEQ ID NO: 1561782
cccuauuaguaggacuauu

SEQ ID NO: 1697964 - RNA, 19 nt, Artificial Sequence
  Description of Artificial Sequence: Synthetic oligonucleotide
  Antisense strand to SEQ ID NO: 1697963
aauaguccuacuaauaggg

SEQ ID NO: 1697965 - RNA, 19 nt, Artificial Sequence
  Description of Artificial Sequence: Synthetic oligonucleotide
  Sense strand starting at position 144 of SEQ ID NO: 1561782
guaggacuauugcuaauuc

SEQ ID NO: 1697966 - RNA, 19 nt, Artificial Sequence
  Description of Artificial Sequence: Synthetic oligonucleotide
  Antisense strand to SEQ ID NO: 1697965
gaauuagcaauaguccuac

SEQ ID NO: 1697967 - RNA, 19 nt, Artificial Sequence
  Description of Artificial Sequence: Synthetic oligonucleotide
  Sense strand starting at position 182 of SEQ ID NO: 1561782
cacggagagcaaugaacuu

SEQ ID NO: 1697968 - RNA, 19 nt, Artificial Sequence
  Description of Artificial Sequence: Synthetic oligonucleotide
  Antisense strand to SEQ ID NO: 1697967
aaguucauugcucuccgug

SEQ ID NO: 1697969 - RNA, 19 nt, Artificial Sequence
  Description of Artificial Sequence: Synthetic oligonucleotide
  Sense strand starting at position 270 of SEQ ID NO: 1561782
ccgugugcuagcuagugau

SEQ ID NO: 1697970 - RNA, 19 nt, Artificial Sequence
  Description of Artificial Sequence: Synthetic oligonucleotide
  Antisense strand to SEQ ID NO: 1697969
aucacuagcuagcacacgg

SEQ ID NO: 1697971 - RNA, 19 nt, Artificial Sequence
  Description of Artificial Sequence: Synthetic oligonucleotide
  Sense strand starting at position 274 of SEQ ID NO: 1561782
gugcuagcuagugauucca

SEQ ID NO: 1697972 - RNA, 19 nt, Artificial Sequence
  Description of Artificial Sequence: Synthetic oligonucleotide
  Antisense strand to SEQ ID NO: 1697971
uggaaucacuagcuagcac

SEQ ID NO: 1697973 - RNA, 19 nt, Artificial Sequence
  Description of Artificial Sequence: Synthetic oligonucleotide
  Sense strand starting at position 676 of SEQ ID NO: 1561782
gugagauccuccagcggga

SEQ ID NO: 1697974 - RNA, 19 nt, Artificial Sequence
  Description of Artificial Sequence: Synthetic oligonucleotide
  Antisense strand to SEQ ID NO: 1697973
ucccgcuggaggaucucac

SEQ ID NO: 1697975 - RNA, 19 nt, Artificial Sequence
  Description of Artificial Sequence: Synthetic oligonucleotide
  Sense strand starting at position 804 of SEQ ID NO: 1561782
ccgggaagcuuaucuucca

SEQ ID NO: 1697976 - RNA, 19 nt, Artificial Sequence
  Description of Artificial Sequence: Synthetic oligonucleotide
  Antisense strand to SEQ ID NO: 1697975
uggaagauaagcuucccgg

SEQ ID NO: 1697977 - RNA, 19 nt, Artificial Sequence
  Description of Artificial Sequence: Synthetic oligonucleotide
  Sense strand starting at position 890 of SEQ ID NO: 1561782
gaguuaggcuaagaaugga

SEQ ID NO: 1697978 - RNA, 19 nt, Artificial Sequence
  Description of Artificial Sequence: Synthetic oligonucleotide
  Antisense strand to SEQ ID NO: 1697977
uccauucuuagccuaacuc

SEQ ID NO: 1697979 - RNA, 19 nt, Artificial Sequence
  Description of Artificial Sequence: Synthetic oligonucleotide
  Sense strand starting at position 1420 of SEQ ID NO: 1561782
gcgucccuuccucuaguau

SEQ ID NO: 1697980 - RNA, 19 nt, Artificial Sequence
  Description of Artificial Sequence: Synthetic oligonucleotide
  Antisense strand to SEQ ID NO: 1697979
auacuagaggaagggacgc

SEQ ID NO: 1697981 - RNA, 19 nt, Artificial Sequence
  Description of Artificial Sequence: Synthetic oligonucleotide
  Sense strand starting at position 2395 of SEQ ID NO: 1561782
accagagucuccgcuuuaa

SEQ ID NO: 1697982 - RNA, 19 nt, Artificial Sequence
  Description of Artificial Sequence: Synthetic oligonucleotide
  Antisense strand to SEQ ID NO: 1697981
uuaaagcggagacucuggu

SEQ ID NO: 1697983 - RNA, 19 nt, Artificial Sequence
  Description of Artificial Sequence: Synthetic oligonucleotide
  Sense strand starting at position 2708 of SEQ ID NO: 1561782
uuaucugaccugggacuua

SEQ ID NO: 1697984 - RNA, 19 nt, Artificial Sequence
  Description of Artificial Sequence: Synthetic oligonucleotide
  Antisense strand to SEQ ID NO: 1697983
uaagucccaggucagauaa

SEQ ID NO: 1697985 - RNA, 19 nt, Artificial Sequence
  Description of Artificial Sequence: Synthetic oligonucleotide
  Sense strand starting at position 2753 of SEQ ID NO: 1561782
gucugucuccacgcaguaa

SEQ ID NO: 1697986 - RNA, 19 nt, Artificial Sequence
  Description of Artificial Sequence: Synthetic oligonucleotide
  Antisense strand to SEQ ID NO: 1697985
uuacugcguggagacagac

SEQ ID NO: 1697987 - RNA, 19 nt, Artificial Sequence
  Description of Artificial Sequence: Synthetic oligonucleotide
  Sense strand starting at position 2825 of SEQ ID NO: 1561782
ugauuuauaucgccuguaa

SEQ ID NO: 1697988 - RNA, 19 nt, Artificial Sequence
  Description of Artificial Sequence: Synthetic oligonucleotide
  Antisense strand to SEQ ID NO: 1697987
uuacaggcgauauaaauca

SEQ ID NO: 1697989 - RNA, 19 nt, Artificial Sequence
  Description of Artificial Sequence: Synthetic oligonucleotide
  Sense strand starting at position 2827 of SEQ ID NO: 1561782
auuuauaucgccuguaagc

SEQ ID NO: 1697990 - RNA, 19 nt, Artificial Sequence
  Description of Artificial Sequence: Synthetic oligonucleotide
  Antisense strand to SEQ ID NO: 1697989
gcuuacaggcgauauaaau

SEQ ID NO: 1697991 - RNA, 19 nt, Artificial Sequence
  Description of Artificial Sequence: Synthetic oligonucleotide
  Sense strand starting at position 2932 of SEQ ID NO: 1561782
ccaagcguuuccuugugau

SEQ ID NO: 1697992 - RNA, 19 nt, Artificial Sequence
  Description of Artificial Sequence: Synthetic oligonucleotide
  Antisense strand to SEQ ID NO: 1697991
aucacaaggaaacgcuugg

SEQ ID NO: 1697993 - RNA, 19 nt, Artificial Sequence
  Description of Artificial Sequence: Synthetic oligonucleotide
  Sense strand starting at position 2992 of SEQ ID NO: 1561782
ugcccagaucuuugcagga

SEQ ID NO: 1697994 - RNA, 19 nt, Artificial Sequence
  Description of Artificial Sequence: Synthetic oligonucleotide
  Antisense strand to SEQ ID NO: 1697993
uccugcaaagaucugggca

SEQ ID NO: 1697995 - RNA, 19 nt, Artificial Sequence
  Description of Artificial Sequence: Synthetic oligonucleotide
  Sense strand starting at position 3036 of SEQ ID NO: 1561782
cccagaaggucacuuuaug

SEQ ID NO: 1697996 - RNA, 19 nt, Artificial Sequence
  Description of Artificial Sequence: Synthetic oligonucleotide
  Antisense strand to SEQ ID NO: 1697995
cauaaagugaccuucuggg

SEQ ID NO: 1697997 - RNA, 19 nt, Artificial Sequence
  Description of Artificial Sequence: Synthetic oligonucleotide
  Sense strand starting at position 3128 of SEQ ID NO: 1561782
agcacuuaccgcgaucuga

SEQ ID NO: 1697998 - RNA, 19 nt, Artificial Sequence
  Description of Artificial Sequence: Synthetic oligonucleotide
  Antisense strand to SEQ ID NO: 1697997
ucagaucgcgguaagugcu

SEQ ID NO: 1697999 - RNA, 19 nt, Artificial Sequence
  Description of Artificial Sequence: Synthetic oligonucleotide
  Sense strand starting at position 3132 of SEQ ID NO: 1561782
cuuaccgcgaucugaaauu

SEQ ID NO: 1698000 - RNA, 19 nt, Artificial Sequence
  Description of Artificial Sequence: Synthetic oligonucleotide
  Antisense strand to SEQ ID NO: 1697999
aauuucagaucgcgguaag

SEQ ID NO: 1698001 - RNA, 19 nt, Artificial Sequence
  Description of Artificial Sequence: Synthetic oligonucleotide
  Sense strand starting at position 3261 of SEQ ID NO: 1561782
ugggucuccaagugcuuau

SEQ ID NO: 1698002 - RNA, 19 nt, Artificial Sequence
  Description of Artificial Sequence: Synthetic oligonucleotide
  Antisense strand to SEQ ID NO: 1698001
auaagcacuuggagaccca

SEQ ID NO: 1698003 - RNA, 19 nt, Artificial Sequence
  Description of Artificial Sequence: Synthetic oligonucleotide
  Sense strand starting at position 3264 of SEQ ID NO: 1561782
gucuccaagugcuuauagu

SEQ ID NO: 1698004 - RNA, 19 nt, Artificial Sequence
  Description of Artificial Sequence: Synthetic oligonucleotide
  Antisense strand to SEQ ID NO: 1698003
acuauaagcacuuggagac

SEQ ID NO: 1698005 - RNA, 19 nt, Artificial Sequence
  Description of Artificial Sequence: Synthetic oligonucleotide
  Sense strand starting at position 3309 of SEQ ID NO: 1561782
ucaauacaaguuuguugaa

SEQ ID NO: 1698006 - RNA, 19 nt, Artificial Sequence
  Description of Artificial Sequence: Synthetic oligonucleotide
  Antisense strand to SEQ ID NO: 1698005
uucaacaaacuuguauuga

SEQ ID NO: 1698007 - RNA, 19 nt, Artificial Sequence
  Description of Artificial Sequence: Synthetic oligonucleotide
  Sense strand starting at position 3357 of SEQ ID NO: 1561782
gcuccagcucccugaguua

SEQ ID NO: 1698008 - RNA, 19 nt, Artificial Sequence
  Description of Artificial Sequence: Synthetic oligonucleotide
  Antisense strand to SEQ ID NO: 1698007
uaacucagggagcuggagc

SEQ ID NO: 1698009 - RNA, 19 nt, Artificial Sequence
  Description of Artificial Sequence: Synthetic oligonucleotide
  Sense strand starting at position 3369 of SEQ ID NO: 1561782
ugaguuacuccacagcuuu

SEQ ID NO: 1698010 - RNA, 19 nt, Artificial Sequence
  Description of Artificial Sequence: Synthetic oligonucleotide
  Antisense strand to SEQ ID NO: 1698009
aaagcuguggaguaacuca

SEQ ID NO: 1698011 - RNA, 19 nt, Artificial Sequence
  Description of Artificial Sequence: Synthetic oligonucleotide
  Sense strand starting at position 3395 of SEQ ID NO: 1561782
uaucucuuaccaggugagu

SEQ ID NO: 1698012 - RNA, 19 nt, Artificial Sequence
  Description of Artificial Sequence: Synthetic oligonucleotide
  Antisense strand to SEQ ID NO: 1698011
acucaccugguaagagaua

SEQ ID NO: 1698013 - RNA, 19 nt, Artificial Sequence
  Description of Artificial Sequence: Synthetic oligonucleotide
  Sense strand starting at position 3398 of SEQ ID NO: 1561782
cucuuaccaggugaguaaa

SEQ ID NO: 1698014 - RNA, 19 nt, Artificial Sequence
  Description of Artificial Sequence: Synthetic oligonucleotide
  Antisense strand to SEQ ID NO: 1698013
uuuacucaccugguaagag

SEQ ID NO: 1698015 - RNA, 19 nt, Artificial Sequence
  Description of Artificial Sequence: Synthetic oligonucleotide
  Sense strand starting at position 3423 of SEQ ID NO: 1561782
aaggguuaauucuuuggau

SEQ ID NO: 1698016 - RNA, 19 nt, Artificial Sequence
  Description of Artificial Sequence: Synthetic oligonucleotide
  Antisense strand to SEQ ID NO: 1698015
auccaaagaauuaacccuu

SEQ ID NO: 1698017 - RNA, 19 nt, Artificial Sequence
  Description of Artificial Sequence: Synthetic oligonucleotide
  Sense strand starting at position 3424 of SEQ ID NO: 1561782
aggguuaauucuuuggaug

SEQ ID NO: 1698018 - RNA, 19 nt, Artificial Sequence
  Description of Artificial Sequence: Synthetic oligonucleotide
  Antisense strand to SEQ ID NO: 1698017
cauccaaagaauuaacccu

SEQ ID NO: 1698019 - RNA, 19 nt, Artificial Sequence
  Description of Artificial Sequence: Synthetic oligonucleotide
  Sense strand starting at position 3425 of SEQ ID NO: 1561782
ggguuaauucuuuggaugc

SEQ ID NO: 1698020 - RNA, 19 nt, Artificial Sequence
  Description of Artificial Sequence: Synthetic oligonucleotide
  Antisense strand to SEQ ID NO: 1698019
gcauccaaagaauuaaccc

SEQ ID NO: 1698021 - RNA, 19 nt, Artificial Sequence
  Description of Artificial Sequence: Synthetic oligonucleotide
  Sense strand starting at position 3515 of SEQ ID NO: 1561782
gagaaaugggcucagcuca

SEQ ID NO: 1698022 - RNA, 19 nt, Artificial Sequence
  Description of Artificial Sequence: Synthetic oligonucleotide
  Antisense strand to SEQ ID NO: 1698021
ugagcugagcccauuucuc

SEQ ID NO: 1698023 - RNA, 19 nt, Artificial Sequence
  Description of Artificial Sequence: Synthetic oligonucleotide
  Sense strand starting at position 3555 of SEQ ID NO: 1561782
agggccucuugugaaugaa

SEQ ID NO: 1698024 - RNA, 19 nt, Artificial Sequence
  Description of Artificial Sequence: Synthetic oligonucleotide
  Antisense strand to SEQ ID NO: 1698023
uucauucacaagaggcccu

SEQ ID NO: 1698025 - RNA, 19 nt, Artificial Sequence
  Description of Artificial Sequence: Synthetic oligonucleotide
  Sense strand starting at position 3558 of SEQ ID NO: 1561782
gccucuugugaaugaacag

SEQ ID NO: 1698026 - RNA, 19 nt, Artificial Sequence
  Description of Artificial Sequence: Synthetic oligonucleotide
  Antisense strand to SEQ ID NO: 1698025
cuguucauucacaagaggc

SEQ ID NO: 1698027 - RNA, 19 nt, Artificial Sequence
  Description of Artificial Sequence: Synthetic oligonucleotide
  Sense strand starting at position 3588 of SEQ ID NO: 1561782
ggcuuucuggcacaaacau

SEQ ID NO: 1698028 - RNA, 19 nt, Artificial Sequence
  Description of Artificial Sequence: Synthetic oligonucleotide
  Antisense strand to SEQ ID NO: 1698027
auguuugugccagaaagcc

SEQ ID NO: 1698029 - RNA, 19 nt, Artificial Sequence
  Description of Artificial Sequence: Synthetic oligonucleotide
  Sense strand starting at position 3623 of SEQ ID NO: 1561782
uccauuggugcaggaagaa

SEQ ID NO: 1698030 - RNA, 19 nt, Artificial Sequence
  Description of Artificial Sequence: Synthetic oligonucleotide
  Antisense strand to SEQ ID NO: 1698029
uucuuccugcaccaaugga

SEQ ID NO: 1698031 - RNA, 19 nt, Artificial Sequence
  Description of Artificial Sequence: Synthetic oligonucleotide
  Sense strand starting at position 82 of SEQ ID NO: 1561783
gcaagauuccaucaugcua

SEQ ID NO: 1698032 - RNA, 19 nt, Artificial Sequence
  Description of Artificial Sequence: Synthetic oligonucleotide
  Antisense strand to SEQ ID NO: 1698031
uagcaugauggaaucuugc

SEQ ID NO: 1698033 - RNA, 19 nt, Artificial Sequence
  Description of Artificial Sequence: Synthetic oligonucleotide
  Sense strand starting at position 134 of SEQ ID NO: 1561783
guuuauuucugggauuuac

SEQ ID NO: 1698034 - RNA, 19 nt, Artificial Sequence
  Description of Artificial Sequence: Synthetic oligonucleotide
  Antisense strand to SEQ ID NO: 1698033
guaaaucccagaaauaaac

SEQ ID NO: 1698035 - RNA, 19 nt, Artificial Sequence
  Description of Artificial Sequence: Synthetic oligonucleotide
  Sense strand starting at position 185 of SEQ ID NO: 1561783
ggcaguugacugcaagcaa

SEQ ID NO: 1698036 - RNA, 19 nt, Artificial Sequence
  Description of Artificial Sequence: Synthetic oligonucleotide
  Antisense strand to SEQ ID NO: 1698035
uugcuugcagucaacugcc

SEQ ID NO: 1698037 - RNA, 19 nt, Artificial Sequence
  Description of Artificial Sequence: Synthetic oligonucleotide
  Sense strand starting at position 239 of SEQ ID NO: 1561783
ggacuaccauauuagagau

SEQ ID NO: 1698038 - RNA, 19 nt, Artificial Sequence
  Description of Artificial Sequence: Synthetic oligonucleotide
  Antisense strand to SEQ ID NO: 1698037
aucucuaauaugguagucc

SEQ ID NO: 1698039 - RNA, 19 nt, Artificial Sequence
  Description of Artificial Sequence: Synthetic oligonucleotide
  Sense strand starting at position 262 of SEQ ID NO: 1561783
caauguaacugaucgucca

SEQ ID NO: 1698040 - RNA, 19 nt, Artificial Sequence
  Description of Artificial Sequence: Synthetic oligonucleotide
  Antisense strand to SEQ ID NO: 1698039
uggacgaucaguuacauug

SEQ ID NO: 1698041 - RNA, 19 nt, Artificial Sequence
  Description of Artificial Sequence: Synthetic oligonucleotide
  Sense strand starting at position 265 of SEQ ID NO: 1561783
uguaacugaucguccagau

SEQ ID NO: 1698042 - RNA, 19 nt, Artificial Sequence
  Description of Artificial Sequence: Synthetic oligonucleotide
  Antisense strand to SEQ ID NO: 1698041
aucuggacgaucaguuaca

SEQ ID NO: 1698043 - RNA, 19 nt, Artificial Sequence
  Description of Artificial Sequence: Synthetic oligonucleotide
  Sense strand starting at position 269 of SEQ ID NO: 1561783
acugaucguccagauugaa

SEQ ID NO: 1698044 - RNA, 19 nt, Artificial Sequence
  Description of Artificial Sequence: Synthetic oligonucleotide
  Antisense strand to SEQ ID NO: 1698043
uucaaucuggacgaucagu

SEQ ID NO: 1698045 - RNA, 19 nt, Artificial Sequence
  Description of Artificial Sequence: Synthetic oligonucleotide
  Sense strand starting at position 295 of SEQ ID NO: 1561783
ugccaaauauaugcagaaa

SEQ ID NO: 1698046 - RNA, 19 nt, Artificial Sequence
  Description of Artificial Sequence: Synthetic oligonucleotide
  Antisense strand to SEQ ID NO: 1698045
uuucugcauauauuuggca

SEQ ID NO: 1698047 - RNA, 19 nt, Artificial Sequence
  Description of Artificial Sequence: Synthetic oligonucleotide
  Sense strand starting at position 612 of SEQ ID NO: 1561783
uauugucagccacagggau

SEQ ID NO: 1698048 - RNA, 19 nt, Artificial Sequence
  Description of Artificial Sequence: Synthetic oligonucleotide
  Antisense strand to SEQ ID NO: 1698047
aucccuguggcugacaaua

SEQ ID NO: 1698049 - RNA, 19 nt, Artificial Sequence
  Description of Artificial Sequence: Synthetic oligonucleotide
  Sense strand starting at position 633 of SEQ ID NO: 1561783
gcucucaguccgucaguau

SEQ ID NO: 1698050 - RNA, 19 nt, Artificial Sequence
  Description of Artificial Sequence: Synthetic oligonucleotide
  Antisense strand to SEQ ID NO: 1698049
auacugacggacugagagc

SEQ ID NO: 1698051 - RNA, 19 nt, Artificial Sequence
  Description of Artificial Sequence: Synthetic oligonucleotide
  Sense strand starting at position 908 of SEQ ID NO: 1561783
caggaaguuccaugggaug

SEQ ID NO: 1698052 - RNA, 19 nt, Artificial Sequence
  Description of Artificial Sequence: Synthetic oligonucleotide
  Antisense strand to SEQ ID NO: 1698051
caucccauggaacuuccug

SEQ ID NO: 1698053 - RNA, 19 nt, Artificial Sequence
  Description of Artificial Sequence: Synthetic oligonucleotide
  Sense strand starting at position 1120 of SEQ ID NO: 1561783
cccugucaugacuggcaga

SEQ ID NO: 1698054 - RNA, 19 nt, Artificial Sequence
  Description of Artificial Sequence: Synthetic oligonucleotide
  Antisense strand to SEQ ID NO: 1698053
ucugccagucaugacaggg

SEQ ID NO: 1698055 - RNA, 19 nt, Artificial Sequence
  Description of Artificial Sequence: Synthetic oligonucleotide
  Sense strand starting at position 1277 of SEQ ID NO: 1561783
gggaauugugguggagguu

SEQ ID NO: 1698056 - RNA, 19 nt, Artificial Sequence
  Description of Artificial Sequence: Synthetic oligonucleotide
  Antisense strand to SEQ ID NO: 1698055
aaccuccaccacaauuccc

SEQ ID NO: 1698057 - RNA, 19 nt, Artificial Sequence
  Description of Artificial Sequence: Synthetic oligonucleotide
  Sense strand starting at position 1285 of SEQ ID NO: 1561783
ugguggagguugucagaga

SEQ ID NO: 1698058 - RNA, 19 nt, Artificial Sequence
  Description of Artificial Sequence: Synthetic oligonucleotide
  Antisense strand to SEQ ID NO: 1698057
ucucugacaaccuccacca

SEQ ID NO: 1698059 - RNA, 19 nt, Artificial Sequence
  Description of Artificial Sequence: Synthetic oligonucleotide
  Sense strand starting at position 1527 of SEQ ID NO: 1561783
caugcuuuccugugggaga

SEQ ID NO: 1698060 - RNA, 19 nt, Artificial Sequence
  Description of Artificial Sequence: Synthetic oligonucleotide
  Antisense strand to SEQ ID NO: 1698059
ucucccacaggaaagcaug

SEQ ID NO: 1698061 - RNA, 19 nt, Artificial Sequence
  Description of Artificial Sequence: Synthetic oligonucleotide
  Sense strand starting at position 1641 of SEQ ID NO: 1561783
gcauucuuagggugaugcu

SEQ ID NO: 1698062 - RNA, 19 nt, Artificial Sequence
  Description of Artificial Sequence: Synthetic oligonucleotide
  Antisense strand to SEQ ID NO: 1698061
agcaucacccuaagaaugc

SEQ ID NO: 1698063 - RNA, 19 nt, Artificial Sequence
  Description of Artificial Sequence: Synthetic oligonucleotide
  Sense strand starting at position 1653 of SEQ ID NO: 1561783
ugaugcucuugcccaagua

SEQ ID NO: 1698064 - RNA, 19 nt, Artificial Sequence
  Description of Artificial Sequence: Synthetic oligonucleotide
  Antisense strand to SEQ ID NO: 1698063
uacuugggcaagagcauca

SEQ ID NO: 1698065 - RNA, 19 nt, Artificial Sequence
  Description of Artificial Sequence: Synthetic oligonucleotide
  Sense strand starting at position 2305 of SEQ ID NO: 1561783
ucagguaaaucagcuaaca

SEQ ID NO: 1698066 - RNA, 19 nt, Artificial Sequence
  Description of Artificial Sequence: Synthetic oligonucleotide
  Antisense strand to SEQ ID NO: 1698065
uguuagcugauuuaccuga

SEQ ID NO: 1698067 - RNA, 19 nt, Artificial Sequence
  Description of Artificial Sequence: Synthetic oligonucleotide
  Sense strand starting at position 2486 of SEQ ID NO: 1561783
agacuagguuauucuccaa

SEQ ID NO: 1698068 - RNA, 19 nt, Artificial Sequence
  Description of Artificial Sequence: Synthetic oligonucleotide
  Antisense strand to SEQ ID NO: 1698067
uuggagaauaaccuagucu

SEQ ID NO: 1698069 - RNA, 19 nt, Artificial Sequence
  Description of Artificial Sequence: Synthetic oligonucleotide
  Sense strand starting at position 2489 of SEQ ID NO: 1561783
cuagguuauucuccaaggu

SEQ ID NO: 1698070 - RNA, 19 nt, Artificial Sequence
  Description of Artificial Sequence: Synthetic oligonucleotide
  Antisense strand to SEQ ID NO: 1698069
accuuggagaauaaccuag

SEQ ID NO: 1698071 - RNA, 19 nt, Artificial Sequence
  Description of Artificial Sequence: Synthetic oligonucleotide
  Sense strand starting at position 2493 of SEQ ID NO: 1561783
guuauucuccaaggucaua

SEQ ID NO: 1698072 - RNA, 19 nt, Artificial Sequence
  Description of Artificial Sequence: Synthetic oligonucleotide
  Antisense strand to SEQ ID NO: 1698071
uaugaccuuggagaauaac

SEQ ID NO: 1698073 - RNA, 19 nt, Artificial Sequence
  Description of Artificial Sequence: Synthetic oligonucleotide
  Sense strand starting at position 2505 of SEQ ID NO: 1561783
ggucauauagcccaucuaa

SEQ ID NO: 1698074 - RNA, 19 nt, Artificial Sequence
  Description of Artificial Sequence: Synthetic oligonucleotide
  Antisense strand to SEQ ID NO: 1698073
uuagaugggcuauaugacc

SEQ ID NO: 1698075 - RNA, 19 nt, Artificial Sequence
  Description of Artificial Sequence: Synthetic oligonucleotide
  Sense strand starting at position 2802 of SEQ ID NO: 1561783
ggcuccaucguggagacau

SEQ ID NO: 1698076 - RNA, 19 nt, Artificial Sequence
  Description of Artificial Sequence: Synthetic oligonucleotide
  Antisense strand to SEQ ID NO: 1698075
augucuccacgauggagcc

SEQ ID NO: 1698077 - RNA, 19 nt, Artificial Sequence
  Description of Artificial Sequence: Synthetic oligonucleotide
  Sense strand starting at position 3061 of SEQ ID NO: 1561783
aacagagucuggcuauguu

SEQ ID NO: 1698078 - RNA, 19 nt, Artificial Sequence
  Description of Artificial Sequence: Synthetic oligonucleotide
  Antisense strand to SEQ ID NO: 1698077
aacauagccagacucuguu

SEQ ID NO: 1698079 - RNA, 19 nt, Artificial Sequence
  Description of Artificial Sequence: Synthetic oligonucleotide
  Sense strand starting at position 3386 of SEQ ID NO: 1561783
cugagagcugcuuggaaga

SEQ ID NO: 1698080 - RNA, 19 nt, Artificial Sequence
  Description of Artificial Sequence: Synthetic oligonucleotide
  Antisense strand to SEQ ID NO: 1698079
ucuuccaagcagcucucag

SEQ ID NO: 1698081 - RNA, 19 nt, Artificial Sequence
  Description of Artificial Sequence: Synthetic oligonucleotide
  Sense strand starting at position 3448 of SEQ ID NO: 1561783
gcuagauguccugaagcag

SEQ ID NO: 1698082 - RNA, 19 nt, Artificial Sequence
  Description of Artificial Sequence: Synthetic oligonucleotide
  Antisense strand to SEQ ID NO: 1698081
cugcuucaggacaucuagc

SEQ ID NO: 1698083 - RNA, 19 nt, Artificial Sequence
  Description of Artificial Sequence: Synthetic oligonucleotide
  Sense strand starting at position 3718 of SEQ ID NO: 1561783
cgaugucuuguccucguga

SEQ ID NO: 1698084 - RNA, 19 nt, Artificial Sequence
  Description of Artificial Sequence: Synthetic oligonucleotide
  Antisense strand to SEQ ID NO: 1698083
ucacgaggacaagacaucg

SEQ ID NO: 1698085 - RNA, 19 nt, Artificial Sequence
  Description of Artificial Sequence: Synthetic oligonucleotide
  Sense strand starting at position 3721 of SEQ ID NO: 1561783
ugucuuguccucgugaucu

SEQ ID NO: 1698086 - RNA, 19 nt, Artificial Sequence
  Description of Artificial Sequence: Synthetic oligonucleotide
  Antisense strand to SEQ ID NO: 1698085
agaucacgaggacaagaca

SEQ ID NO: 1698087 - RNA, 19 nt, Artificial Sequence
  Description of Artificial Sequence: Synthetic oligonucleotide
  Sense strand starting at position 3831 of SEQ ID NO: 1561783
acaagucaugccuagguga

SEQ ID NO: 1698088 - RNA, 19 nt, Artificial Sequence
  Description of Artificial Sequence: Synthetic oligonucleotide
  Antisense strand to SEQ ID NO: 1698087
ucaccuaggcaugacuugu

SEQ ID NO: 1698089 - RNA, 19 nt, Artificial Sequence
  Description of Artificial Sequence: Synthetic oligonucleotide
  Sense strand starting at position 3833 of SEQ ID NO: 1561783
aagucaugccuaggugauu

SEQ ID NO: 1698090 - RNA, 19 nt, Artificial Sequence
  Description of Artificial Sequence: Synthetic oligonucleotide
  Antisense strand to SEQ ID NO: 1698089
aaucaccuaggcaugacuu

SEQ ID NO: 1698091 - RNA, 19 nt, Artificial Sequence
  Description of Artificial Sequence: Synthetic oligonucleotide
  Sense strand starting at position 3834 of SEQ ID NO: 1561783
agucaugccuaggugauua

SEQ ID NO: 1698092 - RNA, 19 nt, Artificial Sequence
  Description of Artificial Sequence: Synthetic oligonucleotide
  Antisense strand to SEQ ID NO: 1698091
uaaucaccuaggcaugacu

SEQ ID NO: 1698093 - RNA, 19 nt, Artificial Sequence
  Description of Artificial Sequence: Synthetic oligonucleotide
  Sense strand starting at position 3836 of SEQ ID NO: 1561783
ucaugccuaggugauuaau

SEQ ID NO: 1698094 - RNA, 19 nt, Artificial Sequence
  Description of Artificial Sequence: Synthetic oligonucleotide
  Antisense strand to SEQ ID NO: 1698093
auuaaucaccuaggcauga

SEQ ID NO: 1698095 - RNA, 19 nt, Artificial Sequence
  Description of Artificial Sequence: Synthetic oligonucleotide
  Sense strand starting at position 3838 of SEQ ID NO: 1561783
augccuaggugauuaauau

SEQ ID NO: 1698096 - RNA, 19 nt, Artificial Sequence
  Description of Artificial Sequence: Synthetic oligonucleotide
  Antisense strand to SEQ ID NO: 1698095
auauuaaucaccuaggcau

SEQ ID NO: 1698097 - RNA, 19 nt, Artificial Sequence
  Description of Artificial Sequence: Synthetic oligonucleotide
  Sense strand starting at position 3839 of SEQ ID NO: 1561783
ugccuaggugauuaauaug

SEQ ID NO: 1698098 - RNA, 19 nt, Artificial Sequence
  Description of Artificial Sequence: Synthetic oligonucleotide
  Antisense strand to SEQ ID NO: 1698097
cauauuaaucaccuaggca

SEQ ID NO: 1698099 - RNA, 19 nt, Artificial Sequence
  Description of Artificial Sequence: Synthetic oligonucleotide
  Sense strand starting at position 3844 of SEQ ID NO: 1561783
aggugauuaauaugcaugu

SEQ ID NO: 1698100 - RNA, 19 nt, Artificial Sequence
  Description of Artificial Sequence: Synthetic oligonucleotide
  Antisense strand to SEQ ID NO: 1698099
acaugcauauuaaucaccu

SEQ ID NO: 1698101 - RNA, 19 nt, Artificial Sequence
  Description of Artificial Sequence: Synthetic oligonucleotide
  Sense strand starting at position 3845 of SEQ ID NO: 1561783
ggugauuaauaugcauguu

SEQ ID NO: 1698102 - RNA, 19 nt, Artificial Sequence
  Description of Artificial Sequence: Synthetic oligonucleotide
  Antisense strand to SEQ ID NO: 1698101
aacaugcauauuaaucacc

SEQ ID NO: 1698103 - RNA, 19 nt, Artificial Sequence
  Description of Artificial Sequence: Synthetic oligonucleotide
  Sense strand starting at position 3884 of SEQ ID NO: 1561783
auaaacaugugcgcugaua

SEQ ID NO: 1698104 - RNA, 19 nt, Artificial Sequence
  Description of Artificial Sequence: Synthetic oligonucleotide
  Antisense strand to SEQ ID NO: 1698103
uaucagcgcacauguuuau

SEQ ID NO: 1698105 - RNA, 19 nt, Artificial Sequence
  Description of Artificial Sequence: Synthetic oligonucleotide
  Sense strand starting at position 3886 of SEQ ID NO: 1561783
aaacaugugcgcugauaca

SEQ ID NO: 1698106 - RNA, 19 nt, Artificial Sequence
  Description of Artificial Sequence: Synthetic oligonucleotide
  Antisense strand to SEQ ID NO: 1698105
uguaucagcgcacauguuu

SEQ ID NO: 1698107 - RNA, 19 nt, Artificial Sequence
  Description of Artificial Sequence: Synthetic oligonucleotide
  Sense strand starting at position 3930 of SEQ ID NO: 1561783
caugauccagaguguguau

SEQ ID NO: 1698108 - RNA, 19 nt, Artificial Sequence
  Description of Artificial Sequence: Synthetic oligonucleotide
  Antisense strand to SEQ ID NO: 1698107
auacacacucuggaucaug

SEQ ID NO: 1698109 - RNA, 19 nt, Artificial Sequence
  Description of Artificial Sequence: Synthetic oligonucleotide
  Sense strand starting at position 3983 of SEQ ID NO: 1561783
aagggacgugccugaauca

SEQ ID NO: 1698110 - RNA, 19 nt, Artificial Sequence
  Description of Artificial Sequence: Synthetic oligonucleotide
  Antisense strand to SEQ ID NO: 1698109
ugauucaggcacgucccuu

SEQ ID NO: 1698111 - RNA, 19 nt, Artificial Sequence
  Description of Artificial Sequence: Synthetic oligonucleotide
  Sense strand starting at position 157 of SEQ ID NO: 1561784
gugcaaaucacagaggcau

SEQ ID NO: 1698112 - RNA, 19 nt, Artificial Sequence
  Description of Artificial Sequence: Synthetic oligonucleotide
  Antisense strand to SEQ ID NO: 1698111
augccucugugauuugcac

SEQ ID NO: 1698113 - RNA, 19 nt, Artificial Sequence
  Description of Artificial Sequence: Synthetic oligonucleotide
  Sense strand starting at position 200 of SEQ ID NO: 1561784
cucuaugaagugcauauua

SEQ ID NO: 1698114 - RNA, 19 nt, Artificial Sequence
  Description of Artificial Sequence: Synthetic oligonucleotide
  Antisense strand to SEQ ID NO: 1698113
uaauaugcacuucauagag

SEQ ID NO: 1698115 - RNA, 19 nt, Artificial Sequence
  Description of Artificial Sequence: Synthetic oligonucleotide
  Sense strand starting at position 202 of SEQ ID NO: 1561784
cuaugaagugcauauuauu

SEQ ID NO: 1698116 - RNA, 19 nt, Artificial Sequence
  Description of Artificial Sequence: Synthetic oligonucleotide
  Antisense strand to SEQ ID NO: 1698115
aauaauaugcacuucauag

SEQ ID NO: 1698117 - RNA, 19 nt, Artificial Sequence
  Description of Artificial Sequence: Synthetic oligonucleotide
  Sense strand starting at position 804 of SEQ ID NO: 1561784
cccucuuuauaguugagaa

SEQ ID NO: 1698118 - RNA, 19 nt, Artificial Sequence
  Description of Artificial Sequence: Synthetic oligonucleotide
  Antisense strand to SEQ ID NO: 1698117
uucucaacuauaaagaggg

SEQ ID NO: 1698119 - RNA, 19 nt, Artificial Sequence
  Description of Artificial Sequence: Synthetic oligonucleotide
  Sense strand starting at position 829 of SEQ ID NO: 1561784
cucaucagagucuguugau

SEQ ID NO: 1698120 - RNA, 19 nt, Artificial Sequence
  Description of Artificial Sequence: Synthetic oligonucleotide
  Antisense strand to SEQ ID NO: 1698119
aucaacagacucugaugag

SEQ ID NO: 1698121 - RNA, 19 nt, Artificial Sequence
  Description of Artificial Sequence: Synthetic oligonucleotide
  Sense strand starting at position 830 of SEQ ID NO: 1561784
ucaucagagucuguugaug

SEQ ID NO: 1698122 - RNA, 19 nt, Artificial Sequence
  Description of Artificial Sequence: Synthetic oligonucleotide
  Antisense strand to SEQ ID NO: 1698121
caucaacagacucugauga

SEQ ID NO: 1698123 - RNA, 19 nt, Artificial Sequence
  Description of Artificial Sequence: Synthetic oligonucleotide
  Sense strand starting at position 847 of SEQ ID NO: 1561784
ugagaacacaguugucuga

SEQ ID NO: 1698124 - RNA, 19 nt, Artificial Sequence
  Description of Artificial Sequence: Synthetic oligonucleotide
  Antisense strand to SEQ ID NO: 1698123
ucagacaacuguguucuca

SEQ ID NO: 1698125 - RNA, 19 nt, Artificial Sequence
  Description of Artificial Sequence: Synthetic oligonucleotide
  Sense strand starting at position 854 of SEQ ID NO: 1561784
acaguugucugacuccaga

SEQ ID NO: 1698126 - RNA, 19 nt, Artificial Sequence
  Description of Artificial Sequence: Synthetic oligonucleotide
  Antisense strand to SEQ ID NO: 1698125
ucuggagucagacaacugu

SEQ ID NO: 1698127 - RNA, 19 nt, Artificial Sequence
  Description of Artificial Sequence: Synthetic oligonucleotide
  Sense strand starting at position 870 of SEQ ID NO: 1561784
agagccuguucucuuaaac

SEQ ID NO: 1698128 - RNA, 19 nt, Artificial Sequence
  Description of Artificial Sequence: Synthetic oligonucleotide
  Antisense strand to SEQ ID NO: 1698127
guuuaagagaacaggcucu

SEQ ID NO: 1698129 - RNA, 19 nt, Artificial Sequence
  Description of Artificial Sequence: Synthetic oligonucleotide
  Sense strand starting at position 931 of SEQ ID NO: 1561784
agugaaugugagggaucuu

SEQ ID NO: 1698130 - RNA, 19 nt, Artificial Sequence
  Description of Artificial Sequence: Synthetic oligonucleotide
  Antisense strand to SEQ ID NO: 1698129
aagaucccucacauucacu

SEQ ID NO: 1698131 - RNA, 19 nt, Artificial Sequence
  Description of Artificial Sequence: Synthetic oligonucleotide
  Sense strand starting at position 940 of SEQ ID NO: 1561784
gagggaucuuagguauugu

SEQ ID NO: 1698132 - RNA, 19 nt, Artificial Sequence
  Description of Artificial Sequence: Synthetic oligonucleotide
  Antisense strand to SEQ ID NO: 1698131
acaauaccuaagaucccuc

SEQ ID NO: 1698133 - RNA, 19 nt, Artificial Sequence
  Description of Artificial Sequence: Synthetic oligonucleotide
  Sense strand starting at position 941 of SEQ ID NO: 1561784
agggaucuuagguauuguu

SEQ ID NO: 1698134 - RNA, 19 nt, Artificial Sequence
  Description of Artificial Sequence: Synthetic oligonucleotide
  Antisense strand to SEQ ID NO: 1698133
aacaauaccuaagaucccu

SEQ ID NO: 1698135 - RNA, 19 nt, Artificial Sequence
  Description of Artificial Sequence: Synthetic oligonucleotide
  Sense strand starting at position 948 of SEQ ID NO: 1561784
uuagguauuguuuauucca

SEQ ID NO: 1698136 - RNA, 19 nt, Artificial Sequence
  Description of Artificial Sequence: Synthetic oligonucleotide
  Antisense strand to SEQ ID NO: 1698135
uggaauaaacaauaccuaa

SEQ ID NO: 1698137 - RNA, 19 nt, Artificial Sequence
  Description of Artificial Sequence: Synthetic oligonucleotide
  Sense strand starting at position 950 of SEQ ID NO: 1561784
agguauuguuuauuccaca

SEQ ID NO: 1698138 - RNA, 19 nt, Artificial Sequence
  Description of Artificial Sequence: Synthetic oligonucleotide
  Antisense strand to SEQ ID NO: 1698137
uguggaauaaacaauaccu

SEQ ID NO: 1698139 - RNA, 19 nt, Artificial Sequence
  Description of Artificial Sequence: Synthetic oligonucleotide
  Sense strand starting at position 1099 of SEQ ID NO: 1561784
uguagaucuccauagccuu

SEQ ID NO: 1698140 - RNA, 19 nt, Artificial Sequence
  Description of Artificial Sequence: Synthetic oligonucleotide
  Antisense strand to SEQ ID NO: 1698139
aaggcuauggagaucuaca

SEQ ID NO: 1698141 - RNA, 19 nt, Artificial Sequence
  Description of Artificial Sequence: Synthetic oligonucleotide
  Sense strand starting at position 1335 of SEQ ID NO: 1561784
gaaguuaaaccuggacauc

SEQ ID NO: 1698142 - RNA, 19 nt, Artificial Sequence
  Description of Artificial Sequence: Synthetic oligonucleotide
  Antisense strand to SEQ ID NO: 1698141
gauguccagguuuaacuuc

SEQ ID NO: 1698143 - RNA, 19 nt, Artificial Sequence
  Description of Artificial Sequence: Synthetic oligonucleotide
  Sense strand starting at position 1434 of SEQ ID NO: 1561784
ugaggaaguuuccugccuu

SEQ ID NO: 1698144 - RNA, 19 nt, Artificial Sequence
  Description of Artificial Sequence: Synthetic oligonucleotide
  Antisense strand to SEQ ID NO: 1698143
aaggcaggaaacuuccuca

SEQ ID NO: 1698145 - RNA, 19 nt, Artificial Sequence
  Description of Artificial Sequence: Synthetic oligonucleotide
  Sense strand starting at position 1508 of SEQ ID NO: 1561784
gagggucaacucuguguca

SEQ ID NO: 1698146 - RNA, 19 nt, Artificial Sequence
  Description of Artificial Sequence: Synthetic oligonucleotide
  Antisense strand to SEQ ID NO: 1698145
ugacacagaguugacccuc

SEQ ID NO: 1698147 - RNA, 19 nt, Artificial Sequence
  Description of Artificial Sequence: Synthetic oligonucleotide
  Sense strand starting at position 2277 of SEQ ID NO: 1561784
gagggaagcguuugguaca

SEQ ID NO: 1698148 - RNA, 19 nt, Artificial Sequence
  Description of Artificial Sequence: Synthetic oligonucleotide
  Antisense strand to SEQ ID NO: 1698147
uguaccaaacgcuucccuc

SEQ ID NO: 1698149 - RNA, 19 nt, Artificial Sequence
  Description of Artificial Sequence: Synthetic oligonucleotide
  Sense strand starting at position 2641 of SEQ ID NO: 1561784
gcacauuaggcacauguua

SEQ ID NO: 1698150 - RNA, 19 nt, Artificial Sequence
  Description of Artificial Sequence: Synthetic oligonucleotide
  Antisense strand to SEQ ID NO: 1698149
uaacaugugccuaaugugc

SEQ ID NO: 1698151 - RNA, 19 nt, Artificial Sequence
  Description of Artificial Sequence: Synthetic oligonucleotide
  Sense strand starting at position 2649 of SEQ ID NO: 1561784
ggcacauguuaggucauca

SEQ ID NO: 1698152 - RNA, 19 nt, Artificial Sequence
  Description of Artificial Sequence: Synthetic oligonucleotide
  Antisense strand to SEQ ID NO: 1698151
ugaugaccuaacaugugcc

SEQ ID NO: 1698153 - RNA, 19 nt, Artificial Sequence
  Description of Artificial Sequence: Synthetic oligonucleotide
  Sense strand starting at position 2654 of SEQ ID NO: 1561784
auguuaggucaucaucaaa

SEQ ID NO: 1698154 - RNA, 19 nt, Artificial Sequence
  Description of Artificial Sequence: Synthetic oligonucleotide
  Antisense strand to SEQ ID NO: 1698153
uuugaugaugaccuaacau

SEQ ID NO: 1698155 - RNA, 19 nt, Artificial Sequence
  Description of Artificial Sequence: Synthetic oligonucleotide
  Sense strand starting at position 2657 of SEQ ID NO: 1561784
uuaggucaucaucaaaugu

SEQ ID NO: 1698156 - RNA, 19 nt, Artificial Sequence
  Description of Artificial Sequence: Synthetic oligonucleotide
  Antisense strand to SEQ ID NO: 1698155
acauuugaugaugaccuaa

SEQ ID NO: 1698157 - RNA, 19 nt, Artificial Sequence
  Description of Artificial Sequence: Synthetic oligonucleotide
  Sense strand starting at position 2671 of SEQ ID NO: 1561784
aauguuaauuaugccgaga

SEQ ID NO: 1698158 - RNA, 19 nt, Artificial Sequence
  Description of Artificial Sequence: Synthetic oligonucleotide
  Antisense strand to SEQ ID NO: 1698157
ucucggcauaauuaacauu

SEQ ID NO: 1698159 - RNA, 19 nt, Artificial Sequence
  Description of Artificial Sequence: Synthetic oligonucleotide
  Sense strand starting at position 2765 of SEQ ID NO: 1561784
gcauauuaggcacauauga

SEQ ID NO: 1698160 - RNA, 19 nt, Artificial Sequence
  Description of Artificial Sequence: Synthetic oligonucleotide
  Antisense strand to SEQ ID NO: 1698159
ucauaugugccuaauaugc

SEQ ID NO: 1698161 - RNA, 19 nt, Artificial Sequence
  Description of Artificial Sequence: Synthetic oligonucleotide
  Sense strand starting at position 2781 of SEQ ID NO: 1561784
ugaggucaucaucaaaugu

SEQ ID NO: 1698162 - RNA, 19 nt, Artificial Sequence
  Description of Artificial Sequence: Synthetic oligonucleotide
  Antisense strand to SEQ ID NO: 1698161
acauuugaugaugaccuca

SEQ ID NO: 1698163 - RNA, 19 nt, Artificial Sequence
  Description of Artificial Sequence: Synthetic oligonucleotide
  Sense strand starting at position 2797 of SEQ ID NO: 1561784
uguuaauuaucuccaugag

SEQ ID NO: 1698164 - RNA, 19 nt, Artificial Sequence
  Description of Artificial Sequence: Synthetic oligonucleotide
  Antisense strand to SEQ ID NO: 1698163
cucauggagauaauuaaca

SEQ ID NO: 1698165 - RNA, 19 nt, Artificial Sequence
  Description of Artificial Sequence: Synthetic oligonucleotide
  Sense strand starting at position 2798 of SEQ ID NO: 1561784
guuaauuaucuccaugagc

SEQ ID NO: 1698166 - RNA, 19 nt, Artificial Sequence
  Description of Artificial Sequence: Synthetic oligonucleotide
  Antisense strand to SEQ ID NO: 1698165
gcucauggagauaauuaac

SEQ ID NO: 1698167 - RNA, 19 nt, Artificial Sequence
  Description of Artificial Sequence: Synthetic oligonucleotide
  Sense strand starting at position 3007 of SEQ ID NO: 1561784
agguauaugugggcagacu

SEQ ID NO: 1698168 - RNA, 19 nt, Artificial Sequence
  Description of Artificial Sequence: Synthetic oligonucleotide
  Antisense strand to SEQ ID NO: 1698167
agucugcccacauauaccu

SEQ ID NO: 1698169 - RNA, 19 nt, Artificial Sequence
  Description of Artificial Sequence: Synthetic oligonucleotide
  Sense strand starting at position 3008 of SEQ ID NO: 1561784
gguauaugugggcagacua

SEQ ID NO: 1698170 - RNA, 19 nt, Artificial Sequence
  Description of Artificial Sequence: Synthetic oligonucleotide
  Antisense strand to SEQ ID NO: 1698169
uagucugcccacauauacc

SEQ ID NO: 1698171 - RNA, 19 nt, Artificial Sequence
  Description of Artificial Sequence: Synthetic oligonucleotide
  Sense strand starting at position 3024 of SEQ ID NO: 1561784
cuauuugagucauacauag

SEQ ID NO: 1698172 - RNA, 19 nt, Artificial Sequence
  Description of Artificial Sequence: Synthetic oligonucleotide
  Antisense strand to SEQ ID NO: 1698171
cuauguaugacucaaauag

SEQ ID NO: 1698173 - RNA, 19 nt, Artificial Sequence
  Description of Artificial Sequence: Synthetic oligonucleotide
  Sense strand starting at position 3109 of SEQ ID NO: 1561784
gacaaagauguagguguuu

SEQ ID NO: 1698174 - RNA, 19 nt, Artificial Sequence
  Description of Artificial Sequence: Synthetic oligonucleotide
  Antisense strand to SEQ ID NO: 1698173
aaacaccuacaucuuuguc

SEQ ID NO: 1698175 - RNA, 19 nt, Artificial Sequence
  Description of Artificial Sequence: Synthetic oligonucleotide
  Sense strand starting at position 3678 of SEQ ID NO: 1561784
ccacuagguuucucaucau

SEQ ID NO: 1698176 - RNA, 19 nt, Artificial Sequence
  Description of Artificial Sequence: Synthetic oligonucleotide
  Antisense strand to SEQ ID NO: 1698175
augaugagaaaccuagugg

SEQ ID NO: 1698177 - RNA, 19 nt, Artificial Sequence
  Description of Artificial Sequence: Synthetic oligonucleotide
  Sense strand starting at position 3681 of SEQ ID NO: 1561784
cuagguuucucaucaucca

SEQ ID NO: 1698178 - RNA, 19 nt, Artificial Sequence
  Description of Artificial Sequence: Synthetic oligonucleotide
  Antisense strand to SEQ ID NO: 1698177
uggaugaugagaaaccuag

SEQ ID NO: 1698179 - RNA, 19 nt, Artificial Sequence
  Description of Artificial Sequence: Synthetic oligonucleotide
  Sense strand starting at position 3684 of SEQ ID NO: 1561784
gguuucucaucauccagga

SEQ ID NO: 1698180 - RNA, 19 nt, Artificial Sequence
  Description of Artificial Sequence: Synthetic oligonucleotide
  Antisense strand to SEQ ID NO: 1698179
uccuggaugaugagaaacc

SEQ ID NO: 1698181 - RNA, 19 nt, Artificial Sequence
  Description of Artificial Sequence: Synthetic oligonucleotide
  Sense strand starting at position 3698 of SEQ ID NO: 1561784
caggaauauuguguauauu

SEQ ID NO: 1698182 - RNA, 19 nt, Artificial Sequence
  Description of Artificial Sequence: Synthetic oligonucleotide
  Antisense strand to SEQ ID NO: 1698181
aauauacacaauauuccug

SEQ ID NO: 1698183 - RNA, 19 nt, Artificial Sequence
  Description of Artificial Sequence: Synthetic oligonucleotide
  Sense strand starting at position 3701 of SEQ ID NO: 1561784
gaauauuguguauauugcu

SEQ ID NO: 1698184 - RNA, 19 nt, Artificial Sequence
  Description of Artificial Sequence: Synthetic oligonucleotide
  Antisense strand to SEQ ID NO: 1698183
agcaauauacacaauauuc

SEQ ID NO: 1698185 - RNA, 19 nt, Artificial Sequence
  Description of Artificial Sequence: Synthetic oligonucleotide
  Sense strand starting at position 3708 of SEQ ID NO: 1561784
guguauauugcuuacagaa

SEQ ID NO: 1698186 - RNA, 19 nt, Artificial Sequence
  Description of Artificial Sequence: Synthetic oligonucleotide
  Antisense strand to SEQ ID NO: 1698185
uucuguaagcaauauacac

SEQ ID NO: 1698187 - RNA, 19 nt, Artificial Sequence
  Description of Artificial Sequence: Synthetic oligonucleotide
  Sense strand starting at position 3753 of SEQ ID NO: 1561784
uugguagugccaggaauuu

SEQ ID NO: 1698188 - RNA, 19 nt, Artificial Sequence
  Description of Artificial Sequence: Synthetic oligonucleotide
  Antisense strand to SEQ ID NO: 1698187
aaauuccuggcacuaccaa

SEQ ID NO: 1698189 - RNA, 19 nt, Artificial Sequence
  Description of Artificial Sequence: Synthetic oligonucleotide
  Sense strand starting at position 3827 of SEQ ID NO: 1561784
ggaguauugugaaagggaa

SEQ ID NO: 1698190 - RNA, 19 nt, Artificial Sequence
  Description of Artificial Sequence: Synthetic oligonucleotide
  Antisense strand to SEQ ID NO: 1698189
uucccuuucacaauacucc

SEQ ID NO: 1698191 - RNA, 19 nt, Artificial Sequence
  Description of Artificial Sequence: Synthetic oligonucleotide
  Sense strand starting at position 8 of SEQ ID NO: 1561785
gcugauggaaauggugaau

SEQ ID NO: 1698192 - RNA, 19 nt, Artificial Sequence
  Description of Artificial Sequence: Synthetic oligonucleotide
  Antisense strand to SEQ ID NO: 1698191
auucaccauuuccaucagc

SEQ ID NO: 1698193 - RNA, 19 nt, Artificial Sequence
  Description of Artificial Sequence: Synthetic oligonucleotide
  Sense strand starting at position 203 of SEQ ID NO: 1561785
aguuuacuacugugaaauu

SEQ ID NO: 1698194 - RNA, 19 nt, Artificial Sequence
  Description of Artificial Sequence: Synthetic oligonucleotide
  Antisense strand to SEQ ID NO: 1698193
aauuucacaguaguaaacu

SEQ ID NO: 1698195 - RNA, 19 nt, Artificial Sequence
  Description of Artificial Sequence: Synthetic oligonucleotide
  Sense strand starting at position 347 of SEQ ID NO: 1561785
ggcauuccacacgauuacu

SEQ ID NO: 1698196 - RNA, 19 nt, Artificial Sequence
  Description of Artificial Sequence: Synthetic oligonucleotide
  Antisense strand to SEQ ID NO: 1698195
aguaaucguguggaaugcc

SEQ ID NO: 1698197 - RNA, 19 nt, Artificial Sequence
  Description of Artificial Sequence: Synthetic oligonucleotide
  Sense strand starting at position 515 of SEQ ID NO: 1561785
agggaccuaguuugaaauu

SEQ ID NO: 1698198 - RNA, 19 nt, Artificial Sequence
  Description of Artificial Sequence: Synthetic oligonucleotide
  Antisense strand to SEQ ID NO: 1698197
aauuucaaacuaggucccu

SEQ ID NO: 1698199 - RNA, 19 nt, Artificial Sequence
  Description of Artificial Sequence: Synthetic oligonucleotide
  Sense strand starting at position 516 of SEQ ID NO: 1561785
gggaccuaguuugaaauuu

SEQ ID NO: 1698200 - RNA, 19 nt, Artificial Sequence
  Description of Artificial Sequence: Synthetic oligonucleotide
  Antisense strand to SEQ ID NO: 1698199
aaauuucaaacuagguccc

SEQ ID NO: 1698201 - RNA, 19 nt, Artificial Sequence
  Description of Artificial Sequence: Synthetic oligonucleotide
  Sense strand starting at position 717 of SEQ ID NO: 1561785
ucccaagugcccuaagauu

SEQ ID NO: 1698202 - RNA, 19 nt, Artificial Sequence
  Description of Artificial Sequence: Synthetic oligonucleotide
  Antisense strand to SEQ ID NO: 1698201
aaucuuagggcacuuggga

SEQ ID NO: 1698203 - RNA, 19 nt, Artificial Sequence
  Description of Artificial Sequence: Synthetic oligonucleotide
  Sense strand starting at position 775 of SEQ ID NO: 1561785
gcgcuaugccagguaucag

SEQ ID NO: 1698204 - RNA, 19 nt, Artificial Sequence
  Description of Artificial Sequence: Synthetic oligonucleotide
  Antisense strand to SEQ ID NO: 1698203
cugauaccuggcauagcgc

SEQ ID NO: 1698205 - RNA, 19 nt, Artificial Sequence
  Description of Artificial Sequence: Synthetic oligonucleotide
  Sense strand starting at position 828 of SEQ ID NO: 1561785
gguguauuccagcaacaga

SEQ ID NO: 1698206 - RNA, 19 nt, Artificial Sequence
  Description of Artificial Sequence: Synthetic oligonucleotide
  Antisense strand to SEQ ID NO: 1698205
ucuguugcuggaauacacc

SEQ ID NO: 1698207 - RNA, 19 nt, Artificial Sequence
  Description of Artificial Sequence: Synthetic oligonucleotide
  Sense strand starting at position 831 of SEQ ID NO: 1561785
guauuccagcaacagaaau

SEQ ID NO: 1698208 - RNA, 19 nt, Artificial Sequence
  Description of Artificial Sequence: Synthetic oligonucleotide
  Antisense strand to SEQ ID NO: 1698207
auuucuguugcuggaauac

SEQ ID NO: 1698209 - RNA, 19 nt, Artificial Sequence
  Description of Artificial Sequence: Synthetic oligonucleotide
  Sense strand starting at position 886 of SEQ ID NO: 1561785
ucaaguaucuacccaaguu

SEQ ID NO: 1698210 - RNA, 19 nt, Artificial Sequence
  Description of Artificial Sequence: Synthetic oligonucleotide
  Antisense strand to SEQ ID NO: 1698209
aacuuggguagauacuuga

SEQ ID NO: 1698211 - RNA, 19 nt, Artificial Sequence
  Description of Artificial Sequence: Synthetic oligonucleotide
  Sense strand starting at position 1016 of SEQ ID NO: 1561785
guucgugaccucguucaca

SEQ ID NO: 1698212 - RNA, 19 nt, Artificial Sequence
  Description of Artificial Sequence: Synthetic oligonucleotide
  Antisense strand to SEQ ID NO: 1698211
ugugaacgaggucacgaac

SEQ ID NO: 1698213 - RNA, 19 nt, Artificial Sequence
  Description of Artificial Sequence: Synthetic oligonucleotide
  Sense strand starting at position 1036 of SEQ ID NO: 1561785
cgaguaugcguguccucuu

SEQ ID NO: 1698214 - RNA, 19 nt, Artificial Sequence
  Description of Artificial Sequence: Synthetic oligonucleotide
  Antisense strand to SEQ ID NO: 1698213
aagaggacacgcauacucg

SEQ ID NO: 1698215 - RNA, 19 nt, Artificial Sequence
  Description of Artificial Sequence: Synthetic oligonucleotide
  Sense strand starting at position 1041 of SEQ ID NO: 1561785
augcguguccucuuucuca

SEQ ID NO: 1698216 - RNA, 19 nt, Artificial Sequence
  Description of Artificial Sequence: Synthetic oligonucleotide
  Antisense strand to SEQ ID NO: 1698215
ugagaaagaggacacgcau

SEQ ID NO: 1698217 - RNA, 19 nt, Artificial Sequence
  Description of Artificial Sequence: Synthetic oligonucleotide
  Sense strand starting at position 1043 of SEQ ID NO: 1561785
gcguguccucuuucucaac

SEQ ID NO: 1698218 - RNA, 19 nt, Artificial Sequence
  Description of Artificial Sequence: Synthetic oligonucleotide
  Antisense strand to SEQ ID NO: 1698217
guugagaaagaggacacgc

SEQ ID NO: 1698219 - RNA, 19 nt, Artificial Sequence
  Description of Artificial Sequence: Synthetic oligonucleotide
  Sense strand starting at position 1168 of SEQ ID NO: 1561785
cauggcuaccgagaaauau

SEQ ID NO: 1698220 - RNA, 19 nt, Artificial Sequence
  Description of Artificial Sequence: Synthetic oligonucleotide
  Antisense strand to SEQ ID NO: 1698219
auauuucucgguagccaug

SEQ ID NO: 1698221 - RNA, 19 nt, Artificial Sequence
  Description of Artificial Sequence: Synthetic oligonucleotide
  Sense strand starting at position 1322 of SEQ ID NO: 1561785
cgcggguuucggcugagaa

SEQ ID NO: 1698222 - RNA, 19 nt, Artificial Sequence
  Description of Artificial Sequence: Synthetic oligonucleotide
  Antisense strand to SEQ ID NO: 1698221
uucucagccgaaacccgcg

SEQ ID NO: 1698223 - RNA, 19 nt, Artificial Sequence
  Description of Artificial Sequence: Synthetic oligonucleotide
  Sense strand starting at position 1392 of SEQ ID NO: 1561785
cagggaugcuggcucaaga

SEQ ID NO: 1698224 - RNA, 19 nt, Artificial Sequence
  Description of Artificial Sequence: Synthetic oligonucleotide
  Antisense strand to SEQ ID NO: 1698223
ucuugagccagcaucccug

SEQ ID NO: 1698225 - RNA, 19 nt, Artificial Sequence
  Description of Artificial Sequence: Synthetic oligonucleotide
  Sense strand starting at position 2370 of SEQ ID NO: 1561785
ugguaucauuugccacagu

SEQ ID NO: 1698226 - RNA, 19 nt, Artificial Sequence
  Description of Artificial Sequence: Synthetic oligonucleotide
  Antisense strand to SEQ ID NO: 1698225
acuguggcaaaugauacca

SEQ ID NO: 1698227 - RNA, 19 nt, Artificial Sequence
  Description of Artificial Sequence: Synthetic oligonucleotide
  Sense strand starting at position 2401 of SEQ ID NO: 1561785
gccucuuucccgccggaau

SEQ ID NO: 1698228 - RNA, 19 nt, Artificial Sequence
  Description of Artificial Sequence: Synthetic oligonucleotide
  Antisense strand to SEQ ID NO: 1698227
auuccggcgggaaagaggc

SEQ ID NO: 1698229 - RNA, 19 nt, Artificial Sequence
  Description of Artificial Sequence: Synthetic oligonucleotide
  Sense strand starting at position 2437 of SEQ ID NO: 1561785
gagacuuggccucaucacu

SEQ ID NO: 1698230 - RNA, 19 nt, Artificial Sequence
  Description of Artificial Sequence: Synthetic oligonucleotide
  Antisense strand to SEQ ID NO: 1698229
agugaugaggccaagucuc

SEQ ID NO: 1698231 - RNA, 19 nt, Artificial Sequence
  Description of Artificial Sequence: Synthetic oligonucleotide
  Sense strand starting at position 2496 of SEQ ID NO: 1561785
aauccuugugguuaucaag

SEQ ID NO: 1698232 - RNA, 19 nt, Artificial Sequence
  Description of Artificial Sequence: Synthetic oligonucleotide
  Antisense strand to SEQ ID NO: 1698231
cuugauaaccacaaggauu

SEQ ID NO: 1698233 - RNA, 19 nt, Artificial Sequence
  Description of Artificial Sequence: Synthetic oligonucleotide
  Sense strand starting at position 2660 of SEQ ID NO: 1561785
ucucauugccauuaugaga

SEQ ID NO: 1698234 - RNA, 19 nt, Artificial Sequence
  Description of Artificial Sequence: Synthetic oligonucleotide
  Antisense strand to SEQ ID NO: 1698233
ucucauaauggcaaugaga

SEQ ID NO: 1698235 - RNA, 19 nt, Artificial Sequence
  Description of Artificial Sequence: Synthetic oligonucleotide
  Sense strand starting at position 2673 of SEQ ID NO: 1561785
augagauacugccuauaca

SEQ ID NO: 1698236 - RNA, 19 nt, Artificial Sequence
  Description of Artificial Sequence: Synthetic oligonucleotide
  Antisense strand to SEQ ID NO: 1698235
uguauaggcaguaucucau

SEQ ID NO: 1698237 - RNA, 19 nt, Artificial Sequence
  Description of Artificial Sequence: Synthetic oligonucleotide
  Sense strand starting at position 2754 of SEQ ID NO: 1561785
agcauacuugauugauaau

SEQ ID NO: 1698238 - RNA, 19 nt, Artificial Sequence
  Description of Artificial Sequence: Synthetic oligonucleotide
  Antisense strand to SEQ ID NO: 1698237
auuaucaaucaaguaugcu

SEQ ID NO: 1698239 - RNA, 19 nt, Artificial Sequence
  Description of Artificial Sequence: Synthetic oligonucleotide
  Sense strand starting at position 2890 of SEQ ID NO: 1561785
cuaucagagcuaggauuga

SEQ ID NO: 1698240 - RNA, 19 nt, Artificial Sequence
  Description of Artificial Sequence: Synthetic oligonucleotide
  Antisense strand to SEQ ID NO: 1698239
ucaauccuagcucugauag

SEQ ID NO: 1698241 - RNA, 19 nt, Artificial Sequence
  Description of Artificial Sequence: Synthetic oligonucleotide
  Sense strand starting at position 2995 of SEQ ID NO: 1561785
cuaguugauuuccaaggaa

SEQ ID NO: 1698242 - RNA, 19 nt, Artificial Sequence
  Description of Artificial Sequence: Synthetic oligonucleotide
  Antisense strand to SEQ ID NO: 1698241
uuccuuggaaaucaacuag

SEQ ID NO: 1698243 - RNA, 19 nt, Artificial Sequence
  Description of Artificial Sequence: Synthetic oligonucleotide
  Sense strand starting at position 3076 of SEQ ID NO: 1561785
auucuuacucacugggaag

SEQ ID NO: 1698244 - RNA, 19 nt, Artificial Sequence
  Description of Artificial Sequence: Synthetic oligonucleotide
  Antisense strand to SEQ ID NO: 1698243
cuucccagugaguaagaau

SEQ ID NO: 1698245 - RNA, 19 nt, Artificial Sequence
  Description of Artificial Sequence: Synthetic oligonucleotide
  Sense strand starting at position 3156 of SEQ ID NO: 1561785
uggauuguuugaccugaug

SEQ ID NO: 1698246 - RNA, 19 nt, Artificial Sequence
  Description of Artificial Sequence: Synthetic oligonucleotide
  Antisense strand to SEQ ID NO: 1698245
caucaggucaaacaaucca

SEQ ID NO: 1698247 - RNA, 19 nt, Artificial Sequence
  Description of Artificial Sequence: Synthetic oligonucleotide
  Sense strand starting at position 3202 of SEQ ID NO: 1561785
cgauaugaaucuucccauu

SEQ ID NO: 1698248 - RNA, 19 nt, Artificial Sequence
  Description of Artificial Sequence: Synthetic oligonucleotide
  Antisense strand to SEQ ID NO: 1698247
aaugggaagauucauaucg

SEQ ID NO: 1698249 - RNA, 19 nt, Artificial Sequence
  Description of Artificial Sequence: Synthetic oligonucleotide
  Sense strand starting at position 3213 of SEQ ID NO: 1561785
uucccauucucacugggaa

SEQ ID NO: 1698250 - RNA, 19 nt, Artificial Sequence
  Description of Artificial Sequence: Synthetic oligonucleotide
  Antisense strand to SEQ ID NO: 1698249
uucccagugagaaugggaa

SEQ ID NO: 1698251 - RNA, 19 nt, Artificial Sequence
  Description of Artificial Sequence: Synthetic oligonucleotide
  Sense strand starting at position 3245 of SEQ ID NO: 1561785
ucaccuuggcuugaugagu

SEQ ID NO: 1698252 - RNA, 19 nt, Artificial Sequence
  Description of Artificial Sequence: Synthetic oligonucleotide
  Antisense strand to SEQ ID NO: 1698251
acucaucaagccaagguga

SEQ ID NO: 1698253 - RNA, 19 nt, Artificial Sequence
  Description of Artificial Sequence: Synthetic oligonucleotide
  Sense strand starting at position 3570 of SEQ ID NO: 1561785
agaccaaguccacaguauu

SEQ ID NO: 1698254 - RNA, 19 nt, Artificial Sequence
  Description of Artificial Sequence: Synthetic oligonucleotide
  Antisense strand to SEQ ID NO: 1698253
aauacuguggacuuggucu

SEQ ID NO: 1698255 - RNA, 19 nt, Artificial Sequence
  Description of Artificial Sequence: Synthetic oligonucleotide
  Sense strand starting at position 3573 of SEQ ID NO: 1561785
ccaaguccacaguauuaua

SEQ ID NO: 1698256 - RNA, 19 nt, Artificial Sequence
  Description of Artificial Sequence: Synthetic oligonucleotide
  Antisense strand to SEQ ID NO: 1698255
uauaauacuguggacuugg

SEQ ID NO: 1698257 - RNA, 19 nt, Artificial Sequence
  Description of Artificial Sequence: Synthetic oligonucleotide
  Sense strand starting at position 3616 of SEQ ID NO: 1561785
gcauaaggagcuugaaaug

SEQ ID NO: 1698258 - RNA, 19 nt, Artificial Sequence
  Description of Artificial Sequence: Synthetic oligonucleotide
  Antisense strand to SEQ ID NO: 1698257
cauuucaagcuccuuaugc

SEQ ID NO: 1698259 - RNA, 19 nt, Artificial Sequence
  Description of Artificial Sequence: Synthetic oligonucleotide
  Sense strand starting at position 3697 of SEQ ID NO: 1561785
auaguuaaugcugacuaua

SEQ ID NO: 1698260 - RNA, 19 nt, Artificial Sequence
  Description of Artificial Sequence: Synthetic oligonucleotide
  Antisense strand to SEQ ID NO: 1698259
uauagucagcauuaacuau

SEQ ID NO: 1698261 - RNA, 19 nt, Artificial Sequence
  Description of Artificial Sequence: Synthetic oligonucleotide
  Sense strand starting at position 3699 of SEQ ID NO: 1561785
aguuaaugcugacuauaau

SEQ ID NO: 1698262 - RNA, 19 nt, Artificial Sequence
  Description of Artificial Sequence: Synthetic oligonucleotide
  Antisense strand to SEQ ID NO: 1698261
auuauagucagcauuaacu

SEQ ID NO: 1698263 - RNA, 19 nt, Artificial Sequence
  Description of Artificial Sequence: Synthetic oligonucleotide
  Sense strand starting at position 3700 of SEQ ID NO: 1561785
guuaaugcugacuauaauc

SEQ ID NO: 1698264 - RNA, 19 nt, Artificial Sequence
  Description of Artificial Sequence: Synthetic oligonucleotide
  Antisense strand to SEQ ID NO: 1698263
gauuauagucagcauuaac

SEQ ID NO: 1698265 - RNA, 19 nt, Artificial Sequence
  Description of Artificial Sequence: Synthetic oligonucleotide
  Sense strand starting at position 3874 of SEQ ID NO: 1561785
aaacguacagacugugaua

SEQ ID NO: 1698266 - RNA, 19 nt, Artificial Sequence
  Description of Artificial Sequence: Synthetic oligonucleotide
  Antisense strand to SEQ ID NO: 1698265
uaucacagucuguacguuu

SEQ ID NO: 1698267 - RNA, 19 nt, Artificial Sequence
  Description of Artificial Sequence: Synthetic oligonucleotide
  Sense strand starting at position 3876 of SEQ ID NO: 1561785
acguacagacugugauaua

SEQ ID NO: 1698268 - RNA, 19 nt, Artificial Sequence
  Description of Artificial Sequence: Synthetic oligonucleotide
  Antisense strand to SEQ ID NO: 1698267
uauaucacagucuguacgu

SEQ ID NO: 1698269 - RNA, 19 nt, Artificial Sequence
  Description of Artificial Sequence: Synthetic oligonucleotide
  Sense strand starting at position 3918 of SEQ ID NO: 1561785
guccaaauugugcaauaca

SEQ ID NO: 1698270 - RNA, 19 nt, Artificial Sequence
  Description of Artificial Sequence: Synthetic oligonucleotide
  Antisense strand to SEQ ID NO: 1698269
uguauugcacaauuuggac

SEQ ID NO: 1698271 - RNA, 19 nt, Artificial Sequence
  Description of Artificial Sequence: Synthetic oligonucleotide
  Sense strand starting at position 160 of SEQ ID NO: 1561786
gggagucacucaguaaagu

SEQ ID NO: 1698272 - RNA, 19 nt, Artificial Sequence
  Description of Artificial Sequence: Synthetic oligonucleotide
  Antisense strand to SEQ ID NO: 1698271
acuuuacugagugacuccc

SEQ ID NO: 1698273 - RNA, 19 nt, Artificial Sequence
  Description of Artificial Sequence: Synthetic oligonucleotide
  Sense strand starting at position 161 of SEQ ID NO: 1561786
ggagucacucaguaaagua

SEQ ID NO: 1698274 - RNA, 19 nt, Artificial Sequence
  Description of Artificial Sequence: Synthetic oligonucleotide
  Antisense strand to SEQ ID NO: 1698273
uacuuuacugagugacucc

SEQ ID NO: 1698275 - RNA, 19 nt, Artificial Sequence
  Description of Artificial Sequence: Synthetic oligonucleotide
  Sense strand starting at position 185 of SEQ ID NO: 1561786
aacaaugggugcucuugaa

SEQ ID NO: 1698276 - RNA, 19 nt, Artificial Sequence
  Description of Artificial Sequence: Synthetic oligonucleotide
  Antisense strand to SEQ ID NO: 1698275
uucaagagcacccauuguu

SEQ ID NO: 1698277 - RNA, 19 nt, Artificial Sequence
  Description of Artificial Sequence: Synthetic oligonucleotide
  Sense strand starting at position 189 of SEQ ID NO: 1561786
augggugcucuugaagaug

SEQ ID NO: 1698278 - RNA, 19 nt, Artificial Sequence
  Description of Artificial Sequence: Synthetic oligonucleotide
  Antisense strand to SEQ ID NO: 1698277
caucuucaagagcacccau

SEQ ID NO: 1698279 - RNA, 19 nt, Artificial Sequence
  Description of Artificial Sequence: Synthetic oligonucleotide
  Sense strand starting at position 192 of SEQ ID NO: 1561786
ggugcucuugaagaugaga

SEQ ID NO: 1698280 - RNA, 19 nt, Artificial Sequence
  Description of Artificial Sequence: Synthetic oligonucleotide
  Antisense strand to SEQ ID NO: 1698279
ucucaucuucaagagcacc

SEQ ID NO: 1698281 - RNA, 19 nt, Artificial Sequence
  Description of Artificial Sequence: Synthetic oligonucleotide
  Sense strand starting at position 240 of SEQ ID NO: 1561786
gaaacuuuggcagagcuga

SEQ ID NO: 1698282 - RNA, 19 nt, Artificial Sequence
  Description of Artificial Sequence: Synthetic oligonucleotide
  Antisense strand to SEQ ID NO: 1698281
ucagcucugccaaaguuuc

SEQ ID NO: 1698283 - RNA, 19 nt, Artificial Sequence
  Description of Artificial Sequence: Synthetic oligonucleotide
  Sense strand starting at position 254 of SEQ ID NO: 1561786
gcugauggaaauggugaau

SEQ ID NO: 1698284 - RNA, 19 nt, Artificial Sequence
  Description of Artificial Sequence: Synthetic oligonucleotide
  Antisense strand to SEQ ID NO: 1698283
auucaccauuuccaucagc

SEQ ID NO: 1698285 - RNA, 19 nt, Artificial Sequence
  Description of Artificial Sequence: Synthetic oligonucleotide
  Sense strand starting at position 593 of SEQ ID NO: 1561786
ggcauuccacacgauuacu

SEQ ID NO: 1698286 - RNA, 19 nt, Artificial Sequence
  Description of Artificial Sequence: Synthetic oligonucleotide
  Antisense strand to SEQ ID NO: 1698285
aguaaucguguggaaugcc

SEQ ID NO: 1698287 - RNA, 19 nt, Artificial Sequence
  Description of Artificial Sequence: Synthetic oligonucleotide
  Sense strand starting at position 761 of SEQ ID NO: 1561786
agggaccuaguuugaaauu

SEQ ID NO: 1698288 - RNA, 19 nt, Artificial Sequence
  Description of Artificial Sequence: Synthetic oligonucleotide
  Antisense strand to SEQ ID NO: 1698287
aauuucaaacuaggucccu

SEQ ID NO: 1698289 - RNA, 19 nt, Artificial Sequence
  Description of Artificial Sequence: Synthetic oligonucleotide
  Sense strand starting at position 963 of SEQ ID NO: 1561786
ucccaagugcccuaagauu

SEQ ID NO: 1698290 - RNA, 19 nt, Artificial Sequence
  Description of Artificial Sequence: Synthetic oligonucleotide
  Antisense strand to SEQ ID NO: 1698289
aaucuuagggcacuuggga

SEQ ID NO: 1698291 - RNA, 19 nt, Artificial Sequence
  Description of Artificial Sequence: Synthetic oligonucleotide
  Sense strand starting at position 1021 of SEQ ID NO: 1561786
gcgcuaugccagguaucag

SEQ ID NO: 1698292 - RNA, 19 nt, Artificial Sequence
  Description of Artificial Sequence: Synthetic oligonucleotide
  Antisense strand to SEQ ID NO: 1698291
cugauaccuggcauagcgc

SEQ ID NO: 1698293 - RNA, 19 nt, Artificial Sequence
  Description of Artificial Sequence: Synthetic oligonucleotide
  Sense strand starting at position 1074 of SEQ ID NO: 1561786
gguguauuccagcaacaga

SEQ ID NO: 1698294 - RNA, 19 nt, Artificial Sequence
  Description of Artificial Sequence: Synthetic oligonucleotide
  Antisense strand to SEQ ID NO: 1698293
ucuguugcuggaauacacc

SEQ ID NO: 1698295 - RNA, 19 nt, Artificial Sequence
  Description of Artificial Sequence: Synthetic oligonucleotide
  Sense strand starting at position 1077 of SEQ ID NO: 1561786
guauuccagcaacagaaau

SEQ ID NO: 1698296 - RNA, 19 nt, Artificial Sequence
  Description of Artificial Sequence: Synthetic oligonucleotide
  Antisense strand to SEQ ID NO: 1698295
auuucuguugcuggaauac

SEQ ID NO: 1698297 - RNA, 19 nt, Artificial Sequence
  Description of Artificial Sequence: Synthetic oligonucleotide
  Sense strand starting at position 1262 of SEQ ID NO: 1561786
guucgugaccucguucaca

SEQ ID NO: 1698298 - RNA, 19 nt, Artificial Sequence
  Description of Artificial Sequence: Synthetic oligonucleotide
  Antisense strand to SEQ ID NO: 1698297
ugugaacgaggucacgaac

SEQ ID NO: 1698299 - RNA, 19 nt, Artificial Sequence
  Description of Artificial Sequence: Synthetic oligonucleotide
  Sense strand starting at position 1282 of SEQ ID NO: 1561786
cgaguaugcguguccucuu

SEQ ID NO: 1698300 - RNA, 19 nt, Artificial Sequence
  Description of Artificial Sequence: Synthetic oligonucleotide
  Antisense strand to SEQ ID NO: 1698299
aagaggacacgcauacucg

SEQ ID NO: 1698301 - RNA, 19 nt, Artificial Sequence
  Description of Artificial Sequence: Synthetic oligonucleotide
  Sense strand starting at position 1287 of SEQ ID NO: 1561786
augcguguccucuuucuca

SEQ ID NO: 1698302 - RNA, 19 nt, Artificial Sequence
  Description of Artificial Sequence: Synthetic oligonucleotide
  Antisense strand to SEQ ID NO: 1698301
ugagaaagaggacacgcau

SEQ ID NO: 1698303 - RNA, 19 nt, Artificial Sequence
  Description of Artificial Sequence: Synthetic oligonucleotide
  Sense strand starting at position 1289 of SEQ ID NO: 1561786
gcguguccucuuucucaac

SEQ ID NO: 1698304 - RNA, 19 nt, Artificial Sequence
  Description of Artificial Sequence: Synthetic oligonucleotide
  Antisense strand to SEQ ID NO: 1698303
guugagaaagaggacacgc

SEQ ID NO: 1698305 - RNA, 19 nt, Artificial Sequence
  Description of Artificial Sequence: Synthetic oligonucleotide
  Sense strand starting at position 1414 of SEQ ID NO: 1561786
cauggcuaccgagaaauau

SEQ ID NO: 1698306 - RNA, 19 nt, Artificial Sequence
  Description of Artificial Sequence: Synthetic oligonucleotide
  Antisense strand to SEQ ID NO: 1698305
auauuucucgguagccaug

SEQ ID NO: 1698307 - RNA, 19 nt, Artificial Sequence
  Description of Artificial Sequence: Synthetic oligonucleotide
  Sense strand starting at position 1568 of SEQ ID NO: 1561786
cgcggguuucggcugagaa

SEQ ID NO: 1698308 - RNA, 19 nt, Artificial Sequence
  Description of Artificial Sequence: Synthetic oligonucleotide
  Antisense strand to SEQ ID NO: 1698307
uucucagccgaaacccgcg

SEQ ID NO: 1698309 - RNA, 19 nt, Artificial Sequence
  Description of Artificial Sequence: Synthetic oligonucleotide
  Sense strand starting at position 1638 of SEQ ID NO: 1561786
cagggaugcuggcucaaga

SEQ ID NO: 1698310 - RNA, 19 nt, Artificial Sequence
  Description of Artificial Sequence: Synthetic oligonucleotide
  Antisense strand to SEQ ID NO: 1698309
ucuugagccagcaucccug

SEQ ID NO: 1698311 - RNA, 19 nt, Artificial Sequence
  Description of Artificial Sequence: Synthetic oligonucleotide
  Sense strand starting at position 2616 of SEQ ID NO: 1561786
ugguaucauuugccacagu

SEQ ID NO: 1698312 - RNA, 19 nt, Artificial Sequence
  Description of Artificial Sequence: Synthetic oligonucleotide
  Antisense strand to SEQ ID NO: 1698311
acuguggcaaaugauacca

SEQ ID NO: 1698313 - RNA, 19 nt, Artificial Sequence
  Description of Artificial Sequence: Synthetic oligonucleotide
  Sense strand starting at position 2647 of SEQ ID NO: 1561786
gccucuuucccgccggaau

SEQ ID NO: 1698314 - RNA, 19 nt, Artificial Sequence
  Description of Artificial Sequence: Synthetic oligonucleotide
  Antisense strand to SEQ ID NO: 1698313
auuccggcgggaaagaggc

SEQ ID NO: 1698315 - RNA, 19 nt, Artificial Sequence
  Description of Artificial Sequence: Synthetic oligonucleotide
  Sense strand starting at position 2683 of SEQ ID NO: 1561786
gagacuuggccucaucacu

SEQ ID NO: 1698316 - RNA, 19 nt, Artificial Sequence
  Description of Artificial Sequence: Synthetic oligonucleotide
  Antisense strand to SEQ ID NO: 1698315
agugaugaggccaagucuc

SEQ ID NO: 1698317 - RNA, 19 nt, Artificial Sequence
  Description of Artificial Sequence: Synthetic oligonucleotide
  Sense strand starting at position 2742 of SEQ ID NO: 1561786
aauccuugugguuaucaag

SEQ ID NO: 1698318 - RNA, 19 nt, Artificial Sequence
  Description of Artificial Sequence: Synthetic oligonucleotide
  Antisense strand to SEQ ID NO: 1698317
cuugauaaccacaaggauu

SEQ ID NO: 1698319 - RNA, 19 nt, Artificial Sequence
  Description of Artificial Sequence: Synthetic oligonucleotide
  Sense strand starting at position 2906 of SEQ ID NO: 1561786
ucucauugccauuaugaga

SEQ ID NO: 1698320 - RNA, 19 nt, Artificial Sequence
  Description of Artificial Sequence: Synthetic oligonucleotide
  Antisense strand to SEQ ID NO: 1698319
ucucauaauggcaaugaga

SEQ ID NO: 1698321 - RNA, 19 nt, Artificial Sequence
  Description of Artificial Sequence: Synthetic oligonucleotide
  Sense strand starting at position 2919 of SEQ ID NO: 1561786
augagauacugccuauaca

SEQ ID NO: 1698322 - RNA, 19 nt, Artificial Sequence
  Description of Artificial Sequence: Synthetic oligonucleotide
  Antisense strand to SEQ ID NO: 1698321
uguauaggcaguaucucau

SEQ ID NO: 1698323 - RNA, 19 nt, Artificial Sequence
  Description of Artificial Sequence: Synthetic oligonucleotide
  Sense strand starting at position 3000 of SEQ ID NO: 1561786
agcauacuugauugauaau

SEQ ID NO: 1698324 - RNA, 19 nt, Artificial Sequence
  Description of Artificial Sequence: Synthetic oligonucleotide
  Antisense strand to SEQ ID NO: 1698323
auuaucaaucaaguaugcu

SEQ ID NO: 1698325 - RNA, 19 nt, Artificial Sequence
  Description of Artificial Sequence: Synthetic oligonucleotide
  Sense strand starting at position 3136 of SEQ ID NO: 1561786
cuaucagagcuaggauuga

SEQ ID NO: 1698326 - RNA, 19 nt, Artificial Sequence
  Description of Artificial Sequence: Synthetic oligonucleotide
  Antisense strand to SEQ ID NO: 1698325
ucaauccuagcucugauag

SEQ ID NO: 1698327 - RNA, 19 nt, Artificial Sequence
  Description of Artificial Sequence: Synthetic oligonucleotide
  Sense strand starting at position 3241 of SEQ ID NO: 1561786
cuaguugauuuccaaggaa

SEQ ID NO: 1698328 - RNA, 19 nt, Artificial Sequence
  Description of Artificial Sequence: Synthetic oligonucleotide
  Antisense strand to SEQ ID NO: 1698327
uuccuuggaaaucaacuag

SEQ ID NO: 1698329 - RNA, 19 nt, Artificial Sequence
  Description of Artificial Sequence: Synthetic oligonucleotide
  Sense strand starting at position 3322 of SEQ ID NO: 1561786
auucuuacucacugggaag

SEQ ID NO: 1698330 - RNA, 19 nt, Artificial Sequence
  Description of Artificial Sequence: Synthetic oligonucleotide
  Antisense strand to SEQ ID NO: 1698329
cuucccagugaguaagaau

SEQ ID NO: 1698331 - RNA, 19 nt, Artificial Sequence
  Description of Artificial Sequence: Synthetic oligonucleotide
  Sense strand starting at position 3402 of SEQ ID NO: 1561786
uggauuguuugaccugaug

SEQ ID NO: 1698332 - RNA, 19 nt, Artificial Sequence
  Description of Artificial Sequence: Synthetic oligonucleotide
  Antisense strand to SEQ ID NO: 1698331
caucaggucaaacaaucca

SEQ ID NO: 1698333 - RNA, 19 nt, Artificial Sequence
  Description of Artificial Sequence: Synthetic oligonucleotide
  Sense strand starting at position 3448 of SEQ ID NO: 1561786
cgauaugaaucuucccauu

SEQ ID NO: 1698334 - RNA, 19 nt, Artificial Sequence
  Description of Artificial Sequence: Synthetic oligonucleotide
  Antisense strand to SEQ ID NO: 1698333
aaugggaagauucauaucg

SEQ ID NO: 1698335 - RNA, 19 nt, Artificial Sequence
  Description of Artificial Sequence: Synthetic oligonucleotide
  Sense strand starting at position 3459 of SEQ ID NO: 1561786
uucccauucucacugggaa

SEQ ID NO: 1698336 - RNA, 19 nt, Artificial Sequence
  Description of Artificial Sequence: Synthetic oligonucleotide
  Antisense strand to SEQ ID NO: 1698335
uucccagugagaaugggaa

SEQ ID NO: 1698337 - RNA, 19 nt, Artificial Sequence
  Description of Artificial Sequence: Synthetic oligonucleotide
  Sense strand starting at position 3491 of SEQ ID NO: 1561786
ucaccuuggcuugaugagu

SEQ ID NO: 1698338 - RNA, 19 nt, Artificial Sequence
  Description of Artificial Sequence: Synthetic oligonucleotide
  Antisense strand to SEQ ID NO: 1698337
acucaucaagccaagguga

SEQ ID NO: 1698339 - RNA, 19 nt, Artificial Sequence
  Description of Artificial Sequence: Synthetic oligonucleotide
  Sense strand starting at position 3816 of SEQ ID NO: 1561786
agaccaaguccacaguauu

SEQ ID NO: 1698340 - RNA, 19 nt, Artificial Sequence
  Description of Artificial Sequence: Synthetic oligonucleotide
  Antisense strand to SEQ ID NO: 1698339
aauacuguggacuuggucu

SEQ ID NO: 1698341 - RNA, 19 nt, Artificial Sequence
  Description of Artificial Sequence: Synthetic oligonucleotide
  Sense strand starting at position 3819 of SEQ ID NO: 1561786
ccaaguccacaguauuaua

SEQ ID NO: 1698342 - RNA, 19 nt, Artificial Sequence
  Description of Artificial Sequence: Synthetic oligonucleotide
  Antisense strand to SEQ ID NO: 1698341
uauaauacuguggacuugg

SEQ ID NO: 1698343 - RNA, 19 nt, Artificial Sequence
  Description of Artificial Sequence: Synthetic oligonucleotide
  Sense strand starting at position 3862 of SEQ ID NO: 1561786
gcauaaggagcuugaaaug

SEQ ID NO: 1698344 - RNA, 19 nt, Artificial Sequence
  Description of Artificial Sequence: Synthetic oligonucleotide
  Antisense strand to SEQ ID NO: 1698343
cauuucaagcuccuuaugc

SEQ ID NO: 1698345 - RNA, 19 nt, Artificial Sequence
  Description of Artificial Sequence: Synthetic oligonucleotide
  Sense strand starting at position 3943 of SEQ ID NO: 1561786
auaguuaaugcugacuaua

SEQ ID NO: 1698346 - RNA, 19 nt, Artificial Sequence
  Description of Artificial Sequence: Synthetic oligonucleotide
  Antisense strand to SEQ ID NO: 1698345
uauagucagcauuaacuau

SEQ ID NO: 1698347 - RNA, 19 nt, Artificial Sequence
  Description of Artificial Sequence: Synthetic oligonucleotide
  Sense strand starting at position 3945 of SEQ ID NO: 1561786
aguuaaugcugacuauaau

SEQ ID NO: 1698348 - RNA, 19 nt, Artificial Sequence
  Description of Artificial Sequence: Synthetic oligonucleotide
  Antisense strand to SEQ ID NO: 1698347
auuauagucagcauuaacu

SEQ ID NO: 1698349 - RNA, 19 nt, Artificial Sequence
  Description of Artificial Sequence: Synthetic oligonucleotide
  Sense strand starting at position 3946 of SEQ ID NO: 1561786
guuaaugcugacuauaauc

SEQ ID NO: 1698350 - RNA, 19 nt, Artificial Sequence
  Description of Artificial Sequence: Synthetic oligonucleotide
  Antisense strand to SEQ ID NO: 1698349
gauuauagucagcauuaac

SEQ ID NO: 1698351 - RNA, 19 nt, Artificial Sequence
  Description of Artificial Sequence: Synthetic oligonucleotide
  Sense strand starting at position 58 of SEQ ID NO: 1561787
ucacauauguucuguugca

SEQ ID NO: 1698352 - RNA, 19 nt, Artificial Sequence
  Description of Artificial Sequence: Synthetic oligonucleotide
  Antisense strand to SEQ ID NO: 1698351
ugcaacagaacauauguga

SEQ ID NO: 1698353 - RNA, 19 nt, Artificial Sequence
  Description of Artificial Sequence: Synthetic oligonucleotide
  Sense strand starting at position 87 of SEQ ID NO: 1561787
uuuggauugaggugcagau

SEQ ID NO: 1698354 - RNA, 19 nt, Artificial Sequence
  Description of Artificial Sequence: Synthetic oligonucleotide
  Antisense strand to SEQ ID NO: 1698353
aucugcaccucaauccaaa

SEQ ID NO: 1698355 - RNA, 19 nt, Artificial Sequence
  Description of Artificial Sequence: Synthetic oligonucleotide
  Sense strand starting at position 103 of SEQ ID NO: 1561787
gauugagagugcgaugaca

SEQ ID NO: 1698356 - RNA, 19 nt, Artificial Sequence
  Description of Artificial Sequence: Synthetic oligonucleotide
  Antisense strand to SEQ ID NO: 1698355
ugucaucgcacucucaauc

SEQ ID NO: 1698357 - RNA, 19 nt, Artificial Sequence
  Description of Artificial Sequence: Synthetic oligonucleotide
  Sense strand starting at position 105 of SEQ ID NO: 1561787
uugagagugcgaugacauc

SEQ ID NO: 1698358 - RNA, 19 nt, Artificial Sequence
  Description of Artificial Sequence: Synthetic oligonucleotide
  Antisense strand to SEQ ID NO: 1698357
gaugucaucgcacucucaa

SEQ ID NO: 1698359 - RNA, 19 nt, Artificial Sequence
  Description of Artificial Sequence: Synthetic oligonucleotide
  Sense strand starting at position 305 of SEQ ID NO: 1561787
gccucaucacugugugaaa

SEQ ID NO: 1698360 - RNA, 19 nt, Artificial Sequence
  Description of Artificial Sequence: Synthetic oligonucleotide
  Antisense strand to SEQ ID NO: 1698359
uuucacacagugaugaggc

SEQ ID NO: 1698361 - RNA, 19 nt, Artificial Sequence
  Description of Artificial Sequence: Synthetic oligonucleotide
  Sense strand starting at position 339 of SEQ ID NO: 1561787
uugcgagcgccuaguuaug

SEQ ID NO: 1698362 - RNA, 19 nt, Artificial Sequence
  Description of Artificial Sequence: Synthetic oligonucleotide
  Antisense strand to SEQ ID NO: 1698361
cauaacuaggcgcucgcaa

SEQ ID NO: 1698363 - RNA, 19 nt, Artificial Sequence
  Description of Artificial Sequence: Synthetic oligonucleotide
  Sense strand starting at position 348 of SEQ ID NO: 1561787
ccuaguuaugucugaggau

SEQ ID NO: 1698364 - RNA, 19 nt, Artificial Sequence
  Description of Artificial Sequence: Synthetic oligonucleotide
  Antisense strand to SEQ ID NO: 1698363
auccucagacauaacuagg

SEQ ID NO: 1698365 - RNA, 19 nt, Artificial Sequence
  Description of Artificial Sequence: Synthetic oligonucleotide
  Sense strand starting at position 349 of SEQ ID NO: 1561787
cuaguuaugucugaggaug

SEQ ID NO: 1698366 - RNA, 19 nt, Artificial Sequence
  Description of Artificial Sequence: Synthetic oligonucleotide
  Antisense strand to SEQ ID NO: 1698365
cauccucagacauaacuag

SEQ ID NO: 1698367 - RNA, 19 nt, Artificial Sequence
  Description of Artificial Sequence: Synthetic oligonucleotide
  Sense strand starting at position 351 of SEQ ID NO: 1561787
aguuaugucugaggaugau

SEQ ID NO: 1698368 - RNA, 19 nt, Artificial Sequence
  Description of Artificial Sequence: Synthetic oligonucleotide
  Antisense strand to SEQ ID NO: 1698367
aucauccucagacauaacu

SEQ ID NO: 1698369 - RNA, 19 nt, Artificial Sequence
  Description of Artificial Sequence: Synthetic oligonucleotide
  Sense strand starting at position 354 of SEQ ID NO: 1561787
uaugucugaggaugauuau

SEQ ID NO: 1698370 - RNA, 19 nt, Artificial Sequence
  Description of Artificial Sequence: Synthetic oligonucleotide
  Antisense strand to SEQ ID NO: 1698369
auaaucauccucagacaua

SEQ ID NO: 1698371 - RNA, 19 nt, Artificial Sequence
  Description of Artificial Sequence: Synthetic oligonucleotide
  Sense strand starting at position 2229 of SEQ ID NO: 1561787
gcgccaagccguuagucau

SEQ ID NO: 1698372 - RNA, 19 nt, Artificial Sequence
  Description of Artificial Sequence: Synthetic oligonucleotide
  Antisense strand to SEQ ID NO: 1698371
augacuaacggcuuggcgc

SEQ ID NO: 1698373 - RNA, 19 nt, Artificial Sequence
  Description of Artificial Sequence: Synthetic oligonucleotide
  Sense strand starting at position 2235 of SEQ ID NO: 1561787
agccguuagucauuaggga

SEQ ID NO: 1698374 - RNA, 19 nt, Artificial Sequence
  Description of Artificial Sequence: Synthetic oligonucleotide
  Antisense strand to SEQ ID NO: 1698373
ucccuaaugacuaacggcu

SEQ ID NO: 1698375 - RNA, 19 nt, Artificial Sequence
  Description of Artificial Sequence: Synthetic oligonucleotide
  Sense strand starting at position 2236 of SEQ ID NO: 1561787
gccguuagucauuagggaa

SEQ ID NO: 1698376 - RNA, 19 nt, Artificial Sequence
  Description of Artificial Sequence: Synthetic oligonucleotide
  Antisense strand to SEQ ID NO: 1698375
uucccuaaugacuaacggc

SEQ ID NO: 1698377 - RNA, 19 nt, Artificial Sequence
  Description of Artificial Sequence: Synthetic oligonucleotide
  Sense strand starting at position 2361 of SEQ ID NO: 1561787
ucagaaucccugugcuuug

SEQ ID NO: 1698378 - RNA, 19 nt, Artificial Sequence
  Description of Artificial Sequence: Synthetic oligonucleotide
  Antisense strand to SEQ ID NO: 1698377
caaagcacagggauucuga

SEQ ID NO: 1698379 - RNA, 19 nt, Artificial Sequence
  Description of Artificial Sequence: Synthetic oligonucleotide
  Sense strand starting at position 2551 of SEQ ID NO: 1561787
guggaaaugacucaagugu

SEQ ID NO: 1698380 - RNA, 19 nt, Artificial Sequence
  Description of Artificial Sequence: Synthetic oligonucleotide
  Antisense strand to SEQ ID NO: 1698379
acacuugagucauuuccac

SEQ ID NO: 1698381 - RNA, 19 nt, Artificial Sequence
  Description of Artificial Sequence: Synthetic oligonucleotide
  Sense strand starting at position 2562 of SEQ ID NO: 1561787
ucaagugugcuccagcaga

SEQ ID NO: 1698382 - RNA, 19 nt, Artificial Sequence
  Description of Artificial Sequence: Synthetic oligonucleotide
  Antisense strand to SEQ ID NO: 1698381
ucugcuggagcacacuuga

SEQ ID NO: 1698383 - RNA, 19 nt, Artificial Sequence
  Description of Artificial Sequence: Synthetic oligonucleotide
  Sense strand starting at position 2573 of SEQ ID NO: 1561787
ccagcagaggaaugaguaa

SEQ ID NO: 1698384 - RNA, 19 nt, Artificial Sequence
  Description of Artificial Sequence: Synthetic oligonucleotide
  Antisense strand to SEQ ID NO: 1698383
uuacucauuccucugcugg

SEQ ID NO: 1698385 - RNA, 19 nt, Artificial Sequence
  Description of Artificial Sequence: Synthetic oligonucleotide
  Sense strand starting at position 2588 of SEQ ID NO: 1561787
guaaacaaauguguuacaa

SEQ ID NO: 1698386 - RNA, 19 nt, Artificial Sequence
  Description of Artificial Sequence: Synthetic oligonucleotide
  Antisense strand to SEQ ID NO: 1698385
uuguaacacauuuguuuac

SEQ ID NO: 1698387 - RNA, 19 nt, Artificial Sequence
  Description of Artificial Sequence: Synthetic oligonucleotide
  Sense strand starting at position 2815 of SEQ ID NO: 1561787
cgguguggaguuaguguuu

SEQ ID NO: 1698388 - RNA, 19 nt, Artificial Sequence
  Description of Artificial Sequence: Synthetic oligonucleotide
  Antisense strand to SEQ ID NO: 1698387
aaacacuaacuccacaccg

SEQ ID NO: 1698389 - RNA, 19 nt, Artificial Sequence
  Description of Artificial Sequence: Synthetic oligonucleotide
  Sense strand starting at position 2816 of SEQ ID NO: 1561787
gguguggaguuaguguuua

SEQ ID NO: 1698390 - RNA, 19 nt, Artificial Sequence
  Description of Artificial Sequence: Synthetic oligonucleotide
  Antisense strand to SEQ ID NO: 1698389
uaaacacuaacuccacacc

SEQ ID NO: 1698391 - RNA, 19 nt, Artificial Sequence
  Description of Artificial Sequence: Synthetic oligonucleotide
  Sense strand starting at position 2842 of SEQ ID NO: 1561787
cggaguuucuguuuagggu

SEQ ID NO: 1698392 - RNA, 19 nt, Artificial Sequence
  Description of Artificial Sequence: Synthetic oligonucleotide
  Antisense strand to SEQ ID NO: 1698391
acccuaaacagaaacuccg

SEQ ID NO: 1698393 - RNA, 19 nt, Artificial Sequence
  Description of Artificial Sequence: Synthetic oligonucleotide
  Sense strand starting at position 2987 of SEQ ID NO: 1561787
ccuggauuuaaucguguag

SEQ ID NO: 1698394 - RNA, 19 nt, Artificial Sequence
  Description of Artificial Sequence: Synthetic oligonucleotide
  Antisense strand to SEQ ID NO: 1698393
cuacacgauuaaauccagg

SEQ ID NO: 1698395 - RNA, 19 nt, Artificial Sequence
  Description of Artificial Sequence: Synthetic oligonucleotide
  Sense strand starting at position 2989 of SEQ ID NO: 1561787
uggauuuaaucguguagaa

SEQ ID NO: 1698396 - RNA, 19 nt, Artificial Sequence
  Description of Artificial Sequence: Synthetic oligonucleotide
  Antisense strand to SEQ ID NO: 1698395
uucuacacgauuaaaucca

SEQ ID NO: 1698397 - RNA, 19 nt, Artificial Sequence
  Description of Artificial Sequence: Synthetic oligonucleotide
  Sense strand starting at position 2999 of SEQ ID NO: 1561787
cguguagaaugcuauguuu

SEQ ID NO: 1698398 - RNA, 19 nt, Artificial Sequence
  Description of Artificial Sequence: Synthetic oligonucleotide
  Antisense strand to SEQ ID NO: 1698397
aaacauagcauucuacacg

SEQ ID NO: 1698399 - RNA, 19 nt, Artificial Sequence
  Description of Artificial Sequence: Synthetic oligonucleotide
  Sense strand starting at position 3225 of SEQ ID NO: 1561787
uuaucagucuccuuccuga

SEQ ID NO: 1698400 - RNA, 19 nt, Artificial Sequence
  Description of Artificial Sequence: Synthetic oligonucleotide
  Antisense strand to SEQ ID NO: 1698399
ucaggaaggagacugauaa

SEQ ID NO: 1698401 - RNA, 19 nt, Artificial Sequence
  Description of Artificial Sequence: Synthetic oligonucleotide
  Sense strand starting at position 3279 of SEQ ID NO: 1561787
ucccgaaucugagcagaau

SEQ ID NO: 1698402 - RNA, 19 nt, Artificial Sequence
  Description of Artificial Sequence: Synthetic oligonucleotide
  Antisense strand to SEQ ID NO: 1698401
auucugcucagauucggga

SEQ ID NO: 1698403 - RNA, 19 nt, Artificial Sequence
  Description of Artificial Sequence: Synthetic oligonucleotide
  Sense strand starting at position 3323 of SEQ ID NO: 1561787
acggucagcucauuugaau

SEQ ID NO: 1698404 - RNA, 19 nt, Artificial Sequence
  Description of Artificial Sequence: Synthetic oligonucleotide
  Antisense strand to SEQ ID NO: 1698403
auucaaaugagcugaccgu

SEQ ID NO: 1698405 - RNA, 19 nt, Artificial Sequence
  Description of Artificial Sequence: Synthetic oligonucleotide
  Sense strand starting at position 3443 of SEQ ID NO: 1561787
aaugauuugucccguagac

SEQ ID NO: 1698406 - RNA, 19 nt, Artificial Sequence
  Description of Artificial Sequence: Synthetic oligonucleotide
  Antisense strand to SEQ ID NO: 1698405
gucuacgggacaaaucauu

SEQ ID NO: 1698407 - RNA, 19 nt, Artificial Sequence
  Description of Artificial Sequence: Synthetic oligonucleotide
  Sense strand starting at position 3445 of SEQ ID NO: 1561787
ugauuugucccguagacgu

SEQ ID NO: 1698408 - RNA, 19 nt, Artificial Sequence
  Description of Artificial Sequence: Synthetic oligonucleotide
  Antisense strand to SEQ ID NO: 1698407
acgucuacgggacaaauca

SEQ ID NO: 1698409 - RNA, 19 nt, Artificial Sequence
  Description of Artificial Sequence: Synthetic oligonucleotide
  Sense strand starting at position 3761 of SEQ ID NO: 1561787
cugacuuguuaauuguuga

SEQ ID NO: 1698410 - RNA, 19 nt, Artificial Sequence
  Description of Artificial Sequence: Synthetic oligonucleotide
  Antisense strand to SEQ ID NO: 1698409
ucaacaauuaacaagucag

SEQ ID NO: 1698411 - RNA, 19 nt, Artificial Sequence
  Description of Artificial Sequence: Synthetic oligonucleotide
  Sense strand starting at position 3764 of SEQ ID NO: 1561787
acuuguuaauuguugaaac

SEQ ID NO: 1698412 - RNA, 19 nt, Artificial Sequence
  Description of Artificial Sequence: Synthetic oligonucleotide
  Antisense strand to SEQ ID NO: 1698411
guuucaacaauuaacaagu

SEQ ID NO: 1698413 - RNA, 19 nt, Artificial Sequence
  Description of Artificial Sequence: Synthetic oligonucleotide
  Sense strand starting at position 3765 of SEQ ID NO: 1561787
cuuguuaauuguugaaacu

SEQ ID NO: 1698414 - RNA, 19 nt, Artificial Sequence
  Description of Artificial Sequence: Synthetic oligonucleotide
  Antisense strand to SEQ ID NO: 1698413
aguuucaacaauuaacaag

SEQ ID NO: 1698415 - RNA, 19 nt, Artificial Sequence
  Description of Artificial Sequence: Synthetic oligonucleotide
  Sense strand starting at position 101 of SEQ ID NO: 1561788
ccagcaaacuuugaagaca

SEQ ID NO: 1698416 - RNA, 19 nt, Artificial Sequence
  Description of Artificial Sequence: Synthetic oligonucleotide
  Antisense strand to SEQ ID NO: 1698415
ugucuucaaaguuugcugg

SEQ ID NO: 1698417 - RNA, 19 nt, Artificial Sequence
  Description of Artificial Sequence: Synthetic oligonucleotide
  Sense strand starting at position 134 of SEQ ID NO: 1561788
uguguuaucuauucuccaa

SEQ ID NO: 1698418 - RNA, 19 nt, Artificial Sequence
  Description of Artificial Sequence: Synthetic oligonucleotide
  Antisense strand to SEQ ID NO: 1698417
uuggagaauagauaacaca

SEQ ID NO: 1698419 - RNA, 19 nt, Artificial Sequence
  Description of Artificial Sequence: Synthetic oligonucleotide
  Sense strand starting at position 137 of SEQ ID NO: 1561788
guuaucuauucuccaagag

SEQ ID NO: 1698420 - RNA, 19 nt, Artificial Sequence
  Description of Artificial Sequence: Synthetic oligonucleotide
  Antisense strand to SEQ ID NO: 1698419
cucuuggagaauagauaac

SEQ ID NO: 1698421 - RNA, 19 nt, Artificial Sequence
  Description of Artificial Sequence: Synthetic oligonucleotide
  Sense strand starting at position 374 of SEQ ID NO: 1561788
guaauuugauugcaucuga

SEQ ID NO: 1698422 - RNA, 19 nt, Artificial Sequence
  Description of Artificial Sequence: Synthetic oligonucleotide
  Antisense strand to SEQ ID NO: 1698421
ucagaugcaaucaaauuac

SEQ ID NO: 1698423 - RNA, 19 nt, Artificial Sequence
  Description of Artificial Sequence: Synthetic oligonucleotide
  Sense strand starting at position 543 of SEQ ID NO: 1561788
guuguaugauaguuacuuu

SEQ ID NO: 1698424 - RNA, 19 nt, Artificial Sequence
  Description of Artificial Sequence: Synthetic oligonucleotide
  Antisense strand to SEQ ID NO: 1698423
aaaguaacuaucauacaac

SEQ ID NO: 1698425 - RNA, 19 nt, Artificial Sequence
  Description of Artificial Sequence: Synthetic oligonucleotide
  Sense strand starting at position 546 of SEQ ID NO: 1561788
guaugauaguuacuuucuu

SEQ ID NO: 1698426 - RNA, 19 nt, Artificial Sequence
  Description of Artificial Sequence: Synthetic oligonucleotide
  Antisense strand to SEQ ID NO: 1698425
aagaaaguaacuaucauac

SEQ ID NO: 1698427 - RNA, 19 nt, Artificial Sequence
  Description of Artificial Sequence: Synthetic oligonucleotide
  Sense strand starting at position 640 of SEQ ID NO: 1561788
ggcauaugaaggcaguuau

SEQ ID NO: 1698428 - RNA, 19 nt, Artificial Sequence
  Description of Artificial Sequence: Synthetic oligonucleotide
  Antisense strand to SEQ ID NO: 1698427
auaacugccuucauaugcc

SEQ ID NO: 1698429 - RNA, 19 nt, Artificial Sequence
  Description of Artificial Sequence: Synthetic oligonucleotide
  Sense strand starting at position 806 of SEQ ID NO: 1561788
agagcaauuuggcaguaac

SEQ ID NO: 1698430 - RNA, 19 nt, Artificial Sequence
  Description of Artificial Sequence: Synthetic oligonucleotide
  Antisense strand to SEQ ID NO: 1698429
guuacugccaaauugcucu

SEQ ID NO: 1698431 - RNA, 19 nt, Artificial Sequence
  Description of Artificial Sequence: Synthetic oligonucleotide
  Sense strand starting at position 856 of SEQ ID NO: 1561788
gcaauccuaccucgaagaa

SEQ ID NO: 1698432 - RNA, 19 nt, Artificial Sequence
  Description of Artificial Sequence: Synthetic oligonucleotide
  Antisense strand to SEQ ID NO: 1698431
uucuucgagguaggauugc

SEQ ID NO: 1698433 - RNA, 19 nt, Artificial Sequence
  Description of Artificial Sequence: Synthetic oligonucleotide
  Sense strand starting at position 999 of SEQ ID NO: 1561788
ccuuguucucaucgacaaa

SEQ ID NO: 1698434 - RNA, 19 nt, Artificial Sequence
  Description of Artificial Sequence: Synthetic oligonucleotide
  Antisense strand to SEQ ID NO: 1698433
uuugucgaugagaacaagg

SEQ ID NO: 1698435 - RNA, 19 nt, Artificial Sequence
  Description of Artificial Sequence: Synthetic oligonucleotide
  Sense strand starting at position 1002 of SEQ ID NO: 1561788
uguucucaucgacaaagca

SEQ ID NO: 1698436 - RNA, 19 nt, Artificial Sequence
  Description of Artificial Sequence: Synthetic oligonucleotide
  Antisense strand to SEQ ID NO: 1698435
ugcuuugucgaugagaaca

SEQ ID NO: 1698437 - RNA, 19 nt, Artificial Sequence
  Description of Artificial Sequence: Synthetic oligonucleotide
  Sense strand starting at position 1071 of SEQ ID NO: 1561788
uugccaugaccugauuaaa

SEQ ID NO: 1698438 - RNA, 19 nt, Artificial Sequence
  Description of Artificial Sequence: Synthetic oligonucleotide
  Antisense strand to SEQ ID NO: 1698437
uuuaaucaggucauggcaa

SEQ ID NO: 1698439 - RNA, 19 nt, Artificial Sequence
  Description of Artificial Sequence: Synthetic oligonucleotide
  Sense strand starting at position 1106 of SEQ ID NO: 1561788
auggaauguuaccuaacuu

SEQ ID NO: 1698440 - RNA, 19 nt, Artificial Sequence
  Description of Artificial Sequence: Synthetic oligonucleotide
  Antisense strand to SEQ ID NO: 1698439
aaguuagguaacauuccau

SEQ ID NO: 1698441 - RNA, 19 nt, Artificial Sequence
  Description of Artificial Sequence: Synthetic oligonucleotide
  Sense strand starting at position 1129 of SEQ ID NO: 1561788
aguaauuugcuauguuugu

SEQ ID NO: 1698442 - RNA, 19 nt, Artificial Sequence
  Description of Artificial Sequence: Synthetic oligonucleotide
  Antisense strand to SEQ ID NO: 1698441
acaaacauagcaaauuacu

SEQ ID NO: 1698443 - RNA, 19 nt, Artificial Sequence
  Description of Artificial Sequence: Synthetic oligonucleotide
  Sense strand starting at position 1130 of SEQ ID NO: 1561788
guaauuugcuauguuugua

SEQ ID NO: 1698444 - RNA, 19 nt, Artificial Sequence
  Description of Artificial Sequence: Synthetic oligonucleotide
  Antisense strand to SEQ ID NO: 1698443
uacaaacauagcaaauuac

SEQ ID NO: 1698445 - RNA, 19 nt, Artificial Sequence
  Description of Artificial Sequence: Synthetic oligonucleotide
  Sense strand starting at position 1133 of SEQ ID NO: 1561788
auuugcuauguuuguacau

SEQ ID NO: 1698446 - RNA, 19 nt, Artificial Sequence
  Description of Artificial Sequence: Synthetic oligonucleotide
  Antisense strand to SEQ ID NO: 1698445
auguacaaacauagcaaau

SEQ ID NO: 1698447 - RNA, 19 nt, Artificial Sequence
  Description of Artificial Sequence: Synthetic oligonucleotide
  Sense strand starting at position 1145 of SEQ ID NO: 1561788
uguacauguuaauaugaga

SEQ ID NO: 1698448 - RNA, 19 nt, Artificial Sequence
  Description of Artificial Sequence: Synthetic oligonucleotide
  Antisense strand to SEQ ID NO: 1698447
ucucauauuaacauguaca

SEQ ID NO: 1698449 - RNA, 19 nt, Artificial Sequence
  Description of Artificial Sequence: Synthetic oligonucleotide
  Sense strand starting at position 1183 of SEQ ID NO: 1561788
acagcaugaucccauuugu

SEQ ID NO: 1698450 - RNA, 19 nt, Artificial Sequence
  Description of Artificial Sequence: Synthetic oligonucleotide
  Antisense strand to SEQ ID NO: 1698449
acaaaugggaucaugcugu

SEQ ID NO: 1698451 - RNA, 19 nt, Artificial Sequence
  Description of Artificial Sequence: Synthetic oligonucleotide
  Sense strand starting at position 1213 of SEQ ID NO: 1561788
acaaguuacuucguacuga

SEQ ID NO: 1698452 - RNA, 19 nt, Artificial Sequence
  Description of Artificial Sequence: Synthetic oligonucleotide
  Antisense strand to SEQ ID NO: 1698451
ucaguacgaaguaacuugu

SEQ ID NO: 1698453 - RNA, 19 nt, Artificial Sequence
  Description of Artificial Sequence: Synthetic oligonucleotide
  Sense strand starting at position 1223 of SEQ ID NO: 1561788
ucguacugacuccaggauu

SEQ ID NO: 1698454 - RNA, 19 nt, Artificial Sequence
  Description of Artificial Sequence: Synthetic oligonucleotide
  Antisense strand to SEQ ID NO: 1698453
aauccuggagucaguacga

SEQ ID NO: 1698455 - RNA, 19 nt, Artificial Sequence
  Description of Artificial Sequence: Synthetic oligonucleotide
  Sense strand starting at position 1333 of SEQ ID NO: 1561788
accagugaucagcgaagau

SEQ ID NO: 1698456 - RNA, 19 nt, Artificial Sequence
  Description of Artificial Sequence: Synthetic oligonucleotide
  Antisense strand to SEQ ID NO: 1698455
aucuucgcugaucacuggu

SEQ ID NO: 1698457 - RNA, 19 nt, Artificial Sequence
  Description of Artificial Sequence: Synthetic oligonucleotide
  Sense strand starting at position 1345 of SEQ ID NO: 1561788
cgaagaugcucuucugcuu

SEQ ID NO: 1698458 - RNA, 19 nt, Artificial Sequence
  Description of Artificial Sequence: Synthetic oligonucleotide
  Antisense strand to SEQ ID NO: 1698457
aagcagaagagcaucuucg

SEQ ID NO: 1698459 - RNA, 19 nt, Artificial Sequence
  Description of Artificial Sequence: Synthetic oligonucleotide
  Sense strand starting at position 1363 of SEQ ID NO: 1561788
uucuccuuuccagaaaggu

SEQ ID NO: 1698460 - RNA, 19 nt, Artificial Sequence
  Description of Artificial Sequence: Synthetic oligonucleotide
  Antisense strand to SEQ ID NO: 1698459
accuuucuggaaaggagaa

SEQ ID NO: 1698461 - RNA, 19 nt, Artificial Sequence
  Description of Artificial Sequence: Synthetic oligonucleotide
  Sense strand starting at position 1378 of SEQ ID NO: 1561788
agguuaucgugcccagcaa

SEQ ID NO: 1698462 - RNA, 19 nt, Artificial Sequence
  Description of Artificial Sequence: Synthetic oligonucleotide
  Antisense strand to SEQ ID NO: 1698461
uugcugggcacgauaaccu

SEQ ID NO: 1698463 - RNA, 19 nt, Artificial Sequence
  Description of Artificial Sequence: Synthetic oligonucleotide
  Sense strand starting at position 1379 of SEQ ID NO: 1561788
gguuaucgugcccagcaau

SEQ ID NO: 1698464 - RNA, 19 nt, Artificial Sequence
  Description of Artificial Sequence: Synthetic oligonucleotide
  Antisense strand to SEQ ID NO: 1698463
auugcugggcacgauaacc

SEQ ID NO: 1698465 - RNA, 19 nt, Artificial Sequence
  Description of Artificial Sequence: Synthetic oligonucleotide
  Sense strand starting at position 1725 of SEQ ID NO: 1561788
uccugugugaggcaaagaa

SEQ ID NO: 1698466 - RNA, 19 nt, Artificial Sequence
  Description of Artificial Sequence: Synthetic oligonucleotide
  Antisense strand to SEQ ID NO: 1698465
uucuuugccucacacagga

SEQ ID NO: 1698467 - RNA, 19 nt, Artificial Sequence
  Description of Artificial Sequence: Synthetic oligonucleotide
  Sense strand starting at position 1831 of SEQ ID NO: 1561788
gugcgcuaccucucggaga

SEQ ID NO: 1698468 - RNA, 19 nt, Artificial Sequence
  Description of Artificial Sequence: Synthetic oligonucleotide
  Antisense strand to SEQ ID NO: 1698467
ucuccgagagguagcgcac

SEQ ID NO: 1698469 - RNA, 19 nt, Artificial Sequence
  Description of Artificial Sequence: Synthetic oligonucleotide
  Sense strand starting at position 1833 of SEQ ID NO: 1561788
gcgcuaccucucggagaag

SEQ ID NO: 1698470 - RNA, 19 nt, Artificial Sequence
  Description of Artificial Sequence: Synthetic oligonucleotide
  Antisense strand to SEQ ID NO: 1698469
cuucuccgagagguagcgc

SEQ ID NO: 1698471 - RNA, 19 nt, Artificial Sequence
  Description of Artificial Sequence: Synthetic oligonucleotide
  Sense strand starting at position 1836 of SEQ ID NO: 1561788
cuaccucucggagaagcuu

SEQ ID NO: 1698472 - RNA, 19 nt, Artificial Sequence
  Description of Artificial Sequence: Synthetic oligonucleotide
  Antisense strand to SEQ ID NO: 1698471
aagcuucuccgagagguag

SEQ ID NO: 1698473 - RNA, 19 nt, Artificial Sequence
  Description of Artificial Sequence: Synthetic oligonucleotide
  Sense strand starting at position 1892 of SEQ ID NO: 1561788
gcucguuguagguagguaa

SEQ ID NO: 1698474 - RNA, 19 nt, Artificial Sequence
  Description of Artificial Sequence: Synthetic oligonucleotide
  Antisense strand to SEQ ID NO: 1698473
uuaccuaccuacaacgagc

SEQ ID NO: 1698475 - RNA, 19 nt, Artificial Sequence
  Description of Artificial Sequence: Synthetic oligonucleotide
  Sense strand starting at position 1893 of SEQ ID NO: 1561788
cucguuguagguagguaaa

SEQ ID NO: 1698476 - RNA, 19 nt, Artificial Sequence
  Description of Artificial Sequence: Synthetic oligonucleotide
  Antisense strand to SEQ ID NO: 1698475
uuuaccuaccuacaacgag

SEQ ID NO: 1698477 - RNA, 19 nt, Artificial Sequence
  Description of Artificial Sequence: Synthetic oligonucleotide
  Sense strand starting at position 2025 of SEQ ID NO: 1561788
agcggaauuacguaaugug

SEQ ID NO: 1698478 - RNA, 19 nt, Artificial Sequence
  Description of Artificial Sequence: Synthetic oligonucleotide
  Antisense strand to SEQ ID NO: 1698477
cacauuacguaauuccgcu

SEQ ID NO: 1698479 - RNA, 19 nt, Artificial Sequence
  Description of Artificial Sequence: Synthetic oligonucleotide
  Sense strand starting at position 2034 of SEQ ID NO: 1561788
acguaauguggcgcggaaa

SEQ ID NO: 1698480 - RNA, 19 nt, Artificial Sequence
  Description of Artificial Sequence: Synthetic oligonucleotide
  Antisense strand to SEQ ID NO: 1698479
uuuccgcgccacauuacgu

SEQ ID NO: 1698481 - RNA, 19 nt, Artificial Sequence
  Description of Artificial Sequence: Synthetic oligonucleotide
  Sense strand starting at position 2088 of SEQ ID NO: 1561788
ggaugaccugugugauuga

SEQ ID NO: 1698482 - RNA, 19 nt, Artificial Sequence
  Description of Artificial Sequence: Synthetic oligonucleotide
  Antisense strand to SEQ ID NO: 1698481
ucaaucacacaggucaucc

SEQ ID NO: 1698483 - RNA, 19 nt, Artificial Sequence
  Description of Artificial Sequence: Synthetic oligonucleotide
  Sense strand starting at position 2098 of SEQ ID NO: 1561788
ugugauugaucgcuaguuc

SEQ ID NO: 1698484 - RNA, 19 nt, Artificial Sequence
  Description of Artificial Sequence: Synthetic oligonucleotide
  Antisense strand to SEQ ID NO: 1698483
gaacuagcgaucaaucaca

SEQ ID NO: 1698485 - RNA, 19 nt, Artificial Sequence
  Description of Artificial Sequence: Synthetic oligonucleotide
  Sense strand starting at position 2099 of SEQ ID NO: 1561788
gugauugaucgcuaguucu

SEQ ID NO: 1698486 - RNA, 19 nt, Artificial Sequence
  Description of Artificial Sequence: Synthetic oligonucleotide
  Antisense strand to SEQ ID NO: 1698485
agaacuagcgaucaaucac

SEQ ID NO: 1698487 - RNA, 19 nt, Artificial Sequence
  Description of Artificial Sequence: Synthetic oligonucleotide
  Sense strand starting at position 2123 of SEQ ID NO: 1561788
ggccauugcgugguucaau

SEQ ID NO: 1698488 - RNA, 19 nt, Artificial Sequence
  Description of Artificial Sequence: Synthetic oligonucleotide
  Antisense strand to SEQ ID NO: 1698487
auugaaccacgcaauggcc

SEQ ID NO: 1698489 - RNA, 19 nt, Artificial Sequence
  Description of Artificial Sequence: Synthetic oligonucleotide
  Sense strand starting at position 2167 of SEQ ID NO: 1561788
uuugaaguuuaaucugaag

SEQ ID NO: 1698490 - RNA, 19 nt, Artificial Sequence
  Description of Artificial Sequence: Synthetic oligonucleotide
  Antisense strand to SEQ ID NO: 1698489
cuucagauuaaacuucaaa

SEQ ID NO: 1698491 - RNA, 19 nt, Artificial Sequence
  Description of Artificial Sequence: Synthetic oligonucleotide
  Sense strand starting at position 2169 of SEQ ID NO: 1561788
ugaaguuuaaucugaaggu

SEQ ID NO: 1698492 - RNA, 19 nt, Artificial Sequence
  Description of Artificial Sequence: Synthetic oligonucleotide
  Antisense strand to SEQ ID NO: 1698491
accuucagauuaaacuuca

SEQ ID NO: 1698493 - RNA, 19 nt, Artificial Sequence
  Description of Artificial Sequence: Synthetic oligonucleotide
  Sense strand starting at position 2173 of SEQ ID NO: 1561788
guuuaaucugaagguuucu

SEQ ID NO: 1698494 - RNA, 19 nt, Artificial Sequence
  Description of Artificial Sequence: Synthetic oligonucleotide
  Antisense strand to SEQ ID NO: 1698493
agaaaccuucagauuaaac

SEQ ID NO: 1698495 - RNA, 19 nt, Artificial Sequence
  Description of Artificial Sequence: Synthetic oligonucleotide
  Sense strand starting at position 350 of SEQ ID NO: 1561789
gccucacuguuacuaguuu

SEQ ID NO: 1698496 - RNA, 19 nt, Artificial Sequence
  Description of Artificial Sequence: Synthetic oligonucleotide
  Antisense strand to SEQ ID NO: 1698495
aaacuaguaacagugaggc

SEQ ID NO: 1698497 - RNA, 19 nt, Artificial Sequence
  Description of Artificial Sequence: Synthetic oligonucleotide
  Sense strand starting at position 354 of SEQ ID NO: 1561789
cacuguuacuaguuuaguu

SEQ ID NO: 1698498 - RNA, 19 nt, Artificial Sequence
  Description of Artificial Sequence: Synthetic oligonucleotide
  Antisense strand to SEQ ID NO: 1698497
aacuaaacuaguaacagug

SEQ ID NO: 1698499 - RNA, 19 nt, Artificial Sequence
  Description of Artificial Sequence: Synthetic oligonucleotide
  Sense strand starting at position 819 of SEQ ID NO: 1561789
guaaacuagucccaauuua

SEQ ID NO: 1698500 - RNA, 19 nt, Artificial Sequence
  Description of Artificial Sequence: Synthetic oligonucleotide
  Antisense strand to SEQ ID NO: 1698499
uaaauugggacuaguuuac

SEQ ID NO: 1698501 - RNA, 19 nt, Artificial Sequence
  Description of Artificial Sequence: Synthetic oligonucleotide
  Sense strand starting at position 860 of SEQ ID NO: 1561789
aguccuauucccuguacua

SEQ ID NO: 1698502 - RNA, 19 nt, Artificial Sequence
  Description of Artificial Sequence: Synthetic oligonucleotide
  Antisense strand to SEQ ID NO: 1698501
uaguacagggaauaggacu

SEQ ID NO: 1698503 - RNA, 19 nt, Artificial Sequence
  Description of Artificial Sequence: Synthetic oligonucleotide
  Sense strand starting at position 892 of SEQ ID NO: 1561789
gcacauaucuguccuucua

SEQ ID NO: 1698504 - RNA, 19 nt, Artificial Sequence
  Description of Artificial Sequence: Synthetic oligonucleotide
  Antisense strand to SEQ ID NO: 1698503
uagaaggacagauaugugc

SEQ ID NO: 1698505 - RNA, 19 nt, Artificial Sequence
  Description of Artificial Sequence: Synthetic oligonucleotide
  Sense strand starting at position 900 of SEQ ID NO: 1561789
cuguccuucuaccuguuaa

SEQ ID NO: 1698506 - RNA, 19 nt, Artificial Sequence
  Description of Artificial Sequence: Synthetic oligonucleotide
  Antisense strand to SEQ ID NO: 1698505
uuaacagguagaaggacag

SEQ ID NO: 1698507 - RNA, 19 nt, Artificial Sequence
  Description of Artificial Sequence: Synthetic oligonucleotide
  Sense strand starting at position 963 of SEQ ID NO: 1561789
aucacuuaucuuuggcaga

SEQ ID NO: 1698508 - RNA, 19 nt, Artificial Sequence
  Description of Artificial Sequence: Synthetic oligonucleotide
  Antisense strand to SEQ ID NO: 1698507
ucugccaaagauaagugau

SEQ ID NO: 1698509 - RNA, 19 nt, Artificial Sequence
  Description of Artificial Sequence: Synthetic oligonucleotide
  Sense strand starting at position 965 of SEQ ID NO: 1561789
cacuuaucuuuggcagagu

SEQ ID NO: 1698510 - RNA, 19 nt, Artificial Sequence
  Description of Artificial Sequence: Synthetic oligonucleotide
  Antisense strand to SEQ ID NO: 1698509
acucugccaaagauaagug

SEQ ID NO: 1698511 - RNA, 19 nt, Artificial Sequence
  Description of Artificial Sequence: Synthetic oligonucleotide
  Sense strand starting at position 976 of SEQ ID NO: 1561789
ggcagaguuggugguuaug

SEQ ID NO: 1698512 - RNA, 19 nt, Artificial Sequence
  Description of Artificial Sequence: Synthetic oligonucleotide
  Antisense strand to SEQ ID NO: 1698511
cauaaccaccaacucugcc

SEQ ID NO: 1698513 - RNA, 19 nt, Artificial Sequence
  Description of Artificial Sequence: Synthetic oligonucleotide
  Sense strand starting at position 1004 of SEQ ID NO: 1561789
cuucguagcauuggcuaua

SEQ ID NO: 1698514 - RNA, 19 nt, Artificial Sequence
  Description of Artificial Sequence: Synthetic oligonucleotide
  Antisense strand to SEQ ID NO: 1698513
uauagccaaugcuacgaag

SEQ ID NO: 1698515 - RNA, 19 nt, Artificial Sequence
  Description of Artificial Sequence: Synthetic oligonucleotide
  Sense strand starting at position 1005 of SEQ ID NO: 1561789
uucguagcauuggcuauaa

SEQ ID NO: 1698516 - RNA, 19 nt, Artificial Sequence
  Description of Artificial Sequence: Synthetic oligonucleotide
  Antisense strand to SEQ ID NO: 1698515
uuauagccaaugcuacgaa

SEQ ID NO: 1698517 - RNA, 19 nt, Artificial Sequence
  Description of Artificial Sequence: Synthetic oligonucleotide
  Sense strand starting at position 1056 of SEQ ID NO: 1561789
cuguauuuguauuccuagu

SEQ ID NO: 1698518 - RNA, 19 nt, Artificial Sequence
  Description of Artificial Sequence: Synthetic oligonucleotide
  Antisense strand to SEQ ID NO: 1698517
acuaggaauacaaauacag

SEQ ID NO: 1698519 - RNA, 19 nt, Artificial Sequence
  Description of Artificial Sequence: Synthetic oligonucleotide
  Sense strand starting at position 1058 of SEQ ID NO: 1561789
guauuuguauuccuaguga

SEQ ID NO: 1698520 - RNA, 19 nt, Artificial Sequence
  Description of Artificial Sequence: Synthetic oligonucleotide
  Antisense strand to SEQ ID NO: 1698519
ucacuaggaauacaaauac

SEQ ID NO: 1698521 - RNA, 19 nt, Artificial Sequence
  Description of Artificial Sequence: Synthetic oligonucleotide
  Sense strand starting at position 1071 of SEQ ID NO: 1561789
uagugacugucaggaacaa

SEQ ID NO: 1698522 - RNA, 19 nt, Artificial Sequence
  Description of Artificial Sequence: Synthetic oligonucleotide
  Antisense strand to SEQ ID NO: 1698521
uuguuccugacagucacua

SEQ ID NO: 1698523 - RNA, 19 nt, Artificial Sequence
  Description of Artificial Sequence: Synthetic oligonucleotide
  Sense strand starting at position 1103 of SEQ ID NO: 1561789
agggaugucaccuaggcau

SEQ ID NO: 1698524 - RNA, 19 nt, Artificial Sequence
  Description of Artificial Sequence: Synthetic oligonucleotide
  Antisense strand to SEQ ID NO: 1698523
augccuaggugacaucccu

SEQ ID NO: 1698525 - RNA, 19 nt, Artificial Sequence
  Description of Artificial Sequence: Synthetic oligonucleotide
  Sense strand starting at position 1252 of SEQ ID NO: 1561789
cacgguccuuaugacaaua

SEQ ID NO: 1698526 - RNA, 19 nt, Artificial Sequence
  Description of Artificial Sequence: Synthetic oligonucleotide
  Antisense strand to SEQ ID NO: 1698525
uauugucauaaggaccgug

SEQ ID NO: 1698527 - RNA, 19 nt, Artificial Sequence
  Description of Artificial Sequence: Synthetic oligonucleotide
  Sense strand starting at position 1290 of SEQ ID NO: 1561789
gauaauaacgacuguauca

SEQ ID NO: 1698528 - RNA, 19 nt, Artificial Sequence
  Description of Artificial Sequence: Synthetic oligonucleotide
  Antisense strand to SEQ ID NO: 1698527
ugauacagucguuauuauc

SEQ ID NO: 1698529 - RNA, 19 nt, Artificial Sequence
  Description of Artificial Sequence: Synthetic oligonucleotide
  Sense strand starting at position 1297 of SEQ ID NO: 1561789
acgacuguaucacacagau

SEQ ID NO: 1698530 - RNA, 19 nt, Artificial Sequence
  Description of Artificial Sequence: Synthetic oligonucleotide
  Antisense strand to SEQ ID NO: 1698529
aucugugugauacagucgu

SEQ ID NO: 1698531 - RNA, 19 nt, Artificial Sequence
  Description of Artificial Sequence: Synthetic oligonucleotide
  Sense strand starting at position 1352 of SEQ ID NO: 1561789
cgcuuauucugugcuagga

SEQ ID NO: 1698532 - RNA, 19 nt, Artificial Sequence
  Description of Artificial Sequence: Synthetic oligonucleotide
  Antisense strand to SEQ ID NO: 1698531
uccuagcacagaauaagcg

SEQ ID NO: 1698533 - RNA, 19 nt, Artificial Sequence
  Description of Artificial Sequence: Synthetic oligonucleotide
  Sense strand starting at position 1366 of SEQ ID NO: 1561789
uaggaccugugcuauguaa

SEQ ID NO: 1698534 - RNA, 19 nt, Artificial Sequence
  Description of Artificial Sequence: Synthetic oligonucleotide
  Antisense strand to SEQ ID NO: 1698533
uuacauagcacagguccua

SEQ ID NO: 1698535 - RNA, 19 nt, Artificial Sequence
  Description of Artificial Sequence: Synthetic oligonucleotide
  Sense strand starting at position 1374 of SEQ ID NO: 1561789
gugcuauguaagcgcuuua

SEQ ID NO: 1698536 - RNA, 19 nt, Artificial Sequence
  Description of Artificial Sequence: Synthetic oligonucleotide
  Antisense strand to SEQ ID NO: 1698535
uaaagcgcuuacauagcac

SEQ ID NO: 1698537 - RNA, 19 nt, Artificial Sequence
  Description of Artificial Sequence: Synthetic oligonucleotide
  Sense strand starting at position 1387 of SEQ ID NO: 1561789
gcuuuacuugcaucguuau

SEQ ID NO: 1698538 - RNA, 19 nt, Artificial Sequence
  Description of Artificial Sequence: Synthetic oligonucleotide
  Antisense strand to SEQ ID NO: 1698537
auaacgaugcaaguaaagc

SEQ ID NO: 1698539 - RNA, 19 nt, Artificial Sequence
  Description of Artificial Sequence: Synthetic oligonucleotide
  Sense strand starting at position 1388 of SEQ ID NO: 1561789
cuuuacuugcaucguuauu

SEQ ID NO: 1698540 - RNA, 19 nt, Artificial Sequence
  Description of Artificial Sequence: Synthetic oligonucleotide
  Antisense strand to SEQ ID NO: 1698539
aauaacgaugcaaguaaag

SEQ ID NO: 1698541 - RNA, 19 nt, Artificial Sequence
  Description of Artificial Sequence: Synthetic oligonucleotide
  Sense strand starting at position 1738 of SEQ ID NO: 1561789
guacgacgccgaagagauu

SEQ ID NO: 1698542 - RNA, 19 nt, Artificial Sequence
  Description of Artificial Sequence: Synthetic oligonucleotide
  Antisense strand to SEQ ID NO: 1698541
aaucucuucggcgucguac

SEQ ID NO: 1698543 - RNA, 19 nt, Artificial Sequence
  Description of Artificial Sequence: Synthetic oligonucleotide
  Sense strand starting at position 1783 of SEQ ID NO: 1561789
agaggacaagucugugacu

SEQ ID NO: 1698544 - RNA, 19 nt, Artificial Sequence
  Description of Artificial Sequence: Synthetic oligonucleotide
  Antisense strand to SEQ ID NO: 1698543
agucacagacuuguccucu

SEQ ID NO: 1698545 - RNA, 19 nt, Artificial Sequence
  Description of Artificial Sequence: Synthetic oligonucleotide
  Sense strand starting at position 1784 of SEQ ID NO: 1561789
gaggacaagucugugacuu

SEQ ID NO: 1698546 - RNA, 19 nt, Artificial Sequence
  Description of Artificial Sequence: Synthetic oligonucleotide
  Antisense strand to SEQ ID NO: 1698545
aagucacagacuuguccuc

SEQ ID NO: 1698547 - RNA, 19 nt, Artificial Sequence
  Description of Artificial Sequence: Synthetic oligonucleotide
  Sense strand starting at position 1785 of SEQ ID NO: 1561789
aggacaagucugugacuuc

SEQ ID NO: 1698548 - RNA, 19 nt, Artificial Sequence
  Description of Artificial Sequence: Synthetic oligonucleotide
  Antisense strand to SEQ ID NO: 1698547
gaagucacagacuuguccu

SEQ ID NO: 1698549 - RNA, 19 nt, Artificial Sequence
  Description of Artificial Sequence: Synthetic oligonucleotide
  Sense strand starting at position 1902 of SEQ ID NO: 1561789
agccgauacucccugauca

SEQ ID NO: 1698550 - RNA, 19 nt, Artificial Sequence
  Description of Artificial Sequence: Synthetic oligonucleotide
  Antisense strand to SEQ ID NO: 1698549
ugaucagggaguaucggcu

SEQ ID NO: 1698551 - RNA, 19 nt, Artificial Sequence
  Description of Artificial Sequence: Synthetic oligonucleotide
  Sense strand starting at position 2267 of SEQ ID NO: 1561789
gagagauucuugccggagg

SEQ ID NO: 1698552 - RNA, 19 nt, Artificial Sequence
  Description of Artificial Sequence: Synthetic oligonucleotide
  Antisense strand to SEQ ID NO: 1698551
ccuccggcaagaaucucuc

SEQ ID NO: 1698553 - RNA, 19 nt, Artificial Sequence
  Description of Artificial Sequence: Synthetic oligonucleotide
  Sense strand starting at position 2268 of SEQ ID NO: 1561789
agagauucuugccggagga

SEQ ID NO: 1698554 - RNA, 19 nt, Artificial Sequence
  Description of Artificial Sequence: Synthetic oligonucleotide
  Antisense strand to SEQ ID NO: 1698553
uccuccggcaagaaucucu

SEQ ID NO: 1698555 - RNA, 19 nt, Artificial Sequence
  Description of Artificial Sequence: Synthetic oligonucleotide
  Sense strand starting at position 2269 of SEQ ID NO: 1561789
gagauucuugccggaggaa

SEQ ID NO: 1698556 - RNA, 19 nt, Artificial Sequence
  Description of Artificial Sequence: Synthetic oligonucleotide
  Antisense strand to SEQ ID NO: 1698555
uuccuccggcaagaaucuc

SEQ ID NO: 1698557 - RNA, 19 nt, Artificial Sequence
  Description of Artificial Sequence: Synthetic oligonucleotide
  Sense strand starting at position 2270 of SEQ ID NO: 1561789
agauucuugccggaggaau

SEQ ID NO: 1698558 - RNA, 19 nt, Artificial Sequence
  Description of Artificial Sequence: Synthetic oligonucleotide
  Antisense strand to SEQ ID NO: 1698557
auuccuccggcaagaaucu

SEQ ID NO: 1698559 - RNA, 19 nt, Artificial Sequence
  Description of Artificial Sequence: Synthetic oligonucleotide
  Sense strand starting at position 2272 of SEQ ID NO: 1561789
auucuugccggaggaauac

SEQ ID NO: 1698560 - RNA, 19 nt, Artificial Sequence
  Description of Artificial Sequence: Synthetic oligonucleotide
  Antisense strand to SEQ ID NO: 1698559
guauuccuccggcaagaau

SEQ ID NO: 1698561 - RNA, 19 nt, Artificial Sequence
  Description of Artificial Sequence: Synthetic oligonucleotide
  Sense strand starting at position 2481 of SEQ ID NO: 1561789
ccucaaacggcuugcuuua

SEQ ID NO: 1698562 - RNA, 19 nt, Artificial Sequence
  Description of Artificial Sequence: Synthetic oligonucleotide
  Antisense strand to SEQ ID NO: 1698561
uaaagcaagccguuugagg

SEQ ID NO: 1698563 - RNA, 19 nt, Artificial Sequence
  Description of Artificial Sequence: Synthetic oligonucleotide
  Sense strand starting at position 3032 of SEQ ID NO: 1561789
cggccacauccucgaauuu

SEQ ID NO: 1698564 - RNA, 19 nt, Artificial Sequence
  Description of Artificial Sequence: Synthetic oligonucleotide
  Antisense strand to SEQ ID NO: 1698563
aaauucgaggauguggccg

SEQ ID NO: 1698565 - RNA, 19 nt, Artificial Sequence
  Description of Artificial Sequence: Synthetic oligonucleotide
  Sense strand starting at position 3057 of SEQ ID NO: 1561789
ucagcuaaggaaugauuga

SEQ ID NO: 1698566 - RNA, 19 nt, Artificial Sequence
  Description of Artificial Sequence: Synthetic oligonucleotide
  Antisense strand to SEQ ID NO: 1698565
ucaaucauuccuuagcuga

SEQ ID NO: 1698567 - RNA, 19 nt, Artificial Sequence
  Description of Artificial Sequence: Synthetic oligonucleotide
  Sense strand starting at position 3577 of SEQ ID NO: 1561789
aagagaacucaguguuccu

SEQ ID NO: 1698568 - RNA, 19 nt, Artificial Sequence
  Description of Artificial Sequence: Synthetic oligonucleotide
  Antisense strand to SEQ ID NO: 1698567
aggaacacugaguucucuu

SEQ ID NO: 1698569 - RNA, 19 nt, Artificial Sequence
  Description of Artificial Sequence: Synthetic oligonucleotide
  Sense strand starting at position 3673 of SEQ ID NO: 1561789
ucguuucccugcuuugaau

SEQ ID NO: 1698570 - RNA, 19 nt, Artificial Sequence
  Description of Artificial Sequence: Synthetic oligonucleotide
  Antisense strand to SEQ ID NO: 1698569
auucaaagcagggaaacga

SEQ ID NO: 1698571 - RNA, 19 nt, Artificial Sequence
  Description of Artificial Sequence: Synthetic oligonucleotide
  Sense strand starting at position 3745 of SEQ ID NO: 1561789
ggcacugugucauuaggcu

SEQ ID NO: 1698572 - RNA, 19 nt, Artificial Sequence
  Description of Artificial Sequence: Synthetic oligonucleotide
  Antisense strand to SEQ ID NO: 1698571
agccuaaugacacagugcc

SEQ ID NO: 1698573 - RNA, 19 nt, Artificial Sequence
  Description of Artificial Sequence: Synthetic oligonucleotide
  Sense strand starting at position 3751 of SEQ ID NO: 1561789
gugucauuaggcugggugu

SEQ ID NO: 1698574 - RNA, 19 nt, Artificial Sequence
  Description of Artificial Sequence: Synthetic oligonucleotide
  Antisense strand to SEQ ID NO: 1698573
acacccagccuaaugacac

SEQ ID NO: 1698575 - RNA, 19 nt, Artificial Sequence
  Description of Artificial Sequence: Synthetic oligonucleotide
  Sense strand starting at position 53 of SEQ ID NO: 1561790
auucuuaguucuccagauc

SEQ ID NO: 1698576 - RNA, 19 nt, Artificial Sequence
  Description of Artificial Sequence: Synthetic oligonucleotide
  Antisense strand to SEQ ID NO: 1698575
gaucuggagaacuaagaau

SEQ ID NO: 1698577 - RNA, 19 nt, Artificial Sequence
  Description of Artificial Sequence: Synthetic oligonucleotide
  Sense strand starting at position 426 of SEQ ID NO: 1561790
gccucacuguuacuaguuu

SEQ ID NO: 1698578 - RNA, 19 nt, Artificial Sequence
  Description of Artificial Sequence: Synthetic oligonucleotide
  Antisense strand to SEQ ID NO: 1698577
aaacuaguaacagugaggc

SEQ ID NO: 1698579 - RNA, 19 nt, Artificial Sequence
  Description of Artificial Sequence: Synthetic oligonucleotide
  Sense strand starting at position 430 of SEQ ID NO: 1561790
cacuguuacuaguuuaguu

SEQ ID NO: 1698580 - RNA, 19 nt, Artificial Sequence
  Description of Artificial Sequence: Synthetic oligonucleotide
  Antisense strand to SEQ ID NO: 1698579
aacuaaacuaguaacagug

SEQ ID NO: 1698581 - RNA, 19 nt, Artificial Sequence
  Description of Artificial Sequence: Synthetic oligonucleotide
  Sense strand starting at position 895 of SEQ ID NO: 1561790
guaaacuagucccaauuua

SEQ ID NO: 1698582 - RNA, 19 nt, Artificial Sequence
  Description of Artificial Sequence: Synthetic oligonucleotide
  Antisense strand to SEQ ID NO: 1698581
uaaauugggacuaguuuac

SEQ ID NO: 1698583 - RNA, 19 nt, Artificial Sequence
  Description of Artificial Sequence: Synthetic oligonucleotide
  Sense strand starting at position 936 of SEQ ID NO: 1561790
aguccuauucccuguacua

SEQ ID NO: 1698584 - RNA, 19 nt, Artificial Sequence
  Description of Artificial Sequence: Synthetic oligonucleotide
  Antisense strand to SEQ ID NO: 1698583
uaguacagggaauaggacu

SEQ ID NO: 1698585 - RNA, 19 nt, Artificial Sequence
  Description of Artificial Sequence: Synthetic oligonucleotide
  Sense strand starting at position 968 of SEQ ID NO: 1561790
gcacauaucuguccuucua

SEQ ID NO: 1698586 - RNA, 19 nt, Artificial Sequence
  Description of Artificial Sequence: Synthetic oligonucleotide
  Antisense strand to SEQ ID NO: 1698585
uagaaggacagauaugugc

SEQ ID NO: 1698587 - RNA, 19 nt, Artificial Sequence
  Description of Artificial Sequence: Synthetic oligonucleotide
  Sense strand starting at position 976 of SEQ ID NO: 1561790
cuguccuucuaccuguuaa

SEQ ID NO: 1698588 - RNA, 19 nt, Artificial Sequence
  Description of Artificial Sequence: Synthetic oligonucleotide
  Antisense strand to SEQ ID NO: 1698587
uuaacagguagaaggacag

SEQ ID NO: 1698589 - RNA, 19 nt, Artificial Sequence
  Description of Artificial Sequence: Synthetic oligonucleotide
  Sense strand starting at position 1039 of SEQ ID NO: 1561790
aucacuuaucuuuggcaga

SEQ ID NO: 1698590 - RNA, 19 nt, Artificial Sequence
  Description of Artificial Sequence: Synthetic oligonucleotide
  Antisense strand to SEQ ID NO: 1698589
ucugccaaagauaagugau

SEQ ID NO: 1698591 - RNA, 19 nt, Artificial Sequence
  Description of Artificial Sequence: Synthetic oligonucleotide
  Sense strand starting at position 1041 of SEQ ID NO: 1561790
cacuuaucuuuggcagagu

SEQ ID NO: 1698592 - RNA, 19 nt, Artificial Sequence
  Description of Artificial Sequence: Synthetic oligonucleotide
  Antisense strand to SEQ ID NO: 1698591
acucugccaaagauaagug

SEQ ID NO: 1698593 - RNA, 19 nt, Artificial Sequence
  Description of Artificial Sequence: Synthetic oligonucleotide
  Sense strand starting at position 1052 of SEQ ID NO: 1561790
ggcagaguuggugguuaug

SEQ ID NO: 1698594 - RNA, 19 nt, Artificial Sequence
  Description of Artificial Sequence: Synthetic oligonucleotide
  Antisense strand to SEQ ID NO: 1698593
cauaaccaccaacucugcc

SEQ ID NO: 1698595 - RNA, 19 nt, Artificial Sequence
  Description of Artificial Sequence: Synthetic oligonucleotide
  Sense strand starting at position 1080 of SEQ ID NO: 1561790
cuucguagcauuggcuaua

SEQ ID NO: 1698596 - RNA, 19 nt, Artificial Sequence
  Description of Artificial Sequence: Synthetic oligonucleotide
  Antisense strand to SEQ ID NO: 1698595
uauagccaaugcuacgaag

SEQ ID NO: 1698597 - RNA, 19 nt, Artificial Sequence
  Description of Artificial Sequence: Synthetic oligonucleotide
  Sense strand starting at position 1081 of SEQ ID NO: 1561790
uucguagcauuggcuauaa

SEQ ID NO: 1698598 - RNA, 19 nt, Artificial Sequence
  Description of Artificial Sequence: Synthetic oligonucleotide
  Antisense strand to SEQ ID NO: 1698597
uuauagccaaugcuacgaa

SEQ ID NO: 1698599 - RNA, 19 nt, Artificial Sequence
  Description of Artificial Sequence: Synthetic oligonucleotide
  Sense strand starting at position 1132 of SEQ ID NO: 1561790
cuguauuuguauuccuagu

SEQ ID NO: 1698600 - RNA, 19 nt, Artificial Sequence
  Description of Artificial Sequence: Synthetic oligonucleotide
  Antisense strand to SEQ ID NO: 1698599
acuaggaauacaaauacag

SEQ ID NO: 1698601 - RNA, 19 nt, Artificial Sequence
  Description of Artificial Sequence: Synthetic oligonucleotide
  Sense strand starting at position 1134 of SEQ ID NO: 1561790
guauuuguauuccuaguga

SEQ ID NO: 1698602 - RNA, 19 nt, Artificial Sequence
  Description of Artificial Sequence: Synthetic oligonucleotide
  Antisense strand to SEQ ID NO: 1698601
ucacuaggaauacaaauac

SEQ ID NO: 1698603 - RNA, 19 nt, Artificial Sequence
  Description of Artificial Sequence: Synthetic oligonucleotide
  Sense strand starting at position 1147 of SEQ ID NO: 1561790
uagugacugucaggaacaa

SEQ ID NO: 1698604 - RNA, 19 nt, Artificial Sequence
  Description of Artificial Sequence: Synthetic oligonucleotide
  Antisense strand to SEQ ID NO: 1698603
uuguuccugacagucacua

SEQ ID NO: 1698605 - RNA, 19 nt, Artificial Sequence
  Description of Artificial Sequence: Synthetic oligonucleotide
  Sense strand starting at position 1179 of SEQ ID NO: 1561790
agggaugucaccuaggcau

SEQ ID NO: 1698606 - RNA, 19 nt, Artificial Sequence
  Description of Artificial Sequence: Synthetic oligonucleotide
  Antisense strand to SEQ ID NO: 1698605
augccuaggugacaucccu

SEQ ID NO: 1698607 - RNA, 19 nt, Artificial Sequence
  Description of Artificial Sequence: Synthetic oligonucleotide
  Sense strand starting at position 1328 of SEQ ID NO: 1561790
cacgguccuuaugacaaua

SEQ ID NO: 1698608 - RNA, 19 nt, Artificial Sequence
  Description of Artificial Sequence: Synthetic oligonucleotide
  Antisense strand to SEQ ID NO: 1698607
uauugucauaaggaccgug

SEQ ID NO: 1698609 - RNA, 19 nt, Artificial Sequence
  Description of Artificial Sequence: Synthetic oligonucleotide
  Sense strand starting at position 1366 of SEQ ID NO: 1561790
gauaauaacgacuguauca

SEQ ID NO: 1698610 - RNA, 19 nt, Artificial Sequence
  Description of Artificial Sequence: Synthetic oligonucleotide
  Antisense strand to SEQ ID NO: 1698609
ugauacagucguuauuauc

SEQ ID NO: 1698611 - RNA, 19 nt, Artificial Sequence
  Description of Artificial Sequence: Synthetic oligonucleotide
  Sense strand starting at position 1373 of SEQ ID NO: 1561790
acgacuguaucacacagau

SEQ ID NO: 1698612 - RNA, 19 nt, Artificial Sequence
  Description of Artificial Sequence: Synthetic oligonucleotide
  Antisense strand to SEQ ID NO: 1698611
aucugugugauacagucgu

SEQ ID NO: 1698613 - RNA, 19 nt, Artificial Sequence
  Description of Artificial Sequence: Synthetic oligonucleotide
  Sense strand starting at position 1428 of SEQ ID NO: 1561790
cgcuuauucugugcuagga

SEQ ID NO: 1698614 - RNA, 19 nt, Artificial Sequence
  Description of Artificial Sequence: Synthetic oligonucleotide
  Antisense strand to SEQ ID NO: 1698613
uccuagcacagaauaagcg

SEQ ID NO: 1698615 - RNA, 19 nt, Artificial Sequence
  Description of Artificial Sequence: Synthetic oligonucleotide
  Sense strand starting at position 1450 of SEQ ID NO: 1561790
gugcuauguaagcgcuuua

SEQ ID NO: 1698616 - RNA, 19 nt, Artificial Sequence
  Description of Artificial Sequence: Synthetic oligonucleotide
  Antisense strand to SEQ ID NO: 1698615
uaaagcgcuuacauagcac

SEQ ID NO: 1698617 - RNA, 19 nt, Artificial Sequence
  Description of Artificial Sequence: Synthetic oligonucleotide
  Sense strand starting at position 1463 of SEQ ID NO: 1561790
gcuuuacuugcaucguuau

SEQ ID NO: 1698618 - RNA, 19 nt, Artificial Sequence
  Description of Artificial Sequence: Synthetic oligonucleotide
  Antisense strand to SEQ ID NO: 1698617
auaacgaugcaaguaaagc

SEQ ID NO: 1698619 - RNA, 19 nt, Artificial Sequence
  Description of Artificial Sequence: Synthetic oligonucleotide
  Sense strand starting at position 1464 of SEQ ID NO: 1561790
cuuuacuugcaucguuauu

SEQ ID NO: 1698620 - RNA, 19 nt, Artificial Sequence
  Description of Artificial Sequence: Synthetic oligonucleotide
  Antisense strand to SEQ ID NO: 1698619
aauaacgaugcaaguaaag

SEQ ID NO: 1698621 - RNA, 19 nt, Artificial Sequence
  Description of Artificial Sequence: Synthetic oligonucleotide
  Sense strand starting at position 1814 of SEQ ID NO: 1561790
guacgacgccgaagagauu

SEQ ID NO: 1698622 - RNA, 19 nt, Artificial Sequence
  Description of Artificial Sequence: Synthetic oligonucleotide
  Antisense strand to SEQ ID NO: 1698621
aaucucuucggcgucguac

SEQ ID NO: 1698623 - RNA, 19 nt, Artificial Sequence
  Description of Artificial Sequence: Synthetic oligonucleotide
  Sense strand starting at position 1859 of SEQ ID NO: 1561790
agaggacaagucugugacu

SEQ ID NO: 1698624 - RNA, 19 nt, Artificial Sequence
  Description of Artificial Sequence: Synthetic oligonucleotide
  Antisense strand to SEQ ID NO: 1698623
agucacagacuuguccucu

SEQ ID NO: 1698625 - RNA, 19 nt, Artificial Sequence
  Description of Artificial Sequence: Synthetic oligonucleotide
  Sense strand starting at position 1860 of SEQ ID NO: 1561790
gaggacaagucugugacuu

SEQ ID NO: 1698626 - RNA, 19 nt, Artificial Sequence
  Description of Artificial Sequence: Synthetic oligonucleotide
  Antisense strand to SEQ ID NO: 1698625
aagucacagacuuguccuc

SEQ ID NO: 1698627 - RNA, 19 nt, Artificial Sequence
  Description of Artificial Sequence: Synthetic oligonucleotide
  Sense strand starting at position 1861 of SEQ ID NO: 1561790
aggacaagucugugacuuc

SEQ ID NO: 1698628 - RNA, 19 nt, Artificial Sequence
  Description of Artificial Sequence: Synthetic oligonucleotide
  Antisense strand to SEQ ID NO: 1698627
gaagucacagacuuguccu

SEQ ID NO: 1698629 - RNA, 19 nt, Artificial Sequence
  Description of Artificial Sequence: Synthetic oligonucleotide
  Sense strand starting at position 1978 of SEQ ID NO: 1561790
agccgauacucccugauca

SEQ ID NO: 1698630 - RNA, 19 nt, Artificial Sequence
  Description of Artificial Sequence: Synthetic oligonucleotide
  Antisense strand to SEQ ID NO: 1698629
ugaucagggaguaucggcu

SEQ ID NO: 1698631 - RNA, 19 nt, Artificial Sequence
  Description of Artificial Sequence: Synthetic oligonucleotide
  Sense strand starting at position 2343 of SEQ ID NO: 1561790
gagagauucuugccggagg

SEQ ID NO: 1698632 - RNA, 19 nt, Artificial Sequence
  Description of Artificial Sequence: Synthetic oligonucleotide
  Antisense strand to SEQ ID NO: 1698631
ccuccggcaagaaucucuc

SEQ ID NO: 1698633 - RNA, 19 nt, Artificial Sequence
  Description of Artificial Sequence: Synthetic oligonucleotide
  Sense strand starting at position 2344 of SEQ ID NO: 1561790
agagauucuugccggagga

SEQ ID NO: 1698634 - RNA, 19 nt, Artificial Sequence
  Description of Artificial Sequence: Synthetic oligonucleotide
  Antisense strand to SEQ ID NO: 1698633
uccuccggcaagaaucucu

SEQ ID NO: 1698635 - RNA, 19 nt, Artificial Sequence
  Description of Artificial Sequence: Synthetic oligonucleotide
  Sense strand starting at position 2345 of SEQ ID NO: 1561790
gagauucuugccggaggaa

SEQ ID NO: 1698636 - RNA, 19 nt, Artificial Sequence
  Description of Artificial Sequence: Synthetic oligonucleotide
  Antisense strand to SEQ ID NO: 1698635
uuccuccggcaagaaucuc

SEQ ID NO: 1698637 - RNA, 19 nt, Artificial Sequence
  Description of Artificial Sequence: Synthetic oligonucleotide
  Sense strand starting at position 2346 of SEQ ID NO: 1561790
agauucuugccggaggaau

SEQ ID NO: 1698638 - RNA, 19 nt, Artificial Sequence
  Description of Artificial Sequence: Synthetic oligonucleotide
  Antisense strand to SEQ ID NO: 1698637
auuccuccggcaagaaucu

SEQ ID NO: 1698639 - RNA, 19 nt, Artificial Sequence
  Description of Artificial Sequence: Synthetic oligonucleotide
  Sense strand starting at position 2348 of SEQ ID NO: 1561790
auucuugccggaggaauac

SEQ ID NO: 1698640 - RNA, 19 nt, Artificial Sequence
  Description of Artificial Sequence: Synthetic oligonucleotide
  Antisense strand to SEQ ID NO: 1698639
guauuccuccggcaagaau

SEQ ID NO: 1698641 - RNA, 19 nt, Artificial Sequence
  Description of Artificial Sequence: Synthetic oligonucleotide
  Sense strand starting at position 2557 of SEQ ID NO: 1561790
ccucaaacggcuugcuuua

SEQ ID NO: 1698642 - RNA, 19 nt, Artificial Sequence
  Description of Artificial Sequence: Synthetic oligonucleotide
  Antisense strand to SEQ ID NO: 1698641
uaaagcaagccguuugagg

SEQ ID NO: 1698643 - RNA, 19 nt, Artificial Sequence
  Description of Artificial Sequence: Synthetic oligonucleotide
  Sense strand starting at position 3108 of SEQ ID NO: 1561790
cggccacauccucgaauuu

SEQ ID NO: 1698644 - RNA, 19 nt, Artificial Sequence
  Description of Artificial Sequence: Synthetic oligonucleotide
  Antisense strand to SEQ ID NO: 1698643
aaauucgaggauguggccg

SEQ ID NO: 1698645 - RNA, 19 nt, Artificial Sequence
  Description of Artificial Sequence: Synthetic oligonucleotide
  Sense strand starting at position 3133 of SEQ ID NO: 1561790
ucagcuaaggaaugauuga

SEQ ID NO: 1698646 - RNA, 19 nt, Artificial Sequence
  Description of Artificial Sequence: Synthetic oligonucleotide
  Antisense strand to SEQ ID NO: 1698645
ucaaucauuccuuagcuga

SEQ ID NO: 1698647 - RNA, 19 nt, Artificial Sequence
  Description of Artificial Sequence: Synthetic oligonucleotide
  Sense strand starting at position 3653 of SEQ ID NO: 1561790
aagagaacucaguguuccu

SEQ ID NO: 1698648 - RNA, 19 nt, Artificial Sequence
  Description of Artificial Sequence: Synthetic oligonucleotide
  Antisense strand to SEQ ID NO: 1698647
aggaacacugaguucucuu

SEQ ID NO: 1698649 - RNA, 19 nt, Artificial Sequence
  Description of Artificial Sequence: Synthetic oligonucleotide
  Sense strand starting at position 3749 of SEQ ID NO: 1561790
ucguuucccugcuuugaau

SEQ ID NO: 1698650 - RNA, 19 nt, Artificial Sequence
  Description of Artificial Sequence: Synthetic oligonucleotide
  Antisense strand to SEQ ID NO: 1698649
auucaaagcagggaaacga

SEQ ID NO: 1698651 - RNA, 19 nt, Artificial Sequence
  Description of Artificial Sequence: Synthetic oligonucleotide
  Sense strand starting at position 3821 of SEQ ID NO: 1561790
ggcacugugucauuaggcu

SEQ ID NO: 1698652 - RNA, 19 nt, Artificial Sequence
  Description of Artificial Sequence: Synthetic oligonucleotide
  Antisense strand to SEQ ID NO: 1698651
agccuaaugacacagugcc

SEQ ID NO: 1698653 - RNA, 19 nt, Artificial Sequence
  Description of Artificial Sequence: Synthetic oligonucleotide
  Sense strand starting at position 3827 of SEQ ID NO: 1561790
gugucauuaggcugggugu

SEQ ID NO: 1698654 - RNA, 19 nt, Artificial Sequence
  Description of Artificial Sequence: Synthetic oligonucleotide
  Antisense strand to SEQ ID NO: 1698653
acacccagccuaaugacac

SEQ ID NO: 1698655 - RNA, 19 nt, Artificial Sequence
  Description of Artificial Sequence: Synthetic oligonucleotide
  Sense strand starting at position 1 of SEQ ID NO: 1561791
cucuaagaguaacuuguaa

SEQ ID NO: 1698656 - RNA, 19 nt, Artificial Sequence
  Description of Artificial Sequence: Synthetic oligonucleotide
  Antisense strand to SEQ ID NO: 1698655
uuacaaguuacucuuagag

SEQ ID NO: 1698657 - RNA, 19 nt, Artificial Sequence
  Description of Artificial Sequence: Synthetic oligonucleotide
  Sense strand starting at position 13 of SEQ ID NO: 1561791
cuuguaaggucuucuugau

SEQ ID NO: 1698658 - RNA, 19 nt, Artificial Sequence
  Description of Artificial Sequence: Synthetic oligonucleotide
  Antisense strand to SEQ ID NO: 1698657
aucaagaagaccuuacaag

SEQ ID NO: 1698659 - RNA, 19 nt, Artificial Sequence
  Description of Artificial Sequence: Synthetic oligonucleotide
  Sense strand starting at position 58 of SEQ ID NO: 1561791
guauuuggaaaucgcucau

SEQ ID NO: 1698660 - RNA, 19 nt, Artificial Sequence
  Description of Artificial Sequence: Synthetic oligonucleotide
  Antisense strand to SEQ ID NO: 1698659
augagcgauuuccaaauac

SEQ ID NO: 1698661 - RNA, 19 nt, Artificial Sequence
  Description of Artificial Sequence: Synthetic oligonucleotide
  Sense strand starting at position 309 of SEQ ID NO: 1561791
cagagugaauggucuuaag

SEQ ID NO: 1698662 - RNA, 19 nt, Artificial Sequence
  Description of Artificial Sequence: Synthetic oligonucleotide
  Antisense strand to SEQ ID NO: 1698661
cuuaagaccauucacucug

SEQ ID NO: 1698663 - RNA, 19 nt, Artificial Sequence
  Description of Artificial Sequence: Synthetic oligonucleotide
  Sense strand starting at position 318 of SEQ ID NO: 1561791
uggucuuaagcguaccaua

SEQ ID NO: 1698664 - RNA, 19 nt, Artificial Sequence
  Description of Artificial Sequence: Synthetic oligonucleotide
  Antisense strand to SEQ ID NO: 1698663
uaugguacgcuuaagacca

SEQ ID NO: 1698665 - RNA, 19 nt, Artificial Sequence
  Description of Artificial Sequence: Synthetic oligonucleotide
  Sense strand starting at position 426 of SEQ ID NO: 1561791
acucaagaugcugauacuu

SEQ ID NO: 1698666 - RNA, 19 nt, Artificial Sequence
  Description of Artificial Sequence: Synthetic oligonucleotide
  Antisense strand to SEQ ID NO: 1698665
aaguaucagcaucuugagu

SEQ ID NO: 1698667 - RNA, 19 nt, Artificial Sequence
  Description of Artificial Sequence: Synthetic oligonucleotide
  Sense strand starting at position 445 of SEQ ID NO: 1561791
uguagcuuacagcauuaaa

SEQ ID NO: 1698668 - RNA, 19 nt, Artificial Sequence
  Description of Artificial Sequence: Synthetic oligonucleotide
  Antisense strand to SEQ ID NO: 1698667
uuuaaugcuguaagcuaca

SEQ ID NO: 1698669 - RNA, 19 nt, Artificial Sequence
  Description of Artificial Sequence: Synthetic oligonucleotide
  Sense strand starting at position 567 of SEQ ID NO: 1561791
cugcauguucacggaaguu

SEQ ID NO: 1698670 - RNA, 19 nt, Artificial Sequence
  Description of Artificial Sequence: Synthetic oligonucleotide
  Antisense strand to SEQ ID NO: 1698669
aacuuccgugaacaugcag

SEQ ID NO: 1698671 - RNA, 19 nt, Artificial Sequence
  Description of Artificial Sequence: Synthetic oligonucleotide
  Sense strand starting at position 624 of SEQ ID NO: 1561791
aacaguuuguaugcagaua

SEQ ID NO: 1698672 - RNA, 19 nt, Artificial Sequence
  Description of Artificial Sequence: Synthetic oligonucleotide
  Antisense strand to SEQ ID NO: 1698671
uaucugcauacaaacuguu

SEQ ID NO: 1698673 - RNA, 19 nt, Artificial Sequence
  Description of Artificial Sequence: Synthetic oligonucleotide
  Sense strand starting at position 647 of SEQ ID NO: 1561791
gguaccaacugcuucuaga

SEQ ID NO: 1698674 - RNA, 19 nt, Artificial Sequence
  Description of Artificial Sequence: Synthetic oligonucleotide
  Antisense strand to SEQ ID NO: 1698673
ucuagaagcaguugguacc

SEQ ID NO: 1698675 - RNA, 19 nt, Artificial Sequence
  Description of Artificial Sequence: Synthetic oligonucleotide
  Sense strand starting at position 669 of SEQ ID NO: 1561791
augcaauuacaguguaaua

SEQ ID NO: 1698676 - RNA, 19 nt, Artificial Sequence
  Description of Artificial Sequence: Synthetic oligonucleotide
  Antisense strand to SEQ ID NO: 1698675
uauuacacuguaauugcau

SEQ ID NO: 1698677 - RNA, 19 nt, Artificial Sequence
  Description of Artificial Sequence: Synthetic oligonucleotide
  Sense strand starting at position 680 of SEQ ID NO: 1561791
guguaauauuucuagcaaa

SEQ ID NO: 1698678 - RNA, 19 nt, Artificial Sequence
  Description of Artificial Sequence: Synthetic oligonucleotide
  Antisense strand to SEQ ID NO: 1698677
uuugcuagaaauauuacac

SEQ ID NO: 1698679 - RNA, 19 nt, Artificial Sequence
  Description of Artificial Sequence: Synthetic oligonucleotide
  Sense strand starting at position 705 of SEQ ID NO: 1561791
uaaggcuacgccugcaaau

SEQ ID NO: 1698680 - RNA, 19 nt, Artificial Sequence
  Description of Artificial Sequence: Synthetic oligonucleotide
  Antisense strand to SEQ ID NO: 1698679
auuugcaggcguagccuua

SEQ ID NO: 1698681 - RNA, 19 nt, Artificial Sequence
  Description of Artificial Sequence: Synthetic oligonucleotide
  Sense strand starting at position 745 of SEQ ID NO: 1561791
gugugugcacacuaacgaa

SEQ ID NO: 1698682 - RNA, 19 nt, Artificial Sequence
  Description of Artificial Sequence: Synthetic oligonucleotide
  Antisense strand to SEQ ID NO: 1698681
uucguuagugugcacacac

SEQ ID NO: 1698683 - RNA, 19 nt, Artificial Sequence
  Description of Artificial Sequence: Synthetic oligonucleotide
  Sense strand starting at position 814 of SEQ ID NO: 1561791
agcuaauuagagugacagu

SEQ ID NO: 1698684 - RNA, 19 nt, Artificial Sequence
  Description of Artificial Sequence: Synthetic oligonucleotide
  Antisense strand to SEQ ID NO: 1698683
acugucacucuaauuagcu

SEQ ID NO: 1698685 - RNA, 19 nt, Artificial Sequence
  Description of Artificial Sequence: Synthetic oligonucleotide
  Sense strand starting at position 895 of SEQ ID NO: 1561791
ccuguuuacuuucugguga

SEQ ID NO: 1698686 - RNA, 19 nt, Artificial Sequence
  Description of Artificial Sequence: Synthetic oligonucleotide
  Antisense strand to SEQ ID NO: 1698685
ucaccagaaaguaaacagg

SEQ ID NO: 1698687 - RNA, 19 nt, Artificial Sequence
  Description of Artificial Sequence: Synthetic oligonucleotide
  Sense strand starting at position 1189 of SEQ ID NO: 1561791
ggauccugcucguuagcga

SEQ ID NO: 1698688 - RNA, 19 nt, Artificial Sequence
  Description of Artificial Sequence: Synthetic oligonucleotide
  Antisense strand to SEQ ID NO: 1698687
ucgcuaacgagcaggaucc

SEQ ID NO: 1698689 - RNA, 19 nt, Artificial Sequence
  Description of Artificial Sequence: Synthetic oligonucleotide
  Sense strand starting at position 1190 of SEQ ID NO: 1561791
gauccugcucguuagcgau

SEQ ID NO: 1698690 - RNA, 19 nt, Artificial Sequence
  Description of Artificial Sequence: Synthetic oligonucleotide
  Antisense strand to SEQ ID NO: 1698689
aucgcuaacgagcaggauc

SEQ ID NO: 1698691 - RNA, 19 nt, Artificial Sequence
  Description of Artificial Sequence: Synthetic oligonucleotide
  Sense strand starting at position 1194 of SEQ ID NO: 1561791
cugcucguuagcgaucauu

SEQ ID NO: 1698692 - RNA, 19 nt, Artificial Sequence
  Description of Artificial Sequence: Synthetic oligonucleotide
  Antisense strand to SEQ ID NO: 1698691
aaugaucgcuaacgagcag

SEQ ID NO: 1698693 - RNA, 19 nt, Artificial Sequence
  Description of Artificial Sequence: Synthetic oligonucleotide
  Sense strand starting at position 1220 of SEQ ID NO: 1561791
cuaggacuguuccauaaag

SEQ ID NO: 1698694 - RNA, 19 nt, Artificial Sequence
  Description of Artificial Sequence: Synthetic oligonucleotide
  Antisense strand to SEQ ID NO: 1698693
cuuuauggaacaguccuag

SEQ ID NO: 1698695 - RNA, 19 nt, Artificial Sequence
  Description of Artificial Sequence: Synthetic oligonucleotide
  Sense strand starting at position 1238 of SEQ ID NO: 1561791
ggcuuuaucuuccuuauug

SEQ ID NO: 1698696 - RNA, 19 nt, Artificial Sequence
  Description of Artificial Sequence: Synthetic oligonucleotide
  Antisense strand to SEQ ID NO: 1698695
caauaaggaagauaaagcc

SEQ ID NO: 1698697 - RNA, 19 nt, Artificial Sequence
  Description of Artificial Sequence: Synthetic oligonucleotide
  Sense strand starting at position 2749 of SEQ ID NO: 1561791
caugcagagugcucuguga

SEQ ID NO: 1698698 - RNA, 19 nt, Artificial Sequence
  Description of Artificial Sequence: Synthetic oligonucleotide
  Antisense strand to SEQ ID NO: 1698697
ucacagagcacucugcaug

SEQ ID NO: 1698699 - RNA, 19 nt, Artificial Sequence
  Description of Artificial Sequence: Synthetic oligonucleotide
  Sense strand starting at position 2751 of SEQ ID NO: 1561791
ugcagagugcucugugagu

SEQ ID NO: 1698700 - RNA, 19 nt, Artificial Sequence
  Description of Artificial Sequence: Synthetic oligonucleotide
  Antisense strand to SEQ ID NO: 1698699
acucacagagcacucugca

SEQ ID NO: 1698701 - RNA, 19 nt, Artificial Sequence
  Description of Artificial Sequence: Synthetic oligonucleotide
  Sense strand starting at position 2760 of SEQ ID NO: 1561791
cucugugagucaccguuaa

SEQ ID NO: 1698702 - RNA, 19 nt, Artificial Sequence
  Description of Artificial Sequence: Synthetic oligonucleotide
  Antisense strand to SEQ ID NO: 1698701
uuaacggugacucacagag

SEQ ID NO: 1698703 - RNA, 19 nt, Artificial Sequence
  Description of Artificial Sequence: Synthetic oligonucleotide
  Sense strand starting at position 2806 of SEQ ID NO: 1561791
uuauuuaucuuugggaacu

SEQ ID NO: 1698704 - RNA, 19 nt, Artificial Sequence
  Description of Artificial Sequence: Synthetic oligonucleotide
  Antisense strand to SEQ ID NO: 1698703
aguucccaaagauaaauaa

SEQ ID NO: 1698705 - RNA, 19 nt, Artificial Sequence
  Description of Artificial Sequence: Synthetic oligonucleotide
  Sense strand starting at position 2949 of SEQ ID NO: 1561791
ugggcgguugcgucggaaa

SEQ ID NO: 1698706 - RNA, 19 nt, Artificial Sequence
  Description of Artificial Sequence: Synthetic oligonucleotide
  Antisense strand to SEQ ID NO: 1698705
uuuccgacgcaaccgccca

SEQ ID NO: 1698707 - RNA, 19 nt, Artificial Sequence
  Description of Artificial Sequence: Synthetic oligonucleotide
  Sense strand starting at position 3057 of SEQ ID NO: 1561791
aauuuagguuaccgagaac

SEQ ID NO: 1698708 - RNA, 19 nt, Artificial Sequence
  Description of Artificial Sequence: Synthetic oligonucleotide
  Antisense strand to SEQ ID NO: 1698707
guucucgguaaccuaaauu

SEQ ID NO: 1698709 - RNA, 19 nt, Artificial Sequence
  Description of Artificial Sequence: Synthetic oligonucleotide
  Sense strand starting at position 3060 of SEQ ID NO: 1561791
uuagguuaccgagaacauc

SEQ ID NO: 1698710 - RNA, 19 nt, Artificial Sequence
  Description of Artificial Sequence: Synthetic oligonucleotide
  Antisense strand to SEQ ID NO: 1698709
gauguucucgguaaccuaa

SEQ ID NO: 1698711 - RNA, 19 nt, Artificial Sequence
  Description of Artificial Sequence: Synthetic oligonucleotide
  Sense strand starting at position 3074 of SEQ ID NO: 1561791
acaucauggccucgaccaa

SEQ ID NO: 1698712 - RNA, 19 nt, Artificial Sequence
  Description of Artificial Sequence: Synthetic oligonucleotide
  Antisense strand to SEQ ID NO: 1698711
uuggucgaggccaugaugu

SEQ ID NO: 1698713 - RNA, 19 nt, Artificial Sequence
  Description of Artificial Sequence: Synthetic oligonucleotide
  Sense strand starting at position 3124 of SEQ ID NO: 1561791
uggacaagauggucaguau

SEQ ID NO: 1698714 - RNA, 19 nt, Artificial Sequence
  Description of Artificial Sequence: Synthetic oligonucleotide
  Antisense strand to SEQ ID NO: 1698713
auacugaccaucuugucca

SEQ ID NO: 1698715 - RNA, 19 nt, Artificial Sequence
  Description of Artificial Sequence: Synthetic oligonucleotide
  Sense strand starting at position 3306 of SEQ ID NO: 1561791
agcagugguucuuuagcau

SEQ ID NO: 1698716 - RNA, 19 nt, Artificial Sequence
  Description of Artificial Sequence: Synthetic oligonucleotide
  Antisense strand to SEQ ID NO: 1698715
augcuaaagaaccacugcu

SEQ ID NO: 1698717 - RNA, 19 nt, Artificial Sequence
  Description of Artificial Sequence: Synthetic oligonucleotide
  Sense strand starting at position 3312 of SEQ ID NO: 1561791
gguucuuuagcaugcauca

SEQ ID NO: 1698718 - RNA, 19 nt, Artificial Sequence
  Description of Artificial Sequence: Synthetic oligonucleotide
  Antisense strand to SEQ ID NO: 1698717
ugaugcaugcuaaagaacc

SEQ ID NO: 1698719 - RNA, 19 nt, Artificial Sequence
  Description of Artificial Sequence: Synthetic oligonucleotide
  Sense strand starting at position 3398 of SEQ ID NO: 1561791
cuaagaugaugcuugagaa

SEQ ID NO: 1698720 - RNA, 19 nt, Artificial Sequence
  Description of Artificial Sequence: Synthetic oligonucleotide
  Antisense strand to SEQ ID NO: 1698719
uucucaagcaucaucuuag

SEQ ID NO: 1698721 - RNA, 19 nt, Artificial Sequence
  Description of Artificial Sequence: Synthetic oligonucleotide
  Sense strand starting at position 3399 of SEQ ID NO: 1561791
uaagaugaugcuugagaau

SEQ ID NO: 1698722 - RNA, 19 nt, Artificial Sequence
  Description of Artificial Sequence: Synthetic oligonucleotide
  Antisense strand to SEQ ID NO: 1698721
auucucaagcaucaucuua

SEQ ID NO: 1698723 - RNA, 19 nt, Artificial Sequence
  Description of Artificial Sequence: Synthetic oligonucleotide
  Sense strand starting at position 3427 of SEQ ID NO: 1561791
uaacaacuccuaggugaug

SEQ ID NO: 1698724 - RNA, 19 nt, Artificial Sequence
  Description of Artificial Sequence: Synthetic oligonucleotide
  Antisense strand to SEQ ID NO: 1698723
caucaccuaggaguuguua

SEQ ID NO: 1698725 - RNA, 19 nt, Artificial Sequence
  Description of Artificial Sequence: Synthetic oligonucleotide
  Sense strand starting at position 3601 of SEQ ID NO: 1561791
gugcucauuuaaggauaca

SEQ ID NO: 1698726 - RNA, 19 nt, Artificial Sequence
  Description of Artificial Sequence: Synthetic oligonucleotide
  Antisense strand to SEQ ID NO: 1698725
uguauccuuaaaugagcac

SEQ ID NO: 1698727 - RNA, 19 nt, Artificial Sequence
  Description of Artificial Sequence: Synthetic oligonucleotide
  Sense strand starting at position 3687 of SEQ ID NO: 1561791
acauaagacuggucuuguu

SEQ ID NO: 1698728 - RNA, 19 nt, Artificial Sequence
  Description of Artificial Sequence: Synthetic oligonucleotide
  Antisense strand to SEQ ID NO: 1698727
aacaagaccagucuuaugu

SEQ ID NO: 1698729 - RNA, 19 nt, Artificial Sequence
  Description of Artificial Sequence: Synthetic oligonucleotide
  Sense strand starting at position 3700 of SEQ ID NO: 1561791
cuuguuacauucuugcuua

SEQ ID NO: 1698730 - RNA, 19 nt, Artificial Sequence
  Description of Artificial Sequence: Synthetic oligonucleotide
  Antisense strand to SEQ ID NO: 1698729
uaagcaagaauguaacaag

SEQ ID NO: 1698731 - RNA, 19 nt, Artificial Sequence
  Description of Artificial Sequence: Synthetic oligonucleotide
  Sense strand starting at position 3842 of SEQ ID NO: 1561791
cgaaacuucucauuccaga

SEQ ID NO: 1698732 - RNA, 19 nt, Artificial Sequence
  Description of Artificial Sequence: Synthetic oligonucleotide
  Antisense strand to SEQ ID NO: 1698731
ucuggaaugagaaguuucg

SEQ ID NO: 1698733 - RNA, 19 nt, Artificial Sequence
  Description of Artificial Sequence: Synthetic oligonucleotide
  Sense strand starting at position 3887 of SEQ ID NO: 1561791
ugaucaugggccugcuuau

SEQ ID NO: 1698734 - RNA, 19 nt, Artificial Sequence
  Description of Artificial Sequence: Synthetic oligonucleotide
  Antisense strand to SEQ ID NO: 1698733
auaagcaggcccaugauca

SEQ ID NO: 1698735 - RNA, 19 nt, Artificial Sequence
  Description of Artificial Sequence: Synthetic oligonucleotide
  Sense strand starting at position 206 of SEQ ID NO: 1561792
auuuaaaucugucagugac

SEQ ID NO: 1698736 - RNA, 19 nt, Artificial Sequence
  Description of Artificial Sequence: Synthetic oligonucleotide
  Antisense strand to SEQ ID NO: 1698735
gucacugacagauuuaaau

SEQ ID NO: 1698737 - RNA, 19 nt, Artificial Sequence
  Description of Artificial Sequence: Synthetic oligonucleotide
  Sense strand starting at position 208 of SEQ ID NO: 1561792
uuaaaucugucagugacga

SEQ ID NO: 1698738 - RNA, 19 nt, Artificial Sequence
  Description of Artificial Sequence: Synthetic oligonucleotide
  Antisense strand to SEQ ID NO: 1698737
ucgucacugacagauuuaa

SEQ ID NO: 1698739 - RNA, 19 nt, Artificial Sequence
  Description of Artificial Sequence: Synthetic oligonucleotide
  Sense strand starting at position 243 of SEQ ID NO: 1561792
acugcaagguucuucucaa

SEQ ID NO: 1698740 - RNA, 19 nt, Artificial Sequence
  Description of Artificial Sequence: Synthetic oligonucleotide
  Antisense strand to SEQ ID NO: 1698739
uugagaagaaccuugcagu

SEQ ID NO: 1698741 - RNA, 19 nt, Artificial Sequence
  Description of Artificial Sequence: Synthetic oligonucleotide
  Sense strand starting at position 244 of SEQ ID NO: 1561792
cugcaagguucuucucaau

SEQ ID NO: 1698742 - RNA, 19 nt, Artificial Sequence
  Description of Artificial Sequence: Synthetic oligonucleotide
  Antisense strand to SEQ ID NO: 1698741
auugagaagaaccuugcag

SEQ ID NO: 1698743 - RNA, 19 nt, Artificial Sequence
  Description of Artificial Sequence: Synthetic oligonucleotide
  Sense strand starting at position 250 of SEQ ID NO: 1561792
gguucuucucaauaaugca

SEQ ID NO: 1698744 - RNA, 19 nt, Artificial Sequence
  Description of Artificial Sequence: Synthetic oligonucleotide
  Antisense strand to SEQ ID NO: 1698743
ugcauuauugagaagaacc

SEQ ID NO: 1698745 - RNA, 19 nt, Artificial Sequence
  Description of Artificial Sequence: Synthetic oligonucleotide
  Sense strand starting at position 358 of SEQ ID NO: 1561792
gugcuacucuauucccuau

SEQ ID NO: 1698746 - RNA, 19 nt, Artificial Sequence
  Description of Artificial Sequence: Synthetic oligonucleotide
  Antisense strand to SEQ ID NO: 1698745
auagggaauagaguagcac

SEQ ID NO: 1698747 - RNA, 19 nt, Artificial Sequence
  Description of Artificial Sequence: Synthetic oligonucleotide
  Sense strand starting at position 478 of SEQ ID NO: 1561792
ggguuugguuguuucuuua

SEQ ID NO: 1698748 - RNA, 19 nt, Artificial Sequence
  Description of Artificial Sequence: Synthetic oligonucleotide
  Antisense strand to SEQ ID NO: 1698747
uaaagaaacaaccaaaccc

SEQ ID NO: 1698749 - RNA, 19 nt, Artificial Sequence
  Description of Artificial Sequence: Synthetic oligonucleotide
  Sense strand starting at position 1094 of SEQ ID NO: 1561792
gacgaaagugcugagugau

SEQ ID NO: 1698750 - RNA, 19 nt, Artificial Sequence
  Description of Artificial Sequence: Synthetic oligonucleotide
  Antisense strand to SEQ ID NO: 1698749
aucacucagcacuuucguc

SEQ ID NO: 1698751 - RNA, 19 nt, Artificial Sequence
  Description of Artificial Sequence: Synthetic oligonucleotide
  Sense strand starting at position 1123 of SEQ ID NO: 1561792
cggguagcuugguccacaa

SEQ ID NO: 1698752 - RNA, 19 nt, Artificial Sequence
  Description of Artificial Sequence: Synthetic oligonucleotide
  Antisense strand to SEQ ID NO: 1698751
uuguggaccaagcuacccg

SEQ ID NO: 1698753 - RNA, 19 nt, Artificial Sequence
  Description of Artificial Sequence: Synthetic oligonucleotide
  Sense strand starting at position 1125 of SEQ ID NO: 1561792
gguagcuugguccacaaga

SEQ ID NO: 1698754 - RNA, 19 nt, Artificial Sequence
  Description of Artificial Sequence: Synthetic oligonucleotide
  Antisense strand to SEQ ID NO: 1698753
ucuuguggaccaagcuacc

SEQ ID NO: 1698755 - RNA, 19 nt, Artificial Sequence
  Description of Artificial Sequence: Synthetic oligonucleotide
  Sense strand starting at position 1127 of SEQ ID NO: 1561792
uagcuugguccacaagaaa

SEQ ID NO: 1698756 - RNA, 19 nt, Artificial Sequence
  Description of Artificial Sequence: Synthetic oligonucleotide
  Antisense strand to SEQ ID NO: 1698755
uuucuuguggaccaagcua

SEQ ID NO: 1698757 - RNA, 19 nt, Artificial Sequence
  Description of Artificial Sequence: Synthetic oligonucleotide
  Sense strand starting at position 1411 of SEQ ID NO: 1561792
gagugccugcuccggaaau

SEQ ID NO: 1698758 - RNA, 19 nt, Artificial Sequence
  Description of Artificial Sequence: Synthetic oligonucleotide
  Antisense strand to SEQ ID NO: 1698757
auuuccggagcaggcacuc

SEQ ID NO: 1698759 - RNA, 19 nt, Artificial Sequence
  Description of Artificial Sequence: Synthetic oligonucleotide
  Sense strand starting at position 1422 of SEQ ID NO: 1561792
ccggaaaugcucuaagcgu

SEQ ID NO: 1698760 - RNA, 19 nt, Artificial Sequence
  Description of Artificial Sequence: Synthetic oligonucleotide
  Antisense strand to SEQ ID NO: 1698759
acgcuuagagcauuuccgg

SEQ ID NO: 1698761 - RNA, 19 nt, Artificial Sequence
  Description of Artificial Sequence: Synthetic oligonucleotide
  Sense strand starting at position 1430 of SEQ ID NO: 1561792
gcucuaagcgugguucauc

SEQ ID NO: 1698762 - RNA, 19 nt, Artificial Sequence
  Description of Artificial Sequence: Synthetic oligonucleotide
  Antisense strand to SEQ ID NO: 1698761
gaugaaccacgcuuagagc

SEQ ID NO: 1698763 - RNA, 19 nt, Artificial Sequence
  Description of Artificial Sequence: Synthetic oligonucleotide
  Sense strand starting at position 2033 of SEQ ID NO: 1561792
auagauugacuccgccuau

SEQ ID NO: 1698764 - RNA, 19 nt, Artificial Sequence
  Description of Artificial Sequence: Synthetic oligonucleotide
  Antisense strand to SEQ ID NO: 1698763
auaggcggagucaaucuau

SEQ ID NO: 1698765 - RNA, 19 nt, Artificial Sequence
  Description of Artificial Sequence: Synthetic oligonucleotide
  Sense strand starting at position 2260 of SEQ ID NO: 1561792
cuaagaacccgucaucacu

SEQ ID NO: 1698766 - RNA, 19 nt, Artificial Sequence
  Description of Artificial Sequence: Synthetic oligonucleotide
  Antisense strand to SEQ ID NO: 1698765
agugaugacggguucuuag

SEQ ID NO: 1698767 - RNA, 19 nt, Artificial Sequence
  Description of Artificial Sequence: Synthetic oligonucleotide
  Sense strand starting at position 2269 of SEQ ID NO: 1561792
cgucaucacuaagccuuua

SEQ ID NO: 1698768 - RNA, 19 nt, Artificial Sequence
  Description of Artificial Sequence: Synthetic oligonucleotide
  Antisense strand to SEQ ID NO: 1698767
uaaaggcuuagugaugacg

SEQ ID NO: 1698769 - RNA, 19 nt, Artificial Sequence
  Description of Artificial Sequence: Synthetic oligonucleotide
  Sense strand starting at position 2459 of SEQ ID NO: 1561792
ucgacuuagccaugucaug

SEQ ID NO: 1698770 - RNA, 19 nt, Artificial Sequence
  Description of Artificial Sequence: Synthetic oligonucleotide
  Antisense strand to SEQ ID NO: 1698769
caugacauggcuaagucga

SEQ ID NO: 1698771 - RNA, 19 nt, Artificial Sequence
  Description of Artificial Sequence: Synthetic oligonucleotide
  Sense strand starting at position 2485 of SEQ ID NO: 1561792
auagguaugugauucuaga

SEQ ID NO: 1698772 - RNA, 19 nt, Artificial Sequence
  Description of Artificial Sequence: Synthetic oligonucleotide
  Antisense strand to SEQ ID NO: 1698771
ucuagaaucacauaccuau

SEQ ID NO: 1698773 - RNA, 19 nt, Artificial Sequence
  Description of Artificial Sequence: Synthetic oligonucleotide
  Sense strand starting at position 2544 of SEQ ID NO: 1561792
cccucacuggguuguuaga

SEQ ID NO: 1698774 - RNA, 19 nt, Artificial Sequence
  Description of Artificial Sequence: Synthetic oligonucleotide
  Antisense strand to SEQ ID NO: 1698773
ucuaacaacccagugaggg

SEQ ID NO: 1698775 - RNA, 19 nt, Artificial Sequence
  Description of Artificial Sequence: Synthetic oligonucleotide
  Sense strand starting at position 2546 of SEQ ID NO: 1561792
cucacuggguuguuagauu

SEQ ID NO: 1698776 - RNA, 19 nt, Artificial Sequence
  Description of Artificial Sequence: Synthetic oligonucleotide
  Antisense strand to SEQ ID NO: 1698775
aaucuaacaacccagugag

SEQ ID NO: 1698777 - RNA, 19 nt, Artificial Sequence
  Description of Artificial Sequence: Synthetic oligonucleotide
  Sense strand starting at position 2693 of SEQ ID NO: 1561792
agcauuggugggcguagaa

SEQ ID NO: 1698778 - RNA, 19 nt, Artificial Sequence
  Description of Artificial Sequence: Synthetic oligonucleotide
  Antisense strand to SEQ ID NO: 1698777
uucuacgcccaccaaugcu

SEQ ID NO: 1698779 - RNA, 19 nt, Artificial Sequence
  Description of Artificial Sequence: Synthetic oligonucleotide
  Sense strand starting at position 2762 of SEQ ID NO: 1561792
acuagugugcuuguuuguu

SEQ ID NO: 1698780 - RNA, 19 nt, Artificial Sequence
  Description of Artificial Sequence: Synthetic oligonucleotide
  Antisense strand to SEQ ID NO: 1698779
aacaaacaagcacacuagu

SEQ ID NO: 1698781 - RNA, 19 nt, Artificial Sequence
  Description of Artificial Sequence: Synthetic oligonucleotide
  Sense strand starting at position 2801 of SEQ ID NO: 1561792
ccuuaauaacguugucaaa

SEQ ID NO: 1698782 - RNA, 19 nt, Artificial Sequence
  Description of Artificial Sequence: Synthetic oligonucleotide
  Antisense strand to SEQ ID NO: 1698781
uuugacaacguuauuaagg

SEQ ID NO: 1698783 - RNA, 19 nt, Artificial Sequence
  Description of Artificial Sequence: Synthetic oligonucleotide
  Sense strand starting at position 2803 of SEQ ID NO: 1561792
uuaauaacguugucaaagu

SEQ ID NO: 1698784 - RNA, 19 nt, Artificial Sequence
  Description of Artificial Sequence: Synthetic oligonucleotide
  Antisense strand to SEQ ID NO: 1698783
acuuugacaacguuauuaa

SEQ ID NO: 1698785 - RNA, 19 nt, Artificial Sequence
  Description of Artificial Sequence: Synthetic oligonucleotide
  Sense strand starting at position 2855 of SEQ ID NO: 1561792
cugauauugcacugggaag

SEQ ID NO: 1698786 - RNA, 19 nt, Artificial Sequence
  Description of Artificial Sequence: Synthetic oligonucleotide
  Antisense strand to SEQ ID NO: 1698785
cuucccagugcaauaucag

SEQ ID NO: 1698787 - RNA, 19 nt, Artificial Sequence
  Description of Artificial Sequence: Synthetic oligonucleotide
  Sense strand starting at position 2857 of SEQ ID NO: 1561792
gauauugcacugggaagga

SEQ ID NO: 1698788 - RNA, 19 nt, Artificial Sequence
  Description of Artificial Sequence: Synthetic oligonucleotide
  Antisense strand to SEQ ID NO: 1698787
uccuucccagugcaauauc

SEQ ID NO: 1698789 - RNA, 19 nt, Artificial Sequence
  Description of Artificial Sequence: Synthetic oligonucleotide
  Sense strand starting at position 2883 of SEQ ID NO: 1561792
ucaaucuugugguauuucu

SEQ ID NO: 1698790 - RNA, 19 nt, Artificial Sequence
  Description of Artificial Sequence: Synthetic oligonucleotide
  Antisense strand to SEQ ID NO: 1698789
agaaauaccacaagauuga

SEQ ID NO: 1698791 - RNA, 19 nt, Artificial Sequence
  Description of Artificial Sequence: Synthetic oligonucleotide
  Sense strand starting at position 2890 of SEQ ID NO: 1561792
ugugguauuucugccaaau

SEQ ID NO: 1698792 - RNA, 19 nt, Artificial Sequence
  Description of Artificial Sequence: Synthetic oligonucleotide
  Antisense strand to SEQ ID NO: 1698791
auuuggcagaaauaccaca

SEQ ID NO: 1698793 - RNA, 19 nt, Artificial Sequence
  Description of Artificial Sequence: Synthetic oligonucleotide
  Sense strand starting at position 2892 of SEQ ID NO: 1561792
ugguauuucugccaaauaa

SEQ ID NO: 1698794 - RNA, 19 nt, Artificial Sequence
  Description of Artificial Sequence: Synthetic oligonucleotide
  Antisense strand to SEQ ID NO: 1698793
uuauuuggcagaaauacca

SEQ ID NO: 1698795 - RNA, 19 nt, Artificial Sequence
  Description of Artificial Sequence: Synthetic oligonucleotide
  Sense strand starting at position 2920 of SEQ ID NO: 1561792
ugaauccaaucaugaugaa

SEQ ID NO: 1698796 - RNA, 19 nt, Artificial Sequence
  Description of Artificial Sequence: Synthetic oligonucleotide
  Antisense strand to SEQ ID NO: 1698795
uucaucaugauuggauuca

SEQ ID NO: 1698797 - RNA, 19 nt, Artificial Sequence
  Description of Artificial Sequence: Synthetic oligonucleotide
  Sense strand starting at position 3071 of SEQ ID NO: 1561792
gugugaucuuggcuaucca

SEQ ID NO: 1698798 - RNA, 19 nt, Artificial Sequence
  Description of Artificial Sequence: Synthetic oligonucleotide
  Antisense strand to SEQ ID NO: 1698797
uggauagccaagaucacac

SEQ ID NO: 1698799 - RNA, 19 nt, Artificial Sequence
  Description of Artificial Sequence: Synthetic oligonucleotide
  Sense strand starting at position 3635 of SEQ ID NO: 1561792
uaaauuaaccuggguggua

SEQ ID NO: 1698800 - RNA, 19 nt, Artificial Sequence
  Description of Artificial Sequence: Synthetic oligonucleotide
  Antisense strand to SEQ ID NO: 1698799
uaccacccagguuaauuua

SEQ ID NO: 1698801 - RNA, 19 nt, Artificial Sequence
  Description of Artificial Sequence: Synthetic oligonucleotide
  Sense strand starting at position 3636 of SEQ ID NO: 1561792
aaauuaaccugggugguau

SEQ ID NO: 1698802 - RNA, 19 nt, Artificial Sequence
  Description of Artificial Sequence: Synthetic oligonucleotide
  Antisense strand to SEQ ID NO: 1698801
auaccacccagguuaauuu

SEQ ID NO: 1698803 - RNA, 19 nt, Artificial Sequence
  Description of Artificial Sequence: Synthetic oligonucleotide
  Sense strand starting at position 3648 of SEQ ID NO: 1561792
gugguauccuggccagaaa

SEQ ID NO: 1698804 - RNA, 19 nt, Artificial Sequence
  Description of Artificial Sequence: Synthetic oligonucleotide
  Antisense strand to SEQ ID NO: 1698803
uuucuggccaggauaccac

SEQ ID NO: 1698805 - RNA, 19 nt, Artificial Sequence
  Description of Artificial Sequence: Synthetic oligonucleotide
  Sense strand starting at position 3799 of SEQ ID NO: 1561792
uuuguuuagguggauuaua

SEQ ID NO: 1698806 - RNA, 19 nt, Artificial Sequence
  Description of Artificial Sequence: Synthetic oligonucleotide
  Antisense strand to SEQ ID NO: 1698805
uauaauccaccuaaacaaa

SEQ ID NO: 1698807 - RNA, 19 nt, Artificial Sequence
  Description of Artificial Sequence: Synthetic oligonucleotide
  Sense strand starting at position 3847 of SEQ ID NO: 1561792
agaaauaguuaacauggau

SEQ ID NO: 1698808 - RNA, 19 nt, Artificial Sequence
  Description of Artificial Sequence: Synthetic oligonucleotide
  Antisense strand to SEQ ID NO: 1698807
auccauguuaacuauuucu

SEQ ID NO: 1698809 - RNA, 19 nt, Artificial Sequence
  Description of Artificial Sequence: Synthetic oligonucleotide
  Sense strand starting at position 3906 of SEQ ID NO: 1561792
auaugaauaucagagcaau

SEQ ID NO: 1698810 - RNA, 19 nt, Artificial Sequence
  Description of Artificial Sequence: Synthetic oligonucleotide
  Antisense strand to SEQ ID NO: 1698809
auugcucugauauucauau

SEQ ID NO: 1698811 - RNA, 19 nt, Artificial Sequence
  Description of Artificial Sequence: Synthetic oligonucleotide
  Sense strand starting at position 3963 of SEQ ID NO: 1561792
uugugcacuccugaaagaa

SEQ ID NO: 1698812 - RNA, 19 nt, Artificial Sequence
  Description of Artificial Sequence: Synthetic oligonucleotide
  Antisense strand to SEQ ID NO: 1698811
uucuuucaggagugcacaa

SEQ ID NO: 1698813 - RNA, 19 nt, Artificial Sequence
  Description of Artificial Sequence: Synthetic oligonucleotide
  Sense strand starting at position 3973 of SEQ ID NO: 1561792
cugaaagaauaagacuaaa

SEQ ID NO: 1698814 - RNA, 19 nt, Artificial Sequence
  Description of Artificial Sequence: Synthetic oligonucleotide
  Antisense strand to SEQ ID NO: 1698813
uuuagucuuauucuuucag

SEQ ID NO: 1698815 - RNA, 19 nt, Artificial Sequence
  Description of Artificial Sequence: Synthetic oligonucleotide
  Sense strand starting at position 75 of SEQ ID NO: 1561793
ccagcauaugcagaucuuu

SEQ ID NO: 1698816 - RNA, 19 nt, Artificial Sequence
  Description of Artificial Sequence: Synthetic oligonucleotide
  Antisense strand to SEQ ID NO: 1698815
aaagaucugcauaugcugg

SEQ ID NO: 1698817 - RNA, 19 nt, Artificial Sequence
  Description of Artificial Sequence: Synthetic oligonucleotide
  Sense strand starting at position 134 of SEQ ID NO: 1561793
uuccucauucgaugagcau

SEQ ID NO: 1698818 - RNA, 19 nt, Artificial Sequence
  Description of Artificial Sequence: Synthetic oligonucleotide
  Antisense strand to SEQ ID NO: 1698817
augcucaucgaaugaggaa

SEQ ID NO: 1698819 - RNA, 19 nt, Artificial Sequence
  Description of Artificial Sequence: Synthetic oligonucleotide
  Sense strand starting at position 135 of SEQ ID NO: 1561793
uccucauucgaugagcauu

SEQ ID NO: 1698820 - RNA, 19 nt, Artificial Sequence
  Description of Artificial Sequence: Synthetic oligonucleotide
  Antisense strand to SEQ ID NO: 1698819
aaugcucaucgaaugagga

SEQ ID NO: 1698821 - RNA, 19 nt, Artificial Sequence
  Description of Artificial Sequence: Synthetic oligonucleotide
  Sense strand starting at position 146 of SEQ ID NO: 1561793
ugagcauuuaccgagugcu

SEQ ID NO: 1698822 - RNA, 19 nt, Artificial Sequence
  Description of Artificial Sequence: Synthetic oligonucleotide
  Antisense strand to SEQ ID NO: 1698821
agcacucgguaaaugcuca

SEQ ID NO: 1698823 - RNA, 19 nt, Artificial Sequence
  Description of Artificial Sequence: Synthetic oligonucleotide
  Sense strand starting at position 149 of SEQ ID NO: 1561793
gcauuuaccgagugcuaac

SEQ ID NO: 1698824 - RNA, 19 nt, Artificial Sequence
  Description of Artificial Sequence: Synthetic oligonucleotide
  Antisense strand to SEQ ID NO: 1698823
guuagcacucgguaaaugc

SEQ ID NO: 1698825 - RNA, 19 nt, Artificial Sequence
  Description of Artificial Sequence: Synthetic oligonucleotide
  Sense strand starting at position 158 of SEQ ID NO: 1561793
gagugcuaaccauguguau

SEQ ID NO: 1698826 - RNA, 19 nt, Artificial Sequence
  Description of Artificial Sequence: Synthetic oligonucleotide
  Antisense strand to SEQ ID NO: 1698825
auacacaugguuagcacuc

SEQ ID NO: 1698827 - RNA, 19 nt, Artificial Sequence
  Description of Artificial Sequence: Synthetic oligonucleotide
  Sense strand starting at position 160 of SEQ ID NO: 1561793
gugcuaaccauguguauac

SEQ ID NO: 1698828 - RNA, 19 nt, Artificial Sequence
  Description of Artificial Sequence: Synthetic oligonucleotide
  Antisense strand to SEQ ID NO: 1698827
guauacacaugguuagcac

SEQ ID NO: 1698829 - RNA, 19 nt, Artificial Sequence
  Description of Artificial Sequence: Synthetic oligonucleotide
  Sense strand starting at position 256 of SEQ ID NO: 1561793
agaccuuacuuggccaaau

SEQ ID NO: 1698830 - RNA, 19 nt, Artificial Sequence
  Description of Artificial Sequence: Synthetic oligonucleotide
  Antisense strand to SEQ ID NO: 1698829
auuuggccaaguaaggucu

SEQ ID NO: 1698831 - RNA, 19 nt, Artificial Sequence
  Description of Artificial Sequence: Synthetic oligonucleotide
  Sense strand starting at position 384 of SEQ ID NO: 1561793
ugacucugcagauggaaau

SEQ ID NO: 1698832 - RNA, 19 nt, Artificial Sequence
  Description of Artificial Sequence: Synthetic oligonucleotide
  Antisense strand to SEQ ID NO: 1698831
auuuccaucugcagaguca

SEQ ID NO: 1698833 - RNA, 19 nt, Artificial Sequence
  Description of Artificial Sequence: Synthetic oligonucleotide
  Sense strand starting at position 793 of SEQ ID NO: 1561793
guuucuacccagcauguuu

SEQ ID NO: 1698834 - RNA, 19 nt, Artificial Sequence
  Description of Artificial Sequence: Synthetic oligonucleotide
  Antisense strand to SEQ ID NO: 1698833
aaacaugcuggguagaaac

SEQ ID NO: 1698835 - RNA, 19 nt, Artificial Sequence
  Description of Artificial Sequence: Synthetic oligonucleotide
  Sense strand starting at position 897 of SEQ ID NO: 1561793
ccuccuccugacugaagau

SEQ ID NO: 1698836 - RNA, 19 nt, Artificial Sequence
  Description of Artificial Sequence: Synthetic oligonucleotide
  Antisense strand to SEQ ID NO: 1698835
aucuucagucaggaggagg

SEQ ID NO: 1698837 - RNA, 19 nt, Artificial Sequence
  Description of Artificial Sequence: Synthetic oligonucleotide
  Sense strand starting at position 1074 of SEQ ID NO: 1561793
ggaccucuccucugacaag

SEQ ID NO: 1698838 - RNA, 19 nt, Artificial Sequence
  Description of Artificial Sequence: Synthetic oligonucleotide
  Antisense strand to SEQ ID NO: 1698837
cuugucagaggagaggucc

SEQ ID NO: 1698839 - RNA, 19 nt, Artificial Sequence
  Description of Artificial Sequence: Synthetic oligonucleotide
  Sense strand starting at position 1551 of SEQ ID NO: 1561793
gugggcagugcucaccaau

SEQ ID NO: 1698840 - RNA, 19 nt, Artificial Sequence
  Description of Artificial Sequence: Synthetic oligonucleotide
  Antisense strand to SEQ ID NO: 1698839
auuggugagcacugcccac

SEQ ID NO: 1698841 - RNA, 19 nt, Artificial Sequence
  Description of Artificial Sequence: Synthetic oligonucleotide
  Sense strand starting at position 1554 of SEQ ID NO: 1561793
ggcagugcucaccaaugaa

SEQ ID NO: 1698842 - RNA, 19 nt, Artificial Sequence
  Description of Artificial Sequence: Synthetic oligonucleotide
  Antisense strand to SEQ ID NO: 1698841
uucauuggugagcacugcc

SEQ ID NO: 1698843 - RNA, 19 nt, Artificial Sequence
  Description of Artificial Sequence: Synthetic oligonucleotide
  Sense strand starting at position 1557 of SEQ ID NO: 1561793
agugcucaccaaugaaguu

SEQ ID NO: 1698844 - RNA, 19 nt, Artificial Sequence
  Description of Artificial Sequence: Synthetic oligonucleotide
  Antisense strand to SEQ ID NO: 1698843
aacuucauuggugagcacu

SEQ ID NO: 1698845 - RNA, 19 nt, Artificial Sequence
  Description of Artificial Sequence: Synthetic oligonucleotide
  Sense strand starting at position 1567 of SEQ ID NO: 1561793
aaugaaguuuccgagguag

SEQ ID NO: 1698846 - RNA, 19 nt, Artificial Sequence
  Description of Artificial Sequence: Synthetic oligonucleotide
  Antisense strand to SEQ ID NO: 1698845
cuaccucggaaacuucauu

SEQ ID NO: 1698847 - RNA, 19 nt, Artificial Sequence
  Description of Artificial Sequence: Synthetic oligonucleotide
  Sense strand starting at position 1569 of SEQ ID NO: 1561793
ugaaguuuccgagguagag

SEQ ID NO: 1698848 - RNA, 19 nt, Artificial Sequence
  Description of Artificial Sequence: Synthetic oligonucleotide
  Antisense strand to SEQ ID NO: 1698847
cucuaccucggaaacuuca

SEQ ID NO: 1698849 - RNA, 19 nt, Artificial Sequence
  Description of Artificial Sequence: Synthetic oligonucleotide
  Sense strand starting at position 1720 of SEQ ID NO: 1561793
ggagcacucucuucccuuu

SEQ ID NO: 1698850 - RNA, 19 nt, Artificial Sequence
  Description of Artificial Sequence: Synthetic oligonucleotide
  Antisense strand to SEQ ID NO: 1698849
aaagggaagagagugcucc

SEQ ID NO: 1698851 - RNA, 19 nt, Artificial Sequence
  Description of Artificial Sequence: Synthetic oligonucleotide
  Sense strand starting at position 1743 of SEQ ID NO: 1561793
ggcccugaguccucuguga

SEQ ID NO: 1698852 - RNA, 19 nt, Artificial Sequence
  Description of Artificial Sequence: Synthetic oligonucleotide
  Antisense strand to SEQ ID NO: 1698851
ucacagaggacucagggcc

SEQ ID NO: 1698853 - RNA, 19 nt, Artificial Sequence
  Description of Artificial Sequence: Synthetic oligonucleotide
  Sense strand starting at position 1745 of SEQ ID NO: 1561793
cccugaguccucugugaga

SEQ ID NO: 1698854 - RNA, 19 nt, Artificial Sequence
  Description of Artificial Sequence: Synthetic oligonucleotide
  Antisense strand to SEQ ID NO: 1698853
ucucacagaggacucaggg

SEQ ID NO: 1698855 - RNA, 19 nt, Artificial Sequence
  Description of Artificial Sequence: Synthetic oligonucleotide
  Sense strand starting at position 2943 of SEQ ID NO: 1561793
acgggauaaguggguaauu

SEQ ID NO: 1698856 - RNA, 19 nt, Artificial Sequence
  Description of Artificial Sequence: Synthetic oligonucleotide
  Antisense strand to SEQ ID NO: 1698855
aauuacccacuuaucccgu

SEQ ID NO: 1698857 - RNA, 19 nt, Artificial Sequence
  Description of Artificial Sequence: Synthetic oligonucleotide
  Sense strand starting at position 2952 of SEQ ID NO: 1561793
guggguaauuccuuccgau

SEQ ID NO: 1698858 - RNA, 19 nt, Artificial Sequence
  Description of Artificial Sequence: Synthetic oligonucleotide
  Antisense strand to SEQ ID NO: 1698857
aucggaaggaauuacccac

SEQ ID NO: 1698859 - RNA, 19 nt, Artificial Sequence
  Description of Artificial Sequence: Synthetic oligonucleotide
  Sense strand starting at position 3187 of SEQ ID NO: 1561793
agaaauuacaggugaaugu

SEQ ID NO: 1698860 - RNA, 19 nt, Artificial Sequence
  Description of Artificial Sequence: Synthetic oligonucleotide
  Antisense strand to SEQ ID NO: 1698859
acauucaccuguaauuucu

SEQ ID NO: 1698861 - RNA, 19 nt, Artificial Sequence
  Description of Artificial Sequence: Synthetic oligonucleotide
  Sense strand starting at position 3194 of SEQ ID NO: 1561793
acaggugaauguugggaga

SEQ ID NO: 1698862 - RNA, 19 nt, Artificial Sequence
  Description of Artificial Sequence: Synthetic oligonucleotide
  Antisense strand to SEQ ID NO: 1698861
ucucccaacauucaccugu

SEQ ID NO: 1698863 - RNA, 19 nt, Artificial Sequence
  Description of Artificial Sequence: Synthetic oligonucleotide
  Sense strand starting at position 3242 of SEQ ID NO: 1561793
gagacuacaucaggaugua

SEQ ID NO: 1698864 - RNA, 19 nt, Artificial Sequence
  Description of Artificial Sequence: Synthetic oligonucleotide
  Antisense strand to SEQ ID NO: 1698863
uacauccugauguagucuc

SEQ ID NO: 1698865 - RNA, 19 nt, Artificial Sequence
  Description of Artificial Sequence: Synthetic oligonucleotide
  Sense strand starting at position 3245 of SEQ ID NO: 1561793
acuacaucaggauguauua

SEQ ID NO: 1698866 - RNA, 19 nt, Artificial Sequence
  Description of Artificial Sequence: Synthetic oligonucleotide
  Antisense strand to SEQ ID NO: 1698865
uaauacauccugauguagu

SEQ ID NO: 1698867 - RNA, 19 nt, Artificial Sequence
  Description of Artificial Sequence: Synthetic oligonucleotide
  Sense strand starting at position 3257 of SEQ ID NO: 1561793
uguauuaauagcuagaggu

SEQ ID NO: 1698868 - RNA, 19 nt, Artificial Sequence
  Description of Artificial Sequence: Synthetic oligonucleotide
  Antisense strand to SEQ ID NO: 1698867
accucuagcuauuaauaca

SEQ ID NO: 1698869 - RNA, 19 nt, Artificial Sequence
  Description of Artificial Sequence: Synthetic oligonucleotide
  Sense strand starting at position 3259 of SEQ ID NO: 1561793
uauuaauagcuagagguca

SEQ ID NO: 1698870 - RNA, 19 nt, Artificial Sequence
  Description of Artificial Sequence: Synthetic oligonucleotide
  Antisense strand to SEQ ID NO: 1698869
ugaccucuagcuauuaaua

SEQ ID NO: 1698871 - RNA, 19 nt, Artificial Sequence
  Description of Artificial Sequence: Synthetic oligonucleotide
  Sense strand starting at position 3333 of SEQ ID NO: 1561793
gcuagaugacccugggaaa

SEQ ID NO: 1698872 - RNA, 19 nt, Artificial Sequence
  Description of Artificial Sequence: Synthetic oligonucleotide
  Antisense strand to SEQ ID NO: 1698871
uuucccagggucaucuagc

SEQ ID NO: 1698873 - RNA, 19 nt, Artificial Sequence
  Description of Artificial Sequence: Synthetic oligonucleotide
  Sense strand starting at position 3375 of SEQ ID NO: 1561793
cuaucuguguuucugagga

SEQ ID NO: 1698874 - RNA, 19 nt, Artificial Sequence
  Description of Artificial Sequence: Synthetic oligonucleotide
  Antisense strand to SEQ ID NO: 1698873
uccucagaaacacagauag

SEQ ID NO: 1698875 - RNA, 19 nt, Artificial Sequence
  Description of Artificial Sequence: Synthetic oligonucleotide
  Sense strand starting at position 3377 of SEQ ID NO: 1561793
aucuguguuucugaggaug

SEQ ID NO: 1698876 - RNA, 19 nt, Artificial Sequence
  Description of Artificial Sequence: Synthetic oligonucleotide
  Antisense strand to SEQ ID NO: 1698875
cauccucagaaacacagau

SEQ ID NO: 1698877 - RNA, 19 nt, Artificial Sequence
  Description of Artificial Sequence: Synthetic oligonucleotide
  Sense strand starting at position 3525 of SEQ ID NO: 1561793
aaucuauaguaguagguga

SEQ ID NO: 1698878 - RNA, 19 nt, Artificial Sequence
  Description of Artificial Sequence: Synthetic oligonucleotide
  Antisense strand to SEQ ID NO: 1698877
ucaccuacuacuauagauu

SEQ ID NO: 1698879 - RNA, 19 nt, Artificial Sequence
  Description of Artificial Sequence: Synthetic oligonucleotide
  Sense strand starting at position 3624 of SEQ ID NO: 1561793
guuucuuccucccucaagu

SEQ ID NO: 1698880 - RNA, 19 nt, Artificial Sequence
  Description of Artificial Sequence: Synthetic oligonucleotide
  Antisense strand to SEQ ID NO: 1698879
acuugagggaggaagaaac

SEQ ID NO: 1698881 - RNA, 19 nt, Artificial Sequence
  Description of Artificial Sequence: Synthetic oligonucleotide
  Sense strand starting at position 3683 of SEQ ID NO: 1561793
agcccagaguucucauaaa

SEQ ID NO: 1698882 - RNA, 19 nt, Artificial Sequence
  Description of Artificial Sequence: Synthetic oligonucleotide
  Antisense strand to SEQ ID NO: 1698881
uuuaugagaacucugggcu

SEQ ID NO: 1698883 - RNA, 19 nt, Artificial Sequence
  Description of Artificial Sequence: Synthetic oligonucleotide
  Sense strand starting at position 3729 of SEQ ID NO: 1561793
gagcaucuaguauaugaua

SEQ ID NO: 1698884 - RNA, 19 nt, Artificial Sequence
  Description of Artificial Sequence: Synthetic oligonucleotide
  Antisense strand to SEQ ID NO: 1698883
uaucauauacuagaugcuc

SEQ ID NO: 1698885 - RNA, 19 nt, Artificial Sequence
  Description of Artificial Sequence: Synthetic oligonucleotide
  Sense strand starting at position 3734 of SEQ ID NO: 1561793
ucuaguauaugauagagac

SEQ ID NO: 1698886 - RNA, 19 nt, Artificial Sequence
  Description of Artificial Sequence: Synthetic oligonucleotide
  Antisense strand to SEQ ID NO: 1698885
gucucuaucauauacuaga

SEQ ID NO: 1698887 - RNA, 19 nt, Artificial Sequence
  Description of Artificial Sequence: Synthetic oligonucleotide
  Sense strand starting at position 3772 of SEQ ID NO: 1561793
agagauuguuccuaccuuc

SEQ ID NO: 1698888 - RNA, 19 nt, Artificial Sequence
  Description of Artificial Sequence: Synthetic oligonucleotide
  Antisense strand to SEQ ID NO: 1698887
gaagguaggaacaaucucu

SEQ ID NO: 1698889 - RNA, 19 nt, Artificial Sequence
  Description of Artificial Sequence: Synthetic oligonucleotide
  Sense strand starting at position 3806 of SEQ ID NO: 1561793
agaccagcauuguccaaau

SEQ ID NO: 1698890 - RNA, 19 nt, Artificial Sequence
  Description of Artificial Sequence: Synthetic oligonucleotide
  Antisense strand to SEQ ID NO: 1698889
auuuggacaaugcuggucu

SEQ ID NO: 1698891 - RNA, 19 nt, Artificial Sequence
  Description of Artificial Sequence: Synthetic oligonucleotide
  Sense strand starting at position 3808 of SEQ ID NO: 1561793
accagcauuguccaaauga

SEQ ID NO: 1698892 - RNA, 19 nt, Artificial Sequence
  Description of Artificial Sequence: Synthetic oligonucleotide
  Antisense strand to SEQ ID NO: 1698891
ucauuuggacaaugcuggu

SEQ ID NO: 1698893 - RNA, 19 nt, Artificial Sequence
  Description of Artificial Sequence: Synthetic oligonucleotide
  Sense strand starting at position 3868 of SEQ ID NO: 1561793
gaaacaaguuaauuguuga

SEQ ID NO: 1698894 - RNA, 19 nt, Artificial Sequence
  Description of Artificial Sequence: Synthetic oligonucleotide
  Antisense strand to SEQ ID NO: 1698893
ucaacaauuaacuuguuuc

SEQ ID NO: 1698895 - RNA, 19 nt, Artificial Sequence
  Description of Artificial Sequence: Synthetic oligonucleotide
  Sense strand starting at position 115 of SEQ ID NO: 1561794
guuucuacccagcauguuu

SEQ ID NO: 1698896 - RNA, 19 nt, Artificial Sequence
  Description of Artificial Sequence: Synthetic oligonucleotide
  Antisense strand to SEQ ID NO: 1698895
aaacaugcuggguagaaac

SEQ ID NO: 1698897 - RNA, 19 nt, Artificial Sequence
  Description of Artificial Sequence: Synthetic oligonucleotide
  Sense strand starting at position 219 of SEQ ID NO: 1561794
ccuccuccugacugaagau

SEQ ID NO: 1698898 - RNA, 19 nt, Artificial Sequence
  Description of Artificial Sequence: Synthetic oligonucleotide
  Antisense strand to SEQ ID NO: 1698897
aucuucagucaggaggagg

SEQ ID NO: 1698899 - RNA, 19 nt, Artificial Sequence
  Description of Artificial Sequence: Synthetic oligonucleotide
  Sense strand starting at position 396 of SEQ ID NO: 1561794
ggaccucuccucugacaag

SEQ ID NO: 1698900 - RNA, 19 nt, Artificial Sequence
  Description of Artificial Sequence: Synthetic oligonucleotide
  Antisense strand to SEQ ID NO: 1698899
cuugucagaggagaggucc

SEQ ID NO: 1698901 - RNA, 19 nt, Artificial Sequence
  Description of Artificial Sequence: Synthetic oligonucleotide
  Sense strand starting at position 610 of SEQ ID NO: 1561794
gcccuuuggucugguggua

SEQ ID NO: 1698902 - RNA, 19 nt, Artificial Sequence
  Description of Artificial Sequence: Synthetic oligonucleotide
  Antisense strand to SEQ ID NO: 1698901
uaccaccagaccaaagggc

SEQ ID NO: 1698903 - RNA, 19 nt, Artificial Sequence
  Description of Artificial Sequence: Synthetic oligonucleotide
  Sense strand starting at position 873 of SEQ ID NO: 1561794
gugggcagugcucaccaau

SEQ ID NO: 1698904 - RNA, 19 nt, Artificial Sequence
  Description of Artificial Sequence: Synthetic oligonucleotide
  Antisense strand to SEQ ID NO: 1698903
auuggugagcacugcccac

SEQ ID NO: 1698905 - RNA, 19 nt, Artificial Sequence
  Description of Artificial Sequence: Synthetic oligonucleotide
  Sense strand starting at position 876 of SEQ ID NO: 1561794
ggcagugcucaccaaugaa

SEQ ID NO: 1698906 - RNA, 19 nt, Artificial Sequence
  Description of Artificial Sequence: Synthetic oligonucleotide
  Antisense strand to SEQ ID NO: 1698905
uucauuggugagcacugcc

SEQ ID NO: 1698907 - RNA, 19 nt, Artificial Sequence
  Description of Artificial Sequence: Synthetic oligonucleotide
  Sense strand starting at position 879 of SEQ ID NO: 1561794
agugcucaccaaugaaguu

SEQ ID NO: 1698908 - RNA, 19 nt, Artificial Sequence
  Description of Artificial Sequence: Synthetic oligonucleotide
  Antisense strand to SEQ ID NO: 1698907
aacuucauuggugagcacu

SEQ ID NO: 1698909 - RNA, 19 nt, Artificial Sequence
  Description of Artificial Sequence: Synthetic oligonucleotide
  Sense strand starting at position 888 of SEQ ID NO: 1561794
caaugaaguuuccgaggua

SEQ ID NO: 1698910 - RNA, 19 nt, Artificial Sequence
  Description of Artificial Sequence: Synthetic oligonucleotide
  Antisense strand to SEQ ID NO: 1698909
uaccucggaaacuucauug

SEQ ID NO: 1698911 - RNA, 19 nt, Artificial Sequence
  Description of Artificial Sequence: Synthetic oligonucleotide
  Sense strand starting at position 889 of SEQ ID NO: 1561794
aaugaaguuuccgagguag

SEQ ID NO: 1698912 - RNA, 19 nt, Artificial Sequence
  Description of Artificial Sequence: Synthetic oligonucleotide
  Antisense strand to SEQ ID NO: 1698911
cuaccucggaaacuucauu

SEQ ID NO: 1698913 - RNA, 19 nt, Artificial Sequence
  Description of Artificial Sequence: Synthetic oligonucleotide
  Sense strand starting at position 891 of SEQ ID NO: 1561794
ugaaguuuccgagguagag

SEQ ID NO: 1698914 - RNA, 19 nt, Artificial Sequence
  Description of Artificial Sequence: Synthetic oligonucleotide
  Antisense strand to SEQ ID NO: 1698913
cucuaccucggaaacuuca

SEQ ID NO: 1698915 - RNA, 19 nt, Artificial Sequence
  Description of Artificial Sequence: Synthetic oligonucleotide
  Sense strand starting at position 1042 of SEQ ID NO: 1561794
ggagcacucucuucccuuu

SEQ ID NO: 1698916 - RNA, 19 nt, Artificial Sequence
  Description of Artificial Sequence: Synthetic oligonucleotide
  Antisense strand to SEQ ID NO: 1698915
aaagggaagagagugcucc

SEQ ID NO: 1698917 - RNA, 19 nt, Artificial Sequence
  Description of Artificial Sequence: Synthetic oligonucleotide
  Sense strand starting at position 1065 of SEQ ID NO: 1561794
ggcccugaguccucuguga

SEQ ID NO: 1698918 - RNA, 19 nt, Artificial Sequence
  Description of Artificial Sequence: Synthetic oligonucleotide
  Antisense strand to SEQ ID NO: 1698917
ucacagaggacucagggcc

SEQ ID NO: 1698919 - RNA, 19 nt, Artificial Sequence
  Description of Artificial Sequence: Synthetic oligonucleotide
  Sense strand starting at position 1067 of SEQ ID NO: 1561794
cccugaguccucugugaga

SEQ ID NO: 1698920 - RNA, 19 nt, Artificial Sequence
  Description of Artificial Sequence: Synthetic oligonucleotide
  Antisense strand to SEQ ID NO: 1698919
ucucacagaggacucaggg

SEQ ID NO: 1698921 - RNA, 19 nt, Artificial Sequence
  Description of Artificial Sequence: Synthetic oligonucleotide
  Sense strand starting at position 1637 of SEQ ID NO: 1561794
cuaccuuggucaugccauu

SEQ ID NO: 1698922 - RNA, 19 nt, Artificial Sequence
  Description of Artificial Sequence: Synthetic oligonucleotide
  Antisense strand to SEQ ID NO: 1698921
aauggcaugaccaagguag

SEQ ID NO: 1698923 - RNA, 19 nt, Artificial Sequence
  Description of Artificial Sequence: Synthetic oligonucleotide
  Sense strand starting at position 2265 of SEQ ID NO: 1561794
acgggauaaguggguaauu

SEQ ID NO: 1698924 - RNA, 19 nt, Artificial Sequence
  Description of Artificial Sequence: Synthetic oligonucleotide
  Antisense strand to SEQ ID NO: 1698923
aauuacccacuuaucccgu

SEQ ID NO: 1698925 - RNA, 19 nt, Artificial Sequence
  Description of Artificial Sequence: Synthetic oligonucleotide
  Sense strand starting at position 2274 of SEQ ID NO: 1561794
guggguaauuccuuccgau

SEQ ID NO: 1698926 - RNA, 19 nt, Artificial Sequence
  Description of Artificial Sequence: Synthetic oligonucleotide
  Antisense strand to SEQ ID NO: 1698925
aucggaaggaauuacccac

SEQ ID NO: 1698927 - RNA, 19 nt, Artificial Sequence
  Description of Artificial Sequence: Synthetic oligonucleotide
  Sense strand starting at position 2277 of SEQ ID NO: 1561794
gguaauuccuuccgauaca

SEQ ID NO: 1698928 - RNA, 19 nt, Artificial Sequence
  Description of Artificial Sequence: Synthetic oligonucleotide
  Antisense strand to SEQ ID NO: 1698927
uguaucggaaggaauuacc

SEQ ID NO: 1698929 - RNA, 19 nt, Artificial Sequence
  Description of Artificial Sequence: Synthetic oligonucleotide
  Sense strand starting at position 2278 of SEQ ID NO: 1561794
guaauuccuuccgauacau

SEQ ID NO: 1698930 - RNA, 19 nt, Artificial Sequence
  Description of Artificial Sequence: Synthetic oligonucleotide
  Antisense strand to SEQ ID NO: 1698929
auguaucggaaggaauuac

SEQ ID NO: 1698931 - RNA, 19 nt, Artificial Sequence
  Description of Artificial Sequence: Synthetic oligonucleotide
  Sense strand starting at position 2509 of SEQ ID NO: 1561794
agaaauuacaggugaaugu

SEQ ID NO: 1698932 - RNA, 19 nt, Artificial Sequence
  Description of Artificial Sequence: Synthetic oligonucleotide
  Antisense strand to SEQ ID NO: 1698931
acauucaccuguaauuucu

SEQ ID NO: 1698933 - RNA, 19 nt, Artificial Sequence
  Description of Artificial Sequence: Synthetic oligonucleotide
  Sense strand starting at position 2516 of SEQ ID NO: 1561794
acaggugaauguugggaga

SEQ ID NO: 1698934 - RNA, 19 nt, Artificial Sequence
  Description of Artificial Sequence: Synthetic oligonucleotide
  Antisense strand to SEQ ID NO: 1698933
ucucccaacauucaccugu

SEQ ID NO: 1698935 - RNA, 19 nt, Artificial Sequence
  Description of Artificial Sequence: Synthetic oligonucleotide
  Sense strand starting at position 2564 of SEQ ID NO: 1561794
gagacuacaucaggaugua

SEQ ID NO: 1698936 - RNA, 19 nt, Artificial Sequence
  Description of Artificial Sequence: Synthetic oligonucleotide
  Antisense strand to SEQ ID NO: 1698935
uacauccugauguagucuc

SEQ ID NO: 1698937 - RNA, 19 nt, Artificial Sequence
  Description of Artificial Sequence: Synthetic oligonucleotide
  Sense strand starting at position 2567 of SEQ ID NO: 1561794
acuacaucaggauguauua

SEQ ID NO: 1698938 - RNA, 19 nt, Artificial Sequence
  Description of Artificial Sequence: Synthetic oligonucleotide
  Antisense strand to SEQ ID NO: 1698937
uaauacauccugauguagu

SEQ ID NO: 1698939 - RNA, 19 nt, Artificial Sequence
  Description of Artificial Sequence: Synthetic oligonucleotide
  Sense strand starting at position 2579 of SEQ ID NO: 1561794
uguauuaauagcuagaggu

SEQ ID NO: 1698940 - RNA, 19 nt, Artificial Sequence
  Description of Artificial Sequence: Synthetic oligonucleotide
  Antisense strand to SEQ ID NO: 1698939
accucuagcuauuaauaca

SEQ ID NO: 1698941 - RNA, 19 nt, Artificial Sequence
  Description of Artificial Sequence: Synthetic oligonucleotide
  Sense strand starting at position 2581 of SEQ ID NO: 1561794
uauuaauagcuagagguca

SEQ ID NO: 1698942 - RNA, 19 nt, Artificial Sequence
  Description of Artificial Sequence: Synthetic oligonucleotide
  Antisense strand to SEQ ID NO: 1698941
ugaccucuagcuauuaaua

SEQ ID NO: 1698943 - RNA, 19 nt, Artificial Sequence
  Description of Artificial Sequence: Synthetic oligonucleotide
  Sense strand starting at position 2655 of SEQ ID NO: 1561794
gcuagaugacccugggaaa

SEQ ID NO: 1698944 - RNA, 19 nt, Artificial Sequence
  Description of Artificial Sequence: Synthetic oligonucleotide
  Antisense strand to SEQ ID NO: 1698943
uuucccagggucaucuagc

SEQ ID NO: 1698945 - RNA, 19 nt, Artificial Sequence
  Description of Artificial Sequence: Synthetic oligonucleotide
  Sense strand starting at position 2697 of SEQ ID NO: 1561794
cuaucuguguuucugagga

SEQ ID NO: 1698946 - RNA, 19 nt, Artificial Sequence
  Description of Artificial Sequence: Synthetic oligonucleotide
  Antisense strand to SEQ ID NO: 1698945
uccucagaaacacagauag

SEQ ID NO: 1698947 - RNA, 19 nt, Artificial Sequence
  Description of Artificial Sequence: Synthetic oligonucleotide
  Sense strand starting at position 2699 of SEQ ID NO: 1561794
aucuguguuucugaggaug

SEQ ID NO: 1698948 - RNA, 19 nt, Artificial Sequence
  Description of Artificial Sequence: Synthetic oligonucleotide
  Antisense strand to SEQ ID NO: 1698947
cauccucagaaacacagau

SEQ ID NO: 1698949 - RNA, 19 nt, Artificial Sequence
  Description of Artificial Sequence: Synthetic oligonucleotide
  Sense strand starting at position 2701 of SEQ ID NO: 1561794
cuguguuucugaggauguu

SEQ ID NO: 1698950 - RNA, 19 nt, Artificial Sequence
  Description of Artificial Sequence: Synthetic oligonucleotide
  Antisense strand to SEQ ID NO: 1698949
aacauccucagaaacacag

SEQ ID NO: 1698951 - RNA, 19 nt, Artificial Sequence
  Description of Artificial Sequence: Synthetic oligonucleotide
  Sense strand starting at position 2847 of SEQ ID NO: 1561794
aaucuauaguaguagguga

SEQ ID NO: 1698952 - RNA, 19 nt, Artificial Sequence
  Description of Artificial Sequence: Synthetic oligonucleotide
  Antisense strand to SEQ ID NO: 1698951
ucaccuacuacuauagauu

SEQ ID NO: 1698953 - RNA, 19 nt, Artificial Sequence
  Description of Artificial Sequence: Synthetic oligonucleotide
  Sense strand starting at position 2946 of SEQ ID NO: 1561794
guuucuuccucccucaagu

SEQ ID NO: 1698954 - RNA, 19 nt, Artificial Sequence
  Description of Artificial Sequence: Synthetic oligonucleotide
  Antisense strand to SEQ ID NO: 1698953
acuugagggaggaagaaac

SEQ ID NO: 1698955 - RNA, 19 nt, Artificial Sequence
  Description of Artificial Sequence: Synthetic oligonucleotide
  Sense strand starting at position 3005 of SEQ ID NO: 1561794
agcccagaguucucauaaa

SEQ ID NO: 1698956 - RNA, 19 nt, Artificial Sequence
  Description of Artificial Sequence: Synthetic oligonucleotide
  Antisense strand to SEQ ID NO: 1698955
uuuaugagaacucugggcu

SEQ ID NO: 1698957 - RNA, 19 nt, Artificial Sequence
  Description of Artificial Sequence: Synthetic oligonucleotide
  Sense strand starting at position 3051 of SEQ ID NO: 1561794
gagcaucuaguauaugaua

SEQ ID NO: 1698958 - RNA, 19 nt, Artificial Sequence
  Description of Artificial Sequence: Synthetic oligonucleotide
  Antisense strand to SEQ ID NO: 1698957
uaucauauacuagaugcuc

SEQ ID NO: 1698959 - RNA, 19 nt, Artificial Sequence
  Description of Artificial Sequence: Synthetic oligonucleotide
  Sense strand starting at position 3056 of SEQ ID NO: 1561794
ucuaguauaugauagagac

SEQ ID NO: 1698960 - RNA, 19 nt, Artificial Sequence
  Description of Artificial Sequence: Synthetic oligonucleotide
  Antisense strand to SEQ ID NO: 1698959
gucucuaucauauacuaga

SEQ ID NO: 1698961 - RNA, 19 nt, Artificial Sequence
  Description of Artificial Sequence: Synthetic oligonucleotide
  Sense strand starting at position 3094 of SEQ ID NO: 1561794
agagauuguuccuaccuuc

SEQ ID NO: 1698962 - RNA, 19 nt, Artificial Sequence
  Description of Artificial Sequence: Synthetic oligonucleotide
  Antisense strand to SEQ ID NO: 1698961
gaagguaggaacaaucucu

SEQ ID NO: 1698963 - RNA, 19 nt, Artificial Sequence
  Description of Artificial Sequence: Synthetic oligonucleotide
  Sense strand starting at position 3128 of SEQ ID NO: 1561794
agaccagcauuguccaaau

SEQ ID NO: 1698964 - RNA, 19 nt, Artificial Sequence
  Description of Artificial Sequence: Synthetic oligonucleotide
  Antisense strand to SEQ ID NO: 1698963
auuuggacaaugcuggucu

SEQ ID NO: 1698965 - RNA, 19 nt, Artificial Sequence
  Description of Artificial Sequence: Synthetic oligonucleotide
  Sense strand starting at position 3130 of SEQ ID NO: 1561794
accagcauuguccaaauga

SEQ ID NO: 1698966 - RNA, 19 nt, Artificial Sequence
  Description of Artificial Sequence: Synthetic oligonucleotide
  Antisense strand to SEQ ID NO: 1698965
ucauuuggacaaugcuggu

SEQ ID NO: 1698967 - RNA, 19 nt, Artificial Sequence
  Description of Artificial Sequence: Synthetic oligonucleotide
  Sense strand starting at position 3190 of SEQ ID NO: 1561794
gaaacaaguuaauuguuga

SEQ ID NO: 1698968 - RNA, 19 nt, Artificial Sequence
  Description of Artificial Sequence: Synthetic oligonucleotide
  Antisense strand to SEQ ID NO: 1698967
ucaacaauuaacuuguuuc

SEQ ID NO: 1698969 - RNA, 19 nt, Artificial Sequence
  Description of Artificial Sequence: Synthetic oligonucleotide
  Sense strand starting at position 3402 of SEQ ID NO: 1561794
guagcuacauauuagacau

SEQ ID NO: 1698970 - RNA, 19 nt, Artificial Sequence
  Description of Artificial Sequence: Synthetic oligonucleotide
  Antisense strand to SEQ ID NO: 1698969
augucuaauauguagcuac

SEQ ID NO: 1698971 - RNA, 19 nt, Artificial Sequence
  Description of Artificial Sequence: Synthetic oligonucleotide
  Sense strand starting at position 3541 of SEQ ID NO: 1561794
ugagcugagaggugauaua

SEQ ID NO: 1698972 - RNA, 19 nt, Artificial Sequence
  Description of Artificial Sequence: Synthetic oligonucleotide
  Antisense strand to SEQ ID NO: 1698971
uauaucaccucucagcuca

SEQ ID NO: 1698973 - RNA, 19 nt, Artificial Sequence
  Description of Artificial Sequence: Synthetic oligonucleotide
  Sense strand starting at position 3574 of SEQ ID NO: 1561794
cuguuuaaagaguggaaag

SEQ ID NO: 1698974 - RNA, 19 nt, Artificial Sequence
  Description of Artificial Sequence: Synthetic oligonucleotide
  Antisense strand to SEQ ID NO: 1698973
cuuuccacucuuuaaacag

SEQ ID NO: 1698975 - RNA, 19 nt, Artificial Sequence
  Description of Artificial Sequence: Synthetic oligonucleotide
  Sense strand starting at position 46 of SEQ ID NO: 1561795
agaccuuacuuggccaaau

SEQ ID NO: 1698976 - RNA, 19 nt, Artificial Sequence
  Description of Artificial Sequence: Synthetic oligonucleotide
  Antisense strand to SEQ ID NO: 1698975
auuuggccaaguaaggucu

SEQ ID NO: 1698977 - RNA, 19 nt, Artificial Sequence
  Description of Artificial Sequence: Synthetic oligonucleotide
  Sense strand starting at position 174 of SEQ ID NO: 1561795
ugacucugcagauggaaau

SEQ ID NO: 1698978 - RNA, 19 nt, Artificial Sequence
  Description of Artificial Sequence: Synthetic oligonucleotide
  Antisense strand to SEQ ID NO: 1698977
auuuccaucugcagaguca

SEQ ID NO: 1698979 - RNA, 19 nt, Artificial Sequence
  Description of Artificial Sequence: Synthetic oligonucleotide
  Sense strand starting at position 583 of SEQ ID NO: 1561795
guuucuacccagcauguuu

SEQ ID NO: 1698980 - RNA, 19 nt, Artificial Sequence
  Description of Artificial Sequence: Synthetic oligonucleotide
  Antisense strand to SEQ ID NO: 1698979
aaacaugcuggguagaaac

SEQ ID NO: 1698981 - RNA, 19 nt, Artificial Sequence
  Description of Artificial Sequence: Synthetic oligonucleotide
  Sense strand starting at position 687 of SEQ ID NO: 1561795
ccuccuccugacugaagau

SEQ ID NO: 1698982 - RNA, 19 nt, Artificial Sequence
  Description of Artificial Sequence: Synthetic oligonucleotide
  Antisense strand to SEQ ID NO: 1698981
aucuucagucaggaggagg

SEQ ID NO: 1698983 - RNA, 19 nt, Artificial Sequence
  Description of Artificial Sequence: Synthetic oligonucleotide
  Sense strand starting at position 864 of SEQ ID NO: 1561795
ggaccucuccucugacaag

SEQ ID NO: 1698984 - RNA, 19 nt, Artificial Sequence
  Description of Artificial Sequence: Synthetic oligonucleotide
  Antisense strand to SEQ ID NO: 1698983
cuugucagaggagaggucc

SEQ ID NO: 1698985 - RNA, 19 nt, Artificial Sequence
  Description of Artificial Sequence: Synthetic oligonucleotide
  Sense strand starting at position 1078 of SEQ ID NO: 1561795
gcccuuuggucugguggua

SEQ ID NO: 1698986 - RNA, 19 nt, Artificial Sequence
  Description of Artificial Sequence: Synthetic oligonucleotide
  Antisense strand to SEQ ID NO: 1698985
uaccaccagaccaaagggc

SEQ ID NO: 1698987 - RNA, 19 nt, Artificial Sequence
  Description of Artificial Sequence: Synthetic oligonucleotide
  Sense strand starting at position 1341 of SEQ ID NO: 1561795
gugggcagugcucaccaau

SEQ ID NO: 1698988 - RNA, 19 nt, Artificial Sequence
  Description of Artificial Sequence: Synthetic oligonucleotide
  Antisense strand to SEQ ID NO: 1698987
auuggugagcacugcccac

SEQ ID NO: 1698989 - RNA, 19 nt, Artificial Sequence
  Description of Artificial Sequence: Synthetic oligonucleotide
  Sense strand starting at position 1344 of SEQ ID NO: 1561795
ggcagugcucaccaaugaa

SEQ ID NO: 1698990 - RNA, 19 nt, Artificial Sequence
  Description of Artificial Sequence: Synthetic oligonucleotide
  Antisense strand to SEQ ID NO: 1698989
uucauuggugagcacugcc

SEQ ID NO: 1698991 - RNA, 19 nt, Artificial Sequence
  Description of Artificial Sequence: Synthetic oligonucleotide
  Sense strand starting at position 1347 of SEQ ID NO: 1561795
agugcucaccaaugaaguu

SEQ ID NO: 1698992 - RNA, 19 nt, Artificial Sequence
  Description of Artificial Sequence: Synthetic oligonucleotide
  Antisense strand to SEQ ID NO: 1698991
aacuucauuggugagcacu

SEQ ID NO: 1698993 - RNA, 19 nt, Artificial Sequence
  Description of Artificial Sequence: Synthetic oligonucleotide
  Sense strand starting at position 1356 of SEQ ID NO: 1561795
caaugaaguuuccgaggua

SEQ ID NO: 1698994 - RNA, 19 nt, Artificial Sequence
  Description of Artificial Sequence: Synthetic oligonucleotide
  Antisense strand to SEQ ID NO: 1698993
uaccucggaaacuucauug

SEQ ID NO: 1698995 - RNA, 19 nt, Artificial Sequence
  Description of Artificial Sequence: Synthetic oligonucleotide
  Sense strand starting at position 1357 of SEQ ID NO: 1561795
aaugaaguuuccgagguag

SEQ ID NO: 1698996 - RNA, 19 nt, Artificial Sequence
  Description of Artificial Sequence: Synthetic oligonucleotide
  Antisense strand to SEQ ID NO: 1698995
cuaccucggaaacuucauu

SEQ ID NO: 1698997 - RNA, 19 nt, Artificial Sequence
  Description of Artificial Sequence: Synthetic oligonucleotide
  Sense strand starting at position 1359 of SEQ ID NO: 1561795
ugaaguuuccgagguagag

SEQ ID NO: 1698998 - RNA, 19 nt, Artificial Sequence
  Description of Artificial Sequence: Synthetic oligonucleotide
  Antisense strand to SEQ ID NO: 1698997
cucuaccucggaaacuuca

SEQ ID NO: 1698999 - RNA, 19 nt, Artificial Sequence
  Description of Artificial Sequence: Synthetic oligonucleotide
  Sense strand starting at position 1510 of SEQ ID NO: 1561795
ggagcacucucuucccuuu

SEQ ID NO: 1699000 - RNA, 19 nt, Artificial Sequence
  Description of Artificial Sequence: Synthetic oligonucleotide
  Antisense strand to SEQ ID NO: 1698999
aaagggaagagagugcucc

SEQ ID NO: 1699001 - RNA, 19 nt, Artificial Sequence
  Description of Artificial Sequence: Synthetic oligonucleotide
  Sense strand starting at position 1533 of SEQ ID NO: 1561795
ggcccugaguccucuguga

SEQ ID NO: 1699002 - RNA, 19 nt, Artificial Sequence
  Description of Artificial Sequence: Synthetic oligonucleotide
  Antisense strand to SEQ ID NO: 1699001
ucacagaggacucagggcc

SEQ ID NO: 1699003 - RNA, 19 nt, Artificial Sequence
  Description of Artificial Sequence: Synthetic oligonucleotide
  Sense strand starting at position 1535 of SEQ ID NO: 1561795
cccugaguccucugugaga

SEQ ID NO: 1699004 - RNA, 19 nt, Artificial Sequence
  Description of Artificial Sequence: Synthetic oligonucleotide
  Antisense strand to SEQ ID NO: 1699003
ucucacagaggacucaggg

SEQ ID NO: 1699005 - RNA, 19 nt, Artificial Sequence
  Description of Artificial Sequence: Synthetic oligonucleotide
  Sense strand starting at position 2105 of SEQ ID NO: 1561795
cuaccuuggucaugccauu

SEQ ID NO: 1699006 - RNA, 19 nt, Artificial Sequence
  Description of Artificial Sequence: Synthetic oligonucleotide
  Antisense strand to SEQ ID NO: 1699005
aauggcaugaccaagguag

SEQ ID NO: 1699007 - RNA, 19 nt, Artificial Sequence
  Description of Artificial Sequence: Synthetic oligonucleotide
  Sense strand starting at position 2733 of SEQ ID NO: 1561795
acgggauaaguggguaauu

SEQ ID NO: 1699008 - RNA, 19 nt, Artificial Sequence
  Description of Artificial Sequence: Synthetic oligonucleotide
  Antisense strand to SEQ ID NO: 1699007
aauuacccacuuaucccgu

SEQ ID NO: 1699009 - RNA, 19 nt, Artificial Sequence
  Description of Artificial Sequence: Synthetic oligonucleotide
  Sense strand starting at position 2742 of SEQ ID NO: 1561795
guggguaauuccuuccgau

SEQ ID NO: 1699010 - RNA, 19 nt, Artificial Sequence
  Description of Artificial Sequence: Synthetic oligonucleotide
  Antisense strand to SEQ ID NO: 1699009
aucggaaggaauuacccac

SEQ ID NO: 1699011 - RNA, 19 nt, Artificial Sequence
  Description of Artificial Sequence: Synthetic oligonucleotide
  Sense strand starting at position 2745 of SEQ ID NO: 1561795
gguaauuccuuccgauaca

SEQ ID NO: 1699012 - RNA, 19 nt, Artificial Sequence
  Description of Artificial Sequence: Synthetic oligonucleotide
  Antisense strand to SEQ ID NO: 1699011
uguaucggaaggaauuacc

SEQ ID NO: 1699013 - RNA, 19 nt, Artificial Sequence
  Description of Artificial Sequence: Synthetic oligonucleotide
  Sense strand starting at position 2746 of SEQ ID NO: 1561795
guaauuccuuccgauacau

SEQ ID NO: 1699014 - RNA, 19 nt, Artificial Sequence
  Description of Artificial Sequence: Synthetic oligonucleotide
  Antisense strand to SEQ ID NO: 1699013
auguaucggaaggaauuac

SEQ ID NO: 1699015 - RNA, 19 nt, Artificial Sequence
  Description of Artificial Sequence: Synthetic oligonucleotide
  Sense strand starting at position 2977 of SEQ ID NO: 1561795
agaaauuacaggugaaugu

SEQ ID NO: 1699016 - RNA, 19 nt, Artificial Sequence
  Description of Artificial Sequence: Synthetic oligonucleotide
  Antisense strand to SEQ ID NO: 1699015
acauucaccuguaauuucu

SEQ ID NO: 1699017 - RNA, 19 nt, Artificial Sequence
  Description of Artificial Sequence: Synthetic oligonucleotide
  Sense strand starting at position 2984 of SEQ ID NO: 1561795
acaggugaauguugggaga

SEQ ID NO: 1699018 - RNA, 19 nt, Artificial Sequence
  Description of Artificial Sequence: Synthetic oligonucleotide
  Antisense strand to SEQ ID NO: 1699017
ucucccaacauucaccugu

SEQ ID NO: 1699019 - RNA, 19 nt, Artificial Sequence
  Description of Artificial Sequence: Synthetic oligonucleotide
  Sense strand starting at position 3032 of SEQ ID NO: 1561795
gagacuacaucaggaugua

SEQ ID NO: 1699020 - RNA, 19 nt, Artificial Sequence
  Description of Artificial Sequence: Synthetic oligonucleotide
  Antisense strand to SEQ ID NO: 1699019
uacauccugauguagucuc

SEQ ID NO: 1699021 - RNA, 19 nt, Artificial Sequence
  Description of Artificial Sequence: Synthetic oligonucleotide
  Sense strand starting at position 3035 of SEQ ID NO: 1561795
acuacaucaggauguauua

SEQ ID NO: 1699022 - RNA, 19 nt, Artificial Sequence
  Description of Artificial Sequence: Synthetic oligonucleotide
  Antisense strand to SEQ ID NO: 1699021
uaauacauccugauguagu

SEQ ID NO: 1699023 - RNA, 19 nt, Artificial Sequence
  Description of Artificial Sequence: Synthetic oligonucleotide
  Sense strand starting at position 3047 of SEQ ID NO: 1561795
uguauuaauagcuagaggu

SEQ ID NO: 1699024 - RNA, 19 nt, Artificial Sequence
  Description of Artificial Sequence: Synthetic oligonucleotide
  Antisense strand to SEQ ID NO: 1699023
accucuagcuauuaauaca

SEQ ID NO: 1699025 - RNA, 19 nt, Artificial Sequence
  Description of Artificial Sequence: Synthetic oligonucleotide
  Sense strand starting at position 3049 of SEQ ID NO: 1561795
uauuaauagcuagagguca

SEQ ID NO: 1699026 - RNA, 19 nt, Artificial Sequence
  Description of Artificial Sequence: Synthetic oligonucleotide
  Antisense strand to SEQ ID NO: 1699025
ugaccucuagcuauuaaua

SEQ ID NO: 1699027 - RNA, 19 nt, Artificial Sequence
  Description of Artificial Sequence: Synthetic oligonucleotide
  Sense strand starting at position 3123 of SEQ ID NO: 1561795
gcuagaugacccugggaaa

SEQ ID NO: 1699028 - RNA, 19 nt, Artificial Sequence
  Description of Artificial Sequence: Synthetic oligonucleotide
  Antisense strand to SEQ ID NO: 1699027
uuucccagggucaucuagc

SEQ ID NO: 1699029 - RNA, 19 nt, Artificial Sequence
  Description of Artificial Sequence: Synthetic oligonucleotide
  Sense strand starting at position 3165 of SEQ ID NO: 1561795
cuaucuguguuucugagga

SEQ ID NO: 1699030 - RNA, 19 nt, Artificial Sequence
  Description of Artificial Sequence: Synthetic oligonucleotide
  Antisense strand to SEQ ID NO: 1699029
uccucagaaacacagauag

SEQ ID NO: 1699031 - RNA, 19 nt, Artificial Sequence
  Description of Artificial Sequence: Synthetic oligonucleotide
  Sense strand starting at position 3167 of SEQ ID NO: 1561795
aucuguguuucugaggaug

SEQ ID NO: 1699032 - RNA, 19 nt, Artificial Sequence
  Description of Artificial Sequence: Synthetic oligonucleotide
  Antisense strand to SEQ ID NO: 1699031
cauccucagaaacacagau

SEQ ID NO: 1699033 - RNA, 19 nt, Artificial Sequence
  Description of Artificial Sequence: Synthetic oligonucleotide
  Sense strand starting at position 3169 of SEQ ID NO: 1561795
cuguguuucugaggauguu

SEQ ID NO: 1699034 - RNA, 19 nt, Artificial Sequence
  Description of Artificial Sequence: Synthetic oligonucleotide
  Antisense strand to SEQ ID NO: 1699033
aacauccucagaaacacag

SEQ ID NO: 1699035 - RNA, 19 nt, Artificial Sequence
  Description of Artificial Sequence: Synthetic oligonucleotide
  Sense strand starting at position 3315 of SEQ ID NO: 1561795
aaucuauaguaguagguga

SEQ ID NO: 1699036 - RNA, 19 nt, Artificial Sequence
  Description of Artificial Sequence: Synthetic oligonucleotide
  Antisense strand to SEQ ID NO: 1699035
ucaccuacuacuauagauu

SEQ ID NO: 1699037 - RNA, 19 nt, Artificial Sequence
  Description of Artificial Sequence: Synthetic oligonucleotide
  Sense strand starting at position 3414 of SEQ ID NO: 1561795
guuucuuccucccucaagu

SEQ ID NO: 1699038 - RNA, 19 nt, Artificial Sequence
  Description of Artificial Sequence: Synthetic oligonucleotide
  Antisense strand to SEQ ID NO: 1699037
acuugagggaggaagaaac

SEQ ID NO: 1699039 - RNA, 19 nt, Artificial Sequence
  Description of Artificial Sequence: Synthetic oligonucleotide
  Sense strand starting at position 3473 of SEQ ID NO: 1561795
agcccagaguucucauaaa

SEQ ID NO: 1699040 - RNA, 19 nt, Artificial Sequence
  Description of Artificial Sequence: Synthetic oligonucleotide
  Antisense strand to SEQ ID NO: 1699039
uuuaugagaacucugggcu

SEQ ID NO: 1699041 - RNA, 19 nt, Artificial Sequence
  Description of Artificial Sequence: Synthetic oligonucleotide
  Sense strand starting at position 3519 of SEQ ID NO: 1561795
gagcaucuaguauaugaua

SEQ ID NO: 1699042 - RNA, 19 nt, Artificial Sequence
  Description of Artificial Sequence: Synthetic oligonucleotide
  Antisense strand to SEQ ID NO: 1699041
uaucauauacuagaugcuc

SEQ ID NO: 1699043 - RNA, 19 nt, Artificial Sequence
  Description of Artificial Sequence: Synthetic oligonucleotide
  Sense strand starting at position 3524 of SEQ ID NO: 1561795
ucuaguauaugauagagac

SEQ ID NO: 1699044 - RNA, 19 nt, Artificial Sequence
  Description of Artificial Sequence: Synthetic oligonucleotide
  Antisense strand to SEQ ID NO: 1699043
gucucuaucauauacuaga

SEQ ID NO: 1699045 - RNA, 19 nt, Artificial Sequence
  Description of Artificial Sequence: Synthetic oligonucleotide
  Sense strand starting at position 3562 of SEQ ID NO: 1561795
agagauuguuccuaccuuc

SEQ ID NO: 1699046 - RNA, 19 nt, Artificial Sequence
  Description of Artificial Sequence: Synthetic oligonucleotide
  Antisense strand to SEQ ID NO: 1699045
gaagguaggaacaaucucu

SEQ ID NO: 1699047 - RNA, 19 nt, Artificial Sequence
  Description of Artificial Sequence: Synthetic oligonucleotide
  Sense strand starting at position 3596 of SEQ ID NO: 1561795
agaccagcauuguccaaau

SEQ ID NO: 1699048 - RNA, 19 nt, Artificial Sequence
  Description of Artificial Sequence: Synthetic oligonucleotide
  Antisense strand to SEQ ID NO: 1699047
auuuggacaaugcuggucu

SEQ ID NO: 1699049 - RNA, 19 nt, Artificial Sequence
  Description of Artificial Sequence: Synthetic oligonucleotide
  Sense strand starting at position 3598 of SEQ ID NO: 1561795
accagcauuguccaaauga

SEQ ID NO: 1699050 - RNA, 19 nt, Artificial Sequence
  Description of Artificial Sequence: Synthetic oligonucleotide
  Antisense strand to SEQ ID NO: 1699049
ucauuuggacaaugcuggu

SEQ ID NO: 1699051 - RNA, 19 nt, Artificial Sequence
  Description of Artificial Sequence: Synthetic oligonucleotide
  Sense strand starting at position 3658 of SEQ ID NO: 1561795
gaaacaaguuaauuguuga

SEQ ID NO: 1699052 - RNA, 19 nt, Artificial Sequence
  Description of Artificial Sequence: Synthetic oligonucleotide
  Antisense strand to SEQ ID NO: 1699051
ucaacaauuaacuuguuuc

SEQ ID NO: 1699053 - RNA, 19 nt, Artificial Sequence
  Description of Artificial Sequence: Synthetic oligonucleotide
  Sense strand starting at position 3870 of SEQ ID NO: 1561795
guagcuacauauuagacau

SEQ ID NO: 1699054 - RNA, 19 nt, Artificial Sequence
  Description of Artificial Sequence: Synthetic oligonucleotide
  Antisense strand to SEQ ID NO: 1699053
augucuaauauguagcuac

SEQ ID NO: 1699055 - RNA, 19 nt, Artificial Sequence
  Description of Artificial Sequence: Synthetic oligonucleotide
  Sense strand starting at position 406 of SEQ ID NO: 1561796
ggaauuagcguccaucaau

SEQ ID NO: 1699056 - RNA, 19 nt, Artificial Sequence
  Description of Artificial Sequence: Synthetic oligonucleotide
  Antisense strand to SEQ ID NO: 1699055
auugauggacgcuaauucc

SEQ ID NO: 1699057 - RNA, 19 nt, Artificial Sequence
  Description of Artificial Sequence: Synthetic oligonucleotide
  Sense strand starting at position 412 of SEQ ID NO: 1561796
agcguccaucaauagguaa

SEQ ID NO: 1699058 - RNA, 19 nt, Artificial Sequence
  Description of Artificial Sequence: Synthetic oligonucleotide
  Antisense strand to SEQ ID NO: 1699057
uuaccuauugauggacgcu

SEQ ID NO: 1699059 - RNA, 19 nt, Artificial Sequence
  Description of Artificial Sequence: Synthetic oligonucleotide
  Sense strand starting at position 671 of SEQ ID NO: 1561796
ggagguggcagugaacuaa

SEQ ID NO: 1699060 - RNA, 19 nt, Artificial Sequence
  Description of Artificial Sequence: Synthetic oligonucleotide
  Antisense strand to SEQ ID NO: 1699059
uuaguucacugccaccucc

SEQ ID NO: 1699061 - RNA, 19 nt, Artificial Sequence
  Description of Artificial Sequence: Synthetic oligonucleotide
  Sense strand starting at position 675 of SEQ ID NO: 1561796
guggcagugaacuaagaug

SEQ ID NO: 1699062 - RNA, 19 nt, Artificial Sequence
  Description of Artificial Sequence: Synthetic oligonucleotide
  Antisense strand to SEQ ID NO: 1699061
caucuuaguucacugccac

SEQ ID NO: 1699063 - RNA, 19 nt, Artificial Sequence
  Description of Artificial Sequence: Synthetic oligonucleotide
  Sense strand starting at position 776 of SEQ ID NO: 1561796
ggugauggauauucuauaa

SEQ ID NO: 1699064 - RNA, 19 nt, Artificial Sequence
  Description of Artificial Sequence: Synthetic oligonucleotide
  Antisense strand to SEQ ID NO: 1699063
uuauagaauauccaucacc

SEQ ID NO: 1699065 - RNA, 19 nt, Artificial Sequence
  Description of Artificial Sequence: Synthetic oligonucleotide
  Sense strand starting at position 902 of SEQ ID NO: 1561796
agcuuaagaagugauguga

SEQ ID NO: 1699066 - RNA, 19 nt, Artificial Sequence
  Description of Artificial Sequence: Synthetic oligonucleotide
  Antisense strand to SEQ ID NO: 1699065
ucacaucacuucuuaagcu

SEQ ID NO: 1699067 - RNA, 19 nt, Artificial Sequence
  Description of Artificial Sequence: Synthetic oligonucleotide
  Sense strand starting at position 958 of SEQ ID NO: 1561796
uuuguaaugauguggagau

SEQ ID NO: 1699068 - RNA, 19 nt, Artificial Sequence
  Description of Artificial Sequence: Synthetic oligonucleotide
  Antisense strand to SEQ ID NO: 1699067
aucuccacaucauuacaaa

SEQ ID NO: 1699069 - RNA, 19 nt, Artificial Sequence
  Description of Artificial Sequence: Synthetic oligonucleotide
  Sense strand starting at position 974 of SEQ ID NO: 1561796
gauauugugguguaauaau

SEQ ID NO: 1699070 - RNA, 19 nt, Artificial Sequence
  Description of Artificial Sequence: Synthetic oligonucleotide
  Antisense strand to SEQ ID NO: 1699069
auuauuacaccacaauauc

SEQ ID NO: 1699071 - RNA, 19 nt, Artificial Sequence
  Description of Artificial Sequence: Synthetic oligonucleotide
  Sense strand starting at position 1029 of SEQ ID NO: 1561796
ggcuaaacuguauaaacca

SEQ ID NO: 1699072 - RNA, 19 nt, Artificial Sequence
  Description of Artificial Sequence: Synthetic oligonucleotide
  Antisense strand to SEQ ID NO: 1699071
ugguuuauacaguuuagcc

SEQ ID NO: 1699073 - RNA, 19 nt, Artificial Sequence
  Description of Artificial Sequence: Synthetic oligonucleotide
  Sense strand starting at position 1068 of SEQ ID NO: 1561796
gaagucauaugacuacugu

SEQ ID NO: 1699074 - RNA, 19 nt, Artificial Sequence
  Description of Artificial Sequence: Synthetic oligonucleotide
  Antisense strand to SEQ ID NO: 1699073
acaguagucauaugacuuc

SEQ ID NO: 1699075 - RNA, 19 nt, Artificial Sequence
  Description of Artificial Sequence: Synthetic oligonucleotide
  Sense strand starting at position 1221 of SEQ ID NO: 1561796
ccaagcugugaggauuaca

SEQ ID NO: 1699076 - RNA, 19 nt, Artificial Sequence
  Description of Artificial Sequence: Synthetic oligonucleotide
  Antisense strand to SEQ ID NO: 1699075
uguaauccucacagcuugg

SEQ ID NO: 1699077 - RNA, 19 nt, Artificial Sequence
  Description of Artificial Sequence: Synthetic oligonucleotide
  Sense strand starting at position 1459 of SEQ ID NO: 1561796
cgcugaauaacagauaugu

SEQ ID NO: 1699078 - RNA, 19 nt, Artificial Sequence
  Description of Artificial Sequence: Synthetic oligonucleotide
  Antisense strand to SEQ ID NO: 1699077
acauaucuguuauucagcg

SEQ ID NO: 1699079 - RNA, 19 nt, Artificial Sequence
  Description of Artificial Sequence: Synthetic oligonucleotide
  Sense strand starting at position 1488 of SEQ ID NO: 1561796
gggacuaaagauuguaucu

SEQ ID NO: 1699080 - RNA, 19 nt, Artificial Sequence
  Description of Artificial Sequence: Synthetic oligonucleotide
  Antisense strand to SEQ ID NO: 1699079
agauacaaucuuuaguccc

SEQ ID NO: 1699081 - RNA, 19 nt, Artificial Sequence
  Description of Artificial Sequence: Synthetic oligonucleotide
  Sense strand starting at position 1546 of SEQ ID NO: 1561796
acauaaagugcuuggcaga

SEQ ID NO: 1699082 - RNA, 19 nt, Artificial Sequence
  Description of Artificial Sequence: Synthetic oligonucleotide
  Antisense strand to SEQ ID NO: 1699081
ucugccaagcacuuuaugu

SEQ ID NO: 1699083 - RNA, 19 nt, Artificial Sequence
  Description of Artificial Sequence: Synthetic oligonucleotide
  Sense strand starting at position 1989 of SEQ ID NO: 1561796
ugcgcaaagguuucuguca

SEQ ID NO: 1699084 - RNA, 19 nt, Artificial Sequence
  Description of Artificial Sequence: Synthetic oligonucleotide
  Antisense strand to SEQ ID NO: 1699083
ugacagaaaccuuugcgca

SEQ ID NO: 1699085 - RNA, 19 nt, Artificial Sequence
  Description of Artificial Sequence: Synthetic oligonucleotide
  Sense strand starting at position 2075 of SEQ ID NO: 1561796
ccgccaggauucuuggaaa

SEQ ID NO: 1699086 - RNA, 19 nt, Artificial Sequence
  Description of Artificial Sequence: Synthetic oligonucleotide
  Antisense strand to SEQ ID NO: 1699085
uuuccaagaauccuggcgg

SEQ ID NO: 1699087 - RNA, 19 nt, Artificial Sequence
  Description of Artificial Sequence: Synthetic oligonucleotide
  Sense strand starting at position 2134 of SEQ ID NO: 1561796
gugcgcuaagcuguggaaa

SEQ ID NO: 1699088 - RNA, 19 nt, Artificial Sequence
  Description of Artificial Sequence: Synthetic oligonucleotide
  Antisense strand to SEQ ID NO: 1699087
uuuccacagcuuagcgcac

SEQ ID NO: 1699089 - RNA, 19 nt, Artificial Sequence
  Description of Artificial Sequence: Synthetic oligonucleotide
  Sense strand starting at position 2346 of SEQ ID NO: 1561796
gcucguguaguuccaguua

SEQ ID NO: 1699090 - RNA, 19 nt, Artificial Sequence
  Description of Artificial Sequence: Synthetic oligonucleotide
  Antisense strand to SEQ ID NO: 1699089
uaacuggaacuacacgagc

SEQ ID NO: 1699091 - RNA, 19 nt, Artificial Sequence
  Description of Artificial Sequence: Synthetic oligonucleotide
  Sense strand starting at position 2560 of SEQ ID NO: 1561796
gcucucaauggaggucuaa

SEQ ID NO: 1699092 - RNA, 19 nt, Artificial Sequence
  Description of Artificial Sequence: Synthetic oligonucleotide
  Antisense strand to SEQ ID NO: 1699091
uuagaccuccauugagagc

SEQ ID NO: 1699093 - RNA, 19 nt, Artificial Sequence
  Description of Artificial Sequence: Synthetic oligonucleotide
  Sense strand starting at position 2742 of SEQ ID NO: 1561796
cgagucuccggguaagaug

SEQ ID NO: 1699094 - RNA, 19 nt, Artificial Sequence
  Description of Artificial Sequence: Synthetic oligonucleotide
  Antisense strand to SEQ ID NO: 1699093
caucuuacccggagacucg

SEQ ID NO: 1699095 - RNA, 19 nt, Artificial Sequence
  Description of Artificial Sequence: Synthetic oligonucleotide
  Sense strand starting at position 2753 of SEQ ID NO: 1561796
guaagaugccgugcaagcu

SEQ ID NO: 1699096 - RNA, 19 nt, Artificial Sequence
  Description of Artificial Sequence: Synthetic oligonucleotide
  Antisense strand to SEQ ID NO: 1699095
agcuugcacggcaucuuac

SEQ ID NO: 1699097 - RNA, 19 nt, Artificial Sequence
  Description of Artificial Sequence: Synthetic oligonucleotide
  Sense strand starting at position 2775 of SEQ ID NO: 1561796
agaugaauugguuagggcu

SEQ ID NO: 1699098 - RNA, 19 nt, Artificial Sequence
  Description of Artificial Sequence: Synthetic oligonucleotide
  Antisense strand to SEQ ID NO: 1699097
agcccuaaccaauucaucu

SEQ ID NO: 1699099 - RNA, 19 nt, Artificial Sequence
  Description of Artificial Sequence: Synthetic oligonucleotide
  Sense strand starting at position 2861 of SEQ ID NO: 1561796
cuguguguucugucuuguu

SEQ ID NO: 1699100 - RNA, 19 nt, Artificial Sequence
  Description of Artificial Sequence: Synthetic oligonucleotide
  Antisense strand to SEQ ID NO: 1699099
aacaagacagaacacacag

SEQ ID NO: 1699101 - RNA, 19 nt, Artificial Sequence
  Description of Artificial Sequence: Synthetic oligonucleotide
  Sense strand starting at position 2863 of SEQ ID NO: 1561796
guguguucugucuuguucu

SEQ ID NO: 1699102 - RNA, 19 nt, Artificial Sequence
  Description of Artificial Sequence: Synthetic oligonucleotide
  Antisense strand to SEQ ID NO: 1699101
agaacaagacagaacacac

SEQ ID NO: 1699103 - RNA, 19 nt, Artificial Sequence
  Description of Artificial Sequence: Synthetic oligonucleotide
  Sense strand starting at position 2865 of SEQ ID NO: 1561796
guguucugucuuguucuca

SEQ ID NO: 1699104 - RNA, 19 nt, Artificial Sequence
  Description of Artificial Sequence: Synthetic oligonucleotide
  Antisense strand to SEQ ID NO: 1699103
ugagaacaagacagaacac

SEQ ID NO: 1699105 - RNA, 19 nt, Artificial Sequence
  Description of Artificial Sequence: Synthetic oligonucleotide
  Sense strand starting at position 2948 of SEQ ID NO: 1561796
cuggguccucuaggaguaa

SEQ ID NO: 1699106 - RNA, 19 nt, Artificial Sequence
  Description of Artificial Sequence: Synthetic oligonucleotide
  Antisense strand to SEQ ID NO: 1699105
uuacuccuagaggacccag

SEQ ID NO: 1699107 - RNA, 19 nt, Artificial Sequence
  Description of Artificial Sequence: Synthetic oligonucleotide
  Sense strand starting at position 2982 of SEQ ID NO: 1561796
acaugcugccguuuaguga

SEQ ID NO: 1699108 - RNA, 19 nt, Artificial Sequence
  Description of Artificial Sequence: Synthetic oligonucleotide
  Antisense strand to SEQ ID NO: 1699107
ucacuaaacggcagcaugu

SEQ ID NO: 1699109 - RNA, 19 nt, Artificial Sequence
  Description of Artificial Sequence: Synthetic oligonucleotide
  Sense strand starting at position 3009 of SEQ ID NO: 1561796
ccacauuacugugcugaac

SEQ ID NO: 1699110 - RNA, 19 nt, Artificial Sequence
  Description of Artificial Sequence: Synthetic oligonucleotide
  Antisense strand to SEQ ID NO: 1699109
guucagcacaguaaugugg

SEQ ID NO: 1699111 - RNA, 19 nt, Artificial Sequence
  Description of Artificial Sequence: Synthetic oligonucleotide
  Sense strand starting at position 3037 of SEQ ID NO: 1561796
acguuaucuccgguagcuu

SEQ ID NO: 1699112 - RNA, 19 nt, Artificial Sequence
  Description of Artificial Sequence: Synthetic oligonucleotide
  Antisense strand to SEQ ID NO: 1699111
aagcuaccggagauaacgu

SEQ ID NO: 1699113 - RNA, 19 nt, Artificial Sequence
  Description of Artificial Sequence: Synthetic oligonucleotide
  Sense strand starting at position 3057 of SEQ ID NO: 1561796
agggaaguaucgguaaccu

SEQ ID NO: 1699114 - RNA, 19 nt, Artificial Sequence
  Description of Artificial Sequence: Synthetic oligonucleotide
  Antisense strand to SEQ ID NO: 1699113
agguuaccgauacuucccu

SEQ ID NO: 1699115 - RNA, 19 nt, Artificial Sequence
  Description of Artificial Sequence: Synthetic oligonucleotide
  Sense strand starting at position 3065 of SEQ ID NO: 1561796
aucgguaaccucgauacuu

SEQ ID NO: 1699116 - RNA, 19 nt, Artificial Sequence
  Description of Artificial Sequence: Synthetic oligonucleotide
  Antisense strand to SEQ ID NO: 1699115
aaguaucgagguuaccgau

SEQ ID NO: 1699117 - RNA, 19 nt, Artificial Sequence
  Description of Artificial Sequence: Synthetic oligonucleotide
  Sense strand starting at position 3067 of SEQ ID NO: 1561796
cgguaaccucgauacuuua

SEQ ID NO: 1699118 - RNA, 19 nt, Artificial Sequence
  Description of Artificial Sequence: Synthetic oligonucleotide
  Antisense strand to SEQ ID NO: 1699117
uaaaguaucgagguuaccg

SEQ ID NO: 1699119 - RNA, 19 nt, Artificial Sequence
  Description of Artificial Sequence: Synthetic oligonucleotide
  Sense strand starting at position 3223 of SEQ ID NO: 1561796
uugacuuuacugcgaagaa

SEQ ID NO: 1699120 - RNA, 19 nt, Artificial Sequence
  Description of Artificial Sequence: Synthetic oligonucleotide
  Antisense strand to SEQ ID NO: 1699119
uucuucgcaguaaagucaa

SEQ ID NO: 1699121 - RNA, 19 nt, Artificial Sequence
  Description of Artificial Sequence: Synthetic oligonucleotide
  Sense strand starting at position 3257 of SEQ ID NO: 1561796
ccguaaccagaucaaaguu

SEQ ID NO: 1699122 - RNA, 19 nt, Artificial Sequence
  Description of Artificial Sequence: Synthetic oligonucleotide
  Antisense strand to SEQ ID NO: 1699121
aacuuugaucugguuacgg

SEQ ID NO: 1699123 - RNA, 19 nt, Artificial Sequence
  Description of Artificial Sequence: Synthetic oligonucleotide
  Sense strand starting at position 3271 of SEQ ID NO: 1561796
aaguuaguauuacuggcaa

SEQ ID NO: 1699124 - RNA, 19 nt, Artificial Sequence
  Description of Artificial Sequence: Synthetic oligonucleotide
  Antisense strand to SEQ ID NO: 1699123
uugccaguaauacuaacuu

SEQ ID NO: 1699125 - RNA, 19 nt, Artificial Sequence
  Description of Artificial Sequence: Synthetic oligonucleotide
  Sense strand starting at position 3456 of SEQ ID NO: 1561796
ucucaaagucaugaaagca

SEQ ID NO: 1699126 - RNA, 19 nt, Artificial Sequence
  Description of Artificial Sequence: Synthetic oligonucleotide
  Antisense strand to SEQ ID NO: 1699125
ugcuuucaugacuuugaga

SEQ ID NO: 1699127 - RNA, 19 nt, Artificial Sequence
  Description of Artificial Sequence: Synthetic oligonucleotide
  Sense strand starting at position 3545 of SEQ ID NO: 1561796
ggugaaaucugaguaaggg

SEQ ID NO: 1699128 - RNA, 19 nt, Artificial Sequence
  Description of Artificial Sequence: Synthetic oligonucleotide
  Antisense strand to SEQ ID NO: 1699127
cccuuacucagauuucacc

SEQ ID NO: 1699129 - RNA, 19 nt, Artificial Sequence
  Description of Artificial Sequence: Synthetic oligonucleotide
  Sense strand starting at position 3555 of SEQ ID NO: 1561796
gaguaagggcuguaguuua

SEQ ID NO: 1699130 - RNA, 19 nt, Artificial Sequence
  Description of Artificial Sequence: Synthetic oligonucleotide
  Antisense strand to SEQ ID NO: 1699129
uaaacuacagcccuuacuc

SEQ ID NO: 1699131 - RNA, 19 nt, Artificial Sequence
  Description of Artificial Sequence: Synthetic oligonucleotide
  Sense strand starting at position 3612 of SEQ ID NO: 1561796
auucuagcaugguuauaug

SEQ ID NO: 1699132 - RNA, 19 nt, Artificial Sequence
  Description of Artificial Sequence: Synthetic oligonucleotide
  Antisense strand to SEQ ID NO: 1699131
cauauaaccaugcuagaau

SEQ ID NO: 1699133 - RNA, 19 nt, Artificial Sequence
  Description of Artificial Sequence: Synthetic oligonucleotide
  Sense strand starting at position 3863 of SEQ ID NO: 1561796
ugucuugcccauggagaac

SEQ ID NO: 1699134 - RNA, 19 nt, Artificial Sequence
  Description of Artificial Sequence: Synthetic oligonucleotide
  Antisense strand to SEQ ID NO: 1699133
guucuccaugggcaagaca

SEQ ID NO: 1699135 - RNA, 19 nt, Artificial Sequence
  Description of Artificial Sequence: Synthetic oligonucleotide
  Sense strand starting at position 52 of SEQ ID NO: 1561797
augugauucuuaccugauu

SEQ ID NO: 1699136 - RNA, 19 nt, Artificial Sequence
  Description of Artificial Sequence: Synthetic oligonucleotide
  Antisense strand to SEQ ID NO: 1699135
aaucagguaagaaucacau

SEQ ID NO: 1699137 - RNA, 19 nt, Artificial Sequence
  Description of Artificial Sequence: Synthetic oligonucleotide
  Sense strand starting at position 82 of SEQ ID NO: 1561797
agcguauuguuaucaauuu

SEQ ID NO: 1699138 - RNA, 19 nt, Artificial Sequence
  Description of Artificial Sequence: Synthetic oligonucleotide
  Antisense strand to SEQ ID NO: 1699137
aaauugauaacaauacgcu

SEQ ID NO: 1699139 - RNA, 19 nt, Artificial Sequence
  Description of Artificial Sequence: Synthetic oligonucleotide
  Sense strand starting at position 404 of SEQ ID NO: 1561797
cugcgaaaggagcaugaau

SEQ ID NO: 1699140 - RNA, 19 nt, Artificial Sequence
  Description of Artificial Sequence: Synthetic oligonucleotide
  Antisense strand to SEQ ID NO: 1699139
auucaugcuccuuucgcag

SEQ ID NO: 1699141 - RNA, 19 nt, Artificial Sequence
  Description of Artificial Sequence: Synthetic oligonucleotide
  Sense strand starting at position 406 of SEQ ID NO: 1561797
gcgaaaggagcaugaauga

SEQ ID NO: 1699142 - RNA, 19 nt, Artificial Sequence
  Description of Artificial Sequence: Synthetic oligonucleotide
  Antisense strand to SEQ ID NO: 1699141
ucauucaugcuccuuucgc

SEQ ID NO: 1699143 - RNA, 19 nt, Artificial Sequence
  Description of Artificial Sequence: Synthetic oligonucleotide
  Sense strand starting at position 506 of SEQ ID NO: 1561797
ugacuugaguucccuguaa

SEQ ID NO: 1699144 - RNA, 19 nt, Artificial Sequence
  Description of Artificial Sequence: Synthetic oligonucleotide
  Antisense strand to SEQ ID NO: 1699143
uuacagggaacucaaguca

SEQ ID NO: 1699145 - RNA, 19 nt, Artificial Sequence
  Description of Artificial Sequence: Synthetic oligonucleotide
  Sense strand starting at position 508 of SEQ ID NO: 1561797
acuugaguucccuguaaau

SEQ ID NO: 1699146 - RNA, 19 nt, Artificial Sequence
  Description of Artificial Sequence: Synthetic oligonucleotide
  Antisense strand to SEQ ID NO: 1699145
auuuacagggaacucaagu

SEQ ID NO: 1699147 - RNA, 19 nt, Artificial Sequence
  Description of Artificial Sequence: Synthetic oligonucleotide
  Sense strand starting at position 574 of SEQ ID NO: 1561797
cagggcaagucaucauaca

SEQ ID NO: 1699148 - RNA, 19 nt, Artificial Sequence
  Description of Artificial Sequence: Synthetic oligonucleotide
  Antisense strand to SEQ ID NO: 1699147
uguaugaugacuugcccug

SEQ ID NO: 1699149 - RNA, 19 nt, Artificial Sequence
  Description of Artificial Sequence: Synthetic oligonucleotide
  Sense strand starting at position 675 of SEQ ID NO: 1561797
ugccauuaucaccagagca

SEQ ID NO: 1699150 - RNA, 19 nt, Artificial Sequence
  Description of Artificial Sequence: Synthetic oligonucleotide
  Antisense strand to SEQ ID NO: 1699149
ugcucuggugauaauggca

SEQ ID NO: 1699151 - RNA, 19 nt, Artificial Sequence
  Description of Artificial Sequence: Synthetic oligonucleotide
  Sense strand starting at position 855 of SEQ ID NO: 1561797
guaugaaagccuuacuggu

SEQ ID NO: 1699152 - RNA, 19 nt, Artificial Sequence
  Description of Artificial Sequence: Synthetic oligonucleotide
  Antisense strand to SEQ ID NO: 1699151
accaguaaggcuuucauac

SEQ ID NO: 1699153 - RNA, 19 nt, Artificial Sequence
  Description of Artificial Sequence: Synthetic oligonucleotide
  Sense strand starting at position 894 of SEQ ID NO: 1561797
ggaggaagguugucauaau

SEQ ID NO: 1699154 - RNA, 19 nt, Artificial Sequence
  Description of Artificial Sequence: Synthetic oligonucleotide
  Antisense strand to SEQ ID NO: 1699153
auuaugacaaccuuccucc

SEQ ID NO: 1699155 - RNA, 19 nt, Artificial Sequence
  Description of Artificial Sequence: Synthetic oligonucleotide
  Sense strand starting at position 1065 of SEQ ID NO: 1561797
gcauucucacuguauuauu

SEQ ID NO: 1699156 - RNA, 19 nt, Artificial Sequence
  Description of Artificial Sequence: Synthetic oligonucleotide
  Antisense strand to SEQ ID NO: 1699155
aauaauacagugagaaugc

SEQ ID NO: 1699157 - RNA, 19 nt, Artificial Sequence
  Description of Artificial Sequence: Synthetic oligonucleotide
  Sense strand starting at position 1107 of SEQ ID NO: 1561797
ccauuuguggcugggcauu

SEQ ID NO: 1699158 - RNA, 19 nt, Artificial Sequence
  Description of Artificial Sequence: Synthetic oligonucleotide
  Antisense strand to SEQ ID NO: 1699157
aaugcccagccacaaaugg

SEQ ID NO: 1699159 - RNA, 19 nt, Artificial Sequence
  Description of Artificial Sequence: Synthetic oligonucleotide
  Sense strand starting at position 1128 of SEQ ID NO: 1561797
ggcuauuucuaguuucuuu

SEQ ID NO: 1699160 - RNA, 19 nt, Artificial Sequence
  Description of Artificial Sequence: Synthetic oligonucleotide
  Antisense strand to SEQ ID NO: 1699159
aaagaaacuagaaauagcc

SEQ ID NO: 1699161 - RNA, 19 nt, Artificial Sequence
  Description of Artificial Sequence: Synthetic oligonucleotide
  Sense strand starting at position 1153 of SEQ ID NO: 1561797
uugccuguugcaguucuaa

SEQ ID NO: 1699162 - RNA, 19 nt, Artificial Sequence
  Description of Artificial Sequence: Synthetic oligonucleotide
  Antisense strand to SEQ ID NO: 1699161
uuagaacugcaacaggcaa

SEQ ID NO: 1699163 - RNA, 19 nt, Artificial Sequence
  Description of Artificial Sequence: Synthetic oligonucleotide
  Sense strand starting at position 1167 of SEQ ID NO: 1561797
ucuaauaaugcugaucuga

SEQ ID NO: 1699164 - RNA, 19 nt, Artificial Sequence
  Description of Artificial Sequence: Synthetic oligonucleotide
  Antisense strand to SEQ ID NO: 1699163
ucagaucagcauuauuaga

SEQ ID NO: 1699165 - RNA, 19 nt, Artificial Sequence
  Description of Artificial Sequence: Synthetic oligonucleotide
  Sense strand starting at position 1255 of SEQ ID NO: 1561797
aacuuaaugccuuguugga

SEQ ID NO: 1699166 - RNA, 19 nt, Artificial Sequence
  Description of Artificial Sequence: Synthetic oligonucleotide
  Antisense strand to SEQ ID NO: 1699165
uccaacaaggcauuaaguu

SEQ ID NO: 1699167 - RNA, 19 nt, Artificial Sequence
  Description of Artificial Sequence: Synthetic oligonucleotide
  Sense strand starting at position 1270 of SEQ ID NO: 1561797
uggauaguuccggaucuag

SEQ ID NO: 1699168 - RNA, 19 nt, Artificial Sequence
  Description of Artificial Sequence: Synthetic oligonucleotide
  Antisense strand to SEQ ID NO: 1699167
cuagauccggaacuaucca

SEQ ID NO: 1699169 - RNA, 19 nt, Artificial Sequence
  Description of Artificial Sequence: Synthetic oligonucleotide
  Sense strand starting at position 1350 of SEQ ID NO: 1561797
ggacuugagacuugcccau

SEQ ID NO: 1699170 - RNA, 19 nt, Artificial Sequence
  Description of Artificial Sequence: Synthetic oligonucleotide
  Antisense strand to SEQ ID NO: 1699169
augggcaagucucaagucc

SEQ ID NO: 1699171 - RNA, 19 nt, Artificial Sequence
  Description of Artificial Sequence: Synthetic oligonucleotide
  Sense strand starting at position 1354 of SEQ ID NO: 1561797
uugagacuugcccauaguc

SEQ ID NO: 1699172 - RNA, 19 nt, Artificial Sequence
  Description of Artificial Sequence: Synthetic oligonucleotide
  Antisense strand to SEQ ID NO: 1699171
gacuaugggcaagucucaa

SEQ ID NO: 1699173 - RNA, 19 nt, Artificial Sequence
  Description of Artificial Sequence: Synthetic oligonucleotide
  Sense strand starting at position 1449 of SEQ ID NO: 1561797
aguaauucgcgagcgucaa

SEQ ID NO: 1699174 - RNA, 19 nt, Artificial Sequence
  Description of Artificial Sequence: Synthetic oligonucleotide
  Antisense strand to SEQ ID NO: 1699173
uugacgcucgcgaauuacu

SEQ ID NO: 1699175 - RNA, 19 nt, Artificial Sequence
  Description of Artificial Sequence: Synthetic oligonucleotide
  Sense strand starting at position 1879 of SEQ ID NO: 1561797
gggugcugggcagaugauu

SEQ ID NO: 1699176 - RNA, 19 nt, Artificial Sequence
  Description of Artificial Sequence: Synthetic oligonucleotide
  Antisense strand to SEQ ID NO: 1699175
aaucaucugcccagcaccc

SEQ ID NO: 1699177 - RNA, 19 nt, Artificial Sequence
  Description of Artificial Sequence: Synthetic oligonucleotide
  Sense strand starting at position 1887 of SEQ ID NO: 1561797
ggcagaugauugguggaga

SEQ ID NO: 1699178 - RNA, 19 nt, Artificial Sequence
  Description of Artificial Sequence: Synthetic oligonucleotide
  Antisense strand to SEQ ID NO: 1699177
ucuccaccaaucaucugcc

SEQ ID NO: 1699179 - RNA, 19 nt, Artificial Sequence
  Description of Artificial Sequence: Synthetic oligonucleotide
  Sense strand starting at position 1969 of SEQ ID NO: 1561797
guuccuuucccagugcuuu

SEQ ID NO: 1699180 - RNA, 19 nt, Artificial Sequence
  Description of Artificial Sequence: Synthetic oligonucleotide
  Antisense strand to SEQ ID NO: 1699179
aaagcacugggaaaggaac

SEQ ID NO: 1699181 - RNA, 19 nt, Artificial Sequence
  Description of Artificial Sequence: Synthetic oligonucleotide
  Sense strand starting at position 2718 of SEQ ID NO: 1561797
gugaauacauguucugauc

SEQ ID NO: 1699182 - RNA, 19 nt, Artificial Sequence
  Description of Artificial Sequence: Synthetic oligonucleotide
  Antisense strand to SEQ ID NO: 1699181
gaucagaacauguauucac

SEQ ID NO: 1699183 - RNA, 19 nt, Artificial Sequence
  Description of Artificial Sequence: Synthetic oligonucleotide
  Sense strand starting at position 2743 of SEQ ID NO: 1561797
cgcucuugucacuaaggga

SEQ ID NO: 1699184 - RNA, 19 nt, Artificial Sequence
  Description of Artificial Sequence: Synthetic oligonucleotide
  Antisense strand to SEQ ID NO: 1699183
ucccuuagugacaagagcg

SEQ ID NO: 1699185 - RNA, 19 nt, Artificial Sequence
  Description of Artificial Sequence: Synthetic oligonucleotide
  Sense strand starting at position 2757 of SEQ ID NO: 1561797
agggaacgucuaugacaaa

SEQ ID NO: 1699186 - RNA, 19 nt, Artificial Sequence
  Description of Artificial Sequence: Synthetic oligonucleotide
  Antisense strand to SEQ ID NO: 1699185
uuugucauagacguucccu

SEQ ID NO: 1699187 - RNA, 19 nt, Artificial Sequence
  Description of Artificial Sequence: Synthetic oligonucleotide
  Sense strand starting at position 2804 of SEQ ID NO: 1561797
gugauuacgaaguaacauu

SEQ ID NO: 1699188 - RNA, 19 nt, Artificial Sequence
  Description of Artificial Sequence: Synthetic oligonucleotide
  Antisense strand to SEQ ID NO: 1699187
aauguuacuucguaaucac

SEQ ID NO: 1699189 - RNA, 19 nt, Artificial Sequence
  Description of Artificial Sequence: Synthetic oligonucleotide
  Sense strand starting at position 2897 of SEQ ID NO: 1561797
auuuguuuguuugugagac

SEQ ID NO: 1699190 - RNA, 19 nt, Artificial Sequence
  Description of Artificial Sequence: Synthetic oligonucleotide
  Antisense strand to SEQ ID NO: 1699189
gucucacaaacaaacaaau

SEQ ID NO: 1699191 - RNA, 19 nt, Artificial Sequence
  Description of Artificial Sequence: Synthetic oligonucleotide
  Sense strand starting at position 3283 of SEQ ID NO: 1561797
guugaugucgacuagguga

SEQ ID NO: 1699192 - RNA, 19 nt, Artificial Sequence
  Description of Artificial Sequence: Synthetic oligonucleotide
  Antisense strand to SEQ ID NO: 1699191
ucaccuagucgacaucaac

SEQ ID NO: 1699193 - RNA, 19 nt, Artificial Sequence
  Description of Artificial Sequence: Synthetic oligonucleotide
  Sense strand starting at position 3288 of SEQ ID NO: 1561797
ugucgacuaggugaagauu

SEQ ID NO: 1699194 - RNA, 19 nt, Artificial Sequence
  Description of Artificial Sequence: Synthetic oligonucleotide
  Antisense strand to SEQ ID NO: 1699193
aaucuucaccuagucgaca

SEQ ID NO: 1699195 - RNA, 19 nt, Artificial Sequence
  Description of Artificial Sequence: Synthetic oligonucleotide
  Sense strand starting at position 3317 of SEQ ID NO: 1561797
uuguuugguagguauaauu

SEQ ID NO: 1699196 - RNA, 19 nt, Artificial Sequence
  Description of Artificial Sequence: Synthetic oligonucleotide
  Antisense strand to SEQ ID NO: 1699195
aauuauaccuaccaaacaa

SEQ ID NO: 1699197 - RNA, 19 nt, Artificial Sequence
  Description of Artificial Sequence: Synthetic oligonucleotide
  Sense strand starting at position 3353 of SEQ ID NO: 1561797
uauggugaauugucauaac

SEQ ID NO: 1699198 - RNA, 19 nt, Artificial Sequence
  Description of Artificial Sequence: Synthetic oligonucleotide
  Antisense strand to SEQ ID NO: 1699197
guuaugacaauucaccaua

SEQ ID NO: 1699199 - RNA, 19 nt, Artificial Sequence
  Description of Artificial Sequence: Synthetic oligonucleotide
  Sense strand starting at position 3379 of SEQ ID NO: 1561797
ggcuuccuaccagaaacau

SEQ ID NO: 1699200 - RNA, 19 nt, Artificial Sequence
  Description of Artificial Sequence: Synthetic oligonucleotide
  Antisense strand to SEQ ID NO: 1699199
auguuucugguaggaagcc

SEQ ID NO: 1699201 - RNA, 19 nt, Artificial Sequence
  Description of Artificial Sequence: Synthetic oligonucleotide
  Sense strand starting at position 3434 of SEQ ID NO: 1561797
cuuugucaugcuuauuaca

SEQ ID NO: 1699202 - RNA, 19 nt, Artificial Sequence
  Description of Artificial Sequence: Synthetic oligonucleotide
  Antisense strand to SEQ ID NO: 1699201
uguaauaagcaugacaaag

SEQ ID NO: 1699203 - RNA, 19 nt, Artificial Sequence
  Description of Artificial Sequence: Synthetic oligonucleotide
  Sense strand starting at position 3462 of SEQ ID NO: 1561797
acugaagucucagcuuuaa

SEQ ID NO: 1699204 - RNA, 19 nt, Artificial Sequence
  Description of Artificial Sequence: Synthetic oligonucleotide
  Antisense strand to SEQ ID NO: 1699203
uuaaagcugagacuucagu

SEQ ID NO: 1699205 - RNA, 19 nt, Artificial Sequence
  Description of Artificial Sequence: Synthetic oligonucleotide
  Sense strand starting at position 3521 of SEQ ID NO: 1561797
aaguucuuauuagugagga

SEQ ID NO: 1699206 - RNA, 19 nt, Artificial Sequence
  Description of Artificial Sequence: Synthetic oligonucleotide
  Antisense strand to SEQ ID NO: 1699205
uccucacuaauaagaacuu

SEQ ID NO: 1699207 - RNA, 19 nt, Artificial Sequence
  Description of Artificial Sequence: Synthetic oligonucleotide
  Sense strand starting at position 3743 of SEQ ID NO: 1561797
auaccuuuguuucuaggau

SEQ ID NO: 1699208 - RNA, 19 nt, Artificial Sequence
  Description of Artificial Sequence: Synthetic oligonucleotide
  Antisense strand to SEQ ID NO: 1699207
auccuagaaacaaagguau

SEQ ID NO: 1699209 - RNA, 19 nt, Artificial Sequence
  Description of Artificial Sequence: Synthetic oligonucleotide
  Sense strand starting at position 3908 of SEQ ID NO: 1561797
cugauaugcugauuaucac

SEQ ID NO: 1699210 - RNA, 19 nt, Artificial Sequence
  Description of Artificial Sequence: Synthetic oligonucleotide
  Antisense strand to SEQ ID NO: 1699209
gugauaaucagcauaucag

SEQ ID NO: 1699211 - RNA, 19 nt, Artificial Sequence
  Description of Artificial Sequence: Synthetic oligonucleotide
  Sense strand starting at position 3909 of SEQ ID NO: 1561797
ugauaugcugauuaucacu

SEQ ID NO: 1699212 - RNA, 19 nt, Artificial Sequence
  Description of Artificial Sequence: Synthetic oligonucleotide
  Antisense strand to SEQ ID NO: 1699211
agugauaaucagcauauca

SEQ ID NO: 1699213 - RNA, 19 nt, Artificial Sequence
  Description of Artificial Sequence: Synthetic oligonucleotide
  Sense strand starting at position 3961 of SEQ ID NO: 1561797
augucaacuugacuaagau

SEQ ID NO: 1699214 - RNA, 19 nt, Artificial Sequence
  Description of Artificial Sequence: Synthetic oligonucleotide
  Antisense strand to SEQ ID NO: 1699213
aucuuagucaaguugacau

SEQ ID NO: 1699215 - RNA, 19 nt, Artificial Sequence
  Description of Artificial Sequence: Synthetic oligonucleotide
  Sense strand starting at position 96 of SEQ ID NO: 1561798
aggucaaccucagaggaaa

SEQ ID NO: 1699216 - RNA, 19 nt, Artificial Sequence
  Description of Artificial Sequence: Synthetic oligonucleotide
  Antisense strand to SEQ ID NO: 1699215
uuuccucugagguugaccu

SEQ ID NO: 1699217 - RNA, 19 nt, Artificial Sequence
  Description of Artificial Sequence: Synthetic oligonucleotide
  Sense strand starting at position 150 of SEQ ID NO: 1561798
augggaagauucuaacauc

SEQ ID NO: 1699218 - RNA, 19 nt, Artificial Sequence
  Description of Artificial Sequence: Synthetic oligonucleotide
  Antisense strand to SEQ ID NO: 1699217
gauguuagaaucuucccau

SEQ ID NO: 1699219 - RNA, 19 nt, Artificial Sequence
  Description of Artificial Sequence: Synthetic oligonucleotide
  Sense strand starting at position 153 of SEQ ID NO: 1561798
ggaagauucuaacaucucu

SEQ ID NO: 1699220 - RNA, 19 nt, Artificial Sequence
  Description of Artificial Sequence: Synthetic oligonucleotide
  Antisense strand to SEQ ID NO: 1699219
agagauguuagaaucuucc

SEQ ID NO: 1699221 - RNA, 19 nt, Artificial Sequence
  Description of Artificial Sequence: Synthetic oligonucleotide
  Sense strand starting at position 315 of SEQ ID NO: 1561798
guggugauuccggaaggca

SEQ ID NO: 1699222 - RNA, 19 nt, Artificial Sequence
  Description of Artificial Sequence: Synthetic oligonucleotide
  Antisense strand to SEQ ID NO: 1699221
ugccuuccggaaucaccac

SEQ ID NO: 1699223 - RNA, 19 nt, Artificial Sequence
  Description of Artificial Sequence: Synthetic oligonucleotide
  Sense strand starting at position 665 of SEQ ID NO: 1561798
cagucugaauucgucuuga

SEQ ID NO: 1699224 - RNA, 19 nt, Artificial Sequence
  Description of Artificial Sequence: Synthetic oligonucleotide
  Antisense strand to SEQ ID NO: 1699223
ucaagacgaauucagacug

SEQ ID NO: 1699225 - RNA, 19 nt, Artificial Sequence
  Description of Artificial Sequence: Synthetic oligonucleotide
  Sense strand starting at position 670 of SEQ ID NO: 1561798
ugaauucgucuugagcuca

SEQ ID NO: 1699226 - RNA, 19 nt, Artificial Sequence
  Description of Artificial Sequence: Synthetic oligonucleotide
  Antisense strand to SEQ ID NO: 1699225
ugagcucaagacgaauuca

SEQ ID NO: 1699227 - RNA, 19 nt, Artificial Sequence
  Description of Artificial Sequence: Synthetic oligonucleotide
  Sense strand starting at position 675 of SEQ ID NO: 1561798
ucgucuugagcucagcgau

SEQ ID NO: 1699228 - RNA, 19 nt, Artificial Sequence
  Description of Artificial Sequence: Synthetic oligonucleotide
  Antisense strand to SEQ ID NO: 1699227
aucgcugagcucaagacga

SEQ ID NO: 1699229 - RNA, 19 nt, Artificial Sequence
  Description of Artificial Sequence: Synthetic oligonucleotide
  Sense strand starting at position 713 of SEQ ID NO: 1561798
ggaucucccugagacauuu

SEQ ID NO: 1699230 - RNA, 19 nt, Artificial Sequence
  Description of Artificial Sequence: Synthetic oligonucleotide
  Antisense strand to SEQ ID NO: 1699229
aaaugucucagggagaucc

SEQ ID NO: 1699231 - RNA, 19 nt, Artificial Sequence
  Description of Artificial Sequence: Synthetic oligonucleotide
  Sense strand starting at position 808 of SEQ ID NO: 1561798
gucggccugccugauuaau

SEQ ID NO: 1699232 - RNA, 19 nt, Artificial Sequence
  Description of Artificial Sequence: Synthetic oligonucleotide
  Antisense strand to SEQ ID NO: 1699231
auuaaucaggcaggccgac

SEQ ID NO: 1699233 - RNA, 19 nt, Artificial Sequence
  Description of Artificial Sequence: Synthetic oligonucleotide
  Sense strand starting at position 810 of SEQ ID NO: 1561798
cggccugccugauuaauga

SEQ ID NO: 1699234 - RNA, 19 nt, Artificial Sequence
  Description of Artificial Sequence: Synthetic oligonucleotide
  Antisense strand to SEQ ID NO: 1699233
ucauuaaucaggcaggccg

SEQ ID NO: 1699235 - RNA, 19 nt, Artificial Sequence
  Description of Artificial Sequence: Synthetic oligonucleotide
  Sense strand starting at position 1009 of SEQ ID NO: 1561798
gaaggagggucuccucaau

SEQ ID NO: 1699236 - RNA, 19 nt, Artificial Sequence
  Description of Artificial Sequence: Synthetic oligonucleotide
  Antisense strand to SEQ ID NO: 1699235
auugaggagacccuccuuc

SEQ ID NO: 1699237 - RNA, 19 nt, Artificial Sequence
  Description of Artificial Sequence: Synthetic oligonucleotide
  Sense strand starting at position 1092 of SEQ ID NO: 1561798
gcucacuaccgagaugcaa

SEQ ID NO: 1699238 - RNA, 19 nt, Artificial Sequence
  Description of Artificial Sequence: Synthetic oligonucleotide
  Antisense strand to SEQ ID NO: 1699237
uugcaucucgguagugagc

SEQ ID NO: 1699239 - RNA, 19 nt, Artificial Sequence
  Description of Artificial Sequence: Synthetic oligonucleotide
  Sense strand starting at position 1106 of SEQ ID NO: 1561798
ugcaaauucugagcugaag

SEQ ID NO: 1699240 - RNA, 19 nt, Artificial Sequence
  Description of Artificial Sequence: Synthetic oligonucleotide
  Antisense strand to SEQ ID NO: 1699239
cuucagcucagaauuugca

SEQ ID NO: 1699241 - RNA, 19 nt, Artificial Sequence
  Description of Artificial Sequence: Synthetic oligonucleotide
  Sense strand starting at position 1313 of SEQ ID NO: 1561798
guugaauacacgugggcua

SEQ ID NO: 1699242 - RNA, 19 nt, Artificial Sequence
  Description of Artificial Sequence: Synthetic oligonucleotide
  Antisense strand to SEQ ID NO: 1699241
uagcccacguguauucaac

SEQ ID NO: 1699243 - RNA, 19 nt, Artificial Sequence
  Description of Artificial Sequence: Synthetic oligonucleotide
  Sense strand starting at position 1315 of SEQ ID NO: 1561798
ugaauacacgugggcuauu

SEQ ID NO: 1699244 - RNA, 19 nt, Artificial Sequence
  Description of Artificial Sequence: Synthetic oligonucleotide
  Antisense strand to SEQ ID NO: 1699243
aauagcccacguguauuca

SEQ ID NO: 1699245 - RNA, 19 nt, Artificial Sequence
  Description of Artificial Sequence: Synthetic oligonucleotide
  Sense strand starting at position 1316 of SEQ ID NO: 1561798
gaauacacgugggcuauua

SEQ ID NO: 1699246 - RNA, 19 nt, Artificial Sequence
  Description of Artificial Sequence: Synthetic oligonucleotide
  Antisense strand to SEQ ID NO: 1699245
uaauagcccacguguauuc

SEQ ID NO: 1699247 - RNA, 19 nt, Artificial Sequence
  Description of Artificial Sequence: Synthetic oligonucleotide
  Sense strand starting at position 1318 of SEQ ID NO: 1561798
auacacgugggcuauuauu

SEQ ID NO: 1699248 - RNA, 19 nt, Artificial Sequence
  Description of Artificial Sequence: Synthetic oligonucleotide
  Antisense strand to SEQ ID NO: 1699247
aauaauagcccacguguau

SEQ ID NO: 1699249 - RNA, 19 nt, Artificial Sequence
  Description of Artificial Sequence: Synthetic oligonucleotide
  Sense strand starting at position 1326 of SEQ ID NO: 1561798
gggcuauuauuaucacuga

SEQ ID NO: 1699250 - RNA, 19 nt, Artificial Sequence
  Description of Artificial Sequence: Synthetic oligonucleotide
  Antisense strand to SEQ ID NO: 1699249
ucagugauaauaauagccc

SEQ ID NO: 1699251 - RNA, 19 nt, Artificial Sequence
  Description of Artificial Sequence: Synthetic oligonucleotide
  Sense strand starting at position 1329 of SEQ ID NO: 1561798
cuauuauuaucacugaguc

SEQ ID NO: 1699252 - RNA, 19 nt, Artificial Sequence
  Description of Artificial Sequence: Synthetic oligonucleotide
  Antisense strand to SEQ ID NO: 1699251
gacucagugauaauaauag

SEQ ID NO: 1699253 - RNA, 19 nt, Artificial Sequence
  Description of Artificial Sequence: Synthetic oligonucleotide
  Sense strand starting at position 2180 of SEQ ID NO: 1561798
aggcuuuguccggauggua

SEQ ID NO: 1699254 - RNA, 19 nt, Artificial Sequence
  Description of Artificial Sequence: Synthetic oligonucleotide
  Antisense strand to SEQ ID NO: 1699253
uaccauccggacaaagccu

SEQ ID NO: 1699255 - RNA, 19 nt, Artificial Sequence
  Description of Artificial Sequence: Synthetic oligonucleotide
  Sense strand starting at position 2382 of SEQ ID NO: 1561798
agcuuagauuuccagagac

SEQ ID NO: 1699256 - RNA, 19 nt, Artificial Sequence
  Description of Artificial Sequence: Synthetic oligonucleotide
  Antisense strand to SEQ ID NO: 1699255
gucucuggaaaucuaagcu

SEQ ID NO: 1699257 - RNA, 19 nt, Artificial Sequence
  Description of Artificial Sequence: Synthetic oligonucleotide
  Sense strand starting at position 2537 of SEQ ID NO: 1561798
aagagcggugccuggaaau

SEQ ID NO: 1699258 - RNA, 19 nt, Artificial Sequence
  Description of Artificial Sequence: Synthetic oligonucleotide
  Antisense strand to SEQ ID NO: 1699257
auuuccaggcaccgcucuu

SEQ ID NO: 1699259 - RNA, 19 nt, Artificial Sequence
  Description of Artificial Sequence: Synthetic oligonucleotide
  Sense strand starting at position 2616 of SEQ ID NO: 1561798
acguauagcaucugcuuga

SEQ ID NO: 1699260 - RNA, 19 nt, Artificial Sequence
  Description of Artificial Sequence: Synthetic oligonucleotide
  Antisense strand to SEQ ID NO: 1699259
ucaagcagaugcuauacgu

SEQ ID NO: 1699261 - RNA, 19 nt, Artificial Sequence
  Description of Artificial Sequence: Synthetic oligonucleotide
  Sense strand starting at position 2617 of SEQ ID NO: 1561798
cguauagcaucugcuugaa

SEQ ID NO: 1699262 - RNA, 19 nt, Artificial Sequence
  Description of Artificial Sequence: Synthetic oligonucleotide
  Antisense strand to SEQ ID NO: 1699261
uucaagcagaugcuauacg

SEQ ID NO: 1699263 - RNA, 19 nt, Artificial Sequence
  Description of Artificial Sequence: Synthetic oligonucleotide
  Sense strand starting at position 2747 of SEQ ID NO: 1561798
guaacagacguuuacaaua

SEQ ID NO: 1699264 - RNA, 19 nt, Artificial Sequence
  Description of Artificial Sequence: Synthetic oligonucleotide
  Antisense strand to SEQ ID NO: 1699263
uauuguaaacgucuguuac

SEQ ID NO: 1699265 - RNA, 19 nt, Artificial Sequence
  Description of Artificial Sequence: Synthetic oligonucleotide
  Sense strand starting at position 2754 of SEQ ID NO: 1561798
acguuuacaauacgaugaa

SEQ ID NO: 1699266 - RNA, 19 nt, Artificial Sequence
  Description of Artificial Sequence: Synthetic oligonucleotide
  Antisense strand to SEQ ID NO: 1699265
uucaucguauuguaaacgu

SEQ ID NO: 1699267 - RNA, 19 nt, Artificial Sequence
  Description of Artificial Sequence: Synthetic oligonucleotide
  Sense strand starting at position 2800 of SEQ ID NO: 1561798
ccggaaucccuguaaucag

SEQ ID NO: 1699268 - RNA, 19 nt, Artificial Sequence
  Description of Artificial Sequence: Synthetic oligonucleotide
  Antisense strand to SEQ ID NO: 1699267
cugauuacagggauuccgg

SEQ ID NO: 1699269 - RNA, 19 nt, Artificial Sequence
  Description of Artificial Sequence: Synthetic oligonucleotide
  Sense strand starting at position 3243 of SEQ ID NO: 1561798
ugagaaagguuaugaaaga

SEQ ID NO: 1699270 - RNA, 19 nt, Artificial Sequence
  Description of Artificial Sequence: Synthetic oligonucleotide
  Antisense strand to SEQ ID NO: 1699269
ucuuucauaaccuuucuca

SEQ ID NO: 1699271 - RNA, 19 nt, Artificial Sequence
  Description of Artificial Sequence: Synthetic oligonucleotide
  Sense strand starting at position 3244 of SEQ ID NO: 1561798
gagaaagguuaugaaagaa

SEQ ID NO: 1699272 - RNA, 19 nt, Artificial Sequence
  Description of Artificial Sequence: Synthetic oligonucleotide
  Antisense strand to SEQ ID NO: 1699271
uucuuucauaaccuuucuc

SEQ ID NO: 1699273 - RNA, 19 nt, Artificial Sequence
  Description of Artificial Sequence: Synthetic oligonucleotide
  Sense strand starting at position 3351 of SEQ ID NO: 1561798
cguggucacuugcuaauuu

SEQ ID NO: 1699274 - RNA, 19 nt, Artificial Sequence
  Description of Artificial Sequence: Synthetic oligonucleotide
  Antisense strand to SEQ ID NO: 1699273
aaauuagcaagugaccacg

SEQ ID NO: 1699275 - RNA, 19 nt, Artificial Sequence
  Description of Artificial Sequence: Synthetic oligonucleotide
  Sense strand starting at position 3400 of SEQ ID NO: 1561798
ucucuaggugcccaagaau

SEQ ID NO: 1699276 - RNA, 19 nt, Artificial Sequence
  Description of Artificial Sequence: Synthetic oligonucleotide
  Antisense strand to SEQ ID NO: 1699275
auucuugggcaccuagaga

SEQ ID NO: 1699277 - RNA, 19 nt, Artificial Sequence
  Description of Artificial Sequence: Synthetic oligonucleotide
  Sense strand starting at position 3451 of SEQ ID NO: 1561798
ggugauauuuguuauucuu

SEQ ID NO: 1699278 - RNA, 19 nt, Artificial Sequence
  Description of Artificial Sequence: Synthetic oligonucleotide
  Antisense strand to SEQ ID NO: 1699277
aagaauaacaaauaucacc

SEQ ID NO: 1699279 - RNA, 19 nt, Artificial Sequence
  Description of Artificial Sequence: Synthetic oligonucleotide
  Sense strand starting at position 3484 of SEQ ID NO: 1561798
uuugacacuuagggaauua

SEQ ID NO: 1699280 - RNA, 19 nt, Artificial Sequence
  Description of Artificial Sequence: Synthetic oligonucleotide
  Antisense strand to SEQ ID NO: 1699279
uaauucccuaagugucaaa

SEQ ID NO: 1699281 - RNA, 19 nt, Artificial Sequence
  Description of Artificial Sequence: Synthetic oligonucleotide
  Sense strand starting at position 3626 of SEQ ID NO: 1561798
gcugguacuccaggugacu

SEQ ID NO: 1699282 - RNA, 19 nt, Artificial Sequence
  Description of Artificial Sequence: Synthetic oligonucleotide
  Antisense strand to SEQ ID NO: 1699281
agucaccuggaguaccagc

SEQ ID NO: 1699283 - RNA, 19 nt, Artificial Sequence
  Description of Artificial Sequence: Synthetic oligonucleotide
  Sense strand starting at position 3702 of SEQ ID NO: 1561798
gguguaccagcauaaucaa

SEQ ID NO: 1699284 - RNA, 19 nt, Artificial Sequence
  Description of Artificial Sequence: Synthetic oligonucleotide
  Antisense strand to SEQ ID NO: 1699283
uugauuaugcugguacacc

SEQ ID NO: 1699285 - RNA, 19 nt, Artificial Sequence
  Description of Artificial Sequence: Synthetic oligonucleotide
  Sense strand starting at position 3834 of SEQ ID NO: 1561798
gcauaaggaauuggaaagu

SEQ ID NO: 1699286 - RNA, 19 nt, Artificial Sequence
  Description of Artificial Sequence: Synthetic oligonucleotide
  Antisense strand to SEQ ID NO: 1699285
acuuuccaauuccuuaugc

SEQ ID NO: 1699287 - RNA, 19 nt, Artificial Sequence
  Description of Artificial Sequence: Synthetic oligonucleotide
  Sense strand starting at position 3901 of SEQ ID NO: 1561798
uccaaugaguaguuucuga

SEQ ID NO: 1699288 - RNA, 19 nt, Artificial Sequence
  Description of Artificial Sequence: Synthetic oligonucleotide
  Antisense strand to SEQ ID NO: 1699287
ucagaaacuacucauugga

SEQ ID NO: 1699289 - RNA, 19 nt, Artificial Sequence
  Description of Artificial Sequence: Synthetic oligonucleotide
  Sense strand starting at position 3929 of SEQ ID NO: 1561798
uugcaaauccuagaaugua

SEQ ID NO: 1699290 - RNA, 19 nt, Artificial Sequence
  Description of Artificial Sequence: Synthetic oligonucleotide
  Antisense strand to SEQ ID NO: 1699289
uacauucuaggauuugcaa

SEQ ID NO: 1699291 - RNA, 19 nt, Artificial Sequence
  Description of Artificial Sequence: Synthetic oligonucleotide
  Sense strand starting at position 3942 of SEQ ID NO: 1561798
aauguaucauagcuagaag

SEQ ID NO: 1699292 - RNA, 19 nt, Artificial Sequence
  Description of Artificial Sequence: Synthetic oligonucleotide
  Antisense strand to SEQ ID NO: 1699291
cuucuagcuaugauacauu

SEQ ID NO: 1699293 - RNA, 19 nt, Artificial Sequence
  Description of Artificial Sequence: Synthetic oligonucleotide
  Sense strand starting at position 3980 of SEQ ID NO: 1561798
agccucuugcuguauggau

SEQ ID NO: 1699294 - RNA, 19 nt, Artificial Sequence
  Description of Artificial Sequence: Synthetic oligonucleotide
  Antisense strand to SEQ ID NO: 1699293
auccauacagcaagaggcu

SEQ ID NO: 1699295 - RNA, 19 nt, Artificial Sequence
  Description of Artificial Sequence: Synthetic oligonucleotide
  Sense strand starting at position 193 of SEQ ID NO: 1561799
agcucagacuucugggaag

SEQ ID NO: 1699296 - RNA, 19 nt, Artificial Sequence
  Description of Artificial Sequence: Synthetic oligonucleotide
  Antisense strand to SEQ ID NO: 1699295
cuucccagaagucugagcu

SEQ ID NO: 1699297 - RNA, 19 nt, Artificial Sequence
  Description of Artificial Sequence: Synthetic oligonucleotide
  Sense strand starting at position 471 of SEQ ID NO: 1561799
gggacucucugccuuccaa

SEQ ID NO: 1699298 - RNA, 19 nt, Artificial Sequence
  Description of Artificial Sequence: Synthetic oligonucleotide
  Antisense strand to SEQ ID NO: 1699297
uuggaaggcagagaguccc

SEQ ID NO: 1699299 - RNA, 19 nt, Artificial Sequence
  Description of Artificial Sequence: Synthetic oligonucleotide
  Sense strand starting at position 679 of SEQ ID NO: 1561799
ucgugccuuuccugacaga

SEQ ID NO: 1699300 - RNA, 19 nt, Artificial Sequence
  Description of Artificial Sequence: Synthetic oligonucleotide
  Antisense strand to SEQ ID NO: 1699299
ucugucaggaaaggcacga

SEQ ID NO: 1699301 - RNA, 19 nt, Artificial Sequence
  Description of Artificial Sequence: Synthetic oligonucleotide
  Sense strand starting at position 682 of SEQ ID NO: 1561799
ugccuuuccugacagagag

SEQ ID NO: 1699302 - RNA, 19 nt, Artificial Sequence
  Description of Artificial Sequence: Synthetic oligonucleotide
  Antisense strand to SEQ ID NO: 1699301
cucucugucaggaaaggca

SEQ ID NO: 1699303 - RNA, 19 nt, Artificial Sequence
  Description of Artificial Sequence: Synthetic oligonucleotide
  Sense strand starting at position 692 of SEQ ID NO: 1561799
gacagagagcugcggaauu

SEQ ID NO: 1699304 - RNA, 19 nt, Artificial Sequence
  Description of Artificial Sequence: Synthetic oligonucleotide
  Antisense strand to SEQ ID NO: 1699303
aauuccgcagcucucuguc

SEQ ID NO: 1699305 - RNA, 19 nt, Artificial Sequence
  Description of Artificial Sequence: Synthetic oligonucleotide
  Sense strand starting at position 856 of SEQ ID NO: 1561799
gcgagcggccgucagaaau

SEQ ID NO: 1699306 - RNA, 19 nt, Artificial Sequence
  Description of Artificial Sequence: Synthetic oligonucleotide
  Antisense strand to SEQ ID NO: 1699305
auuucugacggccgcucgc

SEQ ID NO: 1699307 - RNA, 19 nt, Artificial Sequence
  Description of Artificial Sequence: Synthetic oligonucleotide
  Sense strand starting at position 978 of SEQ ID NO: 1561799
ccgggaccguccagaguua

SEQ ID NO: 1699308 - RNA, 19 nt, Artificial Sequence
  Description of Artificial Sequence: Synthetic oligonucleotide
  Antisense strand to SEQ ID NO: 1699307
uaacucuggacggucccgg

SEQ ID NO: 1699309 - RNA, 19 nt, Artificial Sequence
  Description of Artificial Sequence: Synthetic oligonucleotide
  Sense strand starting at position 1381 of SEQ ID NO: 1561799
gggcgcucccucggagaaa

SEQ ID NO: 1699310 - RNA, 19 nt, Artificial Sequence
  Description of Artificial Sequence: Synthetic oligonucleotide
  Antisense strand to SEQ ID NO: 1699309
uuucuccgagggagcgccc

SEQ ID NO: 1699311 - RNA, 19 nt, Artificial Sequence
  Description of Artificial Sequence: Synthetic oligonucleotide
  Sense strand starting at position 2563 of SEQ ID NO: 1561799
gagcuuucgcucuugacgu

SEQ ID NO: 1699312 - RNA, 19 nt, Artificial Sequence
  Description of Artificial Sequence: Synthetic oligonucleotide
  Antisense strand to SEQ ID NO: 1699311
acgucaagagcgaaagcuc

SEQ ID NO: 1699313 - RNA, 19 nt, Artificial Sequence
  Description of Artificial Sequence: Synthetic oligonucleotide
  Sense strand starting at position 2578 of SEQ ID NO: 1561799
acgucuuucucccgcguga

SEQ ID NO: 1699314 - RNA, 19 nt, Artificial Sequence
  Description of Artificial Sequence: Synthetic oligonucleotide
  Antisense strand to SEQ ID NO: 1699313
ucacgcgggagaaagacgu

SEQ ID NO: 1699315 - RNA, 19 nt, Artificial Sequence
  Description of Artificial Sequence: Synthetic oligonucleotide
  Sense strand starting at position 2580 of SEQ ID NO: 1561799
gucuuucucccgcgugacu

SEQ ID NO: 1699316 - RNA, 19 nt, Artificial Sequence
  Description of Artificial Sequence: Synthetic oligonucleotide
  Antisense strand to SEQ ID NO: 1699315
agucacgcgggagaaagac

SEQ ID NO: 1699317 - RNA, 19 nt, Artificial Sequence
  Description of Artificial Sequence: Synthetic oligonucleotide
  Sense strand starting at position 2652 of SEQ ID NO: 1561799
cugaaacgucccugccgua

SEQ ID NO: 1699318 - RNA, 19 nt, Artificial Sequence
  Description of Artificial Sequence: Synthetic oligonucleotide
  Antisense strand to SEQ ID NO: 1699317
uacggcagggacguuucag

SEQ ID NO: 1699319 - RNA, 19 nt, Artificial Sequence
  Description of Artificial Sequence: Synthetic oligonucleotide
  Sense strand starting at position 2720 of SEQ ID NO: 1561799
gauuccugaugcuggguua

SEQ ID NO: 1699320 - RNA, 19 nt, Artificial Sequence
  Description of Artificial Sequence: Synthetic oligonucleotide
  Antisense strand to SEQ ID NO: 1699319
uaacccagcaucaggaauc

SEQ ID NO: 1699321 - RNA, 19 nt, Artificial Sequence
  Description of Artificial Sequence: Synthetic oligonucleotide
  Sense strand starting at position 2732 of SEQ ID NO: 1561799
uggguuaccuaagccuaaa

SEQ ID NO: 1699322 - RNA, 19 nt, Artificial Sequence
  Description of Artificial Sequence: Synthetic oligonucleotide
  Antisense strand to SEQ ID NO: 1699321
uuuaggcuuagguaaccca

SEQ ID NO: 1699323 - RNA, 19 nt, Artificial Sequence
  Description of Artificial Sequence: Synthetic oligonucleotide
  Sense strand starting at position 2777 of SEQ ID NO: 1561799
ucaggaaccuccugauuuc

SEQ ID NO: 1699324 - RNA, 19 nt, Artificial Sequence
  Description of Artificial Sequence: Synthetic oligonucleotide
  Antisense strand to SEQ ID NO: 1699323
gaaaucaggagguuccuga

SEQ ID NO: 1699325 - RNA, 19 nt, Artificial Sequence
  Description of Artificial Sequence: Synthetic oligonucleotide
  Sense strand starting at position 2788 of SEQ ID NO: 1561799
cugauuucugauugcgagu

SEQ ID NO: 1699326 - RNA, 19 nt, Artificial Sequence
  Description of Artificial Sequence: Synthetic oligonucleotide
  Antisense strand to SEQ ID NO: 1699325
acucgcaaucagaaaucag

SEQ ID NO: 1699327 - RNA, 19 nt, Artificial Sequence
  Description of Artificial Sequence: Synthetic oligonucleotide
  Sense strand starting at position 2885 of SEQ ID NO: 1561799
uuuauuaguuccuggcaca

SEQ ID NO: 1699328 - RNA, 19 nt, Artificial Sequence
  Description of Artificial Sequence: Synthetic oligonucleotide
  Antisense strand to SEQ ID NO: 1699327
ugugccaggaacuaauaaa

SEQ ID NO: 1699329 - RNA, 19 nt, Artificial Sequence
  Description of Artificial Sequence: Synthetic oligonucleotide
  Sense strand starting at position 2888 of SEQ ID NO: 1561799
auuaguuccuggcacagaa

SEQ ID NO: 1699330 - RNA, 19 nt, Artificial Sequence
  Description of Artificial Sequence: Synthetic oligonucleotide
  Antisense strand to SEQ ID NO: 1699329
uucugugccaggaacuaau

SEQ ID NO: 1699331 - RNA, 19 nt, Artificial Sequence
  Description of Artificial Sequence: Synthetic oligonucleotide
  Sense strand starting at position 2996 of SEQ ID NO: 1561799
ccagcacuuuccugcagaa

SEQ ID NO: 1699332 - RNA, 19 nt, Artificial Sequence
  Description of Artificial Sequence: Synthetic oligonucleotide
  Antisense strand to SEQ ID NO: 1699331
uucugcaggaaagugcugg

SEQ ID NO: 1699333 - RNA, 19 nt, Artificial Sequence
  Description of Artificial Sequence: Synthetic oligonucleotide
  Sense strand starting at position 2998 of SEQ ID NO: 1561799
agcacuuuccugcagaaca

SEQ ID NO: 1699334 - RNA, 19 nt, Artificial Sequence
  Description of Artificial Sequence: Synthetic oligonucleotide
  Antisense strand to SEQ ID NO: 1699333
uguucugcaggaaagugcu

SEQ ID NO: 1699335 - RNA, 19 nt, Artificial Sequence
  Description of Artificial Sequence: Synthetic oligonucleotide
  Sense strand starting at position 3112 of SEQ ID NO: 1561799
ggccuccaagugugaguua

SEQ ID NO: 1699336 - RNA, 19 nt, Artificial Sequence
  Description of Artificial Sequence: Synthetic oligonucleotide
  Antisense strand to SEQ ID NO: 1699335
uaacucacacuuggaggcc

SEQ ID NO: 1699337 - RNA, 19 nt, Artificial Sequence
  Description of Artificial Sequence: Synthetic oligonucleotide
  Sense strand starting at position 3117 of SEQ ID NO: 1561799
ccaagugugaguuagcguu

SEQ ID NO: 1699338 - RNA, 19 nt, Artificial Sequence
  Description of Artificial Sequence: Synthetic oligonucleotide
  Antisense strand to SEQ ID NO: 1699337
aacgcuaacucacacuugg

SEQ ID NO: 1699339 - RNA, 19 nt, Artificial Sequence
  Description of Artificial Sequence: Synthetic oligonucleotide
  Sense strand starting at position 3121 of SEQ ID NO: 1561799
gugugaguuagcguucugu

SEQ ID NO: 1699340 - RNA, 19 nt, Artificial Sequence
  Description of Artificial Sequence: Synthetic oligonucleotide
  Antisense strand to SEQ ID NO: 1699339
acagaacgcuaacucacac

SEQ ID NO: 1699341 - RNA, 19 nt, Artificial Sequence
  Description of Artificial Sequence: Synthetic oligonucleotide
  Sense strand starting at position 3123 of SEQ ID NO: 1561799
gugaguuagcguucuguca

SEQ ID NO: 1699342 - RNA, 19 nt, Artificial Sequence
  Description of Artificial Sequence: Synthetic oligonucleotide
  Antisense strand to SEQ ID NO: 1699341
ugacagaacgcuaacucac

SEQ ID NO: 1699343 - RNA, 19 nt, Artificial Sequence
  Description of Artificial Sequence: Synthetic oligonucleotide
  Sense strand starting at position 3124 of SEQ ID NO: 1561799
ugaguuagcguucugucac

SEQ ID NO: 1699344 - RNA, 19 nt, Artificial Sequence
  Description of Artificial Sequence: Synthetic oligonucleotide
  Antisense strand to SEQ ID NO: 1699343
gugacagaacgcuaacuca

SEQ ID NO: 1699345 - RNA, 19 nt, Artificial Sequence
  Description of Artificial Sequence: Synthetic oligonucleotide
  Sense strand starting at position 3125 of SEQ ID NO: 1561799
gaguuagcguucugucaca

SEQ ID NO: 1699346 - RNA, 19 nt, Artificial Sequence
  Description of Artificial Sequence: Synthetic oligonucleotide
  Antisense strand to SEQ ID NO: 1699345
ugugacagaacgcuaacuc

SEQ ID NO: 1699347 - RNA, 19 nt, Artificial Sequence
  Description of Artificial Sequence: Synthetic oligonucleotide
  Sense strand starting at position 3127 of SEQ ID NO: 1561799
guuagcguucugucacaca

SEQ ID NO: 1699348 - RNA, 19 nt, Artificial Sequence
  Description of Artificial Sequence: Synthetic oligonucleotide
  Antisense strand to SEQ ID NO: 1699347
ugugugacagaacgcuaac

SEQ ID NO: 1699349 - RNA, 19 nt, Artificial Sequence
  Description of Artificial Sequence: Synthetic oligonucleotide
  Sense strand starting at position 3333 of SEQ ID NO: 1561799
auggguuucuccuuaagac

SEQ ID NO: 1699350 - RNA, 19 nt, Artificial Sequence
  Description of Artificial Sequence: Synthetic oligonucleotide
  Antisense strand to SEQ ID NO: 1699349
gucuuaaggagaaacccau

SEQ ID NO: 1699351 - RNA, 19 nt, Artificial Sequence
  Description of Artificial Sequence: Synthetic oligonucleotide
  Sense strand starting at position 3334 of SEQ ID NO: 1561799
uggguuucuccuuaagaca

SEQ ID NO: 1699352 - RNA, 19 nt, Artificial Sequence
  Description of Artificial Sequence: Synthetic oligonucleotide
  Antisense strand to SEQ ID NO: 1699351
ugucuuaaggagaaaccca

SEQ ID NO: 1699353 - RNA, 19 nt, Artificial Sequence
  Description of Artificial Sequence: Synthetic oligonucleotide
  Sense strand starting at position 3659 of SEQ ID NO: 1561799
cagggaaucuuggcagaac

SEQ ID NO: 1699354 - RNA, 19 nt, Artificial Sequence
  Description of Artificial Sequence: Synthetic oligonucleotide
  Antisense strand to SEQ ID NO: 1699353
guucugccaagauucccug

SEQ ID NO: 1699355 - RNA, 19 nt, Artificial Sequence
  Description of Artificial Sequence: Synthetic oligonucleotide
  Sense strand starting at position 3744 of SEQ ID NO: 1561799
ggucuuccacuguggagau

SEQ ID NO: 1699356 - RNA, 19 nt, Artificial Sequence
  Description of Artificial Sequence: Synthetic oligonucleotide
  Antisense strand to SEQ ID NO: 1699355
aucuccacaguggaagacc

SEQ ID NO: 1699357 - RNA, 19 nt, Artificial Sequence
  Description of Artificial Sequence: Synthetic oligonucleotide
  Sense strand starting at position 3754 of SEQ ID NO: 1561799
uguggagauggauguggaa

SEQ ID NO: 1699358 - RNA, 19 nt, Artificial Sequence
  Description of Artificial Sequence: Synthetic oligonucleotide
  Antisense strand to SEQ ID NO: 1699357
uuccacauccaucuccaca

SEQ ID NO: 1699359 - RNA, 19 nt, Artificial Sequence
  Description of Artificial Sequence: Synthetic oligonucleotide
  Sense strand starting at position 3793 of SEQ ID NO: 1561799
uucugccuuuccugagauu

SEQ ID NO: 1699360 - RNA, 19 nt, Artificial Sequence
  Description of Artificial Sequence: Synthetic oligonucleotide
  Antisense strand to SEQ ID NO: 1699359
aaucucaggaaaggcagaa

SEQ ID NO: 1699361 - RNA, 19 nt, Artificial Sequence
  Description of Artificial Sequence: Synthetic oligonucleotide
  Sense strand starting at position 3794 of SEQ ID NO: 1561799
ucugccuuuccugagauua

SEQ ID NO: 1699362 - RNA, 19 nt, Artificial Sequence
  Description of Artificial Sequence: Synthetic oligonucleotide
  Antisense strand to SEQ ID NO: 1699361
uaaucucaggaaaggcaga

SEQ ID NO: 1699363 - RNA, 19 nt, Artificial Sequence
  Description of Artificial Sequence: Synthetic oligonucleotide
  Sense strand starting at position 3824 of SEQ ID NO: 1561799
uccuguuugugucucaaua

SEQ ID NO: 1699364 - RNA, 19 nt, Artificial Sequence
  Description of Artificial Sequence: Synthetic oligonucleotide
  Antisense strand to SEQ ID NO: 1699363
uauugagacacaaacagga

SEQ ID NO: 1699365 - RNA, 19 nt, Artificial Sequence
  Description of Artificial Sequence: Synthetic oligonucleotide
  Sense strand starting at position 3826 of SEQ ID NO: 1561799
cuguuugugucucaauaug

SEQ ID NO: 1699366 - RNA, 19 nt, Artificial Sequence
  Description of Artificial Sequence: Synthetic oligonucleotide
  Antisense strand to SEQ ID NO: 1699365
cauauugagacacaaacag

SEQ ID NO: 1699367 - RNA, 19 nt, Artificial Sequence
  Description of Artificial Sequence: Synthetic oligonucleotide
  Sense strand starting at position 6 of SEQ ID NO: 1561800
gagaguguucauggcagua

SEQ ID NO: 1699368 - RNA, 19 nt, Artificial Sequence
  Description of Artificial Sequence: Synthetic oligonucleotide
  Antisense strand to SEQ ID NO: 1699367
uacugccaugaacacucuc

SEQ ID NO: 1699369 - RNA, 19 nt, Artificial Sequence
  Description of Artificial Sequence: Synthetic oligonucleotide
  Sense strand starting at position 16 of SEQ ID NO: 1561800
auggcaguauugcuuagaa

SEQ ID NO: 1699370 - RNA, 19 nt, Artificial Sequence
  Description of Artificial Sequence: Synthetic oligonucleotide
  Antisense strand to SEQ ID NO: 1699369
uucuaagcaauacugccau

SEQ ID NO: 1699371 - RNA, 19 nt, Artificial Sequence
  Description of Artificial Sequence: Synthetic oligonucleotide
  Sense strand starting at position 18 of SEQ ID NO: 1561800
ggcaguauugcuuagaaca

SEQ ID NO: 1699372 - RNA, 19 nt, Artificial Sequence
  Description of Artificial Sequence: Synthetic oligonucleotide
  Antisense strand to SEQ ID NO: 1699371
uguucuaagcaauacugcc

SEQ ID NO: 1699373 - RNA, 19 nt, Artificial Sequence
  Description of Artificial Sequence: Synthetic oligonucleotide
  Sense strand starting at position 66 of SEQ ID NO: 1561800
acccauuaaugggugauua

SEQ ID NO: 1699374 - RNA, 19 nt, Artificial Sequence
  Description of Artificial Sequence: Synthetic oligonucleotide
  Antisense strand to SEQ ID NO: 1699373
uaaucacccauuaaugggu

SEQ ID NO: 1699375 - RNA, 19 nt, Artificial Sequence
  Description of Artificial Sequence: Synthetic oligonucleotide
  Sense strand starting at position 67 of SEQ ID NO: 1561800
cccauuaaugggugauuaa

SEQ ID NO: 1699376 - RNA, 19 nt, Artificial Sequence
  Description of Artificial Sequence: Synthetic oligonucleotide
  Antisense strand to SEQ ID NO: 1699375
uuaaucacccauuaauggg

SEQ ID NO: 1699377 - RNA, 19 nt, Artificial Sequence
  Description of Artificial Sequence: Synthetic oligonucleotide
  Sense strand starting at position 70 of SEQ ID NO: 1561800
auuaaugggugauuaaacu

SEQ ID NO: 1699378 - RNA, 19 nt, Artificial Sequence
  Description of Artificial Sequence: Synthetic oligonucleotide
  Antisense strand to SEQ ID NO: 1699377
aguuuaaucacccauuaau

SEQ ID NO: 1699379 - RNA, 19 nt, Artificial Sequence
  Description of Artificial Sequence: Synthetic oligonucleotide
  Sense strand starting at position 76 of SEQ ID NO: 1561800
gggugauuaaacuguguua

SEQ ID NO: 1699380 - RNA, 19 nt, Artificial Sequence
  Description of Artificial Sequence: Synthetic oligonucleotide
  Antisense strand to SEQ ID NO: 1699379
uaacacaguuuaaucaccc

SEQ ID NO: 1699381 - RNA, 19 nt, Artificial Sequence
  Description of Artificial Sequence: Synthetic oligonucleotide
  Sense strand starting at position 78 of SEQ ID NO: 1561800
gugauuaaacuguguuaua

SEQ ID NO: 1699382 - RNA, 19 nt, Artificial Sequence
  Description of Artificial Sequence: Synthetic oligonucleotide
  Antisense strand to SEQ ID NO: 1699381
uauaacacaguuuaaucac

SEQ ID NO: 1699383 - RNA, 19 nt, Artificial Sequence
  Description of Artificial Sequence: Synthetic oligonucleotide
  Sense strand starting at position 135 of SEQ ID NO: 1561800
caagacuucuaugugcuga

SEQ ID NO: 1699384 - RNA, 19 nt, Artificial Sequence
  Description of Artificial Sequence: Synthetic oligonucleotide
  Antisense strand to SEQ ID NO: 1699383
ucagcacauagaagucuug

SEQ ID NO: 1699385 - RNA, 19 nt, Artificial Sequence
  Description of Artificial Sequence: Synthetic oligonucleotide
  Sense strand starting at position 140 of SEQ ID NO: 1561800
cuucuaugugcugauggaa

SEQ ID NO: 1699386 - RNA, 19 nt, Artificial Sequence
  Description of Artificial Sequence: Synthetic oligonucleotide
  Antisense strand to SEQ ID NO: 1699385
uuccaucagcacauagaag

SEQ ID NO: 1699387 - RNA, 19 nt, Artificial Sequence
  Description of Artificial Sequence: Synthetic oligonucleotide
  Sense strand starting at position 185 of SEQ ID NO: 1561800
aagucagggugguuuagua

SEQ ID NO: 1699388 - RNA, 19 nt, Artificial Sequence
  Description of Artificial Sequence: Synthetic oligonucleotide
  Antisense strand to SEQ ID NO: 1699387
uacuaaaccacccugacuu

SEQ ID NO: 1699389 - RNA, 19 nt, Artificial Sequence
  Description of Artificial Sequence: Synthetic oligonucleotide
  Sense strand starting at position 327 of SEQ ID NO: 1561800
ucauaucuugacugugaug

SEQ ID NO: 1699390 - RNA, 19 nt, Artificial Sequence
  Description of Artificial Sequence: Synthetic oligonucleotide
  Antisense strand to SEQ ID NO: 1699389
caucacagucaagauauga

SEQ ID NO: 1699391 - RNA, 19 nt, Artificial Sequence
  Description of Artificial Sequence: Synthetic oligonucleotide
  Sense strand starting at position 796 of SEQ ID NO: 1561800
guuggaauucuaggguaug

SEQ ID NO: 1699392 - RNA, 19 nt, Artificial Sequence
  Description of Artificial Sequence: Synthetic oligonucleotide
  Antisense strand to SEQ ID NO: 1699391
cauacccuagaauuccaac

SEQ ID NO: 1699393 - RNA, 19 nt, Artificial Sequence
  Description of Artificial Sequence: Synthetic oligonucleotide
  Sense strand starting at position 982 of SEQ ID NO: 1561800
uuaagauacugagcugaga

SEQ ID NO: 1699394 - RNA, 19 nt, Artificial Sequence
  Description of Artificial Sequence: Synthetic oligonucleotide
  Antisense strand to SEQ ID NO: 1699393
ucucagcucaguaucuuaa

SEQ ID NO: 1699395 - RNA, 19 nt, Artificial Sequence
  Description of Artificial Sequence: Synthetic oligonucleotide
  Sense strand starting at position 1174 of SEQ ID NO: 1561800
gguaucucguuacuccaga

SEQ ID NO: 1699396 - RNA, 19 nt, Artificial Sequence
  Description of Artificial Sequence: Synthetic oligonucleotide
  Antisense strand to SEQ ID NO: 1699395
ucuggaguaacgagauacc

SEQ ID NO: 1699397 - RNA, 19 nt, Artificial Sequence
  Description of Artificial Sequence: Synthetic oligonucleotide
  Sense strand starting at position 1175 of SEQ ID NO: 1561800
guaucucguuacuccagaa

SEQ ID NO: 1699398 - RNA, 19 nt, Artificial Sequence
  Description of Artificial Sequence: Synthetic oligonucleotide
  Antisense strand to SEQ ID NO: 1699397
uucuggaguaacgagauac

SEQ ID NO: 1699399 - RNA, 19 nt, Artificial Sequence
  Description of Artificial Sequence: Synthetic oligonucleotide
  Sense strand starting at position 1179 of SEQ ID NO: 1561800
cucguuacuccagaaauug

SEQ ID NO: 1699400 - RNA, 19 nt, Artificial Sequence
  Description of Artificial Sequence: Synthetic oligonucleotide
  Antisense strand to SEQ ID NO: 1699399
caauuucuggaguaacgag

SEQ ID NO: 1699401 - RNA, 19 nt, Artificial Sequence
  Description of Artificial Sequence: Synthetic oligonucleotide
  Sense strand starting at position 1258 of SEQ ID NO: 1561800
ccggcuaauccaggacuuu

SEQ ID NO: 1699402 - RNA, 19 nt, Artificial Sequence
  Description of Artificial Sequence: Synthetic oligonucleotide
  Antisense strand to SEQ ID NO: 1699401
aaaguccuggauuagccgg

SEQ ID NO: 1699403 - RNA, 19 nt, Artificial Sequence
  Description of Artificial Sequence: Synthetic oligonucleotide
  Sense strand starting at position 1298 of SEQ ID NO: 1561800
aguggauccuggaggugau

SEQ ID NO: 1699404 - RNA, 19 nt, Artificial Sequence
  Description of Artificial Sequence: Synthetic oligonucleotide
  Antisense strand to SEQ ID NO: 1699403
aucaccuccaggauccacu

SEQ ID NO: 1699405 - RNA, 19 nt, Artificial Sequence
  Description of Artificial Sequence: Synthetic oligonucleotide
  Sense strand starting at position 1299 of SEQ ID NO: 1561800
guggauccuggaggugaua

SEQ ID NO: 1699406 - RNA, 19 nt, Artificial Sequence
  Description of Artificial Sequence: Synthetic oligonucleotide
  Antisense strand to SEQ ID NO: 1699405
uaucaccuccaggauccac

SEQ ID NO: 1699407 - RNA, 19 nt, Artificial Sequence
  Description of Artificial Sequence: Synthetic oligonucleotide
  Sense strand starting at position 1301 of SEQ ID NO: 1561800
ggauccuggaggugauagu

SEQ ID NO: 1699408 - RNA, 19 nt, Artificial Sequence
  Description of Artificial Sequence: Synthetic oligonucleotide
  Antisense strand to SEQ ID NO: 1699407
acuaucaccuccaggaucc

SEQ ID NO: 1699409 - RNA, 19 nt, Artificial Sequence
  Description of Artificial Sequence: Synthetic oligonucleotide
  Sense strand starting at position 1494 of SEQ ID NO: 1561800
gugagaggucgcagcucau

SEQ ID NO: 1699410 - RNA, 19 nt, Artificial Sequence
  Description of Artificial Sequence: Synthetic oligonucleotide
  Antisense strand to SEQ ID NO: 1699409
augagcugcgaccucucac

SEQ ID NO: 1699411 - RNA, 19 nt, Artificial Sequence
  Description of Artificial Sequence: Synthetic oligonucleotide
  Sense strand starting at position 2111 of SEQ ID NO: 1561800
ugaucaacgugucuuaaag

SEQ ID NO: 1699412 - RNA, 19 nt, Artificial Sequence
  Description of Artificial Sequence: Synthetic oligonucleotide
  Antisense strand to SEQ ID NO: 1699411
cuuuaagacacguugauca

SEQ ID NO: 1699413 - RNA, 19 nt, Artificial Sequence
  Description of Artificial Sequence: Synthetic oligonucleotide
  Sense strand starting at position 2183 of SEQ ID NO: 1561800
gcauguauugagcacuuau

SEQ ID NO: 1699414 - RNA, 19 nt, Artificial Sequence
  Description of Artificial Sequence: Synthetic oligonucleotide
  Antisense strand to SEQ ID NO: 1699413
auaagugcucaauacaugc

SEQ ID NO: 1699415 - RNA, 19 nt, Artificial Sequence
  Description of Artificial Sequence: Synthetic oligonucleotide
  Sense strand starting at position 2767 of SEQ ID NO: 1561800
guggucugcucccuuauuu

SEQ ID NO: 1699416 - RNA, 19 nt, Artificial Sequence
  Description of Artificial Sequence: Synthetic oligonucleotide
  Antisense strand to SEQ ID NO: 1699415
aaauaagggagcagaccac

SEQ ID NO: 1699417 - RNA, 19 nt, Artificial Sequence
  Description of Artificial Sequence: Synthetic oligonucleotide
  Sense strand starting at position 2775 of SEQ ID NO: 1561800
cucccuuauuuagggauau

SEQ ID NO: 1699418 - RNA, 19 nt, Artificial Sequence
  Description of Artificial Sequence: Synthetic oligonucleotide
  Antisense strand to SEQ ID NO: 1699417
auaucccuaaauaagggag

SEQ ID NO: 1699419 - RNA, 19 nt, Artificial Sequence
  Description of Artificial Sequence: Synthetic oligonucleotide
  Sense strand starting at position 2808 of SEQ ID NO: 1561800
caguuacuuguugauugua

SEQ ID NO: 1699420 - RNA, 19 nt, Artificial Sequence
  Description of Artificial Sequence: Synthetic oligonucleotide
  Antisense strand to SEQ ID NO: 1699419
uacaaucaacaaguaacug

SEQ ID NO: 1699421 - RNA, 19 nt, Artificial Sequence
  Description of Artificial Sequence: Synthetic oligonucleotide
  Sense strand starting at position 2810 of SEQ ID NO: 1561800
guuacuuguugauuguaua

SEQ ID NO: 1699422 - RNA, 19 nt, Artificial Sequence
  Description of Artificial Sequence: Synthetic oligonucleotide
  Antisense strand to SEQ ID NO: 1699421
uauacaaucaacaaguaac

SEQ ID NO: 1699423 - RNA, 19 nt, Artificial Sequence
  Description of Artificial Sequence: Synthetic oligonucleotide
  Sense strand starting at position 2899 of SEQ ID NO: 1561800
gcugucacucuugagguuu

SEQ ID NO: 1699424 - RNA, 19 nt, Artificial Sequence
  Description of Artificial Sequence: Synthetic oligonucleotide
  Antisense strand to SEQ ID NO: 1699423
aaaccucaagagugacagc

SEQ ID NO: 1699425 - RNA, 19 nt, Artificial Sequence
  Description of Artificial Sequence: Synthetic oligonucleotide
  Sense strand starting at position 2907 of SEQ ID NO: 1561800
ucuugagguuuccugaaau

SEQ ID NO: 1699426 - RNA, 19 nt, Artificial Sequence
  Description of Artificial Sequence: Synthetic oligonucleotide
  Antisense strand to SEQ ID NO: 1699425
auuucaggaaaccucaaga

SEQ ID NO: 1699427 - RNA, 19 nt, Artificial Sequence
  Description of Artificial Sequence: Synthetic oligonucleotide
  Sense strand starting at position 2919 of SEQ ID NO: 1561800
cugaaaucccgucaguucu

SEQ ID NO: 1699428 - RNA, 19 nt, Artificial Sequence
  Description of Artificial Sequence: Synthetic oligonucleotide
  Antisense strand to SEQ ID NO: 1699427
agaacugacgggauuucag

SEQ ID NO: 1699429 - RNA, 19 nt, Artificial Sequence
  Description of Artificial Sequence: Synthetic oligonucleotide
  Sense strand starting at position 2968 of SEQ ID NO: 1561800
uugggaugugguuacacaa

SEQ ID NO: 1699430 - RNA, 19 nt, Artificial Sequence
  Description of Artificial Sequence: Synthetic oligonucleotide
  Antisense strand to SEQ ID NO: 1699429
uuguguaaccacaucccaa

SEQ ID NO: 1699431 - RNA, 19 nt, Artificial Sequence
  Description of Artificial Sequence: Synthetic oligonucleotide
  Sense strand starting at position 3030 of SEQ ID NO: 1561800
cugucagcccuguagaaug

SEQ ID NO: 1699432 - RNA, 19 nt, Artificial Sequence
  Description of Artificial Sequence: Synthetic oligonucleotide
  Antisense strand to SEQ ID NO: 1699431
cauucuacagggcugacag

SEQ ID NO: 1699433 - RNA, 19 nt, Artificial Sequence
  Description of Artificial Sequence: Synthetic oligonucleotide
  Sense strand starting at position 3041 of SEQ ID NO: 1561800
guagaaugucuuggguaag

SEQ ID NO: 1699434 - RNA, 19 nt, Artificial Sequence
  Description of Artificial Sequence: Synthetic oligonucleotide
  Antisense strand to SEQ ID NO: 1699433
cuuacccaagacauucuac

SEQ ID NO: 1699435 - RNA, 19 nt, Artificial Sequence
  Description of Artificial Sequence: Synthetic oligonucleotide
  Sense strand starting at position 3502 of SEQ ID NO: 1561800
gacuuuggucagugugaca

SEQ ID NO: 1699436 - RNA, 19 nt, Artificial Sequence
  Description of Artificial Sequence: Synthetic oligonucleotide
  Antisense strand to SEQ ID NO: 1699435
ugucacacugaccaaaguc

SEQ ID NO: 1699437 - RNA, 19 nt, Artificial Sequence
  Description of Artificial Sequence: Synthetic oligonucleotide
  Sense strand starting at position 3546 of SEQ ID NO: 1561800
aagucagaucuaggaucca

SEQ ID NO: 1699438 - RNA, 19 nt, Artificial Sequence
  Description of Artificial Sequence: Synthetic oligonucleotide
  Antisense strand to SEQ ID NO: 1699437
uggauccuagaucugacuu

SEQ ID NO: 1699439 - RNA, 19 nt, Artificial Sequence
  Description of Artificial Sequence: Synthetic oligonucleotide
  Sense strand starting at position 3587 of SEQ ID NO: 1561800
aucuauaaccuguguaugu

SEQ ID NO: 1699440 - RNA, 19 nt, Artificial Sequence
  Description of Artificial Sequence: Synthetic oligonucleotide
  Antisense strand to SEQ ID NO: 1699439
acauacacagguuauagau

SEQ ID NO: 1699441 - RNA, 19 nt, Artificial Sequence
  Description of Artificial Sequence: Synthetic oligonucleotide
  Sense strand starting at position 3589 of SEQ ID NO: 1561800
cuauaaccuguguauguga

SEQ ID NO: 1699442 - RNA, 19 nt, Artificial Sequence
  Description of Artificial Sequence: Synthetic oligonucleotide
  Antisense strand to SEQ ID NO: 1699441
ucacauacacagguuauag

SEQ ID NO: 1699443 - RNA, 19 nt, Artificial Sequence
  Description of Artificial Sequence: Synthetic oligonucleotide
  Sense strand starting at position 3708 of SEQ ID NO: 1561800
aggauuggcuaucucuuau

SEQ ID NO: 1699444 - RNA, 19 nt, Artificial Sequence
  Description of Artificial Sequence: Synthetic oligonucleotide
  Antisense strand to SEQ ID NO: 1699443
auaagagauagccaauccu

SEQ ID NO: 1699445 - RNA, 19 nt, Artificial Sequence
  Description of Artificial Sequence: Synthetic oligonucleotide
  Sense strand starting at position 3715 of SEQ ID NO: 1561800
gcuaucucuuauuugcuga

SEQ ID NO: 1699446 - RNA, 19 nt, Artificial Sequence
  Description of Artificial Sequence: Synthetic oligonucleotide
  Antisense strand to SEQ ID NO: 1699445
ucagcaaauaagagauagc

SEQ ID NO: 1699447 - RNA, 19 nt, Artificial Sequence
  Description of Artificial Sequence: Synthetic oligonucleotide
  Sense strand starting at position 32 of SEQ ID NO: 1561801
guaagagaguuucuaagga

SEQ ID NO: 1699448 - RNA, 19 nt, Artificial Sequence
  Description of Artificial Sequence: Synthetic oligonucleotide
  Antisense strand to SEQ ID NO: 1699447
uccuuagaaacucucuuac

SEQ ID NO: 1699449 - RNA, 19 nt, Artificial Sequence
  Description of Artificial Sequence: Synthetic oligonucleotide
  Sense strand starting at position 368 of SEQ ID NO: 1561801
ggcuuucucuaucucagaa

SEQ ID NO: 1699450 - RNA, 19 nt, Artificial Sequence
  Description of Artificial Sequence: Synthetic oligonucleotide
  Antisense strand to SEQ ID NO: 1699449
uucugagauagagaaagcc

SEQ ID NO: 1699451 - RNA, 19 nt, Artificial Sequence
  Description of Artificial Sequence: Synthetic oligonucleotide
  Sense strand starting at position 398 of SEQ ID NO: 1561801
agagacaucucagguaucu

SEQ ID NO: 1699452 - RNA, 19 nt, Artificial Sequence
  Description of Artificial Sequence: Synthetic oligonucleotide
  Antisense strand to SEQ ID NO: 1699451
agauaccugagaugucucu

SEQ ID NO: 1699453 - RNA, 19 nt, Artificial Sequence
  Description of Artificial Sequence: Synthetic oligonucleotide
  Sense strand starting at position 468 of SEQ ID NO: 1561801
ggaucaaacucaggauuga

SEQ ID NO: 1699454 - RNA, 19 nt, Artificial Sequence
  Description of Artificial Sequence: Synthetic oligonucleotide
  Antisense strand to SEQ ID NO: 1699453
ucaauccugaguuugaucc

SEQ ID NO: 1699455 - RNA, 19 nt, Artificial Sequence
  Description of Artificial Sequence: Synthetic oligonucleotide
  Sense strand starting at position 472 of SEQ ID NO: 1561801
caaacucaggauugaguuu

SEQ ID NO: 1699456 - RNA, 19 nt, Artificial Sequence
  Description of Artificial Sequence: Synthetic oligonucleotide
  Antisense strand to SEQ ID NO: 1699455
aaacucaauccugaguuug

SEQ ID NO: 1699457 - RNA, 19 nt, Artificial Sequence
  Description of Artificial Sequence: Synthetic oligonucleotide
  Sense strand starting at position 695 of SEQ ID NO: 1561801
ggcugacuuacucgggagu

SEQ ID NO: 1699458 - RNA, 19 nt, Artificial Sequence
  Description of Artificial Sequence: Synthetic oligonucleotide
  Antisense strand to SEQ ID NO: 1699457
acucccgaguaagucagcc

SEQ ID NO: 1699459 - RNA, 19 nt, Artificial Sequence
  Description of Artificial Sequence: Synthetic oligonucleotide
  Sense strand starting at position 698 of SEQ ID NO: 1561801
ugacuuacucgggaguguu

SEQ ID NO: 1699460 - RNA, 19 nt, Artificial Sequence
  Description of Artificial Sequence: Synthetic oligonucleotide
  Antisense strand to SEQ ID NO: 1699459
aacacucccgaguaaguca

SEQ ID NO: 1699461 - RNA, 19 nt, Artificial Sequence
  Description of Artificial Sequence: Synthetic oligonucleotide
  Sense strand starting at position 701 of SEQ ID NO: 1561801
cuuacucgggaguguugau

SEQ ID NO: 1699462 - RNA, 19 nt, Artificial Sequence
  Description of Artificial Sequence: Synthetic oligonucleotide
  Antisense strand to SEQ ID NO: 1699461
aucaacacucccgaguaag

SEQ ID NO: 1699463 - RNA, 19 nt, Artificial Sequence
  Description of Artificial Sequence: Synthetic oligonucleotide
  Sense strand starting at position 1196 of SEQ ID NO: 1561801
gcuaucugcacccguugaa

SEQ ID NO: 1699464 - RNA, 19 nt, Artificial Sequence
  Description of Artificial Sequence: Synthetic oligonucleotide
  Antisense strand to SEQ ID NO: 1699463
uucaacgggugcagauagc

SEQ ID NO: 1699465 - RNA, 19 nt, Artificial Sequence
  Description of Artificial Sequence: Synthetic oligonucleotide
  Sense strand starting at position 1267 of SEQ ID NO: 1561801
gccucugaauaguucgcaa

SEQ ID NO: 1699466 - RNA, 19 nt, Artificial Sequence
  Description of Artificial Sequence: Synthetic oligonucleotide
  Antisense strand to SEQ ID NO: 1699465
uugcgaacuauucagaggc

SEQ ID NO: 1699467 - RNA, 19 nt, Artificial Sequence
  Description of Artificial Sequence: Synthetic oligonucleotide
  Sense strand starting at position 1269 of SEQ ID NO: 1561801
cucugaauaguucgcaaac

SEQ ID NO: 1699468 - RNA, 19 nt, Artificial Sequence
  Description of Artificial Sequence: Synthetic oligonucleotide
  Antisense strand to SEQ ID NO: 1699467
guuugcgaacuauucagag

SEQ ID NO: 1699469 - RNA, 19 nt, Artificial Sequence
  Description of Artificial Sequence: Synthetic oligonucleotide
  Sense strand starting at position 1270 of SEQ ID NO: 1561801
ucugaauaguucgcaaacu

SEQ ID NO: 1699470 - RNA, 19 nt, Artificial Sequence
  Description of Artificial Sequence: Synthetic oligonucleotide
  Antisense strand to SEQ ID NO: 1699469
aguuugcgaacuauucaga

SEQ ID NO: 1699471 - RNA, 19 nt, Artificial Sequence
  Description of Artificial Sequence: Synthetic oligonucleotide
  Sense strand starting at position 1271 of SEQ ID NO: 1561801
cugaauaguucgcaaacuu

SEQ ID NO: 1699472 - RNA, 19 nt, Artificial Sequence
  Description of Artificial Sequence: Synthetic oligonucleotide
  Antisense strand to SEQ ID NO: 1699471
aaguuugcgaacuauucag

SEQ ID NO: 1699473 - RNA, 19 nt, Artificial Sequence
  Description of Artificial Sequence: Synthetic oligonucleotide
  Sense strand starting at position 1429 of SEQ ID NO: 1561801
gcgucuucacgagugcaga

SEQ ID NO: 1699474 - RNA, 19 nt, Artificial Sequence
  Description of Artificial Sequence: Synthetic oligonucleotide
  Antisense strand to SEQ ID NO: 1699473
ucugcacucgugaagacgc

SEQ ID NO: 1699475 - RNA, 19 nt, Artificial Sequence
  Description of Artificial Sequence: Synthetic oligonucleotide
  Sense strand starting at position 2254 of SEQ ID NO: 1561801
agacacauuucucauuguu

SEQ ID NO: 1699476 - RNA, 19 nt, Artificial Sequence
  Description of Artificial Sequence: Synthetic oligonucleotide
  Antisense strand to SEQ ID NO: 1699475
aacaaugagaaaugugucu

SEQ ID NO: 1699477 - RNA, 19 nt, Artificial Sequence
  Description of Artificial Sequence: Synthetic oligonucleotide
  Sense strand starting at position 2310 of SEQ ID NO: 1561801
caaggaacucgguguacuu

SEQ ID NO: 1699478 - RNA, 19 nt, Artificial Sequence
  Description of Artificial Sequence: Synthetic oligonucleotide
  Antisense strand to SEQ ID NO: 1699477
aaguacaccgaguuccuug

SEQ ID NO: 1699479 - RNA, 19 nt, Artificial Sequence
  Description of Artificial Sequence: Synthetic oligonucleotide
  Sense strand starting at position 2312 of SEQ ID NO: 1561801
aggaacucgguguacuuua

SEQ ID NO: 1699480 - RNA, 19 nt, Artificial Sequence
  Description of Artificial Sequence: Synthetic oligonucleotide
  Antisense strand to SEQ ID NO: 1699479
uaaaguacaccgaguuccu

SEQ ID NO: 1699481 - RNA, 19 nt, Artificial Sequence
  Description of Artificial Sequence: Synthetic oligonucleotide
  Sense strand starting at position 2417 of SEQ ID NO: 1561801
caacaaagauccuggguua

SEQ ID NO: 1699482 - RNA, 19 nt, Artificial Sequence
  Description of Artificial Sequence: Synthetic oligonucleotide
  Antisense strand to SEQ ID NO: 1699481
uaacccaggaucuuuguug

SEQ ID NO: 1699483 - RNA, 19 nt, Artificial Sequence
  Description of Artificial Sequence: Synthetic oligonucleotide
  Sense strand starting at position 2482 of SEQ ID NO: 1561801
gguggcuucaggugagagu

SEQ ID NO: 1699484 - RNA, 19 nt, Artificial Sequence
  Description of Artificial Sequence: Synthetic oligonucleotide
  Antisense strand to SEQ ID NO: 1699483
acucucaccugaagccacc

SEQ ID NO: 1699485 - RNA, 19 nt, Artificial Sequence
  Description of Artificial Sequence: Synthetic oligonucleotide
  Sense strand starting at position 2680 of SEQ ID NO: 1561801
ggcacuuguggucaaagga

SEQ ID NO: 1699486 - RNA, 19 nt, Artificial Sequence
  Description of Artificial Sequence: Synthetic oligonucleotide
  Antisense strand to SEQ ID NO: 1699485
uccuuugaccacaagugcc

SEQ ID NO: 1699487 - RNA, 19 nt, Artificial Sequence
  Description of Artificial Sequence: Synthetic oligonucleotide
  Sense strand starting at position 2924 of SEQ ID NO: 1561801
agagcaguuucugaggaca

SEQ ID NO: 1699488 - RNA, 19 nt, Artificial Sequence
  Description of Artificial Sequence: Synthetic oligonucleotide
  Antisense strand to SEQ ID NO: 1699487
uguccucagaaacugcucu

SEQ ID NO: 1699489 - RNA, 19 nt, Artificial Sequence
  Description of Artificial Sequence: Synthetic oligonucleotide
  Sense strand starting at position 3112 of SEQ ID NO: 1561801
cacugaccugagugaaugu

SEQ ID NO: 1699490 - RNA, 19 nt, Artificial Sequence
  Description of Artificial Sequence: Synthetic oligonucleotide
  Antisense strand to SEQ ID NO: 1699489
acauucacucaggucagug

SEQ ID NO: 1699491 - RNA, 19 nt, Artificial Sequence
  Description of Artificial Sequence: Synthetic oligonucleotide
  Sense strand starting at position 3121 of SEQ ID NO: 1561801
gagugaaugugccuuccga

SEQ ID NO: 1699492 - RNA, 19 nt, Artificial Sequence
  Description of Artificial Sequence: Synthetic oligonucleotide
  Antisense strand to SEQ ID NO: 1699491
ucggaaggcacauucacuc

SEQ ID NO: 1699493 - RNA, 19 nt, Artificial Sequence
  Description of Artificial Sequence: Synthetic oligonucleotide
  Sense strand starting at position 3252 of SEQ ID NO: 1561801
agcacuaaacucuggguaa

SEQ ID NO: 1699494 - RNA, 19 nt, Artificial Sequence
  Description of Artificial Sequence: Synthetic oligonucleotide
  Antisense strand to SEQ ID NO: 1699493
uuacccagaguuuagugcu

SEQ ID NO: 1699495 - RNA, 19 nt, Artificial Sequence
  Description of Artificial Sequence: Synthetic oligonucleotide
  Sense strand starting at position 3253 of SEQ ID NO: 1561801
gcacuaaacucuggguaaa

SEQ ID NO: 1699496 - RNA, 19 nt, Artificial Sequence
  Description of Artificial Sequence: Synthetic oligonucleotide
  Antisense strand to SEQ ID NO: 1699495
uuuacccagaguuuagugc

SEQ ID NO: 1699497 - RNA, 19 nt, Artificial Sequence
  Description of Artificial Sequence: Synthetic oligonucleotide
  Sense strand starting at position 3255 of SEQ ID NO: 1561801
acuaaacucuggguaaauu

SEQ ID NO: 1699498 - RNA, 19 nt, Artificial Sequence
  Description of Artificial Sequence: Synthetic oligonucleotide
  Antisense strand to SEQ ID NO: 1699497
aauuuacccagaguuuagu

SEQ ID NO: 1699499 - RNA, 19 nt, Artificial Sequence
  Description of Artificial Sequence: Synthetic oligonucleotide
  Sense strand starting at position 3263 of SEQ ID NO: 1561801
cuggguaaauugguacaga

SEQ ID NO: 1699500 - RNA, 19 nt, Artificial Sequence
  Description of Artificial Sequence: Synthetic oligonucleotide
  Antisense strand to SEQ ID NO: 1699499
ucuguaccaauuuacccag

SEQ ID NO: 1699501 - RNA, 19 nt, Artificial Sequence
  Description of Artificial Sequence: Synthetic oligonucleotide
  Sense strand starting at position 3266 of SEQ ID NO: 1561801
gguaaauugguacagagcu

SEQ ID NO: 1699502 - RNA, 19 nt, Artificial Sequence
  Description of Artificial Sequence: Synthetic oligonucleotide
  Antisense strand to SEQ ID NO: 1699501
agcucuguaccaauuuacc

SEQ ID NO: 1699503 - RNA, 19 nt, Artificial Sequence
  Description of Artificial Sequence: Synthetic oligonucleotide
  Sense strand starting at position 3404 of SEQ ID NO: 1561801
ugcacuugaugcuuugaaa

SEQ ID NO: 1699504 - RNA, 19 nt, Artificial Sequence
  Description of Artificial Sequence: Synthetic oligonucleotide
  Antisense strand to SEQ ID NO: 1699503
uuucaaagcaucaagugca

SEQ ID NO: 1699505 - RNA, 19 nt, Artificial Sequence
  Description of Artificial Sequence: Synthetic oligonucleotide
  Sense strand starting at position 3464 of SEQ ID NO: 1561801
gggcuagaauuuggaucau

SEQ ID NO: 1699506 - RNA, 19 nt, Artificial Sequence
  Description of Artificial Sequence: Synthetic oligonucleotide
  Antisense strand to SEQ ID NO: 1699505
augauccaaauucuagccc

SEQ ID NO: 1699507 - RNA, 19 nt, Artificial Sequence
  Description of Artificial Sequence: Synthetic oligonucleotide
  Sense strand starting at position 3487 of SEQ ID NO: 1561801
guauuaucuuuguuuguug

SEQ ID NO: 1699508 - RNA, 19 nt, Artificial Sequence
  Description of Artificial Sequence: Synthetic oligonucleotide
  Antisense strand to SEQ ID NO: 1699507
caacaaacaaagauaauac

SEQ ID NO: 1699509 - RNA, 19 nt, Artificial Sequence
  Description of Artificial Sequence: Synthetic oligonucleotide
  Sense strand starting at position 3539 of SEQ ID NO: 1561801
gcugauaaaccgcagaguu

SEQ ID NO: 1699510 - RNA, 19 nt, Artificial Sequence
  Description of Artificial Sequence: Synthetic oligonucleotide
  Antisense strand to SEQ ID NO: 1699509
aacucugcgguuuaucagc

SEQ ID NO: 1699511 - RNA, 19 nt, Artificial Sequence
  Description of Artificial Sequence: Synthetic oligonucleotide
  Sense strand starting at position 3602 of SEQ ID NO: 1561801
cugguagauucgguguuua

SEQ ID NO: 1699512 - RNA, 19 nt, Artificial Sequence
  Description of Artificial Sequence: Synthetic oligonucleotide
  Antisense strand to SEQ ID NO: 1699511
uaaacaccgaaucuaccag

SEQ ID NO: 1699513 - RNA, 19 nt, Artificial Sequence
  Description of Artificial Sequence: Synthetic oligonucleotide
  Sense strand starting at position 3606 of SEQ ID NO: 1561801
uagauucgguguuuaauaa

SEQ ID NO: 1699514 - RNA, 19 nt, Artificial Sequence
  Description of Artificial Sequence: Synthetic oligonucleotide
  Antisense strand to SEQ ID NO: 1699513
uuauuaaacaccgaaucua

SEQ ID NO: 1699515 - RNA, 19 nt, Artificial Sequence
  Description of Artificial Sequence: Synthetic oligonucleotide
  Sense strand starting at position 3607 of SEQ ID NO: 1561801
agauucgguguuuaauaag

SEQ ID NO: 1699516 - RNA, 19 nt, Artificial Sequence
  Description of Artificial Sequence: Synthetic oligonucleotide
  Antisense strand to SEQ ID NO: 1699515
cuuauuaaacaccgaaucu

SEQ ID NO: 1699517 - RNA, 19 nt, Artificial Sequence
  Description of Artificial Sequence: Synthetic oligonucleotide
  Sense strand starting at position 3614 of SEQ ID NO: 1561801
guguuuaauaagggcucga

SEQ ID NO: 1699518 - RNA, 19 nt, Artificial Sequence
  Description of Artificial Sequence: Synthetic oligonucleotide
  Antisense strand to SEQ ID NO: 1699517
ucgagcccuuauuaaacac

SEQ ID NO: 1699519 - RNA, 19 nt, Artificial Sequence
  Description of Artificial Sequence: Synthetic oligonucleotide
  Sense strand starting at position 3625 of SEQ ID NO: 1561801
gggcucgauuucugaucau

SEQ ID NO: 1699520 - RNA, 19 nt, Artificial Sequence
  Description of Artificial Sequence: Synthetic oligonucleotide
  Antisense strand to SEQ ID NO: 1699519
augaucagaaaucgagccc

SEQ ID NO: 1699521 - RNA, 19 nt, Artificial Sequence
  Description of Artificial Sequence: Synthetic oligonucleotide
  Sense strand starting at position 3661 of SEQ ID NO: 1561801
ugcauccucaguuguggaa

SEQ ID NO: 1699522 - RNA, 19 nt, Artificial Sequence
  Description of Artificial Sequence: Synthetic oligonucleotide
  Antisense strand to SEQ ID NO: 1699521
uuccacaacugaggaugca

SEQ ID NO: 1699523 - RNA, 19 nt, Artificial Sequence
  Description of Artificial Sequence: Synthetic oligonucleotide
  Sense strand starting at position 3668 of SEQ ID NO: 1561801
ucaguuguggaagggucaa

SEQ ID NO: 1699524 - RNA, 19 nt, Artificial Sequence
  Description of Artificial Sequence: Synthetic oligonucleotide
  Antisense strand to SEQ ID NO: 1699523
uugacccuuccacaacuga

SEQ ID NO: 1699525 - RNA, 19 nt, Artificial Sequence
  Description of Artificial Sequence: Synthetic oligonucleotide
  Sense strand starting at position 3982 of SEQ ID NO: 1561801
cggguaccauguucagaca

SEQ ID NO: 1699526 - RNA, 19 nt, Artificial Sequence
  Description of Artificial Sequence: Synthetic oligonucleotide
  Antisense strand to SEQ ID NO: 1699525
ugucugaacaugguacccg

SEQ ID NO: 1699527 - RNA, 19 nt, Artificial Sequence
  Description of Artificial Sequence: Synthetic oligonucleotide
  Sense strand starting at position 22 of SEQ ID NO: 1561802
ggcagaguuccagagccuu

SEQ ID NO: 1699528 - RNA, 19 nt, Artificial Sequence
  Description of Artificial Sequence: Synthetic oligonucleotide
  Antisense strand to SEQ ID NO: 1699527
aaggcucuggaacucugcc

SEQ ID NO: 1699529 - RNA, 19 nt, Artificial Sequence
  Description of Artificial Sequence: Synthetic oligonucleotide
  Sense strand starting at position 319 of SEQ ID NO: 1561802
ucucgaacuucucaauggu

SEQ ID NO: 1699530 - RNA, 19 nt, Artificial Sequence
  Description of Artificial Sequence: Synthetic oligonucleotide
  Antisense strand to SEQ ID NO: 1699529
accauugagaaguucgaga

SEQ ID NO: 1699531 - RNA, 19 nt, Artificial Sequence
  Description of Artificial Sequence: Synthetic oligonucleotide
  Sense strand starting at position 343 of SEQ ID NO: 1561802
ugucaauaccuccgcauuu

SEQ ID NO: 1699532 - RNA, 19 nt, Artificial Sequence
  Description of Artificial Sequence: Synthetic oligonucleotide
  Antisense strand to SEQ ID NO: 1699531
aaaugcggagguauugaca

SEQ ID NO: 1699533 - RNA, 19 nt, Artificial Sequence
  Description of Artificial Sequence: Synthetic oligonucleotide
  Sense strand starting at position 409 of SEQ ID NO: 1561802
cgaugaccacgauguugau

SEQ ID NO: 1699534 - RNA, 19 nt, Artificial Sequence
  Description of Artificial Sequence: Synthetic oligonucleotide
  Antisense strand to SEQ ID NO: 1699533
aucaacaucguggucaucg

SEQ ID NO: 1699535 - RNA, 19 nt, Artificial Sequence
  Description of Artificial Sequence: Synthetic oligonucleotide
  Sense strand starting at position 430 of SEQ ID NO: 1561802
gggucuucuccuugcccau

SEQ ID NO: 1699536 - RNA, 19 nt, Artificial Sequence
  Description of Artificial Sequence: Synthetic oligonucleotide
  Antisense strand to SEQ ID NO: 1699535
augggcaaggagaagaccc

SEQ ID NO: 1699537 - RNA, 19 nt, Artificial Sequence
  Description of Artificial Sequence: Synthetic oligonucleotide
  Sense strand starting at position 579 of SEQ ID NO: 1561802
cagagacuguccuggcaca

SEQ ID NO: 1699538 - RNA, 19 nt, Artificial Sequence
  Description of Artificial Sequence: Synthetic oligonucleotide
  Antisense strand to SEQ ID NO: 1699537
ugugccaggacagucucug

SEQ ID NO: 1699539 - RNA, 19 nt, Artificial Sequence
  Description of Artificial Sequence: Synthetic oligonucleotide
  Sense strand starting at position 769 of SEQ ID NO: 1561802
gcgggcugcuccuugggaa

SEQ ID NO: 1699540 - RNA, 19 nt, Artificial Sequence
  Description of Artificial Sequence: Synthetic oligonucleotide
  Antisense strand to SEQ ID NO: 1699539
uucccaaggagcagcccgc

SEQ ID NO: 1699541 - RNA, 19 nt, Artificial Sequence
  Description of Artificial Sequence: Synthetic oligonucleotide
  Sense strand starting at position 1154 of SEQ ID NO: 1561802
ccuguuccagccugaggaa

SEQ ID NO: 1699542 - RNA, 19 nt, Artificial Sequence
  Description of Artificial Sequence: Synthetic oligonucleotide
  Antisense strand to SEQ ID NO: 1699541
uuccucaggcuggaacagg

SEQ ID NO: 1699543 - RNA, 19 nt, Artificial Sequence
  Description of Artificial Sequence: Synthetic oligonucleotide
  Sense strand starting at position 1302 of SEQ ID NO: 1561802
cacagaggucaguggagaa

SEQ ID NO: 1699544 - RNA, 19 nt, Artificial Sequence
  Description of Artificial Sequence: Synthetic oligonucleotide
  Antisense strand to SEQ ID NO: 1699543
uucuccacugaccucugug

SEQ ID NO: 1699545 - RNA, 19 nt, Artificial Sequence
  Description of Artificial Sequence: Synthetic oligonucleotide
  Sense strand starting at position 2324 of SEQ ID NO: 1561802
guggaaaucugcugguuuc

SEQ ID NO: 1699546 - RNA, 19 nt, Artificial Sequence
  Description of Artificial Sequence: Synthetic oligonucleotide
  Antisense strand to SEQ ID NO: 1699545
gaaaccagcagauuuccac

SEQ ID NO: 1699547 - RNA, 19 nt, Artificial Sequence
  Description of Artificial Sequence: Synthetic oligonucleotide
  Sense strand starting at position 2751 of SEQ ID NO: 1561802
gcagccauguguuguguga

SEQ ID NO: 1699548 - RNA, 19 nt, Artificial Sequence
  Description of Artificial Sequence: Synthetic oligonucleotide
  Antisense strand to SEQ ID NO: 1699547
ucacacaacacauggcugc

SEQ ID NO: 1699549 - RNA, 19 nt, Artificial Sequence
  Description of Artificial Sequence: Synthetic oligonucleotide
  Sense strand starting at position 2753 of SEQ ID NO: 1561802
agccauguguugugugaag

SEQ ID NO: 1699550 - RNA, 19 nt, Artificial Sequence
  Description of Artificial Sequence: Synthetic oligonucleotide
  Antisense strand to SEQ ID NO: 1699549
cuucacacaacacauggcu

SEQ ID NO: 1699551 - RNA, 19 nt, Artificial Sequence
  Description of Artificial Sequence: Synthetic oligonucleotide
  Sense strand starting at position 2755 of SEQ ID NO: 1561802
ccauguguugugugaagac

SEQ ID NO: 1699552 - RNA, 19 nt, Artificial Sequence
  Description of Artificial Sequence: Synthetic oligonucleotide
  Antisense strand to SEQ ID NO: 1699551
gucuucacacaacacaugg

SEQ ID NO: 1699553 - RNA, 19 nt, Artificial Sequence
  Description of Artificial Sequence: Synthetic oligonucleotide
  Sense strand starting at position 2799 of SEQ ID NO: 1561802
ccaagauccugucgucuca

SEQ ID NO: 1699554 - RNA, 19 nt, Artificial Sequence
  Description of Artificial Sequence: Synthetic oligonucleotide
  Antisense strand to SEQ ID NO: 1699553
ugagacgacaggaucuugg

SEQ ID NO: 1699555 - RNA, 19 nt, Artificial Sequence
  Description of Artificial Sequence: Synthetic oligonucleotide
  Sense strand starting at position 2808 of SEQ ID NO: 1561802
ugucgucucacccagguau

SEQ ID NO: 1699556 - RNA, 19 nt, Artificial Sequence
  Description of Artificial Sequence: Synthetic oligonucleotide
  Antisense strand to SEQ ID NO: 1699555
auaccugggugagacgaca

SEQ ID NO: 1699557 - RNA, 19 nt, Artificial Sequence
  Description of Artificial Sequence: Synthetic oligonucleotide
  Sense strand starting at position 3615 of SEQ ID NO: 1561802
gugugcugacucugggcaa

SEQ ID NO: 1699558 - RNA, 19 nt, Artificial Sequence
  Description of Artificial Sequence: Synthetic oligonucleotide
  Antisense strand to SEQ ID NO: 1699557
uugcccagagucagcacac

SEQ ID NO: 1699559 - RNA, 19 nt, Artificial Sequence
  Description of Artificial Sequence: Synthetic oligonucleotide
  Sense strand starting at position 3845 of SEQ ID NO: 1561802
cggaaugcuaacugcugaa

SEQ ID NO: 1699560 - RNA, 19 nt, Artificial Sequence
  Description of Artificial Sequence: Synthetic oligonucleotide
  Antisense strand to SEQ ID NO: 1699559
uucagcaguuagcauuccg

SEQ ID NO: 1699561 - RNA, 19 nt, Artificial Sequence
  Description of Artificial Sequence: Synthetic oligonucleotide
  Sense strand starting at position 3849 of SEQ ID NO: 1561802
augcuaacugcugaauaac

SEQ ID NO: 1699562 - RNA, 19 nt, Artificial Sequence
  Description of Artificial Sequence: Synthetic oligonucleotide
  Antisense strand to SEQ ID NO: 1699561
guuauucagcaguuagcau

SEQ ID NO: 1699563 - RNA, 19 nt, Artificial Sequence
  Description of Artificial Sequence: Synthetic oligonucleotide
  Sense strand starting at position 3892 of SEQ ID NO: 1561802
aagugcacgaguuguaacu

SEQ ID NO: 1699564 - RNA, 19 nt, Artificial Sequence
  Description of Artificial Sequence: Synthetic oligonucleotide
  Antisense strand to SEQ ID NO: 1699563
aguuacaacucgugcacuu

SEQ ID NO: 1699565 - RNA, 19 nt, Artificial Sequence
  Description of Artificial Sequence: Synthetic oligonucleotide
  Sense strand starting at position 3894 of SEQ ID NO: 1561802
gugcacgaguuguaacuua

SEQ ID NO: 1699566 - RNA, 19 nt, Artificial Sequence
  Description of Artificial Sequence: Synthetic oligonucleotide
  Antisense strand to SEQ ID NO: 1699565
uaaguuacaacucgugcac

SEQ ID NO: 1699567 - RNA, 19 nt, Artificial Sequence
  Description of Artificial Sequence: Synthetic oligonucleotide
  Sense strand starting at position 3941 of SEQ ID NO: 1561802
gcgcuuucgggaaggaguc

SEQ ID NO: 1699568 - RNA, 19 nt, Artificial Sequence
  Description of Artificial Sequence: Synthetic oligonucleotide
  Antisense strand to SEQ ID NO: 1699567
gacuccuucccgaaagcgc

SEQ ID NO: 1699569 - RNA, 19 nt, Artificial Sequence
  Description of Artificial Sequence: Synthetic oligonucleotide
  Sense strand starting at position 3951 of SEQ ID NO: 1561802
gaaggagucugggucauaa

SEQ ID NO: 1699570 - RNA, 19 nt, Artificial Sequence
  Description of Artificial Sequence: Synthetic oligonucleotide
  Antisense strand to SEQ ID NO: 1699569
uuaugacccagacuccuuc

SEQ ID NO: 1699571 - RNA, 19 nt, Artificial Sequence
  Description of Artificial Sequence: Synthetic oligonucleotide
  Sense strand starting at position 3976 of SEQ ID NO: 1561802
ugcccuuccgaauggauuu

SEQ ID NO: 1699572 - RNA, 19 nt, Artificial Sequence
  Description of Artificial Sequence: Synthetic oligonucleotide
  Antisense strand to SEQ ID NO: 1699571
aaauccauucggaagggca

SEQ ID NO: 1699573 - RNA, 19 nt, Artificial Sequence
  Description of Artificial Sequence: Synthetic oligonucleotide
  Sense strand starting at position 130 of SEQ ID NO: 1561803
caggguucuuguccuacua

SEQ ID NO: 1699574 - RNA, 19 nt, Artificial Sequence
  Description of Artificial Sequence: Synthetic oligonucleotide
  Antisense strand to SEQ ID NO: 1699573
uaguaggacaagaacccug

SEQ ID NO: 1699575 - RNA, 19 nt, Artificial Sequence
  Description of Artificial Sequence: Synthetic oligonucleotide
  Sense strand starting at position 254 of SEQ ID NO: 1561803
uccaaaguccuaugccgaa

SEQ ID NO: 1699576 - RNA, 19 nt, Artificial Sequence
  Description of Artificial Sequence: Synthetic oligonucleotide
  Antisense strand to SEQ ID NO: 1699575
uucggcauaggacuuugga

SEQ ID NO: 1699577 - RNA, 19 nt, Artificial Sequence
  Description of Artificial Sequence: Synthetic oligonucleotide
  Sense strand starting at position 453 of SEQ ID NO: 1561803
uggaaucuugcacacguaa

SEQ ID NO: 1699578 - RNA, 19 nt, Artificial Sequence
  Description of Artificial Sequence: Synthetic oligonucleotide
  Antisense strand to SEQ ID NO: 1699577
uuacgugugcaagauucca

SEQ ID NO: 1699579 - RNA, 19 nt, Artificial Sequence
  Description of Artificial Sequence: Synthetic oligonucleotide
  Sense strand starting at position 480 of SEQ ID NO: 1561803
uuugccaaagguuaugaga

SEQ ID NO: 1699580 - RNA, 19 nt, Artificial Sequence
  Description of Artificial Sequence: Synthetic oligonucleotide
  Antisense strand to SEQ ID NO: 1699579
ucucauaaccuuuggcaaa

SEQ ID NO: 1699581 - RNA, 19 nt, Artificial Sequence
  Description of Artificial Sequence: Synthetic oligonucleotide
  Sense strand starting at position 638 of SEQ ID NO: 1561803
cuagucaaucuggaauucu

SEQ ID NO: 1699582 - RNA, 19 nt, Artificial Sequence
  Description of Artificial Sequence: Synthetic oligonucleotide
  Antisense strand to SEQ ID NO: 1699581
agaauuccagauugacuag

SEQ ID NO: 1699583 - RNA, 19 nt, Artificial Sequence
  Description of Artificial Sequence: Synthetic oligonucleotide
  Sense strand starting at position 648 of SEQ ID NO: 1561803
uggaauucuacugguuuag

SEQ ID NO: 1699584 - RNA, 19 nt, Artificial Sequence
  Description of Artificial Sequence: Synthetic oligonucleotide
  Antisense strand to SEQ ID NO: 1699583
cuaaaccaguagaauucca

SEQ ID NO: 1699585 - RNA, 19 nt, Artificial Sequence
  Description of Artificial Sequence: Synthetic oligonucleotide
  Sense strand starting at position 677 of SEQ ID NO: 1561803
uuugaucaugggcauuaua

SEQ ID NO: 1699586 - RNA, 19 nt, Artificial Sequence
  Description of Artificial Sequence: Synthetic oligonucleotide
  Antisense strand to SEQ ID NO: 1699585
uauaaugcccaugaucaaa

SEQ ID NO: 1699587 - RNA, 19 nt, Artificial Sequence
  Description of Artificial Sequence: Synthetic oligonucleotide
  Sense strand starting at position 786 of SEQ ID NO: 1561803
uggaaucccguccagaaua

SEQ ID NO: 1699588 - RNA, 19 nt, Artificial Sequence
  Description of Artificial Sequence: Synthetic oligonucleotide
  Antisense strand to SEQ ID NO: 1699587
uauucuggacgggauucca

SEQ ID NO: 1699589 - RNA, 19 nt, Artificial Sequence
  Description of Artificial Sequence: Synthetic oligonucleotide
  Sense strand starting at position 788 of SEQ ID NO: 1561803
gaaucccguccagaauaua

SEQ ID NO: 1699590 - RNA, 19 nt, Artificial Sequence
  Description of Artificial Sequence: Synthetic oligonucleotide
  Antisense strand to SEQ ID NO: 1699589
uauauucuggacgggauuc

SEQ ID NO: 1699591 - RNA, 19 nt, Artificial Sequence
  Description of Artificial Sequence: Synthetic oligonucleotide
  Sense strand starting at position 894 of SEQ ID NO: 1561803
acuggagauuauucuacuu

SEQ ID NO: 1699592 - RNA, 19 nt, Artificial Sequence
  Description of Artificial Sequence: Synthetic oligonucleotide
  Antisense strand to SEQ ID NO: 1699591
aaguagaauaaucuccagu

SEQ ID NO: 1699593 - RNA, 19 nt, Artificial Sequence
  Description of Artificial Sequence: Synthetic oligonucleotide
  Sense strand starting at position 899 of SEQ ID NO: 1561803
agauuauucuacuuccugu

SEQ ID NO: 1699594 - RNA, 19 nt, Artificial Sequence
  Description of Artificial Sequence: Synthetic oligonucleotide
  Antisense strand to SEQ ID NO: 1699593
acaggaaguagaauaaucu

SEQ ID NO: 1699595 - RNA, 19 nt, Artificial Sequence
  Description of Artificial Sequence: Synthetic oligonucleotide
  Sense strand starting at position 969 of SEQ ID NO: 1561803
cuuccuauugccugaggaa

SEQ ID NO: 1699596 - RNA, 19 nt, Artificial Sequence
  Description of Artificial Sequence: Synthetic oligonucleotide
  Antisense strand to SEQ ID NO: 1699595
uuccucaggcaauaggaag

SEQ ID NO: 1699597 - RNA, 19 nt, Artificial Sequence
  Description of Artificial Sequence: Synthetic oligonucleotide
  Sense strand starting at position 970 of SEQ ID NO: 1561803
uuccuauugccugaggaaa

SEQ ID NO: 1699598 - RNA, 19 nt, Artificial Sequence
  Description of Artificial Sequence: Synthetic oligonucleotide
  Antisense strand to SEQ ID NO: 1699597
uuuccucaggcaauaggaa

SEQ ID NO: 1699599 - RNA, 19 nt, Artificial Sequence
  Description of Artificial Sequence: Synthetic oligonucleotide
  Sense strand starting at position 1024 of SEQ ID NO: 1561803
gcaauaccuacugggagua

SEQ ID NO: 1699600 - RNA, 19 nt, Artificial Sequence
  Description of Artificial Sequence: Synthetic oligonucleotide
  Antisense strand to SEQ ID NO: 1699599
uacucccaguagguauugc

SEQ ID NO: 1699601 - RNA, 19 nt, Artificial Sequence
  Description of Artificial Sequence: Synthetic oligonucleotide
  Sense strand starting at position 1086 of SEQ ID NO: 1561803
uaggauaaaucugagggaa

SEQ ID NO: 1699602 - RNA, 19 nt, Artificial Sequence
  Description of Artificial Sequence: Synthetic oligonucleotide
  Antisense strand to SEQ ID NO: 1699601
uucccucagauuuauccua

SEQ ID NO: 1699603 - RNA, 19 nt, Artificial Sequence
  Description of Artificial Sequence: Synthetic oligonucleotide
  Sense strand starting at position 1088 of SEQ ID NO: 1561803
ggauaaaucugagggaaag

SEQ ID NO: 1699604 - RNA, 19 nt, Artificial Sequence
  Description of Artificial Sequence: Synthetic oligonucleotide
  Antisense strand to SEQ ID NO: 1699603
cuuucccucagauuuaucc

SEQ ID NO: 1699605 - RNA, 19 nt, Artificial Sequence
  Description of Artificial Sequence: Synthetic oligonucleotide
  Sense strand starting at position 1192 of SEQ ID NO: 1561803
gccgguagcccucuguuaa

SEQ ID NO: 1699606 - RNA, 19 nt, Artificial Sequence
  Description of Artificial Sequence: Synthetic oligonucleotide
  Antisense strand to SEQ ID NO: 1699605
uuaacagagggcuaccggc

SEQ ID NO: 1699607 - RNA, 19 nt, Artificial Sequence
  Description of Artificial Sequence: Synthetic oligonucleotide
  Sense strand starting at position 1229 of SEQ ID NO: 1561803
cccggaaacuuuccgggaa

SEQ ID NO: 1699608 - RNA, 19 nt, Artificial Sequence
  Description of Artificial Sequence: Synthetic oligonucleotide
  Antisense strand to SEQ ID NO: 1699607
uucccggaaaguuuccggg

SEQ ID NO: 1699609 - RNA, 19 nt, Artificial Sequence
  Description of Artificial Sequence: Synthetic oligonucleotide
  Sense strand starting at position 1232 of SEQ ID NO: 1561803
ggaaacuuuccgggaaggu

SEQ ID NO: 1699610 - RNA, 19 nt, Artificial Sequence
  Description of Artificial Sequence: Synthetic oligonucleotide
  Antisense strand to SEQ ID NO: 1699609
accuucccggaaaguuucc

SEQ ID NO: 1699611 - RNA, 19 nt, Artificial Sequence
  Description of Artificial Sequence: Synthetic oligonucleotide
  Sense strand starting at position 1233 of SEQ ID NO: 1561803
gaaacuuuccgggaagguc

SEQ ID NO: 1699612 - RNA, 19 nt, Artificial Sequence
  Description of Artificial Sequence: Synthetic oligonucleotide
  Antisense strand to SEQ ID NO: 1699611
gaccuucccggaaaguuuc

SEQ ID NO: 1699613 - RNA, 19 nt, Artificial Sequence
  Description of Artificial Sequence: Synthetic oligonucleotide
  Sense strand starting at position 1518 of SEQ ID NO: 1561803
ggguuauuaaccgggcauu

SEQ ID NO: 1699614 - RNA, 19 nt, Artificial Sequence
  Description of Artificial Sequence: Synthetic oligonucleotide
  Antisense strand to SEQ ID NO: 1699613
aaugcccgguuaauaaccc

SEQ ID NO: 1699615 - RNA, 19 nt, Artificial Sequence
  Description of Artificial Sequence: Synthetic oligonucleotide
  Sense strand starting at position 2097 of SEQ ID NO: 1561803
cgggacuuguaguccauuu

SEQ ID NO: 1699616 - RNA, 19 nt, Artificial Sequence
  Description of Artificial Sequence: Synthetic oligonucleotide
  Antisense strand to SEQ ID NO: 1699615
aaauggacuacaagucccg

SEQ ID NO: 1699617 - RNA, 19 nt, Artificial Sequence
  Description of Artificial Sequence: Synthetic oligonucleotide
  Sense strand starting at position 2108 of SEQ ID NO: 1561803
guccauuuauaagaggguu

SEQ ID NO: 1699618 - RNA, 19 nt, Artificial Sequence
  Description of Artificial Sequence: Synthetic oligonucleotide
  Antisense strand to SEQ ID NO: 1699617
aacccucuuauaaauggac

SEQ ID NO: 1699619 - RNA, 19 nt, Artificial Sequence
  Description of Artificial Sequence: Synthetic oligonucleotide
  Sense strand starting at position 2187 of SEQ ID NO: 1561803
agaacauucgguuguugau

SEQ ID NO: 1699620 - RNA, 19 nt, Artificial Sequence
  Description of Artificial Sequence: Synthetic oligonucleotide
  Antisense strand to SEQ ID NO: 1699619
aucaacaaccgaauguucu

SEQ ID NO: 1699621 - RNA, 19 nt, Artificial Sequence
  Description of Artificial Sequence: Synthetic oligonucleotide
  Sense strand starting at position 2189 of SEQ ID NO: 1561803
aacauucgguuguugauau

SEQ ID NO: 1699622 - RNA, 19 nt, Artificial Sequence
  Description of Artificial Sequence: Synthetic oligonucleotide
  Antisense strand to SEQ ID NO: 1699621
auaucaacaaccgaauguu

SEQ ID NO: 1699623 - RNA, 19 nt, Artificial Sequence
  Description of Artificial Sequence: Synthetic oligonucleotide
  Sense strand starting at position 2201 of SEQ ID NO: 1561803
uugauauugccucagccuu

SEQ ID NO: 1699624 - RNA, 19 nt, Artificial Sequence
  Description of Artificial Sequence: Synthetic oligonucleotide
  Antisense strand to SEQ ID NO: 1699623
aaggcugaggcaauaucaa

SEQ ID NO: 1699625 - RNA, 19 nt, Artificial Sequence
  Description of Artificial Sequence: Synthetic oligonucleotide
  Sense strand starting at position 2284 of SEQ ID NO: 1561803
uggguuagacacugaguca

SEQ ID NO: 1699626 - RNA, 19 nt, Artificial Sequence
  Description of Artificial Sequence: Synthetic oligonucleotide
  Antisense strand to SEQ ID NO: 1699625
ugacucagugucuaaccca

SEQ ID NO: 1699627 - RNA, 19 nt, Artificial Sequence
  Description of Artificial Sequence: Synthetic oligonucleotide
  Sense strand starting at position 2285 of SEQ ID NO: 1561803
ggguuagacacugagucau

SEQ ID NO: 1699628 - RNA, 19 nt, Artificial Sequence
  Description of Artificial Sequence: Synthetic oligonucleotide
  Antisense strand to SEQ ID NO: 1699627
augacucagugucuaaccc

SEQ ID NO: 1699629 - RNA, 19 nt, Artificial Sequence
  Description of Artificial Sequence: Synthetic oligonucleotide
  Sense strand starting at position 2287 of SEQ ID NO: 1561803
guuagacacugagucauau

SEQ ID NO: 1699630 - RNA, 19 nt, Artificial Sequence
  Description of Artificial Sequence: Synthetic oligonucleotide
  Antisense strand to SEQ ID NO: 1699629
auaugacucagugucuaac

SEQ ID NO: 1699631 - RNA, 19 nt, Artificial Sequence
  Description of Artificial Sequence: Synthetic oligonucleotide
  Sense strand starting at position 2361 of SEQ ID NO: 1561803
aaauucugaguuggagcua

SEQ ID NO: 1699632 - RNA, 19 nt, Artificial Sequence
  Description of Artificial Sequence: Synthetic oligonucleotide
  Antisense strand to SEQ ID NO: 1699631
uagcuccaacucagaauuu

SEQ ID NO: 1699633 - RNA, 19 nt, Artificial Sequence
  Description of Artificial Sequence: Synthetic oligonucleotide
  Sense strand starting at position 2537 of SEQ ID NO: 1561803
gccucagaauacuuguuua

SEQ ID NO: 1699634 - RNA, 19 nt, Artificial Sequence
  Description of Artificial Sequence: Synthetic oligonucleotide
  Antisense strand to SEQ ID NO: 1699633
uaaacaaguauucugaggc

SEQ ID NO: 1699635 - RNA, 19 nt, Artificial Sequence
  Description of Artificial Sequence: Synthetic oligonucleotide
  Sense strand starting at position 2540 of SEQ ID NO: 1561803
ucagaauacuuguuuauga

SEQ ID NO: 1699636 - RNA, 19 nt, Artificial Sequence
  Description of Artificial Sequence: Synthetic oligonucleotide
  Antisense strand to SEQ ID NO: 1699635
ucauaaacaaguauucuga

SEQ ID NO: 1699637 - RNA, 19 nt, Artificial Sequence
  Description of Artificial Sequence: Synthetic oligonucleotide
  Sense strand starting at position 2582 of SEQ ID NO: 1561803
cgcaauuucccuugagacc

SEQ ID NO: 1699638 - RNA, 19 nt, Artificial Sequence
  Description of Artificial Sequence: Synthetic oligonucleotide
  Antisense strand to SEQ ID NO: 1699637
ggucucaagggaaauugcg

SEQ ID NO: 1699639 - RNA, 19 nt, Artificial Sequence
  Description of Artificial Sequence: Synthetic oligonucleotide
  Sense strand starting at position 2671 of SEQ ID NO: 1561803
acuccuguagcuggacaaa

SEQ ID NO: 1699640 - RNA, 19 nt, Artificial Sequence
  Description of Artificial Sequence: Synthetic oligonucleotide
  Antisense strand to SEQ ID NO: 1699639
uuuguccagcuacaggagu

SEQ ID NO: 1699641 - RNA, 19 nt, Artificial Sequence
  Description of Artificial Sequence: Synthetic oligonucleotide
  Sense strand starting at position 2736 of SEQ ID NO: 1561803
ccgggacgucuuuggaaga

SEQ ID NO: 1699642 - RNA, 19 nt, Artificial Sequence
  Description of Artificial Sequence: Synthetic oligonucleotide
  Antisense strand to SEQ ID NO: 1699641
ucuuccaaagacgucccgg

SEQ ID NO: 1699643 - RNA, 19 nt, Artificial Sequence
  Description of Artificial Sequence: Synthetic oligonucleotide
  Sense strand starting at position 2800 of SEQ ID NO: 1561803
cagagcuucucucuggauu

SEQ ID NO: 1699644 - RNA, 19 nt, Artificial Sequence
  Description of Artificial Sequence: Synthetic oligonucleotide
  Antisense strand to SEQ ID NO: 1699643
aauccagagagaagcucug

SEQ ID NO: 1699645 - RNA, 19 nt, Artificial Sequence
  Description of Artificial Sequence: Synthetic oligonucleotide
  Sense strand starting at position 2801 of SEQ ID NO: 1561803
agagcuucucucuggauua

SEQ ID NO: 1699646 - RNA, 19 nt, Artificial Sequence
  Description of Artificial Sequence: Synthetic oligonucleotide
  Antisense strand to SEQ ID NO: 1699645
uaauccagagagaagcucu

SEQ ID NO: 1699647 - RNA, 19 nt, Artificial Sequence
  Description of Artificial Sequence: Synthetic oligonucleotide
  Sense strand starting at position 2803 of SEQ ID NO: 1561803
agcuucucucuggauuaga

SEQ ID NO: 1699648 - RNA, 19 nt, Artificial Sequence
  Description of Artificial Sequence: Synthetic oligonucleotide
  Antisense strand to SEQ ID NO: 1699647
ucuaauccagagagaagcu

SEQ ID NO: 1699649 - RNA, 19 nt, Artificial Sequence
  Description of Artificial Sequence: Synthetic oligonucleotide
  Sense strand starting at position 2841 of SEQ ID NO: 1561803
uaauucuaugauuggguaa

SEQ ID NO: 1699650 - RNA, 19 nt, Artificial Sequence
  Description of Artificial Sequence: Synthetic oligonucleotide
  Antisense strand to SEQ ID NO: 1699649
uuacccaaucauagaauua

SEQ ID NO: 1699651 - RNA, 19 nt, Artificial Sequence
  Description of Artificial Sequence: Synthetic oligonucleotide
  Sense strand starting at position 3032 of SEQ ID NO: 1561803
ggccuauaauucuuacaug

SEQ ID NO: 1699652 - RNA, 19 nt, Artificial Sequence
  Description of Artificial Sequence: Synthetic oligonucleotide
  Antisense strand to SEQ ID NO: 1699651
cauguaagaauuauaggcc

SEQ ID NO: 1699653 - RNA, 19 nt, Artificial Sequence
  Description of Artificial Sequence: Synthetic oligonucleotide
  Sense strand starting at position 440 of SEQ ID NO: 1561804
ggcgggaugcgccuguaau

SEQ ID NO: 1699654 - RNA, 19 nt, Artificial Sequence
  Description of Artificial Sequence: Synthetic oligonucleotide
  Antisense strand to SEQ ID NO: 1699653
auuacaggcgcaucccgcc

SEQ ID NO: 1699655 - RNA, 19 nt, Artificial Sequence
  Description of Artificial Sequence: Synthetic oligonucleotide
  Sense strand starting at position 645 of SEQ ID NO: 1561804
aggguagagaugugguaaa

SEQ ID NO: 1699656 - RNA, 19 nt, Artificial Sequence
  Description of Artificial Sequence: Synthetic oligonucleotide
  Antisense strand to SEQ ID NO: 1699655
uuuaccacaucucuacccu

SEQ ID NO: 1699657 - RNA, 19 nt, Artificial Sequence
  Description of Artificial Sequence: Synthetic oligonucleotide
  Sense strand starting at position 652 of SEQ ID NO: 1561804
agaugugguaaagggaauu

SEQ ID NO: 1699658 - RNA, 19 nt, Artificial Sequence
  Description of Artificial Sequence: Synthetic oligonucleotide
  Antisense strand to SEQ ID NO: 1699657
aauucccuuuaccacaucu

SEQ ID NO: 1699659 - RNA, 19 nt, Artificial Sequence
  Description of Artificial Sequence: Synthetic oligonucleotide
  Sense strand starting at position 670 of SEQ ID NO: 1561804
uuaagauuccaacguaacu

SEQ ID NO: 1699660 - RNA, 19 nt, Artificial Sequence
  Description of Artificial Sequence: Synthetic oligonucleotide
  Antisense strand to SEQ ID NO: 1699659
aguuacguuggaaucuuaa

SEQ ID NO: 1699661 - RNA, 19 nt, Artificial Sequence
  Description of Artificial Sequence: Synthetic oligonucleotide
  Sense strand starting at position 691 of SEQ ID NO: 1561804
gcaggaagaccgcauaucu

SEQ ID NO: 1699662 - RNA, 19 nt, Artificial Sequence
  Description of Artificial Sequence: Synthetic oligonucleotide
  Antisense strand to SEQ ID NO: 1699661
agauaugcggucuuccugc

SEQ ID NO: 1699663 - RNA, 19 nt, Artificial Sequence
  Description of Artificial Sequence: Synthetic oligonucleotide
  Sense strand starting at position 733 of SEQ ID NO: 1561804
aauggaugcuuagaaagag

SEQ ID NO: 1699664 - RNA, 19 nt, Artificial Sequence
  Description of Artificial Sequence: Synthetic oligonucleotide
  Antisense strand to SEQ ID NO: 1699663
cucuuucuaagcauccauu

SEQ ID NO: 1699665 - RNA, 19 nt, Artificial Sequence
  Description of Artificial Sequence: Synthetic oligonucleotide
  Sense strand starting at position 1003 of SEQ ID NO: 1561804
agccuaagaaguugaggau

SEQ ID NO: 1699666 - RNA, 19 nt, Artificial Sequence
  Description of Artificial Sequence: Synthetic oligonucleotide
  Antisense strand to SEQ ID NO: 1699665
auccucaacuucuuaggcu

SEQ ID NO: 1699667 - RNA, 19 nt, Artificial Sequence
  Description of Artificial Sequence: Synthetic oligonucleotide
  Sense strand starting at position 1136 of SEQ ID NO: 1561804
ggaacuuacugagucacuu

SEQ ID NO: 1699668 - RNA, 19 nt, Artificial Sequence
  Description of Artificial Sequence: Synthetic oligonucleotide
  Antisense strand to SEQ ID NO: 1699667
aagugacucaguaaguucc

SEQ ID NO: 1699669 - RNA, 19 nt, Artificial Sequence
  Description of Artificial Sequence: Synthetic oligonucleotide
  Sense strand starting at position 1212 of SEQ ID NO: 1561804
ugucuuugugacgaaggaa

SEQ ID NO: 1699670 - RNA, 19 nt, Artificial Sequence
  Description of Artificial Sequence: Synthetic oligonucleotide
  Antisense strand to SEQ ID NO: 1699669
uuccuucgucacaaagaca

SEQ ID NO: 1699671 - RNA, 19 nt, Artificial Sequence
  Description of Artificial Sequence: Synthetic oligonucleotide
  Sense strand starting at position 1215 of SEQ ID NO: 1561804
cuuugugacgaaggaauga

SEQ ID NO: 1699672 - RNA, 19 nt, Artificial Sequence
  Description of Artificial Sequence: Synthetic oligonucleotide
  Antisense strand to SEQ ID NO: 1699671
ucauuccuucgucacaaag

SEQ ID NO: 1699673 - RNA, 19 nt, Artificial Sequence
  Description of Artificial Sequence: Synthetic oligonucleotide
  Sense strand starting at position 1242 of SEQ ID NO: 1561804
gugaaagcacuuuacauua

SEQ ID NO: 1699674 - RNA, 19 nt, Artificial Sequence
  Description of Artificial Sequence: Synthetic oligonucleotide
  Antisense strand to SEQ ID NO: 1699673
uaauguaaagugcuuucac

SEQ ID NO: 1699675 - RNA, 19 nt, Artificial Sequence
  Description of Artificial Sequence: Synthetic oligonucleotide
  Sense strand starting at position 1313 of SEQ ID NO: 1561804
ugacgcuuggccugagaga

SEQ ID NO: 1699676 - RNA, 19 nt, Artificial Sequence
  Description of Artificial Sequence: Synthetic oligonucleotide
  Antisense strand to SEQ ID NO: 1699675
ucucucaggccaagcguca

SEQ ID NO: 1699677 - RNA, 19 nt, Artificial Sequence
  Description of Artificial Sequence: Synthetic oligonucleotide
  Sense strand starting at position 1314 of SEQ ID NO: 1561804
gacgcuuggccugagagau

SEQ ID NO: 1699678 - RNA, 19 nt, Artificial Sequence
  Description of Artificial Sequence: Synthetic oligonucleotide
  Antisense strand to SEQ ID NO: 1699677
aucucucaggccaagcguc

SEQ ID NO: 1699679 - RNA, 19 nt, Artificial Sequence
  Description of Artificial Sequence: Synthetic oligonucleotide
  Sense strand starting at position 1318 of SEQ ID NO: 1561804
cuuggccugagagauucua

SEQ ID NO: 1699680 - RNA, 19 nt, Artificial Sequence
  Description of Artificial Sequence: Synthetic oligonucleotide
  Antisense strand to SEQ ID NO: 1699679
uagaaucucucaggccaag

SEQ ID NO: 1699681 - RNA, 19 nt, Artificial Sequence
  Description of Artificial Sequence: Synthetic oligonucleotide
  Sense strand starting at position 1331 of SEQ ID NO: 1561804
auucuauagugcccagaga

SEQ ID NO: 1699682 - RNA, 19 nt, Artificial Sequence
  Description of Artificial Sequence: Synthetic oligonucleotide
  Antisense strand to SEQ ID NO: 1699681
ucucugggcacuauagaau

SEQ ID NO: 1699683 - RNA, 19 nt, Artificial Sequence
  Description of Artificial Sequence: Synthetic oligonucleotide
  Sense strand starting at position 1332 of SEQ ID NO: 1561804
uucuauagugcccagagau

SEQ ID NO: 1699684 - RNA, 19 nt, Artificial Sequence
  Description of Artificial Sequence: Synthetic oligonucleotide
  Antisense strand to SEQ ID NO: 1699683
aucucugggcacuauagaa

SEQ ID NO: 1699685 - RNA, 19 nt, Artificial Sequence
  Description of Artificial Sequence: Synthetic oligonucleotide
  Sense strand starting at position 1365 of SEQ ID NO: 1561804
ugggaaucccuaggucacu

SEQ ID NO: 1699686 - RNA, 19 nt, Artificial Sequence
  Description of Artificial Sequence: Synthetic oligonucleotide
  Antisense strand to SEQ ID NO: 1699685
agugaccuagggauuccca

SEQ ID NO: 1699687 - RNA, 19 nt, Artificial Sequence
  Description of Artificial Sequence: Synthetic oligonucleotide
  Sense strand starting at position 1405 of SEQ ID NO: 1561804
aauuaauggugcuuggaga

SEQ ID NO: 1699688 - RNA, 19 nt, Artificial Sequence
  Description of Artificial Sequence: Synthetic oligonucleotide
  Antisense strand to SEQ ID NO: 1699687
ucuccaagcaccauuaauu

SEQ ID NO: 1699689 - RNA, 19 nt, Artificial Sequence
  Description of Artificial Sequence: Synthetic oligonucleotide
  Sense strand starting at position 1666 of SEQ ID NO: 1561804
guagaaguucucugagccu

SEQ ID NO: 1699690 - RNA, 19 nt, Artificial Sequence
  Description of Artificial Sequence: Synthetic oligonucleotide
  Antisense strand to SEQ ID NO: 1699689
aggcucagagaacuucuac

SEQ ID NO: 1699691 - RNA, 19 nt, Artificial Sequence
  Description of Artificial Sequence: Synthetic oligonucleotide
  Sense strand starting at position 1738 of SEQ ID NO: 1561804
acaguuguucucgaacgaa

SEQ ID NO: 1699692 - RNA, 19 nt, Artificial Sequence
  Description of Artificial Sequence: Synthetic oligonucleotide
  Antisense strand to SEQ ID NO: 1699691
uucguucgagaacaacugu

SEQ ID NO: 1699693 - RNA, 19 nt, Artificial Sequence
  Description of Artificial Sequence: Synthetic oligonucleotide
  Sense strand starting at position 2253 of SEQ ID NO: 1561804
aggagcugucaucgaccua

SEQ ID NO: 1699694 - RNA, 19 nt, Artificial Sequence
  Description of Artificial Sequence: Synthetic oligonucleotide
  Antisense strand to SEQ ID NO: 1699693
uaggucgaugacagcuccu

SEQ ID NO: 1699695 - RNA, 19 nt, Artificial Sequence
  Description of Artificial Sequence: Synthetic oligonucleotide
  Sense strand starting at position 2287 of SEQ ID NO: 1561804
gguugugaggcaugaggga

SEQ ID NO: 1699696 - RNA, 19 nt, Artificial Sequence
  Description of Artificial Sequence: Synthetic oligonucleotide
  Antisense strand to SEQ ID NO: 1699695
ucccucaugccucacaacc

SEQ ID NO: 1699697 - RNA, 19 nt, Artificial Sequence
  Description of Artificial Sequence: Synthetic oligonucleotide
  Sense strand starting at position 2335 of SEQ ID NO: 1561804
gguugaugauggagguauu

SEQ ID NO: 1699698 - RNA, 19 nt, Artificial Sequence
  Description of Artificial Sequence: Synthetic oligonucleotide
  Antisense strand to SEQ ID NO: 1699697
aauaccuccaucaucaacc

SEQ ID NO: 1699699 - RNA, 19 nt, Artificial Sequence
  Description of Artificial Sequence: Synthetic oligonucleotide
  Sense strand starting at position 2501 of SEQ ID NO: 1561804
gaggcuacccauggagaga

SEQ ID NO: 1699700 - RNA, 19 nt, Artificial Sequence
  Description of Artificial Sequence: Synthetic oligonucleotide
  Antisense strand to SEQ ID NO: 1699699
ucucuccauggguagccuc

SEQ ID NO: 1699701 - RNA, 19 nt, Artificial Sequence
  Description of Artificial Sequence: Synthetic oligonucleotide
  Sense strand starting at position 2514 of SEQ ID NO: 1561804
gagagaguuccaggaggca

SEQ ID NO: 1699702 - RNA, 19 nt, Artificial Sequence
  Description of Artificial Sequence: Synthetic oligonucleotide
  Antisense strand to SEQ ID NO: 1699701
ugccuccuggaacucucuc

SEQ ID NO: 1699703 - RNA, 19 nt, Artificial Sequence
  Description of Artificial Sequence: Synthetic oligonucleotide
  Sense strand starting at position 3040 of SEQ ID NO: 1561804
uguguaucauguuuacuau

SEQ ID NO: 1699704 - RNA, 19 nt, Artificial Sequence
  Description of Artificial Sequence: Synthetic oligonucleotide
  Antisense strand to SEQ ID NO: 1699703
auaguaaacaugauacaca

SEQ ID NO: 1699705 - RNA, 19 nt, Artificial Sequence
  Description of Artificial Sequence: Synthetic oligonucleotide
  Sense strand starting at position 3041 of SEQ ID NO: 1561804
guguaucauguuuacuauc

SEQ ID NO: 1699706 - RNA, 19 nt, Artificial Sequence
  Description of Artificial Sequence: Synthetic oligonucleotide
  Antisense strand to SEQ ID NO: 1699705
gauaguaaacaugauacac

SEQ ID NO: 1699707 - RNA, 19 nt, Artificial Sequence
  Description of Artificial Sequence: Synthetic oligonucleotide
  Sense strand starting at position 3050 of SEQ ID NO: 1561804
guuuacuaucccggguaag

SEQ ID NO: 1699708 - RNA, 19 nt, Artificial Sequence
  Description of Artificial Sequence: Synthetic oligonucleotide
  Antisense strand to SEQ ID NO: 1699707
cuuacccgggauaguaaac

SEQ ID NO: 1699709 - RNA, 19 nt, Artificial Sequence
  Description of Artificial Sequence: Synthetic oligonucleotide
  Sense strand starting at position 3051 of SEQ ID NO: 1561804
uuuacuaucccggguaagu

SEQ ID NO: 1699710 - RNA, 19 nt, Artificial Sequence
  Description of Artificial Sequence: Synthetic oligonucleotide
  Antisense strand to SEQ ID NO: 1699709
acuuacccgggauaguaaa

SEQ ID NO: 1699711 - RNA, 19 nt, Artificial Sequence
  Description of Artificial Sequence: Synthetic oligonucleotide
  Sense strand starting at position 3061 of SEQ ID NO: 1561804
cggguaaguggugaguuca

SEQ ID NO: 1699712 - RNA, 19 nt, Artificial Sequence
  Description of Artificial Sequence: Synthetic oligonucleotide
  Antisense strand to SEQ ID NO: 1699711
ugaacucaccacuuacccg

SEQ ID NO: 1699713 - RNA, 19 nt, Artificial Sequence
  Description of Artificial Sequence: Synthetic oligonucleotide
  Sense strand starting at position 3131 of SEQ ID NO: 1561804
agaugaugacgacgacaau

SEQ ID NO: 1699714 - RNA, 19 nt, Artificial Sequence
  Description of Artificial Sequence: Synthetic oligonucleotide
  Antisense strand to SEQ ID NO: 1699713
auugucgucgucaucaucu

SEQ ID NO: 1699715 - RNA, 19 nt, Artificial Sequence
  Description of Artificial Sequence: Synthetic oligonucleotide
  Sense strand starting at position 3162 of SEQ ID NO: 1561804
gaugaugacucagcaagau

SEQ ID NO: 1699716 - RNA, 19 nt, Artificial Sequence
  Description of Artificial Sequence: Synthetic oligonucleotide
  Antisense strand to SEQ ID NO: 1699715
aucuugcugagucaucauc

SEQ ID NO: 1699717 - RNA, 19 nt, Artificial Sequence
  Description of Artificial Sequence: Synthetic oligonucleotide
  Sense strand starting at position 3227 of SEQ ID NO: 1561804
guguguuuccggguaucca

SEQ ID NO: 1699718 - RNA, 19 nt, Artificial Sequence
  Description of Artificial Sequence: Synthetic oligonucleotide
  Antisense strand to SEQ ID NO: 1699717
uggauacccggaaacacac

SEQ ID NO: 1699719 - RNA, 19 nt, Artificial Sequence
  Description of Artificial Sequence: Synthetic oligonucleotide
  Sense strand starting at position 3474 of SEQ ID NO: 1561804
cucuguaacugguuaaccu

SEQ ID NO: 1699720 - RNA, 19 nt, Artificial Sequence
  Description of Artificial Sequence: Synthetic oligonucleotide
  Antisense strand to SEQ ID NO: 1699719
agguuaaccaguuacagag

SEQ ID NO: 1699721 - RNA, 19 nt, Artificial Sequence
  Description of Artificial Sequence: Synthetic oligonucleotide
  Sense strand starting at position 3478 of SEQ ID NO: 1561804
guaacugguuaaccuuuaa

SEQ ID NO: 1699722 - RNA, 19 nt, Artificial Sequence
  Description of Artificial Sequence: Synthetic oligonucleotide
  Antisense strand to SEQ ID NO: 1699721
uuaaagguuaaccaguuac

SEQ ID NO: 1699723 - RNA, 19 nt, Artificial Sequence
  Description of Artificial Sequence: Synthetic oligonucleotide
  Sense strand starting at position 3621 of SEQ ID NO: 1561804
agaagauacuaguuagggu

SEQ ID NO: 1699724 - RNA, 19 nt, Artificial Sequence
  Description of Artificial Sequence: Synthetic oligonucleotide
  Antisense strand to SEQ ID NO: 1699723
acccuaacuaguaucuucu

SEQ ID NO: 1699725 - RNA, 19 nt, Artificial Sequence
  Description of Artificial Sequence: Synthetic oligonucleotide
  Sense strand starting at position 3664 of SEQ ID NO: 1561804
guguguacacaagaaucuu

SEQ ID NO: 1699726 - RNA, 19 nt, Artificial Sequence
  Description of Artificial Sequence: Synthetic oligonucleotide
  Antisense strand to SEQ ID NO: 1699725
aagauucuuguguacacac

SEQ ID NO: 1699727 - RNA, 19 nt, Artificial Sequence
  Description of Artificial Sequence: Synthetic oligonucleotide
  Sense strand starting at position 3701 of SEQ ID NO: 1561804
ugaccuggguuucuagaca

SEQ ID NO: 1699728 - RNA, 19 nt, Artificial Sequence
  Description of Artificial Sequence: Synthetic oligonucleotide
  Antisense strand to SEQ ID NO: 1699727
ugucuagaaacccagguca

SEQ ID NO: 1699729 - RNA, 19 nt, Artificial Sequence
  Description of Artificial Sequence: Synthetic oligonucleotide
  Sense strand starting at position 3847 of SEQ ID NO: 1561804
ugaacuuggacuuguugua

SEQ ID NO: 1699730 - RNA, 19 nt, Artificial Sequence
  Description of Artificial Sequence: Synthetic oligonucleotide
  Antisense strand to SEQ ID NO: 1699729
uacaacaaguccaaguuca

SEQ ID NO: 1699731 - RNA, 19 nt, Artificial Sequence
  Description of Artificial Sequence: Synthetic oligonucleotide
  Sense strand starting at position 3856 of SEQ ID NO: 1561804
acuuguuguacuuagugau

SEQ ID NO: 1699732 - RNA, 19 nt, Artificial Sequence
  Description of Artificial Sequence: Synthetic oligonucleotide
  Antisense strand to SEQ ID NO: 1699731
aucacuaaguacaacaagu

SEQ ID NO: 1699733 - RNA, 19 nt, Artificial Sequence
  Description of Artificial Sequence: Synthetic oligonucleotide
  Sense strand starting at position 341 of SEQ ID NO: 1561805
ggcgggaugcgccuguaau

SEQ ID NO: 1699734 - RNA, 19 nt, Artificial Sequence
  Description of Artificial Sequence: Synthetic oligonucleotide
  Antisense strand to SEQ ID NO: 1699733
auuacaggcgcaucccgcc

SEQ ID NO: 1699735 - RNA, 19 nt, Artificial Sequence
  Description of Artificial Sequence: Synthetic oligonucleotide
  Sense strand starting at position 546 of SEQ ID NO: 1561805
aggguagagaugugguaaa

SEQ ID NO: 1699736 - RNA, 19 nt, Artificial Sequence
  Description of Artificial Sequence: Synthetic oligonucleotide
  Antisense strand to SEQ ID NO: 1699735
uuuaccacaucucuacccu

SEQ ID NO: 1699737 - RNA, 19 nt, Artificial Sequence
  Description of Artificial Sequence: Synthetic oligonucleotide
  Sense strand starting at position 553 of SEQ ID NO: 1561805
agaugugguaaagggaauu

SEQ ID NO: 1699738 - RNA, 19 nt, Artificial Sequence
  Description of Artificial Sequence: Synthetic oligonucleotide
  Antisense strand to SEQ ID NO: 1699737
aauucccuuuaccacaucu

SEQ ID NO: 1699739 - RNA, 19 nt, Artificial Sequence
  Description of Artificial Sequence: Synthetic oligonucleotide
  Sense strand starting at position 571 of SEQ ID NO: 1561805
uuaagauuccaacguaacu

SEQ ID NO: 1699740 - RNA, 19 nt, Artificial Sequence
  Description of Artificial Sequence: Synthetic oligonucleotide
  Antisense strand to SEQ ID NO: 1699739
aguuacguuggaaucuuaa

SEQ ID NO: 1699741 - RNA, 19 nt, Artificial Sequence
  Description of Artificial Sequence: Synthetic oligonucleotide
  Sense strand starting at position 592 of SEQ ID NO: 1561805
gcaggaagaccgcauaucu

SEQ ID NO: 1699742 - RNA, 19 nt, Artificial Sequence
  Description of Artificial Sequence: Synthetic oligonucleotide
  Antisense strand to SEQ ID NO: 1699741
agauaugcggucuuccugc

SEQ ID NO: 1699743 - RNA, 19 nt, Artificial Sequence
  Description of Artificial Sequence: Synthetic oligonucleotide
  Sense strand starting at position 904 of SEQ ID NO: 1561805
agccuaagaaguugaggau

SEQ ID NO: 1699744 - RNA, 19 nt, Artificial Sequence
  Description of Artificial Sequence: Synthetic oligonucleotide
  Antisense strand to SEQ ID NO: 1699743
auccucaacuucuuaggcu

SEQ ID NO: 1699745 - RNA, 19 nt, Artificial Sequence
  Description of Artificial Sequence: Synthetic oligonucleotide
  Sense strand starting at position 1037 of SEQ ID NO: 1561805
ggaacuuacugagucacuu

SEQ ID NO: 1699746 - RNA, 19 nt, Artificial Sequence
  Description of Artificial Sequence: Synthetic oligonucleotide
  Antisense strand to SEQ ID NO: 1699745
aagugacucaguaaguucc

SEQ ID NO: 1699747 - RNA, 19 nt, Artificial Sequence
  Description of Artificial Sequence: Synthetic oligonucleotide
  Sense strand starting at position 1113 of SEQ ID NO: 1561805
ugucuuugugacgaaggaa

SEQ ID NO: 1699748 - RNA, 19 nt, Artificial Sequence
  Description of Artificial Sequence: Synthetic oligonucleotide
  Antisense strand to SEQ ID NO: 1699747
uuccuucgucacaaagaca

SEQ ID NO: 1699749 - RNA, 19 nt, Artificial Sequence
  Description of Artificial Sequence: Synthetic oligonucleotide
  Sense strand starting at position 1116 of SEQ ID NO: 1561805
cuuugugacgaaggaauga

SEQ ID NO: 1699750 - RNA, 19 nt, Artificial Sequence
  Description of Artificial Sequence: Synthetic oligonucleotide
  Antisense strand to SEQ ID NO: 1699749
ucauuccuucgucacaaag

SEQ ID NO: 1699751 - RNA, 19 nt, Artificial Sequence
  Description of Artificial Sequence: Synthetic oligonucleotide
  Sense strand starting at position 1143 of SEQ ID NO: 1561805
gugaaagcacuuuacauua

SEQ ID NO: 1699752 - RNA, 19 nt, Artificial Sequence
  Description of Artificial Sequence: Synthetic oligonucleotide
  Antisense strand to SEQ ID NO: 1699751
uaauguaaagugcuuucac

SEQ ID NO: 1699753 - RNA, 19 nt, Artificial Sequence
  Description of Artificial Sequence: Synthetic oligonucleotide
  Sense strand starting at position 1214 of SEQ ID NO: 1561805
ugacgcuuggccugagaga

SEQ ID NO: 1699754 - RNA, 19 nt, Artificial Sequence
  Description of Artificial Sequence: Synthetic oligonucleotide
  Antisense strand to SEQ ID NO: 1699753
ucucucaggccaagcguca

SEQ ID NO: 1699755 - RNA, 19 nt, Artificial Sequence
  Description of Artificial Sequence: Synthetic oligonucleotide
  Sense strand starting at position 1215 of SEQ ID NO: 1561805
gacgcuuggccugagagau

SEQ ID NO: 1699756 - RNA, 19 nt, Artificial Sequence
  Description of Artificial Sequence: Synthetic oligonucleotide
  Antisense strand to SEQ ID NO: 1699755
aucucucaggccaagcguc

SEQ ID NO: 1699757 - RNA, 19 nt, Artificial Sequence
  Description of Artificial Sequence: Synthetic oligonucleotide
  Sense strand starting at position 1219 of SEQ ID NO: 1561805
cuuggccugagagauucua

SEQ ID NO: 1699758 - RNA, 19 nt, Artificial Sequence
  Description of Artificial Sequence: Synthetic oligonucleotide
  Antisense strand to SEQ ID NO: 1699757
uagaaucucucaggccaag

SEQ ID NO: 1699759 - RNA, 19 nt, Artificial Sequence
  Description of Artificial Sequence: Synthetic oligonucleotide
  Sense strand starting at position 1232 of SEQ ID NO: 1561805
auucuauagugcccagaga

SEQ ID NO: 1699760 - RNA, 19 nt, Artificial Sequence
  Description of Artificial Sequence: Synthetic oligonucleotide
  Antisense strand to SEQ ID NO: 1699759
ucucugggcacuauagaau

SEQ ID NO: 1699761 - RNA, 19 nt, Artificial Sequence
  Description of Artificial Sequence: Synthetic oligonucleotide
  Sense strand starting at position 1233 of SEQ ID NO: 1561805
uucuauagugcccagagau

SEQ ID NO: 1699762 - RNA, 19 nt, Artificial Sequence
  Description of Artificial Sequence: Synthetic oligonucleotide
  Antisense strand to SEQ ID NO: 1699761
aucucugggcacuauagaa

SEQ ID NO: 1699763 - RNA, 19 nt, Artificial Sequence
  Description of Artificial Sequence: Synthetic oligonucleotide
  Sense strand starting at position 1266 of SEQ ID NO: 1561805
ugggaaucccuaggucacu

SEQ ID NO: 1699764 - RNA, 19 nt, Artificial Sequence
  Description of Artificial Sequence: Synthetic oligonucleotide
  Antisense strand to SEQ ID NO: 1699763
agugaccuagggauuccca

SEQ ID NO: 1699765 - RNA, 19 nt, Artificial Sequence
  Description of Artificial Sequence: Synthetic oligonucleotide
  Sense strand starting at position 1306 of SEQ ID NO: 1561805
aauuaauggugcuuggaga

SEQ ID NO: 1699766 - RNA, 19 nt, Artificial Sequence
  Description of Artificial Sequence: Synthetic oligonucleotide
  Antisense strand to SEQ ID NO: 1699765
ucuccaagcaccauuaauu

SEQ ID NO: 1699767 - RNA, 19 nt, Artificial Sequence
  Description of Artificial Sequence: Synthetic oligonucleotide
  Sense strand starting at position 1639 of SEQ ID NO: 1561805
acaguuguucucgaacgaa

SEQ ID NO: 1699768 - RNA, 19 nt, Artificial Sequence
  Description of Artificial Sequence: Synthetic oligonucleotide
  Antisense strand to SEQ ID NO: 1699767
uucguucgagaacaacugu

SEQ ID NO: 1699769 - RNA, 19 nt, Artificial Sequence
  Description of Artificial Sequence: Synthetic oligonucleotide
  Sense strand starting at position 2154 of SEQ ID NO: 1561805
aggagcugucaucgaccua

SEQ ID NO: 1699770 - RNA, 19 nt, Artificial Sequence
  Description of Artificial Sequence: Synthetic oligonucleotide
  Antisense strand to SEQ ID NO: 1699769
uaggucgaugacagcuccu

SEQ ID NO: 1699771 - RNA, 19 nt, Artificial Sequence
  Description of Artificial Sequence: Synthetic oligonucleotide
  Sense strand starting at position 2188 of SEQ ID NO: 1561805
gguugugaggcaugaggga

SEQ ID NO: 1699772 - RNA, 19 nt, Artificial Sequence
  Description of Artificial Sequence: Synthetic oligonucleotide
  Antisense strand to SEQ ID NO: 1699771
ucccucaugccucacaacc

SEQ ID NO: 1699773 - RNA, 19 nt, Artificial Sequence
  Description of Artificial Sequence: Synthetic oligonucleotide
  Sense strand starting at position 2236 of SEQ ID NO: 1561805
gguugaugauggagguauu

SEQ ID NO: 1699774 - RNA, 19 nt, Artificial Sequence
  Description of Artificial Sequence: Synthetic oligonucleotide
  Antisense strand to SEQ ID NO: 1699773
aauaccuccaucaucaacc

SEQ ID NO: 1699775 - RNA, 19 nt, Artificial Sequence
  Description of Artificial Sequence: Synthetic oligonucleotide
  Sense strand starting at position 2402 of SEQ ID NO: 1561805
gaggcuacccauggagaga

SEQ ID NO: 1699776 - RNA, 19 nt, Artificial Sequence
  Description of Artificial Sequence: Synthetic oligonucleotide
  Antisense strand to SEQ ID NO: 1699775
ucucuccauggguagccuc

SEQ ID NO: 1699777 - RNA, 19 nt, Artificial Sequence
  Description of Artificial Sequence: Synthetic oligonucleotide
  Sense strand starting at position 2415 of SEQ ID NO: 1561805
gagagaguuccaggaggca

SEQ ID NO: 1699778 - RNA, 19 nt, Artificial Sequence
  Description of Artificial Sequence: Synthetic oligonucleotide
  Antisense strand to SEQ ID NO: 1699777
ugccuccuggaacucucuc

SEQ ID NO: 1699779 - RNA, 19 nt, Artificial Sequence
  Description of Artificial Sequence: Synthetic oligonucleotide
  Sense strand starting at position 2942 of SEQ ID NO: 1561805
guguaucauguuuacuauc

SEQ ID NO: 1699780 - RNA, 19 nt, Artificial Sequence
  Description of Artificial Sequence: Synthetic oligonucleotide
  Antisense strand to SEQ ID NO: 1699779
gauaguaaacaugauacac

SEQ ID NO: 1699781 - RNA, 19 nt, Artificial Sequence
  Description of Artificial Sequence: Synthetic oligonucleotide
  Sense strand starting at position 2951 of SEQ ID NO: 1561805
guuuacuaucccggguaag

SEQ ID NO: 1699782 - RNA, 19 nt, Artificial Sequence
  Description of Artificial Sequence: Synthetic oligonucleotide
  Antisense strand to SEQ ID NO: 1699781
cuuacccgggauaguaaac

SEQ ID NO: 1699783 - RNA, 19 nt, Artificial Sequence
  Description of Artificial Sequence: Synthetic oligonucleotide
  Sense strand starting at position 2952 of SEQ ID NO: 1561805
uuuacuaucccggguaagu

SEQ ID NO: 1699784 - RNA, 19 nt, Artificial Sequence
  Description of Artificial Sequence: Synthetic oligonucleotide
  Antisense strand to SEQ ID NO: 1699783
acuuacccgggauaguaaa

SEQ ID NO: 1699785 - RNA, 19 nt, Artificial Sequence
  Description of Artificial Sequence: Synthetic oligonucleotide
  Sense strand starting at position 2962 of SEQ ID NO: 1561805
cggguaaguggugaguuca

SEQ ID NO: 1699786 - RNA, 19 nt, Artificial Sequence
  Description of Artificial Sequence: Synthetic oligonucleotide
  Antisense strand to SEQ ID NO: 1699785
ugaacucaccacuuacccg

SEQ ID NO: 1699787 - RNA, 19 nt, Artificial Sequence
  Description of Artificial Sequence: Synthetic oligonucleotide
  Sense strand starting at position 3032 of SEQ ID NO: 1561805
agaugaugacgacgacaau

SEQ ID NO: 1699788 - RNA, 19 nt, Artificial Sequence
  Description of Artificial Sequence: Synthetic oligonucleotide
  Antisense strand to SEQ ID NO: 1699787
auugucgucgucaucaucu

SEQ ID NO: 1699789 - RNA, 19 nt, Artificial Sequence
  Description of Artificial Sequence: Synthetic oligonucleotide
  Sense strand starting at position 3063 of SEQ ID NO: 1561805
gaugaugacucagcaagau

SEQ ID NO: 1699790 - RNA, 19 nt, Artificial Sequence
  Description of Artificial Sequence: Synthetic oligonucleotide
  Antisense strand to SEQ ID NO: 1699789
aucuugcugagucaucauc

SEQ ID NO: 1699791 - RNA, 19 nt, Artificial Sequence
  Description of Artificial Sequence: Synthetic oligonucleotide
  Sense strand starting at position 3128 of SEQ ID NO: 1561805
guguguuuccggguaucca

SEQ ID NO: 1699792 - RNA, 19 nt, Artificial Sequence
  Description of Artificial Sequence: Synthetic oligonucleotide
  Antisense strand to SEQ ID NO: 1699791
uggauacccggaaacacac

SEQ ID NO: 1699793 - RNA, 19 nt, Artificial Sequence
  Description of Artificial Sequence: Synthetic oligonucleotide
  Sense strand starting at position 3375 of SEQ ID NO: 1561805
cucuguaacugguuaaccu

SEQ ID NO: 1699794 - RNA, 19 nt, Artificial Sequence
  Description of Artificial Sequence: Synthetic oligonucleotide
  Antisense strand to SEQ ID NO: 1699793
agguuaaccaguuacagag

SEQ ID NO: 1699795 - RNA, 19 nt, Artificial Sequence
  Description of Artificial Sequence: Synthetic oligonucleotide
  Sense strand starting at position 3379 of SEQ ID NO: 1561805
guaacugguuaaccuuuaa

SEQ ID NO: 1699796 - RNA, 19 nt, Artificial Sequence
  Description of Artificial Sequence: Synthetic oligonucleotide
  Antisense strand to SEQ ID NO: 1699795
uuaaagguuaaccaguuac

SEQ ID NO: 1699797 - RNA, 19 nt, Artificial Sequence
  Description of Artificial Sequence: Synthetic oligonucleotide
  Sense strand starting at position 3522 of SEQ ID NO: 1561805
agaagauacuaguuagggu

SEQ ID NO: 1699798 - RNA, 19 nt, Artificial Sequence
  Description of Artificial Sequence: Synthetic oligonucleotide
  Antisense strand to SEQ ID NO: 1699797
acccuaacuaguaucuucu

SEQ ID NO: 1699799 - RNA, 19 nt, Artificial Sequence
  Description of Artificial Sequence: Synthetic oligonucleotide
  Sense strand starting at position 3565 of SEQ ID NO: 1561805
guguguacacaagaaucuu

SEQ ID NO: 1699800 - RNA, 19 nt, Artificial Sequence
  Description of Artificial Sequence: Synthetic oligonucleotide
  Antisense strand to SEQ ID NO: 1699799
aagauucuuguguacacac

SEQ ID NO: 1699801 - RNA, 19 nt, Artificial Sequence
  Description of Artificial Sequence: Synthetic oligonucleotide
  Sense strand starting at position 3602 of SEQ ID NO: 1561805
ugaccuggguuucuagaca

SEQ ID NO: 1699802 - RNA, 19 nt, Artificial Sequence
  Description of Artificial Sequence: Synthetic oligonucleotide
  Antisense strand to SEQ ID NO: 1699801
ugucuagaaacccagguca

SEQ ID NO: 1699803 - RNA, 19 nt, Artificial Sequence
  Description of Artificial Sequence: Synthetic oligonucleotide
  Sense strand starting at position 3748 of SEQ ID NO: 1561805
ugaacuuggacuuguugua

SEQ ID NO: 1699804 - RNA, 19 nt, Artificial Sequence
  Description of Artificial Sequence: Synthetic oligonucleotide
  Antisense strand to SEQ ID NO: 1699803
uacaacaaguccaaguuca

SEQ ID NO: 1699805 - RNA, 19 nt, Artificial Sequence
  Description of Artificial Sequence: Synthetic oligonucleotide
  Sense strand starting at position 3757 of SEQ ID NO: 1561805
acuuguuguacuuagugau

SEQ ID NO: 1699806 - RNA, 19 nt, Artificial Sequence
  Description of Artificial Sequence: Synthetic oligonucleotide
  Antisense strand to SEQ ID NO: 1699805
aucacuaaguacaacaagu

SEQ ID NO: 1699807 - RNA, 19 nt, Artificial Sequence
  Description of Artificial Sequence: Synthetic oligonucleotide
  Sense strand starting at position 3897 of SEQ ID NO: 1561805
aacugaugauacuugguga

SEQ ID NO: 1699808 - RNA, 19 nt, Artificial Sequence
  Description of Artificial Sequence: Synthetic oligonucleotide
  Antisense strand to SEQ ID NO: 1699807
ucaccaaguaucaucaguu

SEQ ID NO: 1699809 - RNA, 19 nt, Artificial Sequence
  Description of Artificial Sequence: Synthetic oligonucleotide
  Sense strand starting at position 3898 of SEQ ID NO: 1561805
acugaugauacuuggugau

SEQ ID NO: 1699810 - RNA, 19 nt, Artificial Sequence
  Description of Artificial Sequence: Synthetic oligonucleotide
  Antisense strand to SEQ ID NO: 1699809
aucaccaaguaucaucagu

SEQ ID NO: 1699811 - RNA, 19 nt, Artificial Sequence
  Description of Artificial Sequence: Synthetic oligonucleotide
  Sense strand starting at position 3900 of SEQ ID NO: 1561805
ugaugauacuuggugauga

SEQ ID NO: 1699812 - RNA, 19 nt, Artificial Sequence
  Description of Artificial Sequence: Synthetic oligonucleotide
  Antisense strand to SEQ ID NO: 1699811
ucaucaccaaguaucauca

SEQ ID NO: 1699813 - RNA, 19 nt, Artificial Sequence
  Description of Artificial Sequence: Synthetic oligonucleotide
  Sense strand starting at position 12 of SEQ ID NO: 1561806
ggccauaggugguuacuaa

SEQ ID NO: 1699814 - RNA, 19 nt, Artificial Sequence
  Description of Artificial Sequence: Synthetic oligonucleotide
  Antisense strand to SEQ ID NO: 1699813
uuaguaaccaccuauggcc

SEQ ID NO: 1699815 - RNA, 19 nt, Artificial Sequence
  Description of Artificial Sequence: Synthetic oligonucleotide
  Sense strand starting at position 282 of SEQ ID NO: 1561806
gcagcaucacucuagcaua

SEQ ID NO: 1699816 - RNA, 19 nt, Artificial Sequence
  Description of Artificial Sequence: Synthetic oligonucleotide
  Antisense strand to SEQ ID NO: 1699815
uaugcuagagugaugcugc

SEQ ID NO: 1699817 - RNA, 19 nt, Artificial Sequence
  Description of Artificial Sequence: Synthetic oligonucleotide
  Sense strand starting at position 354 of SEQ ID NO: 1561806
ggacaucagugaccacgau

SEQ ID NO: 1699818 - RNA, 19 nt, Artificial Sequence
  Description of Artificial Sequence: Synthetic oligonucleotide
  Antisense strand to SEQ ID NO: 1699817
aucguggucacugaugucc

SEQ ID NO: 1699819 - RNA, 19 nt, Artificial Sequence
  Description of Artificial Sequence: Synthetic oligonucleotide
  Sense strand starting at position 355 of SEQ ID NO: 1561806
gacaucagugaccacgauu

SEQ ID NO: 1699820 - RNA, 19 nt, Artificial Sequence
  Description of Artificial Sequence: Synthetic oligonucleotide
  Antisense strand to SEQ ID NO: 1699819
aaucguggucacugauguc

SEQ ID NO: 1699821 - RNA, 19 nt, Artificial Sequence
  Description of Artificial Sequence: Synthetic oligonucleotide
  Sense strand starting at position 443 of SEQ ID NO: 1561806
cccugugugagaugcuaga

SEQ ID NO: 1699822 - RNA, 19 nt, Artificial Sequence
  Description of Artificial Sequence: Synthetic oligonucleotide
  Antisense strand to SEQ ID NO: 1699821
ucuagcaucucacacaggg

SEQ ID NO: 1699823 - RNA, 19 nt, Artificial Sequence
  Description of Artificial Sequence: Synthetic oligonucleotide
  Sense strand starting at position 484 of SEQ ID NO: 1561806
acacuaucuucuucgugga

SEQ ID NO: 1699824 - RNA, 19 nt, Artificial Sequence
  Description of Artificial Sequence: Synthetic oligonucleotide
  Antisense strand to SEQ ID NO: 1699823
uccacgaagaagauagugu

SEQ ID NO: 1699825 - RNA, 19 nt, Artificial Sequence
  Description of Artificial Sequence: Synthetic oligonucleotide
  Sense strand starting at position 566 of SEQ ID NO: 1561806
aguugugcaaguguuguua

SEQ ID NO: 1699826 - RNA, 19 nt, Artificial Sequence
  Description of Artificial Sequence: Synthetic oligonucleotide
  Antisense strand to SEQ ID NO: 1699825
uaacaacacuugcacaacu

SEQ ID NO: 1699827 - RNA, 19 nt, Artificial Sequence
  Description of Artificial Sequence: Synthetic oligonucleotide
  Sense strand starting at position 575 of SEQ ID NO: 1561806
aguguuguuaaggacaagu

SEQ ID NO: 1699828 - RNA, 19 nt, Artificial Sequence
  Description of Artificial Sequence: Synthetic oligonucleotide
  Antisense strand to SEQ ID NO: 1699827
acuuguccuuaacaacacu

SEQ ID NO: 1699829 - RNA, 19 nt, Artificial Sequence
  Description of Artificial Sequence: Synthetic oligonucleotide
  Sense strand starting at position 588 of SEQ ID NO: 1561806
acaaguacccagggugaua

SEQ ID NO: 1699830 - RNA, 19 nt, Artificial Sequence
  Description of Artificial Sequence: Synthetic oligonucleotide
  Antisense strand to SEQ ID NO: 1699829
uaucacccuggguacuugu

SEQ ID NO: 1699831 - RNA, 19 nt, Artificial Sequence
  Description of Artificial Sequence: Synthetic oligonucleotide
  Sense strand starting at position 663 of SEQ ID NO: 1561806
ugcuuaagcggagaucuga

SEQ ID NO: 1699832 - RNA, 19 nt, Artificial Sequence
  Description of Artificial Sequence: Synthetic oligonucleotide
  Antisense strand to SEQ ID NO: 1699831
ucagaucuccgcuuaagca

SEQ ID NO: 1699833 - RNA, 19 nt, Artificial Sequence
  Description of Artificial Sequence: Synthetic oligonucleotide
  Sense strand starting at position 770 of SEQ ID NO: 1561806
aggagcuugggauguagaa

SEQ ID NO: 1699834 - RNA, 19 nt, Artificial Sequence
  Description of Artificial Sequence: Synthetic oligonucleotide
  Antisense strand to SEQ ID NO: 1699833
uucuacaucccaagcuccu

SEQ ID NO: 1699835 - RNA, 19 nt, Artificial Sequence
  Description of Artificial Sequence: Synthetic oligonucleotide
  Sense strand starting at position 952 of SEQ ID NO: 1561806
ccagaucugcucugcauuu

SEQ ID NO: 1699836 - RNA, 19 nt, Artificial Sequence
  Description of Artificial Sequence: Synthetic oligonucleotide
  Antisense strand to SEQ ID NO: 1699835
aaaugcagagcagaucugg

SEQ ID NO: 1699837 - RNA, 19 nt, Artificial Sequence
  Description of Artificial Sequence: Synthetic oligonucleotide
  Sense strand starting at position 2077 of SEQ ID NO: 1561806
guugcuugucugucacuca

SEQ ID NO: 1699838 - RNA, 19 nt, Artificial Sequence
  Description of Artificial Sequence: Synthetic oligonucleotide
  Antisense strand to SEQ ID NO: 1699837
ugagugacagacaagcaac

SEQ ID NO: 1699839 - RNA, 19 nt, Artificial Sequence
  Description of Artificial Sequence: Synthetic oligonucleotide
  Sense strand starting at position 2080 of SEQ ID NO: 1561806
gcuugucugucacucaaga

SEQ ID NO: 1699840 - RNA, 19 nt, Artificial Sequence
  Description of Artificial Sequence: Synthetic oligonucleotide
  Antisense strand to SEQ ID NO: 1699839
ucuugagugacagacaagc

SEQ ID NO: 1699841 - RNA, 19 nt, Artificial Sequence
  Description of Artificial Sequence: Synthetic oligonucleotide
  Sense strand starting at position 2280 of SEQ ID NO: 1561806
uaugcaguccuagagugaa

SEQ ID NO: 1699842 - RNA, 19 nt, Artificial Sequence
  Description of Artificial Sequence: Synthetic oligonucleotide
  Antisense strand to SEQ ID NO: 1699841
uucacucuaggacugcaua

SEQ ID NO: 1699843 - RNA, 19 nt, Artificial Sequence
  Description of Artificial Sequence: Synthetic oligonucleotide
  Sense strand starting at position 2321 of SEQ ID NO: 1561806
gucaaaucauagguuguga

SEQ ID NO: 1699844 - RNA, 19 nt, Artificial Sequence
  Description of Artificial Sequence: Synthetic oligonucleotide
  Antisense strand to SEQ ID NO: 1699843
ucacaaccuaugauuugac

SEQ ID NO: 1699845 - RNA, 19 nt, Artificial Sequence
  Description of Artificial Sequence: Synthetic oligonucleotide
  Sense strand starting at position 2485 of SEQ ID NO: 1561806
ccgaguuggagcuaauuau

SEQ ID NO: 1699846 - RNA, 19 nt, Artificial Sequence
  Description of Artificial Sequence: Synthetic oligonucleotide
  Antisense strand to SEQ ID NO: 1699845
auaauuagcuccaacucgg

SEQ ID NO: 1699847 - RNA, 19 nt, Artificial Sequence
  Description of Artificial Sequence: Synthetic oligonucleotide
  Sense strand starting at position 2814 of SEQ ID NO: 1561806
acuuuaaucguuugucuag

SEQ ID NO: 1699848 - RNA, 19 nt, Artificial Sequence
  Description of Artificial Sequence: Synthetic oligonucleotide
  Antisense strand to SEQ ID NO: 1699847
cuagacaaacgauuaaagu

SEQ ID NO: 1699849 - RNA, 19 nt, Artificial Sequence
  Description of Artificial Sequence: Synthetic oligonucleotide
  Sense strand starting at position 2823 of SEQ ID NO: 1561806
guuugucuagcagauucuu

SEQ ID NO: 1699850 - RNA, 19 nt, Artificial Sequence
  Description of Artificial Sequence: Synthetic oligonucleotide
  Antisense strand to SEQ ID NO: 1699849
aagaaucugcuagacaaac

SEQ ID NO: 1699851 - RNA, 19 nt, Artificial Sequence
  Description of Artificial Sequence: Synthetic oligonucleotide
  Sense strand starting at position 2987 of SEQ ID NO: 1561806
ucgaaacaucuuggaauua

SEQ ID NO: 1699852 - RNA, 19 nt, Artificial Sequence
  Description of Artificial Sequence: Synthetic oligonucleotide
  Antisense strand to SEQ ID NO: 1699851
uaauuccaagauguuucga

SEQ ID NO: 1699853 - RNA, 19 nt, Artificial Sequence
  Description of Artificial Sequence: Synthetic oligonucleotide
  Sense strand starting at position 3057 of SEQ ID NO: 1561806
gagguugaggcuuagccau

SEQ ID NO: 1699854 - RNA, 19 nt, Artificial Sequence
  Description of Artificial Sequence: Synthetic oligonucleotide
  Antisense strand to SEQ ID NO: 1699853
auggcuaagccucaaccuc

SEQ ID NO: 1699855 - RNA, 19 nt, Artificial Sequence
  Description of Artificial Sequence: Synthetic oligonucleotide
  Sense strand starting at position 3063 of SEQ ID NO: 1561806
gaggcuuagccauagcuaa

SEQ ID NO: 1699856 - RNA, 19 nt, Artificial Sequence
  Description of Artificial Sequence: Synthetic oligonucleotide
  Antisense strand to SEQ ID NO: 1699855
uuagcuauggcuaagccuc

SEQ ID NO: 1699857 - RNA, 19 nt, Artificial Sequence
  Description of Artificial Sequence: Synthetic oligonucleotide
  Sense strand starting at position 3100 of SEQ ID NO: 1561806
aggaguuacucuuucuccu

SEQ ID NO: 1699858 - RNA, 19 nt, Artificial Sequence
  Description of Artificial Sequence: Synthetic oligonucleotide
  Antisense strand to SEQ ID NO: 1699857
aggagaaagaguaacuccu

SEQ ID NO: 1699859 - RNA, 19 nt, Artificial Sequence
  Description of Artificial Sequence: Synthetic oligonucleotide
  Sense strand starting at position 3135 of SEQ ID NO: 1561806
cagccuugaccuugugaug

SEQ ID NO: 1699860 - RNA, 19 nt, Artificial Sequence
  Description of Artificial Sequence: Synthetic oligonucleotide
  Antisense strand to SEQ ID NO: 1699859
caucacaaggucaaggcug

SEQ ID NO: 1699861 - RNA, 19 nt, Artificial Sequence
  Description of Artificial Sequence: Synthetic oligonucleotide
  Sense strand starting at position 3231 of SEQ ID NO: 1561806
ucauacucuuaugugaaag

SEQ ID NO: 1699862 - RNA, 19 nt, Artificial Sequence
  Description of Artificial Sequence: Synthetic oligonucleotide
  Antisense strand to SEQ ID NO: 1699861
cuuucacauaagaguauga

SEQ ID NO: 1699863 - RNA, 19 nt, Artificial Sequence
  Description of Artificial Sequence: Synthetic oligonucleotide
  Sense strand starting at position 3239 of SEQ ID NO: 1561806
uuaugugaaagcgaaauga

SEQ ID NO: 1699864 - RNA, 19 nt, Artificial Sequence
  Description of Artificial Sequence: Synthetic oligonucleotide
  Antisense strand to SEQ ID NO: 1699863
ucauuucgcuuucacauaa

SEQ ID NO: 1699865 - RNA, 19 nt, Artificial Sequence
  Description of Artificial Sequence: Synthetic oligonucleotide
  Sense strand starting at position 3243 of SEQ ID NO: 1561806
gugaaagcgaaaugaucuu

SEQ ID NO: 1699866 - RNA, 19 nt, Artificial Sequence
  Description of Artificial Sequence: Synthetic oligonucleotide
  Antisense strand to SEQ ID NO: 1699865
aagaucauuucgcuuucac

SEQ ID NO: 1699867 - RNA, 19 nt, Artificial Sequence
  Description of Artificial Sequence: Synthetic oligonucleotide
  Sense strand starting at position 3443 of SEQ ID NO: 1561806
gcuuuacaagacuguguca

SEQ ID NO: 1699868 - RNA, 19 nt, Artificial Sequence
  Description of Artificial Sequence: Synthetic oligonucleotide
  Antisense strand to SEQ ID NO: 1699867
ugacacagucuuguaaagc

SEQ ID NO: 1699869 - RNA, 19 nt, Artificial Sequence
  Description of Artificial Sequence: Synthetic oligonucleotide
  Sense strand starting at position 3482 of SEQ ID NO: 1561806
cagugcagguucuuugauu

SEQ ID NO: 1699870 - RNA, 19 nt, Artificial Sequence
  Description of Artificial Sequence: Synthetic oligonucleotide
  Antisense strand to SEQ ID NO: 1699869
aaucaaagaaccugcacug

SEQ ID NO: 1699871 - RNA, 19 nt, Artificial Sequence
  Description of Artificial Sequence: Synthetic oligonucleotide
  Sense strand starting at position 3554 of SEQ ID NO: 1561806
caggcuaguguuuaacuca

SEQ ID NO: 1699872 - RNA, 19 nt, Artificial Sequence
  Description of Artificial Sequence: Synthetic oligonucleotide
  Antisense strand to SEQ ID NO: 1699871
ugaguuaaacacuagccug

SEQ ID NO: 1699873 - RNA, 19 nt, Artificial Sequence
  Description of Artificial Sequence: Synthetic oligonucleotide
  Sense strand starting at position 3634 of SEQ ID NO: 1561806
agaguuuaggcaggcaagu

SEQ ID NO: 1699874 - RNA, 19 nt, Artificial Sequence
  Description of Artificial Sequence: Synthetic oligonucleotide
  Antisense strand to SEQ ID NO: 1699873
acuugccugccuaaacucu

SEQ ID NO: 1699875 - RNA, 19 nt, Artificial Sequence
  Description of Artificial Sequence: Synthetic oligonucleotide
  Sense strand starting at position 3674 of SEQ ID NO: 1561806
ucccuuucuugaccagagu

SEQ ID NO: 1699876 - RNA, 19 nt, Artificial Sequence
  Description of Artificial Sequence: Synthetic oligonucleotide
  Antisense strand to SEQ ID NO: 1699875
acucuggucaagaaaggga

SEQ ID NO: 1699877 - RNA, 19 nt, Artificial Sequence
  Description of Artificial Sequence: Synthetic oligonucleotide
  Sense strand starting at position 3675 of SEQ ID NO: 1561806
cccuuucuugaccagaguu

SEQ ID NO: 1699878 - RNA, 19 nt, Artificial Sequence
  Description of Artificial Sequence: Synthetic oligonucleotide
  Antisense strand to SEQ ID NO: 1699877
aacucuggucaagaaaggg

SEQ ID NO: 1699879 - RNA, 19 nt, Artificial Sequence
  Description of Artificial Sequence: Synthetic oligonucleotide
  Sense strand starting at position 3693 of SEQ ID NO: 1561806
uuucuuugaugagucaaag

SEQ ID NO: 1699880 - RNA, 19 nt, Artificial Sequence
  Description of Artificial Sequence: Synthetic oligonucleotide
  Antisense strand to SEQ ID NO: 1699879
cuuugacucaucaaagaaa

SEQ ID NO: 1699881 - RNA, 19 nt, Artificial Sequence
  Description of Artificial Sequence: Synthetic oligonucleotide
  Sense strand starting at position 3705 of SEQ ID NO: 1561806
gucaaagucccuggagcaa

SEQ ID NO: 1699882 - RNA, 19 nt, Artificial Sequence
  Description of Artificial Sequence: Synthetic oligonucleotide
  Antisense strand to SEQ ID NO: 1699881
uugcuccagggacuuugac

SEQ ID NO: 1699883 - RNA, 19 nt, Artificial Sequence
  Description of Artificial Sequence: Synthetic oligonucleotide
  Sense strand starting at position 3744 of SEQ ID NO: 1561806
agguaacauguccacacuu

SEQ ID NO: 1699884 - RNA, 19 nt, Artificial Sequence
  Description of Artificial Sequence: Synthetic oligonucleotide
  Antisense strand to SEQ ID NO: 1699883
aaguguggacauguuaccu

SEQ ID NO: 1699885 - RNA, 19 nt, Artificial Sequence
  Description of Artificial Sequence: Synthetic oligonucleotide
  Sense strand starting at position 3746 of SEQ ID NO: 1561806
guaacauguccacacuuua

SEQ ID NO: 1699886 - RNA, 19 nt, Artificial Sequence
  Description of Artificial Sequence: Synthetic oligonucleotide
  Antisense strand to SEQ ID NO: 1699885
uaaaguguggacauguuac

SEQ ID NO: 1699887 - RNA, 19 nt, Artificial Sequence
  Description of Artificial Sequence: Synthetic oligonucleotide
  Sense strand starting at position 3922 of SEQ ID NO: 1561806
gcugaaugucaugauuaca

SEQ ID NO: 1699888 - RNA, 19 nt, Artificial Sequence
  Description of Artificial Sequence: Synthetic oligonucleotide
  Antisense strand to SEQ ID NO: 1699887
uguaaucaugacauucagc

SEQ ID NO: 1699889 - RNA, 19 nt, Artificial Sequence
  Description of Artificial Sequence: Synthetic oligonucleotide
  Sense strand starting at position 3965 of SEQ ID NO: 1561806
gggagaggauaguagagau

SEQ ID NO: 1699890 - RNA, 19 nt, Artificial Sequence
  Description of Artificial Sequence: Synthetic oligonucleotide
  Antisense strand to SEQ ID NO: 1699889
aucucuacuauccucuccc

SEQ ID NO: 1699891 - RNA, 19 nt, Artificial Sequence
  Description of Artificial Sequence: Synthetic oligonucleotide
  Sense strand starting at position 3977 of SEQ ID NO: 1561806
uagagauucugagcuuugu

SEQ ID NO: 1699892 - RNA, 19 nt, Artificial Sequence
  Description of Artificial Sequence: Synthetic oligonucleotide
  Antisense strand to SEQ ID NO: 1699891
acaaagcucagaaucucua

SEQ ID NO: 1699893 - RNA, 19 nt, Artificial Sequence
  Description of Artificial Sequence: Synthetic oligonucleotide
  Sense strand starting at position 216 of SEQ ID NO: 1561807
cgguauucagccuuuacgu

SEQ ID NO: 1699894 - RNA, 19 nt, Artificial Sequence
  Description of Artificial Sequence: Synthetic oligonucleotide
  Antisense strand to SEQ ID NO: 1699893
acguaaaggcugaauaccg

SEQ ID NO: 1699895 - RNA, 19 nt, Artificial Sequence
  Description of Artificial Sequence: Synthetic oligonucleotide
  Sense strand starting at position 264 of SEQ ID NO: 1561807
gucacauuccugugcacca

SEQ ID NO: 1699896 - RNA, 19 nt, Artificial Sequence
  Description of Artificial Sequence: Synthetic oligonucleotide
  Antisense strand to SEQ ID NO: 1699895
uggugcacaggaaugugac

SEQ ID NO: 1699897 - RNA, 19 nt, Artificial Sequence
  Description of Artificial Sequence: Synthetic oligonucleotide
  Sense strand starting at position 323 of SEQ ID NO: 1561807
ggaauaucuggcugagcga

SEQ ID NO: 1699898 - RNA, 19 nt, Artificial Sequence
  Description of Artificial Sequence: Synthetic oligonucleotide
  Antisense strand to SEQ ID NO: 1699897
ucgcucagccagauauucc

SEQ ID NO: 1699899 - RNA, 19 nt, Artificial Sequence
  Description of Artificial Sequence: Synthetic oligonucleotide
  Sense strand starting at position 578 of SEQ ID NO: 1561807
cccggauucucccucaagu

SEQ ID NO: 1699900 - RNA, 19 nt, Artificial Sequence
  Description of Artificial Sequence: Synthetic oligonucleotide
  Antisense strand to SEQ ID NO: 1699899
acuugagggagaauccggg

SEQ ID NO: 1699901 - RNA, 19 nt, Artificial Sequence
  Description of Artificial Sequence: Synthetic oligonucleotide
  Sense strand starting at position 615 of SEQ ID NO: 1561807
auccuucgcugauuccaaa

SEQ ID NO: 1699902 - RNA, 19 nt, Artificial Sequence
  Description of Artificial Sequence: Synthetic oligonucleotide
  Antisense strand to SEQ ID NO: 1699901
uuuggaaucagcgaaggau

SEQ ID NO: 1699903 - RNA, 19 nt, Artificial Sequence
  Description of Artificial Sequence: Synthetic oligonucleotide
  Sense strand starting at position 670 of SEQ ID NO: 1561807
cucagugacuccuuugaga

SEQ ID NO: 1699904 - RNA, 19 nt, Artificial Sequence
  Description of Artificial Sequence: Synthetic oligonucleotide
  Antisense strand to SEQ ID NO: 1699903
ucucaaaggagucacugag

SEQ ID NO: 1699905 - RNA, 19 nt, Artificial Sequence
  Description of Artificial Sequence: Synthetic oligonucleotide
  Sense strand starting at position 672 of SEQ ID NO: 1561807
cagugacuccuuugagagc

SEQ ID NO: 1699906 - RNA, 19 nt, Artificial Sequence
  Description of Artificial Sequence: Synthetic oligonucleotide
  Antisense strand to SEQ ID NO: 1699905
gcucucaaaggagucacug

SEQ ID NO: 1699907 - RNA, 19 nt, Artificial Sequence
  Description of Artificial Sequence: Synthetic oligonucleotide
  Sense strand starting at position 812 of SEQ ID NO: 1561807
ccaggaggcucgcugugau

SEQ ID NO: 1699908 - RNA, 19 nt, Artificial Sequence
  Description of Artificial Sequence: Synthetic oligonucleotide
  Antisense strand to SEQ ID NO: 1699907
aucacagcgagccuccugg

SEQ ID NO: 1699909 - RNA, 19 nt, Artificial Sequence
  Description of Artificial Sequence: Synthetic oligonucleotide
  Sense strand starting at position 815 of SEQ ID NO: 1561807
ggaggcucgcugugaugua

SEQ ID NO: 1699910 - RNA, 19 nt, Artificial Sequence
  Description of Artificial Sequence: Synthetic oligonucleotide
  Antisense strand to SEQ ID NO: 1699909
uacaucacagcgagccucc

SEQ ID NO: 1699911 - RNA, 19 nt, Artificial Sequence
  Description of Artificial Sequence: Synthetic oligonucleotide
  Sense strand starting at position 1333 of SEQ ID NO: 1561807
aaauguuacuucgcuggaa

SEQ ID NO: 1699912 - RNA, 19 nt, Artificial Sequence
  Description of Artificial Sequence: Synthetic oligonucleotide
  Antisense strand to SEQ ID NO: 1699911
uuccagcgaaguaacauuu

SEQ ID NO: 1699913 - RNA, 19 nt, Artificial Sequence
  Description of Artificial Sequence: Synthetic oligonucleotide
  Sense strand starting at position 1334 of SEQ ID NO: 1561807
aauguuacuucgcuggaaa

SEQ ID NO: 1699914 - RNA, 19 nt, Artificial Sequence
  Description of Artificial Sequence: Synthetic oligonucleotide
  Antisense strand to SEQ ID NO: 1699913
uuuccagcgaaguaacauu

SEQ ID NO: 1699915 - RNA, 19 nt, Artificial Sequence
  Description of Artificial Sequence: Synthetic oligonucleotide
  Sense strand starting at position 1335 of SEQ ID NO: 1561807
auguuacuucgcuggaaag

SEQ ID NO: 1699916 - RNA, 19 nt, Artificial Sequence
  Description of Artificial Sequence: Synthetic oligonucleotide
  Antisense strand to SEQ ID NO: 1699915
cuuuccagcgaaguaacau

SEQ ID NO: 1699917 - RNA, 19 nt, Artificial Sequence
  Description of Artificial Sequence: Synthetic oligonucleotide
  Sense strand starting at position 1337 of SEQ ID NO: 1561807
guuacuucgcuggaaaggu

SEQ ID NO: 1699918 - RNA, 19 nt, Artificial Sequence
  Description of Artificial Sequence: Synthetic oligonucleotide
  Antisense strand to SEQ ID NO: 1699917
accuuuccagcgaaguaac

SEQ ID NO: 1699919 - RNA, 19 nt, Artificial Sequence
  Description of Artificial Sequence: Synthetic oligonucleotide
  Sense strand starting at position 1350 of SEQ ID NO: 1561807
aaagguuuccgcuggcacu

SEQ ID NO: 1699920 - RNA, 19 nt, Artificial Sequence
  Description of Artificial Sequence: Synthetic oligonucleotide
  Antisense strand to SEQ ID NO: 1699919
agugccagcggaaaccuuu

SEQ ID NO: 1699921 - RNA, 19 nt, Artificial Sequence
  Description of Artificial Sequence: Synthetic oligonucleotide
  Sense strand starting at position 2009 of SEQ ID NO: 1561807
gcucuuugcggauuagcau

SEQ ID NO: 1699922 - RNA, 19 nt, Artificial Sequence
  Description of Artificial Sequence: Synthetic oligonucleotide
  Antisense strand to SEQ ID NO: 1699921
augcuaauccgcaaagagc

SEQ ID NO: 1699923 - RNA, 19 nt, Artificial Sequence
  Description of Artificial Sequence: Synthetic oligonucleotide
  Sense strand starting at position 2015 of SEQ ID NO: 1561807
ugcggauuagcauaaacuu

SEQ ID NO: 1699924 - RNA, 19 nt, Artificial Sequence
  Description of Artificial Sequence: Synthetic oligonucleotide
  Antisense strand to SEQ ID NO: 1699923
aaguuuaugcuaauccgca

SEQ ID NO: 1699925 - RNA, 19 nt, Artificial Sequence
  Description of Artificial Sequence: Synthetic oligonucleotide
  Sense strand starting at position 2276 of SEQ ID NO: 1561807
ucaggauacgcuugucuuc

SEQ ID NO: 1699926 - RNA, 19 nt, Artificial Sequence
  Description of Artificial Sequence: Synthetic oligonucleotide
  Antisense strand to SEQ ID NO: 1699925
gaagacaagcguauccuga

SEQ ID NO: 1699927 - RNA, 19 nt, Artificial Sequence
  Description of Artificial Sequence: Synthetic oligonucleotide
  Sense strand starting at position 2279 of SEQ ID NO: 1561807
ggauacgcuugucuucaga

SEQ ID NO: 1699928 - RNA, 19 nt, Artificial Sequence
  Description of Artificial Sequence: Synthetic oligonucleotide
  Antisense strand to SEQ ID NO: 1699927
ucugaagacaagcguaucc

SEQ ID NO: 1699929 - RNA, 19 nt, Artificial Sequence
  Description of Artificial Sequence: Synthetic oligonucleotide
  Sense strand starting at position 2290 of SEQ ID NO: 1561807
ucuucagaguccgugugaa

SEQ ID NO: 1699930 - RNA, 19 nt, Artificial Sequence
  Description of Artificial Sequence: Synthetic oligonucleotide
  Antisense strand to SEQ ID NO: 1699929
uucacacggacucugaaga

SEQ ID NO: 1699931 - RNA, 19 nt, Artificial Sequence
  Description of Artificial Sequence: Synthetic oligonucleotide
  Sense strand starting at position 2379 of SEQ ID NO: 1561807
ccgccaccucuuuggaaua

SEQ ID NO: 1699932 - RNA, 19 nt, Artificial Sequence
  Description of Artificial Sequence: Synthetic oligonucleotide
  Antisense strand to SEQ ID NO: 1699931
uauuccaaagagguggcgg

SEQ ID NO: 1699933 - RNA, 19 nt, Artificial Sequence
  Description of Artificial Sequence: Synthetic oligonucleotide
  Sense strand starting at position 2449 of SEQ ID NO: 1561807
ccgggaaccuuaguuugau

SEQ ID NO: 1699934 - RNA, 19 nt, Artificial Sequence
  Description of Artificial Sequence: Synthetic oligonucleotide
  Antisense strand to SEQ ID NO: 1699933
aucaaacuaagguucccgg

SEQ ID NO: 1699935 - RNA, 19 nt, Artificial Sequence
  Description of Artificial Sequence: Synthetic oligonucleotide
  Sense strand starting at position 2450 of SEQ ID NO: 1561807
cgggaaccuuaguuugaua

SEQ ID NO: 1699936 - RNA, 19 nt, Artificial Sequence
  Description of Artificial Sequence: Synthetic oligonucleotide
  Antisense strand to SEQ ID NO: 1699935
uaucaaacuaagguucccg

SEQ ID NO: 1699937 - RNA, 19 nt, Artificial Sequence
  Description of Artificial Sequence: Synthetic oligonucleotide
  Sense strand starting at position 2452 of SEQ ID NO: 1561807
ggaaccuuaguuugauaac

SEQ ID NO: 1699938 - RNA, 19 nt, Artificial Sequence
  Description of Artificial Sequence: Synthetic oligonucleotide
  Antisense strand to SEQ ID NO: 1699937
guuaucaaacuaagguucc

SEQ ID NO: 1699939 - RNA, 19 nt, Artificial Sequence
  Description of Artificial Sequence: Synthetic oligonucleotide
  Sense strand starting at position 2754 of SEQ ID NO: 1561807
gcuugugaaguugacucuu

SEQ ID NO: 1699940 - RNA, 19 nt, Artificial Sequence
  Description of Artificial Sequence: Synthetic oligonucleotide
  Antisense strand to SEQ ID NO: 1699939
aagagucaacuucacaagc

SEQ ID NO: 1699941 - RNA, 19 nt, Artificial Sequence
  Description of Artificial Sequence: Synthetic oligonucleotide
  Sense strand starting at position 2796 of SEQ ID NO: 1561807
cgucguccucauucaguau

SEQ ID NO: 1699942 - RNA, 19 nt, Artificial Sequence
  Description of Artificial Sequence: Synthetic oligonucleotide
  Antisense strand to SEQ ID NO: 1699941
auacugaaugaggacgacg

SEQ ID NO: 1699943 - RNA, 19 nt, Artificial Sequence
  Description of Artificial Sequence: Synthetic oligonucleotide
  Sense strand starting at position 2836 of SEQ ID NO: 1561807
ugcacagaguccuucugau

SEQ ID NO: 1699944 - RNA, 19 nt, Artificial Sequence
  Description of Artificial Sequence: Synthetic oligonucleotide
  Antisense strand to SEQ ID NO: 1699943
aucagaaggacucugugca

SEQ ID NO: 1699945 - RNA, 19 nt, Artificial Sequence
  Description of Artificial Sequence: Synthetic oligonucleotide
  Sense strand starting at position 2846 of SEQ ID NO: 1561807
ccuucugauucugucauca

SEQ ID NO: 1699946 - RNA, 19 nt, Artificial Sequence
  Description of Artificial Sequence: Synthetic oligonucleotide
  Antisense strand to SEQ ID NO: 1699945
ugaugacagaaucagaagg

SEQ ID NO: 1699947 - RNA, 19 nt, Artificial Sequence
  Description of Artificial Sequence: Synthetic oligonucleotide
  Sense strand starting at position 2856 of SEQ ID NO: 1561807
cugucaucagagcgguacu

SEQ ID NO: 1699948 - RNA, 19 nt, Artificial Sequence
  Description of Artificial Sequence: Synthetic oligonucleotide
  Antisense strand to SEQ ID NO: 1699947
aguaccgcucugaugacag

SEQ ID NO: 1699949 - RNA, 19 nt, Artificial Sequence
  Description of Artificial Sequence: Synthetic oligonucleotide
  Sense strand starting at position 2857 of SEQ ID NO: 1561807
ugucaucagagcgguacuu

SEQ ID NO: 1699950 - RNA, 19 nt, Artificial Sequence
  Description of Artificial Sequence: Synthetic oligonucleotide
  Antisense strand to SEQ ID NO: 1699949
aaguaccgcucugaugaca

SEQ ID NO: 1699951 - RNA, 19 nt, Artificial Sequence
  Description of Artificial Sequence: Synthetic oligonucleotide
  Sense strand starting at position 2933 of SEQ ID NO: 1561807
agcugauagguguacagaa

SEQ ID NO: 1699952 - RNA, 19 nt, Artificial Sequence
  Description of Artificial Sequence: Synthetic oligonucleotide
  Antisense strand to SEQ ID NO: 1699951
uucuguacaccuaucagcu

SEQ ID NO: 1699953 - RNA, 19 nt, Artificial Sequence
  Description of Artificial Sequence: Synthetic oligonucleotide
  Sense strand starting at position 3021 of SEQ ID NO: 1561807
gggugaugguuaucaagga

SEQ ID NO: 1699954 - RNA, 19 nt, Artificial Sequence
  Description of Artificial Sequence: Synthetic oligonucleotide
  Antisense strand to SEQ ID NO: 1699953
uccuugauaaccaucaccc

SEQ ID NO: 1699955 - RNA, 19 nt, Artificial Sequence
  Description of Artificial Sequence: Synthetic oligonucleotide
  Sense strand starting at position 3022 of SEQ ID NO: 1561807
ggugaugguuaucaaggau

SEQ ID NO: 1699956 - RNA, 19 nt, Artificial Sequence
  Description of Artificial Sequence: Synthetic oligonucleotide
  Antisense strand to SEQ ID NO: 1699955
auccuugauaaccaucacc

SEQ ID NO: 1699957 - RNA, 19 nt, Artificial Sequence
  Description of Artificial Sequence: Synthetic oligonucleotide
  Sense strand starting at position 3025 of SEQ ID NO: 1561807
gaugguuaucaaggauacu

SEQ ID NO: 1699958 - RNA, 19 nt, Artificial Sequence
  Description of Artificial Sequence: Synthetic oligonucleotide
  Antisense strand to SEQ ID NO: 1699957
aguauccuugauaaccauc

SEQ ID NO: 1699959 - RNA, 19 nt, Artificial Sequence
  Description of Artificial Sequence: Synthetic oligonucleotide
  Sense strand starting at position 3202 of SEQ ID NO: 1561807
guagguugugugaguuucu

SEQ ID NO: 1699960 - RNA, 19 nt, Artificial Sequence
  Description of Artificial Sequence: Synthetic oligonucleotide
  Antisense strand to SEQ ID NO: 1699959
agaaacucacacaaccuac

SEQ ID NO: 1699961 - RNA, 19 nt, Artificial Sequence
  Description of Artificial Sequence: Synthetic oligonucleotide
  Sense strand starting at position 3243 of SEQ ID NO: 1561807
gacucaguggcuuaacaca

SEQ ID NO: 1699962 - RNA, 19 nt, Artificial Sequence
  Description of Artificial Sequence: Synthetic oligonucleotide
  Antisense strand to SEQ ID NO: 1699961
uguguuaagccacugaguc

SEQ ID NO: 1699963 - RNA, 19 nt, Artificial Sequence
  Description of Artificial Sequence: Synthetic oligonucleotide
  Sense strand starting at position 3396 of SEQ ID NO: 1561807
ggcguucuuuggucaagga

SEQ ID NO: 1699964 - RNA, 19 nt, Artificial Sequence
  Description of Artificial Sequence: Synthetic oligonucleotide
  Antisense strand to SEQ ID NO: 1699963
uccuugaccaaagaacgcc

SEQ ID NO: 1699965 - RNA, 19 nt, Artificial Sequence
  Description of Artificial Sequence: Synthetic oligonucleotide
  Sense strand starting at position 3397 of SEQ ID NO: 1561807
gcguucuuuggucaaggau

SEQ ID NO: 1699966 - RNA, 19 nt, Artificial Sequence
  Description of Artificial Sequence: Synthetic oligonucleotide
  Antisense strand to SEQ ID NO: 1699965
auccuugaccaaagaacgc

SEQ ID NO: 1699967 - RNA, 19 nt, Artificial Sequence
  Description of Artificial Sequence: Synthetic oligonucleotide
  Sense strand starting at position 3406 of SEQ ID NO: 1561807
ggucaaggauucuuuguag

SEQ ID NO: 1699968 - RNA, 19 nt, Artificial Sequence
  Description of Artificial Sequence: Synthetic oligonucleotide
  Antisense strand to SEQ ID NO: 1699967
cuacaaagaauccuugacc

SEQ ID NO: 1699969 - RNA, 19 nt, Artificial Sequence
  Description of Artificial Sequence: Synthetic oligonucleotide
  Sense strand starting at position 3486 of SEQ ID NO: 1561807
cugugacugugaucugugu

SEQ ID NO: 1699970 - RNA, 19 nt, Artificial Sequence
  Description of Artificial Sequence: Synthetic oligonucleotide
  Antisense strand to SEQ ID NO: 1699969
acacagaucacagucacag

SEQ ID NO: 1699971 - RNA, 19 nt, Artificial Sequence
  Description of Artificial Sequence: Synthetic oligonucleotide
  Sense strand starting at position 3490 of SEQ ID NO: 1561807
gacugugaucuguguccuu

SEQ ID NO: 1699972 - RNA, 19 nt, Artificial Sequence
  Description of Artificial Sequence: Synthetic oligonucleotide
  Antisense strand to SEQ ID NO: 1699971
aaggacacagaucacaguc

SEQ ID NO: 1699973 - RNA, 19 nt, Artificial Sequence
  Description of Artificial Sequence: Synthetic oligonucleotide
  Sense strand starting at position 38 of SEQ ID NO: 1561808
aggucaucuccauguaccu

SEQ ID NO: 1699974 - RNA, 19 nt, Artificial Sequence
  Description of Artificial Sequence: Synthetic oligonucleotide
  Antisense strand to SEQ ID NO: 1699973
agguacauggagaugaccu

SEQ ID NO: 1699975 - RNA, 19 nt, Artificial Sequence
  Description of Artificial Sequence: Synthetic oligonucleotide
  Sense strand starting at position 53 of SEQ ID NO: 1561808
accugugucccagaucuaa

SEQ ID NO: 1699976 - RNA, 19 nt, Artificial Sequence
  Description of Artificial Sequence: Synthetic oligonucleotide
  Antisense strand to SEQ ID NO: 1699975
uuagaucugggacacaggu

SEQ ID NO: 1699977 - RNA, 19 nt, Artificial Sequence
  Description of Artificial Sequence: Synthetic oligonucleotide
  Sense strand starting at position 183 of SEQ ID NO: 1561808
ucagguucucccugacaga

SEQ ID NO: 1699978 - RNA, 19 nt, Artificial Sequence
  Description of Artificial Sequence: Synthetic oligonucleotide
  Antisense strand to SEQ ID NO: 1699977
ucugucagggagaaccuga

SEQ ID NO: 1699979 - RNA, 19 nt, Artificial Sequence
  Description of Artificial Sequence: Synthetic oligonucleotide
  Sense strand starting at position 196 of SEQ ID NO: 1561808
gacagacucuuugaggaaa

SEQ ID NO: 1699980 - RNA, 19 nt, Artificial Sequence
  Description of Artificial Sequence: Synthetic oligonucleotide
  Antisense strand to SEQ ID NO: 1699979
uuuccucaaagagucuguc

SEQ ID NO: 1699981 - RNA, 19 nt, Artificial Sequence
  Description of Artificial Sequence: Synthetic oligonucleotide
  Sense strand starting at position 223 of SEQ ID NO: 1561808
aucucagucuguucuuuaa

SEQ ID NO: 1699982 - RNA, 19 nt, Artificial Sequence
  Description of Artificial Sequence: Synthetic oligonucleotide
  Antisense strand to SEQ ID NO: 1699981
uuaaagaacagacugagau

SEQ ID NO: 1699983 - RNA, 19 nt, Artificial Sequence
  Description of Artificial Sequence: Synthetic oligonucleotide
  Sense strand starting at position 225 of SEQ ID NO: 1561808
cucagucuguucuuuaaag

SEQ ID NO: 1699984 - RNA, 19 nt, Artificial Sequence
  Description of Artificial Sequence: Synthetic oligonucleotide
  Antisense strand to SEQ ID NO: 1699983
cuuuaaagaacagacugag

SEQ ID NO: 1699985 - RNA, 19 nt, Artificial Sequence
  Description of Artificial Sequence: Synthetic oligonucleotide
  Sense strand starting at position 227 of SEQ ID NO: 1561808
cagucuguucuuuaaagga

SEQ ID NO: 1699986 - RNA, 19 nt, Artificial Sequence
  Description of Artificial Sequence: Synthetic oligonucleotide
  Antisense strand to SEQ ID NO: 1699985
uccuuuaaagaacagacug

SEQ ID NO: 1699987 - RNA, 19 nt, Artificial Sequence
  Description of Artificial Sequence: Synthetic oligonucleotide
  Sense strand starting at position 389 of SEQ ID NO: 1561808
agaagagaaucugagggua

SEQ ID NO: 1699988 - RNA, 19 nt, Artificial Sequence
  Description of Artificial Sequence: Synthetic oligonucleotide
  Antisense strand to SEQ ID NO: 1699987
uacccucagauucucuucu

SEQ ID NO: 1699989 - RNA, 19 nt, Artificial Sequence
  Description of Artificial Sequence: Synthetic oligonucleotide
  Sense strand starting at position 471 of SEQ ID NO: 1561808
aggucaccucuuggaaaua

SEQ ID NO: 1699990 - RNA, 19 nt, Artificial Sequence
  Description of Artificial Sequence: Synthetic oligonucleotide
  Antisense strand to SEQ ID NO: 1699989
uauuuccaagaggugaccu

SEQ ID NO: 1699991 - RNA, 19 nt, Artificial Sequence
  Description of Artificial Sequence: Synthetic oligonucleotide
  Sense strand starting at position 505 of SEQ ID NO: 1561808
guggauugauggcugccua

SEQ ID NO: 1699992 - RNA, 19 nt, Artificial Sequence
  Description of Artificial Sequence: Synthetic oligonucleotide
  Antisense strand to SEQ ID NO: 1699991
uaggcagccaucaauccac

SEQ ID NO: 1699993 - RNA, 19 nt, Artificial Sequence
  Description of Artificial Sequence: Synthetic oligonucleotide
  Sense strand starting at position 506 of SEQ ID NO: 1561808
uggauugauggcugccuaa

SEQ ID NO: 1699994 - RNA, 19 nt, Artificial Sequence
  Description of Artificial Sequence: Synthetic oligonucleotide
  Antisense strand to SEQ ID NO: 1699993
uuaggcagccaucaaucca

SEQ ID NO: 1699995 - RNA, 19 nt, Artificial Sequence
  Description of Artificial Sequence: Synthetic oligonucleotide
  Sense strand starting at position 567 of SEQ ID NO: 1561808
aagggucaugaaugcaaau

SEQ ID NO: 1699996 - RNA, 19 nt, Artificial Sequence
  Description of Artificial Sequence: Synthetic oligonucleotide
  Antisense strand to SEQ ID NO: 1699995
auuugcauucaugacccuu

SEQ ID NO: 1699997 - RNA, 19 nt, Artificial Sequence
  Description of Artificial Sequence: Synthetic oligonucleotide
  Sense strand starting at position 591 of SEQ ID NO: 1561808
ccaugcacgcuguaucaaa

SEQ ID NO: 1699998 - RNA, 19 nt, Artificial Sequence
  Description of Artificial Sequence: Synthetic oligonucleotide
  Antisense strand to SEQ ID NO: 1699997
uuugauacagcgugcaugg

SEQ ID NO: 1699999 - RNA, 19 nt, Artificial Sequence
  Description of Artificial Sequence: Synthetic oligonucleotide
  Sense strand starting at position 752 of SEQ ID NO: 1561808
gcuuccagaucuccugaca

SEQ ID NO: 1700000 - RNA, 19 nt, Artificial Sequence
  Description of Artificial Sequence: Synthetic oligonucleotide
  Antisense strand to SEQ ID NO: 1699999
ugucaggagaucuggaagc

SEQ ID NO: 1700001 - RNA, 19 nt, Artificial Sequence
  Description of Artificial Sequence: Synthetic oligonucleotide
  Sense strand starting at position 957 of SEQ ID NO: 1561808
gaggaagaguccuuguaau

SEQ ID NO: 1700002 - RNA, 19 nt, Artificial Sequence
  Description of Artificial Sequence: Synthetic oligonucleotide
  Antisense strand to SEQ ID NO: 1700001
auuacaaggacucuuccuc

SEQ ID NO: 1700003 - RNA, 19 nt, Artificial Sequence
  Description of Artificial Sequence: Synthetic oligonucleotide
  Sense strand starting at position 996 of SEQ ID NO: 1561808
cugcgcgagguuucagauu

SEQ ID NO: 1700004 - RNA, 19 nt, Artificial Sequence
  Description of Artificial Sequence: Synthetic oligonucleotide
  Antisense strand to SEQ ID NO: 1700003
aaucugaaaccucgcgcag

SEQ ID NO: 1700005 - RNA, 19 nt, Artificial Sequence
  Description of Artificial Sequence: Synthetic oligonucleotide
  Sense strand starting at position 1367 of SEQ ID NO: 1561808
cuaugagcuccucgggaca

SEQ ID NO: 1700006 - RNA, 19 nt, Artificial Sequence
  Description of Artificial Sequence: Synthetic oligonucleotide
  Antisense strand to SEQ ID NO: 1700005
ugucccgaggagcucauag

SEQ ID NO: 1700007 - RNA, 19 nt, Artificial Sequence
  Description of Artificial Sequence: Synthetic oligonucleotide
  Sense strand starting at position 1401 of SEQ ID NO: 1561808
ggugaaucguccuuacacc

SEQ ID NO: 1700008 - RNA, 19 nt, Artificial Sequence
  Description of Artificial Sequence: Synthetic oligonucleotide
  Antisense strand to SEQ ID NO: 1700007
gguguaaggacgauucacc

SEQ ID NO: 1700009 - RNA, 19 nt, Artificial Sequence
  Description of Artificial Sequence: Synthetic oligonucleotide
  Sense strand starting at position 1448 of SEQ ID NO: 1561808
accuguuucccagaaacug

SEQ ID NO: 1700010 - RNA, 19 nt, Artificial Sequence
  Description of Artificial Sequence: Synthetic oligonucleotide
  Antisense strand to SEQ ID NO: 1700009
caguuucugggaaacaggu

SEQ ID NO: 1700011 - RNA, 19 nt, Artificial Sequence
  Description of Artificial Sequence: Synthetic oligonucleotide
  Sense strand starting at position 2752 of SEQ ID NO: 1561808
ggucuauaggcauaagcca

SEQ ID NO: 1700012 - RNA, 19 nt, Artificial Sequence
  Description of Artificial Sequence: Synthetic oligonucleotide
  Antisense strand to SEQ ID NO: 1700011
uggcuuaugccuauagacc

SEQ ID NO: 1700013 - RNA, 19 nt, Artificial Sequence
  Description of Artificial Sequence: Synthetic oligonucleotide
  Sense strand starting at position 3024 of SEQ ID NO: 1561808
gggcaucugggagagcuau

SEQ ID NO: 1700014 - RNA, 19 nt, Artificial Sequence
  Description of Artificial Sequence: Synthetic oligonucleotide
  Antisense strand to SEQ ID NO: 1700013
auagcucucccagaugccc

SEQ ID NO: 1700015 - RNA, 19 nt, Artificial Sequence
  Description of Artificial Sequence: Synthetic oligonucleotide
  Sense strand starting at position 3035 of SEQ ID NO: 1561808
agagcuauuaguggaagaa

SEQ ID NO: 1700016 - RNA, 19 nt, Artificial Sequence
  Description of Artificial Sequence: Synthetic oligonucleotide
  Antisense strand to SEQ ID NO: 1700015
uucuuccacuaauagcucu

SEQ ID NO: 1700017 - RNA, 19 nt, Artificial Sequence
  Description of Artificial Sequence: Synthetic oligonucleotide
  Sense strand starting at position 3072 of SEQ ID NO: 1561808
ccaagugggcaagaguuua

SEQ ID NO: 1700018 - RNA, 19 nt, Artificial Sequence
  Description of Artificial Sequence: Synthetic oligonucleotide
  Antisense strand to SEQ ID NO: 1700017
uaaacucuugcccacuugg

SEQ ID NO: 1700019 - RNA, 19 nt, Artificial Sequence
  Description of Artificial Sequence: Synthetic oligonucleotide
  Sense strand starting at position 3122 of SEQ ID NO: 1561808
aagugcuagcuguauggga

SEQ ID NO: 1700020 - RNA, 19 nt, Artificial Sequence
  Description of Artificial Sequence: Synthetic oligonucleotide
  Antisense strand to SEQ ID NO: 1700019
ucccauacagcuagcacuu

SEQ ID NO: 1700021 - RNA, 19 nt, Artificial Sequence
  Description of Artificial Sequence: Synthetic oligonucleotide
  Sense strand starting at position 3220 of SEQ ID NO: 1561808
ggacacugccacugagauu

SEQ ID NO: 1700022 - RNA, 19 nt, Artificial Sequence
  Description of Artificial Sequence: Synthetic oligonucleotide
  Antisense strand to SEQ ID NO: 1700021
aaucucaguggcagugucc

SEQ ID NO: 1700023 - RNA, 19 nt, Artificial Sequence
  Description of Artificial Sequence: Synthetic oligonucleotide
  Sense strand starting at position 3234 of SEQ ID NO: 1561808
agauuugguuauuacagag

SEQ ID NO: 1700024 - RNA, 19 nt, Artificial Sequence
  Description of Artificial Sequence: Synthetic oligonucleotide
  Antisense strand to SEQ ID NO: 1700023
cucuguaauaaccaaaucu

SEQ ID NO: 1700025 - RNA, 19 nt, Artificial Sequence
  Description of Artificial Sequence: Synthetic oligonucleotide
  Sense strand starting at position 3238 of SEQ ID NO: 1561808
uugguuauuacagagguua

SEQ ID NO: 1700026 - RNA, 19 nt, Artificial Sequence
  Description of Artificial Sequence: Synthetic oligonucleotide
  Antisense strand to SEQ ID NO: 1700025
uaaccucuguaauaaccaa

SEQ ID NO: 1700027 - RNA, 19 nt, Artificial Sequence
  Description of Artificial Sequence: Synthetic oligonucleotide
  Sense strand starting at position 3299 of SEQ ID NO: 1561808
guugcuuuggguuaggaau

SEQ ID NO: 1700028 - RNA, 19 nt, Artificial Sequence
  Description of Artificial Sequence: Synthetic oligonucleotide
  Antisense strand to SEQ ID NO: 1700027
auuccuaacccaaagcaac

SEQ ID NO: 1700029 - RNA, 19 nt, Artificial Sequence
  Description of Artificial Sequence: Synthetic oligonucleotide
  Sense strand starting at position 3357 of SEQ ID NO: 1561808
guggguauaucugucagaa

SEQ ID NO: 1700030 - RNA, 19 nt, Artificial Sequence
  Description of Artificial Sequence: Synthetic oligonucleotide
  Antisense strand to SEQ ID NO: 1700029
uucugacagauauacccac

SEQ ID NO: 1700031 - RNA, 19 nt, Artificial Sequence
  Description of Artificial Sequence: Synthetic oligonucleotide
  Sense strand starting at position 3432 of SEQ ID NO: 1561808
agccaaacguggcuaaauu

SEQ ID NO: 1700032 - RNA, 19 nt, Artificial Sequence
  Description of Artificial Sequence: Synthetic oligonucleotide
  Antisense strand to SEQ ID NO: 1700031
aauuuagccacguuuggcu

SEQ ID NO: 1700033 - RNA, 19 nt, Artificial Sequence
  Description of Artificial Sequence: Synthetic oligonucleotide
  Sense strand starting at position 3483 of SEQ ID NO: 1561808
uggcaaauaauguguaaga

SEQ ID NO: 1700034 - RNA, 19 nt, Artificial Sequence
  Description of Artificial Sequence: Synthetic oligonucleotide
  Antisense strand to SEQ ID NO: 1700033
ucuuacacauuauuugcca

SEQ ID NO: 1700035 - RNA, 19 nt, Artificial Sequence
  Description of Artificial Sequence: Synthetic oligonucleotide
  Sense strand starting at position 3484 of SEQ ID NO: 1561808
ggcaaauaauguguaagac

SEQ ID NO: 1700036 - RNA, 19 nt, Artificial Sequence
  Description of Artificial Sequence: Synthetic oligonucleotide
  Antisense strand to SEQ ID NO: 1700035
gucuuacacauuauuugcc

SEQ ID NO: 1700037 - RNA, 19 nt, Artificial Sequence
  Description of Artificial Sequence: Synthetic oligonucleotide
  Sense strand starting at position 3485 of SEQ ID NO: 1561808
gcaaauaauguguaagacu

SEQ ID NO: 1700038 - RNA, 19 nt, Artificial Sequence
  Description of Artificial Sequence: Synthetic oligonucleotide
  Antisense strand to SEQ ID NO: 1700037
agucuuacacauuauuugc

SEQ ID NO: 1700039 - RNA, 19 nt, Artificial Sequence
  Description of Artificial Sequence: Synthetic oligonucleotide
  Sense strand starting at position 3708 of SEQ ID NO: 1561808
cucuuagaguuucuagaau

SEQ ID NO: 1700040 - RNA, 19 nt, Artificial Sequence
  Description of Artificial Sequence: Synthetic oligonucleotide
  Antisense strand to SEQ ID NO: 1700039
auucuagaaacucuaagag

SEQ ID NO: 1700041 - RNA, 19 nt, Artificial Sequence
  Description of Artificial Sequence: Synthetic oligonucleotide
  Sense strand starting at position 3719 of SEQ ID NO: 1561808
ucuagaauuugugaaagua

SEQ ID NO: 1700042 - RNA, 19 nt, Artificial Sequence
  Description of Artificial Sequence: Synthetic oligonucleotide
  Antisense strand to SEQ ID NO: 1700041
uacuuucacaaauucuaga

SEQ ID NO: 1700043 - RNA, 19 nt, Artificial Sequence
  Description of Artificial Sequence: Synthetic oligonucleotide
  Sense strand starting at position 3800 of SEQ ID NO: 1561808
acaucuucccuucguagau

SEQ ID NO: 1700044 - RNA, 19 nt, Artificial Sequence
  Description of Artificial Sequence: Synthetic oligonucleotide
  Antisense strand to SEQ ID NO: 1700043
aucuacgaagggaagaugu

SEQ ID NO: 1700045 - RNA, 19 nt, Artificial Sequence
  Description of Artificial Sequence: Synthetic oligonucleotide
  Sense strand starting at position 3812 of SEQ ID NO: 1561808
cguagauuguuucucaaug

SEQ ID NO: 1700046 - RNA, 19 nt, Artificial Sequence
  Description of Artificial Sequence: Synthetic oligonucleotide
  Antisense strand to SEQ ID NO: 1700045
cauugagaaacaaucuacg

SEQ ID NO: 1700047 - RNA, 19 nt, Artificial Sequence
  Description of Artificial Sequence: Synthetic oligonucleotide
  Sense strand starting at position 3813 of SEQ ID NO: 1561808
guagauuguuucucaaugu

SEQ ID NO: 1700048 - RNA, 19 nt, Artificial Sequence
  Description of Artificial Sequence: Synthetic oligonucleotide
  Antisense strand to SEQ ID NO: 1700047
acauugagaaacaaucuac

SEQ ID NO: 1700049 - RNA, 19 nt, Artificial Sequence
  Description of Artificial Sequence: Synthetic oligonucleotide
  Sense strand starting at position 3820 of SEQ ID NO: 1561808
guuucucaauguuuaauac

SEQ ID NO: 1700050 - RNA, 19 nt, Artificial Sequence
  Description of Artificial Sequence: Synthetic oligonucleotide
  Antisense strand to SEQ ID NO: 1700049
guauuaaacauugagaaac

SEQ ID NO: 1700051 - RNA, 19 nt, Artificial Sequence
  Description of Artificial Sequence: Synthetic oligonucleotide
  Sense strand starting at position 3963 of SEQ ID NO: 1561808
cuugccugucgcccagaua

SEQ ID NO: 1700052 - RNA, 19 nt, Artificial Sequence
  Description of Artificial Sequence: Synthetic oligonucleotide
  Antisense strand to SEQ ID NO: 1700051
uaucugggcgacaggcaag

SEQ ID NO: 1700053 - RNA, 19 nt, Artificial Sequence
  Description of Artificial Sequence: Synthetic oligonucleotide
  Sense strand starting at position 192 of SEQ ID NO: 1561809
auggaagaauucuugcacu

SEQ ID NO: 1700054 - RNA, 19 nt, Artificial Sequence
  Description of Artificial Sequence: Synthetic oligonucleotide
  Antisense strand to SEQ ID NO: 1700053
agugcaagaauucuuccau

SEQ ID NO: 1700055 - RNA, 19 nt, Artificial Sequence
  Description of Artificial Sequence: Synthetic oligonucleotide
  Sense strand starting at position 211 of SEQ ID NO: 1561809
uggauauccuucucucuga

SEQ ID NO: 1700056 - RNA, 19 nt, Artificial Sequence
  Description of Artificial Sequence: Synthetic oligonucleotide
  Antisense strand to SEQ ID NO: 1700055
ucagagagaaggauaucca

SEQ ID NO: 1700057 - RNA, 19 nt, Artificial Sequence
  Description of Artificial Sequence: Synthetic oligonucleotide
  Sense strand starting at position 212 of SEQ ID NO: 1561809
ggauauccuucucucugaa

SEQ ID NO: 1700058 - RNA, 19 nt, Artificial Sequence
  Description of Artificial Sequence: Synthetic oligonucleotide
  Antisense strand to SEQ ID NO: 1700057
uucagagagaaggauaucc

SEQ ID NO: 1700059 - RNA, 19 nt, Artificial Sequence
  Description of Artificial Sequence: Synthetic oligonucleotide
  Sense strand starting at position 266 of SEQ ID NO: 1561809
acccuuguaucacagucaa

SEQ ID NO: 1700060 - RNA, 19 nt, Artificial Sequence
  Description of Artificial Sequence: Synthetic oligonucleotide
  Antisense strand to SEQ ID NO: 1700059
uugacugugauacaagggu

SEQ ID NO: 1700061 - RNA, 19 nt, Artificial Sequence
  Description of Artificial Sequence: Synthetic oligonucleotide
  Sense strand starting at position 390 of SEQ ID NO: 1561809
gguacagaauguuucucuu

SEQ ID NO: 1700062 - RNA, 19 nt, Artificial Sequence
  Description of Artificial Sequence: Synthetic oligonucleotide
  Antisense strand to SEQ ID NO: 1700061
aagagaaacauucuguacc

SEQ ID NO: 1700063 - RNA, 19 nt, Artificial Sequence
  Description of Artificial Sequence: Synthetic oligonucleotide
  Sense strand starting at position 618 of SEQ ID NO: 1561809
uagaaaugccuguaugcac

SEQ ID NO: 1700064 - RNA, 19 nt, Artificial Sequence
  Description of Artificial Sequence: Synthetic oligonucleotide
  Antisense strand to SEQ ID NO: 1700063
gugcauacaggcauuucua

SEQ ID NO: 1700065 - RNA, 19 nt, Artificial Sequence
  Description of Artificial Sequence: Synthetic oligonucleotide
  Sense strand starting at position 632 of SEQ ID NO: 1561809
ugcaccaguacuuggagaa

SEQ ID NO: 1700066 - RNA, 19 nt, Artificial Sequence
  Description of Artificial Sequence: Synthetic oligonucleotide
  Antisense strand to SEQ ID NO: 1700065
uucuccaaguacuggugca

SEQ ID NO: 1700067 - RNA, 19 nt, Artificial Sequence
  Description of Artificial Sequence: Synthetic oligonucleotide
  Sense strand starting at position 705 of SEQ ID NO: 1561809
gagggauucccuggaguga

SEQ ID NO: 1700068 - RNA, 19 nt, Artificial Sequence
  Description of Artificial Sequence: Synthetic oligonucleotide
  Antisense strand to SEQ ID NO: 1700067
ucacuccagggaaucccuc

SEQ ID NO: 1700069 - RNA, 19 nt, Artificial Sequence
  Description of Artificial Sequence: Synthetic oligonucleotide
  Sense strand starting at position 733 of SEQ ID NO: 1561809
ccuuuaagagagugguucu

SEQ ID NO: 1700070 - RNA, 19 nt, Artificial Sequence
  Description of Artificial Sequence: Synthetic oligonucleotide
  Antisense strand to SEQ ID NO: 1700069
agaaccacucucuuaaagg

SEQ ID NO: 1700071 - RNA, 19 nt, Artificial Sequence
  Description of Artificial Sequence: Synthetic oligonucleotide
  Sense strand starting at position 1774 of SEQ ID NO: 1561809
gccugucagugcccaaaga

SEQ ID NO: 1700072 - RNA, 19 nt, Artificial Sequence
  Description of Artificial Sequence: Synthetic oligonucleotide
  Antisense strand to SEQ ID NO: 1700071
ucuuugggcacugacaggc

SEQ ID NO: 1700073 - RNA, 19 nt, Artificial Sequence
  Description of Artificial Sequence: Synthetic oligonucleotide
  Sense strand starting at position 1775 of SEQ ID NO: 1561809
ccugucagugcccaaagau

SEQ ID NO: 1700074 - RNA, 19 nt, Artificial Sequence
  Description of Artificial Sequence: Synthetic oligonucleotide
  Antisense strand to SEQ ID NO: 1700073
aucuuugggcacugacagg

SEQ ID NO: 1700075 - RNA, 19 nt, Artificial Sequence
  Description of Artificial Sequence: Synthetic oligonucleotide
  Sense strand starting at position 2769 of SEQ ID NO: 1561809
ccguauaggcgcuccuuua

SEQ ID NO: 1700076 - RNA, 19 nt, Artificial Sequence
  Description of Artificial Sequence: Synthetic oligonucleotide
  Antisense strand to SEQ ID NO: 1700075
uaaaggagcgccuauacgg

SEQ ID NO: 1700077 - RNA, 19 nt, Artificial Sequence
  Description of Artificial Sequence: Synthetic oligonucleotide
  Sense strand starting at position 2787 of SEQ ID NO: 1561809
agguccuucuuggaguaca

SEQ ID NO: 1700078 - RNA, 19 nt, Artificial Sequence
  Description of Artificial Sequence: Synthetic oligonucleotide
  Antisense strand to SEQ ID NO: 1700077
uguacuccaagaaggaccu

SEQ ID NO: 1700079 - RNA, 19 nt, Artificial Sequence
  Description of Artificial Sequence: Synthetic oligonucleotide
  Sense strand starting at position 2827 of SEQ ID NO: 1561809
ggaacuaacccguguucag

SEQ ID NO: 1700080 - RNA, 19 nt, Artificial Sequence
  Description of Artificial Sequence: Synthetic oligonucleotide
  Antisense strand to SEQ ID NO: 1700079
cugaacacggguuaguucc

SEQ ID NO: 1700081 - RNA, 19 nt, Artificial Sequence
  Description of Artificial Sequence: Synthetic oligonucleotide
  Sense strand starting at position 2882 of SEQ ID NO: 1561809
ggaugaagugucugccuuc

SEQ ID NO: 1700082 - RNA, 19 nt, Artificial Sequence
  Description of Artificial Sequence: Synthetic oligonucleotide
  Antisense strand to SEQ ID NO: 1700081
gaaggcagacacuucaucc

SEQ ID NO: 1700083 - RNA, 19 nt, Artificial Sequence
  Description of Artificial Sequence: Synthetic oligonucleotide
  Sense strand starting at position 2885 of SEQ ID NO: 1561809
ugaagugucugccuucuau

SEQ ID NO: 1700084 - RNA, 19 nt, Artificial Sequence
  Description of Artificial Sequence: Synthetic oligonucleotide
  Antisense strand to SEQ ID NO: 1700083
auagaaggcagacacuuca

SEQ ID NO: 1700085 - RNA, 19 nt, Artificial Sequence
  Description of Artificial Sequence: Synthetic oligonucleotide
  Sense strand starting at position 2889 of SEQ ID NO: 1561809
gugucugccuucuauagau

SEQ ID NO: 1700086 - RNA, 19 nt, Artificial Sequence
  Description of Artificial Sequence: Synthetic oligonucleotide
  Antisense strand to SEQ ID NO: 1700085
aucuauagaaggcagacac

SEQ ID NO: 1700087 - RNA, 19 nt, Artificial Sequence
  Description of Artificial Sequence: Synthetic oligonucleotide
  Sense strand starting at position 2891 of SEQ ID NO: 1561809
gucugccuucuauagauaa

SEQ ID NO: 1700088 - RNA, 19 nt, Artificial Sequence
  Description of Artificial Sequence: Synthetic oligonucleotide
  Antisense strand to SEQ ID NO: 1700087
uuaucuauagaaggcagac

SEQ ID NO: 1700089 - RNA, 19 nt, Artificial Sequence
  Description of Artificial Sequence: Synthetic oligonucleotide
  Sense strand starting at position 2955 of SEQ ID NO: 1561809
uccagaagugcccggaaua

SEQ ID NO: 1700090 - RNA, 19 nt, Artificial Sequence
  Description of Artificial Sequence: Synthetic oligonucleotide
  Antisense strand to SEQ ID NO: 1700089
uauuccgggcacuucugga

SEQ ID NO: 1700091 - RNA, 19 nt, Artificial Sequence
  Description of Artificial Sequence: Synthetic oligonucleotide
  Sense strand starting at position 2956 of SEQ ID NO: 1561809
ccagaagugcccggaauaa

SEQ ID NO: 1700092 - RNA, 19 nt, Artificial Sequence
  Description of Artificial Sequence: Synthetic oligonucleotide
  Antisense strand to SEQ ID NO: 1700091
uuauuccgggcacuucugg

SEQ ID NO: 1700093 - RNA, 19 nt, Artificial Sequence
  Description of Artificial Sequence: Synthetic oligonucleotide
  Sense strand starting at position 2969 of SEQ ID NO: 1561809
gaauaaugagccugagccu

SEQ ID NO: 1700094 - RNA, 19 nt, Artificial Sequence
  Description of Artificial Sequence: Synthetic oligonucleotide
  Antisense strand to SEQ ID NO: 1700093
aggcucaggcucauuauuc

SEQ ID NO: 1700095 - RNA, 19 nt, Artificial Sequence
  Description of Artificial Sequence: Synthetic oligonucleotide
  Sense strand starting at position 2978 of SEQ ID NO: 1561809
gccugagccuccuuuguua

SEQ ID NO: 1700096 - RNA, 19 nt, Artificial Sequence
  Description of Artificial Sequence: Synthetic oligonucleotide
  Antisense strand to SEQ ID NO: 1700095
uaacaaaggaggcucaggc

SEQ ID NO: 1700097 - RNA, 19 nt, Artificial Sequence
  Description of Artificial Sequence: Synthetic oligonucleotide
  Sense strand starting at position 2980 of SEQ ID NO: 1561809
cugagccuccuuuguuaga

SEQ ID NO: 1700098 - RNA, 19 nt, Artificial Sequence
  Description of Artificial Sequence: Synthetic oligonucleotide
  Antisense strand to SEQ ID NO: 1700097
ucuaacaaaggaggcucag

SEQ ID NO: 1700099 - RNA, 19 nt, Artificial Sequence
  Description of Artificial Sequence: Synthetic oligonucleotide
  Sense strand starting at position 2981 of SEQ ID NO: 1561809
ugagccuccuuuguuagau

SEQ ID NO: 1700100 - RNA, 19 nt, Artificial Sequence
  Description of Artificial Sequence: Synthetic oligonucleotide
  Antisense strand to SEQ ID NO: 1700099
aucuaacaaaggaggcuca

SEQ ID NO: 1700101 - RNA, 19 nt, Artificial Sequence
  Description of Artificial Sequence: Synthetic oligonucleotide
  Sense strand starting at position 2985 of SEQ ID NO: 1561809
ccuccuuuguuagaugcua

SEQ ID NO: 1700102 - RNA, 19 nt, Artificial Sequence
  Description of Artificial Sequence: Synthetic oligonucleotide
  Antisense strand to SEQ ID NO: 1700101
uagcaucuaacaaaggagg

SEQ ID NO: 1700103 - RNA, 19 nt, Artificial Sequence
  Description of Artificial Sequence: Synthetic oligonucleotide
  Sense strand starting at position 2990 of SEQ ID NO: 1561809
uuuguuagaugcuaaagga

SEQ ID NO: 1700104 - RNA, 19 nt, Artificial Sequence
  Description of Artificial Sequence: Synthetic oligonucleotide
  Antisense strand to SEQ ID NO: 1700103
uccuuuagcaucuaacaaa

SEQ ID NO: 1700105 - RNA, 19 nt, Artificial Sequence
  Description of Artificial Sequence: Synthetic oligonucleotide
  Sense strand starting at position 3017 of SEQ ID NO: 1561809
ggaagaugcaaaugucauu

SEQ ID NO: 1700106 - RNA, 19 nt, Artificial Sequence
  Description of Artificial Sequence: Synthetic oligonucleotide
  Antisense strand to SEQ ID NO: 1700105
aaugacauuugcaucuucc

SEQ ID NO: 1700107 - RNA, 19 nt, Artificial Sequence
  Description of Artificial Sequence: Synthetic oligonucleotide
  Sense strand starting at position 3095 of SEQ ID NO: 1561809
cuacuugucucacuuaagu

SEQ ID NO: 1700108 - RNA, 19 nt, Artificial Sequence
  Description of Artificial Sequence: Synthetic oligonucleotide
  Antisense strand to SEQ ID NO: 1700107
acuuaagugagacaaguag

SEQ ID NO: 1700109 - RNA, 19 nt, Artificial Sequence
  Description of Artificial Sequence: Synthetic oligonucleotide
  Sense strand starting at position 3225 of SEQ ID NO: 1561809
augccucagguauaggaua

SEQ ID NO: 1700110 - RNA, 19 nt, Artificial Sequence
  Description of Artificial Sequence: Synthetic oligonucleotide
  Antisense strand to SEQ ID NO: 1700109
uauccuauaccugaggcau

SEQ ID NO: 1700111 - RNA, 19 nt, Artificial Sequence
  Description of Artificial Sequence: Synthetic oligonucleotide
  Sense strand starting at position 3379 of SEQ ID NO: 1561809
auggcuuguccaggaagga

SEQ ID NO: 1700112 - RNA, 19 nt, Artificial Sequence
  Description of Artificial Sequence: Synthetic oligonucleotide
  Antisense strand to SEQ ID NO: 1700111
uccuuccuggacaagccau

SEQ ID NO: 1700113 - RNA, 19 nt, Artificial Sequence
  Description of Artificial Sequence: Synthetic oligonucleotide
  Sense strand starting at position 3380 of SEQ ID NO: 1561809
uggcuuguccaggaaggaa

SEQ ID NO: 1700114 - RNA, 19 nt, Artificial Sequence
  Description of Artificial Sequence: Synthetic oligonucleotide
  Antisense strand to SEQ ID NO: 1700113
uuccuuccuggacaagcca

SEQ ID NO: 1700115 - RNA, 19 nt, Artificial Sequence
  Description of Artificial Sequence: Synthetic oligonucleotide
  Sense strand starting at position 3392 of SEQ ID NO: 1561809
gaaggaagauuaugauuaa

SEQ ID NO: 1700116 - RNA, 19 nt, Artificial Sequence
  Description of Artificial Sequence: Synthetic oligonucleotide
  Antisense strand to SEQ ID NO: 1700115
uuaaucauaaucuuccuuc

SEQ ID NO: 1700117 - RNA, 19 nt, Artificial Sequence
  Description of Artificial Sequence: Synthetic oligonucleotide
  Sense strand starting at position 3422 of SEQ ID NO: 1561809
gauaauaacucaccgguua

SEQ ID NO: 1700118 - RNA, 19 nt, Artificial Sequence
  Description of Artificial Sequence: Synthetic oligonucleotide
  Antisense strand to SEQ ID NO: 1700117
uaaccggugaguuauuauc

SEQ ID NO: 1700119 - RNA, 19 nt, Artificial Sequence
  Description of Artificial Sequence: Synthetic oligonucleotide
  Sense strand starting at position 3501 of SEQ ID NO: 1561809
acaauaacauuagagguua

SEQ ID NO: 1700120 - RNA, 19 nt, Artificial Sequence
  Description of Artificial Sequence: Synthetic oligonucleotide
  Antisense strand to SEQ ID NO: 1700119
uaaccucuaauguuauugu

SEQ ID NO: 1700121 - RNA, 19 nt, Artificial Sequence
  Description of Artificial Sequence: Synthetic oligonucleotide
  Sense strand starting at position 3515 of SEQ ID NO: 1561809
gguuauucuuauucccaca

SEQ ID NO: 1700122 - RNA, 19 nt, Artificial Sequence
  Description of Artificial Sequence: Synthetic oligonucleotide
  Antisense strand to SEQ ID NO: 1700121
ugugggaauaagaauaacc

SEQ ID NO: 1700123 - RNA, 19 nt, Artificial Sequence
  Description of Artificial Sequence: Synthetic oligonucleotide
  Sense strand starting at position 3529 of SEQ ID NO: 1561809
ccacauuaugcaugcugaa

SEQ ID NO: 1700124 - RNA, 19 nt, Artificial Sequence
  Description of Artificial Sequence: Synthetic oligonucleotide
  Antisense strand to SEQ ID NO: 1700123
uucagcaugcauaaugugg

SEQ ID NO: 1700125 - RNA, 19 nt, Artificial Sequence
  Description of Artificial Sequence: Synthetic oligonucleotide
  Sense strand starting at position 568 of SEQ ID NO: 1561810
gccugucagugcccaaaga

SEQ ID NO: 1700126 - RNA, 19 nt, Artificial Sequence
  Description of Artificial Sequence: Synthetic oligonucleotide
  Antisense strand to SEQ ID NO: 1700125
ucuuugggcacugacaggc

SEQ ID NO: 1700127 - RNA, 19 nt, Artificial Sequence
  Description of Artificial Sequence: Synthetic oligonucleotide
  Sense strand starting at position 569 of SEQ ID NO: 1561810
ccugucagugcccaaagau

SEQ ID NO: 1700128 - RNA, 19 nt, Artificial Sequence
  Description of Artificial Sequence: Synthetic oligonucleotide
  Antisense strand to SEQ ID NO: 1700127
aucuuugggcacugacagg

SEQ ID NO: 1700129 - RNA, 19 nt, Artificial Sequence
  Description of Artificial Sequence: Synthetic oligonucleotide
  Sense strand starting at position 1563 of SEQ ID NO: 1561810
ccguauaggcgcuccuuua

SEQ ID NO: 1700130 - RNA, 19 nt, Artificial Sequence
  Description of Artificial Sequence: Synthetic oligonucleotide
  Antisense strand to SEQ ID NO: 1700129
uaaaggagcgccuauacgg

SEQ ID NO: 1700131 - RNA, 19 nt, Artificial Sequence
  Description of Artificial Sequence: Synthetic oligonucleotide
  Sense strand starting at position 1621 of SEQ ID NO: 1561810
ggaacuaacccguguucag

SEQ ID NO: 1700132 - RNA, 19 nt, Artificial Sequence
  Description of Artificial Sequence: Synthetic oligonucleotide
  Antisense strand to SEQ ID NO: 1700131
cugaacacggguuaguucc

SEQ ID NO: 1700133 - RNA, 19 nt, Artificial Sequence
  Description of Artificial Sequence: Synthetic oligonucleotide
  Sense strand starting at position 1676 of SEQ ID NO: 1561810
ggaugaagugucugccuuc

SEQ ID NO: 1700134 - RNA, 19 nt, Artificial Sequence
  Description of Artificial Sequence: Synthetic oligonucleotide
  Antisense strand to SEQ ID NO: 1700133
gaaggcagacacuucaucc

SEQ ID NO: 1700135 - RNA, 19 nt, Artificial Sequence
  Description of Artificial Sequence: Synthetic oligonucleotide
  Sense strand starting at position 1679 of SEQ ID NO: 1561810
ugaagugucugccuucuau

SEQ ID NO: 1700136 - RNA, 19 nt, Artificial Sequence
  Description of Artificial Sequence: Synthetic oligonucleotide
  Antisense strand to SEQ ID NO: 1700135
auagaaggcagacacuuca

SEQ ID NO: 1700137 - RNA, 19 nt, Artificial Sequence
  Description of Artificial Sequence: Synthetic oligonucleotide
  Sense strand starting at position 1685 of SEQ ID NO: 1561810
gucugccuucuauagauaa

SEQ ID NO: 1700138 - RNA, 19 nt, Artificial Sequence
  Description of Artificial Sequence: Synthetic oligonucleotide
  Antisense strand to SEQ ID NO: 1700137
uuaucuauagaaggcagac

SEQ ID NO: 1700139 - RNA, 19 nt, Artificial Sequence
  Description of Artificial Sequence: Synthetic oligonucleotide
  Sense strand starting at position 1749 of SEQ ID NO: 1561810
uccagaagugcccggaaua

SEQ ID NO: 1700140 - RNA, 19 nt, Artificial Sequence
  Description of Artificial Sequence: Synthetic oligonucleotide
  Antisense strand to SEQ ID NO: 1700139
uauuccgggcacuucugga

SEQ ID NO: 1700141 - RNA, 19 nt, Artificial Sequence
  Description of Artificial Sequence: Synthetic oligonucleotide
  Sense strand starting at position 1750 of SEQ ID NO: 1561810
ccagaagugcccggaauaa

SEQ ID NO: 1700142 - RNA, 19 nt, Artificial Sequence
  Description of Artificial Sequence: Synthetic oligonucleotide
  Antisense strand to SEQ ID NO: 1700141
uuauuccgggcacuucugg

SEQ ID NO: 1700143 - RNA, 19 nt, Artificial Sequence
  Description of Artificial Sequence: Synthetic oligonucleotide
  Sense strand starting at position 1763 of SEQ ID NO: 1561810
gaauaaugagccugagccu

SEQ ID NO: 1700144 - RNA, 19 nt, Artificial Sequence
  Description of Artificial Sequence: Synthetic oligonucleotide
  Antisense strand to SEQ ID NO: 1700143
aggcucaggcucauuauuc

SEQ ID NO: 1700145 - RNA, 19 nt, Artificial Sequence
  Description of Artificial Sequence: Synthetic oligonucleotide
  Sense strand starting at position 1774 of SEQ ID NO: 1561810
cugagccuccuuuguuaga

SEQ ID NO: 1700146 - RNA, 19 nt, Artificial Sequence
  Description of Artificial Sequence: Synthetic oligonucleotide
  Antisense strand to SEQ ID NO: 1700145
ucuaacaaaggaggcucag

SEQ ID NO: 1700147 - RNA, 19 nt, Artificial Sequence
  Description of Artificial Sequence: Synthetic oligonucleotide
  Sense strand starting at position 1775 of SEQ ID NO: 1561810
ugagccuccuuuguuagau

SEQ ID NO: 1700148 - RNA, 19 nt, Artificial Sequence
  Description of Artificial Sequence: Synthetic oligonucleotide
  Antisense strand to SEQ ID NO: 1700147
aucuaacaaaggaggcuca

SEQ ID NO: 1700149 - RNA, 19 nt, Artificial Sequence
  Description of Artificial Sequence: Synthetic oligonucleotide
  Sense strand starting at position 1811 of SEQ ID NO: 1561810
ggaagaugcaaaugucauu

SEQ ID NO: 1700150 - RNA, 19 nt, Artificial Sequence
  Description of Artificial Sequence: Synthetic oligonucleotide
  Antisense strand to SEQ ID NO: 1700149
aaugacauuugcaucuucc

SEQ ID NO: 1700151 - RNA, 19 nt, Artificial Sequence
  Description of Artificial Sequence: Synthetic oligonucleotide
  Sense strand starting at position 1889 of SEQ ID NO: 1561810
cuacuugucucacuuaagu

SEQ ID NO: 1700152 - RNA, 19 nt, Artificial Sequence
  Description of Artificial Sequence: Synthetic oligonucleotide
  Antisense strand to SEQ ID NO: 1700151
acuuaagugagacaaguag

SEQ ID NO: 1700153 - RNA, 19 nt, Artificial Sequence
  Description of Artificial Sequence: Synthetic oligonucleotide
  Sense strand starting at position 2019 of SEQ ID NO: 1561810
augccucagguauaggaua

SEQ ID NO: 1700154 - RNA, 19 nt, Artificial Sequence
  Description of Artificial Sequence: Synthetic oligonucleotide
  Antisense strand to SEQ ID NO: 1700153
uauccuauaccugaggcau

SEQ ID NO: 1700155 - RNA, 19 nt, Artificial Sequence
  Description of Artificial Sequence: Synthetic oligonucleotide
  Sense strand starting at position 2173 of SEQ ID NO: 1561810
auggcuuguccaggaagga

SEQ ID NO: 1700156 - RNA, 19 nt, Artificial Sequence
  Description of Artificial Sequence: Synthetic oligonucleotide
  Antisense strand to SEQ ID NO: 1700155
uccuuccuggacaagccau

SEQ ID NO: 1700157 - RNA, 19 nt, Artificial Sequence
  Description of Artificial Sequence: Synthetic oligonucleotide
  Sense strand starting at position 2174 of SEQ ID NO: 1561810
uggcuuguccaggaaggaa

SEQ ID NO: 1700158 - RNA, 19 nt, Artificial Sequence
  Description of Artificial Sequence: Synthetic oligonucleotide
  Antisense strand to SEQ ID NO: 1700157
uuccuuccuggacaagcca

SEQ ID NO: 1700159 - RNA, 19 nt, Artificial Sequence
  Description of Artificial Sequence: Synthetic oligonucleotide
  Sense strand starting at position 2186 of SEQ ID NO: 1561810
gaaggaagauuaugauuaa

SEQ ID NO: 1700160 - RNA, 19 nt, Artificial Sequence
  Description of Artificial Sequence: Synthetic oligonucleotide
  Antisense strand to SEQ ID NO: 1700159
uuaaucauaaucuuccuuc

SEQ ID NO: 1700161 - RNA, 19 nt, Artificial Sequence
  Description of Artificial Sequence: Synthetic oligonucleotide
  Sense strand starting at position 2216 of SEQ ID NO: 1561810
gauaauaacucaccgguua

SEQ ID NO: 1700162 - RNA, 19 nt, Artificial Sequence
  Description of Artificial Sequence: Synthetic oligonucleotide
  Antisense strand to SEQ ID NO: 1700161
uaaccggugaguuauuauc

SEQ ID NO: 1700163 - RNA, 19 nt, Artificial Sequence
  Description of Artificial Sequence: Synthetic oligonucleotide
  Sense strand starting at position 2295 of SEQ ID NO: 1561810
acaauaacauuagagguua

SEQ ID NO: 1700164 - RNA, 19 nt, Artificial Sequence
  Description of Artificial Sequence: Synthetic oligonucleotide
  Antisense strand to SEQ ID NO: 1700163
uaaccucuaauguuauugu

SEQ ID NO: 1700165 - RNA, 19 nt, Artificial Sequence
  Description of Artificial Sequence: Synthetic oligonucleotide
  Sense strand starting at position 2309 of SEQ ID NO: 1561810
gguuauucuuauucccaca

SEQ ID NO: 1700166 - RNA, 19 nt, Artificial Sequence
  Description of Artificial Sequence: Synthetic oligonucleotide
  Antisense strand to SEQ ID NO: 1700165
ugugggaauaagaauaacc

SEQ ID NO: 1700167 - RNA, 19 nt, Artificial Sequence
  Description of Artificial Sequence: Synthetic oligonucleotide
  Sense strand starting at position 2323 of SEQ ID NO: 1561810
ccacauuaugcaugcugaa

SEQ ID NO: 1700168 - RNA, 19 nt, Artificial Sequence
  Description of Artificial Sequence: Synthetic oligonucleotide
  Antisense strand to SEQ ID NO: 1700167
uucagcaugcauaaugugg

SEQ ID NO: 1700169 - RNA, 19 nt, Artificial Sequence
  Description of Artificial Sequence: Synthetic oligonucleotide
  Sense strand starting at position 2836 of SEQ ID NO: 1561810
uuuaauugaugucuucuga

SEQ ID NO: 1700170 - RNA, 19 nt, Artificial Sequence
  Description of Artificial Sequence: Synthetic oligonucleotide
  Antisense strand to SEQ ID NO: 1700169
ucagaagacaucaauuaaa

SEQ ID NO: 1700171 - RNA, 19 nt, Artificial Sequence
  Description of Artificial Sequence: Synthetic oligonucleotide
  Sense strand starting at position 2899 of SEQ ID NO: 1561810
ggccuaauuuguuaaauga

SEQ ID NO: 1700172 - RNA, 19 nt, Artificial Sequence
  Description of Artificial Sequence: Synthetic oligonucleotide
  Antisense strand to SEQ ID NO: 1700171
ucauuuaacaaauuaggcc

SEQ ID NO: 1700173 - RNA, 19 nt, Artificial Sequence
  Description of Artificial Sequence: Synthetic oligonucleotide
  Sense strand starting at position 2907 of SEQ ID NO: 1561810
uuguuaaaugacugcacaa

SEQ ID NO: 1700174 - RNA, 19 nt, Artificial Sequence
  Description of Artificial Sequence: Synthetic oligonucleotide
  Antisense strand to SEQ ID NO: 1700173
uugugcagucauuuaacaa

SEQ ID NO: 1700175 - RNA, 19 nt, Artificial Sequence
  Description of Artificial Sequence: Synthetic oligonucleotide
  Sense strand starting at position 2909 of SEQ ID NO: 1561810
guuaaaugacugcacaacu

SEQ ID NO: 1700176 - RNA, 19 nt, Artificial Sequence
  Description of Artificial Sequence: Synthetic oligonucleotide
  Antisense strand to SEQ ID NO: 1700175
aguugugcagucauuuaac

SEQ ID NO: 1700177 - RNA, 19 nt, Artificial Sequence
  Description of Artificial Sequence: Synthetic oligonucleotide
  Sense strand starting at position 2981 of SEQ ID NO: 1561810
cucuguucugcuggguauu

SEQ ID NO: 1700178 - RNA, 19 nt, Artificial Sequence
  Description of Artificial Sequence: Synthetic oligonucleotide
  Antisense strand to SEQ ID NO: 1700177
aauacccagcagaacagag

SEQ ID NO: 1700179 - RNA, 19 nt, Artificial Sequence
  Description of Artificial Sequence: Synthetic oligonucleotide
  Sense strand starting at position 3029 of SEQ ID NO: 1561810
gaagguaugaaacguugau

SEQ ID NO: 1700180 - RNA, 19 nt, Artificial Sequence
  Description of Artificial Sequence: Synthetic oligonucleotide
  Antisense strand to SEQ ID NO: 1700179
aucaacguuucauaccuuc

SEQ ID NO: 1700181 - RNA, 19 nt, Artificial Sequence
  Description of Artificial Sequence: Synthetic oligonucleotide
  Sense strand starting at position 3033 of SEQ ID NO: 1561810
guaugaaacguugaucaaa

SEQ ID NO: 1700182 - RNA, 19 nt, Artificial Sequence
  Description of Artificial Sequence: Synthetic oligonucleotide
  Antisense strand to SEQ ID NO: 1700181
uuugaucaacguuucauac

SEQ ID NO: 1700183 - RNA, 19 nt, Artificial Sequence
  Description of Artificial Sequence: Synthetic oligonucleotide
  Sense strand starting at position 3035 of SEQ ID NO: 1561810
augaaacguugaucaaauc

SEQ ID NO: 1700184 - RNA, 19 nt, Artificial Sequence
  Description of Artificial Sequence: Synthetic oligonucleotide
  Antisense strand to SEQ ID NO: 1700183
gauuugaucaacguuucau

SEQ ID NO: 1700185 - RNA, 19 nt, Artificial Sequence
  Description of Artificial Sequence: Synthetic oligonucleotide
  Sense strand starting at position 3036 of SEQ ID NO: 1561810
ugaaacguugaucaaaucu

SEQ ID NO: 1700186 - RNA, 19 nt, Artificial Sequence
  Description of Artificial Sequence: Synthetic oligonucleotide
  Antisense strand to SEQ ID NO: 1700185
agauuugaucaacguuuca

SEQ ID NO: 1700187 - RNA, 19 nt, Artificial Sequence
  Description of Artificial Sequence: Synthetic oligonucleotide
  Sense strand starting at position 3165 of SEQ ID NO: 1561810
cucagauuguaaguauaaa

SEQ ID NO: 1700188 - RNA, 19 nt, Artificial Sequence
  Description of Artificial Sequence: Synthetic oligonucleotide
  Antisense strand to SEQ ID NO: 1700187
uuuauacuuacaaucugag

SEQ ID NO: 1700189 - RNA, 19 nt, Artificial Sequence
  Description of Artificial Sequence: Synthetic oligonucleotide
  Sense strand starting at position 3206 of SEQ ID NO: 1561810
agagcagucccacagaacu

SEQ ID NO: 1700190 - RNA, 19 nt, Artificial Sequence
  Description of Artificial Sequence: Synthetic oligonucleotide
  Antisense strand to SEQ ID NO: 1700189
aguucugugggacugcucu

SEQ ID NO: 1700191 - RNA, 19 nt, Artificial Sequence
  Description of Artificial Sequence: Synthetic oligonucleotide
  Sense strand starting at position 3244 of SEQ ID NO: 1561810
uccugaaucuuugcugucu

SEQ ID NO: 1700192 - RNA, 19 nt, Artificial Sequence
  Description of Artificial Sequence: Synthetic oligonucleotide
  Antisense strand to SEQ ID NO: 1700191
agacagcaaagauucagga

SEQ ID NO: 1700193 - RNA, 19 nt, Artificial Sequence
  Description of Artificial Sequence: Synthetic oligonucleotide
  Sense strand starting at position 3250 of SEQ ID NO: 1561810
aucuuugcugucugauaca

SEQ ID NO: 1700194 - RNA, 19 nt, Artificial Sequence
  Description of Artificial Sequence: Synthetic oligonucleotide
  Antisense strand to SEQ ID NO: 1700193
uguaucagacagcaaagau

SEQ ID NO: 1700195 - RNA, 19 nt, Artificial Sequence
  Description of Artificial Sequence: Synthetic oligonucleotide
  Sense strand starting at position 3458 of SEQ ID NO: 1561810
caguaauuacagugaaagu

SEQ ID NO: 1700196 - RNA, 19 nt, Artificial Sequence
  Description of Artificial Sequence: Synthetic oligonucleotide
  Antisense strand to SEQ ID NO: 1700195
acuuucacuguaauuacug

SEQ ID NO: 1700197 - RNA, 19 nt, Artificial Sequence
  Description of Artificial Sequence: Synthetic oligonucleotide
  Sense strand starting at position 3467 of SEQ ID NO: 1561810
cagugaaagugacuuaaag

SEQ ID NO: 1700198 - RNA, 19 nt, Artificial Sequence
  Description of Artificial Sequence: Synthetic oligonucleotide
  Antisense strand to SEQ ID NO: 1700197
cuuuaagucacuuucacug

SEQ ID NO: 1700199 - RNA, 19 nt, Artificial Sequence
  Description of Artificial Sequence: Synthetic oligonucleotide
  Sense strand starting at position 3469 of SEQ ID NO: 1561810
gugaaagugacuuaaaggu

SEQ ID NO: 1700200 - RNA, 19 nt, Artificial Sequence
  Description of Artificial Sequence: Synthetic oligonucleotide
  Antisense strand to SEQ ID NO: 1700199
accuuuaagucacuuucac

SEQ ID NO: 1700201 - RNA, 19 nt, Artificial Sequence
  Description of Artificial Sequence: Synthetic oligonucleotide
  Sense strand starting at position 3648 of SEQ ID NO: 1561810
ugaauauucuaucaacgga

SEQ ID NO: 1700202 - RNA, 19 nt, Artificial Sequence
  Description of Artificial Sequence: Synthetic oligonucleotide
  Antisense strand to SEQ ID NO: 1700201
uccguugauagaauauuca

SEQ ID NO: 1700203 - RNA, 19 nt, Artificial Sequence
  Description of Artificial Sequence: Synthetic oligonucleotide
  Sense strand starting at position 3651 of SEQ ID NO: 1561810
auauucuaucaacggaaac

SEQ ID NO: 1700204 - RNA, 19 nt, Artificial Sequence
  Description of Artificial Sequence: Synthetic oligonucleotide
  Antisense strand to SEQ ID NO: 1700203
guuuccguugauagaauau

SEQ ID NO: 1700205 - RNA, 19 nt, Artificial Sequence
  Description of Artificial Sequence: Synthetic oligonucleotide
  Sense strand starting at position 126 of SEQ ID NO: 1561811
cagaguccugucuauagca

SEQ ID NO: 1700206 - RNA, 19 nt, Artificial Sequence
  Description of Artificial Sequence: Synthetic oligonucleotide
  Antisense strand to SEQ ID NO: 1700205
ugcuauagacaggacucug

SEQ ID NO: 1700207 - RNA, 19 nt, Artificial Sequence
  Description of Artificial Sequence: Synthetic oligonucleotide
  Sense strand starting at position 128 of SEQ ID NO: 1561811
gaguccugucuauagcaca

SEQ ID NO: 1700208 - RNA, 19 nt, Artificial Sequence
  Description of Artificial Sequence: Synthetic oligonucleotide
  Antisense strand to SEQ ID NO: 1700207
ugugcuauagacaggacuc

SEQ ID NO: 1700209 - RNA, 19 nt, Artificial Sequence
  Description of Artificial Sequence: Synthetic oligonucleotide
  Sense strand starting at position 200 of SEQ ID NO: 1561811
guggaagaccuggguacau

SEQ ID NO: 1700210 - RNA, 19 nt, Artificial Sequence
  Description of Artificial Sequence: Synthetic oligonucleotide
  Antisense strand to SEQ ID NO: 1700209
auguacccaggucuuccac

SEQ ID NO: 1700211 - RNA, 19 nt, Artificial Sequence
  Description of Artificial Sequence: Synthetic oligonucleotide
  Sense strand starting at position 338 of SEQ ID NO: 1561811
caugcaggauucuauggaa

SEQ ID NO: 1700212 - RNA, 19 nt, Artificial Sequence
  Description of Artificial Sequence: Synthetic oligonucleotide
  Antisense strand to SEQ ID NO: 1700211
uuccauagaauccugcaug

SEQ ID NO: 1700213 - RNA, 19 nt, Artificial Sequence
  Description of Artificial Sequence: Synthetic oligonucleotide
  Sense strand starting at position 341 of SEQ ID NO: 1561811
gcaggauucuauggaagaa

SEQ ID NO: 1700214 - RNA, 19 nt, Artificial Sequence
  Description of Artificial Sequence: Synthetic oligonucleotide
  Antisense strand to SEQ ID NO: 1700213
uucuuccauagaauccugc

SEQ ID NO: 1700215 - RNA, 19 nt, Artificial Sequence
  Description of Artificial Sequence: Synthetic oligonucleotide
  Sense strand starting at position 416 of SEQ ID NO: 1561811
gggcuuuaauaggaacaau

SEQ ID NO: 1700216 - RNA, 19 nt, Artificial Sequence
  Description of Artificial Sequence: Synthetic oligonucleotide
  Antisense strand to SEQ ID NO: 1700215
auuguuccuauuaaagccc

SEQ ID NO: 1700217 - RNA, 19 nt, Artificial Sequence
  Description of Artificial Sequence: Synthetic oligonucleotide
  Sense strand starting at position 486 of SEQ ID NO: 1561811
cagggacugugcucugcau

SEQ ID NO: 1700218 - RNA, 19 nt, Artificial Sequence
  Description of Artificial Sequence: Synthetic oligonucleotide
  Antisense strand to SEQ ID NO: 1700217
augcagagcacagucccug

SEQ ID NO: 1700219 - RNA, 19 nt, Artificial Sequence
  Description of Artificial Sequence: Synthetic oligonucleotide
  Sense strand starting at position 725 of SEQ ID NO: 1561811
gaggcacugucuuccaaga

SEQ ID NO: 1700220 - RNA, 19 nt, Artificial Sequence
  Description of Artificial Sequence: Synthetic oligonucleotide
  Antisense strand to SEQ ID NO: 1700219
ucuuggaagacagugccuc

SEQ ID NO: 1700221 - RNA, 19 nt, Artificial Sequence
  Description of Artificial Sequence: Synthetic oligonucleotide
  Sense strand starting at position 770 of SEQ ID NO: 1561811
agaucuugaccuggcucaa

SEQ ID NO: 1700222 - RNA, 19 nt, Artificial Sequence
  Description of Artificial Sequence: Synthetic oligonucleotide
  Antisense strand to SEQ ID NO: 1700221
uugagccaggucaagaucu

SEQ ID NO: 1700223 - RNA, 19 nt, Artificial Sequence
  Description of Artificial Sequence: Synthetic oligonucleotide
  Sense strand starting at position 941 of SEQ ID NO: 1561811
uccagaagugaauguggga

SEQ ID NO: 1700224 - RNA, 19 nt, Artificial Sequence
  Description of Artificial Sequence: Synthetic oligonucleotide
  Antisense strand to SEQ ID NO: 1700223
ucccacauucacuucugga

SEQ ID NO: 1700225 - RNA, 19 nt, Artificial Sequence
  Description of Artificial Sequence: Synthetic oligonucleotide
  Sense strand starting at position 1097 of SEQ ID NO: 1561811
ggaccacuuugagccauau

SEQ ID NO: 1700226 - RNA, 19 nt, Artificial Sequence
  Description of Artificial Sequence: Synthetic oligonucleotide
  Antisense strand to SEQ ID NO: 1700225
auauggcucaaaguggucc

SEQ ID NO: 1700227 - RNA, 19 nt, Artificial Sequence
  Description of Artificial Sequence: Synthetic oligonucleotide
  Sense strand starting at position 1101 of SEQ ID NO: 1561811
cacuuugagccauauacgu

SEQ ID NO: 1700228 - RNA, 19 nt, Artificial Sequence
  Description of Artificial Sequence: Synthetic oligonucleotide
  Antisense strand to SEQ ID NO: 1700227
acguauauggcucaaagug

SEQ ID NO: 1700229 - RNA, 19 nt, Artificial Sequence
  Description of Artificial Sequence: Synthetic oligonucleotide
  Sense strand starting at position 1320 of SEQ ID NO: 1561811
gcagaaguccuagggcuaa

SEQ ID NO: 1700230 - RNA, 19 nt, Artificial Sequence
  Description of Artificial Sequence: Synthetic oligonucleotide
  Antisense strand to SEQ ID NO: 1700229
uuagcccuaggacuucugc

SEQ ID NO: 1700231 - RNA, 19 nt, Artificial Sequence
  Description of Artificial Sequence: Synthetic oligonucleotide
  Sense strand starting at position 2401 of SEQ ID NO: 1561811
gggcucaucagcgagaaag

SEQ ID NO: 1700232 - RNA, 19 nt, Artificial Sequence
  Description of Artificial Sequence: Synthetic oligonucleotide
  Antisense strand to SEQ ID NO: 1700231
cuuucucgcugaugagccc

SEQ ID NO: 1700233 - RNA, 19 nt, Artificial Sequence
  Description of Artificial Sequence: Synthetic oligonucleotide
  Sense strand starting at position 2444 of SEQ ID NO: 1561811
augcaugccugacucagaa

SEQ ID NO: 1700234 - RNA, 19 nt, Artificial Sequence
  Description of Artificial Sequence: Synthetic oligonucleotide
  Antisense strand to SEQ ID NO: 1700233
uucugagucaggcaugcau

SEQ ID NO: 1700235 - RNA, 19 nt, Artificial Sequence
  Description of Artificial Sequence: Synthetic oligonucleotide
  Sense strand starting at position 2600 of SEQ ID NO: 1561811
cugggaauccucugugccu

SEQ ID NO: 1700236 - RNA, 19 nt, Artificial Sequence
  Description of Artificial Sequence: Synthetic oligonucleotide
  Antisense strand to SEQ ID NO: 1700235
aggcacagaggauucccag

SEQ ID NO: 1700237 - RNA, 19 nt, Artificial Sequence
  Description of Artificial Sequence: Synthetic oligonucleotide
  Sense strand starting at position 2632 of SEQ ID NO: 1561811
gagggugucuauguguaca

SEQ ID NO: 1700238 - RNA, 19 nt, Artificial Sequence
  Description of Artificial Sequence: Synthetic oligonucleotide
  Antisense strand to SEQ ID NO: 1700237
uguacacauagacacccuc

SEQ ID NO: 1700239 - RNA, 19 nt, Artificial Sequence
  Description of Artificial Sequence: Synthetic oligonucleotide
  Sense strand starting at position 2634 of SEQ ID NO: 1561811
gggugucuauguguacauu

SEQ ID NO: 1700240 - RNA, 19 nt, Artificial Sequence
  Description of Artificial Sequence: Synthetic oligonucleotide
  Antisense strand to SEQ ID NO: 1700239
aauguacacauagacaccc

SEQ ID NO: 1700241 - RNA, 19 nt, Artificial Sequence
  Description of Artificial Sequence: Synthetic oligonucleotide
  Sense strand starting at position 2635 of SEQ ID NO: 1561811
ggugucuauguguacauuu

SEQ ID NO: 1700242 - RNA, 19 nt, Artificial Sequence
  Description of Artificial Sequence: Synthetic oligonucleotide
  Antisense strand to SEQ ID NO: 1700241
aaauguacacauagacacc

SEQ ID NO: 1700243 - RNA, 19 nt, Artificial Sequence
  Description of Artificial Sequence: Synthetic oligonucleotide
  Sense strand starting at position 2643 of SEQ ID NO: 1561811
uguguacauuuguccacau

SEQ ID NO: 1700244 - RNA, 19 nt, Artificial Sequence
  Description of Artificial Sequence: Synthetic oligonucleotide
  Antisense strand to SEQ ID NO: 1700243
auguggacaaauguacaca

SEQ ID NO: 1700245 - RNA, 19 nt, Artificial Sequence
  Description of Artificial Sequence: Synthetic oligonucleotide
  Sense strand starting at position 2671 of SEQ ID NO: 1561811
ugacaaugacaguaagugu

SEQ ID NO: 1700246 - RNA, 19 nt, Artificial Sequence
  Description of Artificial Sequence: Synthetic oligonucleotide
  Antisense strand to SEQ ID NO: 1700245
acacuuacugucauuguca

SEQ ID NO: 1700247 - RNA, 19 nt, Artificial Sequence
  Description of Artificial Sequence: Synthetic oligonucleotide
  Sense strand starting at position 2743 of SEQ ID NO: 1561811
ugcuguaugugucugagca

SEQ ID NO: 1700248 - RNA, 19 nt, Artificial Sequence
  Description of Artificial Sequence: Synthetic oligonucleotide
  Antisense strand to SEQ ID NO: 1700247
ugcucagacacauacagca

SEQ ID NO: 1700249 - RNA, 19 nt, Artificial Sequence
  Description of Artificial Sequence: Synthetic oligonucleotide
  Sense strand starting at position 2744 of SEQ ID NO: 1561811
gcuguaugugucugagcac

SEQ ID NO: 1700250 - RNA, 19 nt, Artificial Sequence
  Description of Artificial Sequence: Synthetic oligonucleotide
  Antisense strand to SEQ ID NO: 1700249
gugcucagacacauacagc

SEQ ID NO: 1700251 - RNA, 19 nt, Artificial Sequence
  Description of Artificial Sequence: Synthetic oligonucleotide
  Sense strand starting at position 2774 of SEQ ID NO: 1561811
gcaccugagcuccaggaaa

SEQ ID NO: 1700252 - RNA, 19 nt, Artificial Sequence
  Description of Artificial Sequence: Synthetic oligonucleotide
  Antisense strand to SEQ ID NO: 1700251
uuuccuggagcucaggugc

SEQ ID NO: 1700253 - RNA, 19 nt, Artificial Sequence
  Description of Artificial Sequence: Synthetic oligonucleotide
  Sense strand starting at position 2811 of SEQ ID NO: 1561811
cagcuuguggcagagauca

SEQ ID NO: 1700254 - RNA, 19 nt, Artificial Sequence
  Description of Artificial Sequence: Synthetic oligonucleotide
  Antisense strand to SEQ ID NO: 1700253
ugaucucugccacaagcug

SEQ ID NO: 1700255 - RNA, 19 nt, Artificial Sequence
  Description of Artificial Sequence: Synthetic oligonucleotide
  Sense strand starting at position 2813 of SEQ ID NO: 1561811
gcuuguggcagagaucaug

SEQ ID NO: 1700256 - RNA, 19 nt, Artificial Sequence
  Description of Artificial Sequence: Synthetic oligonucleotide
  Antisense strand to SEQ ID NO: 1700255
caugaucucugccacaagc

SEQ ID NO: 1700257 - RNA, 19 nt, Artificial Sequence
  Description of Artificial Sequence: Synthetic oligonucleotide
  Sense strand starting at position 2819 of SEQ ID NO: 1561811
ggcagagaucauggcucaa

SEQ ID NO: 1700258 - RNA, 19 nt, Artificial Sequence
  Description of Artificial Sequence: Synthetic oligonucleotide
  Antisense strand to SEQ ID NO: 1700257
uugagccaugaucucugcc

SEQ ID NO: 1700259 - RNA, 19 nt, Artificial Sequence
  Description of Artificial Sequence: Synthetic oligonucleotide
  Sense strand starting at position 3043 of SEQ ID NO: 1561811
gggccucauuugcaaauga

SEQ ID NO: 1700260 - RNA, 19 nt, Artificial Sequence
  Description of Artificial Sequence: Synthetic oligonucleotide
  Antisense strand to SEQ ID NO: 1700259
ucauuugcaaaugaggccc

SEQ ID NO: 1700261 - RNA, 19 nt, Artificial Sequence
  Description of Artificial Sequence: Synthetic oligonucleotide
  Sense strand starting at position 3114 of SEQ ID NO: 1561811
uagagagaaugguggguaa

SEQ ID NO: 1700262 - RNA, 19 nt, Artificial Sequence
  Description of Artificial Sequence: Synthetic oligonucleotide
  Antisense strand to SEQ ID NO: 1700261
uuacccaccauucucucua

SEQ ID NO: 1700263 - RNA, 19 nt, Artificial Sequence
  Description of Artificial Sequence: Synthetic oligonucleotide
  Sense strand starting at position 3135 of SEQ ID NO: 1561811
gcagcaugaucuccaaaga

SEQ ID NO: 1700264 - RNA, 19 nt, Artificial Sequence
  Description of Artificial Sequence: Synthetic oligonucleotide
  Antisense strand to SEQ ID NO: 1700263
ucuuuggagaucaugcugc

SEQ ID NO: 1700265 - RNA, 19 nt, Artificial Sequence
  Description of Artificial Sequence: Synthetic oligonucleotide
  Sense strand starting at position 3373 of SEQ ID NO: 1561811
ugaugcgauucccucagua

SEQ ID NO: 1700266 - RNA, 19 nt, Artificial Sequence
  Description of Artificial Sequence: Synthetic oligonucleotide
  Antisense strand to SEQ ID NO: 1700265
uacugagggaaucgcauca

SEQ ID NO: 1700267 - RNA, 19 nt, Artificial Sequence
  Description of Artificial Sequence: Synthetic oligonucleotide
  Sense strand starting at position 3375 of SEQ ID NO: 1561811
augcgauucccucaguauc

SEQ ID NO: 1700268 - RNA, 19 nt, Artificial Sequence
  Description of Artificial Sequence: Synthetic oligonucleotide
  Antisense strand to SEQ ID NO: 1700267
gauacugagggaaucgcau

SEQ ID NO: 1700269 - RNA, 19 nt, Artificial Sequence
  Description of Artificial Sequence: Synthetic oligonucleotide
  Sense strand starting at position 3412 of SEQ ID NO: 1561811
uccaucucugcuugucaca

SEQ ID NO: 1700270 - RNA, 19 nt, Artificial Sequence
  Description of Artificial Sequence: Synthetic oligonucleotide
  Antisense strand to SEQ ID NO: 1700269
ugugacaagcagagaugga

SEQ ID NO: 1700271 - RNA, 19 nt, Artificial Sequence
  Description of Artificial Sequence: Synthetic oligonucleotide
  Sense strand starting at position 3473 of SEQ ID NO: 1561811
cagugugcugcuccaucau

SEQ ID NO: 1700272 - RNA, 19 nt, Artificial Sequence
  Description of Artificial Sequence: Synthetic oligonucleotide
  Antisense strand to SEQ ID NO: 1700271
augauggagcagcacacug

SEQ ID NO: 1700273 - RNA, 19 nt, Artificial Sequence
  Description of Artificial Sequence: Synthetic oligonucleotide
  Sense strand starting at position 3559 of SEQ ID NO: 1561811
cucagcacccuuuagagaa

SEQ ID NO: 1700274 - RNA, 19 nt, Artificial Sequence
  Description of Artificial Sequence: Synthetic oligonucleotide
  Antisense strand to SEQ ID NO: 1700273
uucucuaaagggugcugag

SEQ ID NO: 1700275 - RNA, 19 nt, Artificial Sequence
  Description of Artificial Sequence: Synthetic oligonucleotide
  Sense strand starting at position 3586 of SEQ ID NO: 1561811
acaauugcgucccuuugua

SEQ ID NO: 1700276 - RNA, 19 nt, Artificial Sequence
  Description of Artificial Sequence: Synthetic oligonucleotide
  Antisense strand to SEQ ID NO: 1700275
uacaaagggacgcaauugu

SEQ ID NO: 1700277 - RNA, 19 nt, Artificial Sequence
  Description of Artificial Sequence: Synthetic oligonucleotide
  Sense strand starting at position 3654 of SEQ ID NO: 1561811
ggugucuuuagacaaagcu

SEQ ID NO: 1700278 - RNA, 19 nt, Artificial Sequence
  Description of Artificial Sequence: Synthetic oligonucleotide
  Antisense strand to SEQ ID NO: 1700277
agcuuugucuaaagacacc

SEQ ID NO: 1700279 - RNA, 19 nt, Artificial Sequence
  Description of Artificial Sequence: Synthetic oligonucleotide
  Sense strand starting at position 3745 of SEQ ID NO: 1561811
uucucccaguccuagagaa

SEQ ID NO: 1700280 - RNA, 19 nt, Artificial Sequence
  Description of Artificial Sequence: Synthetic oligonucleotide
  Antisense strand to SEQ ID NO: 1700279
uucucuaggacugggagaa

SEQ ID NO: 1700281 - RNA, 19 nt, Artificial Sequence
  Description of Artificial Sequence: Synthetic oligonucleotide
  Sense strand starting at position 3829 of SEQ ID NO: 1561811
acgaguguccugcuuggca

SEQ ID NO: 1700282 - RNA, 19 nt, Artificial Sequence
  Description of Artificial Sequence: Synthetic oligonucleotide
  Antisense strand to SEQ ID NO: 1700281
ugccaagcaggacacucgu

SEQ ID NO: 1700283 - RNA, 19 nt, Artificial Sequence
  Description of Artificial Sequence: Synthetic oligonucleotide
  Sense strand starting at position 3844 of SEQ ID NO: 1561811
ggcagccuucuguacaaau

SEQ ID NO: 1700284 - RNA, 19 nt, Artificial Sequence
  Description of Artificial Sequence: Synthetic oligonucleotide
  Antisense strand to SEQ ID NO: 1700283
auuuguacagaaggcugcc

SEQ ID NO: 1700285 - RNA, 19 nt, Artificial Sequence
  Description of Artificial Sequence: Synthetic oligonucleotide
  Sense strand starting at position 24 of SEQ ID NO: 1561812
aggauaaggucauuccuaa

SEQ ID NO: 1700286 - RNA, 19 nt, Artificial Sequence
  Description of Artificial Sequence: Synthetic oligonucleotide
  Antisense strand to SEQ ID NO: 1700285
uuaggaaugaccuuauccu

SEQ ID NO: 1700287 - RNA, 19 nt, Artificial Sequence
  Description of Artificial Sequence: Synthetic oligonucleotide
  Sense strand starting at position 206 of SEQ ID NO: 1561812
auauuaccuuguuugagau

SEQ ID NO: 1700288 - RNA, 19 nt, Artificial Sequence
  Description of Artificial Sequence: Synthetic oligonucleotide
  Antisense strand to SEQ ID NO: 1700287
aucucaaacaagguaauau

SEQ ID NO: 1700289 - RNA, 19 nt, Artificial Sequence
  Description of Artificial Sequence: Synthetic oligonucleotide
  Sense strand starting at position 803 of SEQ ID NO: 1561812
ggccuuguugaggaaucca

SEQ ID NO: 1700290 - RNA, 19 nt, Artificial Sequence
  Description of Artificial Sequence: Synthetic oligonucleotide
  Antisense strand to SEQ ID NO: 1700289
uggauuccucaacaaggcc

SEQ ID NO: 1700291 - RNA, 19 nt, Artificial Sequence
  Description of Artificial Sequence: Synthetic oligonucleotide
  Sense strand starting at position 808 of SEQ ID NO: 1561812
uguugaggaauccauguuu

SEQ ID NO: 1700292 - RNA, 19 nt, Artificial Sequence
  Description of Artificial Sequence: Synthetic oligonucleotide
  Antisense strand to SEQ ID NO: 1700291
aaacauggauuccucaaca

SEQ ID NO: 1700293 - RNA, 19 nt, Artificial Sequence
  Description of Artificial Sequence: Synthetic oligonucleotide
  Sense strand starting at position 814 of SEQ ID NO: 1561812
ggaauccauguuuggaagu

SEQ ID NO: 1700294 - RNA, 19 nt, Artificial Sequence
  Description of Artificial Sequence: Synthetic oligonucleotide
  Antisense strand to SEQ ID NO: 1700293
acuuccaaacauggauucc

SEQ ID NO: 1700295 - RNA, 19 nt, Artificial Sequence
  Description of Artificial Sequence: Synthetic oligonucleotide
  Sense strand starting at position 896 of SEQ ID NO: 1561812
gaauucugacuuggucuga

SEQ ID NO: 1700296 - RNA, 19 nt, Artificial Sequence
  Description of Artificial Sequence: Synthetic oligonucleotide
  Antisense strand to SEQ ID NO: 1700295
ucagaccaagucagaauuc

SEQ ID NO: 1700297 - RNA, 19 nt, Artificial Sequence
  Description of Artificial Sequence: Synthetic oligonucleotide
  Sense strand starting at position 897 of SEQ ID NO: 1561812
aauucugacuuggucugaa

SEQ ID NO: 1700298 - RNA, 19 nt, Artificial Sequence
  Description of Artificial Sequence: Synthetic oligonucleotide
  Antisense strand to SEQ ID NO: 1700297
uucagaccaagucagaauu

SEQ ID NO: 1700299 - RNA, 19 nt, Artificial Sequence
  Description of Artificial Sequence: Synthetic oligonucleotide
  Sense strand starting at position 1118 of SEQ ID NO: 1561812
uuauaauugcucuaugaag

SEQ ID NO: 1700300 - RNA, 19 nt, Artificial Sequence
  Description of Artificial Sequence: Synthetic oligonucleotide
  Antisense strand to SEQ ID NO: 1700299
cuucauagagcaauuauaa

SEQ ID NO: 1700301 - RNA, 19 nt, Artificial Sequence
  Description of Artificial Sequence: Synthetic oligonucleotide
  Sense strand starting at position 1120 of SEQ ID NO: 1561812
auaauugcucuaugaagga

SEQ ID NO: 1700302 - RNA, 19 nt, Artificial Sequence
  Description of Artificial Sequence: Synthetic oligonucleotide
  Antisense strand to SEQ ID NO: 1700301
uccuucauagagcaauuau

SEQ ID NO: 1700303 - RNA, 19 nt, Artificial Sequence
  Description of Artificial Sequence: Synthetic oligonucleotide
  Sense strand starting at position 1331 of SEQ ID NO: 1561812
guuacauuauagucaugga

SEQ ID NO: 1700304 - RNA, 19 nt, Artificial Sequence
  Description of Artificial Sequence: Synthetic oligonucleotide
  Antisense strand to SEQ ID NO: 1700303
uccaugacuauaauguaac

SEQ ID NO: 1700305 - RNA, 19 nt, Artificial Sequence
  Description of Artificial Sequence: Synthetic oligonucleotide
  Sense strand starting at position 1370 of SEQ ID NO: 1561812
gugucuuaaguuuaaagag

SEQ ID NO: 1700306 - RNA, 19 nt, Artificial Sequence
  Description of Artificial Sequence: Synthetic oligonucleotide
  Antisense strand to SEQ ID NO: 1700305
cucuuuaaacuuaagacac

SEQ ID NO: 1700307 - RNA, 19 nt, Artificial Sequence
  Description of Artificial Sequence: Synthetic oligonucleotide
  Sense strand starting at position 1527 of SEQ ID NO: 1561812
aggagaaggucccuugguu

SEQ ID NO: 1700308 - RNA, 19 nt, Artificial Sequence
  Description of Artificial Sequence: Synthetic oligonucleotide
  Antisense strand to SEQ ID NO: 1700307
aaccaagggaccuucuccu

SEQ ID NO: 1700309 - RNA, 19 nt, Artificial Sequence
  Description of Artificial Sequence: Synthetic oligonucleotide
  Sense strand starting at position 1828 of SEQ ID NO: 1561812
ggccaauacuuacugggaa

SEQ ID NO: 1700310 - RNA, 19 nt, Artificial Sequence
  Description of Artificial Sequence: Synthetic oligonucleotide
  Antisense strand to SEQ ID NO: 1700309
uucccaguaaguauuggcc

SEQ ID NO: 1700311 - RNA, 19 nt, Artificial Sequence
  Description of Artificial Sequence: Synthetic oligonucleotide
  Sense strand starting at position 2099 of SEQ ID NO: 1561812
gaggaagggucucuuauug

SEQ ID NO: 1700312 - RNA, 19 nt, Artificial Sequence
  Description of Artificial Sequence: Synthetic oligonucleotide
  Antisense strand to SEQ ID NO: 1700311
caauaagagacccuuccuc

SEQ ID NO: 1700313 - RNA, 19 nt, Artificial Sequence
  Description of Artificial Sequence: Synthetic oligonucleotide
  Sense strand starting at position 2103 of SEQ ID NO: 1561812
aagggucucuuauugaaug

SEQ ID NO: 1700314 - RNA, 19 nt, Artificial Sequence
  Description of Artificial Sequence: Synthetic oligonucleotide
  Antisense strand to SEQ ID NO: 1700313
cauucaauaagagacccuu

SEQ ID NO: 1700315 - RNA, 19 nt, Artificial Sequence
  Description of Artificial Sequence: Synthetic oligonucleotide
  Sense strand starting at position 2108 of SEQ ID NO: 1561812
ucucuuauugaauggaucu

SEQ ID NO: 1700316 - RNA, 19 nt, Artificial Sequence
  Description of Artificial Sequence: Synthetic oligonucleotide
  Antisense strand to SEQ ID NO: 1700315
agauccauucaauaagaga

SEQ ID NO: 1700317 - RNA, 19 nt, Artificial Sequence
  Description of Artificial Sequence: Synthetic oligonucleotide
  Sense strand starting at position 2249 of SEQ ID NO: 1561812
ucuugauaacuuggagagu

SEQ ID NO: 1700318 - RNA, 19 nt, Artificial Sequence
  Description of Artificial Sequence: Synthetic oligonucleotide
  Antisense strand to SEQ ID NO: 1700317
acucuccaaguuaucaaga

SEQ ID NO: 1700319 - RNA, 19 nt, Artificial Sequence
  Description of Artificial Sequence: Synthetic oligonucleotide
  Sense strand starting at position 2502 of SEQ ID NO: 1561812
cucauauucguugacuaag

SEQ ID NO: 1700320 - RNA, 19 nt, Artificial Sequence
  Description of Artificial Sequence: Synthetic oligonucleotide
  Antisense strand to SEQ ID NO: 1700319
cuuagucaacgaauaugag

SEQ ID NO: 1700321 - RNA, 19 nt, Artificial Sequence
  Description of Artificial Sequence: Synthetic oligonucleotide
  Sense strand starting at position 2587 of SEQ ID NO: 1561812
cagagaauguuucucaaag

SEQ ID NO: 1700322 - RNA, 19 nt, Artificial Sequence
  Description of Artificial Sequence: Synthetic oligonucleotide
  Antisense strand to SEQ ID NO: 1700321
cuuugagaaacauucucug

SEQ ID NO: 1700323 - RNA, 19 nt, Artificial Sequence
  Description of Artificial Sequence: Synthetic oligonucleotide
  Sense strand starting at position 2588 of SEQ ID NO: 1561812
agagaauguuucucaaagu

SEQ ID NO: 1700324 - RNA, 19 nt, Artificial Sequence
  Description of Artificial Sequence: Synthetic oligonucleotide
  Antisense strand to SEQ ID NO: 1700323
acuuugagaaacauucucu

SEQ ID NO: 1700325 - RNA, 19 nt, Artificial Sequence
  Description of Artificial Sequence: Synthetic oligonucleotide
  Sense strand starting at position 2671 of SEQ ID NO: 1561812
cuccuugaugucugaggaa

SEQ ID NO: 1700326 - RNA, 19 nt, Artificial Sequence
  Description of Artificial Sequence: Synthetic oligonucleotide
  Antisense strand to SEQ ID NO: 1700325
uuccucagacaucaaggag

SEQ ID NO: 1700327 - RNA, 19 nt, Artificial Sequence
  Description of Artificial Sequence: Synthetic oligonucleotide
  Sense strand starting at position 2700 of SEQ ID NO: 1561812
aagggacuugccugggaga

SEQ ID NO: 1700328 - RNA, 19 nt, Artificial Sequence
  Description of Artificial Sequence: Synthetic oligonucleotide
  Antisense strand to SEQ ID NO: 1700327
ucucccaggcaagucccuu

SEQ ID NO: 1700329 - RNA, 19 nt, Artificial Sequence
  Description of Artificial Sequence: Synthetic oligonucleotide
  Sense strand starting at position 2702 of SEQ ID NO: 1561812
gggacuugccugggagacu

SEQ ID NO: 1700330 - RNA, 19 nt, Artificial Sequence
  Description of Artificial Sequence: Synthetic oligonucleotide
  Antisense strand to SEQ ID NO: 1700329
agucucccaggcaaguccc

SEQ ID NO: 1700331 - RNA, 19 nt, Artificial Sequence
  Description of Artificial Sequence: Synthetic oligonucleotide
  Sense strand starting at position 2713 of SEQ ID NO: 1561812
gggagacugcaguggaaua

SEQ ID NO: 1700332 - RNA, 19 nt, Artificial Sequence
  Description of Artificial Sequence: Synthetic oligonucleotide
  Antisense strand to SEQ ID NO: 1700331
uauuccacugcagucuccc

SEQ ID NO: 1700333 - RNA, 19 nt, Artificial Sequence
  Description of Artificial Sequence: Synthetic oligonucleotide
  Sense strand starting at position 2714 of SEQ ID NO: 1561812
ggagacugcaguggaauaa

SEQ ID NO: 1700334 - RNA, 19 nt, Artificial Sequence
  Description of Artificial Sequence: Synthetic oligonucleotide
  Antisense strand to SEQ ID NO: 1700333
uuauuccacugcagucucc

SEQ ID NO: 1700335 - RNA, 19 nt, Artificial Sequence
  Description of Artificial Sequence: Synthetic oligonucleotide
  Sense strand starting at position 2856 of SEQ ID NO: 1561812
cagccaguccugggaagaa

SEQ ID NO: 1700336 - RNA, 19 nt, Artificial Sequence
  Description of Artificial Sequence: Synthetic oligonucleotide
  Antisense strand to SEQ ID NO: 1700335
uucuucccaggacuggcug

SEQ ID NO: 1700337 - RNA, 19 nt, Artificial Sequence
  Description of Artificial Sequence: Synthetic oligonucleotide
  Sense strand starting at position 2883 of SEQ ID NO: 1561812
cucuuuacagaguaaaugu

SEQ ID NO: 1700338 - RNA, 19 nt, Artificial Sequence
  Description of Artificial Sequence: Synthetic oligonucleotide
  Antisense strand to SEQ ID NO: 1700337
acauuuacucuguaaagag

SEQ ID NO: 1700339 - RNA, 19 nt, Artificial Sequence
  Description of Artificial Sequence: Synthetic oligonucleotide
  Sense strand starting at position 2923 of SEQ ID NO: 1561812
cuucucuaacuaggaguua

SEQ ID NO: 1700340 - RNA, 19 nt, Artificial Sequence
  Description of Artificial Sequence: Synthetic oligonucleotide
  Antisense strand to SEQ ID NO: 1700339
uaacuccuaguuagagaag

SEQ ID NO: 1700341 - RNA, 19 nt, Artificial Sequence
  Description of Artificial Sequence: Synthetic oligonucleotide
  Sense strand starting at position 3003 of SEQ ID NO: 1561812
acagccuuauuaucagaga

SEQ ID NO: 1700342 - RNA, 19 nt, Artificial Sequence
  Description of Artificial Sequence: Synthetic oligonucleotide
  Antisense strand to SEQ ID NO: 1700341
ucucugauaauaaggcugu

SEQ ID NO: 1700343 - RNA, 19 nt, Artificial Sequence
  Description of Artificial Sequence: Synthetic oligonucleotide
  Sense strand starting at position 3011 of SEQ ID NO: 1561812
auuaucagagagugacuau

SEQ ID NO: 1700344 - RNA, 19 nt, Artificial Sequence
  Description of Artificial Sequence: Synthetic oligonucleotide
  Antisense strand to SEQ ID NO: 1700343
auagucacucucugauaau

SEQ ID NO: 1700345 - RNA, 19 nt, Artificial Sequence
  Description of Artificial Sequence: Synthetic oligonucleotide
  Sense strand starting at position 3022 of SEQ ID NO: 1561812
gugacuauauggucacaaa

SEQ ID NO: 1700346 - RNA, 19 nt, Artificial Sequence
  Description of Artificial Sequence: Synthetic oligonucleotide
  Antisense strand to SEQ ID NO: 1700345
uuugugaccauauagucac

SEQ ID NO: 1700347 - RNA, 19 nt, Artificial Sequence
  Description of Artificial Sequence: Synthetic oligonucleotide
  Sense strand starting at position 3408 of SEQ ID NO: 1561812
uuuaguagagaugacguau

SEQ ID NO: 1700348 - RNA, 19 nt, Artificial Sequence
  Description of Artificial Sequence: Synthetic oligonucleotide
  Antisense strand to SEQ ID NO: 1700347
auacgucaucucuacuaaa

SEQ ID NO: 1700349 - RNA, 19 nt, Artificial Sequence
  Description of Artificial Sequence: Synthetic oligonucleotide
  Sense strand starting at position 3547 of SEQ ID NO: 1561812
guaagacgucguaagcagu

SEQ ID NO: 1700350 - RNA, 19 nt, Artificial Sequence
  Description of Artificial Sequence: Synthetic oligonucleotide
  Antisense strand to SEQ ID NO: 1700349
acugcuuacgacgucuuac

SEQ ID NO: 1700351 - RNA, 19 nt, Artificial Sequence
  Description of Artificial Sequence: Synthetic oligonucleotide
  Sense strand starting at position 3678 of SEQ ID NO: 1561812
auuuauagaugggaaucau

SEQ ID NO: 1700352 - RNA, 19 nt, Artificial Sequence
  Description of Artificial Sequence: Synthetic oligonucleotide
  Antisense strand to SEQ ID NO: 1700351
augauucccaucuauaaau

SEQ ID NO: 1700353 - RNA, 19 nt, Artificial Sequence
  Description of Artificial Sequence: Synthetic oligonucleotide
  Sense strand starting at position 3711 of SEQ ID NO: 1561812
ugaggaugcugacuaaaug

SEQ ID NO: 1700354 - RNA, 19 nt, Artificial Sequence
  Description of Artificial Sequence: Synthetic oligonucleotide
  Antisense strand to SEQ ID NO: 1700353
cauuuagucagcauccuca

SEQ ID NO: 1700355 - RNA, 19 nt, Artificial Sequence
  Description of Artificial Sequence: Synthetic oligonucleotide
  Sense strand starting at position 3781 of SEQ ID NO: 1561812
aaguucuugccagaggaca

SEQ ID NO: 1700356 - RNA, 19 nt, Artificial Sequence
  Description of Artificial Sequence: Synthetic oligonucleotide
  Antisense strand to SEQ ID NO: 1700355
uguccucuggcaagaacuu

SEQ ID NO: 1700357 - RNA, 19 nt, Artificial Sequence
  Description of Artificial Sequence: Synthetic oligonucleotide
  Sense strand starting at position 3814 of SEQ ID NO: 1561812
gauguugguguggauauaa

SEQ ID NO: 1700358 - RNA, 19 nt, Artificial Sequence
  Description of Artificial Sequence: Synthetic oligonucleotide
  Antisense strand to SEQ ID NO: 1700357
uuauauccacaccaacauc

SEQ ID NO: 1700359 - RNA, 19 nt, Artificial Sequence
  Description of Artificial Sequence: Synthetic oligonucleotide
  Sense strand starting at position 3838 of SEQ ID NO: 1561812
ucuuguagaguugaaggua

SEQ ID NO: 1700360 - RNA, 19 nt, Artificial Sequence
  Description of Artificial Sequence: Synthetic oligonucleotide
  Antisense strand to SEQ ID NO: 1700359
uaccuucaacucuacaaga

SEQ ID NO: 1700361 - RNA, 19 nt, Artificial Sequence
  Description of Artificial Sequence: Synthetic oligonucleotide
  Sense strand starting at position 3884 of SEQ ID NO: 1561812
aaguaaugucuuuagugga

SEQ ID NO: 1700362 - RNA, 19 nt, Artificial Sequence
  Description of Artificial Sequence: Synthetic oligonucleotide
  Antisense strand to SEQ ID NO: 1700361
uccacuaaagacauuacuu

SEQ ID NO: 1700363 - RNA, 19 nt, Artificial Sequence
  Description of Artificial Sequence: Synthetic oligonucleotide
  Sense strand starting at position 3924 of SEQ ID NO: 1561812
aagugaaagucaguaaauu

SEQ ID NO: 1700364 - RNA, 19 nt, Artificial Sequence
  Description of Artificial Sequence: Synthetic oligonucleotide
  Antisense strand to SEQ ID NO: 1700363
aauuuacugacuuucacuu

SEQ ID NO: 1700365 - RNA, 19 nt, Artificial Sequence
  Description of Artificial Sequence: Synthetic oligonucleotide
  Sense strand starting at position 24 of SEQ ID NO: 1561813
aggauaaggucauuccuaa

SEQ ID NO: 1700366 - RNA, 19 nt, Artificial Sequence
  Description of Artificial Sequence: Synthetic oligonucleotide
  Antisense strand to SEQ ID NO: 1700365
uuaggaaugaccuuauccu

SEQ ID NO: 1700367 - RNA, 19 nt, Artificial Sequence
  Description of Artificial Sequence: Synthetic oligonucleotide
  Sense strand starting at position 206 of SEQ ID NO: 1561813
auauuaccuuguuugagau

SEQ ID NO: 1700368 - RNA, 19 nt, Artificial Sequence
  Description of Artificial Sequence: Synthetic oligonucleotide
  Antisense strand to SEQ ID NO: 1700367
aucucaaacaagguaauau

SEQ ID NO: 1700369 - RNA, 19 nt, Artificial Sequence
  Description of Artificial Sequence: Synthetic oligonucleotide
  Sense strand starting at position 803 of SEQ ID NO: 1561813
ggccuuguugaggaaucca

SEQ ID NO: 1700370 - RNA, 19 nt, Artificial Sequence
  Description of Artificial Sequence: Synthetic oligonucleotide
  Antisense strand to SEQ ID NO: 1700369
uggauuccucaacaaggcc

SEQ ID NO: 1700371 - RNA, 19 nt, Artificial Sequence
  Description of Artificial Sequence: Synthetic oligonucleotide
  Sense strand starting at position 808 of SEQ ID NO: 1561813
uguugaggaauccauguuu

SEQ ID NO: 1700372 - RNA, 19 nt, Artificial Sequence
  Description of Artificial Sequence: Synthetic oligonucleotide
  Antisense strand to SEQ ID NO: 1700371
aaacauggauuccucaaca

SEQ ID NO: 1700373 - RNA, 19 nt, Artificial Sequence
  Description of Artificial Sequence: Synthetic oligonucleotide
  Sense strand starting at position 814 of SEQ ID NO: 1561813
ggaauccauguuuggaagu

SEQ ID NO: 1700374 - RNA, 19 nt, Artificial Sequence
  Description of Artificial Sequence: Synthetic oligonucleotide
  Antisense strand to SEQ ID NO: 1700373
acuuccaaacauggauucc

SEQ ID NO: 1700375 - RNA, 19 nt, Artificial Sequence
  Description of Artificial Sequence: Synthetic oligonucleotide
  Sense strand starting at position 896 of SEQ ID NO: 1561813
gaauucugacuuggucuga

SEQ ID NO: 1700376 - RNA, 19 nt, Artificial Sequence
  Description of Artificial Sequence: Synthetic oligonucleotide
  Antisense strand to SEQ ID NO: 1700375
ucagaccaagucagaauuc

SEQ ID NO: 1700377 - RNA, 19 nt, Artificial Sequence
  Description of Artificial Sequence: Synthetic oligonucleotide
  Sense strand starting at position 897 of SEQ ID NO: 1561813
aauucugacuuggucugaa

SEQ ID NO: 1700378 - RNA, 19 nt, Artificial Sequence
  Description of Artificial Sequence: Synthetic oligonucleotide
  Antisense strand to SEQ ID NO: 1700377
uucagaccaagucagaauu

SEQ ID NO: 1700379 - RNA, 19 nt, Artificial Sequence
  Description of Artificial Sequence: Synthetic oligonucleotide
  Sense strand starting at position 1118 of SEQ ID NO: 1561813
uuauaauugcucuaugaag

SEQ ID NO: 1700380 - RNA, 19 nt, Artificial Sequence
  Description of Artificial Sequence: Synthetic oligonucleotide
  Antisense strand to SEQ ID NO: 1700379
cuucauagagcaauuauaa

SEQ ID NO: 1700381 - RNA, 19 nt, Artificial Sequence
  Description of Artificial Sequence: Synthetic oligonucleotide
  Sense strand starting at position 1120 of SEQ ID NO: 1561813
auaauugcucuaugaagga

SEQ ID NO: 1700382 - RNA, 19 nt, Artificial Sequence
  Description of Artificial Sequence: Synthetic oligonucleotide
  Antisense strand to SEQ ID NO: 1700381
uccuucauagagcaauuau

SEQ ID NO: 1700383 - RNA, 19 nt, Artificial Sequence
  Description of Artificial Sequence: Synthetic oligonucleotide
  Sense strand starting at position 1331 of SEQ ID NO: 1561813
guuacauuauagucaugga

SEQ ID NO: 1700384 - RNA, 19 nt, Artificial Sequence
  Description of Artificial Sequence: Synthetic oligonucleotide
  Antisense strand to SEQ ID NO: 1700383
uccaugacuauaauguaac

SEQ ID NO: 1700385 - RNA, 19 nt, Artificial Sequence
  Description of Artificial Sequence: Synthetic oligonucleotide
  Sense strand starting at position 1370 of SEQ ID NO: 1561813
gugucuuaaguuuaaagag

SEQ ID NO: 1700386 - RNA, 19 nt, Artificial Sequence
  Description of Artificial Sequence: Synthetic oligonucleotide
  Antisense strand to SEQ ID NO: 1700385
cucuuuaaacuuaagacac

SEQ ID NO: 1700387 - RNA, 19 nt, Artificial Sequence
  Description of Artificial Sequence: Synthetic oligonucleotide
  Sense strand starting at position 1527 of SEQ ID NO: 1561813
aggagaaggucccuugguu

SEQ ID NO: 1700388 - RNA, 19 nt, Artificial Sequence
  Description of Artificial Sequence: Synthetic oligonucleotide
  Antisense strand to SEQ ID NO: 1700387
aaccaagggaccuucuccu

SEQ ID NO: 1700389 - RNA, 19 nt, Artificial Sequence
  Description of Artificial Sequence: Synthetic oligonucleotide
  Sense strand starting at position 1828 of SEQ ID NO: 1561813
ggccaauacuuacugggaa

SEQ ID NO: 1700390 - RNA, 19 nt, Artificial Sequence
  Description of Artificial Sequence: Synthetic oligonucleotide
  Antisense strand to SEQ ID NO: 1700389
uucccaguaaguauuggcc

SEQ ID NO: 1700391 - RNA, 19 nt, Artificial Sequence
  Description of Artificial Sequence: Synthetic oligonucleotide
  Sense strand starting at position 2099 of SEQ ID NO: 1561813
gaggaagggucucuuauug

SEQ ID NO: 1700392 - RNA, 19 nt, Artificial Sequence
  Description of Artificial Sequence: Synthetic oligonucleotide
  Antisense strand to SEQ ID NO: 1700391
caauaagagacccuuccuc

SEQ ID NO: 1700393 - RNA, 19 nt, Artificial Sequence
  Description of Artificial Sequence: Synthetic oligonucleotide
  Sense strand starting at position 2103 of SEQ ID NO: 1561813
aagggucucuuauugaaug

SEQ ID NO: 1700394 - RNA, 19 nt, Artificial Sequence
  Description of Artificial Sequence: Synthetic oligonucleotide
  Antisense strand to SEQ ID NO: 1700393
cauucaauaagagacccuu

SEQ ID NO: 1700395 - RNA, 19 nt, Artificial Sequence
  Description of Artificial Sequence: Synthetic oligonucleotide
  Sense strand starting at position 2108 of SEQ ID NO: 1561813
ucucuuauugaauggaucu

SEQ ID NO: 1700396 - RNA, 19 nt, Artificial Sequence
  Description of Artificial Sequence: Synthetic oligonucleotide
  Antisense strand to SEQ ID NO: 1700395
agauccauucaauaagaga

SEQ ID NO: 1700397 - RNA, 19 nt, Artificial Sequence
  Description of Artificial Sequence: Synthetic oligonucleotide
  Sense strand starting at position 2249 of SEQ ID NO: 1561813
ucuugauaacuuggagagu

SEQ ID NO: 1700398 - RNA, 19 nt, Artificial Sequence
  Description of Artificial Sequence: Synthetic oligonucleotide
  Antisense strand to SEQ ID NO: 1700397
acucuccaaguuaucaaga

SEQ ID NO: 1700399 - RNA, 19 nt, Artificial Sequence
  Description of Artificial Sequence: Synthetic oligonucleotide
  Sense strand starting at position 2502 of SEQ ID NO: 1561813
cucauauucguugacuaag

SEQ ID NO: 1700400 - RNA, 19 nt, Artificial Sequence
  Description of Artificial Sequence: Synthetic oligonucleotide
  Antisense strand to SEQ ID NO: 1700399
cuuagucaacgaauaugag

SEQ ID NO: 1700401 - RNA, 19 nt, Artificial Sequence
  Description of Artificial Sequence: Synthetic oligonucleotide
  Sense strand starting at position 2587 of SEQ ID NO: 1561813
cagagaauguuucucaaag

SEQ ID NO: 1700402 - RNA, 19 nt, Artificial Sequence
  Description of Artificial Sequence: Synthetic oligonucleotide
  Antisense strand to SEQ ID NO: 1700401
cuuugagaaacauucucug

SEQ ID NO: 1700403 - RNA, 19 nt, Artificial Sequence
  Description of Artificial Sequence: Synthetic oligonucleotide
  Sense strand starting at position 2588 of SEQ ID NO: 1561813
agagaauguuucucaaagu

SEQ ID NO: 1700404 - RNA, 19 nt, Artificial Sequence
  Description of Artificial Sequence: Synthetic oligonucleotide
  Antisense strand to SEQ ID NO: 1700403
acuuugagaaacauucucu

SEQ ID NO: 1700405 - RNA, 19 nt, Artificial Sequence
  Description of Artificial Sequence: Synthetic oligonucleotide
  Sense strand starting at position 2671 of SEQ ID NO: 1561813
cuccuugaugucugaggaa

SEQ ID NO: 1700406 - RNA, 19 nt, Artificial Sequence
  Description of Artificial Sequence: Synthetic oligonucleotide
  Antisense strand to SEQ ID NO: 1700405
uuccucagacaucaaggag

SEQ ID NO: 1700407 - RNA, 19 nt, Artificial Sequence
  Description of Artificial Sequence: Synthetic oligonucleotide
  Sense strand starting at position 2700 of SEQ ID NO: 1561813
aagggacuugccugggaga

SEQ ID NO: 1700408 - RNA, 19 nt, Artificial Sequence
  Description of Artificial Sequence: Synthetic oligonucleotide
  Antisense strand to SEQ ID NO: 1700407
ucucccaggcaagucccuu

SEQ ID NO: 1700409 - RNA, 19 nt, Artificial Sequence
  Description of Artificial Sequence: Synthetic oligonucleotide
  Sense strand starting at position 2702 of SEQ ID NO: 1561813
gggacuugccugggagacu

SEQ ID NO: 1700410 - RNA, 19 nt, Artificial Sequence
  Description of Artificial Sequence: Synthetic oligonucleotide
  Antisense strand to SEQ ID NO: 1700409
agucucccaggcaaguccc

SEQ ID NO: 1700411 - RNA, 19 nt, Artificial Sequence
  Description of Artificial Sequence: Synthetic oligonucleotide
  Sense strand starting at position 2713 of SEQ ID NO: 1561813
gggagacugcaguggaaua

SEQ ID NO: 1700412 - RNA, 19 nt, Artificial Sequence
  Description of Artificial Sequence: Synthetic oligonucleotide
  Antisense strand to SEQ ID NO: 1700411
uauuccacugcagucuccc

SEQ ID NO: 1700413 - RNA, 19 nt, Artificial Sequence
  Description of Artificial Sequence: Synthetic oligonucleotide
  Sense strand starting at position 2714 of SEQ ID NO: 1561813
ggagacugcaguggaauaa

SEQ ID NO: 1700414 - RNA, 19 nt, Artificial Sequence
  Description of Artificial Sequence: Synthetic oligonucleotide
  Antisense strand to SEQ ID NO: 1700413
uuauuccacugcagucucc

SEQ ID NO: 1700415 - RNA, 19 nt, Artificial Sequence
  Description of Artificial Sequence: Synthetic oligonucleotide
  Sense strand starting at position 2856 of SEQ ID NO: 1561813
cagccaguccugggaagaa

SEQ ID NO: 1700416 - RNA, 19 nt, Artificial Sequence
  Description of Artificial Sequence: Synthetic oligonucleotide
  Antisense strand to SEQ ID NO: 1700415
uucuucccaggacuggcug

SEQ ID NO: 1700417 - RNA, 19 nt, Artificial Sequence
  Description of Artificial Sequence: Synthetic oligonucleotide
  Sense strand starting at position 2883 of SEQ ID NO: 1561813
cucuuuacagaguaaaugu

SEQ ID NO: 1700418 - RNA, 19 nt, Artificial Sequence
  Description of Artificial Sequence: Synthetic oligonucleotide
  Antisense strand to SEQ ID NO: 1700417
acauuuacucuguaaagag

SEQ ID NO: 1700419 - RNA, 19 nt, Artificial Sequence
  Description of Artificial Sequence: Synthetic oligonucleotide
  Sense strand starting at position 2923 of SEQ ID NO: 1561813
cuucucuaacuaggaguua

SEQ ID NO: 1700420 - RNA, 19 nt, Artificial Sequence
  Description of Artificial Sequence: Synthetic oligonucleotide
  Antisense strand to SEQ ID NO: 1700419
uaacuccuaguuagagaag

SEQ ID NO: 1700421 - RNA, 19 nt, Artificial Sequence
  Description of Artificial Sequence: Synthetic oligonucleotide
  Sense strand starting at position 3003 of SEQ ID NO: 1561813
acagccuuauuaucagaga

SEQ ID NO: 1700422 - RNA, 19 nt, Artificial Sequence
  Description of Artificial Sequence: Synthetic oligonucleotide
  Antisense strand to SEQ ID NO: 1700421
ucucugauaauaaggcugu

SEQ ID NO: 1700423 - RNA, 19 nt, Artificial Sequence
  Description of Artificial Sequence: Synthetic oligonucleotide
  Sense strand starting at position 3011 of SEQ ID NO: 1561813
auuaucagagagugacuau

SEQ ID NO: 1700424 - RNA, 19 nt, Artificial Sequence
  Description of Artificial Sequence: Synthetic oligonucleotide
  Antisense strand to SEQ ID NO: 1700423
auagucacucucugauaau

SEQ ID NO: 1700425 - RNA, 19 nt, Artificial Sequence
  Description of Artificial Sequence: Synthetic oligonucleotide
  Sense strand starting at position 3022 of SEQ ID NO: 1561813
gugacuauauggucacaaa

SEQ ID NO: 1700426 - RNA, 19 nt, Artificial Sequence
  Description of Artificial Sequence: Synthetic oligonucleotide
  Antisense strand to SEQ ID NO: 1700425
uuugugaccauauagucac

SEQ ID NO: 1700427 - RNA, 19 nt, Artificial Sequence
  Description of Artificial Sequence: Synthetic oligonucleotide
  Sense strand starting at position 3408 of SEQ ID NO: 1561813
uuuaguagagaugacguau

SEQ ID NO: 1700428 - RNA, 19 nt, Artificial Sequence
  Description of Artificial Sequence: Synthetic oligonucleotide
  Antisense strand to SEQ ID NO: 1700427
auacgucaucucuacuaaa

SEQ ID NO: 1700429 - RNA, 19 nt, Artificial Sequence
  Description of Artificial Sequence: Synthetic oligonucleotide
  Sense strand starting at position 3547 of SEQ ID NO: 1561813
guaagacgucguaagcagu

SEQ ID NO: 1700430 - RNA, 19 nt, Artificial Sequence
  Description of Artificial Sequence: Synthetic oligonucleotide
  Antisense strand to SEQ ID NO: 1700429
acugcuuacgacgucuuac

SEQ ID NO: 1700431 - RNA, 19 nt, Artificial Sequence
  Description of Artificial Sequence: Synthetic oligonucleotide
  Sense strand starting at position 3678 of SEQ ID NO: 1561813
auuuauagaugggaaucau

SEQ ID NO: 1700432 - RNA, 19 nt, Artificial Sequence
  Description of Artificial Sequence: Synthetic oligonucleotide
  Antisense strand to SEQ ID NO: 1700431
augauucccaucuauaaau

SEQ ID NO: 1700433 - RNA, 19 nt, Artificial Sequence
  Description of Artificial Sequence: Synthetic oligonucleotide
  Sense strand starting at position 3711 of SEQ ID NO: 1561813
ugaggaugcugacuaaaug

SEQ ID NO: 1700434 - RNA, 19 nt, Artificial Sequence
  Description of Artificial Sequence: Synthetic oligonucleotide
  Antisense strand to SEQ ID NO: 1700433
cauuuagucagcauccuca

SEQ ID NO: 1700435 - RNA, 19 nt, Artificial Sequence
  Description of Artificial Sequence: Synthetic oligonucleotide
  Sense strand starting at position 3781 of SEQ ID NO: 1561813
aaguucuugccagaggaca

SEQ ID NO: 1700436 - RNA, 19 nt, Artificial Sequence
  Description of Artificial Sequence: Synthetic oligonucleotide
  Antisense strand to SEQ ID NO: 1700435
uguccucuggcaagaacuu

SEQ ID NO: 1700437 - RNA, 19 nt, Artificial Sequence
  Description of Artificial Sequence: Synthetic oligonucleotide
  Sense strand starting at position 3814 of SEQ ID NO: 1561813
gauguugguguggauauaa

SEQ ID NO: 1700438 - RNA, 19 nt, Artificial Sequence
  Description of Artificial Sequence: Synthetic oligonucleotide
  Antisense strand to SEQ ID NO: 1700437
uuauauccacaccaacauc

SEQ ID NO: 1700439 - RNA, 19 nt, Artificial Sequence
  Description of Artificial Sequence: Synthetic oligonucleotide
  Sense strand starting at position 3838 of SEQ ID NO: 1561813
ucuuguagaguugaaggua

SEQ ID NO: 1700440 - RNA, 19 nt, Artificial Sequence
  Description of Artificial Sequence: Synthetic oligonucleotide
  Antisense strand to SEQ ID NO: 1700439
uaccuucaacucuacaaga

SEQ ID NO: 1700441 - RNA, 19 nt, Artificial Sequence
  Description of Artificial Sequence: Synthetic oligonucleotide
  Sense strand starting at position 3884 of SEQ ID NO: 1561813
aaguaaugucuuuagugga

SEQ ID NO: 1700442 - RNA, 19 nt, Artificial Sequence
  Description of Artificial Sequence: Synthetic oligonucleotide
  Antisense strand to SEQ ID NO: 1700441
uccacuaaagacauuacuu

SEQ ID NO: 1700443 - RNA, 19 nt, Artificial Sequence
  Description of Artificial Sequence: Synthetic oligonucleotide
  Sense strand starting at position 3924 of SEQ ID NO: 1561813
aagugaaagucaguaaauu

SEQ ID NO: 1700444 - RNA, 19 nt, Artificial Sequence
  Description of Artificial Sequence: Synthetic oligonucleotide
  Antisense strand to SEQ ID NO: 1700443
aauuuacugacuuucacuu

SEQ ID NO: 1700445 - RNA, 19 nt, Artificial Sequence
  Description of Artificial Sequence: Synthetic oligonucleotide
  Sense strand starting at position 351 of SEQ ID NO: 1561814
acugguguccugcauuaau

SEQ ID NO: 1700446 - RNA, 19 nt, Artificial Sequence
  Description of Artificial Sequence: Synthetic oligonucleotide
  Antisense strand to SEQ ID NO: 1700445
auuaaugcaggacaccagu

SEQ ID NO: 1700447 - RNA, 19 nt, Artificial Sequence
  Description of Artificial Sequence: Synthetic oligonucleotide
  Sense strand starting at position 360 of SEQ ID NO: 1561814
cugcauuaaucugcugaaa

SEQ ID NO: 1700448 - RNA, 19 nt, Artificial Sequence
  Description of Artificial Sequence: Synthetic oligonucleotide
  Antisense strand to SEQ ID NO: 1700447
uuucagcagauuaaugcag

SEQ ID NO: 1700449 - RNA, 19 nt, Artificial Sequence
  Description of Artificial Sequence: Synthetic oligonucleotide
  Sense strand starting at position 464 of SEQ ID NO: 1561814
ugaguuaacgaagggaauu

SEQ ID NO: 1700450 - RNA, 19 nt, Artificial Sequence
  Description of Artificial Sequence: Synthetic oligonucleotide
  Antisense strand to SEQ ID NO: 1700449
aauucccuucguuaacuca

SEQ ID NO: 1700451 - RNA, 19 nt, Artificial Sequence
  Description of Artificial Sequence: Synthetic oligonucleotide
  Sense strand starting at position 568 of SEQ ID NO: 1561814
cuuacaauuccaugugguu

SEQ ID NO: 1700452 - RNA, 19 nt, Artificial Sequence
  Description of Artificial Sequence: Synthetic oligonucleotide
  Antisense strand to SEQ ID NO: 1700451
aaccacauggaauuguaag

SEQ ID NO: 1700453 - RNA, 19 nt, Artificial Sequence
  Description of Artificial Sequence: Synthetic oligonucleotide
  Sense strand starting at position 658 of SEQ ID NO: 1561814
caggcaaucugacuugaga

SEQ ID NO: 1700454 - RNA, 19 nt, Artificial Sequence
  Description of Artificial Sequence: Synthetic oligonucleotide
  Antisense strand to SEQ ID NO: 1700453
ucucaagucagauugccug

SEQ ID NO: 1700455 - RNA, 19 nt, Artificial Sequence
  Description of Artificial Sequence: Synthetic oligonucleotide
  Sense strand starting at position 718 of SEQ ID NO: 1561814
agcauuaagggcugaauua

SEQ ID NO: 1700456 - RNA, 19 nt, Artificial Sequence
  Description of Artificial Sequence: Synthetic oligonucleotide
  Antisense strand to SEQ ID NO: 1700455
uaauucagcccuuaaugcu

SEQ ID NO: 1700457 - RNA, 19 nt, Artificial Sequence
  Description of Artificial Sequence: Synthetic oligonucleotide
  Sense strand starting at position 719 of SEQ ID NO: 1561814
gcauuaagggcugaauuaa

SEQ ID NO: 1700458 - RNA, 19 nt, Artificial Sequence
  Description of Artificial Sequence: Synthetic oligonucleotide
  Antisense strand to SEQ ID NO: 1700457
uuaauucagcccuuaaugc

SEQ ID NO: 1700459 - RNA, 19 nt, Artificial Sequence
  Description of Artificial Sequence: Synthetic oligonucleotide
  Sense strand starting at position 764 of SEQ ID NO: 1561814
caaagaagccuggguccau

SEQ ID NO: 1700460 - RNA, 19 nt, Artificial Sequence
  Description of Artificial Sequence: Synthetic oligonucleotide
  Antisense strand to SEQ ID NO: 1700459
auggacccaggcuucuuug

SEQ ID NO: 1700461 - RNA, 19 nt, Artificial Sequence
  Description of Artificial Sequence: Synthetic oligonucleotide
  Sense strand starting at position 788 of SEQ ID NO: 1561814
caguucuaccaaggcaaga

SEQ ID NO: 1700462 - RNA, 19 nt, Artificial Sequence
  Description of Artificial Sequence: Synthetic oligonucleotide
  Antisense strand to SEQ ID NO: 1700461
ucuugccuugguagaacug

SEQ ID NO: 1700463 - RNA, 19 nt, Artificial Sequence
  Description of Artificial Sequence: Synthetic oligonucleotide
  Sense strand starting at position 871 of SEQ ID NO: 1561814
ugagaauaauagccaggua

SEQ ID NO: 1700464 - RNA, 19 nt, Artificial Sequence
  Description of Artificial Sequence: Synthetic oligonucleotide
  Antisense strand to SEQ ID NO: 1700463
uaccuggcuauuauucuca

SEQ ID NO: 1700465 - RNA, 19 nt, Artificial Sequence
  Description of Artificial Sequence: Synthetic oligonucleotide
  Sense strand starting at position 874 of SEQ ID NO: 1561814
gaauaauagccagguagau

SEQ ID NO: 1700466 - RNA, 19 nt, Artificial Sequence
  Description of Artificial Sequence: Synthetic oligonucleotide
  Antisense strand to SEQ ID NO: 1700465
aucuaccuggcuauuauuc

SEQ ID NO: 1700467 - RNA, 19 nt, Artificial Sequence
  Description of Artificial Sequence: Synthetic oligonucleotide
  Sense strand starting at position 886 of SEQ ID NO: 1561814
gguagauuaccugacucga

SEQ ID NO: 1700468 - RNA, 19 nt, Artificial Sequence
  Description of Artificial Sequence: Synthetic oligonucleotide
  Antisense strand to SEQ ID NO: 1700467
ucgagucagguaaucuacc

SEQ ID NO: 1700469 - RNA, 19 nt, Artificial Sequence
  Description of Artificial Sequence: Synthetic oligonucleotide
  Sense strand starting at position 888 of SEQ ID NO: 1561814
uagauuaccugacucgaua

SEQ ID NO: 1700470 - RNA, 19 nt, Artificial Sequence
  Description of Artificial Sequence: Synthetic oligonucleotide
  Antisense strand to SEQ ID NO: 1700469
uaucgagucagguaaucua

SEQ ID NO: 1700471 - RNA, 19 nt, Artificial Sequence
  Description of Artificial Sequence: Synthetic oligonucleotide
  Sense strand starting at position 895 of SEQ ID NO: 1561814
ccugacucgauauguauag

SEQ ID NO: 1700472 - RNA, 19 nt, Artificial Sequence
  Description of Artificial Sequence: Synthetic oligonucleotide
  Antisense strand to SEQ ID NO: 1700471
cuauacauaucgagucagg

SEQ ID NO: 1700473 - RNA, 19 nt, Artificial Sequence
  Description of Artificial Sequence: Synthetic oligonucleotide
  Sense strand starting at position 896 of SEQ ID NO: 1561814
cugacucgauauguauaga

SEQ ID NO: 1700474 - RNA, 19 nt, Artificial Sequence
  Description of Artificial Sequence: Synthetic oligonucleotide
  Antisense strand to SEQ ID NO: 1700473
ucuauacauaucgagucag

SEQ ID NO: 1700475 - RNA, 19 nt, Artificial Sequence
  Description of Artificial Sequence: Synthetic oligonucleotide
  Sense strand starting at position 980 of SEQ ID NO: 1561814
cucuuaguuguuuaaugua

SEQ ID NO: 1700476 - RNA, 19 nt, Artificial Sequence
  Description of Artificial Sequence: Synthetic oligonucleotide
  Antisense strand to SEQ ID NO: 1700475
uacauuaaacaacuaagag

SEQ ID NO: 1700477 - RNA, 19 nt, Artificial Sequence
  Description of Artificial Sequence: Synthetic oligonucleotide
  Sense strand starting at position 1028 of SEQ ID NO: 1561814
gcagauaggcuuggguaca

SEQ ID NO: 1700478 - RNA, 19 nt, Artificial Sequence
  Description of Artificial Sequence: Synthetic oligonucleotide
  Antisense strand to SEQ ID NO: 1700477
uguacccaagccuaucugc

SEQ ID NO: 1700479 - RNA, 19 nt, Artificial Sequence
  Description of Artificial Sequence: Synthetic oligonucleotide
  Sense strand starting at position 2247 of SEQ ID NO: 1561814
gcaccagguguuuaagacu

SEQ ID NO: 1700480 - RNA, 19 nt, Artificial Sequence
  Description of Artificial Sequence: Synthetic oligonucleotide
  Antisense strand to SEQ ID NO: 1700479
agucuuaaacaccuggugc

SEQ ID NO: 1700481 - RNA, 19 nt, Artificial Sequence
  Description of Artificial Sequence: Synthetic oligonucleotide
  Sense strand starting at position 2393 of SEQ ID NO: 1561814
aggaauggcaucggaugau

SEQ ID NO: 1700482 - RNA, 19 nt, Artificial Sequence
  Description of Artificial Sequence: Synthetic oligonucleotide
  Antisense strand to SEQ ID NO: 1700481
aucauccgaugccauuccu

SEQ ID NO: 1700483 - RNA, 19 nt, Artificial Sequence
  Description of Artificial Sequence: Synthetic oligonucleotide
  Sense strand starting at position 2437 of SEQ ID NO: 1561814
ccugaaagcaggugugacu

SEQ ID NO: 1700484 - RNA, 19 nt, Artificial Sequence
  Description of Artificial Sequence: Synthetic oligonucleotide
  Antisense strand to SEQ ID NO: 1700483
agucacaccugcuuucagg

SEQ ID NO: 1700485 - RNA, 19 nt, Artificial Sequence
  Description of Artificial Sequence: Synthetic oligonucleotide
  Sense strand starting at position 2480 of SEQ ID NO: 1561814
cugugaccuggagaaguua

SEQ ID NO: 1700486 - RNA, 19 nt, Artificial Sequence
  Description of Artificial Sequence: Synthetic oligonucleotide
  Antisense strand to SEQ ID NO: 1700485
uaacuucuccaggucacag

SEQ ID NO: 1700487 - RNA, 19 nt, Artificial Sequence
  Description of Artificial Sequence: Synthetic oligonucleotide
  Sense strand starting at position 2554 of SEQ ID NO: 1561814
ucuucuggaccucaaagua

SEQ ID NO: 1700488 - RNA, 19 nt, Artificial Sequence
  Description of Artificial Sequence: Synthetic oligonucleotide
  Antisense strand to SEQ ID NO: 1700487
uacuuugagguccagaaga

SEQ ID NO: 1700489 - RNA, 19 nt, Artificial Sequence
  Description of Artificial Sequence: Synthetic oligonucleotide
  Sense strand starting at position 2564 of SEQ ID NO: 1561814
cucaaaguacucugggaau

SEQ ID NO: 1700490 - RNA, 19 nt, Artificial Sequence
  Description of Artificial Sequence: Synthetic oligonucleotide
  Antisense strand to SEQ ID NO: 1700489
auucccagaguacuuugag

SEQ ID NO: 1700491 - RNA, 19 nt, Artificial Sequence
  Description of Artificial Sequence: Synthetic oligonucleotide
  Sense strand starting at position 2566 of SEQ ID NO: 1561814
caaaguacucugggaauca

SEQ ID NO: 1700492 - RNA, 19 nt, Artificial Sequence
  Description of Artificial Sequence: Synthetic oligonucleotide
  Antisense strand to SEQ ID NO: 1700491
ugauucccagaguacuuug

SEQ ID NO: 1700493 - RNA, 19 nt, Artificial Sequence
  Description of Artificial Sequence: Synthetic oligonucleotide
  Sense strand starting at position 2631 of SEQ ID NO: 1561814
cugagcgcugcuuucugaa

SEQ ID NO: 1700494 - RNA, 19 nt, Artificial Sequence
  Description of Artificial Sequence: Synthetic oligonucleotide
  Antisense strand to SEQ ID NO: 1700493
uucagaaagcagcgcucag

SEQ ID NO: 1700495 - RNA, 19 nt, Artificial Sequence
  Description of Artificial Sequence: Synthetic oligonucleotide
  Sense strand starting at position 2718 of SEQ ID NO: 1561814
ucaagugauauggagcuua

SEQ ID NO: 1700496 - RNA, 19 nt, Artificial Sequence
  Description of Artificial Sequence: Synthetic oligonucleotide
  Antisense strand to SEQ ID NO: 1700495
uaagcuccauaucacuuga

SEQ ID NO: 1700497 - RNA, 19 nt, Artificial Sequence
  Description of Artificial Sequence: Synthetic oligonucleotide
  Sense strand starting at position 2801 of SEQ ID NO: 1561814
agcugcaaugaguaagaua

SEQ ID NO: 1700498 - RNA, 19 nt, Artificial Sequence
  Description of Artificial Sequence: Synthetic oligonucleotide
  Antisense strand to SEQ ID NO: 1700497
uaucuuacucauugcagcu

SEQ ID NO: 1700499 - RNA, 19 nt, Artificial Sequence
  Description of Artificial Sequence: Synthetic oligonucleotide
  Sense strand starting at position 2982 of SEQ ID NO: 1561814
guuguuacaccuuaagaua

SEQ ID NO: 1700500 - RNA, 19 nt, Artificial Sequence
  Description of Artificial Sequence: Synthetic oligonucleotide
  Antisense strand to SEQ ID NO: 1700499
uaucuuaagguguaacaac

SEQ ID NO: 1700501 - RNA, 19 nt, Artificial Sequence
  Description of Artificial Sequence: Synthetic oligonucleotide
  Sense strand starting at position 3001 of SEQ ID NO: 1561814
uugaaucugucucuuaaag

SEQ ID NO: 1700502 - RNA, 19 nt, Artificial Sequence
  Description of Artificial Sequence: Synthetic oligonucleotide
  Antisense strand to SEQ ID NO: 1700501
cuuuaagagacagauucaa

SEQ ID NO: 1700503 - RNA, 19 nt, Artificial Sequence
  Description of Artificial Sequence: Synthetic oligonucleotide
  Sense strand starting at position 3038 of SEQ ID NO: 1561814
cauaaagauguaugcauga

SEQ ID NO: 1700504 - RNA, 19 nt, Artificial Sequence
  Description of Artificial Sequence: Synthetic oligonucleotide
  Antisense strand to SEQ ID NO: 1700503
ucaugcauacaucuuuaug

SEQ ID NO: 1700505 - RNA, 19 nt, Artificial Sequence
  Description of Artificial Sequence: Synthetic oligonucleotide
  Sense strand starting at position 3051 of SEQ ID NO: 1561814
gcaugagauuguucaaugg

SEQ ID NO: 1700506 - RNA, 19 nt, Artificial Sequence
  Description of Artificial Sequence: Synthetic oligonucleotide
  Antisense strand to SEQ ID NO: 1700505
ccauugaacaaucucaugc

SEQ ID NO: 1700507 - RNA, 19 nt, Artificial Sequence
  Description of Artificial Sequence: Synthetic oligonucleotide
  Sense strand starting at position 3238 of SEQ ID NO: 1561814
ugugcauuccaucauucca

SEQ ID NO: 1700508 - RNA, 19 nt, Artificial Sequence
  Description of Artificial Sequence: Synthetic oligonucleotide
  Antisense strand to SEQ ID NO: 1700507
uggaaugauggaaugcaca

SEQ ID NO: 1700509 - RNA, 19 nt, Artificial Sequence
  Description of Artificial Sequence: Synthetic oligonucleotide
  Sense strand starting at position 3439 of SEQ ID NO: 1561814
caggaagcaucacuugagu

SEQ ID NO: 1700510 - RNA, 19 nt, Artificial Sequence
  Description of Artificial Sequence: Synthetic oligonucleotide
  Antisense strand to SEQ ID NO: 1700509
acucaagugaugcuuccug

SEQ ID NO: 1700511 - RNA, 19 nt, Artificial Sequence
  Description of Artificial Sequence: Synthetic oligonucleotide
  Sense strand starting at position 3441 of SEQ ID NO: 1561814
ggaagcaucacuugaguuc

SEQ ID NO: 1700512 - RNA, 19 nt, Artificial Sequence
  Description of Artificial Sequence: Synthetic oligonucleotide
  Antisense strand to SEQ ID NO: 1700511
gaacucaagugaugcuucc

SEQ ID NO: 1700513 - RNA, 19 nt, Artificial Sequence
  Description of Artificial Sequence: Synthetic oligonucleotide
  Sense strand starting at position 3748 of SEQ ID NO: 1561814
gguugagcccaggagaguu

SEQ ID NO: 1700514 - RNA, 19 nt, Artificial Sequence
  Description of Artificial Sequence: Synthetic oligonucleotide
  Antisense strand to SEQ ID NO: 1700513
aacucuccugggcucaacc

SEQ ID NO: 1700515 - RNA, 19 nt, Artificial Sequence
  Description of Artificial Sequence: Synthetic oligonucleotide
  Sense strand starting at position 3797 of SEQ ID NO: 1561814
aguuguuaccagcauagag

SEQ ID NO: 1700516 - RNA, 19 nt, Artificial Sequence
  Description of Artificial Sequence: Synthetic oligonucleotide
  Antisense strand to SEQ ID NO: 1700515
cucuaugcugguaacaacu

SEQ ID NO: 1700517 - RNA, 19 nt, Artificial Sequence
  Description of Artificial Sequence: Synthetic oligonucleotide
  Sense strand starting at position 3799 of SEQ ID NO: 1561814
uuguuaccagcauagaguu

SEQ ID NO: 1700518 - RNA, 19 nt, Artificial Sequence
  Description of Artificial Sequence: Synthetic oligonucleotide
  Antisense strand to SEQ ID NO: 1700517
aacucuaugcugguaacaa

SEQ ID NO: 1700519 - RNA, 19 nt, Artificial Sequence
  Description of Artificial Sequence: Synthetic oligonucleotide
  Sense strand starting at position 3809 of SEQ ID NO: 1561814
cauagaguuguccagguuc

SEQ ID NO: 1700520 - RNA, 19 nt, Artificial Sequence
  Description of Artificial Sequence: Synthetic oligonucleotide
  Antisense strand to SEQ ID NO: 1700519
gaaccuggacaacucuaug

SEQ ID NO: 1700521 - RNA, 19 nt, Artificial Sequence
  Description of Artificial Sequence: Synthetic oligonucleotide
  Sense strand starting at position 3971 of SEQ ID NO: 1561814
ucaaucaggguuuguauua

SEQ ID NO: 1700522 - RNA, 19 nt, Artificial Sequence
  Description of Artificial Sequence: Synthetic oligonucleotide
  Antisense strand to SEQ ID NO: 1700521
uaauacaaacccugauuga

SEQ ID NO: 1700523 - RNA, 19 nt, Artificial Sequence
  Description of Artificial Sequence: Synthetic oligonucleotide
  Sense strand starting at position 3972 of SEQ ID NO: 1561814
caaucaggguuuguauuaa

SEQ ID NO: 1700524 - RNA, 19 nt, Artificial Sequence
  Description of Artificial Sequence: Synthetic oligonucleotide
  Antisense strand to SEQ ID NO: 1700523
uuaauacaaacccugauug

SEQ ID NO: 1700525 - RNA, 19 nt, Artificial Sequence
  Description of Artificial Sequence: Synthetic oligonucleotide
  Sense strand starting at position 65 of SEQ ID NO: 1561815
uugaacuucuugucaugaa

SEQ ID NO: 1700526 - RNA, 19 nt, Artificial Sequence
  Description of Artificial Sequence: Synthetic oligonucleotide
  Antisense strand to SEQ ID NO: 1700525
uucaugacaagaaguucaa

SEQ ID NO: 1700527 - RNA, 19 nt, Artificial Sequence
  Description of Artificial Sequence: Synthetic oligonucleotide
  Sense strand starting at position 78 of SEQ ID NO: 1561815
caugaaacauggcucgaaa

SEQ ID NO: 1700528 - RNA, 19 nt, Artificial Sequence
  Description of Artificial Sequence: Synthetic oligonucleotide
  Antisense strand to SEQ ID NO: 1700527
uuucgagccauguuucaug

SEQ ID NO: 1700529 - RNA, 19 nt, Artificial Sequence
  Description of Artificial Sequence: Synthetic oligonucleotide
  Sense strand starting at position 80 of SEQ ID NO: 1561815
ugaaacauggcucgaaauc

SEQ ID NO: 1700530 - RNA, 19 nt, Artificial Sequence
  Description of Artificial Sequence: Synthetic oligonucleotide
  Antisense strand to SEQ ID NO: 1700529
gauuucgagccauguuuca

SEQ ID NO: 1700531 - RNA, 19 nt, Artificial Sequence
  Description of Artificial Sequence: Synthetic oligonucleotide
  Sense strand starting at position 81 of SEQ ID NO: 1561815
gaaacauggcucgaaaucu

SEQ ID NO: 1700532 - RNA, 19 nt, Artificial Sequence
  Description of Artificial Sequence: Synthetic oligonucleotide
  Antisense strand to SEQ ID NO: 1700531
agauuucgagccauguuuc

SEQ ID NO: 1700533 - RNA, 19 nt, Artificial Sequence
  Description of Artificial Sequence: Synthetic oligonucleotide
  Sense strand starting at position 174 of SEQ ID NO: 1561815
gcuggucacucauuauuuc

SEQ ID NO: 1700534 - RNA, 19 nt, Artificial Sequence
  Description of Artificial Sequence: Synthetic oligonucleotide
  Antisense strand to SEQ ID NO: 1700533
gaaauaaugagugaccagc

SEQ ID NO: 1700535 - RNA, 19 nt, Artificial Sequence
  Description of Artificial Sequence: Synthetic oligonucleotide
  Sense strand starting at position 224 of SEQ ID NO: 1561815
cgaccaaaugcuugaagaa

SEQ ID NO: 1700536 - RNA, 19 nt, Artificial Sequence
  Description of Artificial Sequence: Synthetic oligonucleotide
  Antisense strand to SEQ ID NO: 1700535
uucuucaagcauuuggucg

SEQ ID NO: 1700537 - RNA, 19 nt, Artificial Sequence
  Description of Artificial Sequence: Synthetic oligonucleotide
  Sense strand starting at position 276 of SEQ ID NO: 1561815
ugguaauaaugguuaguac

SEQ ID NO: 1700538 - RNA, 19 nt, Artificial Sequence
  Description of Artificial Sequence: Synthetic oligonucleotide
  Antisense strand to SEQ ID NO: 1700537
guacuaaccauuauuacca

SEQ ID NO: 1700539 - RNA, 19 nt, Artificial Sequence
  Description of Artificial Sequence: Synthetic oligonucleotide
  Sense strand starting at position 277 of SEQ ID NO: 1561815
gguaauaaugguuaguaca

SEQ ID NO: 1700540 - RNA, 19 nt, Artificial Sequence
  Description of Artificial Sequence: Synthetic oligonucleotide
  Antisense strand to SEQ ID NO: 1700539
uguacuaaccauuauuacc

SEQ ID NO: 1700541 - RNA, 19 nt, Artificial Sequence
  Description of Artificial Sequence: Synthetic oligonucleotide
  Sense strand starting at position 347 of SEQ ID NO: 1561815
cuaaguuaaguguacauaa

SEQ ID NO: 1700542 - RNA, 19 nt, Artificial Sequence
  Description of Artificial Sequence: Synthetic oligonucleotide
  Antisense strand to SEQ ID NO: 1700541
uuauguacacuuaacuuag

SEQ ID NO: 1700543 - RNA, 19 nt, Artificial Sequence
  Description of Artificial Sequence: Synthetic oligonucleotide
  Sense strand starting at position 493 of SEQ ID NO: 1561815
agcagaaucccagggcuuu

SEQ ID NO: 1700544 - RNA, 19 nt, Artificial Sequence
  Description of Artificial Sequence: Synthetic oligonucleotide
  Antisense strand to SEQ ID NO: 1700543
aaagcccugggauucugcu

SEQ ID NO: 1700545 - RNA, 19 nt, Artificial Sequence
  Description of Artificial Sequence: Synthetic oligonucleotide
  Sense strand starting at position 494 of SEQ ID NO: 1561815
gcagaaucccagggcuuua

SEQ ID NO: 1700546 - RNA, 19 nt, Artificial Sequence
  Description of Artificial Sequence: Synthetic oligonucleotide
  Antisense strand to SEQ ID NO: 1700545
uaaagcccugggauucugc

SEQ ID NO: 1700547 - RNA, 19 nt, Artificial Sequence
  Description of Artificial Sequence: Synthetic oligonucleotide
  Sense strand starting at position 581 of SEQ ID NO: 1561815
uuacuaauugaaggcaaau

SEQ ID NO: 1700548 - RNA, 19 nt, Artificial Sequence
  Description of Artificial Sequence: Synthetic oligonucleotide
  Antisense strand to SEQ ID NO: 1700547
auuugccuucaauuaguaa

SEQ ID NO: 1700549 - RNA, 19 nt, Artificial Sequence
  Description of Artificial Sequence: Synthetic oligonucleotide
  Sense strand starting at position 592 of SEQ ID NO: 1561815
aggcaaauguaguuaagau

SEQ ID NO: 1700550 - RNA, 19 nt, Artificial Sequence
  Description of Artificial Sequence: Synthetic oligonucleotide
  Antisense strand to SEQ ID NO: 1700549
aucuuaacuacauuugccu

SEQ ID NO: 1700551 - RNA, 19 nt, Artificial Sequence
  Description of Artificial Sequence: Synthetic oligonucleotide
  Sense strand starting at position 593 of SEQ ID NO: 1561815
ggcaaauguaguuaagauu

SEQ ID NO: 1700552 - RNA, 19 nt, Artificial Sequence
  Description of Artificial Sequence: Synthetic oligonucleotide
  Antisense strand to SEQ ID NO: 1700551
aaucuuaacuacauuugcc

SEQ ID NO: 1700553 - RNA, 19 nt, Artificial Sequence
  Description of Artificial Sequence: Synthetic oligonucleotide
  Sense strand starting at position 808 of SEQ ID NO: 1561815
ggaggucuuggcuagagug

SEQ ID NO: 1700554 - RNA, 19 nt, Artificial Sequence
  Description of Artificial Sequence: Synthetic oligonucleotide
  Antisense strand to SEQ ID NO: 1700553
cacucuagccaagaccucc

SEQ ID NO: 1700555 - RNA, 19 nt, Artificial Sequence
  Description of Artificial Sequence: Synthetic oligonucleotide
  Sense strand starting at position 993 of SEQ ID NO: 1561815
ccuuuaguucuguaagacu

SEQ ID NO: 1700556 - RNA, 19 nt, Artificial Sequence
  Description of Artificial Sequence: Synthetic oligonucleotide
  Antisense strand to SEQ ID NO: 1700555
agucuuacagaacuaaagg

SEQ ID NO: 1700557 - RNA, 19 nt, Artificial Sequence
  Description of Artificial Sequence: Synthetic oligonucleotide
  Sense strand starting at position 1297 of SEQ ID NO: 1561815
agcaucucuggaugggaau

SEQ ID NO: 1700558 - RNA, 19 nt, Artificial Sequence
  Description of Artificial Sequence: Synthetic oligonucleotide
  Antisense strand to SEQ ID NO: 1700557
auucccauccagagaugcu

SEQ ID NO: 1700559 - RNA, 19 nt, Artificial Sequence
  Description of Artificial Sequence: Synthetic oligonucleotide
  Sense strand starting at position 1298 of SEQ ID NO: 1561815
gcaucucuggaugggaauu

SEQ ID NO: 1700560 - RNA, 19 nt, Artificial Sequence
  Description of Artificial Sequence: Synthetic oligonucleotide
  Antisense strand to SEQ ID NO: 1700559
aauucccauccagagaugc

SEQ ID NO: 1700561 - RNA, 19 nt, Artificial Sequence
  Description of Artificial Sequence: Synthetic oligonucleotide
  Sense strand starting at position 1435 of SEQ ID NO: 1561815
aagcuaucgcuggugcauu

SEQ ID NO: 1700562 - RNA, 19 nt, Artificial Sequence
  Description of Artificial Sequence: Synthetic oligonucleotide
  Antisense strand to SEQ ID NO: 1700561
aaugcaccagcgauagcuu

SEQ ID NO: 1700563 - RNA, 19 nt, Artificial Sequence
  Description of Artificial Sequence: Synthetic oligonucleotide
  Sense strand starting at position 1525 of SEQ ID NO: 1561815
ggagaaguacugcauguau

SEQ ID NO: 1700564 - RNA, 19 nt, Artificial Sequence
  Description of Artificial Sequence: Synthetic oligonucleotide
  Antisense strand to SEQ ID NO: 1700563
auacaugcaguacuucucc

SEQ ID NO: 1700565 - RNA, 19 nt, Artificial Sequence
  Description of Artificial Sequence: Synthetic oligonucleotide
  Sense strand starting at position 1741 of SEQ ID NO: 1561815
cuaacagacugauucgaga

SEQ ID NO: 1700566 - RNA, 19 nt, Artificial Sequence
  Description of Artificial Sequence: Synthetic oligonucleotide
  Antisense strand to SEQ ID NO: 1700565
ucucgaaucagucuguuag

SEQ ID NO: 1700567 - RNA, 19 nt, Artificial Sequence
  Description of Artificial Sequence: Synthetic oligonucleotide
  Sense strand starting at position 2008 of SEQ ID NO: 1561815
cgccguaauggcaagcgaa

SEQ ID NO: 1700568 - RNA, 19 nt, Artificial Sequence
  Description of Artificial Sequence: Synthetic oligonucleotide
  Antisense strand to SEQ ID NO: 1700567
uucgcuugccauuacggcg

SEQ ID NO: 1700569 - RNA, 19 nt, Artificial Sequence
  Description of Artificial Sequence: Synthetic oligonucleotide
  Sense strand starting at position 2053 of SEQ ID NO: 1561815
ucgagaagaucuuuggagu

SEQ ID NO: 1700570 - RNA, 19 nt, Artificial Sequence
  Description of Artificial Sequence: Synthetic oligonucleotide
  Antisense strand to SEQ ID NO: 1700569
acuccaaagaucuucucga

SEQ ID NO: 1700571 - RNA, 19 nt, Artificial Sequence
  Description of Artificial Sequence: Synthetic oligonucleotide
  Sense strand starting at position 2054 of SEQ ID NO: 1561815
cgagaagaucuuuggagua

SEQ ID NO: 1700572 - RNA, 19 nt, Artificial Sequence
  Description of Artificial Sequence: Synthetic oligonucleotide
  Antisense strand to SEQ ID NO: 1700571
uacuccaaagaucuucucg

SEQ ID NO: 1700573 - RNA, 19 nt, Artificial Sequence
  Description of Artificial Sequence: Synthetic oligonucleotide
  Sense strand starting at position 2592 of SEQ ID NO: 1561815
uauagaggccuccagugaa

SEQ ID NO: 1700574 - RNA, 19 nt, Artificial Sequence
  Description of Artificial Sequence: Synthetic oligonucleotide
  Antisense strand to SEQ ID NO: 1700573
uucacuggaggccucuaua

SEQ ID NO: 1700575 - RNA, 19 nt, Artificial Sequence
  Description of Artificial Sequence: Synthetic oligonucleotide
  Sense strand starting at position 2760 of SEQ ID NO: 1561815
aaaggugacuaguccaauu

SEQ ID NO: 1700576 - RNA, 19 nt, Artificial Sequence
  Description of Artificial Sequence: Synthetic oligonucleotide
  Antisense strand to SEQ ID NO: 1700575
aauuggacuagucaccuuu

SEQ ID NO: 1700577 - RNA, 19 nt, Artificial Sequence
  Description of Artificial Sequence: Synthetic oligonucleotide
  Sense strand starting at position 2803 of SEQ ID NO: 1561815
aguauagugacuuaguaug

SEQ ID NO: 1700578 - RNA, 19 nt, Artificial Sequence
  Description of Artificial Sequence: Synthetic oligonucleotide
  Antisense strand to SEQ ID NO: 1700577
cauacuaagucacuauacu

SEQ ID NO: 1700579 - RNA, 19 nt, Artificial Sequence
  Description of Artificial Sequence: Synthetic oligonucleotide
  Sense strand starting at position 2805 of SEQ ID NO: 1561815
uauagugacuuaguaugaa

SEQ ID NO: 1700580 - RNA, 19 nt, Artificial Sequence
  Description of Artificial Sequence: Synthetic oligonucleotide
  Antisense strand to SEQ ID NO: 1700579
uucauacuaagucacuaua

SEQ ID NO: 1700581 - RNA, 19 nt, Artificial Sequence
  Description of Artificial Sequence: Synthetic oligonucleotide
  Sense strand starting at position 2886 of SEQ ID NO: 1561815
uugauauauugggucacau

SEQ ID NO: 1700582 - RNA, 19 nt, Artificial Sequence
  Description of Artificial Sequence: Synthetic oligonucleotide
  Antisense strand to SEQ ID NO: 1700581
augugacccaauauaucaa

SEQ ID NO: 1700583 - RNA, 19 nt, Artificial Sequence
  Description of Artificial Sequence: Synthetic oligonucleotide
  Sense strand starting at position 2965 of SEQ ID NO: 1561815
uucuuauguggcuacuaga

SEQ ID NO: 1700584 - RNA, 19 nt, Artificial Sequence
  Description of Artificial Sequence: Synthetic oligonucleotide
  Antisense strand to SEQ ID NO: 1700583
ucuaguagccacauaagaa

SEQ ID NO: 1700585 - RNA, 19 nt, Artificial Sequence
  Description of Artificial Sequence: Synthetic oligonucleotide
  Sense strand starting at position 3063 of SEQ ID NO: 1561815
aguggagugaucugacuua

SEQ ID NO: 1700586 - RNA, 19 nt, Artificial Sequence
  Description of Artificial Sequence: Synthetic oligonucleotide
  Antisense strand to SEQ ID NO: 1700585
uaagucagaucacuccacu

SEQ ID NO: 1700587 - RNA, 19 nt, Artificial Sequence
  Description of Artificial Sequence: Synthetic oligonucleotide
  Sense strand starting at position 3163 of SEQ ID NO: 1561815
gacugaggguuucuacuuu

SEQ ID NO: 1700588 - RNA, 19 nt, Artificial Sequence
  Description of Artificial Sequence: Synthetic oligonucleotide
  Antisense strand to SEQ ID NO: 1700587
aaaguagaaacccucaguc

SEQ ID NO: 1700589 - RNA, 19 nt, Artificial Sequence
  Description of Artificial Sequence: Synthetic oligonucleotide
  Sense strand starting at position 3240 of SEQ ID NO: 1561815
guuggagucaaguauaaug

SEQ ID NO: 1700590 - RNA, 19 nt, Artificial Sequence
  Description of Artificial Sequence: Synthetic oligonucleotide
  Antisense strand to SEQ ID NO: 1700589
cauuauacuugacuccaac

SEQ ID NO: 1700591 - RNA, 19 nt, Artificial Sequence
  Description of Artificial Sequence: Synthetic oligonucleotide
  Sense strand starting at position 3329 of SEQ ID NO: 1561815
cagggugucuuucucagga

SEQ ID NO: 1700592 - RNA, 19 nt, Artificial Sequence
  Description of Artificial Sequence: Synthetic oligonucleotide
  Antisense strand to SEQ ID NO: 1700591
uccugagaaagacacccug

SEQ ID NO: 1700593 - RNA, 19 nt, Artificial Sequence
  Description of Artificial Sequence: Synthetic oligonucleotide
  Sense strand starting at position 3334 of SEQ ID NO: 1561815
ugucuuucucaggaagucu

SEQ ID NO: 1700594 - RNA, 19 nt, Artificial Sequence
  Description of Artificial Sequence: Synthetic oligonucleotide
  Antisense strand to SEQ ID NO: 1700593
agacuuccugagaaagaca

SEQ ID NO: 1700595 - RNA, 19 nt, Artificial Sequence
  Description of Artificial Sequence: Synthetic oligonucleotide
  Sense strand starting at position 3356 of SEQ ID NO: 1561815
gcugguaaugucuauuaua

SEQ ID NO: 1700596 - RNA, 19 nt, Artificial Sequence
  Description of Artificial Sequence: Synthetic oligonucleotide
  Antisense strand to SEQ ID NO: 1700595
uauaauagacauuaccagc

SEQ ID NO: 1700597 - RNA, 19 nt, Artificial Sequence
  Description of Artificial Sequence: Synthetic oligonucleotide
  Sense strand starting at position 3437 of SEQ ID NO: 1561815
ugcugaugucguguacuua

SEQ ID NO: 1700598 - RNA, 19 nt, Artificial Sequence
  Description of Artificial Sequence: Synthetic oligonucleotide
  Antisense strand to SEQ ID NO: 1700597
uaaguacacgacaucagca

SEQ ID NO: 1700599 - RNA, 19 nt, Artificial Sequence
  Description of Artificial Sequence: Synthetic oligonucleotide
  Sense strand starting at position 3593 of SEQ ID NO: 1561815
ucauauuaggaaugacgua

SEQ ID NO: 1700600 - RNA, 19 nt, Artificial Sequence
  Description of Artificial Sequence: Synthetic oligonucleotide
  Antisense strand to SEQ ID NO: 1700599
uacgucauuccuaauauga

SEQ ID NO: 1700601 - RNA, 19 nt, Artificial Sequence
  Description of Artificial Sequence: Synthetic oligonucleotide
  Sense strand starting at position 3720 of SEQ ID NO: 1561815
gguguuuaugagggaauga

SEQ ID NO: 1700602 - RNA, 19 nt, Artificial Sequence
  Description of Artificial Sequence: Synthetic oligonucleotide
  Antisense strand to SEQ ID NO: 1700601
ucauucccucauaaacacc

SEQ ID NO: 1700603 - RNA, 19 nt, Artificial Sequence
  Description of Artificial Sequence: Synthetic oligonucleotide
  Sense strand starting at position 3807 of SEQ ID NO: 1561815
uggugcuuaccuuaugacu

SEQ ID NO: 1700604 - RNA, 19 nt, Artificial Sequence
  Description of Artificial Sequence: Synthetic oligonucleotide
  Antisense strand to SEQ ID NO: 1700603
agucauaagguaagcacca

SEQ ID NO: 1700605 - RNA, 19 nt, Artificial Sequence
  Description of Artificial Sequence: Synthetic oligonucleotide
  Sense strand starting at position 112 of SEQ ID NO: 1561816
uugaacuucuugucaugaa

SEQ ID NO: 1700606 - RNA, 19 nt, Artificial Sequence
  Description of Artificial Sequence: Synthetic oligonucleotide
  Antisense strand to SEQ ID NO: 1700605
uucaugacaagaaguucaa

SEQ ID NO: 1700607 - RNA, 19 nt, Artificial Sequence
  Description of Artificial Sequence: Synthetic oligonucleotide
  Sense strand starting at position 125 of SEQ ID NO: 1561816
caugaaacauggcucgaaa

SEQ ID NO: 1700608 - RNA, 19 nt, Artificial Sequence
  Description of Artificial Sequence: Synthetic oligonucleotide
  Antisense strand to SEQ ID NO: 1700607
uuucgagccauguuucaug

SEQ ID NO: 1700609 - RNA, 19 nt, Artificial Sequence
  Description of Artificial Sequence: Synthetic oligonucleotide
  Sense strand starting at position 127 of SEQ ID NO: 1561816
ugaaacauggcucgaaauc

SEQ ID NO: 1700610 - RNA, 19 nt, Artificial Sequence
  Description of Artificial Sequence: Synthetic oligonucleotide
  Antisense strand to SEQ ID NO: 1700609
gauuucgagccauguuuca

SEQ ID NO: 1700611 - RNA, 19 nt, Artificial Sequence
  Description of Artificial Sequence: Synthetic oligonucleotide
  Sense strand starting at position 128 of SEQ ID NO: 1561816
gaaacauggcucgaaaucu

SEQ ID NO: 1700612 - RNA, 19 nt, Artificial Sequence
  Description of Artificial Sequence: Synthetic oligonucleotide
  Antisense strand to SEQ ID NO: 1700611
agauuucgagccauguuuc

SEQ ID NO: 1700613 - RNA, 19 nt, Artificial Sequence
  Description of Artificial Sequence: Synthetic oligonucleotide
  Sense strand starting at position 221 of SEQ ID NO: 1561816
gcuggucacucauuauuuc

SEQ ID NO: 1700614 - RNA, 19 nt, Artificial Sequence
  Description of Artificial Sequence: Synthetic oligonucleotide
  Antisense strand to SEQ ID NO: 1700613
gaaauaaugagugaccagc

SEQ ID NO: 1700615 - RNA, 19 nt, Artificial Sequence
  Description of Artificial Sequence: Synthetic oligonucleotide
  Sense strand starting at position 271 of SEQ ID NO: 1561816
cgaccaaaugcuugaagaa

SEQ ID NO: 1700616 - RNA, 19 nt, Artificial Sequence
  Description of Artificial Sequence: Synthetic oligonucleotide
  Antisense strand to SEQ ID NO: 1700615
uucuucaagcauuuggucg

SEQ ID NO: 1700617 - RNA, 19 nt, Artificial Sequence
  Description of Artificial Sequence: Synthetic oligonucleotide
  Sense strand starting at position 323 of SEQ ID NO: 1561816
ugguaauaaugguuaguac

SEQ ID NO: 1700618 - RNA, 19 nt, Artificial Sequence
  Description of Artificial Sequence: Synthetic oligonucleotide
  Antisense strand to SEQ ID NO: 1700617
guacuaaccauuauuacca

SEQ ID NO: 1700619 - RNA, 19 nt, Artificial Sequence
  Description of Artificial Sequence: Synthetic oligonucleotide
  Sense strand starting at position 324 of SEQ ID NO: 1561816
gguaauaaugguuaguaca

SEQ ID NO: 1700620 - RNA, 19 nt, Artificial Sequence
  Description of Artificial Sequence: Synthetic oligonucleotide
  Antisense strand to SEQ ID NO: 1700619
uguacuaaccauuauuacc

SEQ ID NO: 1700621 - RNA, 19 nt, Artificial Sequence
  Description of Artificial Sequence: Synthetic oligonucleotide
  Sense strand starting at position 394 of SEQ ID NO: 1561816
cuaaguuaaguguacauaa

SEQ ID NO: 1700622 - RNA, 19 nt, Artificial Sequence
  Description of Artificial Sequence: Synthetic oligonucleotide
  Antisense strand to SEQ ID NO: 1700621
uuauguacacuuaacuuag

SEQ ID NO: 1700623 - RNA, 19 nt, Artificial Sequence
  Description of Artificial Sequence: Synthetic oligonucleotide
  Sense strand starting at position 540 of SEQ ID NO: 1561816
agcagaaucccagggcuuu

SEQ ID NO: 1700624 - RNA, 19 nt, Artificial Sequence
  Description of Artificial Sequence: Synthetic oligonucleotide
  Antisense strand to SEQ ID NO: 1700623
aaagcccugggauucugcu

SEQ ID NO: 1700625 - RNA, 19 nt, Artificial Sequence
  Description of Artificial Sequence: Synthetic oligonucleotide
  Sense strand starting at position 541 of SEQ ID NO: 1561816
gcagaaucccagggcuuua

SEQ ID NO: 1700626 - RNA, 19 nt, Artificial Sequence
  Description of Artificial Sequence: Synthetic oligonucleotide
  Antisense strand to SEQ ID NO: 1700625
uaaagcccugggauucugc

SEQ ID NO: 1700627 - RNA, 19 nt, Artificial Sequence
  Description of Artificial Sequence: Synthetic oligonucleotide
  Sense strand starting at position 628 of SEQ ID NO: 1561816
uuacuaauugaaggcaaau

SEQ ID NO: 1700628 - RNA, 19 nt, Artificial Sequence
  Description of Artificial Sequence: Synthetic oligonucleotide
  Antisense strand to SEQ ID NO: 1700627
auuugccuucaauuaguaa

SEQ ID NO: 1700629 - RNA, 19 nt, Artificial Sequence
  Description of Artificial Sequence: Synthetic oligonucleotide
  Sense strand starting at position 639 of SEQ ID NO: 1561816
aggcaaauguaguuaagau

SEQ ID NO: 1700630 - RNA, 19 nt, Artificial Sequence
  Description of Artificial Sequence: Synthetic oligonucleotide
  Antisense strand to SEQ ID NO: 1700629
aucuuaacuacauuugccu

SEQ ID NO: 1700631 - RNA, 19 nt, Artificial Sequence
  Description of Artificial Sequence: Synthetic oligonucleotide
  Sense strand starting at position 640 of SEQ ID NO: 1561816
ggcaaauguaguuaagauu

SEQ ID NO: 1700632 - RNA, 19 nt, Artificial Sequence
  Description of Artificial Sequence: Synthetic oligonucleotide
  Antisense strand to SEQ ID NO: 1700631
aaucuuaacuacauuugcc

SEQ ID NO: 1700633 - RNA, 19 nt, Artificial Sequence
  Description of Artificial Sequence: Synthetic oligonucleotide
  Sense strand starting at position 855 of SEQ ID NO: 1561816
ggaggucuuggcuagagug

SEQ ID NO: 1700634 - RNA, 19 nt, Artificial Sequence
  Description of Artificial Sequence: Synthetic oligonucleotide
  Antisense strand to SEQ ID NO: 1700633
cacucuagccaagaccucc

SEQ ID NO: 1700635 - RNA, 19 nt, Artificial Sequence
  Description of Artificial Sequence: Synthetic oligonucleotide
  Sense strand starting at position 1040 of SEQ ID NO: 1561816
ccuuuaguucuguaagacu

SEQ ID NO: 1700636 - RNA, 19 nt, Artificial Sequence
  Description of Artificial Sequence: Synthetic oligonucleotide
  Antisense strand to SEQ ID NO: 1700635
agucuuacagaacuaaagg

SEQ ID NO: 1700637 - RNA, 19 nt, Artificial Sequence
  Description of Artificial Sequence: Synthetic oligonucleotide
  Sense strand starting at position 1344 of SEQ ID NO: 1561816
agcaucucuggaugggaau

SEQ ID NO: 1700638 - RNA, 19 nt, Artificial Sequence
  Description of Artificial Sequence: Synthetic oligonucleotide
  Antisense strand to SEQ ID NO: 1700637
auucccauccagagaugcu

SEQ ID NO: 1700639 - RNA, 19 nt, Artificial Sequence
  Description of Artificial Sequence: Synthetic oligonucleotide
  Sense strand starting at position 1345 of SEQ ID NO: 1561816
gcaucucuggaugggaauu

SEQ ID NO: 1700640 - RNA, 19 nt, Artificial Sequence
  Description of Artificial Sequence: Synthetic oligonucleotide
  Antisense strand to SEQ ID NO: 1700639
aauucccauccagagaugc

SEQ ID NO: 1700641 - RNA, 19 nt, Artificial Sequence
  Description of Artificial Sequence: Synthetic oligonucleotide
  Sense strand starting at position 1482 of SEQ ID NO: 1561816
aagcuaucgcuggugcauu

SEQ ID NO: 1700642 - RNA, 19 nt, Artificial Sequence
  Description of Artificial Sequence: Synthetic oligonucleotide
  Antisense strand to SEQ ID NO: 1700641
aaugcaccagcgauagcuu

SEQ ID NO: 1700643 - RNA, 19 nt, Artificial Sequence
  Description of Artificial Sequence: Synthetic oligonucleotide
  Sense strand starting at position 1572 of SEQ ID NO: 1561816
ggagaaguacugcauguau

SEQ ID NO: 1700644 - RNA, 19 nt, Artificial Sequence
  Description of Artificial Sequence: Synthetic oligonucleotide
  Antisense strand to SEQ ID NO: 1700643
auacaugcaguacuucucc

SEQ ID NO: 1700645 - RNA, 19 nt, Artificial Sequence
  Description of Artificial Sequence: Synthetic oligonucleotide
  Sense strand starting at position 1788 of SEQ ID NO: 1561816
cuaacagacugauucgaga

SEQ ID NO: 1700646 - RNA, 19 nt, Artificial Sequence
  Description of Artificial Sequence: Synthetic oligonucleotide
  Antisense strand to SEQ ID NO: 1700645
ucucgaaucagucuguuag

SEQ ID NO: 1700647 - RNA, 19 nt, Artificial Sequence
  Description of Artificial Sequence: Synthetic oligonucleotide
  Sense strand starting at position 2055 of SEQ ID NO: 1561816
cgccguaauggcaagcgaa

SEQ ID NO: 1700648 - RNA, 19 nt, Artificial Sequence
  Description of Artificial Sequence: Synthetic oligonucleotide
  Antisense strand to SEQ ID NO: 1700647
uucgcuugccauuacggcg

SEQ ID NO: 1700649 - RNA, 19 nt, Artificial Sequence
  Description of Artificial Sequence: Synthetic oligonucleotide
  Sense strand starting at position 2100 of SEQ ID NO: 1561816
ucgagaagaucuuuggagu

SEQ ID NO: 1700650 - RNA, 19 nt, Artificial Sequence
  Description of Artificial Sequence: Synthetic oligonucleotide
  Antisense strand to SEQ ID NO: 1700649
acuccaaagaucuucucga

SEQ ID NO: 1700651 - RNA, 19 nt, Artificial Sequence
  Description of Artificial Sequence: Synthetic oligonucleotide
  Sense strand starting at position 2101 of SEQ ID NO: 1561816
cgagaagaucuuuggagua

SEQ ID NO: 1700652 - RNA, 19 nt, Artificial Sequence
  Description of Artificial Sequence: Synthetic oligonucleotide
  Antisense strand to SEQ ID NO: 1700651
uacuccaaagaucuucucg

SEQ ID NO: 1700653 - RNA, 19 nt, Artificial Sequence
  Description of Artificial Sequence: Synthetic oligonucleotide
  Sense strand starting at position 2639 of SEQ ID NO: 1561816
uauagaggccuccagugaa

SEQ ID NO: 1700654 - RNA, 19 nt, Artificial Sequence
  Description of Artificial Sequence: Synthetic oligonucleotide
  Antisense strand to SEQ ID NO: 1700653
uucacuggaggccucuaua

SEQ ID NO: 1700655 - RNA, 19 nt, Artificial Sequence
  Description of Artificial Sequence: Synthetic oligonucleotide
  Sense strand starting at position 2807 of SEQ ID NO: 1561816
aaaggugacuaguccaauu

SEQ ID NO: 1700656 - RNA, 19 nt, Artificial Sequence
  Description of Artificial Sequence: Synthetic oligonucleotide
  Antisense strand to SEQ ID NO: 1700655
aauuggacuagucaccuuu

SEQ ID NO: 1700657 - RNA, 19 nt, Artificial Sequence
  Description of Artificial Sequence: Synthetic oligonucleotide
  Sense strand starting at position 2850 of SEQ ID NO: 1561816
aguauagugacuuaguaug

SEQ ID NO: 1700658 - RNA, 19 nt, Artificial Sequence
  Description of Artificial Sequence: Synthetic oligonucleotide
  Antisense strand to SEQ ID NO: 1700657
cauacuaagucacuauacu

SEQ ID NO: 1700659 - RNA, 19 nt, Artificial Sequence
  Description of Artificial Sequence: Synthetic oligonucleotide
  Sense strand starting at position 2852 of SEQ ID NO: 1561816
uauagugacuuaguaugaa

SEQ ID NO: 1700660 - RNA, 19 nt, Artificial Sequence
  Description of Artificial Sequence: Synthetic oligonucleotide
  Antisense strand to SEQ ID NO: 1700659
uucauacuaagucacuaua

SEQ ID NO: 1700661 - RNA, 19 nt, Artificial Sequence
  Description of Artificial Sequence: Synthetic oligonucleotide
  Sense strand starting at position 2933 of SEQ ID NO: 1561816
uugauauauugggucacau

SEQ ID NO: 1700662 - RNA, 19 nt, Artificial Sequence
  Description of Artificial Sequence: Synthetic oligonucleotide
  Antisense strand to SEQ ID NO: 1700661
augugacccaauauaucaa

SEQ ID NO: 1700663 - RNA, 19 nt, Artificial Sequence
  Description of Artificial Sequence: Synthetic oligonucleotide
  Sense strand starting at position 3012 of SEQ ID NO: 1561816
uucuuauguggcuacuaga

SEQ ID NO: 1700664 - RNA, 19 nt, Artificial Sequence
  Description of Artificial Sequence: Synthetic oligonucleotide
  Antisense strand to SEQ ID NO: 1700663
ucuaguagccacauaagaa

SEQ ID NO: 1700665 - RNA, 19 nt, Artificial Sequence
  Description of Artificial Sequence: Synthetic oligonucleotide
  Sense strand starting at position 3110 of SEQ ID NO: 1561816
aguggagugaucugacuua

SEQ ID NO: 1700666 - RNA, 19 nt, Artificial Sequence
  Description of Artificial Sequence: Synthetic oligonucleotide
  Antisense strand to SEQ ID NO: 1700665
uaagucagaucacuccacu

SEQ ID NO: 1700667 - RNA, 19 nt, Artificial Sequence
  Description of Artificial Sequence: Synthetic oligonucleotide
  Sense strand starting at position 3210 of SEQ ID NO: 1561816
gacugaggguuucuacuuu

SEQ ID NO: 1700668 - RNA, 19 nt, Artificial Sequence
  Description of Artificial Sequence: Synthetic oligonucleotide
  Antisense strand to SEQ ID NO: 1700667
aaaguagaaacccucaguc

SEQ ID NO: 1700669 - RNA, 19 nt, Artificial Sequence
  Description of Artificial Sequence: Synthetic oligonucleotide
  Sense strand starting at position 3287 of SEQ ID NO: 1561816
guuggagucaaguauaaug

SEQ ID NO: 1700670 - RNA, 19 nt, Artificial Sequence
  Description of Artificial Sequence: Synthetic oligonucleotide
  Antisense strand to SEQ ID NO: 1700669
cauuauacuugacuccaac

SEQ ID NO: 1700671 - RNA, 19 nt, Artificial Sequence
  Description of Artificial Sequence: Synthetic oligonucleotide
  Sense strand starting at position 3376 of SEQ ID NO: 1561816
cagggugucuuucucagga

SEQ ID NO: 1700672 - RNA, 19 nt, Artificial Sequence
  Description of Artificial Sequence: Synthetic oligonucleotide
  Antisense strand to SEQ ID NO: 1700671
uccugagaaagacacccug

SEQ ID NO: 1700673 - RNA, 19 nt, Artificial Sequence
  Description of Artificial Sequence: Synthetic oligonucleotide
  Sense strand starting at position 3381 of SEQ ID NO: 1561816
ugucuuucucaggaagucu

SEQ ID NO: 1700674 - RNA, 19 nt, Artificial Sequence
  Description of Artificial Sequence: Synthetic oligonucleotide
  Antisense strand to SEQ ID NO: 1700673
agacuuccugagaaagaca

SEQ ID NO: 1700675 - RNA, 19 nt, Artificial Sequence
  Description of Artificial Sequence: Synthetic oligonucleotide
  Sense strand starting at position 3403 of SEQ ID NO: 1561816
gcugguaaugucuauuaua

SEQ ID NO: 1700676 - RNA, 19 nt, Artificial Sequence
  Description of Artificial Sequence: Synthetic oligonucleotide
  Antisense strand to SEQ ID NO: 1700675
uauaauagacauuaccagc

SEQ ID NO: 1700677 - RNA, 19 nt, Artificial Sequence
  Description of Artificial Sequence: Synthetic oligonucleotide
  Sense strand starting at position 3484 of SEQ ID NO: 1561816
ugcugaugucguguacuua

SEQ ID NO: 1700678 - RNA, 19 nt, Artificial Sequence
  Description of Artificial Sequence: Synthetic oligonucleotide
  Antisense strand to SEQ ID NO: 1700677
uaaguacacgacaucagca

SEQ ID NO: 1700679 - RNA, 19 nt, Artificial Sequence
  Description of Artificial Sequence: Synthetic oligonucleotide
  Sense strand starting at position 3640 of SEQ ID NO: 1561816
ucauauuaggaaugacgua

SEQ ID NO: 1700680 - RNA, 19 nt, Artificial Sequence
  Description of Artificial Sequence: Synthetic oligonucleotide
  Antisense strand to SEQ ID NO: 1700679
uacgucauuccuaauauga

SEQ ID NO: 1700681 - RNA, 19 nt, Artificial Sequence
  Description of Artificial Sequence: Synthetic oligonucleotide
  Sense strand starting at position 3767 of SEQ ID NO: 1561816
gguguuuaugagggaauga

SEQ ID NO: 1700682 - RNA, 19 nt, Artificial Sequence
  Description of Artificial Sequence: Synthetic oligonucleotide
  Antisense strand to SEQ ID NO: 1700681
ucauucccucauaaacacc

SEQ ID NO: 1700683 - RNA, 19 nt, Artificial Sequence
  Description of Artificial Sequence: Synthetic oligonucleotide
  Sense strand starting at position 3854 of SEQ ID NO: 1561816
uggugcuuaccuuaugacu

SEQ ID NO: 1700684 - RNA, 19 nt, Artificial Sequence
  Description of Artificial Sequence: Synthetic oligonucleotide
  Antisense strand to SEQ ID NO: 1700683
agucauaagguaagcacca

SEQ ID NO: 1700685 - RNA, 19 nt, Artificial Sequence
  Description of Artificial Sequence: Synthetic oligonucleotide
  Sense strand starting at position 36 of SEQ ID NO: 1561817
gugugagagugucuaaaug

SEQ ID NO: 1700686 - RNA, 19 nt, Artificial Sequence
  Description of Artificial Sequence: Synthetic oligonucleotide
  Antisense strand to SEQ ID NO: 1700685
cauuuagacacucucacac

SEQ ID NO: 1700687 - RNA, 19 nt, Artificial Sequence
  Description of Artificial Sequence: Synthetic oligonucleotide
  Sense strand starting at position 231 of SEQ ID NO: 1561817
ugguuacauguguauguua

SEQ ID NO: 1700688 - RNA, 19 nt, Artificial Sequence
  Description of Artificial Sequence: Synthetic oligonucleotide
  Antisense strand to SEQ ID NO: 1700687
uaacauacacauguaacca

SEQ ID NO: 1700689 - RNA, 19 nt, Artificial Sequence
  Description of Artificial Sequence: Synthetic oligonucleotide
  Sense strand starting at position 274 of SEQ ID NO: 1561817
ugguaaggugcuuacuagu

SEQ ID NO: 1700690 - RNA, 19 nt, Artificial Sequence
  Description of Artificial Sequence: Synthetic oligonucleotide
  Antisense strand to SEQ ID NO: 1700689
acuaguaagcaccuuacca

SEQ ID NO: 1700691 - RNA, 19 nt, Artificial Sequence
  Description of Artificial Sequence: Synthetic oligonucleotide
  Sense strand starting at position 284 of SEQ ID NO: 1561817
cuuacuaguucuguaucua

SEQ ID NO: 1700692 - RNA, 19 nt, Artificial Sequence
  Description of Artificial Sequence: Synthetic oligonucleotide
  Antisense strand to SEQ ID NO: 1700691
uagauacagaacuaguaag

SEQ ID NO: 1700693 - RNA, 19 nt, Artificial Sequence
  Description of Artificial Sequence: Synthetic oligonucleotide
  Sense strand starting at position 285 of SEQ ID NO: 1561817
uuacuaguucuguaucuau

SEQ ID NO: 1700694 - RNA, 19 nt, Artificial Sequence
  Description of Artificial Sequence: Synthetic oligonucleotide
  Antisense strand to SEQ ID NO: 1700693
auagauacagaacuaguaa

SEQ ID NO: 1700695 - RNA, 19 nt, Artificial Sequence
  Description of Artificial Sequence: Synthetic oligonucleotide
  Sense strand starting at position 288 of SEQ ID NO: 1561817
cuaguucuguaucuauuau

SEQ ID NO: 1700696 - RNA, 19 nt, Artificial Sequence
  Description of Artificial Sequence: Synthetic oligonucleotide
  Antisense strand to SEQ ID NO: 1700695
auaauagauacagaacuag

SEQ ID NO: 1700697 - RNA, 19 nt, Artificial Sequence
  Description of Artificial Sequence: Synthetic oligonucleotide
  Sense strand starting at position 348 of SEQ ID NO: 1561817
uuaauagauucgguuugaa

SEQ ID NO: 1700698 - RNA, 19 nt, Artificial Sequence
  Description of Artificial Sequence: Synthetic oligonucleotide
  Antisense strand to SEQ ID NO: 1700697
uucaaaccgaaucuauuaa

SEQ ID NO: 1700699 - RNA, 19 nt, Artificial Sequence
  Description of Artificial Sequence: Synthetic oligonucleotide
  Sense strand starting at position 351 of SEQ ID NO: 1561817
auagauucgguuugaaaua

SEQ ID NO: 1700700 - RNA, 19 nt, Artificial Sequence
  Description of Artificial Sequence: Synthetic oligonucleotide
  Antisense strand to SEQ ID NO: 1700699
uauuucaaaccgaaucuau

SEQ ID NO: 1700701 - RNA, 19 nt, Artificial Sequence
  Description of Artificial Sequence: Synthetic oligonucleotide
  Sense strand starting at position 369 of SEQ ID NO: 1561817
acaauuguccacugguuau

SEQ ID NO: 1700702 - RNA, 19 nt, Artificial Sequence
  Description of Artificial Sequence: Synthetic oligonucleotide
  Antisense strand to SEQ ID NO: 1700701
auaaccaguggacaauugu

SEQ ID NO: 1700703 - RNA, 19 nt, Artificial Sequence
  Description of Artificial Sequence: Synthetic oligonucleotide
  Sense strand starting at position 372 of SEQ ID NO: 1561817
auuguccacugguuauaau

SEQ ID NO: 1700704 - RNA, 19 nt, Artificial Sequence
  Description of Artificial Sequence: Synthetic oligonucleotide
  Antisense strand to SEQ ID NO: 1700703
auuauaaccaguggacaau

SEQ ID NO: 1700705 - RNA, 19 nt, Artificial Sequence
  Description of Artificial Sequence: Synthetic oligonucleotide
  Sense strand starting at position 373 of SEQ ID NO: 1561817
uuguccacugguuauaauu

SEQ ID NO: 1700706 - RNA, 19 nt, Artificial Sequence
  Description of Artificial Sequence: Synthetic oligonucleotide
  Antisense strand to SEQ ID NO: 1700705
aauuauaaccaguggacaa

SEQ ID NO: 1700707 - RNA, 19 nt, Artificial Sequence
  Description of Artificial Sequence: Synthetic oligonucleotide
  Sense strand starting at position 381 of SEQ ID NO: 1561817
ugguuauaauuuccuuugu

SEQ ID NO: 1700708 - RNA, 19 nt, Artificial Sequence
  Description of Artificial Sequence: Synthetic oligonucleotide
  Antisense strand to SEQ ID NO: 1700707
acaaaggaaauuauaacca

SEQ ID NO: 1700709 - RNA, 19 nt, Artificial Sequence
  Description of Artificial Sequence: Synthetic oligonucleotide
  Sense strand starting at position 387 of SEQ ID NO: 1561817
uaauuuccuuuguaaggga

SEQ ID NO: 1700710 - RNA, 19 nt, Artificial Sequence
  Description of Artificial Sequence: Synthetic oligonucleotide
  Antisense strand to SEQ ID NO: 1700709
ucccuuacaaaggaaauua

SEQ ID NO: 1700711 - RNA, 19 nt, Artificial Sequence
  Description of Artificial Sequence: Synthetic oligonucleotide
  Sense strand starting at position 441 of SEQ ID NO: 1561817
cuuacaugauguuuguaaa

SEQ ID NO: 1700712 - RNA, 19 nt, Artificial Sequence
  Description of Artificial Sequence: Synthetic oligonucleotide
  Antisense strand to SEQ ID NO: 1700711
uuuacaaacaucauguaag

SEQ ID NO: 1700713 - RNA, 19 nt, Artificial Sequence
  Description of Artificial Sequence: Synthetic oligonucleotide
  Sense strand starting at position 557 of SEQ ID NO: 1561817
uuuauaccuccacguuaua

SEQ ID NO: 1700714 - RNA, 19 nt, Artificial Sequence
  Description of Artificial Sequence: Synthetic oligonucleotide
  Antisense strand to SEQ ID NO: 1700713
uauaacguggagguauaaa

SEQ ID NO: 1700715 - RNA, 19 nt, Artificial Sequence
  Description of Artificial Sequence: Synthetic oligonucleotide
  Sense strand starting at position 829 of SEQ ID NO: 1561817
cuaguauuccuugagcuua

SEQ ID NO: 1700716 - RNA, 19 nt, Artificial Sequence
  Description of Artificial Sequence: Synthetic oligonucleotide
  Antisense strand to SEQ ID NO: 1700715
uaagcucaaggaauacuag

SEQ ID NO: 1700717 - RNA, 19 nt, Artificial Sequence
  Description of Artificial Sequence: Synthetic oligonucleotide
  Sense strand starting at position 831 of SEQ ID NO: 1561817
aguauuccuugagcuuaua

SEQ ID NO: 1700718 - RNA, 19 nt, Artificial Sequence
  Description of Artificial Sequence: Synthetic oligonucleotide
  Antisense strand to SEQ ID NO: 1700717
uauaagcucaaggaauacu

SEQ ID NO: 1700719 - RNA, 19 nt, Artificial Sequence
  Description of Artificial Sequence: Synthetic oligonucleotide
  Sense strand starting at position 912 of SEQ ID NO: 1561817
ccguuuaaccuccagacuu

SEQ ID NO: 1700720 - RNA, 19 nt, Artificial Sequence
  Description of Artificial Sequence: Synthetic oligonucleotide
  Antisense strand to SEQ ID NO: 1700719
aagucuggagguuaaacgg

SEQ ID NO: 1700721 - RNA, 19 nt, Artificial Sequence
  Description of Artificial Sequence: Synthetic oligonucleotide
  Sense strand starting at position 2231 of SEQ ID NO: 1561817
cugagagacucagcuagaa

SEQ ID NO: 1700722 - RNA, 19 nt, Artificial Sequence
  Description of Artificial Sequence: Synthetic oligonucleotide
  Antisense strand to SEQ ID NO: 1700721
uucuagcugagucucucag

SEQ ID NO: 1700723 - RNA, 19 nt, Artificial Sequence
  Description of Artificial Sequence: Synthetic oligonucleotide
  Sense strand starting at position 2349 of SEQ ID NO: 1561817
guuagaguuacagggagaa

SEQ ID NO: 1700724 - RNA, 19 nt, Artificial Sequence
  Description of Artificial Sequence: Synthetic oligonucleotide
  Antisense strand to SEQ ID NO: 1700723
uucucccuguaacucuaac

SEQ ID NO: 1700725 - RNA, 19 nt, Artificial Sequence
  Description of Artificial Sequence: Synthetic oligonucleotide
  Sense strand starting at position 2563 of SEQ ID NO: 1561817
gagcuuaacugguuuagug

SEQ ID NO: 1700726 - RNA, 19 nt, Artificial Sequence
  Description of Artificial Sequence: Synthetic oligonucleotide
  Antisense strand to SEQ ID NO: 1700725
cacuaaaccaguuaagcuc

SEQ ID NO: 1700727 - RNA, 19 nt, Artificial Sequence
  Description of Artificial Sequence: Synthetic oligonucleotide
  Sense strand starting at position 2565 of SEQ ID NO: 1561817
gcuuaacugguuuagugaa

SEQ ID NO: 1700728 - RNA, 19 nt, Artificial Sequence
  Description of Artificial Sequence: Synthetic oligonucleotide
  Antisense strand to SEQ ID NO: 1700727
uucacuaaaccaguuaagc

SEQ ID NO: 1700729 - RNA, 19 nt, Artificial Sequence
  Description of Artificial Sequence: Synthetic oligonucleotide
  Sense strand starting at position 2674 of SEQ ID NO: 1561817
cuggcaaugaacuguguua

SEQ ID NO: 1700730 - RNA, 19 nt, Artificial Sequence
  Description of Artificial Sequence: Synthetic oligonucleotide
  Antisense strand to SEQ ID NO: 1700729
uaacacaguucauugccag

SEQ ID NO: 1700731 - RNA, 19 nt, Artificial Sequence
  Description of Artificial Sequence: Synthetic oligonucleotide
  Sense strand starting at position 2676 of SEQ ID NO: 1561817
ggcaaugaacuguguuaau

SEQ ID NO: 1700732 - RNA, 19 nt, Artificial Sequence
  Description of Artificial Sequence: Synthetic oligonucleotide
  Antisense strand to SEQ ID NO: 1700731
auuaacacaguucauugcc

SEQ ID NO: 1700733 - RNA, 19 nt, Artificial Sequence
  Description of Artificial Sequence: Synthetic oligonucleotide
  Sense strand starting at position 2742 of SEQ ID NO: 1561817
uaugaauuccaccguggga

SEQ ID NO: 1700734 - RNA, 19 nt, Artificial Sequence
  Description of Artificial Sequence: Synthetic oligonucleotide
  Antisense strand to SEQ ID NO: 1700733
ucccacgguggaauucaua

SEQ ID NO: 1700735 - RNA, 19 nt, Artificial Sequence
  Description of Artificial Sequence: Synthetic oligonucleotide
  Sense strand starting at position 2744 of SEQ ID NO: 1561817
ugaauuccaccgugggaca

SEQ ID NO: 1700736 - RNA, 19 nt, Artificial Sequence
  Description of Artificial Sequence: Synthetic oligonucleotide
  Antisense strand to SEQ ID NO: 1700735
ugucccacgguggaauuca

SEQ ID NO: 1700737 - RNA, 19 nt, Artificial Sequence
  Description of Artificial Sequence: Synthetic oligonucleotide
  Sense strand starting at position 2800 of SEQ ID NO: 1561817
gucauuucuuaagugcagu

SEQ ID NO: 1700738 - RNA, 19 nt, Artificial Sequence
  Description of Artificial Sequence: Synthetic oligonucleotide
  Antisense strand to SEQ ID NO: 1700737
acugcacuuaagaaaugac

SEQ ID NO: 1700739 - RNA, 19 nt, Artificial Sequence
  Description of Artificial Sequence: Synthetic oligonucleotide
  Sense strand starting at position 2859 of SEQ ID NO: 1561817
cgaggaaucaguugcagua

SEQ ID NO: 1700740 - RNA, 19 nt, Artificial Sequence
  Description of Artificial Sequence: Synthetic oligonucleotide
  Antisense strand to SEQ ID NO: 1700739
uacugcaacugauuccucg

SEQ ID NO: 1700741 - RNA, 19 nt, Artificial Sequence
  Description of Artificial Sequence: Synthetic oligonucleotide
  Sense strand starting at position 2886 of SEQ ID NO: 1561817
augcgauugguuguacgua

SEQ ID NO: 1700742 - RNA, 19 nt, Artificial Sequence
  Description of Artificial Sequence: Synthetic oligonucleotide
  Antisense strand to SEQ ID NO: 1700741
uacguacaaccaaucgcau

SEQ ID NO: 1700743 - RNA, 19 nt, Artificial Sequence
  Description of Artificial Sequence: Synthetic oligonucleotide
  Sense strand starting at position 2888 of SEQ ID NO: 1561817
gcgauugguuguacguacu

SEQ ID NO: 1700744 - RNA, 19 nt, Artificial Sequence
  Description of Artificial Sequence: Synthetic oligonucleotide
  Antisense strand to SEQ ID NO: 1700743
aguacguacaaccaaucgc

SEQ ID NO: 1700745 - RNA, 19 nt, Artificial Sequence
  Description of Artificial Sequence: Synthetic oligonucleotide
  Sense strand starting at position 2891 of SEQ ID NO: 1561817
auugguuguacguacuuau

SEQ ID NO: 1700746 - RNA, 19 nt, Artificial Sequence
  Description of Artificial Sequence: Synthetic oligonucleotide
  Antisense strand to SEQ ID NO: 1700745
auaaguacguacaaccaau

SEQ ID NO: 1700747 - RNA, 19 nt, Artificial Sequence
  Description of Artificial Sequence: Synthetic oligonucleotide
  Sense strand starting at position 2895 of SEQ ID NO: 1561817
guuguacguacuuauauuu

SEQ ID NO: 1700748 - RNA, 19 nt, Artificial Sequence
  Description of Artificial Sequence: Synthetic oligonucleotide
  Antisense strand to SEQ ID NO: 1700747
aaauauaaguacguacaac

SEQ ID NO: 1700749 - RNA, 19 nt, Artificial Sequence
  Description of Artificial Sequence: Synthetic oligonucleotide
  Sense strand starting at position 2934 of SEQ ID NO: 1561817
ccgaaauuccaauguaacc

SEQ ID NO: 1700750 - RNA, 19 nt, Artificial Sequence
  Description of Artificial Sequence: Synthetic oligonucleotide
  Antisense strand to SEQ ID NO: 1700749
gguuacauuggaauuucgg

SEQ ID NO: 1700751 - RNA, 19 nt, Artificial Sequence
  Description of Artificial Sequence: Synthetic oligonucleotide
  Sense strand starting at position 3107 of SEQ ID NO: 1561817
cugagccaggaaugaaauu

SEQ ID NO: 1700752 - RNA, 19 nt, Artificial Sequence
  Description of Artificial Sequence: Synthetic oligonucleotide
  Antisense strand to SEQ ID NO: 1700751
aauuucauuccuggcucag

SEQ ID NO: 1700753 - RNA, 19 nt, Artificial Sequence
  Description of Artificial Sequence: Synthetic oligonucleotide
  Sense strand starting at position 3185 of SEQ ID NO: 1561817
guaaguuuacaggagcuga

SEQ ID NO: 1700754 - RNA, 19 nt, Artificial Sequence
  Description of Artificial Sequence: Synthetic oligonucleotide
  Antisense strand to SEQ ID NO: 1700753
ucagcuccuguaaacuuac

SEQ ID NO: 1700755 - RNA, 19 nt, Artificial Sequence
  Description of Artificial Sequence: Synthetic oligonucleotide
  Sense strand starting at position 3423 of SEQ ID NO: 1561817
gaaaguugaguugggaauu

SEQ ID NO: 1700756 - RNA, 19 nt, Artificial Sequence
  Description of Artificial Sequence: Synthetic oligonucleotide
  Antisense strand to SEQ ID NO: 1700755
aauucccaacucaacuuuc

SEQ ID NO: 1700757 - RNA, 19 nt, Artificial Sequence
  Description of Artificial Sequence: Synthetic oligonucleotide
  Sense strand starting at position 3478 of SEQ ID NO: 1561817
uugaauuuguugugauuuc

SEQ ID NO: 1700758 - RNA, 19 nt, Artificial Sequence
  Description of Artificial Sequence: Synthetic oligonucleotide
  Antisense strand to SEQ ID NO: 1700757
gaaaucacaacaaauucaa

SEQ ID NO: 1700759 - RNA, 19 nt, Artificial Sequence
  Description of Artificial Sequence: Synthetic oligonucleotide
  Sense strand starting at position 3479 of SEQ ID NO: 1561817
ugaauuuguugugauuucu

SEQ ID NO: 1700760 - RNA, 19 nt, Artificial Sequence
  Description of Artificial Sequence: Synthetic oligonucleotide
  Antisense strand to SEQ ID NO: 1700759
agaaaucacaacaaauuca

SEQ ID NO: 1700761 - RNA, 19 nt, Artificial Sequence
  Description of Artificial Sequence: Synthetic oligonucleotide
  Sense strand starting at position 3766 of SEQ ID NO: 1561817
auauguacuuggccuugau

SEQ ID NO: 1700762 - RNA, 19 nt, Artificial Sequence
  Description of Artificial Sequence: Synthetic oligonucleotide
  Antisense strand to SEQ ID NO: 1700761
aucaaggccaaguacauau

SEQ ID NO: 1700763 - RNA, 19 nt, Artificial Sequence
  Description of Artificial Sequence: Synthetic oligonucleotide
  Sense strand starting at position 3845 of SEQ ID NO: 1561817
uggagcucaugcucauaaa

SEQ ID NO: 1700764 - RNA, 19 nt, Artificial Sequence
  Description of Artificial Sequence: Synthetic oligonucleotide
  Antisense strand to SEQ ID NO: 1700763
uuuaugagcaugagcucca

SEQ ID NO: 1700765 - RNA, 19 nt, Artificial Sequence
  Description of Artificial Sequence: Synthetic oligonucleotide
  Sense strand starting at position 19 of SEQ ID NO: 1561818
guggccuugcacuaacauu

SEQ ID NO: 1700766 - RNA, 19 nt, Artificial Sequence
  Description of Artificial Sequence: Synthetic oligonucleotide
  Antisense strand to SEQ ID NO: 1700765
aauguuagugcaaggccac

SEQ ID NO: 1700767 - RNA, 19 nt, Artificial Sequence
  Description of Artificial Sequence: Synthetic oligonucleotide
  Sense strand starting at position 549 of SEQ ID NO: 1561818
ucaugaaggcugugugagu

SEQ ID NO: 1700768 - RNA, 19 nt, Artificial Sequence
  Description of Artificial Sequence: Synthetic oligonucleotide
  Antisense strand to SEQ ID NO: 1700767
acucacacagccuucauga

SEQ ID NO: 1700769 - RNA, 19 nt, Artificial Sequence
  Description of Artificial Sequence: Synthetic oligonucleotide
  Sense strand starting at position 550 of SEQ ID NO: 1561818
caugaaggcugugugaguu

SEQ ID NO: 1700770 - RNA, 19 nt, Artificial Sequence
  Description of Artificial Sequence: Synthetic oligonucleotide
  Antisense strand to SEQ ID NO: 1700769
aacucacacagccuucaug

SEQ ID NO: 1700771 - RNA, 19 nt, Artificial Sequence
  Description of Artificial Sequence: Synthetic oligonucleotide
  Sense strand starting at position 590 of SEQ ID NO: 1561818
acaaaugguccaugaacgu

SEQ ID NO: 1700772 - RNA, 19 nt, Artificial Sequence
  Description of Artificial Sequence: Synthetic oligonucleotide
  Antisense strand to SEQ ID NO: 1700771
acguucauggaccauuugu

SEQ ID NO: 1700773 - RNA, 19 nt, Artificial Sequence
  Description of Artificial Sequence: Synthetic oligonucleotide
  Sense strand starting at position 605 of SEQ ID NO: 1561818
acguuaguuucagucuuga

SEQ ID NO: 1700774 - RNA, 19 nt, Artificial Sequence
  Description of Artificial Sequence: Synthetic oligonucleotide
  Antisense strand to SEQ ID NO: 1700773
ucaagacugaaacuaacgu

SEQ ID NO: 1700775 - RNA, 19 nt, Artificial Sequence
  Description of Artificial Sequence: Synthetic oligonucleotide
  Sense strand starting at position 704 of SEQ ID NO: 1561818
ugauacauuugcuaauaag

SEQ ID NO: 1700776 - RNA, 19 nt, Artificial Sequence
  Description of Artificial Sequence: Synthetic oligonucleotide
  Antisense strand to SEQ ID NO: 1700775
cuuauuagcaaauguauca

SEQ ID NO: 1700777 - RNA, 19 nt, Artificial Sequence
  Description of Artificial Sequence: Synthetic oligonucleotide
  Sense strand starting at position 812 of SEQ ID NO: 1561818
cuuucugaguccucggaga

SEQ ID NO: 1700778 - RNA, 19 nt, Artificial Sequence
  Description of Artificial Sequence: Synthetic oligonucleotide
  Antisense strand to SEQ ID NO: 1700777
ucuccgaggacucagaaag

SEQ ID NO: 1700779 - RNA, 19 nt, Artificial Sequence
  Description of Artificial Sequence: Synthetic oligonucleotide
  Sense strand starting at position 814 of SEQ ID NO: 1561818
uucugaguccucggagauc

SEQ ID NO: 1700780 - RNA, 19 nt, Artificial Sequence
  Description of Artificial Sequence: Synthetic oligonucleotide
  Antisense strand to SEQ ID NO: 1700779
gaucuccgaggacucagaa

SEQ ID NO: 1700781 - RNA, 19 nt, Artificial Sequence
  Description of Artificial Sequence: Synthetic oligonucleotide
  Sense strand starting at position 877 of SEQ ID NO: 1561818
guaacucccuuaugaagag

SEQ ID NO: 1700782 - RNA, 19 nt, Artificial Sequence
  Description of Artificial Sequence: Synthetic oligonucleotide
  Antisense strand to SEQ ID NO: 1700781
cucuucauaagggaguuac

SEQ ID NO: 1700783 - RNA, 19 nt, Artificial Sequence
  Description of Artificial Sequence: Synthetic oligonucleotide
  Sense strand starting at position 914 of SEQ ID NO: 1561818
gcaugauucugugugucaa

SEQ ID NO: 1700784 - RNA, 19 nt, Artificial Sequence
  Description of Artificial Sequence: Synthetic oligonucleotide
  Antisense strand to SEQ ID NO: 1700783
uugacacacagaaucaugc

SEQ ID NO: 1700785 - RNA, 19 nt, Artificial Sequence
  Description of Artificial Sequence: Synthetic oligonucleotide
  Sense strand starting at position 915 of SEQ ID NO: 1561818
caugauucugugugucaag

SEQ ID NO: 1700786 - RNA, 19 nt, Artificial Sequence
  Description of Artificial Sequence: Synthetic oligonucleotide
  Antisense strand to SEQ ID NO: 1700785
cuugacacacagaaucaug

SEQ ID NO: 1700787 - RNA, 19 nt, Artificial Sequence
  Description of Artificial Sequence: Synthetic oligonucleotide
  Sense strand starting at position 922 of SEQ ID NO: 1561818
cugugugucaaggauucua

SEQ ID NO: 1700788 - RNA, 19 nt, Artificial Sequence
  Description of Artificial Sequence: Synthetic oligonucleotide
  Antisense strand to SEQ ID NO: 1700787
uagaauccuugacacacag

SEQ ID NO: 1700789 - RNA, 19 nt, Artificial Sequence
  Description of Artificial Sequence: Synthetic oligonucleotide
  Sense strand starting at position 927 of SEQ ID NO: 1561818
ugucaaggauucuaagauu

SEQ ID NO: 1700790 - RNA, 19 nt, Artificial Sequence
  Description of Artificial Sequence: Synthetic oligonucleotide
  Antisense strand to SEQ ID NO: 1700789
aaucuuagaauccuugaca

SEQ ID NO: 1700791 - RNA, 19 nt, Artificial Sequence
  Description of Artificial Sequence: Synthetic oligonucleotide
  Sense strand starting at position 980 of SEQ ID NO: 1561818
gucugacugugacuucgaa

SEQ ID NO: 1700792 - RNA, 19 nt, Artificial Sequence
  Description of Artificial Sequence: Synthetic oligonucleotide
  Antisense strand to SEQ ID NO: 1700791
uucgaagucacagucagac

SEQ ID NO: 1700793 - RNA, 19 nt, Artificial Sequence
  Description of Artificial Sequence: Synthetic oligonucleotide
  Sense strand starting at position 1002 of SEQ ID NO: 1561818
gggcuuaacuucuuagaac

SEQ ID NO: 1700794 - RNA, 19 nt, Artificial Sequence
  Description of Artificial Sequence: Synthetic oligonucleotide
  Antisense strand to SEQ ID NO: 1700793
guucuaagaaguuaagccc

SEQ ID NO: 1700795 - RNA, 19 nt, Artificial Sequence
  Description of Artificial Sequence: Synthetic oligonucleotide
  Sense strand starting at position 1003 of SEQ ID NO: 1561818
ggcuuaacuucuuagaacc

SEQ ID NO: 1700796 - RNA, 19 nt, Artificial Sequence
  Description of Artificial Sequence: Synthetic oligonucleotide
  Antisense strand to SEQ ID NO: 1700795
gguucuaagaaguuaagcc

SEQ ID NO: 1700797 - RNA, 19 nt, Artificial Sequence
  Description of Artificial Sequence: Synthetic oligonucleotide
  Sense strand starting at position 1150 of SEQ ID NO: 1561818
auuccaaagucucugguga

SEQ ID NO: 1700798 - RNA, 19 nt, Artificial Sequence
  Description of Artificial Sequence: Synthetic oligonucleotide
  Antisense strand to SEQ ID NO: 1700797
ucaccagagacuuuggaau

SEQ ID NO: 1700799 - RNA, 19 nt, Artificial Sequence
  Description of Artificial Sequence: Synthetic oligonucleotide
  Sense strand starting at position 1282 of SEQ ID NO: 1561818
ccagaaaugucagucccgu

SEQ ID NO: 1700800 - RNA, 19 nt, Artificial Sequence
  Description of Artificial Sequence: Synthetic oligonucleotide
  Antisense strand to SEQ ID NO: 1700799
acgggacugacauuucugg

SEQ ID NO: 1700801 - RNA, 19 nt, Artificial Sequence
  Description of Artificial Sequence: Synthetic oligonucleotide
  Sense strand starting at position 1432 of SEQ ID NO: 1561818
ggauaugugauccagccag

SEQ ID NO: 1700802 - RNA, 19 nt, Artificial Sequence
  Description of Artificial Sequence: Synthetic oligonucleotide
  Antisense strand to SEQ ID NO: 1700801
cuggcuggaucacauaucc

SEQ ID NO: 1700803 - RNA, 19 nt, Artificial Sequence
  Description of Artificial Sequence: Synthetic oligonucleotide
  Sense strand starting at position 1517 of SEQ ID NO: 1561818
aaggcaaguccagauguga

SEQ ID NO: 1700804 - RNA, 19 nt, Artificial Sequence
  Description of Artificial Sequence: Synthetic oligonucleotide
  Antisense strand to SEQ ID NO: 1700803
ucacaucuggacuugccuu

SEQ ID NO: 1700805 - RNA, 19 nt, Artificial Sequence
  Description of Artificial Sequence: Synthetic oligonucleotide
  Sense strand starting at position 2301 of SEQ ID NO: 1561818
acgcuaacucccuauguga

SEQ ID NO: 1700806 - RNA, 19 nt, Artificial Sequence
  Description of Artificial Sequence: Synthetic oligonucleotide
  Antisense strand to SEQ ID NO: 1700805
ucacauagggaguuagcgu

SEQ ID NO: 1700807 - RNA, 19 nt, Artificial Sequence
  Description of Artificial Sequence: Synthetic oligonucleotide
  Sense strand starting at position 2349 of SEQ ID NO: 1561818
cuccuaacugcaugaugau

SEQ ID NO: 1700808 - RNA, 19 nt, Artificial Sequence
  Description of Artificial Sequence: Synthetic oligonucleotide
  Antisense strand to SEQ ID NO: 1700807
aucaucaugcaguuaggag

SEQ ID NO: 1700809 - RNA, 19 nt, Artificial Sequence
  Description of Artificial Sequence: Synthetic oligonucleotide
  Sense strand starting at position 2358 of SEQ ID NO: 1561818
gcaugaugaugagugaguu

SEQ ID NO: 1700810 - RNA, 19 nt, Artificial Sequence
  Description of Artificial Sequence: Synthetic oligonucleotide
  Antisense strand to SEQ ID NO: 1700809
aacucacucaucaucaugc

SEQ ID NO: 1700811 - RNA, 19 nt, Artificial Sequence
  Description of Artificial Sequence: Synthetic oligonucleotide
  Sense strand starting at position 2359 of SEQ ID NO: 1561818
caugaugaugagugaguua

SEQ ID NO: 1700812 - RNA, 19 nt, Artificial Sequence
  Description of Artificial Sequence: Synthetic oligonucleotide
  Antisense strand to SEQ ID NO: 1700811
uaacucacucaucaucaug

SEQ ID NO: 1700813 - RNA, 19 nt, Artificial Sequence
  Description of Artificial Sequence: Synthetic oligonucleotide
  Sense strand starting at position 2362 of SEQ ID NO: 1561818
gaugaugagugaguuaauu

SEQ ID NO: 1700814 - RNA, 19 nt, Artificial Sequence
  Description of Artificial Sequence: Synthetic oligonucleotide
  Antisense strand to SEQ ID NO: 1700813
aauuaacucacucaucauc

SEQ ID NO: 1700815 - RNA, 19 nt, Artificial Sequence
  Description of Artificial Sequence: Synthetic oligonucleotide
  Sense strand starting at position 2403 of SEQ ID NO: 1561818
ucccgaaauuuacaaagga

SEQ ID NO: 1700816 - RNA, 19 nt, Artificial Sequence
  Description of Artificial Sequence: Synthetic oligonucleotide
  Antisense strand to SEQ ID NO: 1700815
uccuuuguaaauuucggga

SEQ ID NO: 1700817 - RNA, 19 nt, Artificial Sequence
  Description of Artificial Sequence: Synthetic oligonucleotide
  Sense strand starting at position 2503 of SEQ ID NO: 1561818
cuugaaagggauugguuau

SEQ ID NO: 1700818 - RNA, 19 nt, Artificial Sequence
  Description of Artificial Sequence: Synthetic oligonucleotide
  Antisense strand to SEQ ID NO: 1700817
auaaccaaucccuuucaag

SEQ ID NO: 1700819 - RNA, 19 nt, Artificial Sequence
  Description of Artificial Sequence: Synthetic oligonucleotide
  Sense strand starting at position 2509 of SEQ ID NO: 1561818
agggauugguuauauaauu

SEQ ID NO: 1700820 - RNA, 19 nt, Artificial Sequence
  Description of Artificial Sequence: Synthetic oligonucleotide
  Antisense strand to SEQ ID NO: 1700819
aauuauauaaccaaucccu

SEQ ID NO: 1700821 - RNA, 19 nt, Artificial Sequence
  Description of Artificial Sequence: Synthetic oligonucleotide
  Sense strand starting at position 2582 of SEQ ID NO: 1561818
cagaacaagucuugucaag

SEQ ID NO: 1700822 - RNA, 19 nt, Artificial Sequence
  Description of Artificial Sequence: Synthetic oligonucleotide
  Antisense strand to SEQ ID NO: 1700821
cuugacaagacuuguucug

SEQ ID NO: 1700823 - RNA, 19 nt, Artificial Sequence
  Description of Artificial Sequence: Synthetic oligonucleotide
  Sense strand starting at position 2588 of SEQ ID NO: 1561818
aagucuugucaaggcuuau

SEQ ID NO: 1700824 - RNA, 19 nt, Artificial Sequence
  Description of Artificial Sequence: Synthetic oligonucleotide
  Antisense strand to SEQ ID NO: 1700823
auaagccuugacaagacuu

SEQ ID NO: 1700825 - RNA, 19 nt, Artificial Sequence
  Description of Artificial Sequence: Synthetic oligonucleotide
  Sense strand starting at position 2592 of SEQ ID NO: 1561818
cuugucaaggcuuaugaca

SEQ ID NO: 1700826 - RNA, 19 nt, Artificial Sequence
  Description of Artificial Sequence: Synthetic oligonucleotide
  Antisense strand to SEQ ID NO: 1700825
ugucauaagccuugacaag

SEQ ID NO: 1700827 - RNA, 19 nt, Artificial Sequence
  Description of Artificial Sequence: Synthetic oligonucleotide
  Sense strand starting at position 2984 of SEQ ID NO: 1561818
acuuucugaugaggaauau

SEQ ID NO: 1700828 - RNA, 19 nt, Artificial Sequence
  Description of Artificial Sequence: Synthetic oligonucleotide
  Antisense strand to SEQ ID NO: 1700827
auauuccucaucagaaagu

SEQ ID NO: 1700829 - RNA, 19 nt, Artificial Sequence
  Description of Artificial Sequence: Synthetic oligonucleotide
  Sense strand starting at position 3352 of SEQ ID NO: 1561818
gggaaaugcuaaguauuaa

SEQ ID NO: 1700830 - RNA, 19 nt, Artificial Sequence
  Description of Artificial Sequence: Synthetic oligonucleotide
  Antisense strand to SEQ ID NO: 1700829
uuaauacuuagcauuuccc

SEQ ID NO: 1700831 - RNA, 19 nt, Artificial Sequence
  Description of Artificial Sequence: Synthetic oligonucleotide
  Sense strand starting at position 3450 of SEQ ID NO: 1561818
cacuguaaccuagguugaa

SEQ ID NO: 1700832 - RNA, 19 nt, Artificial Sequence
  Description of Artificial Sequence: Synthetic oligonucleotide
  Antisense strand to SEQ ID NO: 1700831
uucaaccuagguuacagug

SEQ ID NO: 1700833 - RNA, 19 nt, Artificial Sequence
  Description of Artificial Sequence: Synthetic oligonucleotide
  Sense strand starting at position 3604 of SEQ ID NO: 1561818
cugaauuucuaggauuaca

SEQ ID NO: 1700834 - RNA, 19 nt, Artificial Sequence
  Description of Artificial Sequence: Synthetic oligonucleotide
  Antisense strand to SEQ ID NO: 1700833
uguaauccuagaaauucag

SEQ ID NO: 1700835 - RNA, 19 nt, Artificial Sequence
  Description of Artificial Sequence: Synthetic oligonucleotide
  Sense strand starting at position 3847 of SEQ ID NO: 1561818
gggccuuuaaggugaggaa

SEQ ID NO: 1700836 - RNA, 19 nt, Artificial Sequence
  Description of Artificial Sequence: Synthetic oligonucleotide
  Antisense strand to SEQ ID NO: 1700835
uuccucaccuuaaaggccc

SEQ ID NO: 1700837 - RNA, 19 nt, Artificial Sequence
  Description of Artificial Sequence: Synthetic oligonucleotide
  Sense strand starting at position 3850 of SEQ ID NO: 1561818
ccuuuaaggugaggaaauu

SEQ ID NO: 1700838 - RNA, 19 nt, Artificial Sequence
  Description of Artificial Sequence: Synthetic oligonucleotide
  Antisense strand to SEQ ID NO: 1700837
aauuuccucaccuuaaagg

SEQ ID NO: 1700839 - RNA, 19 nt, Artificial Sequence
  Description of Artificial Sequence: Synthetic oligonucleotide
  Sense strand starting at position 3941 of SEQ ID NO: 1561818
cuuuguuuggauugccaau

SEQ ID NO: 1700840 - RNA, 19 nt, Artificial Sequence
  Description of Artificial Sequence: Synthetic oligonucleotide
  Antisense strand to SEQ ID NO: 1700839
auuggcaauccaaacaaag

SEQ ID NO: 1700841 - RNA, 19 nt, Artificial Sequence
  Description of Artificial Sequence: Synthetic oligonucleotide
  Sense strand starting at position 3943 of SEQ ID NO: 1561818
uuguuuggauugccaauaa

SEQ ID NO: 1700842 - RNA, 19 nt, Artificial Sequence
  Description of Artificial Sequence: Synthetic oligonucleotide
  Antisense strand to SEQ ID NO: 1700841
uuauuggcaauccaaacaa

SEQ ID NO: 1700843 - RNA, 19 nt, Artificial Sequence
  Description of Artificial Sequence: Synthetic oligonucleotide
  Sense strand starting at position 3964 of SEQ ID NO: 1561818
gagaacuuacugcguaaac

SEQ ID NO: 1700844 - RNA, 19 nt, Artificial Sequence
  Description of Artificial Sequence: Synthetic oligonucleotide
  Antisense strand to SEQ ID NO: 1700843
guuuacgcaguaaguucuc

SEQ ID NO: 1700845 - RNA, 19 nt, Artificial Sequence
  Description of Artificial Sequence: Synthetic oligonucleotide
  Sense strand starting at position 478 of SEQ ID NO: 1561819
gguguauuguuccaggaag

SEQ ID NO: 1700846 - RNA, 19 nt, Artificial Sequence
  Description of Artificial Sequence: Synthetic oligonucleotide
  Antisense strand to SEQ ID NO: 1700845
cuuccuggaacaauacacc

SEQ ID NO: 1700847 - RNA, 19 nt, Artificial Sequence
  Description of Artificial Sequence: Synthetic oligonucleotide
  Sense strand starting at position 480 of SEQ ID NO: 1561819
uguauuguuccaggaagcu

SEQ ID NO: 1700848 - RNA, 19 nt, Artificial Sequence
  Description of Artificial Sequence: Synthetic oligonucleotide
  Antisense strand to SEQ ID NO: 1700847
agcuuccuggaacaauaca

SEQ ID NO: 1700849 - RNA, 19 nt, Artificial Sequence
  Description of Artificial Sequence: Synthetic oligonucleotide
  Sense strand starting at position 536 of SEQ ID NO: 1561819
cugucagcauauucgauaa

SEQ ID NO: 1700850 - RNA, 19 nt, Artificial Sequence
  Description of Artificial Sequence: Synthetic oligonucleotide
  Antisense strand to SEQ ID NO: 1700849
uuaucgaauaugcugacag

SEQ ID NO: 1700851 - RNA, 19 nt, Artificial Sequence
  Description of Artificial Sequence: Synthetic oligonucleotide
  Sense strand starting at position 538 of SEQ ID NO: 1561819
gucagcauauucgauaaua

SEQ ID NO: 1700852 - RNA, 19 nt, Artificial Sequence
  Description of Artificial Sequence: Synthetic oligonucleotide
  Antisense strand to SEQ ID NO: 1700851
uauuaucgaauaugcugac

SEQ ID NO: 1700853 - RNA, 19 nt, Artificial Sequence
  Description of Artificial Sequence: Synthetic oligonucleotide
  Sense strand starting at position 587 of SEQ ID NO: 1561819
aaauaugucugcgaacaua

SEQ ID NO: 1700854 - RNA, 19 nt, Artificial Sequence
  Description of Artificial Sequence: Synthetic oligonucleotide
  Antisense strand to SEQ ID NO: 1700853
uauguucgcagacauauuu

SEQ ID NO: 1700855 - RNA, 19 nt, Artificial Sequence
  Description of Artificial Sequence: Synthetic oligonucleotide
  Sense strand starting at position 659 of SEQ ID NO: 1561819
gcagccaugaguugggaau

SEQ ID NO: 1700856 - RNA, 19 nt, Artificial Sequence
  Description of Artificial Sequence: Synthetic oligonucleotide
  Antisense strand to SEQ ID NO: 1700855
auucccaacucauggcugc

SEQ ID NO: 1700857 - RNA, 19 nt, Artificial Sequence
  Description of Artificial Sequence: Synthetic oligonucleotide
  Sense strand starting at position 660 of SEQ ID NO: 1561819
cagccaugaguugggaaua

SEQ ID NO: 1700858 - RNA, 19 nt, Artificial Sequence
  Description of Artificial Sequence: Synthetic oligonucleotide
  Antisense strand to SEQ ID NO: 1700857
uauucccaacucauggcug

SEQ ID NO: 1700859 - RNA, 19 nt, Artificial Sequence
  Description of Artificial Sequence: Synthetic oligonucleotide
  Sense strand starting at position 1107 of SEQ ID NO: 1561819
gcagcuucgccucuuuaca

SEQ ID NO: 1700860 - RNA, 19 nt, Artificial Sequence
  Description of Artificial Sequence: Synthetic oligonucleotide
  Antisense strand to SEQ ID NO: 1700859
uguaaagaggcgaagcugc

SEQ ID NO: 1700861 - RNA, 19 nt, Artificial Sequence
  Description of Artificial Sequence: Synthetic oligonucleotide
  Sense strand starting at position 1109 of SEQ ID NO: 1561819
agcuucgccucuuuacaga

SEQ ID NO: 1700862 - RNA, 19 nt, Artificial Sequence
  Description of Artificial Sequence: Synthetic oligonucleotide
  Antisense strand to SEQ ID NO: 1700861
ucuguaaagaggcgaagcu

SEQ ID NO: 1700863 - RNA, 19 nt, Artificial Sequence
  Description of Artificial Sequence: Synthetic oligonucleotide
  Sense strand starting at position 1122 of SEQ ID NO: 1561819
uacagacucgguuaccuua

SEQ ID NO: 1700864 - RNA, 19 nt, Artificial Sequence
  Description of Artificial Sequence: Synthetic oligonucleotide
  Antisense strand to SEQ ID NO: 1700863
uaagguaaccgagucugua

SEQ ID NO: 1700865 - RNA, 19 nt, Artificial Sequence
  Description of Artificial Sequence: Synthetic oligonucleotide
  Sense strand starting at position 1129 of SEQ ID NO: 1561819
ucgguuaccuuauccguga

SEQ ID NO: 1700866 - RNA, 19 nt, Artificial Sequence
  Description of Artificial Sequence: Synthetic oligonucleotide
  Antisense strand to SEQ ID NO: 1700865
ucacggauaagguaaccga

SEQ ID NO: 1700867 - RNA, 19 nt, Artificial Sequence
  Description of Artificial Sequence: Synthetic oligonucleotide
  Sense strand starting at position 1130 of SEQ ID NO: 1561819
cgguuaccuuauccgugaa

SEQ ID NO: 1700868 - RNA, 19 nt, Artificial Sequence
  Description of Artificial Sequence: Synthetic oligonucleotide
  Antisense strand to SEQ ID NO: 1700867
uucacggauaagguaaccg

SEQ ID NO: 1700869 - RNA, 19 nt, Artificial Sequence
  Description of Artificial Sequence: Synthetic oligonucleotide
  Sense strand starting at position 1131 of SEQ ID NO: 1561819
gguuaccuuauccgugaaa

SEQ ID NO: 1700870 - RNA, 19 nt, Artificial Sequence
  Description of Artificial Sequence: Synthetic oligonucleotide
  Antisense strand to SEQ ID NO: 1700869
uuucacggauaagguaacc

SEQ ID NO: 1700871 - RNA, 19 nt, Artificial Sequence
  Description of Artificial Sequence: Synthetic oligonucleotide
  Sense strand starting at position 1132 of SEQ ID NO: 1561819
guuaccuuauccgugaaac

SEQ ID NO: 1700872 - RNA, 19 nt, Artificial Sequence
  Description of Artificial Sequence: Synthetic oligonucleotide
  Antisense strand to SEQ ID NO: 1700871
guuucacggauaagguaac

SEQ ID NO: 1700873 - RNA, 19 nt, Artificial Sequence
  Description of Artificial Sequence: Synthetic oligonucleotide
  Sense strand starting at position 1133 of SEQ ID NO: 1561819
uuaccuuauccgugaaacg

SEQ ID NO: 1700874 - RNA, 19 nt, Artificial Sequence
  Description of Artificial Sequence: Synthetic oligonucleotide
  Antisense strand to SEQ ID NO: 1700873
cguuucacggauaagguaa

SEQ ID NO: 1700875 - RNA, 19 nt, Artificial Sequence
  Description of Artificial Sequence: Synthetic oligonucleotide
  Sense strand starting at position 1134 of SEQ ID NO: 1561819
uaccuuauccgugaaacga

SEQ ID NO: 1700876 - RNA, 19 nt, Artificial Sequence
  Description of Artificial Sequence: Synthetic oligonucleotide
  Antisense strand to SEQ ID NO: 1700875
ucguuucacggauaaggua

SEQ ID NO: 1700877 - RNA, 19 nt, Artificial Sequence
  Description of Artificial Sequence: Synthetic oligonucleotide
  Sense strand starting at position 1272 of SEQ ID NO: 1561819
ucaagaagauuucgacuaa

SEQ ID NO: 1700878 - RNA, 19 nt, Artificial Sequence
  Description of Artificial Sequence: Synthetic oligonucleotide
  Antisense strand to SEQ ID NO: 1700877
uuagucgaaaucuucuuga

SEQ ID NO: 1700879 - RNA, 19 nt, Artificial Sequence
  Description of Artificial Sequence: Synthetic oligonucleotide
  Sense strand starting at position 2021 of SEQ ID NO: 1561819
agcugaguuugcgcaacuu

SEQ ID NO: 1700880 - RNA, 19 nt, Artificial Sequence
  Description of Artificial Sequence: Synthetic oligonucleotide
  Antisense strand to SEQ ID NO: 1700879
aaguugcgcaaacucagcu

SEQ ID NO: 1700881 - RNA, 19 nt, Artificial Sequence
  Description of Artificial Sequence: Synthetic oligonucleotide
  Sense strand starting at position 2184 of SEQ ID NO: 1561819
cagggaaguucuuccggga

SEQ ID NO: 1700882 - RNA, 19 nt, Artificial Sequence
  Description of Artificial Sequence: Synthetic oligonucleotide
  Antisense strand to SEQ ID NO: 1700881
ucccggaagaacuucccug

SEQ ID NO: 1700883 - RNA, 19 nt, Artificial Sequence
  Description of Artificial Sequence: Synthetic oligonucleotide
  Sense strand starting at position 2323 of SEQ ID NO: 1561819
ggugauguucacugugcca

SEQ ID NO: 1700884 - RNA, 19 nt, Artificial Sequence
  Description of Artificial Sequence: Synthetic oligonucleotide
  Antisense strand to SEQ ID NO: 1700883
uggcacagugaacaucacc

SEQ ID NO: 1700885 - RNA, 19 nt, Artificial Sequence
  Description of Artificial Sequence: Synthetic oligonucleotide
  Sense strand starting at position 2361 of SEQ ID NO: 1561819
cuugguaucggguaaccca

SEQ ID NO: 1700886 - RNA, 19 nt, Artificial Sequence
  Description of Artificial Sequence: Synthetic oligonucleotide
  Antisense strand to SEQ ID NO: 1700885
uggguuacccgauaccaag

SEQ ID NO: 1700887 - RNA, 19 nt, Artificial Sequence
  Description of Artificial Sequence: Synthetic oligonucleotide
  Sense strand starting at position 2395 of SEQ ID NO: 1561819
caaucacuaucuggugagu

SEQ ID NO: 1700888 - RNA, 19 nt, Artificial Sequence
  Description of Artificial Sequence: Synthetic oligonucleotide
  Antisense strand to SEQ ID NO: 1700887
acucaccagauagugauug

SEQ ID NO: 1700889 - RNA, 19 nt, Artificial Sequence
  Description of Artificial Sequence: Synthetic oligonucleotide
  Sense strand starting at position 2397 of SEQ ID NO: 1561819
aucacuaucuggugaguuc

SEQ ID NO: 1700890 - RNA, 19 nt, Artificial Sequence
  Description of Artificial Sequence: Synthetic oligonucleotide
  Antisense strand to SEQ ID NO: 1700889
gaacucaccagauagugau

SEQ ID NO: 1700891 - RNA, 19 nt, Artificial Sequence
  Description of Artificial Sequence: Synthetic oligonucleotide
  Sense strand starting at position 2398 of SEQ ID NO: 1561819
ucacuaucuggugaguucu

SEQ ID NO: 1700892 - RNA, 19 nt, Artificial Sequence
  Description of Artificial Sequence: Synthetic oligonucleotide
  Antisense strand to SEQ ID NO: 1700891
agaacucaccagauaguga

SEQ ID NO: 1700893 - RNA, 19 nt, Artificial Sequence
  Description of Artificial Sequence: Synthetic oligonucleotide
  Sense strand starting at position 2400 of SEQ ID NO: 1561819
acuaucuggugaguucuau

SEQ ID NO: 1700894 - RNA, 19 nt, Artificial Sequence
  Description of Artificial Sequence: Synthetic oligonucleotide
  Antisense strand to SEQ ID NO: 1700893
auagaacucaccagauagu

SEQ ID NO: 1700895 - RNA, 19 nt, Artificial Sequence
  Description of Artificial Sequence: Synthetic oligonucleotide
  Sense strand starting at position 2426 of SEQ ID NO: 1561819
ccauuugacuaaugguaaa

SEQ ID NO: 1700896 - RNA, 19 nt, Artificial Sequence
  Description of Artificial Sequence: Synthetic oligonucleotide
  Antisense strand to SEQ ID NO: 1700895
uuuaccauuagucaaaugg

SEQ ID NO: 1700897 - RNA, 19 nt, Artificial Sequence
  Description of Artificial Sequence: Synthetic oligonucleotide
  Sense strand starting at position 2587 of SEQ ID NO: 1561819
caugcugucacguguagag

SEQ ID NO: 1700898 - RNA, 19 nt, Artificial Sequence
  Description of Artificial Sequence: Synthetic oligonucleotide
  Antisense strand to SEQ ID NO: 1700897
cucuacacgugacagcaug

SEQ ID NO: 1700899 - RNA, 19 nt, Artificial Sequence
  Description of Artificial Sequence: Synthetic oligonucleotide
  Sense strand starting at position 2604 of SEQ ID NO: 1561819
aguccaucccucuggaaca

SEQ ID NO: 1700900 - RNA, 19 nt, Artificial Sequence
  Description of Artificial Sequence: Synthetic oligonucleotide
  Antisense strand to SEQ ID NO: 1700899
uguuccagagggauggacu

SEQ ID NO: 1700901 - RNA, 19 nt, Artificial Sequence
  Description of Artificial Sequence: Synthetic oligonucleotide
  Sense strand starting at position 2639 of SEQ ID NO: 1561819
gccucagcugccuugugaa

SEQ ID NO: 1700902 - RNA, 19 nt, Artificial Sequence
  Description of Artificial Sequence: Synthetic oligonucleotide
  Antisense strand to SEQ ID NO: 1700901
uucacaaggcagcugaggc

SEQ ID NO: 1700903 - RNA, 19 nt, Artificial Sequence
  Description of Artificial Sequence: Synthetic oligonucleotide
  Sense strand starting at position 2659 of SEQ ID NO: 1561819
acgguuaacaucggcaaca

SEQ ID NO: 1700904 - RNA, 19 nt, Artificial Sequence
  Description of Artificial Sequence: Synthetic oligonucleotide
  Antisense strand to SEQ ID NO: 1700903
uguugccgauguuaaccgu

SEQ ID NO: 1700905 - RNA, 19 nt, Artificial Sequence
  Description of Artificial Sequence: Synthetic oligonucleotide
  Sense strand starting at position 2660 of SEQ ID NO: 1561819
cgguuaacaucggcaacaa

SEQ ID NO: 1700906 - RNA, 19 nt, Artificial Sequence
  Description of Artificial Sequence: Synthetic oligonucleotide
  Antisense strand to SEQ ID NO: 1700905
uuguugccgauguuaaccg

SEQ ID NO: 1700907 - RNA, 19 nt, Artificial Sequence
  Description of Artificial Sequence: Synthetic oligonucleotide
  Sense strand starting at position 2674 of SEQ ID NO: 1561819
aacaacagccgucauagua

SEQ ID NO: 1700908 - RNA, 19 nt, Artificial Sequence
  Description of Artificial Sequence: Synthetic oligonucleotide
  Antisense strand to SEQ ID NO: 1700907
uacuaugacggcuguuguu

SEQ ID NO: 1700909 - RNA, 19 nt, Artificial Sequence
  Description of Artificial Sequence: Synthetic oligonucleotide
  Sense strand starting at position 2682 of SEQ ID NO: 1561819
ccgucauaguaacaacaau

SEQ ID NO: 1700910 - RNA, 19 nt, Artificial Sequence
  Description of Artificial Sequence: Synthetic oligonucleotide
  Antisense strand to SEQ ID NO: 1700909
auuguuguuacuaugacgg

SEQ ID NO: 1700911 - RNA, 19 nt, Artificial Sequence
  Description of Artificial Sequence: Synthetic oligonucleotide
  Sense strand starting at position 3069 of SEQ ID NO: 1561819
ccuccagucccugacuuua

SEQ ID NO: 1700912 - RNA, 19 nt, Artificial Sequence
  Description of Artificial Sequence: Synthetic oligonucleotide
  Antisense strand to SEQ ID NO: 1700911
uaaagucagggacuggagg

SEQ ID NO: 1700913 - RNA, 19 nt, Artificial Sequence
  Description of Artificial Sequence: Synthetic oligonucleotide
  Sense strand starting at position 3523 of SEQ ID NO: 1561819
uagccaguaucuccgugau

SEQ ID NO: 1700914 - RNA, 19 nt, Artificial Sequence
  Description of Artificial Sequence: Synthetic oligonucleotide
  Antisense strand to SEQ ID NO: 1700913
aucacggagauacuggcua

SEQ ID NO: 1700915 - RNA, 19 nt, Artificial Sequence
  Description of Artificial Sequence: Synthetic oligonucleotide
  Sense strand starting at position 3525 of SEQ ID NO: 1561819
gccaguaucuccgugauua

SEQ ID NO: 1700916 - RNA, 19 nt, Artificial Sequence
  Description of Artificial Sequence: Synthetic oligonucleotide
  Antisense strand to SEQ ID NO: 1700915
uaaucacggagauacuggc

SEQ ID NO: 1700917 - RNA, 19 nt, Artificial Sequence
  Description of Artificial Sequence: Synthetic oligonucleotide
  Sense strand starting at position 3558 of SEQ ID NO: 1561819
cagagauuguuccugccac

SEQ ID NO: 1700918 - RNA, 19 nt, Artificial Sequence
  Description of Artificial Sequence: Synthetic oligonucleotide
  Antisense strand to SEQ ID NO: 1700917
guggcaggaacaaucucug

SEQ ID NO: 1700919 - RNA, 19 nt, Artificial Sequence
  Description of Artificial Sequence: Synthetic oligonucleotide
  Sense strand starting at position 3688 of SEQ ID NO: 1561819
acgggaagcugacagagau

SEQ ID NO: 1700920 - RNA, 19 nt, Artificial Sequence
  Description of Artificial Sequence: Synthetic oligonucleotide
  Antisense strand to SEQ ID NO: 1700919
aucucugucagcuucccgu

SEQ ID NO: 1700921 - RNA, 19 nt, Artificial Sequence
  Description of Artificial Sequence: Synthetic oligonucleotide
  Sense strand starting at position 3898 of SEQ ID NO: 1561819
gcacuuucuuuguaccaga

SEQ ID NO: 1700922 - RNA, 19 nt, Artificial Sequence
  Description of Artificial Sequence: Synthetic oligonucleotide
  Antisense strand to SEQ ID NO: 1700921
ucugguacaaagaaagugc

SEQ ID NO: 1700923 - RNA, 19 nt, Artificial Sequence
  Description of Artificial Sequence: Synthetic oligonucleotide
  Sense strand starting at position 3966 of SEQ ID NO: 1561819
cccugugagggcuacuauu

SEQ ID NO: 1700924 - RNA, 19 nt, Artificial Sequence
  Description of Artificial Sequence: Synthetic oligonucleotide
  Antisense strand to SEQ ID NO: 1700923
aauaguagcccucacaggg

SEQ ID NO: 1700925 - RNA, 19 nt, Artificial Sequence
  Description of Artificial Sequence: Synthetic oligonucleotide
  Sense strand starting at position 123 of SEQ ID NO: 1561820
ucaguuuccuccucgauga

SEQ ID NO: 1700926 - RNA, 19 nt, Artificial Sequence
  Description of Artificial Sequence: Synthetic oligonucleotide
  Antisense strand to SEQ ID NO: 1700925
ucaucgaggaggaaacuga

SEQ ID NO: 1700927 - RNA, 19 nt, Artificial Sequence
  Description of Artificial Sequence: Synthetic oligonucleotide
  Sense strand starting at position 151 of SEQ ID NO: 1561820
gcuagccuuccaggagagu

SEQ ID NO: 1700928 - RNA, 19 nt, Artificial Sequence
  Description of Artificial Sequence: Synthetic oligonucleotide
  Antisense strand to SEQ ID NO: 1700927
acucuccuggaaggcuagc

SEQ ID NO: 1700929 - RNA, 19 nt, Artificial Sequence
  Description of Artificial Sequence: Synthetic oligonucleotide
  Sense strand starting at position 152 of SEQ ID NO: 1561820
cuagccuuccaggagaguu

SEQ ID NO: 1700930 - RNA, 19 nt, Artificial Sequence
  Description of Artificial Sequence: Synthetic oligonucleotide
  Antisense strand to SEQ ID NO: 1700929
aacucuccuggaaggcuag

SEQ ID NO: 1700931 - RNA, 19 nt, Artificial Sequence
  Description of Artificial Sequence: Synthetic oligonucleotide
  Sense strand starting at position 154 of SEQ ID NO: 1561820
agccuuccaggagaguuau

SEQ ID NO: 1700932 - RNA, 19 nt, Artificial Sequence
  Description of Artificial Sequence: Synthetic oligonucleotide
  Antisense strand to SEQ ID NO: 1700931
auaacucuccuggaaggcu

SEQ ID NO: 1700933 - RNA, 19 nt, Artificial Sequence
  Description of Artificial Sequence: Synthetic oligonucleotide
  Sense strand starting at position 160 of SEQ ID NO: 1561820
ccaggagaguuaugagaac

SEQ ID NO: 1700934 - RNA, 19 nt, Artificial Sequence
  Description of Artificial Sequence: Synthetic oligonucleotide
  Antisense strand to SEQ ID NO: 1700933
guucucauaacucuccugg

SEQ ID NO: 1700935 - RNA, 19 nt, Artificial Sequence
  Description of Artificial Sequence: Synthetic oligonucleotide
  Sense strand starting at position 321 of SEQ ID NO: 1561820
aggcccagcccuugagaaa

SEQ ID NO: 1700936 - RNA, 19 nt, Artificial Sequence
  Description of Artificial Sequence: Synthetic oligonucleotide
  Antisense strand to SEQ ID NO: 1700935
uuucucaagggcugggccu

SEQ ID NO: 1700937 - RNA, 19 nt, Artificial Sequence
  Description of Artificial Sequence: Synthetic oligonucleotide
  Sense strand starting at position 2312 of SEQ ID NO: 1561820
gcaaacaacuugcuuaagu

SEQ ID NO: 1700938 - RNA, 19 nt, Artificial Sequence
  Description of Artificial Sequence: Synthetic oligonucleotide
  Antisense strand to SEQ ID NO: 1700937
acuuaagcaaguuguuugc

SEQ ID NO: 1700939 - RNA, 19 nt, Artificial Sequence
  Description of Artificial Sequence: Synthetic oligonucleotide
  Sense strand starting at position 2611 of SEQ ID NO: 1561820
gucagcuuccugcauggaa

SEQ ID NO: 1700940 - RNA, 19 nt, Artificial Sequence
  Description of Artificial Sequence: Synthetic oligonucleotide
  Antisense strand to SEQ ID NO: 1700939
uuccaugcaggaagcugac

SEQ ID NO: 1700941 - RNA, 19 nt, Artificial Sequence
  Description of Artificial Sequence: Synthetic oligonucleotide
  Sense strand starting at position 2655 of SEQ ID NO: 1561820
augccugucacguggaaac

SEQ ID NO: 1700942 - RNA, 19 nt, Artificial Sequence
  Description of Artificial Sequence: Synthetic oligonucleotide
  Antisense strand to SEQ ID NO: 1700941
guuuccacgugacaggcau

SEQ ID NO: 1700943 - RNA, 19 nt, Artificial Sequence
  Description of Artificial Sequence: Synthetic oligonucleotide
  Sense strand starting at position 2657 of SEQ ID NO: 1561820
gccugucacguggaaacau

SEQ ID NO: 1700944 - RNA, 19 nt, Artificial Sequence
  Description of Artificial Sequence: Synthetic oligonucleotide
  Antisense strand to SEQ ID NO: 1700943
auguuuccacgugacaggc

SEQ ID NO: 1700945 - RNA, 19 nt, Artificial Sequence
  Description of Artificial Sequence: Synthetic oligonucleotide
  Sense strand starting at position 2683 of SEQ ID NO: 1561820
gagcuaugcugugcugaga

SEQ ID NO: 1700946 - RNA, 19 nt, Artificial Sequence
  Description of Artificial Sequence: Synthetic oligonucleotide
  Antisense strand to SEQ ID NO: 1700945
ucucagcacagcauagcuc

SEQ ID NO: 1700947 - RNA, 19 nt, Artificial Sequence
  Description of Artificial Sequence: Synthetic oligonucleotide
  Sense strand starting at position 2686 of SEQ ID NO: 1561820
cuaugcugugcugagagaa

SEQ ID NO: 1700948 - RNA, 19 nt, Artificial Sequence
  Description of Artificial Sequence: Synthetic oligonucleotide
  Antisense strand to SEQ ID NO: 1700947
uucucucagcacagcauag

SEQ ID NO: 1700949 - RNA, 19 nt, Artificial Sequence
  Description of Artificial Sequence: Synthetic oligonucleotide
  Sense strand starting at position 3002 of SEQ ID NO: 1561820
gguacuuaaucuggguguu

SEQ ID NO: 1700950 - RNA, 19 nt, Artificial Sequence
  Description of Artificial Sequence: Synthetic oligonucleotide
  Antisense strand to SEQ ID NO: 1700949
aacacccagauuaaguacc

SEQ ID NO: 1700951 - RNA, 19 nt, Artificial Sequence
  Description of Artificial Sequence: Synthetic oligonucleotide
  Sense strand starting at position 3003 of SEQ ID NO: 1561820
guacuuaaucuggguguuc

SEQ ID NO: 1700952 - RNA, 19 nt, Artificial Sequence
  Description of Artificial Sequence: Synthetic oligonucleotide
  Antisense strand to SEQ ID NO: 1700951
gaacacccagauuaaguac

SEQ ID NO: 1700953 - RNA, 19 nt, Artificial Sequence
  Description of Artificial Sequence: Synthetic oligonucleotide
  Sense strand starting at position 3055 of SEQ ID NO: 1561820
ccgugcuguccagcucaau

SEQ ID NO: 1700954 - RNA, 19 nt, Artificial Sequence
  Description of Artificial Sequence: Synthetic oligonucleotide
  Antisense strand to SEQ ID NO: 1700953
auugagcuggacagcacgg

SEQ ID NO: 1700955 - RNA, 19 nt, Artificial Sequence
  Description of Artificial Sequence: Synthetic oligonucleotide
  Sense strand starting at position 3056 of SEQ ID NO: 1561820
cgugcuguccagcucaaua

SEQ ID NO: 1700956 - RNA, 19 nt, Artificial Sequence
  Description of Artificial Sequence: Synthetic oligonucleotide
  Antisense strand to SEQ ID NO: 1700955
uauugagcuggacagcacg

SEQ ID NO: 1700957 - RNA, 19 nt, Artificial Sequence
  Description of Artificial Sequence: Synthetic oligonucleotide
  Sense strand starting at position 3148 of SEQ ID NO: 1561820
gagcuacacuaguggcauu

SEQ ID NO: 1700958 - RNA, 19 nt, Artificial Sequence
  Description of Artificial Sequence: Synthetic oligonucleotide
  Antisense strand to SEQ ID NO: 1700957
aaugccacuaguguagcuc

SEQ ID NO: 1700959 - RNA, 19 nt, Artificial Sequence
  Description of Artificial Sequence: Synthetic oligonucleotide
  Sense strand starting at position 3191 of SEQ ID NO: 1561820
gccaguugccacuguguuu

SEQ ID NO: 1700960 - RNA, 19 nt, Artificial Sequence
  Description of Artificial Sequence: Synthetic oligonucleotide
  Antisense strand to SEQ ID NO: 1700959
aaacacaguggcaacuggc

SEQ ID NO: 1700961 - RNA, 19 nt, Artificial Sequence
  Description of Artificial Sequence: Synthetic oligonucleotide
  Sense strand starting at position 3811 of SEQ ID NO: 1561820
gguguauuguuccaggaag

SEQ ID NO: 1700962 - RNA, 19 nt, Artificial Sequence
  Description of Artificial Sequence: Synthetic oligonucleotide
  Antisense strand to SEQ ID NO: 1700961
cuuccuggaacaauacacc

SEQ ID NO: 1700963 - RNA, 19 nt, Artificial Sequence
  Description of Artificial Sequence: Synthetic oligonucleotide
  Sense strand starting at position 3813 of SEQ ID NO: 1561820
uguauuguuccaggaagcu

SEQ ID NO: 1700964 - RNA, 19 nt, Artificial Sequence
  Description of Artificial Sequence: Synthetic oligonucleotide
  Antisense strand to SEQ ID NO: 1700963
agcuuccuggaacaauaca

SEQ ID NO: 1700965 - RNA, 19 nt, Artificial Sequence
  Description of Artificial Sequence: Synthetic oligonucleotide
  Sense strand starting at position 3869 of SEQ ID NO: 1561820
cugucagcauauucgauaa

SEQ ID NO: 1700966 - RNA, 19 nt, Artificial Sequence
  Description of Artificial Sequence: Synthetic oligonucleotide
  Antisense strand to SEQ ID NO: 1700965
uuaucgaauaugcugacag

SEQ ID NO: 1700967 - RNA, 19 nt, Artificial Sequence
  Description of Artificial Sequence: Synthetic oligonucleotide
  Sense strand starting at position 3871 of SEQ ID NO: 1561820
gucagcauauucgauaaua

SEQ ID NO: 1700968 - RNA, 19 nt, Artificial Sequence
  Description of Artificial Sequence: Synthetic oligonucleotide
  Antisense strand to SEQ ID NO: 1700967
uauuaucgaauaugcugac

SEQ ID NO: 1700969 - RNA, 19 nt, Artificial Sequence
  Description of Artificial Sequence: Synthetic oligonucleotide
  Sense strand starting at position 3920 of SEQ ID NO: 1561820
aaauaugucugcgaacaua

SEQ ID NO: 1700970 - RNA, 19 nt, Artificial Sequence
  Description of Artificial Sequence: Synthetic oligonucleotide
  Antisense strand to SEQ ID NO: 1700969
uauguucgcagacauauuu

SEQ ID NO: 1700971 - RNA, 19 nt, Artificial Sequence
  Description of Artificial Sequence: Synthetic oligonucleotide
  Sense strand starting at position 25 of SEQ ID NO: 1561821
auaacaacaguuugucuua

SEQ ID NO: 1700972 - RNA, 19 nt, Artificial Sequence
  Description of Artificial Sequence: Synthetic oligonucleotide
  Antisense strand to SEQ ID NO: 1700971
uaagacaaacuguuguuau

SEQ ID NO: 1700973 - RNA, 19 nt, Artificial Sequence
  Description of Artificial Sequence: Synthetic oligonucleotide
  Sense strand starting at position 28 of SEQ ID NO: 1561821
acaacaguuugucuuaauc

SEQ ID NO: 1700974 - RNA, 19 nt, Artificial Sequence
  Description of Artificial Sequence: Synthetic oligonucleotide
  Antisense strand to SEQ ID NO: 1700973
gauuaagacaaacuguugu

SEQ ID NO: 1700975 - RNA, 19 nt, Artificial Sequence
  Description of Artificial Sequence: Synthetic oligonucleotide
  Sense strand starting at position 38 of SEQ ID NO: 1561821
gucuuaaucuuagugauca

SEQ ID NO: 1700976 - RNA, 19 nt, Artificial Sequence
  Description of Artificial Sequence: Synthetic oligonucleotide
  Antisense strand to SEQ ID NO: 1700975
ugaucacuaagauuaagac

SEQ ID NO: 1700977 - RNA, 19 nt, Artificial Sequence
  Description of Artificial Sequence: Synthetic oligonucleotide
  Sense strand starting at position 54 of SEQ ID NO: 1561821
ucagccaauuccuugguua

SEQ ID NO: 1700978 - RNA, 19 nt, Artificial Sequence
  Description of Artificial Sequence: Synthetic oligonucleotide
  Antisense strand to SEQ ID NO: 1700977
uaaccaaggaauuggcuga

SEQ ID NO: 1700979 - RNA, 19 nt, Artificial Sequence
  Description of Artificial Sequence: Synthetic oligonucleotide
  Sense strand starting at position 56 of SEQ ID NO: 1561821
agccaauuccuugguuaag

SEQ ID NO: 1700980 - RNA, 19 nt, Artificial Sequence
  Description of Artificial Sequence: Synthetic oligonucleotide
  Antisense strand to SEQ ID NO: 1700979
cuuaaccaaggaauuggcu

SEQ ID NO: 1700981 - RNA, 19 nt, Artificial Sequence
  Description of Artificial Sequence: Synthetic oligonucleotide
  Sense strand starting at position 72 of SEQ ID NO: 1561821
aaggcaguaucugccaaau

SEQ ID NO: 1700982 - RNA, 19 nt, Artificial Sequence
  Description of Artificial Sequence: Synthetic oligonucleotide
  Antisense strand to SEQ ID NO: 1700981
auuuggcagauacugccuu

SEQ ID NO: 1700983 - RNA, 19 nt, Artificial Sequence
  Description of Artificial Sequence: Synthetic oligonucleotide
  Sense strand starting at position 132 of SEQ ID NO: 1561821
aauaucuugugagaagaga

SEQ ID NO: 1700984 - RNA, 19 nt, Artificial Sequence
  Description of Artificial Sequence: Synthetic oligonucleotide
  Antisense strand to SEQ ID NO: 1700983
ucucuucucacaagauauu

SEQ ID NO: 1700985 - RNA, 19 nt, Artificial Sequence
  Description of Artificial Sequence: Synthetic oligonucleotide
  Sense strand starting at position 382 of SEQ ID NO: 1561821
uggccauaucuguaaggua

SEQ ID NO: 1700986 - RNA, 19 nt, Artificial Sequence
  Description of Artificial Sequence: Synthetic oligonucleotide
  Antisense strand to SEQ ID NO: 1700985
uaccuuacagauauggcca

SEQ ID NO: 1700987 - RNA, 19 nt, Artificial Sequence
  Description of Artificial Sequence: Synthetic oligonucleotide
  Sense strand starting at position 538 of SEQ ID NO: 1561821
gcaugagguccaugcauga

SEQ ID NO: 1700988 - RNA, 19 nt, Artificial Sequence
  Description of Artificial Sequence: Synthetic oligonucleotide
  Antisense strand to SEQ ID NO: 1700987
ucaugcauggaccucaugc

SEQ ID NO: 1700989 - RNA, 19 nt, Artificial Sequence
  Description of Artificial Sequence: Synthetic oligonucleotide
  Sense strand starting at position 542 of SEQ ID NO: 1561821
gagguccaugcaugacaaa

SEQ ID NO: 1700990 - RNA, 19 nt, Artificial Sequence
  Description of Artificial Sequence: Synthetic oligonucleotide
  Antisense strand to SEQ ID NO: 1700989
uuugucaugcauggaccuc

SEQ ID NO: 1700991 - RNA, 19 nt, Artificial Sequence
  Description of Artificial Sequence: Synthetic oligonucleotide
  Sense strand starting at position 543 of SEQ ID NO: 1561821
agguccaugcaugacaaau

SEQ ID NO: 1700992 - RNA, 19 nt, Artificial Sequence
  Description of Artificial Sequence: Synthetic oligonucleotide
  Antisense strand to SEQ ID NO: 1700991
auuugucaugcauggaccu

SEQ ID NO: 1700993 - RNA, 19 nt, Artificial Sequence
  Description of Artificial Sequence: Synthetic oligonucleotide
  Sense strand starting at position 554 of SEQ ID NO: 1561821
ugacaaaugucaccaaagu

SEQ ID NO: 1700994 - RNA, 19 nt, Artificial Sequence
  Description of Artificial Sequence: Synthetic oligonucleotide
  Antisense strand to SEQ ID NO: 1700993
acuuuggugacauuuguca

SEQ ID NO: 1700995 - RNA, 19 nt, Artificial Sequence
  Description of Artificial Sequence: Synthetic oligonucleotide
  Sense strand starting at position 567 of SEQ ID NO: 1561821
caaagugcaggcuaugaua

SEQ ID NO: 1700996 - RNA, 19 nt, Artificial Sequence
  Description of Artificial Sequence: Synthetic oligonucleotide
  Antisense strand to SEQ ID NO: 1700995
uaucauagccugcacuuug

SEQ ID NO: 1700997 - RNA, 19 nt, Artificial Sequence
  Description of Artificial Sequence: Synthetic oligonucleotide
  Sense strand starting at position 643 of SEQ ID NO: 1561821
ccagaaagcugauccacua

SEQ ID NO: 1700998 - RNA, 19 nt, Artificial Sequence
  Description of Artificial Sequence: Synthetic oligonucleotide
  Antisense strand to SEQ ID NO: 1700997
uaguggaucagcuuucugg

SEQ ID NO: 1700999 - RNA, 19 nt, Artificial Sequence
  Description of Artificial Sequence: Synthetic oligonucleotide
  Sense strand starting at position 1027 of SEQ ID NO: 1561821
ugcagagucacuugaacag

SEQ ID NO: 1701000 - RNA, 19 nt, Artificial Sequence
  Description of Artificial Sequence: Synthetic oligonucleotide
  Antisense strand to SEQ ID NO: 1700999
cuguucaagugacucugca

SEQ ID NO: 1701001 - RNA, 19 nt, Artificial Sequence
  Description of Artificial Sequence: Synthetic oligonucleotide
  Sense strand starting at position 1503 of SEQ ID NO: 1561821
auagauuauuccgccauaa

SEQ ID NO: 1701002 - RNA, 19 nt, Artificial Sequence
  Description of Artificial Sequence: Synthetic oligonucleotide
  Antisense strand to SEQ ID NO: 1701001
uuauggcggaauaaucuau

SEQ ID NO: 1701003 - RNA, 19 nt, Artificial Sequence
  Description of Artificial Sequence: Synthetic oligonucleotide
  Sense strand starting at position 1559 of SEQ ID NO: 1561821
acuuaaaggcauuaugcua

SEQ ID NO: 1701004 - RNA, 19 nt, Artificial Sequence
  Description of Artificial Sequence: Synthetic oligonucleotide
  Antisense strand to SEQ ID NO: 1701003
uagcauaaugccuuuaagu

SEQ ID NO: 1701005 - RNA, 19 nt, Artificial Sequence
  Description of Artificial Sequence: Synthetic oligonucleotide
  Sense strand starting at position 1865 of SEQ ID NO: 1561821
ccaccucuagguuaucuua

SEQ ID NO: 1701006 - RNA, 19 nt, Artificial Sequence
  Description of Artificial Sequence: Synthetic oligonucleotide
  Antisense strand to SEQ ID NO: 1701005
uaagauaaccuagaggugg

SEQ ID NO: 1701007 - RNA, 19 nt, Artificial Sequence
  Description of Artificial Sequence: Synthetic oligonucleotide
  Sense strand starting at position 1873 of SEQ ID NO: 1561821
agguuaucuuaugcaaauu

SEQ ID NO: 1701008 - RNA, 19 nt, Artificial Sequence
  Description of Artificial Sequence: Synthetic oligonucleotide
  Antisense strand to SEQ ID NO: 1701007
aauuugcauaagauaaccu

SEQ ID NO: 1701009 - RNA, 19 nt, Artificial Sequence
  Description of Artificial Sequence: Synthetic oligonucleotide
  Sense strand starting at position 2011 of SEQ ID NO: 1561821
cauaguaaaugcucaagag

SEQ ID NO: 1701010 - RNA, 19 nt, Artificial Sequence
  Description of Artificial Sequence: Synthetic oligonucleotide
  Antisense strand to SEQ ID NO: 1701009
cucuugagcauuuacuaug

SEQ ID NO: 1701011 - RNA, 19 nt, Artificial Sequence
  Description of Artificial Sequence: Synthetic oligonucleotide
  Sense strand starting at position 2015 of SEQ ID NO: 1561821
guaaaugcucaagaggugu

SEQ ID NO: 1701012 - RNA, 19 nt, Artificial Sequence
  Description of Artificial Sequence: Synthetic oligonucleotide
  Antisense strand to SEQ ID NO: 1701011
acaccucuugagcauuuac

SEQ ID NO: 1701013 - RNA, 19 nt, Artificial Sequence
  Description of Artificial Sequence: Synthetic oligonucleotide
  Sense strand starting at position 2019 of SEQ ID NO: 1561821
augcucaagagguguuagu

SEQ ID NO: 1701014 - RNA, 19 nt, Artificial Sequence
  Description of Artificial Sequence: Synthetic oligonucleotide
  Antisense strand to SEQ ID NO: 1701013
acuaacaccucuugagcau

SEQ ID NO: 1701015 - RNA, 19 nt, Artificial Sequence
  Description of Artificial Sequence: Synthetic oligonucleotide
  Sense strand starting at position 2070 of SEQ ID NO: 1561821
gugguuuccaaagguuaua

SEQ ID NO: 1701016 - RNA, 19 nt, Artificial Sequence
  Description of Artificial Sequence: Synthetic oligonucleotide
  Antisense strand to SEQ ID NO: 1701015
uauaaccuuuggaaaccac

SEQ ID NO: 1701017 - RNA, 19 nt, Artificial Sequence
  Description of Artificial Sequence: Synthetic oligonucleotide
  Sense strand starting at position 2073 of SEQ ID NO: 1561821
guuuccaaagguuauaauu

SEQ ID NO: 1701018 - RNA, 19 nt, Artificial Sequence
  Description of Artificial Sequence: Synthetic oligonucleotide
  Antisense strand to SEQ ID NO: 1701017
aauuauaaccuuuggaaac

SEQ ID NO: 1701019 - RNA, 19 nt, Artificial Sequence
  Description of Artificial Sequence: Synthetic oligonucleotide
  Sense strand starting at position 2153 of SEQ ID NO: 1561821
gcagaagccuggccuagau

SEQ ID NO: 1701020 - RNA, 19 nt, Artificial Sequence
  Description of Artificial Sequence: Synthetic oligonucleotide
  Antisense strand to SEQ ID NO: 1701019
aucuaggccaggcuucugc

SEQ ID NO: 1701021 - RNA, 19 nt, Artificial Sequence
  Description of Artificial Sequence: Synthetic oligonucleotide
  Sense strand starting at position 2390 of SEQ ID NO: 1561821
guggccuugcacuaacauu

SEQ ID NO: 1701022 - RNA, 19 nt, Artificial Sequence
  Description of Artificial Sequence: Synthetic oligonucleotide
  Antisense strand to SEQ ID NO: 1701021
aauguuagugcaaggccac

SEQ ID NO: 1701023 - RNA, 19 nt, Artificial Sequence
  Description of Artificial Sequence: Synthetic oligonucleotide
  Sense strand starting at position 2920 of SEQ ID NO: 1561821
ucaugaaggcugugugagu

SEQ ID NO: 1701024 - RNA, 19 nt, Artificial Sequence
  Description of Artificial Sequence: Synthetic oligonucleotide
  Antisense strand to SEQ ID NO: 1701023
acucacacagccuucauga

SEQ ID NO: 1701025 - RNA, 19 nt, Artificial Sequence
  Description of Artificial Sequence: Synthetic oligonucleotide
  Sense strand starting at position 2921 of SEQ ID NO: 1561821
caugaaggcugugugaguu

SEQ ID NO: 1701026 - RNA, 19 nt, Artificial Sequence
  Description of Artificial Sequence: Synthetic oligonucleotide
  Antisense strand to SEQ ID NO: 1701025
aacucacacagccuucaug

SEQ ID NO: 1701027 - RNA, 19 nt, Artificial Sequence
  Description of Artificial Sequence: Synthetic oligonucleotide
  Sense strand starting at position 2961 of SEQ ID NO: 1561821
acaaaugguccaugaacgu

SEQ ID NO: 1701028 - RNA, 19 nt, Artificial Sequence
  Description of Artificial Sequence: Synthetic oligonucleotide
  Antisense strand to SEQ ID NO: 1701027
acguucauggaccauuugu

SEQ ID NO: 1701029 - RNA, 19 nt, Artificial Sequence
  Description of Artificial Sequence: Synthetic oligonucleotide
  Sense strand starting at position 3075 of SEQ ID NO: 1561821
ugauacauuugcuaauaag

SEQ ID NO: 1701030 - RNA, 19 nt, Artificial Sequence
  Description of Artificial Sequence: Synthetic oligonucleotide
  Antisense strand to SEQ ID NO: 1701029
cuuauuagcaaauguauca

SEQ ID NO: 1701031 - RNA, 19 nt, Artificial Sequence
  Description of Artificial Sequence: Synthetic oligonucleotide
  Sense strand starting at position 3183 of SEQ ID NO: 1561821
cuuucugaguccucggaga

SEQ ID NO: 1701032 - RNA, 19 nt, Artificial Sequence
  Description of Artificial Sequence: Synthetic oligonucleotide
  Antisense strand to SEQ ID NO: 1701031
ucuccgaggacucagaaag

SEQ ID NO: 1701033 - RNA, 19 nt, Artificial Sequence
  Description of Artificial Sequence: Synthetic oligonucleotide
  Sense strand starting at position 3185 of SEQ ID NO: 1561821
uucugaguccucggagauc

SEQ ID NO: 1701034 - RNA, 19 nt, Artificial Sequence
  Description of Artificial Sequence: Synthetic oligonucleotide
  Antisense strand to SEQ ID NO: 1701033
gaucuccgaggacucagaa

SEQ ID NO: 1701035 - RNA, 19 nt, Artificial Sequence
  Description of Artificial Sequence: Synthetic oligonucleotide
  Sense strand starting at position 3286 of SEQ ID NO: 1561821
caugauucugugugucaag

SEQ ID NO: 1701036 - RNA, 19 nt, Artificial Sequence
  Description of Artificial Sequence: Synthetic oligonucleotide
  Antisense strand to SEQ ID NO: 1701035
cuugacacacagaaucaug

SEQ ID NO: 1701037 - RNA, 19 nt, Artificial Sequence
  Description of Artificial Sequence: Synthetic oligonucleotide
  Sense strand starting at position 3293 of SEQ ID NO: 1561821
cugugugucaaggauucua

SEQ ID NO: 1701038 - RNA, 19 nt, Artificial Sequence
  Description of Artificial Sequence: Synthetic oligonucleotide
  Antisense strand to SEQ ID NO: 1701037
uagaauccuugacacacag

SEQ ID NO: 1701039 - RNA, 19 nt, Artificial Sequence
  Description of Artificial Sequence: Synthetic oligonucleotide
  Sense strand starting at position 3351 of SEQ ID NO: 1561821
gucugacugugacuucgaa

SEQ ID NO: 1701040 - RNA, 19 nt, Artificial Sequence
  Description of Artificial Sequence: Synthetic oligonucleotide
  Antisense strand to SEQ ID NO: 1701039
uucgaagucacagucagac

SEQ ID NO: 1701041 - RNA, 19 nt, Artificial Sequence
  Description of Artificial Sequence: Synthetic oligonucleotide
  Sense strand starting at position 3373 of SEQ ID NO: 1561821
gggcuuaacuucuuagaac

SEQ ID NO: 1701042 - RNA, 19 nt, Artificial Sequence
  Description of Artificial Sequence: Synthetic oligonucleotide
  Antisense strand to SEQ ID NO: 1701041
guucuaagaaguuaagccc

SEQ ID NO: 1701043 - RNA, 19 nt, Artificial Sequence
  Description of Artificial Sequence: Synthetic oligonucleotide
  Sense strand starting at position 3521 of SEQ ID NO: 1561821
auuccaaagucucugguga

SEQ ID NO: 1701044 - RNA, 19 nt, Artificial Sequence
  Description of Artificial Sequence: Synthetic oligonucleotide
  Antisense strand to SEQ ID NO: 1701043
ucaccagagacuuuggaau

SEQ ID NO: 1701045 - RNA, 19 nt, Artificial Sequence
  Description of Artificial Sequence: Synthetic oligonucleotide
  Sense strand starting at position 3653 of SEQ ID NO: 1561821
ccagaaaugucagucccgu

SEQ ID NO: 1701046 - RNA, 19 nt, Artificial Sequence
  Description of Artificial Sequence: Synthetic oligonucleotide
  Antisense strand to SEQ ID NO: 1701045
acgggacugacauuucugg

SEQ ID NO: 1701047 - RNA, 19 nt, Artificial Sequence
  Description of Artificial Sequence: Synthetic oligonucleotide
  Sense strand starting at position 3803 of SEQ ID NO: 1561821
ggauaugugauccagccag

SEQ ID NO: 1701048 - RNA, 19 nt, Artificial Sequence
  Description of Artificial Sequence: Synthetic oligonucleotide
  Antisense strand to SEQ ID NO: 1701047
cuggcuggaucacauaucc

SEQ ID NO: 1701049 - RNA, 19 nt, Artificial Sequence
  Description of Artificial Sequence: Synthetic oligonucleotide
  Sense strand starting at position 3888 of SEQ ID NO: 1561821
aaggcaaguccagauguga

SEQ ID NO: 1701050 - RNA, 19 nt, Artificial Sequence
  Description of Artificial Sequence: Synthetic oligonucleotide
  Antisense strand to SEQ ID NO: 1701049
ucacaucuggacuugccuu

SEQ ID NO: 1701051 - RNA, 19 nt, Artificial Sequence
  Description of Artificial Sequence: Synthetic oligonucleotide
  Sense strand starting at position 109 of SEQ ID NO: 1561822
gcuagugugguagaaggaa

SEQ ID NO: 1701052 - RNA, 19 nt, Artificial Sequence
  Description of Artificial Sequence: Synthetic oligonucleotide
  Antisense strand to SEQ ID NO: 1701051
uuccuucuaccacacuagc

SEQ ID NO: 1701053 - RNA, 19 nt, Artificial Sequence
  Description of Artificial Sequence: Synthetic oligonucleotide
  Sense strand starting at position 320 of SEQ ID NO: 1561822
gagcaagaguuuguaugga

SEQ ID NO: 1701054 - RNA, 19 nt, Artificial Sequence
  Description of Artificial Sequence: Synthetic oligonucleotide
  Antisense strand to SEQ ID NO: 1701053
uccauacaaacucuugcuc

SEQ ID NO: 1701055 - RNA, 19 nt, Artificial Sequence
  Description of Artificial Sequence: Synthetic oligonucleotide
  Sense strand starting at position 922 of SEQ ID NO: 1561822
ugcuccugucaggaaagau

SEQ ID NO: 1701056 - RNA, 19 nt, Artificial Sequence
  Description of Artificial Sequence: Synthetic oligonucleotide
  Antisense strand to SEQ ID NO: 1701055
aucuuuccugacaggagca

SEQ ID NO: 1701057 - RNA, 19 nt, Artificial Sequence
  Description of Artificial Sequence: Synthetic oligonucleotide
  Sense strand starting at position 935 of SEQ ID NO: 1561822
aaagauacucaaggucagu

SEQ ID NO: 1701058 - RNA, 19 nt, Artificial Sequence
  Description of Artificial Sequence: Synthetic oligonucleotide
  Antisense strand to SEQ ID NO: 1701057
acugaccuugaguaucuuu

SEQ ID NO: 1701059 - RNA, 19 nt, Artificial Sequence
  Description of Artificial Sequence: Synthetic oligonucleotide
  Sense strand starting at position 941 of SEQ ID NO: 1561822
acucaaggucaguaauauu

SEQ ID NO: 1701060 - RNA, 19 nt, Artificial Sequence
  Description of Artificial Sequence: Synthetic oligonucleotide
  Antisense strand to SEQ ID NO: 1701059
aauauuacugaccuugagu

SEQ ID NO: 1701061 - RNA, 19 nt, Artificial Sequence
  Description of Artificial Sequence: Synthetic oligonucleotide
  Sense strand starting at position 958 of SEQ ID NO: 1561822
uugugaacuuuguugguuu

SEQ ID NO: 1701062 - RNA, 19 nt, Artificial Sequence
  Description of Artificial Sequence: Synthetic oligonucleotide
  Antisense strand to SEQ ID NO: 1701061
aaaccaacaaaguucacaa

SEQ ID NO: 1701063 - RNA, 19 nt, Artificial Sequence
  Description of Artificial Sequence: Synthetic oligonucleotide
  Sense strand starting at position 1031 of SEQ ID NO: 1561822
gcccacaaagcugaagaua

SEQ ID NO: 1701064 - RNA, 19 nt, Artificial Sequence
  Description of Artificial Sequence: Synthetic oligonucleotide
  Antisense strand to SEQ ID NO: 1701063
uaucuucagcuuugugggc

SEQ ID NO: 1701065 - RNA, 19 nt, Artificial Sequence
  Description of Artificial Sequence: Synthetic oligonucleotide
  Sense strand starting at position 1119 of SEQ ID NO: 1561822
uuaugaagugcugggucuu

SEQ ID NO: 1701066 - RNA, 19 nt, Artificial Sequence
  Description of Artificial Sequence: Synthetic oligonucleotide
  Antisense strand to SEQ ID NO: 1701065
aagacccagcacuucauaa

SEQ ID NO: 1701067 - RNA, 19 nt, Artificial Sequence
  Description of Artificial Sequence: Synthetic oligonucleotide
  Sense strand starting at position 1180 of SEQ ID NO: 1561822
gaaagaguuguuugugguc

SEQ ID NO: 1701068 - RNA, 19 nt, Artificial Sequence
  Description of Artificial Sequence: Synthetic oligonucleotide
  Antisense strand to SEQ ID NO: 1701067
gaccacaaacaacucuuuc

SEQ ID NO: 1701069 - RNA, 19 nt, Artificial Sequence
  Description of Artificial Sequence: Synthetic oligonucleotide
  Sense strand starting at position 1185 of SEQ ID NO: 1561822
aguuguuuguggucacuuu

SEQ ID NO: 1701070 - RNA, 19 nt, Artificial Sequence
  Description of Artificial Sequence: Synthetic oligonucleotide
  Antisense strand to SEQ ID NO: 1701069
aaagugaccacaaacaacu

SEQ ID NO: 1701071 - RNA, 19 nt, Artificial Sequence
  Description of Artificial Sequence: Synthetic oligonucleotide
  Sense strand starting at position 1262 of SEQ ID NO: 1561822
uugggauaaugauaucauu

SEQ ID NO: 1701072 - RNA, 19 nt, Artificial Sequence
  Description of Artificial Sequence: Synthetic oligonucleotide
  Antisense strand to SEQ ID NO: 1701071
aaugauaucauuaucccaa

SEQ ID NO: 1701073 - RNA, 19 nt, Artificial Sequence
  Description of Artificial Sequence: Synthetic oligonucleotide
  Sense strand starting at position 1308 of SEQ ID NO: 1561822
gucaaacacuagcaagaau

SEQ ID NO: 1701074 - RNA, 19 nt, Artificial Sequence
  Description of Artificial Sequence: Synthetic oligonucleotide
  Antisense strand to SEQ ID NO: 1701073
auucuugcuaguguuugac

SEQ ID NO: 1701075 - RNA, 19 nt, Artificial Sequence
  Description of Artificial Sequence: Synthetic oligonucleotide
  Sense strand starting at position 1345 of SEQ ID NO: 1561822
ugaaucuggcccugugaau

SEQ ID NO: 1701076 - RNA, 19 nt, Artificial Sequence
  Description of Artificial Sequence: Synthetic oligonucleotide
  Antisense strand to SEQ ID NO: 1701075
auucacagggccagauuca

SEQ ID NO: 1701077 - RNA, 19 nt, Artificial Sequence
  Description of Artificial Sequence: Synthetic oligonucleotide
  Sense strand starting at position 1587 of SEQ ID NO: 1561822
gccgucuagacucacuaga

SEQ ID NO: 1701078 - RNA, 19 nt, Artificial Sequence
  Description of Artificial Sequence: Synthetic oligonucleotide
  Antisense strand to SEQ ID NO: 1701077
ucuagugagucuagacggc

SEQ ID NO: 1701079 - RNA, 19 nt, Artificial Sequence
  Description of Artificial Sequence: Synthetic oligonucleotide
  Sense strand starting at position 1589 of SEQ ID NO: 1561822
cgucuagacucacuagaac

SEQ ID NO: 1701080 - RNA, 19 nt, Artificial Sequence
  Description of Artificial Sequence: Synthetic oligonucleotide
  Antisense strand to SEQ ID NO: 1701079
guucuagugagucuagacg

SEQ ID NO: 1701081 - RNA, 19 nt, Artificial Sequence
  Description of Artificial Sequence: Synthetic oligonucleotide
  Sense strand starting at position 2213 of SEQ ID NO: 1561822
gggagaggccaucauguuu

SEQ ID NO: 1701082 - RNA, 19 nt, Artificial Sequence
  Description of Artificial Sequence: Synthetic oligonucleotide
  Antisense strand to SEQ ID NO: 1701081
aaacaugauggccucuccc

SEQ ID NO: 1701083 - RNA, 19 nt, Artificial Sequence
  Description of Artificial Sequence: Synthetic oligonucleotide
  Sense strand starting at position 2243 of SEQ ID NO: 1561822
uuguuugauccagacauug

SEQ ID NO: 1701084 - RNA, 19 nt, Artificial Sequence
  Description of Artificial Sequence: Synthetic oligonucleotide
  Antisense strand to SEQ ID NO: 1701083
caaugucuggaucaaacaa

SEQ ID NO: 1701085 - RNA, 19 nt, Artificial Sequence
  Description of Artificial Sequence: Synthetic oligonucleotide
  Sense strand starting at position 2245 of SEQ ID NO: 1561822
guuugauccagacauugug

SEQ ID NO: 1701086 - RNA, 19 nt, Artificial Sequence
  Description of Artificial Sequence: Synthetic oligonucleotide
  Antisense strand to SEQ ID NO: 1701085
cacaaugucuggaucaaac

SEQ ID NO: 1701087 - RNA, 19 nt, Artificial Sequence
  Description of Artificial Sequence: Synthetic oligonucleotide
  Sense strand starting at position 2298 of SEQ ID NO: 1561822
cugaguuaaacgggagaga

SEQ ID NO: 1701088 - RNA, 19 nt, Artificial Sequence
  Description of Artificial Sequence: Synthetic oligonucleotide
  Antisense strand to SEQ ID NO: 1701087
ucucucccguuuaacucag

SEQ ID NO: 1701089 - RNA, 19 nt, Artificial Sequence
  Description of Artificial Sequence: Synthetic oligonucleotide
  Sense strand starting at position 2355 of SEQ ID NO: 1561822
accuauguggcucaaacua

SEQ ID NO: 1701090 - RNA, 19 nt, Artificial Sequence
  Description of Artificial Sequence: Synthetic oligonucleotide
  Antisense strand to SEQ ID NO: 1701089
uaguuugagccacauaggu

SEQ ID NO: 1701091 - RNA, 19 nt, Artificial Sequence
  Description of Artificial Sequence: Synthetic oligonucleotide
  Sense strand starting at position 2435 of SEQ ID NO: 1561822
acuggagugcaaugaucuu

SEQ ID NO: 1701092 - RNA, 19 nt, Artificial Sequence
  Description of Artificial Sequence: Synthetic oligonucleotide
  Antisense strand to SEQ ID NO: 1701091
aagaucauugcacuccagu

SEQ ID NO: 1701093 - RNA, 19 nt, Artificial Sequence
  Description of Artificial Sequence: Synthetic oligonucleotide
  Sense strand starting at position 2946 of SEQ ID NO: 1561822
cuggguuaagaguauacuu

SEQ ID NO: 1701094 - RNA, 19 nt, Artificial Sequence
  Description of Artificial Sequence: Synthetic oligonucleotide
  Antisense strand to SEQ ID NO: 1701093
aaguauacucuuaacccag

SEQ ID NO: 1701095 - RNA, 19 nt, Artificial Sequence
  Description of Artificial Sequence: Synthetic oligonucleotide
  Sense strand starting at position 3264 of SEQ ID NO: 1561822
gagagaguauacuuugauu

SEQ ID NO: 1701096 - RNA, 19 nt, Artificial Sequence
  Description of Artificial Sequence: Synthetic oligonucleotide
  Antisense strand to SEQ ID NO: 1701095
aaucaaaguauacucucuc

SEQ ID NO: 1701097 - RNA, 19 nt, Artificial Sequence
  Description of Artificial Sequence: Synthetic oligonucleotide
  Sense strand starting at position 3266 of SEQ ID NO: 1561822
gagaguauacuuugauuaa

SEQ ID NO: 1701098 - RNA, 19 nt, Artificial Sequence
  Description of Artificial Sequence: Synthetic oligonucleotide
  Antisense strand to SEQ ID NO: 1701097
uuaaucaaaguauacucuc

SEQ ID NO: 1701099 - RNA, 19 nt, Artificial Sequence
  Description of Artificial Sequence: Synthetic oligonucleotide
  Sense strand starting at position 3299 of SEQ ID NO: 1561822
caggaagcuuuagagacua

SEQ ID NO: 1701100 - RNA, 19 nt, Artificial Sequence
  Description of Artificial Sequence: Synthetic oligonucleotide
  Antisense strand to SEQ ID NO: 1701099
uagucucuaaagcuuccug

SEQ ID NO: 1701101 - RNA, 19 nt, Artificial Sequence
  Description of Artificial Sequence: Synthetic oligonucleotide
  Sense strand starting at position 3304 of SEQ ID NO: 1561822
agcuuuagagacuagcaua

SEQ ID NO: 1701102 - RNA, 19 nt, Artificial Sequence
  Description of Artificial Sequence: Synthetic oligonucleotide
  Antisense strand to SEQ ID NO: 1701101
uaugcuagucucuaaagcu

SEQ ID NO: 1701103 - RNA, 19 nt, Artificial Sequence
  Description of Artificial Sequence: Synthetic oligonucleotide
  Sense strand starting at position 3401 of SEQ ID NO: 1561822
ugauuaagaguuggugggu

SEQ ID NO: 1701104 - RNA, 19 nt, Artificial Sequence
  Description of Artificial Sequence: Synthetic oligonucleotide
  Antisense strand to SEQ ID NO: 1701103
acccaccaacucuuaauca

SEQ ID NO: 1701105 - RNA, 19 nt, Artificial Sequence
  Description of Artificial Sequence: Synthetic oligonucleotide
  Sense strand starting at position 3402 of SEQ ID NO: 1561822
gauuaagaguuggugggua

SEQ ID NO: 1701106 - RNA, 19 nt, Artificial Sequence
  Description of Artificial Sequence: Synthetic oligonucleotide
  Antisense strand to SEQ ID NO: 1701105
uacccaccaacucuuaauc

SEQ ID NO: 1701107 - RNA, 19 nt, Artificial Sequence
  Description of Artificial Sequence: Synthetic oligonucleotide
  Sense strand starting at position 3404 of SEQ ID NO: 1561822
uuaagaguugguggguaaa

SEQ ID NO: 1701108 - RNA, 19 nt, Artificial Sequence
  Description of Artificial Sequence: Synthetic oligonucleotide
  Antisense strand to SEQ ID NO: 1701107
uuuacccaccaacucuuaa

SEQ ID NO: 1701109 - RNA, 19 nt, Artificial Sequence
  Description of Artificial Sequence: Synthetic oligonucleotide
  Sense strand starting at position 3504 of SEQ ID NO: 1561822
uccauaguauacucgaaac

SEQ ID NO: 1701110 - RNA, 19 nt, Artificial Sequence
  Description of Artificial Sequence: Synthetic oligonucleotide
  Antisense strand to SEQ ID NO: 1701109
guuucgaguauacuaugga

SEQ ID NO: 1701111 - RNA, 19 nt, Artificial Sequence
  Description of Artificial Sequence: Synthetic oligonucleotide
  Sense strand starting at position 3626 of SEQ ID NO: 1561822
ggcucugauuugcagauuu

SEQ ID NO: 1701112 - RNA, 19 nt, Artificial Sequence
  Description of Artificial Sequence: Synthetic oligonucleotide
  Antisense strand to SEQ ID NO: 1701111
aaaucugcaaaucagagcc

SEQ ID NO: 1701113 - RNA, 19 nt, Artificial Sequence
  Description of Artificial Sequence: Synthetic oligonucleotide
  Sense strand starting at position 3662 of SEQ ID NO: 1561822
cuuuaugcugcacaggaaa

SEQ ID NO: 1701114 - RNA, 19 nt, Artificial Sequence
  Description of Artificial Sequence: Synthetic oligonucleotide
  Antisense strand to SEQ ID NO: 1701113
uuuccugugcagcauaaag

SEQ ID NO: 1701115 - RNA, 19 nt, Artificial Sequence
  Description of Artificial Sequence: Synthetic oligonucleotide
  Sense strand starting at position 3703 of SEQ ID NO: 1561822
cuucgcugugccuuaaacu

SEQ ID NO: 1701116 - RNA, 19 nt, Artificial Sequence
  Description of Artificial Sequence: Synthetic oligonucleotide
  Antisense strand to SEQ ID NO: 1701115
aguuuaaggcacagcgaag

SEQ ID NO: 1701117 - RNA, 19 nt, Artificial Sequence
  Description of Artificial Sequence: Synthetic oligonucleotide
  Sense strand starting at position 3704 of SEQ ID NO: 1561822
uucgcugugccuuaaacua

SEQ ID NO: 1701118 - RNA, 19 nt, Artificial Sequence
  Description of Artificial Sequence: Synthetic oligonucleotide
  Antisense strand to SEQ ID NO: 1701117
uaguuuaaggcacagcgaa

SEQ ID NO: 1701119 - RNA, 19 nt, Artificial Sequence
  Description of Artificial Sequence: Synthetic oligonucleotide
  Sense strand starting at position 3721 of SEQ ID NO: 1561822
uacugaucucuguggagug

SEQ ID NO: 1701120 - RNA, 19 nt, Artificial Sequence
  Description of Artificial Sequence: Synthetic oligonucleotide
  Antisense strand to SEQ ID NO: 1701119
cacuccacagagaucagua

SEQ ID NO: 1701121 - RNA, 19 nt, Artificial Sequence
  Description of Artificial Sequence: Synthetic oligonucleotide
  Sense strand starting at position 3726 of SEQ ID NO: 1561822
aucucuguggagugacaaa

SEQ ID NO: 1701122 - RNA, 19 nt, Artificial Sequence
  Description of Artificial Sequence: Synthetic oligonucleotide
  Antisense strand to SEQ ID NO: 1701121
uuugucacuccacagagau

SEQ ID NO: 1701123 - RNA, 19 nt, Artificial Sequence
  Description of Artificial Sequence: Synthetic oligonucleotide
  Sense strand starting at position 3741 of SEQ ID NO: 1561822
caaaguaguucugcaagac

SEQ ID NO: 1701124 - RNA, 19 nt, Artificial Sequence
  Description of Artificial Sequence: Synthetic oligonucleotide
  Antisense strand to SEQ ID NO: 1701123
gucuugcagaacuacuuug

SEQ ID NO: 1701125 - RNA, 19 nt, Artificial Sequence
  Description of Artificial Sequence: Synthetic oligonucleotide
  Sense strand starting at position 3742 of SEQ ID NO: 1561822
aaaguaguucugcaagacu

SEQ ID NO: 1701126 - RNA, 19 nt, Artificial Sequence
  Description of Artificial Sequence: Synthetic oligonucleotide
  Antisense strand to SEQ ID NO: 1701125
agucuugcagaacuacuuu

SEQ ID NO: 1701127 - RNA, 19 nt, Artificial Sequence
  Description of Artificial Sequence: Synthetic oligonucleotide
  Sense strand starting at position 3745 of SEQ ID NO: 1561822
guaguucugcaagacuaug

SEQ ID NO: 1701128 - RNA, 19 nt, Artificial Sequence
  Description of Artificial Sequence: Synthetic oligonucleotide
  Antisense strand to SEQ ID NO: 1701127
cauagucuugcagaacuac

SEQ ID NO: 1701129 - RNA, 19 nt, Artificial Sequence
  Description of Artificial Sequence: Synthetic oligonucleotide
  Sense strand starting at position 3894 of SEQ ID NO: 1561822
acaaauuagccagguguuu

SEQ ID NO: 1701130 - RNA, 19 nt, Artificial Sequence
  Description of Artificial Sequence: Synthetic oligonucleotide
  Antisense strand to SEQ ID NO: 1701129
aaacaccuggcuaauuugu

SEQ ID NO: 1701131 - RNA, 19 nt, Artificial Sequence
  Description of Artificial Sequence: Synthetic oligonucleotide
  Sense strand starting at position 968 of SEQ ID NO: 1561823
ccauuuagcucaggaauuu

SEQ ID NO: 1701132 - RNA, 19 nt, Artificial Sequence
  Description of Artificial Sequence: Synthetic oligonucleotide
  Antisense strand to SEQ ID NO: 1701131
aaauuccugagcuaaaugg

SEQ ID NO: 1701133 - RNA, 19 nt, Artificial Sequence
  Description of Artificial Sequence: Synthetic oligonucleotide
  Sense strand starting at position 1038 of SEQ ID NO: 1561823
uggcccugugaauaauaua

SEQ ID NO: 1701134 - RNA, 19 nt, Artificial Sequence
  Description of Artificial Sequence: Synthetic oligonucleotide
  Antisense strand to SEQ ID NO: 1701133
uauauuauucacagggcca

SEQ ID NO: 1701135 - RNA, 19 nt, Artificial Sequence
  Description of Artificial Sequence: Synthetic oligonucleotide
  Sense strand starting at position 1367 of SEQ ID NO: 1561823
ccggcugaguucuugaauc

SEQ ID NO: 1701136 - RNA, 19 nt, Artificial Sequence
  Description of Artificial Sequence: Synthetic oligonucleotide
  Antisense strand to SEQ ID NO: 1701135
gauucaagaacucagccgg

SEQ ID NO: 1701137 - RNA, 19 nt, Artificial Sequence
  Description of Artificial Sequence: Synthetic oligonucleotide
  Sense strand starting at position 1369 of SEQ ID NO: 1561823
ggcugaguucuugaaucua

SEQ ID NO: 1701138 - RNA, 19 nt, Artificial Sequence
  Description of Artificial Sequence: Synthetic oligonucleotide
  Antisense strand to SEQ ID NO: 1701137
uagauucaagaacucagcc

SEQ ID NO: 1701139 - RNA, 19 nt, Artificial Sequence
  Description of Artificial Sequence: Synthetic oligonucleotide
  Sense strand starting at position 1441 of SEQ ID NO: 1561823
gaggucaucuuccacuguu

SEQ ID NO: 1701140 - RNA, 19 nt, Artificial Sequence
  Description of Artificial Sequence: Synthetic oligonucleotide
  Antisense strand to SEQ ID NO: 1701139
aacaguggaagaugaccuc

SEQ ID NO: 1701141 - RNA, 19 nt, Artificial Sequence
  Description of Artificial Sequence: Synthetic oligonucleotide
  Sense strand starting at position 1444 of SEQ ID NO: 1561823
gucaucuuccacuguuugu

SEQ ID NO: 1701142 - RNA, 19 nt, Artificial Sequence
  Description of Artificial Sequence: Synthetic oligonucleotide
  Antisense strand to SEQ ID NO: 1701141
acaaacaguggaagaugac

SEQ ID NO: 1701143 - RNA, 19 nt, Artificial Sequence
  Description of Artificial Sequence: Synthetic oligonucleotide
  Sense strand starting at position 1451 of SEQ ID NO: 1561823
uccacuguuugucccaaua

SEQ ID NO: 1701144 - RNA, 19 nt, Artificial Sequence
  Description of Artificial Sequence: Synthetic oligonucleotide
  Antisense strand to SEQ ID NO: 1701143
uauugggacaaacagugga

SEQ ID NO: 1701145 - RNA, 19 nt, Artificial Sequence
  Description of Artificial Sequence: Synthetic oligonucleotide
  Sense strand starting at position 1462 of SEQ ID NO: 1561823
ucccaauaucuguggaugu

SEQ ID NO: 1701146 - RNA, 19 nt, Artificial Sequence
  Description of Artificial Sequence: Synthetic oligonucleotide
  Antisense strand to SEQ ID NO: 1701145
acauccacagauauuggga

SEQ ID NO: 1701147 - RNA, 19 nt, Artificial Sequence
  Description of Artificial Sequence: Synthetic oligonucleotide
  Sense strand starting at position 2026 of SEQ ID NO: 1561823
ccuggccauugugaugauu

SEQ ID NO: 1701148 - RNA, 19 nt, Artificial Sequence
  Description of Artificial Sequence: Synthetic oligonucleotide
  Antisense strand to SEQ ID NO: 1701147
aaucaucacaauggccagg

SEQ ID NO: 1701149 - RNA, 19 nt, Artificial Sequence
  Description of Artificial Sequence: Synthetic oligonucleotide
  Sense strand starting at position 2198 of SEQ ID NO: 1561823
gguagaggccgucauguuu

SEQ ID NO: 1701150 - RNA, 19 nt, Artificial Sequence
  Description of Artificial Sequence: Synthetic oligonucleotide
  Antisense strand to SEQ ID NO: 1701149
aaacaugacggccucuacc

SEQ ID NO: 1701151 - RNA, 19 nt, Artificial Sequence
  Description of Artificial Sequence: Synthetic oligonucleotide
  Sense strand starting at position 2281 of SEQ ID NO: 1561823
agcugaguuaaaugggaga

SEQ ID NO: 1701152 - RNA, 19 nt, Artificial Sequence
  Description of Artificial Sequence: Synthetic oligonucleotide
  Antisense strand to SEQ ID NO: 1701151
ucucccauuuaacucagcu

SEQ ID NO: 1701153 - RNA, 19 nt, Artificial Sequence
  Description of Artificial Sequence: Synthetic oligonucleotide
  Sense strand starting at position 2284 of SEQ ID NO: 1561823
ugaguuaaaugggagagaa

SEQ ID NO: 1701154 - RNA, 19 nt, Artificial Sequence
  Description of Artificial Sequence: Synthetic oligonucleotide
  Antisense strand to SEQ ID NO: 1701153
uucucucccauuuaacuca

SEQ ID NO: 1701155 - RNA, 19 nt, Artificial Sequence
  Description of Artificial Sequence: Synthetic oligonucleotide
  Sense strand starting at position 2356 of SEQ ID NO: 1561823
uggccuauguuguuucuaa

SEQ ID NO: 1701156 - RNA, 19 nt, Artificial Sequence
  Description of Artificial Sequence: Synthetic oligonucleotide
  Antisense strand to SEQ ID NO: 1701155
uuagaaacaacauaggcca

SEQ ID NO: 1701157 - RNA, 19 nt, Artificial Sequence
  Description of Artificial Sequence: Synthetic oligonucleotide
  Sense strand starting at position 2357 of SEQ ID NO: 1561823
ggccuauguuguuucuaaa

SEQ ID NO: 1701158 - RNA, 19 nt, Artificial Sequence
  Description of Artificial Sequence: Synthetic oligonucleotide
  Antisense strand to SEQ ID NO: 1701157
uuuagaaacaacauaggcc

SEQ ID NO: 1701159 - RNA, 19 nt, Artificial Sequence
  Description of Artificial Sequence: Synthetic oligonucleotide
  Sense strand starting at position 2380 of SEQ ID NO: 1561823
auuagucaguacuuaaaug

SEQ ID NO: 1701160 - RNA, 19 nt, Artificial Sequence
  Description of Artificial Sequence: Synthetic oligonucleotide
  Antisense strand to SEQ ID NO: 1701159
cauuuaaguacugacuaau

SEQ ID NO: 1701161 - RNA, 19 nt, Artificial Sequence
  Description of Artificial Sequence: Synthetic oligonucleotide
  Sense strand starting at position 2816 of SEQ ID NO: 1561823
ggcccacacugucauagaa

SEQ ID NO: 1701162 - RNA, 19 nt, Artificial Sequence
  Description of Artificial Sequence: Synthetic oligonucleotide
  Antisense strand to SEQ ID NO: 1701161
uucuaugacagugugggcc

SEQ ID NO: 1701163 - RNA, 19 nt, Artificial Sequence
  Description of Artificial Sequence: Synthetic oligonucleotide
  Sense strand starting at position 2832 of SEQ ID NO: 1561823
gaaccagucuucugcuaga

SEQ ID NO: 1701164 - RNA, 19 nt, Artificial Sequence
  Description of Artificial Sequence: Synthetic oligonucleotide
  Antisense strand to SEQ ID NO: 1701163
ucuagcagaagacugguuc

SEQ ID NO: 1701165 - RNA, 19 nt, Artificial Sequence
  Description of Artificial Sequence: Synthetic oligonucleotide
  Sense strand starting at position 2845 of SEQ ID NO: 1561823
gcuagagccaagugaaauc

SEQ ID NO: 1701166 - RNA, 19 nt, Artificial Sequence
  Description of Artificial Sequence: Synthetic oligonucleotide
  Antisense strand to SEQ ID NO: 1701165
gauuucacuuggcucuagc

SEQ ID NO: 1701167 - RNA, 19 nt, Artificial Sequence
  Description of Artificial Sequence: Synthetic oligonucleotide
  Sense strand starting at position 3615 of SEQ ID NO: 1561823
aagaguauaguucgauuaa

SEQ ID NO: 1701168 - RNA, 19 nt, Artificial Sequence
  Description of Artificial Sequence: Synthetic oligonucleotide
  Antisense strand to SEQ ID NO: 1701167
uuaaucgaacuauacucuu

SEQ ID NO: 1701169 - RNA, 19 nt, Artificial Sequence
  Description of Artificial Sequence: Synthetic oligonucleotide
  Sense strand starting at position 3616 of SEQ ID NO: 1561823
agaguauaguucgauuaaa

SEQ ID NO: 1701170 - RNA, 19 nt, Artificial Sequence
  Description of Artificial Sequence: Synthetic oligonucleotide
  Antisense strand to SEQ ID NO: 1701169
uuuaaucgaacuauacucu

SEQ ID NO: 1701171 - RNA, 19 nt, Artificial Sequence
  Description of Artificial Sequence: Synthetic oligonucleotide
  Sense strand starting at position 104 of SEQ ID NO: 1561824
uucucaggcagaugaguua

SEQ ID NO: 1701172 - RNA, 19 nt, Artificial Sequence
  Description of Artificial Sequence: Synthetic oligonucleotide
  Antisense strand to SEQ ID NO: 1701171
uaacucaucugccugagaa

SEQ ID NO: 1701173 - RNA, 19 nt, Artificial Sequence
  Description of Artificial Sequence: Synthetic oligonucleotide
  Sense strand starting at position 131 of SEQ ID NO: 1561824
ccuaaucuccuuugagguu

SEQ ID NO: 1701174 - RNA, 19 nt, Artificial Sequence
  Description of Artificial Sequence: Synthetic oligonucleotide
  Antisense strand to SEQ ID NO: 1701173
aaccucaaaggagauuagg

SEQ ID NO: 1701175 - RNA, 19 nt, Artificial Sequence
  Description of Artificial Sequence: Synthetic oligonucleotide
  Sense strand starting at position 283 of SEQ ID NO: 1561824
ccagaugccagguaugaac

SEQ ID NO: 1701176 - RNA, 19 nt, Artificial Sequence
  Description of Artificial Sequence: Synthetic oligonucleotide
  Antisense strand to SEQ ID NO: 1701175
guucauaccuggcaucugg

SEQ ID NO: 1701177 - RNA, 19 nt, Artificial Sequence
  Description of Artificial Sequence: Synthetic oligonucleotide
  Sense strand starting at position 323 of SEQ ID NO: 1561824
uucuaugaagucugaauua

SEQ ID NO: 1701178 - RNA, 19 nt, Artificial Sequence
  Description of Artificial Sequence: Synthetic oligonucleotide
  Antisense strand to SEQ ID NO: 1701177
uaauucagacuucauagaa

SEQ ID NO: 1701179 - RNA, 19 nt, Artificial Sequence
  Description of Artificial Sequence: Synthetic oligonucleotide
  Sense strand starting at position 533 of SEQ ID NO: 1561824
gaggccauuccagaugagu

SEQ ID NO: 1701180 - RNA, 19 nt, Artificial Sequence
  Description of Artificial Sequence: Synthetic oligonucleotide
  Antisense strand to SEQ ID NO: 1701179
acucaucuggaauggccuc

SEQ ID NO: 1701181 - RNA, 19 nt, Artificial Sequence
  Description of Artificial Sequence: Synthetic oligonucleotide
  Sense strand starting at position 607 of SEQ ID NO: 1561824
ccucacaggucguuagaga

SEQ ID NO: 1701182 - RNA, 19 nt, Artificial Sequence
  Description of Artificial Sequence: Synthetic oligonucleotide
  Antisense strand to SEQ ID NO: 1701181
ucucuaacgaccugugagg

SEQ ID NO: 1701183 - RNA, 19 nt, Artificial Sequence
  Description of Artificial Sequence: Synthetic oligonucleotide
  Sense strand starting at position 789 of SEQ ID NO: 1561824
gaugaaagccuggguccaa

SEQ ID NO: 1701184 - RNA, 19 nt, Artificial Sequence
  Description of Artificial Sequence: Synthetic oligonucleotide
  Antisense strand to SEQ ID NO: 1701183
uuggacccaggcuuucauc

SEQ ID NO: 1701185 - RNA, 19 nt, Artificial Sequence
  Description of Artificial Sequence: Synthetic oligonucleotide
  Sense strand starting at position 790 of SEQ ID NO: 1561824
augaaagccuggguccaau

SEQ ID NO: 1701186 - RNA, 19 nt, Artificial Sequence
  Description of Artificial Sequence: Synthetic oligonucleotide
  Antisense strand to SEQ ID NO: 1701185
auuggacccaggcuuucau

SEQ ID NO: 1701187 - RNA, 19 nt, Artificial Sequence
  Description of Artificial Sequence: Synthetic oligonucleotide
  Sense strand starting at position 908 of SEQ ID NO: 1561824
cccaaacucuugcugggaa

SEQ ID NO: 1701188 - RNA, 19 nt, Artificial Sequence
  Description of Artificial Sequence: Synthetic oligonucleotide
  Antisense strand to SEQ ID NO: 1701187
uucccagcaagaguuuggg

SEQ ID NO: 1701189 - RNA, 19 nt, Artificial Sequence
  Description of Artificial Sequence: Synthetic oligonucleotide
  Sense strand starting at position 1163 of SEQ ID NO: 1561824
ggaagaaagugauagauuu

SEQ ID NO: 1701190 - RNA, 19 nt, Artificial Sequence
  Description of Artificial Sequence: Synthetic oligonucleotide
  Antisense strand to SEQ ID NO: 1701189
aaaucuaucacuuucuucc

SEQ ID NO: 1701191 - RNA, 19 nt, Artificial Sequence
  Description of Artificial Sequence: Synthetic oligonucleotide
  Sense strand starting at position 1196 of SEQ ID NO: 1561824
ugguaugacugcucugaag

SEQ ID NO: 1701192 - RNA, 19 nt, Artificial Sequence
  Description of Artificial Sequence: Synthetic oligonucleotide
  Antisense strand to SEQ ID NO: 1701191
cuucagagcagucauacca

SEQ ID NO: 1701193 - RNA, 19 nt, Artificial Sequence
  Description of Artificial Sequence: Synthetic oligonucleotide
  Sense strand starting at position 1198 of SEQ ID NO: 1561824
guaugacugcucugaagga

SEQ ID NO: 1701194 - RNA, 19 nt, Artificial Sequence
  Description of Artificial Sequence: Synthetic oligonucleotide
  Antisense strand to SEQ ID NO: 1701193
uccuucagagcagucauac

SEQ ID NO: 1701195 - RNA, 19 nt, Artificial Sequence
  Description of Artificial Sequence: Synthetic oligonucleotide
  Sense strand starting at position 1545 of SEQ ID NO: 1561824
ggcugucaacuaggaggau

SEQ ID NO: 1701196 - RNA, 19 nt, Artificial Sequence
  Description of Artificial Sequence: Synthetic oligonucleotide
  Antisense strand to SEQ ID NO: 1701195
auccuccuaguugacagcc

SEQ ID NO: 1701197 - RNA, 19 nt, Artificial Sequence
  Description of Artificial Sequence: Synthetic oligonucleotide
  Sense strand starting at position 2315 of SEQ ID NO: 1561824
ccugcagaaaugggugaaa

SEQ ID NO: 1701198 - RNA, 19 nt, Artificial Sequence
  Description of Artificial Sequence: Synthetic oligonucleotide
  Antisense strand to SEQ ID NO: 1701197
uuucacccauuucugcagg

SEQ ID NO: 1701199 - RNA, 19 nt, Artificial Sequence
  Description of Artificial Sequence: Synthetic oligonucleotide
  Sense strand starting at position 2317 of SEQ ID NO: 1561824
ugcagaaaugggugaaauc

SEQ ID NO: 1701200 - RNA, 19 nt, Artificial Sequence
  Description of Artificial Sequence: Synthetic oligonucleotide
  Antisense strand to SEQ ID NO: 1701199
gauuucacccauuucugca

SEQ ID NO: 1701201 - RNA, 19 nt, Artificial Sequence
  Description of Artificial Sequence: Synthetic oligonucleotide
  Sense strand starting at position 2347 of SEQ ID NO: 1561824
uauagauauguuuacgugu

SEQ ID NO: 1701202 - RNA, 19 nt, Artificial Sequence
  Description of Artificial Sequence: Synthetic oligonucleotide
  Antisense strand to SEQ ID NO: 1701201
acacguaaacauaucuaua

SEQ ID NO: 1701203 - RNA, 19 nt, Artificial Sequence
  Description of Artificial Sequence: Synthetic oligonucleotide
  Sense strand starting at position 2352 of SEQ ID NO: 1561824
auauguuuacguguuagcu

SEQ ID NO: 1701204 - RNA, 19 nt, Artificial Sequence
  Description of Artificial Sequence: Synthetic oligonucleotide
  Antisense strand to SEQ ID NO: 1701203
agcuaacacguaaacauau

SEQ ID NO: 1701205 - RNA, 19 nt, Artificial Sequence
  Description of Artificial Sequence: Synthetic oligonucleotide
  Sense strand starting at position 2360 of SEQ ID NO: 1561824
acguguuagcuccaaagaa

SEQ ID NO: 1701206 - RNA, 19 nt, Artificial Sequence
  Description of Artificial Sequence: Synthetic oligonucleotide
  Antisense strand to SEQ ID NO: 1701205
uucuuuggagcuaacacgu

SEQ ID NO: 1701207 - RNA, 19 nt, Artificial Sequence
  Description of Artificial Sequence: Synthetic oligonucleotide
  Sense strand starting at position 2436 of SEQ ID NO: 1561824
cauagauuguuggcgugaa

SEQ ID NO: 1701208 - RNA, 19 nt, Artificial Sequence
  Description of Artificial Sequence: Synthetic oligonucleotide
  Antisense strand to SEQ ID NO: 1701207
uucacgccaacaaucuaug

SEQ ID NO: 1701209 - RNA, 19 nt, Artificial Sequence
  Description of Artificial Sequence: Synthetic oligonucleotide
  Sense strand starting at position 2440 of SEQ ID NO: 1561824
gauuguuggcgugaaugua

SEQ ID NO: 1701210 - RNA, 19 nt, Artificial Sequence
  Description of Artificial Sequence: Synthetic oligonucleotide
  Antisense strand to SEQ ID NO: 1701209
uacauucacgccaacaauc

SEQ ID NO: 1701211 - RNA, 19 nt, Artificial Sequence
  Description of Artificial Sequence: Synthetic oligonucleotide
  Sense strand starting at position 2450 of SEQ ID NO: 1561824
gugaauguaaagcgaaaga

SEQ ID NO: 1701212 - RNA, 19 nt, Artificial Sequence
  Description of Artificial Sequence: Synthetic oligonucleotide
  Antisense strand to SEQ ID NO: 1701211
ucuuucgcuuuacauucac

SEQ ID NO: 1701213 - RNA, 19 nt, Artificial Sequence
  Description of Artificial Sequence: Synthetic oligonucleotide
  Sense strand starting at position 2535 of SEQ ID NO: 1561824
guagcuucucaagagaaac

SEQ ID NO: 1701214 - RNA, 19 nt, Artificial Sequence
  Description of Artificial Sequence: Synthetic oligonucleotide
  Antisense strand to SEQ ID NO: 1701213
guuucucuugagaagcuac

SEQ ID NO: 1701215 - RNA, 19 nt, Artificial Sequence
  Description of Artificial Sequence: Synthetic oligonucleotide
  Sense strand starting at position 2582 of SEQ ID NO: 1561824
ugaagacaccaauguuugu

SEQ ID NO: 1701216 - RNA, 19 nt, Artificial Sequence
  Description of Artificial Sequence: Synthetic oligonucleotide
  Antisense strand to SEQ ID NO: 1701215
acaaacauuggugucuuca

SEQ ID NO: 1701217 - RNA, 19 nt, Artificial Sequence
  Description of Artificial Sequence: Synthetic oligonucleotide
  Sense strand starting at position 2587 of SEQ ID NO: 1561824
acaccaauguuuguagaga

SEQ ID NO: 1701218 - RNA, 19 nt, Artificial Sequence
  Description of Artificial Sequence: Synthetic oligonucleotide
  Antisense strand to SEQ ID NO: 1701217
ucucuacaaacauuggugu

SEQ ID NO: 1701219 - RNA, 19 nt, Artificial Sequence
  Description of Artificial Sequence: Synthetic oligonucleotide
  Sense strand starting at position 2938 of SEQ ID NO: 1561824
gauuguagggauggugaca

SEQ ID NO: 1701220 - RNA, 19 nt, Artificial Sequence
  Description of Artificial Sequence: Synthetic oligonucleotide
  Antisense strand to SEQ ID NO: 1701219
ugucaccaucccuacaauc

SEQ ID NO: 1701221 - RNA, 19 nt, Artificial Sequence
  Description of Artificial Sequence: Synthetic oligonucleotide
  Sense strand starting at position 2947 of SEQ ID NO: 1561824
gauggugacagcuguguaa

SEQ ID NO: 1701222 - RNA, 19 nt, Artificial Sequence
  Description of Artificial Sequence: Synthetic oligonucleotide
  Antisense strand to SEQ ID NO: 1701221
uuacacagcugucaccauc

SEQ ID NO: 1701223 - RNA, 19 nt, Artificial Sequence
  Description of Artificial Sequence: Synthetic oligonucleotide
  Sense strand starting at position 2950 of SEQ ID NO: 1561824
ggugacagcuguguaacua

SEQ ID NO: 1701224 - RNA, 19 nt, Artificial Sequence
  Description of Artificial Sequence: Synthetic oligonucleotide
  Antisense strand to SEQ ID NO: 1701223
uaguuacacagcugucacc

SEQ ID NO: 1701225 - RNA, 19 nt, Artificial Sequence
  Description of Artificial Sequence: Synthetic oligonucleotide
  Sense strand starting at position 3463 of SEQ ID NO: 1561824
uggaguuauagcugugaaa

SEQ ID NO: 1701226 - RNA, 19 nt, Artificial Sequence
  Description of Artificial Sequence: Synthetic oligonucleotide
  Antisense strand to SEQ ID NO: 1701225
uuucacagcuauaacucca

SEQ ID NO: 1701227 - RNA, 19 nt, Artificial Sequence
  Description of Artificial Sequence: Synthetic oligonucleotide
  Sense strand starting at position 3465 of SEQ ID NO: 1561824
gaguuauagcugugaaagu

SEQ ID NO: 1701228 - RNA, 19 nt, Artificial Sequence
  Description of Artificial Sequence: Synthetic oligonucleotide
  Antisense strand to SEQ ID NO: 1701227
acuuucacagcuauaacuc

SEQ ID NO: 1701229 - RNA, 19 nt, Artificial Sequence
  Description of Artificial Sequence: Synthetic oligonucleotide
  Sense strand starting at position 3524 of SEQ ID NO: 1561824
ugggaauccuuccauuuaa

SEQ ID NO: 1701230 - RNA, 19 nt, Artificial Sequence
  Description of Artificial Sequence: Synthetic oligonucleotide
  Antisense strand to SEQ ID NO: 1701229
uuaaauggaaggauuccca

SEQ ID NO: 1701231 - RNA, 19 nt, Artificial Sequence
  Description of Artificial Sequence: Synthetic oligonucleotide
  Sense strand starting at position 3535 of SEQ ID NO: 1561824
ccauuuaagugucugcaag

SEQ ID NO: 1701232 - RNA, 19 nt, Artificial Sequence
  Description of Artificial Sequence: Synthetic oligonucleotide
  Antisense strand to SEQ ID NO: 1701231
cuugcagacacuuaaaugg

SEQ ID NO: 1701233 - RNA, 19 nt, Artificial Sequence
  Description of Artificial Sequence: Synthetic oligonucleotide
  Sense strand starting at position 3566 of SEQ ID NO: 1561824
agugcuuaagggugcagau

SEQ ID NO: 1701234 - RNA, 19 nt, Artificial Sequence
  Description of Artificial Sequence: Synthetic oligonucleotide
  Antisense strand to SEQ ID NO: 1701233
aucugcacccuuaagcacu

SEQ ID NO: 1701235 - RNA, 19 nt, Artificial Sequence
  Description of Artificial Sequence: Synthetic oligonucleotide
  Sense strand starting at position 3591 of SEQ ID NO: 1561824
ucagguuggcccuagaagu

SEQ ID NO: 1701236 - RNA, 19 nt, Artificial Sequence
  Description of Artificial Sequence: Synthetic oligonucleotide
  Antisense strand to SEQ ID NO: 1701235
acuucuagggccaaccuga

SEQ ID NO: 1701237 - RNA, 19 nt, Artificial Sequence
  Description of Artificial Sequence: Synthetic oligonucleotide
  Sense strand starting at position 3612 of SEQ ID NO: 1561824
agcugugugauuuggaagu

SEQ ID NO: 1701238 - RNA, 19 nt, Artificial Sequence
  Description of Artificial Sequence: Synthetic oligonucleotide
  Antisense strand to SEQ ID NO: 1701237
acuuccaaaucacacagcu

SEQ ID NO: 1701239 - RNA, 19 nt, Artificial Sequence
  Description of Artificial Sequence: Synthetic oligonucleotide
  Sense strand starting at position 3719 of SEQ ID NO: 1561824
uugacacaguucuuggaaa

SEQ ID NO: 1701240 - RNA, 19 nt, Artificial Sequence
  Description of Artificial Sequence: Synthetic oligonucleotide
  Antisense strand to SEQ ID NO: 1701239
uuuccaagaacugugucaa

SEQ ID NO: 1701241 - RNA, 19 nt, Artificial Sequence
  Description of Artificial Sequence: Synthetic oligonucleotide
  Sense strand starting at position 3783 of SEQ ID NO: 1561824
cugggauguuguagagaug

SEQ ID NO: 1701242 - RNA, 19 nt, Artificial Sequence
  Description of Artificial Sequence: Synthetic oligonucleotide
  Antisense strand to SEQ ID NO: 1701241
caucucuacaacaucccag

SEQ ID NO: 1701243 - RNA, 19 nt, Artificial Sequence
  Description of Artificial Sequence: Synthetic oligonucleotide
  Sense strand starting at position 3786 of SEQ ID NO: 1561824
ggauguuguagagaugccu

SEQ ID NO: 1701244 - RNA, 19 nt, Artificial Sequence
  Description of Artificial Sequence: Synthetic oligonucleotide
  Antisense strand to SEQ ID NO: 1701243
aggcaucucuacaacaucc

SEQ ID NO: 1701245 - RNA, 19 nt, Artificial Sequence
  Description of Artificial Sequence: Synthetic oligonucleotide
  Sense strand starting at position 3795 of SEQ ID NO: 1561824
agagaugccuugccugaag

SEQ ID NO: 1701246 - RNA, 19 nt, Artificial Sequence
  Description of Artificial Sequence: Synthetic oligonucleotide
  Antisense strand to SEQ ID NO: 1701245
cuucaggcaaggcaucucu

SEQ ID NO: 1701247 - RNA, 19 nt, Artificial Sequence
  Description of Artificial Sequence: Synthetic oligonucleotide
  Sense strand starting at position 3859 of SEQ ID NO: 1561824
ucucgacuuccucaugguu

SEQ ID NO: 1701248 - RNA, 19 nt, Artificial Sequence
  Description of Artificial Sequence: Synthetic oligonucleotide
  Antisense strand to SEQ ID NO: 1701247
aaccaugaggaagucgaga

SEQ ID NO: 1701249 - RNA, 19 nt, Artificial Sequence
  Description of Artificial Sequence: Synthetic oligonucleotide
  Sense strand starting at position 3867 of SEQ ID NO: 1561824
uccucaugguucccaugau

SEQ ID NO: 1701250 - RNA, 19 nt, Artificial Sequence
  Description of Artificial Sequence: Synthetic oligonucleotide
  Antisense strand to SEQ ID NO: 1701249
aucaugggaaccaugagga

SEQ ID NO: 1701251 - RNA, 19 nt, Artificial Sequence
  Description of Artificial Sequence: Synthetic oligonucleotide
  Sense strand starting at position 163 of SEQ ID NO: 1561825
agagauagggccuagcuau

SEQ ID NO: 1701252 - RNA, 19 nt, Artificial Sequence
  Description of Artificial Sequence: Synthetic oligonucleotide
  Antisense strand to SEQ ID NO: 1701251
auagcuaggcccuaucucu

SEQ ID NO: 1701253 - RNA, 19 nt, Artificial Sequence
  Description of Artificial Sequence: Synthetic oligonucleotide
  Sense strand starting at position 246 of SEQ ID NO: 1561825
cagggaguauaugugugaa

SEQ ID NO: 1701254 - RNA, 19 nt, Artificial Sequence
  Description of Artificial Sequence: Synthetic oligonucleotide
  Antisense strand to SEQ ID NO: 1701253
uucacacauauacucccug

SEQ ID NO: 1701255 - RNA, 19 nt, Artificial Sequence
  Description of Artificial Sequence: Synthetic oligonucleotide
  Sense strand starting at position 249 of SEQ ID NO: 1561825
ggaguauaugugugaacca

SEQ ID NO: 1701256 - RNA, 19 nt, Artificial Sequence
  Description of Artificial Sequence: Synthetic oligonucleotide
  Antisense strand to SEQ ID NO: 1701255
ugguucacacauauacucc

SEQ ID NO: 1701257 - RNA, 19 nt, Artificial Sequence
  Description of Artificial Sequence: Synthetic oligonucleotide
  Sense strand starting at position 269 of SEQ ID NO: 1561825
ggcacauaguuuccaaauu

SEQ ID NO: 1701258 - RNA, 19 nt, Artificial Sequence
  Description of Artificial Sequence: Synthetic oligonucleotide
  Antisense strand to SEQ ID NO: 1701257
aauuuggaaacuaugugcc

SEQ ID NO: 1701259 - RNA, 19 nt, Artificial Sequence
  Description of Artificial Sequence: Synthetic oligonucleotide
  Sense strand starting at position 312 of SEQ ID NO: 1561825
caugaaaugccacggucua

SEQ ID NO: 1701260 - RNA, 19 nt, Artificial Sequence
  Description of Artificial Sequence: Synthetic oligonucleotide
  Antisense strand to SEQ ID NO: 1701259
uagaccguggcauuucaug

SEQ ID NO: 1701261 - RNA, 19 nt, Artificial Sequence
  Description of Artificial Sequence: Synthetic oligonucleotide
  Sense strand starting at position 313 of SEQ ID NO: 1561825
augaaaugccacggucuaa

SEQ ID NO: 1701262 - RNA, 19 nt, Artificial Sequence
  Description of Artificial Sequence: Synthetic oligonucleotide
  Antisense strand to SEQ ID NO: 1701261
uuagaccguggcauuucau

SEQ ID NO: 1701263 - RNA, 19 nt, Artificial Sequence
  Description of Artificial Sequence: Synthetic oligonucleotide
  Sense strand starting at position 391 of SEQ ID NO: 1561825
guuuacggauguuuacuaa

SEQ ID NO: 1701264 - RNA, 19 nt, Artificial Sequence
  Description of Artificial Sequence: Synthetic oligonucleotide
  Antisense strand to SEQ ID NO: 1701263
uuaguaaacauccguaaac

SEQ ID NO: 1701265 - RNA, 19 nt, Artificial Sequence
  Description of Artificial Sequence: Synthetic oligonucleotide
  Sense strand starting at position 394 of SEQ ID NO: 1561825
uacggauguuuacuaaaua

SEQ ID NO: 1701266 - RNA, 19 nt, Artificial Sequence
  Description of Artificial Sequence: Synthetic oligonucleotide
  Antisense strand to SEQ ID NO: 1701265
uauuuaguaaacauccgua

SEQ ID NO: 1701267 - RNA, 19 nt, Artificial Sequence
  Description of Artificial Sequence: Synthetic oligonucleotide
  Sense strand starting at position 406 of SEQ ID NO: 1561825
cuaaauaauccgcaggcuu

SEQ ID NO: 1701268 - RNA, 19 nt, Artificial Sequence
  Description of Artificial Sequence: Synthetic oligonucleotide
  Antisense strand to SEQ ID NO: 1701267
aagccugcggauuauuuag

SEQ ID NO: 1701269 - RNA, 19 nt, Artificial Sequence
  Description of Artificial Sequence: Synthetic oligonucleotide
  Sense strand starting at position 560 of SEQ ID NO: 1561825
cuuagaucuauuggcggaa

SEQ ID NO: 1701270 - RNA, 19 nt, Artificial Sequence
  Description of Artificial Sequence: Synthetic oligonucleotide
  Antisense strand to SEQ ID NO: 1701269
uuccgccaauagaucuaag

SEQ ID NO: 1701271 - RNA, 19 nt, Artificial Sequence
  Description of Artificial Sequence: Synthetic oligonucleotide
  Sense strand starting at position 561 of SEQ ID NO: 1561825
uuagaucuauuggcggaaa

SEQ ID NO: 1701272 - RNA, 19 nt, Artificial Sequence
  Description of Artificial Sequence: Synthetic oligonucleotide
  Antisense strand to SEQ ID NO: 1701271
uuuccgccaauagaucuaa

SEQ ID NO: 1701273 - RNA, 19 nt, Artificial Sequence
  Description of Artificial Sequence: Synthetic oligonucleotide
  Sense strand starting at position 624 of SEQ ID NO: 1561825
ugaagcacucuucgaucuu

SEQ ID NO: 1701274 - RNA, 19 nt, Artificial Sequence
  Description of Artificial Sequence: Synthetic oligonucleotide
  Antisense strand to SEQ ID NO: 1701273
aagaucgaagagugcuuca

SEQ ID NO: 1701275 - RNA, 19 nt, Artificial Sequence
  Description of Artificial Sequence: Synthetic oligonucleotide
  Sense strand starting at position 737 of SEQ ID NO: 1561825
acaccuguguaccuuagau

SEQ ID NO: 1701276 - RNA, 19 nt, Artificial Sequence
  Description of Artificial Sequence: Synthetic oligonucleotide
  Antisense strand to SEQ ID NO: 1701275
aucuaagguacacaggugu

SEQ ID NO: 1701277 - RNA, 19 nt, Artificial Sequence
  Description of Artificial Sequence: Synthetic oligonucleotide
  Sense strand starting at position 744 of SEQ ID NO: 1561825
uguaccuuagauugcauau

SEQ ID NO: 1701278 - RNA, 19 nt, Artificial Sequence
  Description of Artificial Sequence: Synthetic oligonucleotide
  Antisense strand to SEQ ID NO: 1701277
auaugcaaucuaagguaca

SEQ ID NO: 1701279 - RNA, 19 nt, Artificial Sequence
  Description of Artificial Sequence: Synthetic oligonucleotide
  Sense strand starting at position 766 of SEQ ID NO: 1561825
aucugucagcucugaauua

SEQ ID NO: 1701280 - RNA, 19 nt, Artificial Sequence
  Description of Artificial Sequence: Synthetic oligonucleotide
  Antisense strand to SEQ ID NO: 1701279
uaauucagagcugacagau

SEQ ID NO: 1701281 - RNA, 19 nt, Artificial Sequence
  Description of Artificial Sequence: Synthetic oligonucleotide
  Sense strand starting at position 822 of SEQ ID NO: 1561825
guuacaaaguugucaagaa

SEQ ID NO: 1701282 - RNA, 19 nt, Artificial Sequence
  Description of Artificial Sequence: Synthetic oligonucleotide
  Antisense strand to SEQ ID NO: 1701281
uucuugacaacuuuguaac

SEQ ID NO: 1701283 - RNA, 19 nt, Artificial Sequence
  Description of Artificial Sequence: Synthetic oligonucleotide
  Sense strand starting at position 831 of SEQ ID NO: 1561825
uugucaagaaguugguaau

SEQ ID NO: 1701284 - RNA, 19 nt, Artificial Sequence
  Description of Artificial Sequence: Synthetic oligonucleotide
  Antisense strand to SEQ ID NO: 1701283
auuaccaacuucuugacaa

SEQ ID NO: 1701285 - RNA, 19 nt, Artificial Sequence
  Description of Artificial Sequence: Synthetic oligonucleotide
  Sense strand starting at position 832 of SEQ ID NO: 1561825
ugucaagaaguugguaauu

SEQ ID NO: 1701286 - RNA, 19 nt, Artificial Sequence
  Description of Artificial Sequence: Synthetic oligonucleotide
  Antisense strand to SEQ ID NO: 1701285
aauuaccaacuucuugaca

SEQ ID NO: 1701287 - RNA, 19 nt, Artificial Sequence
  Description of Artificial Sequence: Synthetic oligonucleotide
  Sense strand starting at position 843 of SEQ ID NO: 1561825
ugguaauucuagcuaagca

SEQ ID NO: 1701288 - RNA, 19 nt, Artificial Sequence
  Description of Artificial Sequence: Synthetic oligonucleotide
  Antisense strand to SEQ ID NO: 1701287
ugcuuagcuagaauuacca

SEQ ID NO: 1701289 - RNA, 19 nt, Artificial Sequence
  Description of Artificial Sequence: Synthetic oligonucleotide
  Sense strand starting at position 844 of SEQ ID NO: 1561825
gguaauucuagcuaagcag

SEQ ID NO: 1701290 - RNA, 19 nt, Artificial Sequence
  Description of Artificial Sequence: Synthetic oligonucleotide
  Antisense strand to SEQ ID NO: 1701289
cugcuuagcuagaauuacc

SEQ ID NO: 1701291 - RNA, 19 nt, Artificial Sequence
  Description of Artificial Sequence: Synthetic oligonucleotide
  Sense strand starting at position 850 of SEQ ID NO: 1561825
ucuagcuaagcagaauauu

SEQ ID NO: 1701292 - RNA, 19 nt, Artificial Sequence
  Description of Artificial Sequence: Synthetic oligonucleotide
  Antisense strand to SEQ ID NO: 1701291
aauauucugcuuagcuaga

SEQ ID NO: 1701293 - RNA, 19 nt, Artificial Sequence
  Description of Artificial Sequence: Synthetic oligonucleotide
  Sense strand starting at position 918 of SEQ ID NO: 1561825
acaacugagcuuugauucu

SEQ ID NO: 1701294 - RNA, 19 nt, Artificial Sequence
  Description of Artificial Sequence: Synthetic oligonucleotide
  Antisense strand to SEQ ID NO: 1701293
agaaucaaagcucaguugu

SEQ ID NO: 1701295 - RNA, 19 nt, Artificial Sequence
  Description of Artificial Sequence: Synthetic oligonucleotide
  Sense strand starting at position 1181 of SEQ ID NO: 1561825
aggcucaucaguggaggau

SEQ ID NO: 1701296 - RNA, 19 nt, Artificial Sequence
  Description of Artificial Sequence: Synthetic oligonucleotide
  Antisense strand to SEQ ID NO: 1701295
auccuccacugaugagccu

SEQ ID NO: 1701297 - RNA, 19 nt, Artificial Sequence
  Description of Artificial Sequence: Synthetic oligonucleotide
  Sense strand starting at position 1182 of SEQ ID NO: 1561825
ggcucaucaguggaggauu

SEQ ID NO: 1701298 - RNA, 19 nt, Artificial Sequence
  Description of Artificial Sequence: Synthetic oligonucleotide
  Antisense strand to SEQ ID NO: 1701297
aauccuccacugaugagcc

SEQ ID NO: 1701299 - RNA, 19 nt, Artificial Sequence
  Description of Artificial Sequence: Synthetic oligonucleotide
  Sense strand starting at position 1195 of SEQ ID NO: 1561825
aggauugaauuccucggau

SEQ ID NO: 1701300 - RNA, 19 nt, Artificial Sequence
  Description of Artificial Sequence: Synthetic oligonucleotide
  Antisense strand to SEQ ID NO: 1701299
auccgaggaauucaauccu

SEQ ID NO: 1701301 - RNA, 19 nt, Artificial Sequence
  Description of Artificial Sequence: Synthetic oligonucleotide
  Sense strand starting at position 1197 of SEQ ID NO: 1561825
gauugaauuccucggauga

SEQ ID NO: 1701302 - RNA, 19 nt, Artificial Sequence
  Description of Artificial Sequence: Synthetic oligonucleotide
  Antisense strand to SEQ ID NO: 1701301
ucauccgaggaauucaauc

SEQ ID NO: 1701303 - RNA, 19 nt, Artificial Sequence
  Description of Artificial Sequence: Synthetic oligonucleotide
  Sense strand starting at position 1198 of SEQ ID NO: 1561825
auugaauuccucggaugaa

SEQ ID NO: 1701304 - RNA, 19 nt, Artificial Sequence
  Description of Artificial Sequence: Synthetic oligonucleotide
  Antisense strand to SEQ ID NO: 1701303
uucauccgaggaauucaau

SEQ ID NO: 1701305 - RNA, 19 nt, Artificial Sequence
  Description of Artificial Sequence: Synthetic oligonucleotide
  Sense strand starting at position 1201 of SEQ ID NO: 1561825
gaauuccucggaugaaguu

SEQ ID NO: 1701306 - RNA, 19 nt, Artificial Sequence
  Description of Artificial Sequence: Synthetic oligonucleotide
  Antisense strand to SEQ ID NO: 1701305
aacuucauccgaggaauuc

SEQ ID NO: 1701307 - RNA, 19 nt, Artificial Sequence
  Description of Artificial Sequence: Synthetic oligonucleotide
  Sense strand starting at position 1202 of SEQ ID NO: 1561825
aauuccucggaugaaguua

SEQ ID NO: 1701308 - RNA, 19 nt, Artificial Sequence
  Description of Artificial Sequence: Synthetic oligonucleotide
  Antisense strand to SEQ ID NO: 1701307
uaacuucauccgaggaauu

SEQ ID NO: 1701309 - RNA, 19 nt, Artificial Sequence
  Description of Artificial Sequence: Synthetic oligonucleotide
  Sense strand starting at position 1210 of SEQ ID NO: 1561825
ggaugaaguuaauccacau

SEQ ID NO: 1701310 - RNA, 19 nt, Artificial Sequence
  Description of Artificial Sequence: Synthetic oligonucleotide
  Antisense strand to SEQ ID NO: 1701309
auguggauuaacuucaucc

SEQ ID NO: 1701311 - RNA, 19 nt, Artificial Sequence
  Description of Artificial Sequence: Synthetic oligonucleotide
  Sense strand starting at position 1448 of SEQ ID NO: 1561825
uuaaacggaucucuuaaau

SEQ ID NO: 1701312 - RNA, 19 nt, Artificial Sequence
  Description of Artificial Sequence: Synthetic oligonucleotide
  Antisense strand to SEQ ID NO: 1701311
auuuaagagauccguuuaa

SEQ ID NO: 1701313 - RNA, 19 nt, Artificial Sequence
  Description of Artificial Sequence: Synthetic oligonucleotide
  Sense strand starting at position 1464 of SEQ ID NO: 1561825
aauggaagcgucugaaaga

SEQ ID NO: 1701314 - RNA, 19 nt, Artificial Sequence
  Description of Artificial Sequence: Synthetic oligonucleotide
  Antisense strand to SEQ ID NO: 1701313
ucuuucagacgcuuccauu

SEQ ID NO: 1701315 - RNA, 19 nt, Artificial Sequence
  Description of Artificial Sequence: Synthetic oligonucleotide
  Sense strand starting at position 1846 of SEQ ID NO: 1561825
cguucaucaggagagcaua

SEQ ID NO: 1701316 - RNA, 19 nt, Artificial Sequence
  Description of Artificial Sequence: Synthetic oligonucleotide
  Antisense strand to SEQ ID NO: 1701315
uaugcucuccugaugaacg

SEQ ID NO: 1701317 - RNA, 19 nt, Artificial Sequence
  Description of Artificial Sequence: Synthetic oligonucleotide
  Sense strand starting at position 2821 of SEQ ID NO: 1561825
gccgguuccacuuagggaa

SEQ ID NO: 1701318 - RNA, 19 nt, Artificial Sequence
  Description of Artificial Sequence: Synthetic oligonucleotide
  Antisense strand to SEQ ID NO: 1701317
uucccuaaguggaaccggc

SEQ ID NO: 1701319 - RNA, 19 nt, Artificial Sequence
  Description of Artificial Sequence: Synthetic oligonucleotide
  Sense strand starting at position 3708 of SEQ ID NO: 1561825
auccacgcuucucuugaaa

SEQ ID NO: 1701320 - RNA, 19 nt, Artificial Sequence
  Description of Artificial Sequence: Synthetic oligonucleotide
  Antisense strand to SEQ ID NO: 1701319
uuucaagagaagcguggau

SEQ ID NO: 1701321 - RNA, 19 nt, Artificial Sequence
  Description of Artificial Sequence: Synthetic oligonucleotide
  Sense strand starting at position 3735 of SEQ ID NO: 1561825
uucuguucucgguuuccga

SEQ ID NO: 1701322 - RNA, 19 nt, Artificial Sequence
  Description of Artificial Sequence: Synthetic oligonucleotide
  Antisense strand to SEQ ID NO: 1701321
ucggaaaccgagaacagaa

SEQ ID NO: 1701323 - RNA, 19 nt, Artificial Sequence
  Description of Artificial Sequence: Synthetic oligonucleotide
  Sense strand starting at position 3742 of SEQ ID NO: 1561825
cucgguuuccgaagucguu

SEQ ID NO: 1701324 - RNA, 19 nt, Artificial Sequence
  Description of Artificial Sequence: Synthetic oligonucleotide
  Antisense strand to SEQ ID NO: 1701323
aacgacuucggaaaccgag

SEQ ID NO: 1701325 - RNA, 19 nt, Artificial Sequence
  Description of Artificial Sequence: Synthetic oligonucleotide
  Sense strand starting at position 3748 of SEQ ID NO: 1561825
uuccgaagucguucuguua

SEQ ID NO: 1701326 - RNA, 19 nt, Artificial Sequence
  Description of Artificial Sequence: Synthetic oligonucleotide
  Antisense strand to SEQ ID NO: 1701325
uaacagaacgacuucggaa

SEQ ID NO: 1701327 - RNA, 19 nt, Artificial Sequence
  Description of Artificial Sequence: Synthetic oligonucleotide
  Sense strand starting at position 3875 of SEQ ID NO: 1561825
aauguuaacuuguuugaug

SEQ ID NO: 1701328 - RNA, 19 nt, Artificial Sequence
  Description of Artificial Sequence: Synthetic oligonucleotide
  Antisense strand to SEQ ID NO: 1701327
caucaaacaaguuaacauu

SEQ ID NO: 1701329 - RNA, 19 nt, Artificial Sequence
  Description of Artificial Sequence: Synthetic oligonucleotide
  Sense strand starting at position 3896 of SEQ ID NO: 1561825
guggauagugcugugcuuu

SEQ ID NO: 1701330 - RNA, 19 nt, Artificial Sequence
  Description of Artificial Sequence: Synthetic oligonucleotide
  Antisense strand to SEQ ID NO: 1701329
aaagcacagcacuauccac

SEQ ID NO: 1701331 - RNA, 19 nt, Artificial Sequence
  Description of Artificial Sequence: Synthetic oligonucleotide
  Sense strand starting at position 204 of SEQ ID NO: 1561826
agaauacugucaguaacua

SEQ ID NO: 1701332 - RNA, 19 nt, Artificial Sequence
  Description of Artificial Sequence: Synthetic oligonucleotide
  Antisense strand to SEQ ID NO: 1701331
uaguuacugacaguauucu

SEQ ID NO: 1701333 - RNA, 19 nt, Artificial Sequence
  Description of Artificial Sequence: Synthetic oligonucleotide
  Sense strand starting at position 215 of SEQ ID NO: 1561826
aguaacuauugauugcaaa

SEQ ID NO: 1701334 - RNA, 19 nt, Artificial Sequence
  Description of Artificial Sequence: Synthetic oligonucleotide
  Antisense strand to SEQ ID NO: 1701333
uuugcaaucaauaguuacu

SEQ ID NO: 1701335 - RNA, 19 nt, Artificial Sequence
  Description of Artificial Sequence: Synthetic oligonucleotide
  Sense strand starting at position 216 of SEQ ID NO: 1561826
guaacuauugauugcaaau

SEQ ID NO: 1701336 - RNA, 19 nt, Artificial Sequence
  Description of Artificial Sequence: Synthetic oligonucleotide
  Antisense strand to SEQ ID NO: 1701335
auuugcaaucaauaguuac

SEQ ID NO: 1701337 - RNA, 19 nt, Artificial Sequence
  Description of Artificial Sequence: Synthetic oligonucleotide
  Sense strand starting at position 295 of SEQ ID NO: 1561826
aaauauuaaggcugugauc

SEQ ID NO: 1701338 - RNA, 19 nt, Artificial Sequence
  Description of Artificial Sequence: Synthetic oligonucleotide
  Antisense strand to SEQ ID NO: 1701337
gaucacagccuuaauauuu

SEQ ID NO: 1701339 - RNA, 19 nt, Artificial Sequence
  Description of Artificial Sequence: Synthetic oligonucleotide
  Sense strand starting at position 297 of SEQ ID NO: 1561826
auauuaaggcugugaucau

SEQ ID NO: 1701340 - RNA, 19 nt, Artificial Sequence
  Description of Artificial Sequence: Synthetic oligonucleotide
  Antisense strand to SEQ ID NO: 1701339
augaucacagccuuaauau

SEQ ID NO: 1701341 - RNA, 19 nt, Artificial Sequence
  Description of Artificial Sequence: Synthetic oligonucleotide
  Sense strand starting at position 320 of SEQ ID NO: 1561826
ugguuugcacucuagguua

SEQ ID NO: 1701342 - RNA, 19 nt, Artificial Sequence
  Description of Artificial Sequence: Synthetic oligonucleotide
  Antisense strand to SEQ ID NO: 1701341
uaaccuagagugcaaacca

SEQ ID NO: 1701343 - RNA, 19 nt, Artificial Sequence
  Description of Artificial Sequence: Synthetic oligonucleotide
  Sense strand starting at position 325 of SEQ ID NO: 1561826
ugcacucuagguuaugaaa

SEQ ID NO: 1701344 - RNA, 19 nt, Artificial Sequence
  Description of Artificial Sequence: Synthetic oligonucleotide
  Antisense strand to SEQ ID NO: 1701343
uuucauaaccuagagugca

SEQ ID NO: 1701345 - RNA, 19 nt, Artificial Sequence
  Description of Artificial Sequence: Synthetic oligonucleotide
  Sense strand starting at position 391 of SEQ ID NO: 1561826
ugcuuauuacaguagauau

SEQ ID NO: 1701346 - RNA, 19 nt, Artificial Sequence
  Description of Artificial Sequence: Synthetic oligonucleotide
  Antisense strand to SEQ ID NO: 1701345
auaucuacuguaauaagca

SEQ ID NO: 1701347 - RNA, 19 nt, Artificial Sequence
  Description of Artificial Sequence: Synthetic oligonucleotide
  Sense strand starting at position 492 of SEQ ID NO: 1561826
gguauaaucuuccuuggaa

SEQ ID NO: 1701348 - RNA, 19 nt, Artificial Sequence
  Description of Artificial Sequence: Synthetic oligonucleotide
  Antisense strand to SEQ ID NO: 1701347
uuccaaggaagauuauacc

SEQ ID NO: 1701349 - RNA, 19 nt, Artificial Sequence
  Description of Artificial Sequence: Synthetic oligonucleotide
  Sense strand starting at position 493 of SEQ ID NO: 1561826
guauaaucuuccuuggaaa

SEQ ID NO: 1701350 - RNA, 19 nt, Artificial Sequence
  Description of Artificial Sequence: Synthetic oligonucleotide
  Antisense strand to SEQ ID NO: 1701349
uuuccaaggaagauuauac

SEQ ID NO: 1701351 - RNA, 19 nt, Artificial Sequence
  Description of Artificial Sequence: Synthetic oligonucleotide
  Sense strand starting at position 664 of SEQ ID NO: 1561826
gcuuaaacucuaggaggaa

SEQ ID NO: 1701352 - RNA, 19 nt, Artificial Sequence
  Description of Artificial Sequence: Synthetic oligonucleotide
  Antisense strand to SEQ ID NO: 1701351
uuccuccuagaguuuaagc

SEQ ID NO: 1701353 - RNA, 19 nt, Artificial Sequence
  Description of Artificial Sequence: Synthetic oligonucleotide
  Sense strand starting at position 676 of SEQ ID NO: 1561826
ggaggaacguucccauuca

SEQ ID NO: 1701354 - RNA, 19 nt, Artificial Sequence
  Description of Artificial Sequence: Synthetic oligonucleotide
  Antisense strand to SEQ ID NO: 1701353
ugaaugggaacguuccucc

SEQ ID NO: 1701355 - RNA, 19 nt, Artificial Sequence
  Description of Artificial Sequence: Synthetic oligonucleotide
  Sense strand starting at position 845 of SEQ ID NO: 1561826
aagugcacugaauggaaau

SEQ ID NO: 1701356 - RNA, 19 nt, Artificial Sequence
  Description of Artificial Sequence: Synthetic oligonucleotide
  Antisense strand to SEQ ID NO: 1701355
auuuccauucagugcacuu

SEQ ID NO: 1701357 - RNA, 19 nt, Artificial Sequence
  Description of Artificial Sequence: Synthetic oligonucleotide
  Sense strand starting at position 846 of SEQ ID NO: 1561826
agugcacugaauggaaauu

SEQ ID NO: 1701358 - RNA, 19 nt, Artificial Sequence
  Description of Artificial Sequence: Synthetic oligonucleotide
  Antisense strand to SEQ ID NO: 1701357
aauuuccauucagugcacu

SEQ ID NO: 1701359 - RNA, 19 nt, Artificial Sequence
  Description of Artificial Sequence: Synthetic oligonucleotide
  Sense strand starting at position 906 of SEQ ID NO: 1561826
aagagaugauuauagaaga

SEQ ID NO: 1701360 - RNA, 19 nt, Artificial Sequence
  Description of Artificial Sequence: Synthetic oligonucleotide
  Antisense strand to SEQ ID NO: 1701359
ucuucuauaaucaucucuu

SEQ ID NO: 1701361 - RNA, 19 nt, Artificial Sequence
  Description of Artificial Sequence: Synthetic oligonucleotide
  Sense strand starting at position 1066 of SEQ ID NO: 1561826
uuuagaugcaacgaauguu

SEQ ID NO: 1701362 - RNA, 19 nt, Artificial Sequence
  Description of Artificial Sequence: Synthetic oligonucleotide
  Antisense strand to SEQ ID NO: 1701361
aacauucguugcaucuaaa

SEQ ID NO: 1701363 - RNA, 19 nt, Artificial Sequence
  Description of Artificial Sequence: Synthetic oligonucleotide
  Sense strand starting at position 1072 of SEQ ID NO: 1561826
ugcaacgaauguucuugaa

SEQ ID NO: 1701364 - RNA, 19 nt, Artificial Sequence
  Description of Artificial Sequence: Synthetic oligonucleotide
  Antisense strand to SEQ ID NO: 1701363
uucaagaacauucguugca

SEQ ID NO: 1701365 - RNA, 19 nt, Artificial Sequence
  Description of Artificial Sequence: Synthetic oligonucleotide
  Sense strand starting at position 1076 of SEQ ID NO: 1561826
acgaauguucuugaaucaa

SEQ ID NO: 1701366 - RNA, 19 nt, Artificial Sequence
  Description of Artificial Sequence: Synthetic oligonucleotide
  Antisense strand to SEQ ID NO: 1701365
uugauucaagaacauucgu

SEQ ID NO: 1701367 - RNA, 19 nt, Artificial Sequence
  Description of Artificial Sequence: Synthetic oligonucleotide
  Sense strand starting at position 1176 of SEQ ID NO: 1561826
ccaaacugcucucuggaaa

SEQ ID NO: 1701368 - RNA, 19 nt, Artificial Sequence
  Description of Artificial Sequence: Synthetic oligonucleotide
  Antisense strand to SEQ ID NO: 1701367
uuuccagagagcaguuugg

SEQ ID NO: 1701369 - RNA, 19 nt, Artificial Sequence
  Description of Artificial Sequence: Synthetic oligonucleotide
  Sense strand starting at position 1225 of SEQ ID NO: 1561826
ccugguaugcuuuacacca

SEQ ID NO: 1701370 - RNA, 19 nt, Artificial Sequence
  Description of Artificial Sequence: Synthetic oligonucleotide
  Antisense strand to SEQ ID NO: 1701369
ugguguaaagcauaccagg

SEQ ID NO: 1701371 - RNA, 19 nt, Artificial Sequence
  Description of Artificial Sequence: Synthetic oligonucleotide
  Sense strand starting at position 1300 of SEQ ID NO: 1561826
gguucuaaauaggcagaaa

SEQ ID NO: 1701372 - RNA, 19 nt, Artificial Sequence
  Description of Artificial Sequence: Synthetic oligonucleotide
  Antisense strand to SEQ ID NO: 1701371
uuucugccuauuuagaacc

SEQ ID NO: 1701373 - RNA, 19 nt, Artificial Sequence
  Description of Artificial Sequence: Synthetic oligonucleotide
  Sense strand starting at position 1374 of SEQ ID NO: 1561826
cggagauucuggcuacaaa

SEQ ID NO: 1701374 - RNA, 19 nt, Artificial Sequence
  Description of Artificial Sequence: Synthetic oligonucleotide
  Antisense strand to SEQ ID NO: 1701373
uuuguagccagaaucuccg

SEQ ID NO: 1701375 - RNA, 19 nt, Artificial Sequence
  Description of Artificial Sequence: Synthetic oligonucleotide
  Sense strand starting at position 1433 of SEQ ID NO: 1561826
agaagucaucagcggguaa

SEQ ID NO: 1701376 - RNA, 19 nt, Artificial Sequence
  Description of Artificial Sequence: Synthetic oligonucleotide
  Antisense strand to SEQ ID NO: 1701375
uuacccgcugaugacuucu

SEQ ID NO: 1701377 - RNA, 19 nt, Artificial Sequence
  Description of Artificial Sequence: Synthetic oligonucleotide
  Sense strand starting at position 1529 of SEQ ID NO: 1561826
agggaaucugcuggccauu

SEQ ID NO: 1701378 - RNA, 19 nt, Artificial Sequence
  Description of Artificial Sequence: Synthetic oligonucleotide
  Antisense strand to SEQ ID NO: 1701377
aauggccagcagauucccu

SEQ ID NO: 1701379 - RNA, 19 nt, Artificial Sequence
  Description of Artificial Sequence: Synthetic oligonucleotide
  Sense strand starting at position 1556 of SEQ ID NO: 1561826
caaagcauucugggugaug

SEQ ID NO: 1701380 - RNA, 19 nt, Artificial Sequence
  Description of Artificial Sequence: Synthetic oligonucleotide
  Antisense strand to SEQ ID NO: 1701379
caucacccagaaugcuuug

SEQ ID NO: 1701381 - RNA, 19 nt, Artificial Sequence
  Description of Artificial Sequence: Synthetic oligonucleotide
  Sense strand starting at position 1557 of SEQ ID NO: 1561826
aaagcauucugggugaugu

SEQ ID NO: 1701382 - RNA, 19 nt, Artificial Sequence
  Description of Artificial Sequence: Synthetic oligonucleotide
  Antisense strand to SEQ ID NO: 1701381
acaucacccagaaugcuuu

SEQ ID NO: 1701383 - RNA, 19 nt, Artificial Sequence
  Description of Artificial Sequence: Synthetic oligonucleotide
  Sense strand starting at position 1637 of SEQ ID NO: 1561826
cagugaaccuguccaaagu

SEQ ID NO: 1701384 - RNA, 19 nt, Artificial Sequence
  Description of Artificial Sequence: Synthetic oligonucleotide
  Antisense strand to SEQ ID NO: 1701383
acuuuggacagguucacug

SEQ ID NO: 1701385 - RNA, 19 nt, Artificial Sequence
  Description of Artificial Sequence: Synthetic oligonucleotide
  Sense strand starting at position 1793 of SEQ ID NO: 1561826
agacaaagucuaugaucga

SEQ ID NO: 1701386 - RNA, 19 nt, Artificial Sequence
  Description of Artificial Sequence: Synthetic oligonucleotide
  Antisense strand to SEQ ID NO: 1701385
ucgaucauagacuuugucu

SEQ ID NO: 1701387 - RNA, 19 nt, Artificial Sequence
  Description of Artificial Sequence: Synthetic oligonucleotide
  Sense strand starting at position 1796 of SEQ ID NO: 1561826
caaagucuaugaucgauag

SEQ ID NO: 1701388 - RNA, 19 nt, Artificial Sequence
  Description of Artificial Sequence: Synthetic oligonucleotide
  Antisense strand to SEQ ID NO: 1701387
cuaucgaucauagacuuug

SEQ ID NO: 1701389 - RNA, 19 nt, Artificial Sequence
  Description of Artificial Sequence: Synthetic oligonucleotide
  Sense strand starting at position 2252 of SEQ ID NO: 1561826
uuucuuuaaccgcaagaag

SEQ ID NO: 1701390 - RNA, 19 nt, Artificial Sequence
  Description of Artificial Sequence: Synthetic oligonucleotide
  Antisense strand to SEQ ID NO: 1701389
cuucuugcgguuaaagaaa

SEQ ID NO: 1701391 - RNA, 19 nt, Artificial Sequence
  Description of Artificial Sequence: Synthetic oligonucleotide
  Sense strand starting at position 3515 of SEQ ID NO: 1561826
ugucuucuacuugaaacgu

SEQ ID NO: 1701392 - RNA, 19 nt, Artificial Sequence
  Description of Artificial Sequence: Synthetic oligonucleotide
  Antisense strand to SEQ ID NO: 1701391
acguuucaaguagaagaca

SEQ ID NO: 1701393 - RNA, 19 nt, Artificial Sequence
  Description of Artificial Sequence: Synthetic oligonucleotide
  Sense strand starting at position 3523 of SEQ ID NO: 1561826
acuugaaacgucugaguca

SEQ ID NO: 1701394 - RNA, 19 nt, Artificial Sequence
  Description of Artificial Sequence: Synthetic oligonucleotide
  Antisense strand to SEQ ID NO: 1701393
ugacucagacguuucaagu

SEQ ID NO: 1701395 - RNA, 19 nt, Artificial Sequence
  Description of Artificial Sequence: Synthetic oligonucleotide
  Sense strand starting at position 3526 of SEQ ID NO: 1561826
ugaaacgucugagucacuu

SEQ ID NO: 1701396 - RNA, 19 nt, Artificial Sequence
  Description of Artificial Sequence: Synthetic oligonucleotide
  Antisense strand to SEQ ID NO: 1701395
aagugacucagacguuuca

SEQ ID NO: 1701397 - RNA, 19 nt, Artificial Sequence
  Description of Artificial Sequence: Synthetic oligonucleotide
  Sense strand starting at position 3534 of SEQ ID NO: 1561826
cugagucacuuggucuaaa

SEQ ID NO: 1701398 - RNA, 19 nt, Artificial Sequence
  Description of Artificial Sequence: Synthetic oligonucleotide
  Antisense strand to SEQ ID NO: 1701397
uuuagaccaagugacucag

SEQ ID NO: 1701399 - RNA, 19 nt, Artificial Sequence
  Description of Artificial Sequence: Synthetic oligonucleotide
  Sense strand starting at position 3708 of SEQ ID NO: 1561826
cugaaugugucucuguaaa

SEQ ID NO: 1701400 - RNA, 19 nt, Artificial Sequence
  Description of Artificial Sequence: Synthetic oligonucleotide
  Antisense strand to SEQ ID NO: 1701399
uuuacagagacacauucag

SEQ ID NO: 1701401 - RNA, 19 nt, Artificial Sequence
  Description of Artificial Sequence: Synthetic oligonucleotide
  Sense strand starting at position 3710 of SEQ ID NO: 1561826
gaaugugucucuguaaaca

SEQ ID NO: 1701402 - RNA, 19 nt, Artificial Sequence
  Description of Artificial Sequence: Synthetic oligonucleotide
  Antisense strand to SEQ ID NO: 1701401
uguuuacagagacacauuc

SEQ ID NO: 1701403 - RNA, 19 nt, Artificial Sequence
  Description of Artificial Sequence: Synthetic oligonucleotide
  Sense strand starting at position 3776 of SEQ ID NO: 1561826
augccuccucaggaauauu

SEQ ID NO: 1701404 - RNA, 19 nt, Artificial Sequence
  Description of Artificial Sequence: Synthetic oligonucleotide
  Antisense strand to SEQ ID NO: 1701403
aauauuccugaggaggcau

SEQ ID NO: 1701405 - RNA, 19 nt, Artificial Sequence
  Description of Artificial Sequence: Synthetic oligonucleotide
  Sense strand starting at position 3943 of SEQ ID NO: 1561826
gccuucuaacagugggaaa

SEQ ID NO: 1701406 - RNA, 19 nt, Artificial Sequence
  Description of Artificial Sequence: Synthetic oligonucleotide
  Antisense strand to SEQ ID NO: 1701405
uuucccacuguuagaaggc

SEQ ID NO: 1701407 - RNA, 19 nt, Artificial Sequence
  Description of Artificial Sequence: Synthetic oligonucleotide
  Sense strand starting at position 3945 of SEQ ID NO: 1561826
cuucuaacagugggaaacu

SEQ ID NO: 1701408 - RNA, 19 nt, Artificial Sequence
  Description of Artificial Sequence: Synthetic oligonucleotide
  Antisense strand to SEQ ID NO: 1701407
aguuucccacuguuagaag

SEQ ID NO: 1701409 - RNA, 19 nt, Artificial Sequence
  Description of Artificial Sequence: Synthetic oligonucleotide
  Sense strand starting at position 3979 of SEQ ID NO: 1561826
auuucugcuuuaucaguca

SEQ ID NO: 1701410 - RNA, 19 nt, Artificial Sequence
  Description of Artificial Sequence: Synthetic oligonucleotide
  Antisense strand to SEQ ID NO: 1701409
ugacugauaaagcagaaau

SEQ ID NO: 1701411 - RNA, 19 nt, Artificial Sequence
  Description of Artificial Sequence: Synthetic oligonucleotide
  Sense strand starting at position 61 of SEQ ID NO: 1561827
uuuagagguuuccugaaau

SEQ ID NO: 1701412 - RNA, 19 nt, Artificial Sequence
  Description of Artificial Sequence: Synthetic oligonucleotide
  Antisense strand to SEQ ID NO: 1701411
auuucaggaaaccucuaaa

SEQ ID NO: 1701413 - RNA, 19 nt, Artificial Sequence
  Description of Artificial Sequence: Synthetic oligonucleotide
  Sense strand starting at position 210 of SEQ ID NO: 1561827
uggacaaguugcucccaga

SEQ ID NO: 1701414 - RNA, 19 nt, Artificial Sequence
  Description of Artificial Sequence: Synthetic oligonucleotide
  Antisense strand to SEQ ID NO: 1701413
ucugggagcaacuugucca

SEQ ID NO: 1701415 - RNA, 19 nt, Artificial Sequence
  Description of Artificial Sequence: Synthetic oligonucleotide
  Sense strand starting at position 558 of SEQ ID NO: 1561827
augcaaauagcuuacgaua

SEQ ID NO: 1701416 - RNA, 19 nt, Artificial Sequence
  Description of Artificial Sequence: Synthetic oligonucleotide
  Antisense strand to SEQ ID NO: 1701415
uaucguaagcuauuugcau

SEQ ID NO: 1701417 - RNA, 19 nt, Artificial Sequence
  Description of Artificial Sequence: Synthetic oligonucleotide
  Sense strand starting at position 618 of SEQ ID NO: 1561827
cgcuguaugcguuucacaa

SEQ ID NO: 1701418 - RNA, 19 nt, Artificial Sequence
  Description of Artificial Sequence: Synthetic oligonucleotide
  Antisense strand to SEQ ID NO: 1701417
uugugaaacgcauacagcg

SEQ ID NO: 1701419 - RNA, 19 nt, Artificial Sequence
  Description of Artificial Sequence: Synthetic oligonucleotide
  Sense strand starting at position 664 of SEQ ID NO: 1561827
ggcccagagugauucgaaa

SEQ ID NO: 1701420 - RNA, 19 nt, Artificial Sequence
  Description of Artificial Sequence: Synthetic oligonucleotide
  Antisense strand to SEQ ID NO: 1701419
uuucgaaucacucugggcc

SEQ ID NO: 1701421 - RNA, 19 nt, Artificial Sequence
  Description of Artificial Sequence: Synthetic oligonucleotide
  Sense strand starting at position 666 of SEQ ID NO: 1561827
cccagagugauucgaaaca

SEQ ID NO: 1701422 - RNA, 19 nt, Artificial Sequence
  Description of Artificial Sequence: Synthetic oligonucleotide
  Antisense strand to SEQ ID NO: 1701421
uguuucgaaucacucuggg

SEQ ID NO: 1701423 - RNA, 19 nt, Artificial Sequence
  Description of Artificial Sequence: Synthetic oligonucleotide
  Sense strand starting at position 820 of SEQ ID NO: 1561827
gcagcaaaucuaggaaauu

SEQ ID NO: 1701424 - RNA, 19 nt, Artificial Sequence
  Description of Artificial Sequence: Synthetic oligonucleotide
  Antisense strand to SEQ ID NO: 1701423
aauuuccuagauuugcugc

SEQ ID NO: 1701425 - RNA, 19 nt, Artificial Sequence
  Description of Artificial Sequence: Synthetic oligonucleotide
  Sense strand starting at position 907 of SEQ ID NO: 1561827
gcugacacauccuuuagag

SEQ ID NO: 1701426 - RNA, 19 nt, Artificial Sequence
  Description of Artificial Sequence: Synthetic oligonucleotide
  Antisense strand to SEQ ID NO: 1701425
cucuaaaggaugugucagc

SEQ ID NO: 1701427 - RNA, 19 nt, Artificial Sequence
  Description of Artificial Sequence: Synthetic oligonucleotide
  Sense strand starting at position 1080 of SEQ ID NO: 1561827
ggguguacaggagaguuua

SEQ ID NO: 1701428 - RNA, 19 nt, Artificial Sequence
  Description of Artificial Sequence: Synthetic oligonucleotide
  Antisense strand to SEQ ID NO: 1701427
uaaacucuccuguacaccc

SEQ ID NO: 1701429 - RNA, 19 nt, Artificial Sequence
  Description of Artificial Sequence: Synthetic oligonucleotide
  Sense strand starting at position 1247 of SEQ ID NO: 1561827
ccgggauuucccgagccga

SEQ ID NO: 1701430 - RNA, 19 nt, Artificial Sequence
  Description of Artificial Sequence: Synthetic oligonucleotide
  Antisense strand to SEQ ID NO: 1701429
ucggcucgggaaaucccgg

SEQ ID NO: 1701431 - RNA, 19 nt, Artificial Sequence
  Description of Artificial Sequence: Synthetic oligonucleotide
  Sense strand starting at position 1294 of SEQ ID NO: 1561827
gcguauagcagauacacaa

SEQ ID NO: 1701432 - RNA, 19 nt, Artificial Sequence
  Description of Artificial Sequence: Synthetic oligonucleotide
  Antisense strand to SEQ ID NO: 1701431
uuguguaucugcuauacgc

SEQ ID NO: 1701433 - RNA, 19 nt, Artificial Sequence
  Description of Artificial Sequence: Synthetic oligonucleotide
  Sense strand starting at position 1315 of SEQ ID NO: 1561827
aauagcugucaucaugaga

SEQ ID NO: 1701434 - RNA, 19 nt, Artificial Sequence
  Description of Artificial Sequence: Synthetic oligonucleotide
  Antisense strand to SEQ ID NO: 1701433
ucucaugaugacagcuauu

SEQ ID NO: 1701435 - RNA, 19 nt, Artificial Sequence
  Description of Artificial Sequence: Synthetic oligonucleotide
  Sense strand starting at position 1318 of SEQ ID NO: 1561827
agcugucaucaugagaauc

SEQ ID NO: 1701436 - RNA, 19 nt, Artificial Sequence
  Description of Artificial Sequence: Synthetic oligonucleotide
  Antisense strand to SEQ ID NO: 1701435
gauucucaugaugacagcu

SEQ ID NO: 1701437 - RNA, 19 nt, Artificial Sequence
  Description of Artificial Sequence: Synthetic oligonucleotide
  Sense strand starting at position 1532 of SEQ ID NO: 1561827
ccagaagucuguccacaca

SEQ ID NO: 1701438 - RNA, 19 nt, Artificial Sequence
  Description of Artificial Sequence: Synthetic oligonucleotide
  Antisense strand to SEQ ID NO: 1701437
uguguggacagacuucugg

SEQ ID NO: 1701439 - RNA, 19 nt, Artificial Sequence
  Description of Artificial Sequence: Synthetic oligonucleotide
  Sense strand starting at position 1771 of SEQ ID NO: 1561827
ggaagaucgccuugaggac

SEQ ID NO: 1701440 - RNA, 19 nt, Artificial Sequence
  Description of Artificial Sequence: Synthetic oligonucleotide
  Antisense strand to SEQ ID NO: 1701439
guccucaaggcgaucuucc

SEQ ID NO: 1701441 - RNA, 19 nt, Artificial Sequence
  Description of Artificial Sequence: Synthetic oligonucleotide
  Sense strand starting at position 1980 of SEQ ID NO: 1561827
ggccgauugcuugucagug

SEQ ID NO: 1701442 - RNA, 19 nt, Artificial Sequence
  Description of Artificial Sequence: Synthetic oligonucleotide
  Antisense strand to SEQ ID NO: 1701441
cacugacaagcaaucggcc

SEQ ID NO: 1701443 - RNA, 19 nt, Artificial Sequence
  Description of Artificial Sequence: Synthetic oligonucleotide
  Sense strand starting at position 2134 of SEQ ID NO: 1561827
guuuguggucguguccuga

SEQ ID NO: 1701444 - RNA, 19 nt, Artificial Sequence
  Description of Artificial Sequence: Synthetic oligonucleotide
  Antisense strand to SEQ ID NO: 1701443
ucaggacacgaccacaaac

SEQ ID NO: 1701445 - RNA, 19 nt, Artificial Sequence
  Description of Artificial Sequence: Synthetic oligonucleotide
  Sense strand starting at position 2147 of SEQ ID NO: 1561827
uccugaauccuccacgauu

SEQ ID NO: 1701446 - RNA, 19 nt, Artificial Sequence
  Description of Artificial Sequence: Synthetic oligonucleotide
  Antisense strand to SEQ ID NO: 1701445
aaucguggaggauucagga

SEQ ID NO: 1701447 - RNA, 19 nt, Artificial Sequence
  Description of Artificial Sequence: Synthetic oligonucleotide
  Sense strand starting at position 2149 of SEQ ID NO: 1561827
cugaauccuccacgauuaa

SEQ ID NO: 1701448 - RNA, 19 nt, Artificial Sequence
  Description of Artificial Sequence: Synthetic oligonucleotide
  Antisense strand to SEQ ID NO: 1701447
uuaaucguggaggauucag

SEQ ID NO: 1701449 - RNA, 19 nt, Artificial Sequence
  Description of Artificial Sequence: Synthetic oligonucleotide
  Sense strand starting at position 2156 of SEQ ID NO: 1561827
cuccacgauuaaucacaga

SEQ ID NO: 1701450 - RNA, 19 nt, Artificial Sequence
  Description of Artificial Sequence: Synthetic oligonucleotide
  Antisense strand to SEQ ID NO: 1701449
ucugugauuaaucguggag

SEQ ID NO: 1701451 - RNA, 19 nt, Artificial Sequence
  Description of Artificial Sequence: Synthetic oligonucleotide
  Sense strand starting at position 2180 of SEQ ID NO: 1561827
ugauuucugcuuugccuca

SEQ ID NO: 1701452 - RNA, 19 nt, Artificial Sequence
  Description of Artificial Sequence: Synthetic oligonucleotide
  Antisense strand to SEQ ID NO: 1701451
ugaggcaaagcagaaauca

SEQ ID NO: 1701453 - RNA, 19 nt, Artificial Sequence
  Description of Artificial Sequence: Synthetic oligonucleotide
  Sense strand starting at position 2513 of SEQ ID NO: 1561827
cuucuccuagauugagagu

SEQ ID NO: 1701454 - RNA, 19 nt, Artificial Sequence
  Description of Artificial Sequence: Synthetic oligonucleotide
  Antisense strand to SEQ ID NO: 1701453
acucucaaucuaggagaag

SEQ ID NO: 1701455 - RNA, 19 nt, Artificial Sequence
  Description of Artificial Sequence: Synthetic oligonucleotide
  Sense strand starting at position 2765 of SEQ ID NO: 1561827
uccugauucugcucaggga

SEQ ID NO: 1701456 - RNA, 19 nt, Artificial Sequence
  Description of Artificial Sequence: Synthetic oligonucleotide
  Antisense strand to SEQ ID NO: 1701455
ucccugagcagaaucagga

SEQ ID NO: 1701457 - RNA, 19 nt, Artificial Sequence
  Description of Artificial Sequence: Synthetic oligonucleotide
  Sense strand starting at position 2998 of SEQ ID NO: 1561827
aggguaauuuggcaaagac

SEQ ID NO: 1701458 - RNA, 19 nt, Artificial Sequence
  Description of Artificial Sequence: Synthetic oligonucleotide
  Antisense strand to SEQ ID NO: 1701457
gucuuugccaaauuacccu

SEQ ID NO: 1701459 - RNA, 19 nt, Artificial Sequence
  Description of Artificial Sequence: Synthetic oligonucleotide
  Sense strand starting at position 3030 of SEQ ID NO: 1561827
agaugagggucuccuacua

SEQ ID NO: 1701460 - RNA, 19 nt, Artificial Sequence
  Description of Artificial Sequence: Synthetic oligonucleotide
  Antisense strand to SEQ ID NO: 1701459
uaguaggagacccucaucu

SEQ ID NO: 1701461 - RNA, 19 nt, Artificial Sequence
  Description of Artificial Sequence: Synthetic oligonucleotide
  Sense strand starting at position 3076 of SEQ ID NO: 1561827
cagagaugcuugcugagag

SEQ ID NO: 1701462 - RNA, 19 nt, Artificial Sequence
  Description of Artificial Sequence: Synthetic oligonucleotide
  Antisense strand to SEQ ID NO: 1701461
cucucagcaagcaucucug

SEQ ID NO: 1701463 - RNA, 19 nt, Artificial Sequence
  Description of Artificial Sequence: Synthetic oligonucleotide
  Sense strand starting at position 3088 of SEQ ID NO: 1561827
cugagagcugcuuaucaua

SEQ ID NO: 1701464 - RNA, 19 nt, Artificial Sequence
  Description of Artificial Sequence: Synthetic oligonucleotide
  Antisense strand to SEQ ID NO: 1701463
uaugauaagcagcucucag

SEQ ID NO: 1701465 - RNA, 19 nt, Artificial Sequence
  Description of Artificial Sequence: Synthetic oligonucleotide
  Sense strand starting at position 3106 of SEQ ID NO: 1561827
aggaaaugaugggaaauaa

SEQ ID NO: 1701466 - RNA, 19 nt, Artificial Sequence
  Description of Artificial Sequence: Synthetic oligonucleotide
  Antisense strand to SEQ ID NO: 1701465
uuauuucccaucauuuccu

SEQ ID NO: 1701467 - RNA, 19 nt, Artificial Sequence
  Description of Artificial Sequence: Synthetic oligonucleotide
  Sense strand starting at position 3137 of SEQ ID NO: 1561827
uccaauaaugacugcuuga

SEQ ID NO: 1701468 - RNA, 19 nt, Artificial Sequence
  Description of Artificial Sequence: Synthetic oligonucleotide
  Antisense strand to SEQ ID NO: 1701467
ucaagcagucauuauugga

SEQ ID NO: 1701469 - RNA, 19 nt, Artificial Sequence
  Description of Artificial Sequence: Synthetic oligonucleotide
  Sense strand starting at position 3148 of SEQ ID NO: 1561827
cugcuugaacaagauguga

SEQ ID NO: 1701470 - RNA, 19 nt, Artificial Sequence
  Description of Artificial Sequence: Synthetic oligonucleotide
  Antisense strand to SEQ ID NO: 1701469
ucacaucuuguucaagcag

SEQ ID NO: 1701471 - RNA, 19 nt, Artificial Sequence
  Description of Artificial Sequence: Synthetic oligonucleotide
  Sense strand starting at position 3150 of SEQ ID NO: 1561827
gcuugaacaagaugugaaa

SEQ ID NO: 1701472 - RNA, 19 nt, Artificial Sequence
  Description of Artificial Sequence: Synthetic oligonucleotide
  Antisense strand to SEQ ID NO: 1701471
uuucacaucuuguucaagc

SEQ ID NO: 1701473 - RNA, 19 nt, Artificial Sequence
  Description of Artificial Sequence: Synthetic oligonucleotide
  Sense strand starting at position 3161 of SEQ ID NO: 1561827
augugaaagauaugguaca

SEQ ID NO: 1701474 - RNA, 19 nt, Artificial Sequence
  Description of Artificial Sequence: Synthetic oligonucleotide
  Antisense strand to SEQ ID NO: 1701473
uguaccauaucuuucacau

SEQ ID NO: 1701475 - RNA, 19 nt, Artificial Sequence
  Description of Artificial Sequence: Synthetic oligonucleotide
  Sense strand starting at position 3596 of SEQ ID NO: 1561827
gagcuaugucuguauugaa

SEQ ID NO: 1701476 - RNA, 19 nt, Artificial Sequence
  Description of Artificial Sequence: Synthetic oligonucleotide
  Antisense strand to SEQ ID NO: 1701475
uucaauacagacauagcuc

SEQ ID NO: 1701477 - RNA, 19 nt, Artificial Sequence
  Description of Artificial Sequence: Synthetic oligonucleotide
  Sense strand starting at position 3603 of SEQ ID NO: 1561827
gucuguauugaagagcaga

SEQ ID NO: 1701478 - RNA, 19 nt, Artificial Sequence
  Description of Artificial Sequence: Synthetic oligonucleotide
  Antisense strand to SEQ ID NO: 1701477
ucugcucuucaauacagac

SEQ ID NO: 1701479 - RNA, 19 nt, Artificial Sequence
  Description of Artificial Sequence: Synthetic oligonucleotide
  Sense strand starting at position 3666 of SEQ ID NO: 1561827
ugauacauuugguagaaug

SEQ ID NO: 1701480 - RNA, 19 nt, Artificial Sequence
  Description of Artificial Sequence: Synthetic oligonucleotide
  Antisense strand to SEQ ID NO: 1701479
cauucuaccaaauguauca

SEQ ID NO: 1701481 - RNA, 19 nt, Artificial Sequence
  Description of Artificial Sequence: Synthetic oligonucleotide
  Sense strand starting at position 3780 of SEQ ID NO: 1561827
aguugcuaccucugggaaa

SEQ ID NO: 1701482 - RNA, 19 nt, Artificial Sequence
  Description of Artificial Sequence: Synthetic oligonucleotide
  Antisense strand to SEQ ID NO: 1701481
uuucccagagguagcaacu

SEQ ID NO: 1701483 - RNA, 19 nt, Artificial Sequence
  Description of Artificial Sequence: Synthetic oligonucleotide
  Sense strand starting at position 3847 of SEQ ID NO: 1561827
ugagaauagauuggucugu

SEQ ID NO: 1701484 - RNA, 19 nt, Artificial Sequence
  Description of Artificial Sequence: Synthetic oligonucleotide
  Antisense strand to SEQ ID NO: 1701483
acagaccaaucuauucuca

SEQ ID NO: 1701485 - RNA, 19 nt, Artificial Sequence
  Description of Artificial Sequence: Synthetic oligonucleotide
  Sense strand starting at position 3848 of SEQ ID NO: 1561827
gagaauagauuggucuguu

SEQ ID NO: 1701486 - RNA, 19 nt, Artificial Sequence
  Description of Artificial Sequence: Synthetic oligonucleotide
  Antisense strand to SEQ ID NO: 1701485
aacagaccaaucuauucuc

SEQ ID NO: 1701487 - RNA, 19 nt, Artificial Sequence
  Description of Artificial Sequence: Synthetic oligonucleotide
  Sense strand starting at position 3849 of SEQ ID NO: 1561827
agaauagauuggucuguua

SEQ ID NO: 1701488 - RNA, 19 nt, Artificial Sequence
  Description of Artificial Sequence: Synthetic oligonucleotide
  Antisense strand to SEQ ID NO: 1701487
uaacagaccaaucuauucu

SEQ ID NO: 1701489 - RNA, 19 nt, Artificial Sequence
  Description of Artificial Sequence: Synthetic oligonucleotide
  Sense strand starting at position 3851 of SEQ ID NO: 1561827
aauagauuggucuguuacu

SEQ ID NO: 1701490 - RNA, 19 nt, Artificial Sequence
  Description of Artificial Sequence: Synthetic oligonucleotide
  Antisense strand to SEQ ID NO: 1701489
aguaacagaccaaucuauu

SEQ ID NO: 1701491 - RNA, 19 nt, Artificial Sequence
  Description of Artificial Sequence: Synthetic oligonucleotide
  Sense strand starting at position 188 of SEQ ID NO: 1561828
acuacucaguucuagcauu

SEQ ID NO: 1701492 - RNA, 19 nt, Artificial Sequence
  Description of Artificial Sequence: Synthetic oligonucleotide
  Antisense strand to SEQ ID NO: 1701491
aaugcuagaacugaguagu

SEQ ID NO: 1701493 - RNA, 19 nt, Artificial Sequence
  Description of Artificial Sequence: Synthetic oligonucleotide
  Sense strand starting at position 220 of SEQ ID NO: 1561828
agcugcagacauuauguaa

SEQ ID NO: 1701494 - RNA, 19 nt, Artificial Sequence
  Description of Artificial Sequence: Synthetic oligonucleotide
  Antisense strand to SEQ ID NO: 1701493
uuacauaaugucugcagcu

SEQ ID NO: 1701495 - RNA, 19 nt, Artificial Sequence
  Description of Artificial Sequence: Synthetic oligonucleotide
  Sense strand starting at position 240 of SEQ ID NO: 1561828
ggaauuaugccauggcugu

SEQ ID NO: 1701496 - RNA, 19 nt, Artificial Sequence
  Description of Artificial Sequence: Synthetic oligonucleotide
  Antisense strand to SEQ ID NO: 1701495
acagccauggcauaauucc

SEQ ID NO: 1701497 - RNA, 19 nt, Artificial Sequence
  Description of Artificial Sequence: Synthetic oligonucleotide
  Sense strand starting at position 353 of SEQ ID NO: 1561828
accugcucugaggacuuaa

SEQ ID NO: 1701498 - RNA, 19 nt, Artificial Sequence
  Description of Artificial Sequence: Synthetic oligonucleotide
  Antisense strand to SEQ ID NO: 1701497
uuaaguccucagagcaggu

SEQ ID NO: 1701499 - RNA, 19 nt, Artificial Sequence
  Description of Artificial Sequence: Synthetic oligonucleotide
  Sense strand starting at position 401 of SEQ ID NO: 1561828
ugagacaaguacuauuacu

SEQ ID NO: 1701500 - RNA, 19 nt, Artificial Sequence
  Description of Artificial Sequence: Synthetic oligonucleotide
  Antisense strand to SEQ ID NO: 1701499
aguaauaguacuugucuca

SEQ ID NO: 1701501 - RNA, 19 nt, Artificial Sequence
  Description of Artificial Sequence: Synthetic oligonucleotide
  Sense strand starting at position 465 of SEQ ID NO: 1561828
gcgacucacgccuauaauu

SEQ ID NO: 1701502 - RNA, 19 nt, Artificial Sequence
  Description of Artificial Sequence: Synthetic oligonucleotide
  Antisense strand to SEQ ID NO: 1701501
aauuauaggcgugagucgc

SEQ ID NO: 1701503 - RNA, 19 nt, Artificial Sequence
  Description of Artificial Sequence: Synthetic oligonucleotide
  Sense strand starting at position 643 of SEQ ID NO: 1561828
ggaggaucauuagagaccu

SEQ ID NO: 1701504 - RNA, 19 nt, Artificial Sequence
  Description of Artificial Sequence: Synthetic oligonucleotide
  Antisense strand to SEQ ID NO: 1701503
aggucucuaaugauccucc

SEQ ID NO: 1701505 - RNA, 19 nt, Artificial Sequence
  Description of Artificial Sequence: Synthetic oligonucleotide
  Sense strand starting at position 813 of SEQ ID NO: 1561828
aaaugaguccuccgagguc

SEQ ID NO: 1701506 - RNA, 19 nt, Artificial Sequence
  Description of Artificial Sequence: Synthetic oligonucleotide
  Antisense strand to SEQ ID NO: 1701505
gaccucggaggacucauuu

SEQ ID NO: 1701507 - RNA, 19 nt, Artificial Sequence
  Description of Artificial Sequence: Synthetic oligonucleotide
  Sense strand starting at position 1035 of SEQ ID NO: 1561828
cugggugguggccgagaaa

SEQ ID NO: 1701508 - RNA, 19 nt, Artificial Sequence
  Description of Artificial Sequence: Synthetic oligonucleotide
  Antisense strand to SEQ ID NO: 1701507
uuucucggccaccacccag

SEQ ID NO: 1701509 - RNA, 19 nt, Artificial Sequence
  Description of Artificial Sequence: Synthetic oligonucleotide
  Sense strand starting at position 1309 of SEQ ID NO: 1561828
cggacagcuccugacaagu

SEQ ID NO: 1701510 - RNA, 19 nt, Artificial Sequence
  Description of Artificial Sequence: Synthetic oligonucleotide
  Antisense strand to SEQ ID NO: 1701509
acuugucaggagcuguccg

SEQ ID NO: 1701511 - RNA, 19 nt, Artificial Sequence
  Description of Artificial Sequence: Synthetic oligonucleotide
  Sense strand starting at position 1331 of SEQ ID NO: 1561828
guuugucaccugcgaccaa

SEQ ID NO: 1701512 - RNA, 19 nt, Artificial Sequence
  Description of Artificial Sequence: Synthetic oligonucleotide
  Antisense strand to SEQ ID NO: 1701511
uuggucgcaggugacaaac

SEQ ID NO: 1701513 - RNA, 19 nt, Artificial Sequence
  Description of Artificial Sequence: Synthetic oligonucleotide
  Sense strand starting at position 1350 of SEQ ID NO: 1561828
gggugacauuccugauguu

SEQ ID NO: 1701514 - RNA, 19 nt, Artificial Sequence
  Description of Artificial Sequence: Synthetic oligonucleotide
  Antisense strand to SEQ ID NO: 1701513
aacaucaggaaugucaccc

SEQ ID NO: 1701515 - RNA, 19 nt, Artificial Sequence
  Description of Artificial Sequence: Synthetic oligonucleotide
  Sense strand starting at position 1351 of SEQ ID NO: 1561828
ggugacauuccugauguuu

SEQ ID NO: 1701516 - RNA, 19 nt, Artificial Sequence
  Description of Artificial Sequence: Synthetic oligonucleotide
  Antisense strand to SEQ ID NO: 1701515
aaacaucaggaaugucacc

SEQ ID NO: 1701517 - RNA, 19 nt, Artificial Sequence
  Description of Artificial Sequence: Synthetic oligonucleotide
  Sense strand starting at position 1353 of SEQ ID NO: 1561828
ugacauuccugauguuuaa

SEQ ID NO: 1701518 - RNA, 19 nt, Artificial Sequence
  Description of Artificial Sequence: Synthetic oligonucleotide
  Antisense strand to SEQ ID NO: 1701517
uuaaacaucaggaauguca

SEQ ID NO: 1701519 - RNA, 19 nt, Artificial Sequence
  Description of Artificial Sequence: Synthetic oligonucleotide
  Sense strand starting at position 1357 of SEQ ID NO: 1561828
auuccugauguuuaagcaa

SEQ ID NO: 1701520 - RNA, 19 nt, Artificial Sequence
  Description of Artificial Sequence: Synthetic oligonucleotide
  Antisense strand to SEQ ID NO: 1701519
uugcuuaaacaucaggaau

SEQ ID NO: 1701521 - RNA, 19 nt, Artificial Sequence
  Description of Artificial Sequence: Synthetic oligonucleotide
  Sense strand starting at position 1364 of SEQ ID NO: 1561828
auguuuaagcaauggcaca

SEQ ID NO: 1701522 - RNA, 19 nt, Artificial Sequence
  Description of Artificial Sequence: Synthetic oligonucleotide
  Antisense strand to SEQ ID NO: 1701521
ugugccauugcuuaaacau

SEQ ID NO: 1701523 - RNA, 19 nt, Artificial Sequence
  Description of Artificial Sequence: Synthetic oligonucleotide
  Sense strand starting at position 1576 of SEQ ID NO: 1561828
gcacucugcaggcaugaga

SEQ ID NO: 1701524 - RNA, 19 nt, Artificial Sequence
  Description of Artificial Sequence: Synthetic oligonucleotide
  Antisense strand to SEQ ID NO: 1701523
ucucaugccugcagagugc

SEQ ID NO: 1701525 - RNA, 19 nt, Artificial Sequence
  Description of Artificial Sequence: Synthetic oligonucleotide
  Sense strand starting at position 1934 of SEQ ID NO: 1561828
ucaccucauuuagagguaa

SEQ ID NO: 1701526 - RNA, 19 nt, Artificial Sequence
  Description of Artificial Sequence: Synthetic oligonucleotide
  Antisense strand to SEQ ID NO: 1701525
uuaccucuaaaugagguga

SEQ ID NO: 1701527 - RNA, 19 nt, Artificial Sequence
  Description of Artificial Sequence: Synthetic oligonucleotide
  Sense strand starting at position 2051 of SEQ ID NO: 1561828
gggcuuaguuuguuuauag

SEQ ID NO: 1701528 - RNA, 19 nt, Artificial Sequence
  Description of Artificial Sequence: Synthetic oligonucleotide
  Antisense strand to SEQ ID NO: 1701527
cuauaaacaaacuaagccc

SEQ ID NO: 1701529 - RNA, 19 nt, Artificial Sequence
  Description of Artificial Sequence: Synthetic oligonucleotide
  Sense strand starting at position 2055 of SEQ ID NO: 1561828
uuaguuuguuuauaggagu

SEQ ID NO: 1701530 - RNA, 19 nt, Artificial Sequence
  Description of Artificial Sequence: Synthetic oligonucleotide
  Antisense strand to SEQ ID NO: 1701529
acuccuauaaacaaacuaa

SEQ ID NO: 1701531 - RNA, 19 nt, Artificial Sequence
  Description of Artificial Sequence: Synthetic oligonucleotide
  Sense strand starting at position 2086 of SEQ ID NO: 1561828
uccuuugguuucgcaugaa

SEQ ID NO: 1701532 - RNA, 19 nt, Artificial Sequence
  Description of Artificial Sequence: Synthetic oligonucleotide
  Antisense strand to SEQ ID NO: 1701531
uucaugcgaaaccaaagga

SEQ ID NO: 1701533 - RNA, 19 nt, Artificial Sequence
  Description of Artificial Sequence: Synthetic oligonucleotide
  Sense strand starting at position 2089 of SEQ ID NO: 1561828
uuugguuucgcaugaaagg

SEQ ID NO: 1701534 - RNA, 19 nt, Artificial Sequence
  Description of Artificial Sequence: Synthetic oligonucleotide
  Antisense strand to SEQ ID NO: 1701533
ccuuucaugcgaaaccaaa

SEQ ID NO: 1701535 - RNA, 19 nt, Artificial Sequence
  Description of Artificial Sequence: Synthetic oligonucleotide
  Sense strand starting at position 2090 of SEQ ID NO: 1561828
uugguuucgcaugaaagga

SEQ ID NO: 1701536 - RNA, 19 nt, Artificial Sequence
  Description of Artificial Sequence: Synthetic oligonucleotide
  Antisense strand to SEQ ID NO: 1701535
uccuuucaugcgaaaccaa

SEQ ID NO: 1701537 - RNA, 19 nt, Artificial Sequence
  Description of Artificial Sequence: Synthetic oligonucleotide
  Sense strand starting at position 2126 of SEQ ID NO: 1561828
ggaagaggaaugugaguuu

SEQ ID NO: 1701538 - RNA, 19 nt, Artificial Sequence
  Description of Artificial Sequence: Synthetic oligonucleotide
  Antisense strand to SEQ ID NO: 1701537
aaacucacauuccucuucc

SEQ ID NO: 1701539 - RNA, 19 nt, Artificial Sequence
  Description of Artificial Sequence: Synthetic oligonucleotide
  Sense strand starting at position 2129 of SEQ ID NO: 1561828
agaggaaugugaguuuaca

SEQ ID NO: 1701540 - RNA, 19 nt, Artificial Sequence
  Description of Artificial Sequence: Synthetic oligonucleotide
  Antisense strand to SEQ ID NO: 1701539
uguaaacucacauuccucu

SEQ ID NO: 1701541 - RNA, 19 nt, Artificial Sequence
  Description of Artificial Sequence: Synthetic oligonucleotide
  Sense strand starting at position 2171 of SEQ ID NO: 1561828
gaggcuucucugggaacca

SEQ ID NO: 1701542 - RNA, 19 nt, Artificial Sequence
  Description of Artificial Sequence: Synthetic oligonucleotide
  Antisense strand to SEQ ID NO: 1701541
ugguucccagagaagccuc

SEQ ID NO: 1701543 - RNA, 19 nt, Artificial Sequence
  Description of Artificial Sequence: Synthetic oligonucleotide
  Sense strand starting at position 2187 of SEQ ID NO: 1561828
ccaguucgccuguaccaga

SEQ ID NO: 1701544 - RNA, 19 nt, Artificial Sequence
  Description of Artificial Sequence: Synthetic oligonucleotide
  Antisense strand to SEQ ID NO: 1701543
ucugguacaggcgaacugg

SEQ ID NO: 1701545 - RNA, 19 nt, Artificial Sequence
  Description of Artificial Sequence: Synthetic oligonucleotide
  Sense strand starting at position 2272 of SEQ ID NO: 1561828
ccaggauggucacacaacu

SEQ ID NO: 1701546 - RNA, 19 nt, Artificial Sequence
  Description of Artificial Sequence: Synthetic oligonucleotide
  Antisense strand to SEQ ID NO: 1701545
aguugugugaccauccugg

SEQ ID NO: 1701547 - RNA, 19 nt, Artificial Sequence
  Description of Artificial Sequence: Synthetic oligonucleotide
  Sense strand starting at position 2431 of SEQ ID NO: 1561828
ccaggucuucccuaucacu

SEQ ID NO: 1701548 - RNA, 19 nt, Artificial Sequence
  Description of Artificial Sequence: Synthetic oligonucleotide
  Antisense strand to SEQ ID NO: 1701547
agugauagggaagaccugg

SEQ ID NO: 1701549 - RNA, 19 nt, Artificial Sequence
  Description of Artificial Sequence: Synthetic oligonucleotide
  Sense strand starting at position 2554 of SEQ ID NO: 1561828
aacucaugguucugauugu

SEQ ID NO: 1701550 - RNA, 19 nt, Artificial Sequence
  Description of Artificial Sequence: Synthetic oligonucleotide
  Antisense strand to SEQ ID NO: 1701549
acaaucagaaccaugaguu

SEQ ID NO: 1701551 - RNA, 19 nt, Artificial Sequence
  Description of Artificial Sequence: Synthetic oligonucleotide
  Sense strand starting at position 2558 of SEQ ID NO: 1561828
caugguucugauugucuua

SEQ ID NO: 1701552 - RNA, 19 nt, Artificial Sequence
  Description of Artificial Sequence: Synthetic oligonucleotide
  Antisense strand to SEQ ID NO: 1701551
uaagacaaucagaaccaug

SEQ ID NO: 1701553 - RNA, 19 nt, Artificial Sequence
  Description of Artificial Sequence: Synthetic oligonucleotide
  Sense strand starting at position 2560 of SEQ ID NO: 1561828
ugguucugauugucuuauu

SEQ ID NO: 1701554 - RNA, 19 nt, Artificial Sequence
  Description of Artificial Sequence: Synthetic oligonucleotide
  Antisense strand to SEQ ID NO: 1701553
aauaagacaaucagaacca

SEQ ID NO: 1701555 - RNA, 19 nt, Artificial Sequence
  Description of Artificial Sequence: Synthetic oligonucleotide
  Sense strand starting at position 3144 of SEQ ID NO: 1561828
aaaggacccuugguuuaaa

SEQ ID NO: 1701556 - RNA, 19 nt, Artificial Sequence
  Description of Artificial Sequence: Synthetic oligonucleotide
  Antisense strand to SEQ ID NO: 1701555
uuuaaaccaaggguccuuu

SEQ ID NO: 1701557 - RNA, 19 nt, Artificial Sequence
  Description of Artificial Sequence: Synthetic oligonucleotide
  Sense strand starting at position 3145 of SEQ ID NO: 1561828
aaggacccuugguuuaaau

SEQ ID NO: 1701558 - RNA, 19 nt, Artificial Sequence
  Description of Artificial Sequence: Synthetic oligonucleotide
  Antisense strand to SEQ ID NO: 1701557
auuuaaaccaaggguccuu

SEQ ID NO: 1701559 - RNA, 19 nt, Artificial Sequence
  Description of Artificial Sequence: Synthetic oligonucleotide
  Sense strand starting at position 3290 of SEQ ID NO: 1561828
cacaaugagugcccugauu

SEQ ID NO: 1701560 - RNA, 19 nt, Artificial Sequence
  Description of Artificial Sequence: Synthetic oligonucleotide
  Antisense strand to SEQ ID NO: 1701559
aaucagggcacucauugug

SEQ ID NO: 1701561 - RNA, 19 nt, Artificial Sequence
  Description of Artificial Sequence: Synthetic oligonucleotide
  Sense strand starting at position 3297 of SEQ ID NO: 1561828
agugcccugauuugugauu

SEQ ID NO: 1701562 - RNA, 19 nt, Artificial Sequence
  Description of Artificial Sequence: Synthetic oligonucleotide
  Antisense strand to SEQ ID NO: 1701561
aaucacaaaucagggcacu

SEQ ID NO: 1701563 - RNA, 19 nt, Artificial Sequence
  Description of Artificial Sequence: Synthetic oligonucleotide
  Sense strand starting at position 3299 of SEQ ID NO: 1561828
ugcccugauuugugauuua

SEQ ID NO: 1701564 - RNA, 19 nt, Artificial Sequence
  Description of Artificial Sequence: Synthetic oligonucleotide
  Antisense strand to SEQ ID NO: 1701563
uaaaucacaaaucagggca

SEQ ID NO: 1701565 - RNA, 19 nt, Artificial Sequence
  Description of Artificial Sequence: Synthetic oligonucleotide
  Sense strand starting at position 3395 of SEQ ID NO: 1561828
gccuccugaccgcagaaua

SEQ ID NO: 1701566 - RNA, 19 nt, Artificial Sequence
  Description of Artificial Sequence: Synthetic oligonucleotide
  Antisense strand to SEQ ID NO: 1701565
uauucugcggucaggaggc

SEQ ID NO: 1701567 - RNA, 19 nt, Artificial Sequence
  Description of Artificial Sequence: Synthetic oligonucleotide
  Sense strand starting at position 3648 of SEQ ID NO: 1561828
agccucucuuugggaaaga

SEQ ID NO: 1701568 - RNA, 19 nt, Artificial Sequence
  Description of Artificial Sequence: Synthetic oligonucleotide
  Antisense strand to SEQ ID NO: 1701567
ucuuucccaaagagaggcu

SEQ ID NO: 1701569 - RNA, 19 nt, Artificial Sequence
  Description of Artificial Sequence: Synthetic oligonucleotide
  Sense strand starting at position 3649 of SEQ ID NO: 1561828
gccucucuuugggaaagaa

SEQ ID NO: 1701570 - RNA, 19 nt, Artificial Sequence
  Description of Artificial Sequence: Synthetic oligonucleotide
  Antisense strand to SEQ ID NO: 1701569
uucuuucccaaagagaggc

SEQ ID NO: 1701571 - RNA, 19 nt, Artificial Sequence
  Description of Artificial Sequence: Synthetic oligonucleotide
  Sense strand starting at position 62 of SEQ ID NO: 1561829
uggagauaaugauagccau

SEQ ID NO: 1701572 - RNA, 19 nt, Artificial Sequence
  Description of Artificial Sequence: Synthetic oligonucleotide
  Antisense strand to SEQ ID NO: 1701571
auggcuaucauuaucucca

SEQ ID NO: 1701573 - RNA, 19 nt, Artificial Sequence
  Description of Artificial Sequence: Synthetic oligonucleotide
  Sense strand starting at position 212 of SEQ ID NO: 1561829
gcuccugacccaggauaga

SEQ ID NO: 1701574 - RNA, 19 nt, Artificial Sequence
  Description of Artificial Sequence: Synthetic oligonucleotide
  Antisense strand to SEQ ID NO: 1701573
ucuauccugggucaggagc

SEQ ID NO: 1701575 - RNA, 19 nt, Artificial Sequence
  Description of Artificial Sequence: Synthetic oligonucleotide
  Sense strand starting at position 358 of SEQ ID NO: 1561829
gcagcagccucacuaauaa

SEQ ID NO: 1701576 - RNA, 19 nt, Artificial Sequence
  Description of Artificial Sequence: Synthetic oligonucleotide
  Antisense strand to SEQ ID NO: 1701575
uuauuagugaggcugcugc

SEQ ID NO: 1701577 - RNA, 19 nt, Artificial Sequence
  Description of Artificial Sequence: Synthetic oligonucleotide
  Sense strand starting at position 526 of SEQ ID NO: 1561829
gggaucaucucguccauuc

SEQ ID NO: 1701578 - RNA, 19 nt, Artificial Sequence
  Description of Artificial Sequence: Synthetic oligonucleotide
  Antisense strand to SEQ ID NO: 1701577
gaauggacgagaugauccc

SEQ ID NO: 1701579 - RNA, 19 nt, Artificial Sequence
  Description of Artificial Sequence: Synthetic oligonucleotide
  Sense strand starting at position 599 of SEQ ID NO: 1561829
gagccuuucugggugcuga

SEQ ID NO: 1701580 - RNA, 19 nt, Artificial Sequence
  Description of Artificial Sequence: Synthetic oligonucleotide
  Antisense strand to SEQ ID NO: 1701579
ucagcacccagaaaggcuc

SEQ ID NO: 1701581 - RNA, 19 nt, Artificial Sequence
  Description of Artificial Sequence: Synthetic oligonucleotide
  Sense strand starting at position 885 of SEQ ID NO: 1561829
agcccugagcucuauguca

SEQ ID NO: 1701582 - RNA, 19 nt, Artificial Sequence
  Description of Artificial Sequence: Synthetic oligonucleotide
  Antisense strand to SEQ ID NO: 1701581
ugacauagagcucagggcu

SEQ ID NO: 1701583 - RNA, 19 nt, Artificial Sequence
  Description of Artificial Sequence: Synthetic oligonucleotide
  Sense strand starting at position 1055 of SEQ ID NO: 1561829
agcaucuuccaagguaaag

SEQ ID NO: 1701584 - RNA, 19 nt, Artificial Sequence
  Description of Artificial Sequence: Synthetic oligonucleotide
  Antisense strand to SEQ ID NO: 1701583
cuuuaccuuggaagaugcu

SEQ ID NO: 1701585 - RNA, 19 nt, Artificial Sequence
  Description of Artificial Sequence: Synthetic oligonucleotide
  Sense strand starting at position 1102 of SEQ ID NO: 1561829
gcaccacuucgugugcauu

SEQ ID NO: 1701586 - RNA, 19 nt, Artificial Sequence
  Description of Artificial Sequence: Synthetic oligonucleotide
  Antisense strand to SEQ ID NO: 1701585
aaugcacacgaaguggugc

SEQ ID NO: 1701587 - RNA, 19 nt, Artificial Sequence
  Description of Artificial Sequence: Synthetic oligonucleotide
  Sense strand starting at position 1154 of SEQ ID NO: 1561829
cuguucuaugcucauccau

SEQ ID NO: 1701588 - RNA, 19 nt, Artificial Sequence
  Description of Artificial Sequence: Synthetic oligonucleotide
  Antisense strand to SEQ ID NO: 1701587
auggaugagcauagaacag

SEQ ID NO: 1701589 - RNA, 19 nt, Artificial Sequence
  Description of Artificial Sequence: Synthetic oligonucleotide
  Sense strand starting at position 1156 of SEQ ID NO: 1561829
guucuaugcucauccauac

SEQ ID NO: 1701590 - RNA, 19 nt, Artificial Sequence
  Description of Artificial Sequence: Synthetic oligonucleotide
  Antisense strand to SEQ ID NO: 1701589
guauggaugagcauagaac

SEQ ID NO: 1701591 - RNA, 19 nt, Artificial Sequence
  Description of Artificial Sequence: Synthetic oligonucleotide
  Sense strand starting at position 1168 of SEQ ID NO: 1561829
uccauacuauuccugggua

SEQ ID NO: 1701592 - RNA, 19 nt, Artificial Sequence
  Description of Artificial Sequence: Synthetic oligonucleotide
  Antisense strand to SEQ ID NO: 1701591
uacccaggaauaguaugga

SEQ ID NO: 1701593 - RNA, 19 nt, Artificial Sequence
  Description of Artificial Sequence: Synthetic oligonucleotide
  Sense strand starting at position 1171 of SEQ ID NO: 1561829
auacuauuccuggguacca

SEQ ID NO: 1701594 - RNA, 19 nt, Artificial Sequence
  Description of Artificial Sequence: Synthetic oligonucleotide
  Antisense strand to SEQ ID NO: 1701593
ugguacccaggaauaguau

SEQ ID NO: 1701595 - RNA, 19 nt, Artificial Sequence
  Description of Artificial Sequence: Synthetic oligonucleotide
  Sense strand starting at position 1190 of SEQ ID NO: 1561829
agcaguugccaagguaaau

SEQ ID NO: 1701596 - RNA, 19 nt, Artificial Sequence
  Description of Artificial Sequence: Synthetic oligonucleotide
  Antisense strand to SEQ ID NO: 1701595
auuuaccuuggcaacugcu

SEQ ID NO: 1701597 - RNA, 19 nt, Artificial Sequence
  Description of Artificial Sequence: Synthetic oligonucleotide
  Sense strand starting at position 1331 of SEQ ID NO: 1561829
uccucugugagaugaguga

SEQ ID NO: 1701598 - RNA, 19 nt, Artificial Sequence
  Description of Artificial Sequence: Synthetic oligonucleotide
  Antisense strand to SEQ ID NO: 1701597
ucacucaucucacagagga

SEQ ID NO: 1701599 - RNA, 19 nt, Artificial Sequence
  Description of Artificial Sequence: Synthetic oligonucleotide
  Sense strand starting at position 1335 of SEQ ID NO: 1561829
cugugagaugagugaugga

SEQ ID NO: 1701600 - RNA, 19 nt, Artificial Sequence
  Description of Artificial Sequence: Synthetic oligonucleotide
  Antisense strand to SEQ ID NO: 1701599
uccaucacucaucucacag

SEQ ID NO: 1701601 - RNA, 19 nt, Artificial Sequence
  Description of Artificial Sequence: Synthetic oligonucleotide
  Sense strand starting at position 1531 of SEQ ID NO: 1561829
ggaaguaagucccugaggu

SEQ ID NO: 1701602 - RNA, 19 nt, Artificial Sequence
  Description of Artificial Sequence: Synthetic oligonucleotide
  Antisense strand to SEQ ID NO: 1701601
accucagggacuuacuucc

SEQ ID NO: 1701603 - RNA, 19 nt, Artificial Sequence
  Description of Artificial Sequence: Synthetic oligonucleotide
  Sense strand starting at position 1532 of SEQ ID NO: 1561829
gaaguaagucccugaggug

SEQ ID NO: 1701604 - RNA, 19 nt, Artificial Sequence
  Description of Artificial Sequence: Synthetic oligonucleotide
  Antisense strand to SEQ ID NO: 1701603
caccucagggacuuacuuc

SEQ ID NO: 1701605 - RNA, 19 nt, Artificial Sequence
  Description of Artificial Sequence: Synthetic oligonucleotide
  Sense strand starting at position 1533 of SEQ ID NO: 1561829
aaguaagucccugagguga

SEQ ID NO: 1701606 - RNA, 19 nt, Artificial Sequence
  Description of Artificial Sequence: Synthetic oligonucleotide
  Antisense strand to SEQ ID NO: 1701605
ucaccucagggacuuacuu

SEQ ID NO: 1701607 - RNA, 19 nt, Artificial Sequence
  Description of Artificial Sequence: Synthetic oligonucleotide
  Sense strand starting at position 1627 of SEQ ID NO: 1561829
gcacauggcuggucaugua

SEQ ID NO: 1701608 - RNA, 19 nt, Artificial Sequence
  Description of Artificial Sequence: Synthetic oligonucleotide
  Antisense strand to SEQ ID NO: 1701607
uacaugaccagccaugugc

SEQ ID NO: 1701609 - RNA, 19 nt, Artificial Sequence
  Description of Artificial Sequence: Synthetic oligonucleotide
  Sense strand starting at position 2238 of SEQ ID NO: 1561829
acccacagagguugaauua

SEQ ID NO: 1701610 - RNA, 19 nt, Artificial Sequence
  Description of Artificial Sequence: Synthetic oligonucleotide
  Antisense strand to SEQ ID NO: 1701609
uaauucaaccucugugggu

SEQ ID NO: 1701611 - RNA, 19 nt, Artificial Sequence
  Description of Artificial Sequence: Synthetic oligonucleotide
  Sense strand starting at position 2565 of SEQ ID NO: 1561829
gaacgacugucacauggaa

SEQ ID NO: 1701612 - RNA, 19 nt, Artificial Sequence
  Description of Artificial Sequence: Synthetic oligonucleotide
  Antisense strand to SEQ ID NO: 1701611
uuccaugugacagucguuc

SEQ ID NO: 1701613 - RNA, 19 nt, Artificial Sequence
  Description of Artificial Sequence: Synthetic oligonucleotide
  Sense strand starting at position 2567 of SEQ ID NO: 1561829
acgacugucacauggaaua

SEQ ID NO: 1701614 - RNA, 19 nt, Artificial Sequence
  Description of Artificial Sequence: Synthetic oligonucleotide
  Antisense strand to SEQ ID NO: 1701613
uauuccaugugacagucgu

SEQ ID NO: 1701615 - RNA, 19 nt, Artificial Sequence
  Description of Artificial Sequence: Synthetic oligonucleotide
  Sense strand starting at position 2804 of SEQ ID NO: 1561829
ccuggaaauucucauccag

SEQ ID NO: 1701616 - RNA, 19 nt, Artificial Sequence
  Description of Artificial Sequence: Synthetic oligonucleotide
  Antisense strand to SEQ ID NO: 1701615
cuggaugagaauuuccagg

SEQ ID NO: 1701617 - RNA, 19 nt, Artificial Sequence
  Description of Artificial Sequence: Synthetic oligonucleotide
  Sense strand starting at position 2948 of SEQ ID NO: 1561829
ucuggacucgagcgaucuu

SEQ ID NO: 1701618 - RNA, 19 nt, Artificial Sequence
  Description of Artificial Sequence: Synthetic oligonucleotide
  Antisense strand to SEQ ID NO: 1701617
aagaucgcucgaguccaga

SEQ ID NO: 1701619 - RNA, 19 nt, Artificial Sequence
  Description of Artificial Sequence: Synthetic oligonucleotide
  Sense strand starting at position 3306 of SEQ ID NO: 1561829
gagacaugcuguuccagau

SEQ ID NO: 1701620 - RNA, 19 nt, Artificial Sequence
  Description of Artificial Sequence: Synthetic oligonucleotide
  Antisense strand to SEQ ID NO: 1701619
aucuggaacagcaugucuc

SEQ ID NO: 1701621 - RNA, 19 nt, Artificial Sequence
  Description of Artificial Sequence: Synthetic oligonucleotide
  Sense strand starting at position 3322 of SEQ ID NO: 1561829
gauggcugugcuugcaaca

SEQ ID NO: 1701622 - RNA, 19 nt, Artificial Sequence
  Description of Artificial Sequence: Synthetic oligonucleotide
  Antisense strand to SEQ ID NO: 1701621
uguugcaagcacagccauc

SEQ ID NO: 1701623 - RNA, 19 nt, Artificial Sequence
  Description of Artificial Sequence: Synthetic oligonucleotide
  Sense strand starting at position 3341 of SEQ ID NO: 1561829
cccuuaacuccagggaugu

SEQ ID NO: 1701624 - RNA, 19 nt, Artificial Sequence
  Description of Artificial Sequence: Synthetic oligonucleotide
  Antisense strand to SEQ ID NO: 1701623
acaucccuggaguuaaggg

SEQ ID NO: 1701625 - RNA, 19 nt, Artificial Sequence
  Description of Artificial Sequence: Synthetic oligonucleotide
  Sense strand starting at position 3342 of SEQ ID NO: 1561829
ccuuaacuccagggauguu

SEQ ID NO: 1701626 - RNA, 19 nt, Artificial Sequence
  Description of Artificial Sequence: Synthetic oligonucleotide
  Antisense strand to SEQ ID NO: 1701625
aacaucccuggaguuaagg

SEQ ID NO: 1701627 - RNA, 19 nt, Artificial Sequence
  Description of Artificial Sequence: Synthetic oligonucleotide
  Sense strand starting at position 3424 of SEQ ID NO: 1561829
guuggaagguuguuucaga

SEQ ID NO: 1701628 - RNA, 19 nt, Artificial Sequence
  Description of Artificial Sequence: Synthetic oligonucleotide
  Antisense strand to SEQ ID NO: 1701627
ucugaaacaaccuuccaac

SEQ ID NO: 1701629 - RNA, 19 nt, Artificial Sequence
  Description of Artificial Sequence: Synthetic oligonucleotide
  Sense strand starting at position 3514 of SEQ ID NO: 1561829
gauuaaaguccuggagcau

SEQ ID NO: 1701630 - RNA, 19 nt, Artificial Sequence
  Description of Artificial Sequence: Synthetic oligonucleotide
  Antisense strand to SEQ ID NO: 1701629
augcuccaggacuuuaauc

SEQ ID NO: 1701631 - RNA, 19 nt, Artificial Sequence
  Description of Artificial Sequence: Synthetic oligonucleotide
  Sense strand starting at position 3731 of SEQ ID NO: 1561829
ugguuuaucuggucugcga

SEQ ID NO: 1701632 - RNA, 19 nt, Artificial Sequence
  Description of Artificial Sequence: Synthetic oligonucleotide
  Antisense strand to SEQ ID NO: 1701631
ucgcagaccagauaaacca

SEQ ID NO: 1701633 - RNA, 19 nt, Artificial Sequence
  Description of Artificial Sequence: Synthetic oligonucleotide
  Sense strand starting at position 3735 of SEQ ID NO: 1561829
uuaucuggucugcgaucau

SEQ ID NO: 1701634 - RNA, 19 nt, Artificial Sequence
  Description of Artificial Sequence: Synthetic oligonucleotide
  Antisense strand to SEQ ID NO: 1701633
augaucgcagaccagauaa

SEQ ID NO: 1701635 - RNA, 19 nt, Artificial Sequence
  Description of Artificial Sequence: Synthetic oligonucleotide
  Sense strand starting at position 3745 of SEQ ID NO: 1561829
ugcgaucauguccggaaca

SEQ ID NO: 1701636 - RNA, 19 nt, Artificial Sequence
  Description of Artificial Sequence: Synthetic oligonucleotide
  Antisense strand to SEQ ID NO: 1701635
uguuccggacaugaucgca

SEQ ID NO: 1701637 - RNA, 19 nt, Artificial Sequence
  Description of Artificial Sequence: Synthetic oligonucleotide
  Sense strand starting at position 3747 of SEQ ID NO: 1561829
cgaucauguccggaacaca

SEQ ID NO: 1701638 - RNA, 19 nt, Artificial Sequence
  Description of Artificial Sequence: Synthetic oligonucleotide
  Antisense strand to SEQ ID NO: 1701637
uguguuccggacaugaucg

SEQ ID NO: 1701639 - RNA, 19 nt, Artificial Sequence
  Description of Artificial Sequence: Synthetic oligonucleotide
  Sense strand starting at position 3764 of SEQ ID NO: 1561829
cagggucuucuguguccaa

SEQ ID NO: 1701640 - RNA, 19 nt, Artificial Sequence
  Description of Artificial Sequence: Synthetic oligonucleotide
  Antisense strand to SEQ ID NO: 1701639
uuggacacagaagacccug

SEQ ID NO: 1701641 - RNA, 19 nt, Artificial Sequence
  Description of Artificial Sequence: Synthetic oligonucleotide
  Sense strand starting at position 3765 of SEQ ID NO: 1561829
agggucuucuguguccaaa

SEQ ID NO: 1701642 - RNA, 19 nt, Artificial Sequence
  Description of Artificial Sequence: Synthetic oligonucleotide
  Antisense strand to SEQ ID NO: 1701641
uuuggacacagaagacccu

SEQ ID NO: 1701643 - RNA, 19 nt, Artificial Sequence
  Description of Artificial Sequence: Synthetic oligonucleotide
  Sense strand starting at position 3767 of SEQ ID NO: 1561829
ggucuucuguguccaaaga

SEQ ID NO: 1701644 - RNA, 19 nt, Artificial Sequence
  Description of Artificial Sequence: Synthetic oligonucleotide
  Antisense strand to SEQ ID NO: 1701643
ucuuuggacacagaagacc

SEQ ID NO: 1701645 - RNA, 19 nt, Artificial Sequence
  Description of Artificial Sequence: Synthetic oligonucleotide
  Sense strand starting at position 3768 of SEQ ID NO: 1561829
gucuucuguguccaaagaa

SEQ ID NO: 1701646 - RNA, 19 nt, Artificial Sequence
  Description of Artificial Sequence: Synthetic oligonucleotide
  Antisense strand to SEQ ID NO: 1701645
uucuuuggacacagaagac

SEQ ID NO: 1701647 - RNA, 19 nt, Artificial Sequence
  Description of Artificial Sequence: Synthetic oligonucleotide
  Sense strand starting at position 3929 of SEQ ID NO: 1561829
gccacaggucaggaguuau

SEQ ID NO: 1701648 - RNA, 19 nt, Artificial Sequence
  Description of Artificial Sequence: Synthetic oligonucleotide
  Antisense strand to SEQ ID NO: 1701647
auaacuccugaccuguggc

SEQ ID NO: 1701649 - RNA, 19 nt, Artificial Sequence
  Description of Artificial Sequence: Synthetic oligonucleotide
  Sense strand starting at position 3940 of SEQ ID NO: 1561829
ggaguuauggccuacucca

SEQ ID NO: 1701650 - RNA, 19 nt, Artificial Sequence
  Description of Artificial Sequence: Synthetic oligonucleotide
  Antisense strand to SEQ ID NO: 1701649
uggaguaggccauaacucc

SEQ ID NO: 1701651 - RNA, 19 nt, Artificial Sequence
  Description of Artificial Sequence: Synthetic oligonucleotide
  Sense strand starting at position 341 of SEQ ID NO: 1561830
uacuaagagucagacagua

SEQ ID NO: 1701652 - RNA, 19 nt, Artificial Sequence
  Description of Artificial Sequence: Synthetic oligonucleotide
  Antisense strand to SEQ ID NO: 1701651
uacugucugacucuuagua

SEQ ID NO: 1701653 - RNA, 19 nt, Artificial Sequence
  Description of Artificial Sequence: Synthetic oligonucleotide
  Sense strand starting at position 396 of SEQ ID NO: 1561830
augcaaauguaucugcauu

SEQ ID NO: 1701654 - RNA, 19 nt, Artificial Sequence
  Description of Artificial Sequence: Synthetic oligonucleotide
  Antisense strand to SEQ ID NO: 1701653
aaugcagauacauuugcau

SEQ ID NO: 1701655 - RNA, 19 nt, Artificial Sequence
  Description of Artificial Sequence: Synthetic oligonucleotide
  Sense strand starting at position 849 of SEQ ID NO: 1561830
gccacucucguguuuaucu

SEQ ID NO: 1701656 - RNA, 19 nt, Artificial Sequence
  Description of Artificial Sequence: Synthetic oligonucleotide
  Antisense strand to SEQ ID NO: 1701655
agauaaacacgagaguggc

SEQ ID NO: 1701657 - RNA, 19 nt, Artificial Sequence
  Description of Artificial Sequence: Synthetic oligonucleotide
  Sense strand starting at position 887 of SEQ ID NO: 1561830
gcaugaaaguaauuagcaa

SEQ ID NO: 1701658 - RNA, 19 nt, Artificial Sequence
  Description of Artificial Sequence: Synthetic oligonucleotide
  Antisense strand to SEQ ID NO: 1701657
uugcuaauuacuuucaugc

SEQ ID NO: 1701659 - RNA, 19 nt, Artificial Sequence
  Description of Artificial Sequence: Synthetic oligonucleotide
  Sense strand starting at position 928 of SEQ ID NO: 1561830
cguaguugucucuggagac

SEQ ID NO: 1701660 - RNA, 19 nt, Artificial Sequence
  Description of Artificial Sequence: Synthetic oligonucleotide
  Antisense strand to SEQ ID NO: 1701659
gucuccagagacaacuacg

SEQ ID NO: 1701661 - RNA, 19 nt, Artificial Sequence
  Description of Artificial Sequence: Synthetic oligonucleotide
  Sense strand starting at position 954 of SEQ ID NO: 1561830
cuggaacuuucccugcgua

SEQ ID NO: 1701662 - RNA, 19 nt, Artificial Sequence
  Description of Artificial Sequence: Synthetic oligonucleotide
  Antisense strand to SEQ ID NO: 1701661
uacgcagggaaaguuccag

SEQ ID NO: 1701663 - RNA, 19 nt, Artificial Sequence
  Description of Artificial Sequence: Synthetic oligonucleotide
  Sense strand starting at position 955 of SEQ ID NO: 1561830
uggaacuuucccugcguaa

SEQ ID NO: 1701664 - RNA, 19 nt, Artificial Sequence
  Description of Artificial Sequence: Synthetic oligonucleotide
  Antisense strand to SEQ ID NO: 1701663
uuacgcagggaaaguucca

SEQ ID NO: 1701665 - RNA, 19 nt, Artificial Sequence
  Description of Artificial Sequence: Synthetic oligonucleotide
  Sense strand starting at position 957 of SEQ ID NO: 1561830
gaacuuucccugcguaagu

SEQ ID NO: 1701666 - RNA, 19 nt, Artificial Sequence
  Description of Artificial Sequence: Synthetic oligonucleotide
  Antisense strand to SEQ ID NO: 1701665
acuuacgcagggaaaguuc

SEQ ID NO: 1701667 - RNA, 19 nt, Artificial Sequence
  Description of Artificial Sequence: Synthetic oligonucleotide
  Sense strand starting at position 958 of SEQ ID NO: 1561830
aacuuucccugcguaaguu

SEQ ID NO: 1701668 - RNA, 19 nt, Artificial Sequence
  Description of Artificial Sequence: Synthetic oligonucleotide
  Antisense strand to SEQ ID NO: 1701667
aacuuacgcagggaaaguu

SEQ ID NO: 1701669 - RNA, 19 nt, Artificial Sequence
  Description of Artificial Sequence: Synthetic oligonucleotide
  Sense strand starting at position 967 of SEQ ID NO: 1561830
ugcguaaguucuuugguaa

SEQ ID NO: 1701670 - RNA, 19 nt, Artificial Sequence
  Description of Artificial Sequence: Synthetic oligonucleotide
  Antisense strand to SEQ ID NO: 1701669
uuaccaaagaacuuacgca

SEQ ID NO: 1701671 - RNA, 19 nt, Artificial Sequence
  Description of Artificial Sequence: Synthetic oligonucleotide
  Sense strand starting at position 968 of SEQ ID NO: 1561830
gcguaaguucuuugguaau

SEQ ID NO: 1701672 - RNA, 19 nt, Artificial Sequence
  Description of Artificial Sequence: Synthetic oligonucleotide
  Antisense strand to SEQ ID NO: 1701671
auuaccaaagaacuuacgc

SEQ ID NO: 1701673 - RNA, 19 nt, Artificial Sequence
  Description of Artificial Sequence: Synthetic oligonucleotide
  Sense strand starting at position 970 of SEQ ID NO: 1561830
guaaguucuuugguaauga

SEQ ID NO: 1701674 - RNA, 19 nt, Artificial Sequence
  Description of Artificial Sequence: Synthetic oligonucleotide
  Antisense strand to SEQ ID NO: 1701673
ucauuaccaaagaacuuac

SEQ ID NO: 1701675 - RNA, 19 nt, Artificial Sequence
  Description of Artificial Sequence: Synthetic oligonucleotide
  Sense strand starting at position 981 of SEQ ID NO: 1561830
gguaaugagucuccuaaga

SEQ ID NO: 1701676 - RNA, 19 nt, Artificial Sequence
  Description of Artificial Sequence: Synthetic oligonucleotide
  Antisense strand to SEQ ID NO: 1701675
ucuuaggagacucauuacc

SEQ ID NO: 1701677 - RNA, 19 nt, Artificial Sequence
  Description of Artificial Sequence: Synthetic oligonucleotide
  Sense strand starting at position 1007 of SEQ ID NO: 1561830
gaaagugggaucuagcguu

SEQ ID NO: 1701678 - RNA, 19 nt, Artificial Sequence
  Description of Artificial Sequence: Synthetic oligonucleotide
  Antisense strand to SEQ ID NO: 1701677
aacgcuagaucccacuuuc

SEQ ID NO: 1701679 - RNA, 19 nt, Artificial Sequence
  Description of Artificial Sequence: Synthetic oligonucleotide
  Sense strand starting at position 1013 of SEQ ID NO: 1561830
gggaucuagcguuggcuga

SEQ ID NO: 1701680 - RNA, 19 nt, Artificial Sequence
  Description of Artificial Sequence: Synthetic oligonucleotide
  Antisense strand to SEQ ID NO: 1701679
ucagccaacgcuagauccc

SEQ ID NO: 1701681 - RNA, 19 nt, Artificial Sequence
  Description of Artificial Sequence: Synthetic oligonucleotide
  Sense strand starting at position 1144 of SEQ ID NO: 1561830
caauucgcauccuugggaa

SEQ ID NO: 1701682 - RNA, 19 nt, Artificial Sequence
  Description of Artificial Sequence: Synthetic oligonucleotide
  Antisense strand to SEQ ID NO: 1701681
uucccaaggaugcgaauug

SEQ ID NO: 1701683 - RNA, 19 nt, Artificial Sequence
  Description of Artificial Sequence: Synthetic oligonucleotide
  Sense strand starting at position 2284 of SEQ ID NO: 1561830
gcucucagugcuuuggcau

SEQ ID NO: 1701684 - RNA, 19 nt, Artificial Sequence
  Description of Artificial Sequence: Synthetic oligonucleotide
  Antisense strand to SEQ ID NO: 1701683
augccaaagcacugagagc

SEQ ID NO: 1701685 - RNA, 19 nt, Artificial Sequence
  Description of Artificial Sequence: Synthetic oligonucleotide
  Sense strand starting at position 2290 of SEQ ID NO: 1561830
agugcuuuggcauggccaa

SEQ ID NO: 1701686 - RNA, 19 nt, Artificial Sequence
  Description of Artificial Sequence: Synthetic oligonucleotide
  Antisense strand to SEQ ID NO: 1701685
uuggccaugccaaagcacu

SEQ ID NO: 1701687 - RNA, 19 nt, Artificial Sequence
  Description of Artificial Sequence: Synthetic oligonucleotide
  Sense strand starting at position 2377 of SEQ ID NO: 1561830
uaggacugcuccuuugauu

SEQ ID NO: 1701688 - RNA, 19 nt, Artificial Sequence
  Description of Artificial Sequence: Synthetic oligonucleotide
  Antisense strand to SEQ ID NO: 1701687
aaucaaaggagcaguccua

SEQ ID NO: 1701689 - RNA, 19 nt, Artificial Sequence
  Description of Artificial Sequence: Synthetic oligonucleotide
  Sense strand starting at position 2403 of SEQ ID NO: 1561830
cggguagucuucucucauu

SEQ ID NO: 1701690 - RNA, 19 nt, Artificial Sequence
  Description of Artificial Sequence: Synthetic oligonucleotide
  Antisense strand to SEQ ID NO: 1701689
aaugagagaagacuacccg

SEQ ID NO: 1701691 - RNA, 19 nt, Artificial Sequence
  Description of Artificial Sequence: Synthetic oligonucleotide
  Sense strand starting at position 2447 of SEQ ID NO: 1561830
ccaaccaaccgugguuaua

SEQ ID NO: 1701692 - RNA, 19 nt, Artificial Sequence
  Description of Artificial Sequence: Synthetic oligonucleotide
  Antisense strand to SEQ ID NO: 1701691
uauaaccacgguugguugg

SEQ ID NO: 1701693 - RNA, 19 nt, Artificial Sequence
  Description of Artificial Sequence: Synthetic oligonucleotide
  Sense strand starting at position 2523 of SEQ ID NO: 1561830
gcguaaccaugcuuacuga

SEQ ID NO: 1701694 - RNA, 19 nt, Artificial Sequence
  Description of Artificial Sequence: Synthetic oligonucleotide
  Antisense strand to SEQ ID NO: 1701693
ucaguaagcaugguuacgc

SEQ ID NO: 1701695 - RNA, 19 nt, Artificial Sequence
  Description of Artificial Sequence: Synthetic oligonucleotide
  Sense strand starting at position 2534 of SEQ ID NO: 1561830
cuuacugacuggucauguu

SEQ ID NO: 1701696 - RNA, 19 nt, Artificial Sequence
  Description of Artificial Sequence: Synthetic oligonucleotide
  Antisense strand to SEQ ID NO: 1701695
aacaugaccagucaguaag

SEQ ID NO: 1701697 - RNA, 19 nt, Artificial Sequence
  Description of Artificial Sequence: Synthetic oligonucleotide
  Sense strand starting at position 2732 of SEQ ID NO: 1561830
cuugguguacgccuguaau

SEQ ID NO: 1701698 - RNA, 19 nt, Artificial Sequence
  Description of Artificial Sequence: Synthetic oligonucleotide
  Antisense strand to SEQ ID NO: 1701697
auuacaggcguacaccaag

SEQ ID NO: 1701699 - RNA, 19 nt, Artificial Sequence
  Description of Artificial Sequence: Synthetic oligonucleotide
  Sense strand starting at position 2957 of SEQ ID NO: 1561830
cugacagcuugucuuccau

SEQ ID NO: 1701700 - RNA, 19 nt, Artificial Sequence
  Description of Artificial Sequence: Synthetic oligonucleotide
  Antisense strand to SEQ ID NO: 1701699
auggaagacaagcugucag

SEQ ID NO: 1701701 - RNA, 19 nt, Artificial Sequence
  Description of Artificial Sequence: Synthetic oligonucleotide
  Sense strand starting at position 2959 of SEQ ID NO: 1561830
gacagcuugucuuccaugu

SEQ ID NO: 1701702 - RNA, 19 nt, Artificial Sequence
  Description of Artificial Sequence: Synthetic oligonucleotide
  Antisense strand to SEQ ID NO: 1701701
acauggaagacaagcuguc

SEQ ID NO: 1701703 - RNA, 19 nt, Artificial Sequence
  Description of Artificial Sequence: Synthetic oligonucleotide
  Sense strand starting at position 2968 of SEQ ID NO: 1561830
ucuuccaugucagcaagaa

SEQ ID NO: 1701704 - RNA, 19 nt, Artificial Sequence
  Description of Artificial Sequence: Synthetic oligonucleotide
  Antisense strand to SEQ ID NO: 1701703
uucuugcugacauggaaga

SEQ ID NO: 1701705 - RNA, 19 nt, Artificial Sequence
  Description of Artificial Sequence: Synthetic oligonucleotide
  Sense strand starting at position 2969 of SEQ ID NO: 1561830
cuuccaugucagcaagaac

SEQ ID NO: 1701706 - RNA, 19 nt, Artificial Sequence
  Description of Artificial Sequence: Synthetic oligonucleotide
  Antisense strand to SEQ ID NO: 1701705
guucuugcugacauggaag

SEQ ID NO: 1701707 - RNA, 19 nt, Artificial Sequence
  Description of Artificial Sequence: Synthetic oligonucleotide
  Sense strand starting at position 3045 of SEQ ID NO: 1561830
gcaucucugcccguauacu

SEQ ID NO: 1701708 - RNA, 19 nt, Artificial Sequence
  Description of Artificial Sequence: Synthetic oligonucleotide
  Antisense strand to SEQ ID NO: 1701707
aguauacgggcagagaugc

SEQ ID NO: 1701709 - RNA, 19 nt, Artificial Sequence
  Description of Artificial Sequence: Synthetic oligonucleotide
  Sense strand starting at position 3055 of SEQ ID NO: 1561830
ccguauacugggcauugau

SEQ ID NO: 1701710 - RNA, 19 nt, Artificial Sequence
  Description of Artificial Sequence: Synthetic oligonucleotide
  Antisense strand to SEQ ID NO: 1701709
aucaaugcccaguauacgg

SEQ ID NO: 1701711 - RNA, 19 nt, Artificial Sequence
  Description of Artificial Sequence: Synthetic oligonucleotide
  Sense strand starting at position 3058 of SEQ ID NO: 1561830
uauacugggcauugaugaa

SEQ ID NO: 1701712 - RNA, 19 nt, Artificial Sequence
  Description of Artificial Sequence: Synthetic oligonucleotide
  Antisense strand to SEQ ID NO: 1701711
uucaucaaugcccaguaua

SEQ ID NO: 1701713 - RNA, 19 nt, Artificial Sequence
  Description of Artificial Sequence: Synthetic oligonucleotide
  Sense strand starting at position 3141 of SEQ ID NO: 1561830
ccagcaucgcuccagcaau

SEQ ID NO: 1701714 - RNA, 19 nt, Artificial Sequence
  Description of Artificial Sequence: Synthetic oligonucleotide
  Antisense strand to SEQ ID NO: 1701713
auugcuggagcgaugcugg

SEQ ID NO: 1701715 - RNA, 19 nt, Artificial Sequence
  Description of Artificial Sequence: Synthetic oligonucleotide
  Sense strand starting at position 3308 of SEQ ID NO: 1561830
agcauagaaucucagaugu

SEQ ID NO: 1701716 - RNA, 19 nt, Artificial Sequence
  Description of Artificial Sequence: Synthetic oligonucleotide
  Antisense strand to SEQ ID NO: 1701715
acaucugagauucuaugcu

SEQ ID NO: 1701717 - RNA, 19 nt, Artificial Sequence
  Description of Artificial Sequence: Synthetic oligonucleotide
  Sense strand starting at position 3566 of SEQ ID NO: 1561830
ugcagcuguagugaacuau

SEQ ID NO: 1701718 - RNA, 19 nt, Artificial Sequence
  Description of Artificial Sequence: Synthetic oligonucleotide
  Antisense strand to SEQ ID NO: 1701717
auaguucacuacagcugca

SEQ ID NO: 1701719 - RNA, 19 nt, Artificial Sequence
  Description of Artificial Sequence: Synthetic oligonucleotide
  Sense strand starting at position 3771 of SEQ ID NO: 1561830
ucaugaguuccacagagcu

SEQ ID NO: 1701720 - RNA, 19 nt, Artificial Sequence
  Description of Artificial Sequence: Synthetic oligonucleotide
  Antisense strand to SEQ ID NO: 1701719
agcucuguggaacucauga

SEQ ID NO: 1701721 - RNA, 19 nt, Artificial Sequence
  Description of Artificial Sequence: Synthetic oligonucleotide
  Sense strand starting at position 3839 of SEQ ID NO: 1561830
gugggucauaaaugugaga

SEQ ID NO: 1701722 - RNA, 19 nt, Artificial Sequence
  Description of Artificial Sequence: Synthetic oligonucleotide
  Antisense strand to SEQ ID NO: 1701721
ucucacauuuaugacccac

SEQ ID NO: 1701723 - RNA, 19 nt, Artificial Sequence
  Description of Artificial Sequence: Synthetic oligonucleotide
  Sense strand starting at position 3841 of SEQ ID NO: 1561830
gggucauaaaugugagaug

SEQ ID NO: 1701724 - RNA, 19 nt, Artificial Sequence
  Description of Artificial Sequence: Synthetic oligonucleotide
  Antisense strand to SEQ ID NO: 1701723
caucucacauuuaugaccc

SEQ ID NO: 1701725 - RNA, 19 nt, Artificial Sequence
  Description of Artificial Sequence: Synthetic oligonucleotide
  Sense strand starting at position 3844 of SEQ ID NO: 1561830
ucauaaaugugagauguua

SEQ ID NO: 1701726 - RNA, 19 nt, Artificial Sequence
  Description of Artificial Sequence: Synthetic oligonucleotide
  Antisense strand to SEQ ID NO: 1701725
uaacaucucacauuuauga

SEQ ID NO: 1701727 - RNA, 19 nt, Artificial Sequence
  Description of Artificial Sequence: Synthetic oligonucleotide
  Sense strand starting at position 3965 of SEQ ID NO: 1561830
uugugaaguuucucaagaa

SEQ ID NO: 1701728 - RNA, 19 nt, Artificial Sequence
  Description of Artificial Sequence: Synthetic oligonucleotide
  Antisense strand to SEQ ID NO: 1701727
uucuugagaaacuucacaa

SEQ ID NO: 1701729 - RNA, 19 nt, Artificial Sequence
  Description of Artificial Sequence: Synthetic oligonucleotide
  Sense strand starting at position 3972 of SEQ ID NO: 1561830
guuucucaagaauaagugu

SEQ ID NO: 1701730 - RNA, 19 nt, Artificial Sequence
  Description of Artificial Sequence: Synthetic oligonucleotide
  Antisense strand to SEQ ID NO: 1701729
acacuuauucuugagaaac

SEQ ID NO: 1701731 - RNA, 19 nt, Artificial Sequence
  Description of Artificial Sequence: Synthetic oligonucleotide
  Sense strand starting at position 374 of SEQ ID NO: 1561831
cgcaccugaccuuagaauu

SEQ ID NO: 1701732 - RNA, 19 nt, Artificial Sequence
  Description of Artificial Sequence: Synthetic oligonucleotide
  Antisense strand to SEQ ID NO: 1701731
aauucuaaggucaggugcg

SEQ ID NO: 1701733 - RNA, 19 nt, Artificial Sequence
  Description of Artificial Sequence: Synthetic oligonucleotide
  Sense strand starting at position 898 of SEQ ID NO: 1561831
uuuagucuaccagguagua

SEQ ID NO: 1701734 - RNA, 19 nt, Artificial Sequence
  Description of Artificial Sequence: Synthetic oligonucleotide
  Antisense strand to SEQ ID NO: 1701733
uacuaccugguagacuaaa

SEQ ID NO: 1701735 - RNA, 19 nt, Artificial Sequence
  Description of Artificial Sequence: Synthetic oligonucleotide
  Sense strand starting at position 1125 of SEQ ID NO: 1561831
gggucugaucagugaagca

SEQ ID NO: 1701736 - RNA, 19 nt, Artificial Sequence
  Description of Artificial Sequence: Synthetic oligonucleotide
  Antisense strand to SEQ ID NO: 1701735
ugcuucacugaucagaccc

SEQ ID NO: 1701737 - RNA, 19 nt, Artificial Sequence
  Description of Artificial Sequence: Synthetic oligonucleotide
  Sense strand starting at position 1179 of SEQ ID NO: 1561831
gacccaaaguucccugagu

SEQ ID NO: 1701738 - RNA, 19 nt, Artificial Sequence
  Description of Artificial Sequence: Synthetic oligonucleotide
  Antisense strand to SEQ ID NO: 1701737
acucagggaacuuuggguc

SEQ ID NO: 1701739 - RNA, 19 nt, Artificial Sequence
  Description of Artificial Sequence: Synthetic oligonucleotide
  Sense strand starting at position 1181 of SEQ ID NO: 1561831
cccaaaguucccugaguca

SEQ ID NO: 1701740 - RNA, 19 nt, Artificial Sequence
  Description of Artificial Sequence: Synthetic oligonucleotide
  Antisense strand to SEQ ID NO: 1701739
ugacucagggaacuuuggg

SEQ ID NO: 1701741 - RNA, 19 nt, Artificial Sequence
  Description of Artificial Sequence: Synthetic oligonucleotide
  Sense strand starting at position 1184 of SEQ ID NO: 1561831
aaaguucccugagucaaga

SEQ ID NO: 1701742 - RNA, 19 nt, Artificial Sequence
  Description of Artificial Sequence: Synthetic oligonucleotide
  Antisense strand to SEQ ID NO: 1701741
ucuugacucagggaacuuu

SEQ ID NO: 1701743 - RNA, 19 nt, Artificial Sequence
  Description of Artificial Sequence: Synthetic oligonucleotide
  Sense strand starting at position 1248 of SEQ ID NO: 1561831
auucuuacccacggaaaga

SEQ ID NO: 1701744 - RNA, 19 nt, Artificial Sequence
  Description of Artificial Sequence: Synthetic oligonucleotide
  Antisense strand to SEQ ID NO: 1701743
ucuuuccguggguaagaau

SEQ ID NO: 1701745 - RNA, 19 nt, Artificial Sequence
  Description of Artificial Sequence: Synthetic oligonucleotide
  Sense strand starting at position 1297 of SEQ ID NO: 1561831
aggcuugugcaacgagaaa

SEQ ID NO: 1701746 - RNA, 19 nt, Artificial Sequence
  Description of Artificial Sequence: Synthetic oligonucleotide
  Antisense strand to SEQ ID NO: 1701745
uuucucguugcacaagccu

SEQ ID NO: 1701747 - RNA, 19 nt, Artificial Sequence
  Description of Artificial Sequence: Synthetic oligonucleotide
  Sense strand starting at position 1349 of SEQ ID NO: 1561831
cauacugauguuuaccgaa

SEQ ID NO: 1701748 - RNA, 19 nt, Artificial Sequence
  Description of Artificial Sequence: Synthetic oligonucleotide
  Antisense strand to SEQ ID NO: 1701747
uucgguaaacaucaguaug

SEQ ID NO: 1701749 - RNA, 19 nt, Artificial Sequence
  Description of Artificial Sequence: Synthetic oligonucleotide
  Sense strand starting at position 1351 of SEQ ID NO: 1561831
uacugauguuuaccgaaga

SEQ ID NO: 1701750 - RNA, 19 nt, Artificial Sequence
  Description of Artificial Sequence: Synthetic oligonucleotide
  Antisense strand to SEQ ID NO: 1701749
ucuucgguaaacaucagua

SEQ ID NO: 1701751 - RNA, 19 nt, Artificial Sequence
  Description of Artificial Sequence: Synthetic oligonucleotide
  Sense strand starting at position 1444 of SEQ ID NO: 1561831
cagccucgucuggaaucua

SEQ ID NO: 1701752 - RNA, 19 nt, Artificial Sequence
  Description of Artificial Sequence: Synthetic oligonucleotide
  Antisense strand to SEQ ID NO: 1701751
uagauuccagacgaggcug

SEQ ID NO: 1701753 - RNA, 19 nt, Artificial Sequence
  Description of Artificial Sequence: Synthetic oligonucleotide
  Sense strand starting at position 1452 of SEQ ID NO: 1561831
ucuggaaucuaguuaggaa

SEQ ID NO: 1701754 - RNA, 19 nt, Artificial Sequence
  Description of Artificial Sequence: Synthetic oligonucleotide
  Antisense strand to SEQ ID NO: 1701753
uuccuaacuagauuccaga

SEQ ID NO: 1701755 - RNA, 19 nt, Artificial Sequence
  Description of Artificial Sequence: Synthetic oligonucleotide
  Sense strand starting at position 1456 of SEQ ID NO: 1561831
gaaucuaguuaggaacaca

SEQ ID NO: 1701756 - RNA, 19 nt, Artificial Sequence
  Description of Artificial Sequence: Synthetic oligonucleotide
  Antisense strand to SEQ ID NO: 1701755
uguguuccuaacuagauuc

SEQ ID NO: 1701757 - RNA, 19 nt, Artificial Sequence
  Description of Artificial Sequence: Synthetic oligonucleotide
  Sense strand starting at position 1467 of SEQ ID NO: 1561831
ggaacacaguuaucucaga

SEQ ID NO: 1701758 - RNA, 19 nt, Artificial Sequence
  Description of Artificial Sequence: Synthetic oligonucleotide
  Antisense strand to SEQ ID NO: 1701757
ucugagauaacuguguucc

SEQ ID NO: 1701759 - RNA, 19 nt, Artificial Sequence
  Description of Artificial Sequence: Synthetic oligonucleotide
  Sense strand starting at position 1530 of SEQ ID NO: 1561831
ggcacaucaaagugugaug

SEQ ID NO: 1701760 - RNA, 19 nt, Artificial Sequence
  Description of Artificial Sequence: Synthetic oligonucleotide
  Antisense strand to SEQ ID NO: 1701759
caucacacuuugaugugcc

SEQ ID NO: 1701761 - RNA, 19 nt, Artificial Sequence
  Description of Artificial Sequence: Synthetic oligonucleotide
  Sense strand starting at position 1555 of SEQ ID NO: 1561831
gcggcagaauaucugacua

SEQ ID NO: 1701762 - RNA, 19 nt, Artificial Sequence
  Description of Artificial Sequence: Synthetic oligonucleotide
  Antisense strand to SEQ ID NO: 1701761
uagucagauauucugccgc

SEQ ID NO: 1701763 - RNA, 19 nt, Artificial Sequence
  Description of Artificial Sequence: Synthetic oligonucleotide
  Sense strand starting at position 1590 of SEQ ID NO: 1561831
ccgugagacaaguacuguu

SEQ ID NO: 1701764 - RNA, 19 nt, Artificial Sequence
  Description of Artificial Sequence: Synthetic oligonucleotide
  Antisense strand to SEQ ID NO: 1701763
aacaguacuugucucacgg

SEQ ID NO: 1701765 - RNA, 19 nt, Artificial Sequence
  Description of Artificial Sequence: Synthetic oligonucleotide
  Sense strand starting at position 1683 of SEQ ID NO: 1561831
cggcgagagucacugaagu

SEQ ID NO: 1701766 - RNA, 19 nt, Artificial Sequence
  Description of Artificial Sequence: Synthetic oligonucleotide
  Antisense strand to SEQ ID NO: 1701765
acuucagugacucucgccg

SEQ ID NO: 1701767 - RNA, 19 nt, Artificial Sequence
  Description of Artificial Sequence: Synthetic oligonucleotide
  Sense strand starting at position 1685 of SEQ ID NO: 1561831
gcgagagucacugaaguuc

SEQ ID NO: 1701768 - RNA, 19 nt, Artificial Sequence
  Description of Artificial Sequence: Synthetic oligonucleotide
  Antisense strand to SEQ ID NO: 1701767
gaacuucagugacucucgc

SEQ ID NO: 1701769 - RNA, 19 nt, Artificial Sequence
  Description of Artificial Sequence: Synthetic oligonucleotide
  Sense strand starting at position 2058 of SEQ ID NO: 1561831
agcguuucccaaggacauu

SEQ ID NO: 1701770 - RNA, 19 nt, Artificial Sequence
  Description of Artificial Sequence: Synthetic oligonucleotide
  Antisense strand to SEQ ID NO: 1701769
aauguccuugggaaacgcu

SEQ ID NO: 1701771 - RNA, 19 nt, Artificial Sequence
  Description of Artificial Sequence: Synthetic oligonucleotide
  Sense strand starting at position 2145 of SEQ ID NO: 1561831
gauggaucgcucuggaagu

SEQ ID NO: 1701772 - RNA, 19 nt, Artificial Sequence
  Description of Artificial Sequence: Synthetic oligonucleotide
  Antisense strand to SEQ ID NO: 1701771
acuuccagagcgauccauc

SEQ ID NO: 1701773 - RNA, 19 nt, Artificial Sequence
  Description of Artificial Sequence: Synthetic oligonucleotide
  Sense strand starting at position 2158 of SEQ ID NO: 1561831
ggaagucauuaagcagcuu

SEQ ID NO: 1701774 - RNA, 19 nt, Artificial Sequence
  Description of Artificial Sequence: Synthetic oligonucleotide
  Antisense strand to SEQ ID NO: 1701773
aagcugcuuaaugacuucc

SEQ ID NO: 1701775 - RNA, 19 nt, Artificial Sequence
  Description of Artificial Sequence: Synthetic oligonucleotide
  Sense strand starting at position 2755 of SEQ ID NO: 1561831
aagccuguacagugagaaa

SEQ ID NO: 1701776 - RNA, 19 nt, Artificial Sequence
  Description of Artificial Sequence: Synthetic oligonucleotide
  Antisense strand to SEQ ID NO: 1701775
uuucucacuguacaggcuu

SEQ ID NO: 1701777 - RNA, 19 nt, Artificial Sequence
  Description of Artificial Sequence: Synthetic oligonucleotide
  Sense strand starting at position 3262 of SEQ ID NO: 1561831
gagcuagugacaugaugga

SEQ ID NO: 1701778 - RNA, 19 nt, Artificial Sequence
  Description of Artificial Sequence: Synthetic oligonucleotide
  Antisense strand to SEQ ID NO: 1701777
uccaucaugucacuagcuc

SEQ ID NO: 1701779 - RNA, 19 nt, Artificial Sequence
  Description of Artificial Sequence: Synthetic oligonucleotide
  Sense strand starting at position 3355 of SEQ ID NO: 1561831
gugauucuccaccacccua

SEQ ID NO: 1701780 - RNA, 19 nt, Artificial Sequence
  Description of Artificial Sequence: Synthetic oligonucleotide
  Antisense strand to SEQ ID NO: 1701779
uagggugguggagaaucac

SEQ ID NO: 1701781 - RNA, 19 nt, Artificial Sequence
  Description of Artificial Sequence: Synthetic oligonucleotide
  Sense strand starting at position 3386 of SEQ ID NO: 1561831
ggguccuacuggguacaua

SEQ ID NO: 1701782 - RNA, 19 nt, Artificial Sequence
  Description of Artificial Sequence: Synthetic oligonucleotide
  Antisense strand to SEQ ID NO: 1701781
uauguacccaguaggaccc

SEQ ID NO: 1701783 - RNA, 19 nt, Artificial Sequence
  Description of Artificial Sequence: Synthetic oligonucleotide
  Sense strand starting at position 3387 of SEQ ID NO: 1561831
gguccuacuggguacauau

SEQ ID NO: 1701784 - RNA, 19 nt, Artificial Sequence
  Description of Artificial Sequence: Synthetic oligonucleotide
  Antisense strand to SEQ ID NO: 1701783
auauguacccaguaggacc

SEQ ID NO: 1701785 - RNA, 19 nt, Artificial Sequence
  Description of Artificial Sequence: Synthetic oligonucleotide
  Sense strand starting at position 3420 of SEQ ID NO: 1561831
caguauagguaccuagaca

SEQ ID NO: 1701786 - RNA, 19 nt, Artificial Sequence
  Description of Artificial Sequence: Synthetic oligonucleotide
  Antisense strand to SEQ ID NO: 1701785
ugucuagguaccuauacug

SEQ ID NO: 1701787 - RNA, 19 nt, Artificial Sequence
  Description of Artificial Sequence: Synthetic oligonucleotide
  Sense strand starting at position 3504 of SEQ ID NO: 1561831
gcacuugagaucugcugau

SEQ ID NO: 1701788 - RNA, 19 nt, Artificial Sequence
  Description of Artificial Sequence: Synthetic oligonucleotide
  Antisense strand to SEQ ID NO: 1701787
aucagcagaucucaagugc

SEQ ID NO: 1701789 - RNA, 19 nt, Artificial Sequence
  Description of Artificial Sequence: Synthetic oligonucleotide
  Sense strand starting at position 3540 of SEQ ID NO: 1561831
gucaaugccuuggcucuaa

SEQ ID NO: 1701790 - RNA, 19 nt, Artificial Sequence
  Description of Artificial Sequence: Synthetic oligonucleotide
  Antisense strand to SEQ ID NO: 1701789
uuagagccaaggcauugac

SEQ ID NO: 1701791 - RNA, 19 nt, Artificial Sequence
  Description of Artificial Sequence: Synthetic oligonucleotide
  Sense strand starting at position 3599 of SEQ ID NO: 1561831
gccuaucuuguagggaaga

SEQ ID NO: 1701792 - RNA, 19 nt, Artificial Sequence
  Description of Artificial Sequence: Synthetic oligonucleotide
  Antisense strand to SEQ ID NO: 1701791
ucuucccuacaagauaggc

SEQ ID NO: 1701793 - RNA, 19 nt, Artificial Sequence
  Description of Artificial Sequence: Synthetic oligonucleotide
  Sense strand starting at position 3686 of SEQ ID NO: 1561831
uggagacagcgcuguuuga

SEQ ID NO: 1701794 - RNA, 19 nt, Artificial Sequence
  Description of Artificial Sequence: Synthetic oligonucleotide
  Antisense strand to SEQ ID NO: 1701793
ucaaacagcgcugucucca

SEQ ID NO: 1701795 - RNA, 19 nt, Artificial Sequence
  Description of Artificial Sequence: Synthetic oligonucleotide
  Sense strand starting at position 3786 of SEQ ID NO: 1561831
uuguuaugacucuguccuu

SEQ ID NO: 1701796 - RNA, 19 nt, Artificial Sequence
  Description of Artificial Sequence: Synthetic oligonucleotide
  Antisense strand to SEQ ID NO: 1701795
aaggacagagucauaacaa

SEQ ID NO: 1701797 - RNA, 19 nt, Artificial Sequence
  Description of Artificial Sequence: Synthetic oligonucleotide
  Sense strand starting at position 3843 of SEQ ID NO: 1561831
aggaaugaaccauguuugu

SEQ ID NO: 1701798 - RNA, 19 nt, Artificial Sequence
  Description of Artificial Sequence: Synthetic oligonucleotide
  Antisense strand to SEQ ID NO: 1701797
acaaacaugguucauuccu

SEQ ID NO: 1701799 - RNA, 19 nt, Artificial Sequence
  Description of Artificial Sequence: Synthetic oligonucleotide
  Sense strand starting at position 3849 of SEQ ID NO: 1561831
gaaccauguuuguuccuag

SEQ ID NO: 1701800 - RNA, 19 nt, Artificial Sequence
  Description of Artificial Sequence: Synthetic oligonucleotide
  Antisense strand to SEQ ID NO: 1701799
cuaggaacaaacaugguuc

SEQ ID NO: 1701801 - RNA, 19 nt, Artificial Sequence
  Description of Artificial Sequence: Synthetic oligonucleotide
  Sense strand starting at position 3852 of SEQ ID NO: 1561831
ccauguuuguuccuaggca

SEQ ID NO: 1701802 - RNA, 19 nt, Artificial Sequence
  Description of Artificial Sequence: Synthetic oligonucleotide
  Antisense strand to SEQ ID NO: 1701801
ugccuaggaacaaacaugg

SEQ ID NO: 1701803 - RNA, 19 nt, Artificial Sequence
  Description of Artificial Sequence: Synthetic oligonucleotide
  Sense strand starting at position 3881 of SEQ ID NO: 1561831
uccuguuucucuuuguaau

SEQ ID NO: 1701804 - RNA, 19 nt, Artificial Sequence
  Description of Artificial Sequence: Synthetic oligonucleotide
  Antisense strand to SEQ ID NO: 1701803
auuacaaagagaaacagga

SEQ ID NO: 1701805 - RNA, 19 nt, Artificial Sequence
  Description of Artificial Sequence: Synthetic oligonucleotide
  Sense strand starting at position 3882 of SEQ ID NO: 1561831
ccuguuucucuuuguaaua

SEQ ID NO: 1701806 - RNA, 19 nt, Artificial Sequence
  Description of Artificial Sequence: Synthetic oligonucleotide
  Antisense strand to SEQ ID NO: 1701805
uauuacaaagagaaacagg

SEQ ID NO: 1701807 - RNA, 19 nt, Artificial Sequence
  Description of Artificial Sequence: Synthetic oligonucleotide
  Sense strand starting at position 3883 of SEQ ID NO: 1561831
cuguuucucuuuguaauac

SEQ ID NO: 1701808 - RNA, 19 nt, Artificial Sequence
  Description of Artificial Sequence: Synthetic oligonucleotide
  Antisense strand to SEQ ID NO: 1701807
guauuacaaagagaaacag

SEQ ID NO: 1701809 - RNA, 19 nt, Artificial Sequence
  Description of Artificial Sequence: Synthetic oligonucleotide
  Sense strand starting at position 3978 of SEQ ID NO: 1561831
cugggagggcucugggaaa

SEQ ID NO: 1701810 - RNA, 19 nt, Artificial Sequence
  Description of Artificial Sequence: Synthetic oligonucleotide
  Antisense strand to SEQ ID NO: 1701809
uuucccagagcccucccag

SEQ ID NO: 1701811 - RNA, 19 nt, Artificial Sequence
  Description of Artificial Sequence: Synthetic oligonucleotide
  Sense strand starting at position 49 of SEQ ID NO: 1561832
guaugaugugcucuguguu

SEQ ID NO: 1701812 - RNA, 19 nt, Artificial Sequence
  Description of Artificial Sequence: Synthetic oligonucleotide
  Antisense strand to SEQ ID NO: 1701811
aacacagagcacaucauac

SEQ ID NO: 1701813 - RNA, 19 nt, Artificial Sequence
  Description of Artificial Sequence: Synthetic oligonucleotide
  Sense strand starting at position 392 of SEQ ID NO: 1561832
acucauaacuuggcauuga

SEQ ID NO: 1701814 - RNA, 19 nt, Artificial Sequence
  Description of Artificial Sequence: Synthetic oligonucleotide
  Antisense strand to SEQ ID NO: 1701813
ucaaugccaaguuaugagu

SEQ ID NO: 1701815 - RNA, 19 nt, Artificial Sequence
  Description of Artificial Sequence: Synthetic oligonucleotide
  Sense strand starting at position 405 of SEQ ID NO: 1561832
cauugaacuguucgacuuu

SEQ ID NO: 1701816 - RNA, 19 nt, Artificial Sequence
  Description of Artificial Sequence: Synthetic oligonucleotide
  Antisense strand to SEQ ID NO: 1701815
aaagucgaacaguucaaug

SEQ ID NO: 1701817 - RNA, 19 nt, Artificial Sequence
  Description of Artificial Sequence: Synthetic oligonucleotide
  Sense strand starting at position 411 of SEQ ID NO: 1561832
acuguucgacuuuaagauc

SEQ ID NO: 1701818 - RNA, 19 nt, Artificial Sequence
  Description of Artificial Sequence: Synthetic oligonucleotide
  Antisense strand to SEQ ID NO: 1701817
gaucuuaaagucgaacagu

SEQ ID NO: 1701819 - RNA, 19 nt, Artificial Sequence
  Description of Artificial Sequence: Synthetic oligonucleotide
  Sense strand starting at position 452 of SEQ ID NO: 1561832
aauugugaagucuaguuau

SEQ ID NO: 1701820 - RNA, 19 nt, Artificial Sequence
  Description of Artificial Sequence: Synthetic oligonucleotide
  Antisense strand to SEQ ID NO: 1701819
auaacuagacuucacaauu

SEQ ID NO: 1701821 - RNA, 19 nt, Artificial Sequence
  Description of Artificial Sequence: Synthetic oligonucleotide
  Sense strand starting at position 508 of SEQ ID NO: 1561832
ggugauuccuuacugcuua

SEQ ID NO: 1701822 - RNA, 19 nt, Artificial Sequence
  Description of Artificial Sequence: Synthetic oligonucleotide
  Antisense strand to SEQ ID NO: 1701821
uaagcaguaaggaaucacc

SEQ ID NO: 1701823 - RNA, 19 nt, Artificial Sequence
  Description of Artificial Sequence: Synthetic oligonucleotide
  Sense strand starting at position 556 of SEQ ID NO: 1561832
uuccuaacuugggugauca

SEQ ID NO: 1701824 - RNA, 19 nt, Artificial Sequence
  Description of Artificial Sequence: Synthetic oligonucleotide
  Antisense strand to SEQ ID NO: 1701823
ugaucacccaaguuaggaa

SEQ ID NO: 1701825 - RNA, 19 nt, Artificial Sequence
  Description of Artificial Sequence: Synthetic oligonucleotide
  Sense strand starting at position 557 of SEQ ID NO: 1561832
uccuaacuugggugaucaa

SEQ ID NO: 1701826 - RNA, 19 nt, Artificial Sequence
  Description of Artificial Sequence: Synthetic oligonucleotide
  Antisense strand to SEQ ID NO: 1701825
uugaucacccaaguuagga

SEQ ID NO: 1701827 - RNA, 19 nt, Artificial Sequence
  Description of Artificial Sequence: Synthetic oligonucleotide
  Sense strand starting at position 713 of SEQ ID NO: 1561832
agcuguuacuugucaagga

SEQ ID NO: 1701828 - RNA, 19 nt, Artificial Sequence
  Description of Artificial Sequence: Synthetic oligonucleotide
  Antisense strand to SEQ ID NO: 1701827
uccuugacaaguaacagcu

SEQ ID NO: 1701829 - RNA, 19 nt, Artificial Sequence
  Description of Artificial Sequence: Synthetic oligonucleotide
  Sense strand starting at position 974 of SEQ ID NO: 1561832
ggcggauguuggguggaua

SEQ ID NO: 1701830 - RNA, 19 nt, Artificial Sequence
  Description of Artificial Sequence: Synthetic oligonucleotide
  Antisense strand to SEQ ID NO: 1701829
uauccacccaacauccgcc

SEQ ID NO: 1701831 - RNA, 19 nt, Artificial Sequence
  Description of Artificial Sequence: Synthetic oligonucleotide
  Sense strand starting at position 975 of SEQ ID NO: 1561832
gcggauguuggguggauaa

SEQ ID NO: 1701832 - RNA, 19 nt, Artificial Sequence
  Description of Artificial Sequence: Synthetic oligonucleotide
  Antisense strand to SEQ ID NO: 1701831
uuauccacccaacauccgc

SEQ ID NO: 1701833 - RNA, 19 nt, Artificial Sequence
  Description of Artificial Sequence: Synthetic oligonucleotide
  Sense strand starting at position 976 of SEQ ID NO: 1561832
cggauguuggguggauaaa

SEQ ID NO: 1701834 - RNA, 19 nt, Artificial Sequence
  Description of Artificial Sequence: Synthetic oligonucleotide
  Antisense strand to SEQ ID NO: 1701833
uuuauccacccaacauccg

SEQ ID NO: 1701835 - RNA, 19 nt, Artificial Sequence
  Description of Artificial Sequence: Synthetic oligonucleotide
  Sense strand starting at position 1166 of SEQ ID NO: 1561832
gccacuggugcccaugaaa

SEQ ID NO: 1701836 - RNA, 19 nt, Artificial Sequence
  Description of Artificial Sequence: Synthetic oligonucleotide
  Antisense strand to SEQ ID NO: 1701835
uuucaugggcaccaguggc

SEQ ID NO: 1701837 - RNA, 19 nt, Artificial Sequence
  Description of Artificial Sequence: Synthetic oligonucleotide
  Sense strand starting at position 1891 of SEQ ID NO: 1561832
gagcacuuguggucaggga

SEQ ID NO: 1701838 - RNA, 19 nt, Artificial Sequence
  Description of Artificial Sequence: Synthetic oligonucleotide
  Antisense strand to SEQ ID NO: 1701837
ucccugaccacaagugcuc

SEQ ID NO: 1701839 - RNA, 19 nt, Artificial Sequence
  Description of Artificial Sequence: Synthetic oligonucleotide
  Sense strand starting at position 1931 of SEQ ID NO: 1561832
auucgucucugaguaagag

SEQ ID NO: 1701840 - RNA, 19 nt, Artificial Sequence
  Description of Artificial Sequence: Synthetic oligonucleotide
  Antisense strand to SEQ ID NO: 1701839
cucuuacucagagacgaau

SEQ ID NO: 1701841 - RNA, 19 nt, Artificial Sequence
  Description of Artificial Sequence: Synthetic oligonucleotide
  Sense strand starting at position 2081 of SEQ ID NO: 1561832
gucgccuuccuguuggauu

SEQ ID NO: 1701842 - RNA, 19 nt, Artificial Sequence
  Description of Artificial Sequence: Synthetic oligonucleotide
  Antisense strand to SEQ ID NO: 1701841
aauccaacaggaaggcgac

SEQ ID NO: 1701843 - RNA, 19 nt, Artificial Sequence
  Description of Artificial Sequence: Synthetic oligonucleotide
  Sense strand starting at position 2083 of SEQ ID NO: 1561832
cgccuuccuguuggauuua

SEQ ID NO: 1701844 - RNA, 19 nt, Artificial Sequence
  Description of Artificial Sequence: Synthetic oligonucleotide
  Antisense strand to SEQ ID NO: 1701843
uaaauccaacaggaaggcg

SEQ ID NO: 1701845 - RNA, 19 nt, Artificial Sequence
  Description of Artificial Sequence: Synthetic oligonucleotide
  Sense strand starting at position 2189 of SEQ ID NO: 1561832
cacauuuguugagugcuua

SEQ ID NO: 1701846 - RNA, 19 nt, Artificial Sequence
  Description of Artificial Sequence: Synthetic oligonucleotide
  Antisense strand to SEQ ID NO: 1701845
uaagcacucaacaaaugug

SEQ ID NO: 1701847 - RNA, 19 nt, Artificial Sequence
  Description of Artificial Sequence: Synthetic oligonucleotide
  Sense strand starting at position 2241 of SEQ ID NO: 1561832
agagaauacagugguuaau

SEQ ID NO: 1701848 - RNA, 19 nt, Artificial Sequence
  Description of Artificial Sequence: Synthetic oligonucleotide
  Antisense strand to SEQ ID NO: 1701847
auuaaccacuguauucucu

SEQ ID NO: 1701849 - RNA, 19 nt, Artificial Sequence
  Description of Artificial Sequence: Synthetic oligonucleotide
  Sense strand starting at position 2358 of SEQ ID NO: 1561832
gcuuuagcgauuugcauua

SEQ ID NO: 1701850 - RNA, 19 nt, Artificial Sequence
  Description of Artificial Sequence: Synthetic oligonucleotide
  Antisense strand to SEQ ID NO: 1701849
uaaugcaaaucgcuaaagc

SEQ ID NO: 1701851 - RNA, 19 nt, Artificial Sequence
  Description of Artificial Sequence: Synthetic oligonucleotide
  Sense strand starting at position 2463 of SEQ ID NO: 1561832
ggaauuauuauggguuuga

SEQ ID NO: 1701852 - RNA, 19 nt, Artificial Sequence
  Description of Artificial Sequence: Synthetic oligonucleotide
  Antisense strand to SEQ ID NO: 1701851
ucaaacccauaauaauucc

SEQ ID NO: 1701853 - RNA, 19 nt, Artificial Sequence
  Description of Artificial Sequence: Synthetic oligonucleotide
  Sense strand starting at position 2464 of SEQ ID NO: 1561832
gaauuauuauggguuugaa

SEQ ID NO: 1701854 - RNA, 19 nt, Artificial Sequence
  Description of Artificial Sequence: Synthetic oligonucleotide
  Antisense strand to SEQ ID NO: 1701853
uucaaacccauaauaauuc

SEQ ID NO: 1701855 - RNA, 19 nt, Artificial Sequence
  Description of Artificial Sequence: Synthetic oligonucleotide
  Sense strand starting at position 2467 of SEQ ID NO: 1561832
uuauuauggguuugaaagu

SEQ ID NO: 1701856 - RNA, 19 nt, Artificial Sequence
  Description of Artificial Sequence: Synthetic oligonucleotide
  Antisense strand to SEQ ID NO: 1701855
acuuucaaacccauaauaa

SEQ ID NO: 1701857 - RNA, 19 nt, Artificial Sequence
  Description of Artificial Sequence: Synthetic oligonucleotide
  Sense strand starting at position 2501 of SEQ ID NO: 1561832
agguuaguugaacauuguu

SEQ ID NO: 1701858 - RNA, 19 nt, Artificial Sequence
  Description of Artificial Sequence: Synthetic oligonucleotide
  Antisense strand to SEQ ID NO: 1701857
aacaauguucaacuaaccu

SEQ ID NO: 1701859 - RNA, 19 nt, Artificial Sequence
  Description of Artificial Sequence: Synthetic oligonucleotide
  Sense strand starting at position 2506 of SEQ ID NO: 1561832
aguugaacauuguuggcaa

SEQ ID NO: 1701860 - RNA, 19 nt, Artificial Sequence
  Description of Artificial Sequence: Synthetic oligonucleotide
  Antisense strand to SEQ ID NO: 1701859
uugccaacaauguucaacu

SEQ ID NO: 1701861 - RNA, 19 nt, Artificial Sequence
  Description of Artificial Sequence: Synthetic oligonucleotide
  Sense strand starting at position 2508 of SEQ ID NO: 1561832
uugaacauuguuggcaaau

SEQ ID NO: 1701862 - RNA, 19 nt, Artificial Sequence
  Description of Artificial Sequence: Synthetic oligonucleotide
  Antisense strand to SEQ ID NO: 1701861
auuugccaacaauguucaa

SEQ ID NO: 1701863 - RNA, 19 nt, Artificial Sequence
  Description of Artificial Sequence: Synthetic oligonucleotide
  Sense strand starting at position 2509 of SEQ ID NO: 1561832
ugaacauuguuggcaaaua

SEQ ID NO: 1701864 - RNA, 19 nt, Artificial Sequence
  Description of Artificial Sequence: Synthetic oligonucleotide
  Antisense strand to SEQ ID NO: 1701863
uauuugccaacaauguuca

SEQ ID NO: 1701865 - RNA, 19 nt, Artificial Sequence
  Description of Artificial Sequence: Synthetic oligonucleotide
  Sense strand starting at position 2591 of SEQ ID NO: 1561832
guuugucaacgaugggaag

SEQ ID NO: 1701866 - RNA, 19 nt, Artificial Sequence
  Description of Artificial Sequence: Synthetic oligonucleotide
  Antisense strand to SEQ ID NO: 1701865
cuucccaucguugacaaac

SEQ ID NO: 1701867 - RNA, 19 nt, Artificial Sequence
  Description of Artificial Sequence: Synthetic oligonucleotide
  Sense strand starting at position 2653 of SEQ ID NO: 1561832
cugcuuauggcccauuaga

SEQ ID NO: 1701868 - RNA, 19 nt, Artificial Sequence
  Description of Artificial Sequence: Synthetic oligonucleotide
  Antisense strand to SEQ ID NO: 1701867
ucuaaugggccauaagcag

SEQ ID NO: 1701869 - RNA, 19 nt, Artificial Sequence
  Description of Artificial Sequence: Synthetic oligonucleotide
  Sense strand starting at position 3012 of SEQ ID NO: 1561832
ccagccuguggucaagauu

SEQ ID NO: 1701870 - RNA, 19 nt, Artificial Sequence
  Description of Artificial Sequence: Synthetic oligonucleotide
  Antisense strand to SEQ ID NO: 1701869
aaucuugaccacaggcugg

SEQ ID NO: 1701871 - RNA, 19 nt, Artificial Sequence
  Description of Artificial Sequence: Synthetic oligonucleotide
  Sense strand starting at position 3042 of SEQ ID NO: 1561832
cuugaauuauggcucuauc

SEQ ID NO: 1701872 - RNA, 19 nt, Artificial Sequence
  Description of Artificial Sequence: Synthetic oligonucleotide
  Antisense strand to SEQ ID NO: 1701871
gauagagccauaauucaag

SEQ ID NO: 1701873 - RNA, 19 nt, Artificial Sequence
  Description of Artificial Sequence: Synthetic oligonucleotide
  Sense strand starting at position 3139 of SEQ ID NO: 1561832
uucuucuuggccuagguua

SEQ ID NO: 1701874 - RNA, 19 nt, Artificial Sequence
  Description of Artificial Sequence: Synthetic oligonucleotide
  Antisense strand to SEQ ID NO: 1701873
uaaccuaggccaagaagaa

SEQ ID NO: 1701875 - RNA, 19 nt, Artificial Sequence
  Description of Artificial Sequence: Synthetic oligonucleotide
  Sense strand starting at position 3183 of SEQ ID NO: 1561832
gugacuuguguguauauaa

SEQ ID NO: 1701876 - RNA, 19 nt, Artificial Sequence
  Description of Artificial Sequence: Synthetic oligonucleotide
  Antisense strand to SEQ ID NO: 1701875
uuauauacacacaagucac

SEQ ID NO: 1701877 - RNA, 19 nt, Artificial Sequence
  Description of Artificial Sequence: Synthetic oligonucleotide
  Sense strand starting at position 3255 of SEQ ID NO: 1561832
agcacaaaucgugaaugua

SEQ ID NO: 1701878 - RNA, 19 nt, Artificial Sequence
  Description of Artificial Sequence: Synthetic oligonucleotide
  Antisense strand to SEQ ID NO: 1701877
uacauucacgauuugugcu

SEQ ID NO: 1701879 - RNA, 19 nt, Artificial Sequence
  Description of Artificial Sequence: Synthetic oligonucleotide
  Sense strand starting at position 3258 of SEQ ID NO: 1561832
acaaaucgugaauguauag

SEQ ID NO: 1701880 - RNA, 19 nt, Artificial Sequence
  Description of Artificial Sequence: Synthetic oligonucleotide
  Antisense strand to SEQ ID NO: 1701879
cuauacauucacgauuugu

SEQ ID NO: 1701881 - RNA, 19 nt, Artificial Sequence
  Description of Artificial Sequence: Synthetic oligonucleotide
  Sense strand starting at position 3265 of SEQ ID NO: 1561832
gugaauguauagcugauga

SEQ ID NO: 1701882 - RNA, 19 nt, Artificial Sequence
  Description of Artificial Sequence: Synthetic oligonucleotide
  Antisense strand to SEQ ID NO: 1701881
ucaucagcuauacauucac

SEQ ID NO: 1701883 - RNA, 19 nt, Artificial Sequence
  Description of Artificial Sequence: Synthetic oligonucleotide
  Sense strand starting at position 3267 of SEQ ID NO: 1561832
gaauguauagcugaugagu

SEQ ID NO: 1701884 - RNA, 19 nt, Artificial Sequence
  Description of Artificial Sequence: Synthetic oligonucleotide
  Antisense strand to SEQ ID NO: 1701883
acucaucagcuauacauuc

SEQ ID NO: 1701885 - RNA, 19 nt, Artificial Sequence
  Description of Artificial Sequence: Synthetic oligonucleotide
  Sense strand starting at position 3960 of SEQ ID NO: 1561832
cuggguuagaaguggguua

SEQ ID NO: 1701886 - RNA, 19 nt, Artificial Sequence
  Description of Artificial Sequence: Synthetic oligonucleotide
  Antisense strand to SEQ ID NO: 1701885
uaacccacuucuaacccag

SEQ ID NO: 1701887 - RNA, 19 nt, Artificial Sequence
  Description of Artificial Sequence: Synthetic oligonucleotide
  Sense strand starting at position 3961 of SEQ ID NO: 1561832
uggguuagaaguggguuaa

SEQ ID NO: 1701888 - RNA, 19 nt, Artificial Sequence
  Description of Artificial Sequence: Synthetic oligonucleotide
  Antisense strand to SEQ ID NO: 1701887
uuaacccacuucuaaccca

SEQ ID NO: 1701889 - RNA, 19 nt, Artificial Sequence
  Description of Artificial Sequence: Synthetic oligonucleotide
  Sense strand starting at position 3962 of SEQ ID NO: 1561832
ggguuagaaguggguuaaa

SEQ ID NO: 1701890 - RNA, 19 nt, Artificial Sequence
  Description of Artificial Sequence: Synthetic oligonucleotide
  Antisense strand to SEQ ID NO: 1701889
uuuaacccacuucuaaccc

SEQ ID NO: 1701891 - RNA, 19 nt, Artificial Sequence
  Description of Artificial Sequence: Synthetic oligonucleotide
  Sense strand starting at position 233 of SEQ ID NO: 1561833
guucuuuccuaacggcaga

SEQ ID NO: 1701892 - RNA, 19 nt, Artificial Sequence
  Description of Artificial Sequence: Synthetic oligonucleotide
  Antisense strand to SEQ ID NO: 1701891
ucugccguuaggaaagaac

SEQ ID NO: 1701893 - RNA, 19 nt, Artificial Sequence
  Description of Artificial Sequence: Synthetic oligonucleotide
  Sense strand starting at position 261 of SEQ ID NO: 1561833
gcaacaaggucuuacuuua

SEQ ID NO: 1701894 - RNA, 19 nt, Artificial Sequence
  Description of Artificial Sequence: Synthetic oligonucleotide
  Antisense strand to SEQ ID NO: 1701893
uaaaguaagaccuuguugc

SEQ ID NO: 1701895 - RNA, 19 nt, Artificial Sequence
  Description of Artificial Sequence: Synthetic oligonucleotide
  Sense strand starting at position 466 of SEQ ID NO: 1561833
cacagaggcuuggaacaaa

SEQ ID NO: 1701896 - RNA, 19 nt, Artificial Sequence
  Description of Artificial Sequence: Synthetic oligonucleotide
  Antisense strand to SEQ ID NO: 1701895
uuuguuccaagccucugug

SEQ ID NO: 1701897 - RNA, 19 nt, Artificial Sequence
  Description of Artificial Sequence: Synthetic oligonucleotide
  Sense strand starting at position 797 of SEQ ID NO: 1561833
uaaggaagaucuugccaga

SEQ ID NO: 1701898 - RNA, 19 nt, Artificial Sequence
  Description of Artificial Sequence: Synthetic oligonucleotide
  Antisense strand to SEQ ID NO: 1701897
ucuggcaagaucuuccuua

SEQ ID NO: 1701899 - RNA, 19 nt, Artificial Sequence
  Description of Artificial Sequence: Synthetic oligonucleotide
  Sense strand starting at position 836 of SEQ ID NO: 1561833
ugaggaagcugccugugaa

SEQ ID NO: 1701900 - RNA, 19 nt, Artificial Sequence
  Description of Artificial Sequence: Synthetic oligonucleotide
  Antisense strand to SEQ ID NO: 1701899
uucacaggcagcuuccuca

SEQ ID NO: 1701901 - RNA, 19 nt, Artificial Sequence
  Description of Artificial Sequence: Synthetic oligonucleotide
  Sense strand starting at position 974 of SEQ ID NO: 1561833
ucccuuuaugaccgcaaca

SEQ ID NO: 1701902 - RNA, 19 nt, Artificial Sequence
  Description of Artificial Sequence: Synthetic oligonucleotide
  Antisense strand to SEQ ID NO: 1701901
uguugcggucauaaaggga

SEQ ID NO: 1701903 - RNA, 19 nt, Artificial Sequence
  Description of Artificial Sequence: Synthetic oligonucleotide
  Sense strand starting at position 976 of SEQ ID NO: 1561833
ccuuuaugaccgcaacaga

SEQ ID NO: 1701904 - RNA, 19 nt, Artificial Sequence
  Description of Artificial Sequence: Synthetic oligonucleotide
  Antisense strand to SEQ ID NO: 1701903
ucuguugcggucauaaagg

SEQ ID NO: 1701905 - RNA, 19 nt, Artificial Sequence
  Description of Artificial Sequence: Synthetic oligonucleotide
  Sense strand starting at position 1010 of SEQ ID NO: 1561833
acuuacuaaccgggaguuu

SEQ ID NO: 1701906 - RNA, 19 nt, Artificial Sequence
  Description of Artificial Sequence: Synthetic oligonucleotide
  Antisense strand to SEQ ID NO: 1701905
aaacucccgguuaguaagu

SEQ ID NO: 1701907 - RNA, 19 nt, Artificial Sequence
  Description of Artificial Sequence: Synthetic oligonucleotide
  Sense strand starting at position 1056 of SEQ ID NO: 1561833
aguggauggguggaguuaa

SEQ ID NO: 1701908 - RNA, 19 nt, Artificial Sequence
  Description of Artificial Sequence: Synthetic oligonucleotide
  Antisense strand to SEQ ID NO: 1701907
uuaacuccacccauccacu

SEQ ID NO: 1701909 - RNA, 19 nt, Artificial Sequence
  Description of Artificial Sequence: Synthetic oligonucleotide
  Sense strand starting at position 1064 of SEQ ID NO: 1561833
gguggaguuaaggagaugu

SEQ ID NO: 1701910 - RNA, 19 nt, Artificial Sequence
  Description of Artificial Sequence: Synthetic oligonucleotide
  Antisense strand to SEQ ID NO: 1701909
acaucuccuuaacuccacc

SEQ ID NO: 1701911 - RNA, 19 nt, Artificial Sequence
  Description of Artificial Sequence: Synthetic oligonucleotide
  Sense strand starting at position 1068 of SEQ ID NO: 1561833
gaguuaaggagaugucuca

SEQ ID NO: 1701912 - RNA, 19 nt, Artificial Sequence
  Description of Artificial Sequence: Synthetic oligonucleotide
  Antisense strand to SEQ ID NO: 1701911
ugagacaucuccuuaacuc

SEQ ID NO: 1701913 - RNA, 19 nt, Artificial Sequence
  Description of Artificial Sequence: Synthetic oligonucleotide
  Sense strand starting at position 1124 of SEQ ID NO: 1561833
augcauucugaguggcuga

SEQ ID NO: 1701914 - RNA, 19 nt, Artificial Sequence
  Description of Artificial Sequence: Synthetic oligonucleotide
  Antisense strand to SEQ ID NO: 1701913
ucagccacucagaaugcau

SEQ ID NO: 1701915 - RNA, 19 nt, Artificial Sequence
  Description of Artificial Sequence: Synthetic oligonucleotide
  Sense strand starting at position 1127 of SEQ ID NO: 1561833
cauucugaguggcugagau

SEQ ID NO: 1701916 - RNA, 19 nt, Artificial Sequence
  Description of Artificial Sequence: Synthetic oligonucleotide
  Antisense strand to SEQ ID NO: 1701915
aucucagccacucagaaug

SEQ ID NO: 1701917 - RNA, 19 nt, Artificial Sequence
  Description of Artificial Sequence: Synthetic oligonucleotide
  Sense strand starting at position 1185 of SEQ ID NO: 1561833
guuccagcccucugugagu

SEQ ID NO: 1701918 - RNA, 19 nt, Artificial Sequence
  Description of Artificial Sequence: Synthetic oligonucleotide
  Antisense strand to SEQ ID NO: 1701917
acucacagagggcuggaac

SEQ ID NO: 1701919 - RNA, 19 nt, Artificial Sequence
  Description of Artificial Sequence: Synthetic oligonucleotide
  Sense strand starting at position 1517 of SEQ ID NO: 1561833
caaagugggucugcaaaca

SEQ ID NO: 1701920 - RNA, 19 nt, Artificial Sequence
  Description of Artificial Sequence: Synthetic oligonucleotide
  Antisense strand to SEQ ID NO: 1701919
uguuugcagacccacuuug

SEQ ID NO: 1701921 - RNA, 19 nt, Artificial Sequence
  Description of Artificial Sequence: Synthetic oligonucleotide
  Sense strand starting at position 1740 of SEQ ID NO: 1561833
ugcgcuuguugcugaggua

SEQ ID NO: 1701922 - RNA, 19 nt, Artificial Sequence
  Description of Artificial Sequence: Synthetic oligonucleotide
  Antisense strand to SEQ ID NO: 1701921
uaccucagcaacaagcgca

SEQ ID NO: 1701923 - RNA, 19 nt, Artificial Sequence
  Description of Artificial Sequence: Synthetic oligonucleotide
  Sense strand starting at position 1752 of SEQ ID NO: 1561833
ugagguagcucucgggcaa

SEQ ID NO: 1701924 - RNA, 19 nt, Artificial Sequence
  Description of Artificial Sequence: Synthetic oligonucleotide
  Antisense strand to SEQ ID NO: 1701923
uugcccgagagcuaccuca

SEQ ID NO: 1701925 - RNA, 19 nt, Artificial Sequence
  Description of Artificial Sequence: Synthetic oligonucleotide
  Sense strand starting at position 2156 of SEQ ID NO: 1561833
cuugcucuggucugggaaa

SEQ ID NO: 1701926 - RNA, 19 nt, Artificial Sequence
  Description of Artificial Sequence: Synthetic oligonucleotide
  Antisense strand to SEQ ID NO: 1701925
uuucccagaccagagcaag

SEQ ID NO: 1701927 - RNA, 19 nt, Artificial Sequence
  Description of Artificial Sequence: Synthetic oligonucleotide
  Sense strand starting at position 2211 of SEQ ID NO: 1561833
ggauaaauguagcccugga

SEQ ID NO: 1701928 - RNA, 19 nt, Artificial Sequence
  Description of Artificial Sequence: Synthetic oligonucleotide
  Antisense strand to SEQ ID NO: 1701927
uccagggcuacauuuaucc

SEQ ID NO: 1701929 - RNA, 19 nt, Artificial Sequence
  Description of Artificial Sequence: Synthetic oligonucleotide
  Sense strand starting at position 2215 of SEQ ID NO: 1561833
aaauguagcccuggagaau

SEQ ID NO: 1701930 - RNA, 19 nt, Artificial Sequence
  Description of Artificial Sequence: Synthetic oligonucleotide
  Antisense strand to SEQ ID NO: 1701929
auucuccagggcuacauuu

SEQ ID NO: 1701931 - RNA, 19 nt, Artificial Sequence
  Description of Artificial Sequence: Synthetic oligonucleotide
  Sense strand starting at position 2216 of SEQ ID NO: 1561833
aauguagcccuggagaauu

SEQ ID NO: 1701932 - RNA, 19 nt, Artificial Sequence
  Description of Artificial Sequence: Synthetic oligonucleotide
  Antisense strand to SEQ ID NO: 1701931
aauucuccagggcuacauu

SEQ ID NO: 1701933 - RNA, 19 nt, Artificial Sequence
  Description of Artificial Sequence: Synthetic oligonucleotide
  Sense strand starting at position 2227 of SEQ ID NO: 1561833
ggagaauuggagcaguagu

SEQ ID NO: 1701934 - RNA, 19 nt, Artificial Sequence
  Description of Artificial Sequence: Synthetic oligonucleotide
  Antisense strand to SEQ ID NO: 1701933
acuacugcuccaauucucc

SEQ ID NO: 1701935 - RNA, 19 nt, Artificial Sequence
  Description of Artificial Sequence: Synthetic oligonucleotide
  Sense strand starting at position 2376 of SEQ ID NO: 1561833
gguucauuacguuggcaca

SEQ ID NO: 1701936 - RNA, 19 nt, Artificial Sequence
  Description of Artificial Sequence: Synthetic oligonucleotide
  Antisense strand to SEQ ID NO: 1701935
ugugccaacguaaugaacc

SEQ ID NO: 1701937 - RNA, 19 nt, Artificial Sequence
  Description of Artificial Sequence: Synthetic oligonucleotide
  Sense strand starting at position 2409 of SEQ ID NO: 1561833
agaugaaguuuccuuagga

SEQ ID NO: 1701938 - RNA, 19 nt, Artificial Sequence
  Description of Artificial Sequence: Synthetic oligonucleotide
  Antisense strand to SEQ ID NO: 1701937
uccuaaggaaacuucaucu

SEQ ID NO: 1701939 - RNA, 19 nt, Artificial Sequence
  Description of Artificial Sequence: Synthetic oligonucleotide
  Sense strand starting at position 3152 of SEQ ID NO: 1561833
cagugagacucaguaucua

SEQ ID NO: 1701940 - RNA, 19 nt, Artificial Sequence
  Description of Artificial Sequence: Synthetic oligonucleotide
  Antisense strand to SEQ ID NO: 1701939
uagauacugagucucacug

SEQ ID NO: 1701941 - RNA, 19 nt, Artificial Sequence
  Description of Artificial Sequence: Synthetic oligonucleotide
  Sense strand starting at position 3156 of SEQ ID NO: 1561833
gagacucaguaucuauaag

SEQ ID NO: 1701942 - RNA, 19 nt, Artificial Sequence
  Description of Artificial Sequence: Synthetic oligonucleotide
  Antisense strand to SEQ ID NO: 1701941
cuuauagauacugagucuc

SEQ ID NO: 1701943 - RNA, 19 nt, Artificial Sequence
  Description of Artificial Sequence: Synthetic oligonucleotide
  Sense strand starting at position 3285 of SEQ ID NO: 1561833
cugugauggucccauugca

SEQ ID NO: 1701944 - RNA, 19 nt, Artificial Sequence
  Description of Artificial Sequence: Synthetic oligonucleotide
  Antisense strand to SEQ ID NO: 1701943
ugcaaugggaccaucacag

SEQ ID NO: 1701945 - RNA, 19 nt, Artificial Sequence
  Description of Artificial Sequence: Synthetic oligonucleotide
  Sense strand starting at position 3363 of SEQ ID NO: 1561833
gcuaucuaugccuguugga

SEQ ID NO: 1701946 - RNA, 19 nt, Artificial Sequence
  Description of Artificial Sequence: Synthetic oligonucleotide
  Antisense strand to SEQ ID NO: 1701945
uccaacaggcauagauagc

SEQ ID NO: 1701947 - RNA, 19 nt, Artificial Sequence
  Description of Artificial Sequence: Synthetic oligonucleotide
  Sense strand starting at position 3366 of SEQ ID NO: 1561833
aucuaugccuguuggauga

SEQ ID NO: 1701948 - RNA, 19 nt, Artificial Sequence
  Description of Artificial Sequence: Synthetic oligonucleotide
  Antisense strand to SEQ ID NO: 1701947
ucauccaacaggcauagau

SEQ ID NO: 1701949 - RNA, 19 nt, Artificial Sequence
  Description of Artificial Sequence: Synthetic oligonucleotide
  Sense strand starting at position 3368 of SEQ ID NO: 1561833
cuaugccuguuggaugaaa

SEQ ID NO: 1701950 - RNA, 19 nt, Artificial Sequence
  Description of Artificial Sequence: Synthetic oligonucleotide
  Antisense strand to SEQ ID NO: 1701949
uuucauccaacaggcauag

SEQ ID NO: 1701951 - RNA, 19 nt, Artificial Sequence
  Description of Artificial Sequence: Synthetic oligonucleotide
  Sense strand starting at position 3419 of SEQ ID NO: 1561833
caugaaguuguuggagacu

SEQ ID NO: 1701952 - RNA, 19 nt, Artificial Sequence
  Description of Artificial Sequence: Synthetic oligonucleotide
  Antisense strand to SEQ ID NO: 1701951
agucuccaacaacuucaug

SEQ ID NO: 1701953 - RNA, 19 nt, Artificial Sequence
  Description of Artificial Sequence: Synthetic oligonucleotide
  Sense strand starting at position 3434 of SEQ ID NO: 1561833
gacucaguugcucaguuua

SEQ ID NO: 1701954 - RNA, 19 nt, Artificial Sequence
  Description of Artificial Sequence: Synthetic oligonucleotide
  Antisense strand to SEQ ID NO: 1701953
uaaacugagcaacugaguc

SEQ ID NO: 1701955 - RNA, 19 nt, Artificial Sequence
  Description of Artificial Sequence: Synthetic oligonucleotide
  Sense strand starting at position 3439 of SEQ ID NO: 1561833
aguugcucaguuuaucaca

SEQ ID NO: 1701956 - RNA, 19 nt, Artificial Sequence
  Description of Artificial Sequence: Synthetic oligonucleotide
  Antisense strand to SEQ ID NO: 1701955
ugugauaaacugagcaacu

SEQ ID NO: 1701957 - RNA, 19 nt, Artificial Sequence
  Description of Artificial Sequence: Synthetic oligonucleotide
  Sense strand starting at position 3533 of SEQ ID NO: 1561833
auguuaguuuccuguggca

SEQ ID NO: 1701958 - RNA, 19 nt, Artificial Sequence
  Description of Artificial Sequence: Synthetic oligonucleotide
  Antisense strand to SEQ ID NO: 1701957
ugccacaggaaacuaacau

SEQ ID NO: 1701959 - RNA, 19 nt, Artificial Sequence
  Description of Artificial Sequence: Synthetic oligonucleotide
  Sense strand starting at position 3803 of SEQ ID NO: 1561833
auaucaagagaugggcauu

SEQ ID NO: 1701960 - RNA, 19 nt, Artificial Sequence
  Description of Artificial Sequence: Synthetic oligonucleotide
  Antisense strand to SEQ ID NO: 1701959
aaugcccaucucuugauau

SEQ ID NO: 1701961 - RNA, 19 nt, Artificial Sequence
  Description of Artificial Sequence: Synthetic oligonucleotide
  Sense strand starting at position 140 of SEQ ID NO: 1561834
ucauccuuccgaugacaaa

SEQ ID NO: 1701962 - RNA, 19 nt, Artificial Sequence
  Description of Artificial Sequence: Synthetic oligonucleotide
  Antisense strand to SEQ ID NO: 1701961
uuugucaucggaaggauga

SEQ ID NO: 1701963 - RNA, 19 nt, Artificial Sequence
  Description of Artificial Sequence: Synthetic oligonucleotide
  Sense strand starting at position 311 of SEQ ID NO: 1561834
acuccuccuuuggcagaau

SEQ ID NO: 1701964 - RNA, 19 nt, Artificial Sequence
  Description of Artificial Sequence: Synthetic oligonucleotide
  Antisense strand to SEQ ID NO: 1701963
auucugccaaaggaggagu

SEQ ID NO: 1701965 - RNA, 19 nt, Artificial Sequence
  Description of Artificial Sequence: Synthetic oligonucleotide
  Sense strand starting at position 468 of SEQ ID NO: 1561834
gagggaucccuccauguuu

SEQ ID NO: 1701966 - RNA, 19 nt, Artificial Sequence
  Description of Artificial Sequence: Synthetic oligonucleotide
  Antisense strand to SEQ ID NO: 1701965
aaacauggagggaucccuc

SEQ ID NO: 1701967 - RNA, 19 nt, Artificial Sequence
  Description of Artificial Sequence: Synthetic oligonucleotide
  Sense strand starting at position 485 of SEQ ID NO: 1561834
uuccaugauuuggaagaga

SEQ ID NO: 1701968 - RNA, 19 nt, Artificial Sequence
  Description of Artificial Sequence: Synthetic oligonucleotide
  Antisense strand to SEQ ID NO: 1701967
ucucuuccaaaucauggaa

SEQ ID NO: 1701969 - RNA, 19 nt, Artificial Sequence
  Description of Artificial Sequence: Synthetic oligonucleotide
  Sense strand starting at position 659 of SEQ ID NO: 1561834
gagggaagguuauucguau

SEQ ID NO: 1701970 - RNA, 19 nt, Artificial Sequence
  Description of Artificial Sequence: Synthetic oligonucleotide
  Antisense strand to SEQ ID NO: 1701969
auacgaauaaccuucccuc

SEQ ID NO: 1701971 - RNA, 19 nt, Artificial Sequence
  Description of Artificial Sequence: Synthetic oligonucleotide
  Sense strand starting at position 660 of SEQ ID NO: 1561834
agggaagguuauucguauc

SEQ ID NO: 1701972 - RNA, 19 nt, Artificial Sequence
  Description of Artificial Sequence: Synthetic oligonucleotide
  Antisense strand to SEQ ID NO: 1701971
gauacgaauaaccuucccu

SEQ ID NO: 1701973 - RNA, 19 nt, Artificial Sequence
  Description of Artificial Sequence: Synthetic oligonucleotide
  Sense strand starting at position 824 of SEQ ID NO: 1561834
cgacucugaugucugaauu

SEQ ID NO: 1701974 - RNA, 19 nt, Artificial Sequence
  Description of Artificial Sequence: Synthetic oligonucleotide
  Antisense strand to SEQ ID NO: 1701973
aauucagacaucagagucg

SEQ ID NO: 1701975 - RNA, 19 nt, Artificial Sequence
  Description of Artificial Sequence: Synthetic oligonucleotide
  Sense strand starting at position 825 of SEQ ID NO: 1561834
gacucugaugucugaauuc

SEQ ID NO: 1701976 - RNA, 19 nt, Artificial Sequence
  Description of Artificial Sequence: Synthetic oligonucleotide
  Antisense strand to SEQ ID NO: 1701975
gaauucagacaucagaguc

SEQ ID NO: 1701977 - RNA, 19 nt, Artificial Sequence
  Description of Artificial Sequence: Synthetic oligonucleotide
  Sense strand starting at position 881 of SEQ ID NO: 1561834
cuuguauuaucacuaugua

SEQ ID NO: 1701978 - RNA, 19 nt, Artificial Sequence
  Description of Artificial Sequence: Synthetic oligonucleotide
  Antisense strand to SEQ ID NO: 1701977
uacauagugauaauacaag

SEQ ID NO: 1701979 - RNA, 19 nt, Artificial Sequence
  Description of Artificial Sequence: Synthetic oligonucleotide
  Sense strand starting at position 1016 of SEQ ID NO: 1561834
gagccuuggauuuguaagu

SEQ ID NO: 1701980 - RNA, 19 nt, Artificial Sequence
  Description of Artificial Sequence: Synthetic oligonucleotide
  Antisense strand to SEQ ID NO: 1701979
acuuacaaauccaaggcuc

SEQ ID NO: 1701981 - RNA, 19 nt, Artificial Sequence
  Description of Artificial Sequence: Synthetic oligonucleotide
  Sense strand starting at position 1022 of SEQ ID NO: 1561834
uggauuuguaaguggcuca

SEQ ID NO: 1701982 - RNA, 19 nt, Artificial Sequence
  Description of Artificial Sequence: Synthetic oligonucleotide
  Antisense strand to SEQ ID NO: 1701981
ugagccacuuacaaaucca

SEQ ID NO: 1701983 - RNA, 19 nt, Artificial Sequence
  Description of Artificial Sequence: Synthetic oligonucleotide
  Sense strand starting at position 1095 of SEQ ID NO: 1561834
gggccaaagcaaugacuua

SEQ ID NO: 1701984 - RNA, 19 nt, Artificial Sequence
  Description of Artificial Sequence: Synthetic oligonucleotide
  Antisense strand to SEQ ID NO: 1701983
uaagucauugcuuuggccc

SEQ ID NO: 1701985 - RNA, 19 nt, Artificial Sequence
  Description of Artificial Sequence: Synthetic oligonucleotide
  Sense strand starting at position 1180 of SEQ ID NO: 1561834
cucugcagacucggaauua

SEQ ID NO: 1701986 - RNA, 19 nt, Artificial Sequence
  Description of Artificial Sequence: Synthetic oligonucleotide
  Antisense strand to SEQ ID NO: 1701985
uaauuccgagucugcagag

SEQ ID NO: 1701987 - RNA, 19 nt, Artificial Sequence
  Description of Artificial Sequence: Synthetic oligonucleotide
  Sense strand starting at position 1306 of SEQ ID NO: 1561834
aagugugaccuugggaaag

SEQ ID NO: 1701988 - RNA, 19 nt, Artificial Sequence
  Description of Artificial Sequence: Synthetic oligonucleotide
  Antisense strand to SEQ ID NO: 1701987
cuuucccaaggucacacuu

SEQ ID NO: 1701989 - RNA, 19 nt, Artificial Sequence
  Description of Artificial Sequence: Synthetic oligonucleotide
  Sense strand starting at position 1339 of SEQ ID NO: 1561834
agugacuucgccucgccaa

SEQ ID NO: 1701990 - RNA, 19 nt, Artificial Sequence
  Description of Artificial Sequence: Synthetic oligonucleotide
  Antisense strand to SEQ ID NO: 1701989
uuggcgaggcgaagucacu

SEQ ID NO: 1701991 - RNA, 19 nt, Artificial Sequence
  Description of Artificial Sequence: Synthetic oligonucleotide
  Sense strand starting at position 1396 of SEQ ID NO: 1561834
gcaucuaaggugcagaaau

SEQ ID NO: 1701992 - RNA, 19 nt, Artificial Sequence
  Description of Artificial Sequence: Synthetic oligonucleotide
  Antisense strand to SEQ ID NO: 1701991
auuucugcaccuuagaugc

SEQ ID NO: 1701993 - RNA, 19 nt, Artificial Sequence
  Description of Artificial Sequence: Synthetic oligonucleotide
  Sense strand starting at position 2077 of SEQ ID NO: 1561834
uguguuugccgggugacuu

SEQ ID NO: 1701994 - RNA, 19 nt, Artificial Sequence
  Description of Artificial Sequence: Synthetic oligonucleotide
  Antisense strand to SEQ ID NO: 1701993
aagucacccggcaaacaca

SEQ ID NO: 1701995 - RNA, 19 nt, Artificial Sequence
  Description of Artificial Sequence: Synthetic oligonucleotide
  Sense strand starting at position 2148 of SEQ ID NO: 1561834
gcccaaagaaugggaguaa

SEQ ID NO: 1701996 - RNA, 19 nt, Artificial Sequence
  Description of Artificial Sequence: Synthetic oligonucleotide
  Antisense strand to SEQ ID NO: 1701995
uuacucccauucuuugggc

SEQ ID NO: 1701997 - RNA, 19 nt, Artificial Sequence
  Description of Artificial Sequence: Synthetic oligonucleotide
  Sense strand starting at position 2195 of SEQ ID NO: 1561834
ggugacugucaucagguuu

SEQ ID NO: 1701998 - RNA, 19 nt, Artificial Sequence
  Description of Artificial Sequence: Synthetic oligonucleotide
  Antisense strand to SEQ ID NO: 1701997
aaaccugaugacagucacc

SEQ ID NO: 1701999 - RNA, 19 nt, Artificial Sequence
  Description of Artificial Sequence: Synthetic oligonucleotide
  Sense strand starting at position 2231 of SEQ ID NO: 1561834
guuacucauccugggaaga

SEQ ID NO: 1702000 - RNA, 19 nt, Artificial Sequence
  Description of Artificial Sequence: Synthetic oligonucleotide
  Antisense strand to SEQ ID NO: 1701999
ucuucccaggaugaguaac

SEQ ID NO: 1702001 - RNA, 19 nt, Artificial Sequence
  Description of Artificial Sequence: Synthetic oligonucleotide
  Sense strand starting at position 2299 of SEQ ID NO: 1561834
uuauaaguggcucaagguu

SEQ ID NO: 1702002 - RNA, 19 nt, Artificial Sequence
  Description of Artificial Sequence: Synthetic oligonucleotide
  Antisense strand to SEQ ID NO: 1702001
aaccuugagccacuuauaa

SEQ ID NO: 1702003 - RNA, 19 nt, Artificial Sequence
  Description of Artificial Sequence: Synthetic oligonucleotide
  Sense strand starting at position 2343 of SEQ ID NO: 1561834
ggaggaguuguccaaauuc

SEQ ID NO: 1702004 - RNA, 19 nt, Artificial Sequence
  Description of Artificial Sequence: Synthetic oligonucleotide
  Antisense strand to SEQ ID NO: 1702003
gaauuuggacaacuccucc

SEQ ID NO: 1702005 - RNA, 19 nt, Artificial Sequence
  Description of Artificial Sequence: Synthetic oligonucleotide
  Sense strand starting at position 2391 of SEQ ID NO: 1561834
auucuuauugagcauguga

SEQ ID NO: 1702006 - RNA, 19 nt, Artificial Sequence
  Description of Artificial Sequence: Synthetic oligonucleotide
  Antisense strand to SEQ ID NO: 1702005
ucacaugcucaauaagaau

SEQ ID NO: 1702007 - RNA, 19 nt, Artificial Sequence
  Description of Artificial Sequence: Synthetic oligonucleotide
  Sense strand starting at position 2393 of SEQ ID NO: 1561834
ucuuauugagcaugugaaa

SEQ ID NO: 1702008 - RNA, 19 nt, Artificial Sequence
  Description of Artificial Sequence: Synthetic oligonucleotide
  Antisense strand to SEQ ID NO: 1702007
uuucacaugcucaauaaga

SEQ ID NO: 1702009 - RNA, 19 nt, Artificial Sequence
  Description of Artificial Sequence: Synthetic oligonucleotide
  Sense strand starting at position 2402 of SEQ ID NO: 1561834
gcaugugaaaguugauaau

SEQ ID NO: 1702010 - RNA, 19 nt, Artificial Sequence
  Description of Artificial Sequence: Synthetic oligonucleotide
  Antisense strand to SEQ ID NO: 1702009
auuaucaacuuucacaugc

SEQ ID NO: 1702011 - RNA, 19 nt, Artificial Sequence
  Description of Artificial Sequence: Synthetic oligonucleotide
  Sense strand starting at position 2751 of SEQ ID NO: 1561834
guaugcuccgaguugcgau

SEQ ID NO: 1702012 - RNA, 19 nt, Artificial Sequence
  Description of Artificial Sequence: Synthetic oligonucleotide
  Antisense strand to SEQ ID NO: 1702011
aucgcaacucggagcauac

SEQ ID NO: 1702013 - RNA, 19 nt, Artificial Sequence
  Description of Artificial Sequence: Synthetic oligonucleotide
  Sense strand starting at position 2882 of SEQ ID NO: 1561834
cggugaaggagucagacuu

SEQ ID NO: 1702014 - RNA, 19 nt, Artificial Sequence
  Description of Artificial Sequence: Synthetic oligonucleotide
  Antisense strand to SEQ ID NO: 1702013
aagucugacuccuucaccg

SEQ ID NO: 1702015 - RNA, 19 nt, Artificial Sequence
  Description of Artificial Sequence: Synthetic oligonucleotide
  Sense strand starting at position 2913 of SEQ ID NO: 1561834
cacagaaucuacguaugau

SEQ ID NO: 1702016 - RNA, 19 nt, Artificial Sequence
  Description of Artificial Sequence: Synthetic oligonucleotide
  Antisense strand to SEQ ID NO: 1702015
aucauacguagauucugug

SEQ ID NO: 1702017 - RNA, 19 nt, Artificial Sequence
  Description of Artificial Sequence: Synthetic oligonucleotide
  Sense strand starting at position 2921 of SEQ ID NO: 1561834
cuacguaugaugugggaga

SEQ ID NO: 1702018 - RNA, 19 nt, Artificial Sequence
  Description of Artificial Sequence: Synthetic oligonucleotide
  Antisense strand to SEQ ID NO: 1702017
ucucccacaucauacguag

SEQ ID NO: 1702019 - RNA, 19 nt, Artificial Sequence
  Description of Artificial Sequence: Synthetic oligonucleotide
  Sense strand starting at position 2923 of SEQ ID NO: 1561834
acguaugaugugggagaga

SEQ ID NO: 1702020 - RNA, 19 nt, Artificial Sequence
  Description of Artificial Sequence: Synthetic oligonucleotide
  Antisense strand to SEQ ID NO: 1702019
ucucucccacaucauacgu

SEQ ID NO: 1702021 - RNA, 19 nt, Artificial Sequence
  Description of Artificial Sequence: Synthetic oligonucleotide
  Sense strand starting at position 3051 of SEQ ID NO: 1561834
agagaugccucacuuaguc

SEQ ID NO: 1702022 - RNA, 19 nt, Artificial Sequence
  Description of Artificial Sequence: Synthetic oligonucleotide
  Antisense strand to SEQ ID NO: 1702021
gacuaagugaggcaucucu

SEQ ID NO: 1702023 - RNA, 19 nt, Artificial Sequence
  Description of Artificial Sequence: Synthetic oligonucleotide
  Sense strand starting at position 3068 of SEQ ID NO: 1561834
ucuggaauguggucagaua

SEQ ID NO: 1702024 - RNA, 19 nt, Artificial Sequence
  Description of Artificial Sequence: Synthetic oligonucleotide
  Antisense strand to SEQ ID NO: 1702023
uaucugaccacauuccaga

SEQ ID NO: 1702025 - RNA, 19 nt, Artificial Sequence
  Description of Artificial Sequence: Synthetic oligonucleotide
  Sense strand starting at position 3069 of SEQ ID NO: 1561834
cuggaauguggucagauau

SEQ ID NO: 1702026 - RNA, 19 nt, Artificial Sequence
  Description of Artificial Sequence: Synthetic oligonucleotide
  Antisense strand to SEQ ID NO: 1702025
auaucugaccacauuccag

SEQ ID NO: 1702027 - RNA, 19 nt, Artificial Sequence
  Description of Artificial Sequence: Synthetic oligonucleotide
  Sense strand starting at position 3090 of SEQ ID NO: 1561834
cccugaguuagccagguuu

SEQ ID NO: 1702028 - RNA, 19 nt, Artificial Sequence
  Description of Artificial Sequence: Synthetic oligonucleotide
  Antisense strand to SEQ ID NO: 1702027
aaaccuggcuaacucaggg

SEQ ID NO: 1702029 - RNA, 19 nt, Artificial Sequence
  Description of Artificial Sequence: Synthetic oligonucleotide
  Sense strand starting at position 3113 of SEQ ID NO: 1561834
agguuuagccaagguuaga

SEQ ID NO: 1702030 - RNA, 19 nt, Artificial Sequence
  Description of Artificial Sequence: Synthetic oligonucleotide
  Antisense strand to SEQ ID NO: 1702029
ucuaaccuuggcuaaaccu

SEQ ID NO: 1702031 - RNA, 19 nt, Artificial Sequence
  Description of Artificial Sequence: Synthetic oligonucleotide
  Sense strand starting at position 3201 of SEQ ID NO: 1561834
gcaagagaacacugugaca

SEQ ID NO: 1702032 - RNA, 19 nt, Artificial Sequence
  Description of Artificial Sequence: Synthetic oligonucleotide
  Antisense strand to SEQ ID NO: 1702031
ugucacaguguucucuugc

SEQ ID NO: 1702033 - RNA, 19 nt, Artificial Sequence
  Description of Artificial Sequence: Synthetic oligonucleotide
  Sense strand starting at position 3213 of SEQ ID NO: 1561834
ugugacauggucuaggaca

SEQ ID NO: 1702034 - RNA, 19 nt, Artificial Sequence
  Description of Artificial Sequence: Synthetic oligonucleotide
  Antisense strand to SEQ ID NO: 1702033
uguccuagaccaugucaca

SEQ ID NO: 1702035 - RNA, 19 nt, Artificial Sequence
  Description of Artificial Sequence: Synthetic oligonucleotide
  Sense strand starting at position 3215 of SEQ ID NO: 1561834
ugacauggucuaggacaua

SEQ ID NO: 1702036 - RNA, 19 nt, Artificial Sequence
  Description of Artificial Sequence: Synthetic oligonucleotide
  Antisense strand to SEQ ID NO: 1702035
uauguccuagaccauguca

SEQ ID NO: 1702037 - RNA, 19 nt, Artificial Sequence
  Description of Artificial Sequence: Synthetic oligonucleotide
  Sense strand starting at position 3238 of SEQ ID NO: 1561834
ggcacaugugacuaaucuu

SEQ ID NO: 1702038 - RNA, 19 nt, Artificial Sequence
  Description of Artificial Sequence: Synthetic oligonucleotide
  Antisense strand to SEQ ID NO: 1702037
aagauuagucacaugugcc

SEQ ID NO: 1702039 - RNA, 19 nt, Artificial Sequence
  Description of Artificial Sequence: Synthetic oligonucleotide
  Sense strand starting at position 3892 of SEQ ID NO: 1561834
cucccuugaccucaggauu

SEQ ID NO: 1702040 - RNA, 19 nt, Artificial Sequence
  Description of Artificial Sequence: Synthetic oligonucleotide
  Antisense strand to SEQ ID NO: 1702039
aauccugaggucaagggag

SEQ ID NO: 1702041 - RNA, 19 nt, Artificial Sequence
  Description of Artificial Sequence: Synthetic oligonucleotide
  Sense strand starting at position 16 of SEQ ID NO: 1561835
uuuacagaaccgcaauauu

SEQ ID NO: 1702042 - RNA, 19 nt, Artificial Sequence
  Description of Artificial Sequence: Synthetic oligonucleotide
  Antisense strand to SEQ ID NO: 1702041
aauauugcgguucuguaaa

SEQ ID NO: 1702043 - RNA, 19 nt, Artificial Sequence
  Description of Artificial Sequence: Synthetic oligonucleotide
  Sense strand starting at position 284 of SEQ ID NO: 1561835
auuuguaguaguugguaau

SEQ ID NO: 1702044 - RNA, 19 nt, Artificial Sequence
  Description of Artificial Sequence: Synthetic oligonucleotide
  Antisense strand to SEQ ID NO: 1702043
auuaccaacuacuacaaau

SEQ ID NO: 1702045 - RNA, 19 nt, Artificial Sequence
  Description of Artificial Sequence: Synthetic oligonucleotide
  Sense strand starting at position 294 of SEQ ID NO: 1561835
guugguaauguugauauua

SEQ ID NO: 1702046 - RNA, 19 nt, Artificial Sequence
  Description of Artificial Sequence: Synthetic oligonucleotide
  Antisense strand to SEQ ID NO: 1702045
uaauaucaacauuaccaac

SEQ ID NO: 1702047 - RNA, 19 nt, Artificial Sequence
  Description of Artificial Sequence: Synthetic oligonucleotide
  Sense strand starting at position 363 of SEQ ID NO: 1561835
agaugaauauuagucaucu

SEQ ID NO: 1702048 - RNA, 19 nt, Artificial Sequence
  Description of Artificial Sequence: Synthetic oligonucleotide
  Antisense strand to SEQ ID NO: 1702047
agaugacuaauauucaucu

SEQ ID NO: 1702049 - RNA, 19 nt, Artificial Sequence
  Description of Artificial Sequence: Synthetic oligonucleotide
  Sense strand starting at position 364 of SEQ ID NO: 1561835
gaugaauauuagucaucug

SEQ ID NO: 1702050 - RNA, 19 nt, Artificial Sequence
  Description of Artificial Sequence: Synthetic oligonucleotide
  Antisense strand to SEQ ID NO: 1702049
cagaugacuaauauucauc

SEQ ID NO: 1702051 - RNA, 19 nt, Artificial Sequence
  Description of Artificial Sequence: Synthetic oligonucleotide
  Sense strand starting at position 388 of SEQ ID NO: 1561835
uugggucagguauaaguga

SEQ ID NO: 1702052 - RNA, 19 nt, Artificial Sequence
  Description of Artificial Sequence: Synthetic oligonucleotide
  Antisense strand to SEQ ID NO: 1702051
ucacuuauaccugacccaa

SEQ ID NO: 1702053 - RNA, 19 nt, Artificial Sequence
  Description of Artificial Sequence: Synthetic oligonucleotide
  Sense strand starting at position 399 of SEQ ID NO: 1561835
auaagugauucucccugaa

SEQ ID NO: 1702054 - RNA, 19 nt, Artificial Sequence
  Description of Artificial Sequence: Synthetic oligonucleotide
  Antisense strand to SEQ ID NO: 1702053
uucagggagaaucacuuau

SEQ ID NO: 1702055 - RNA, 19 nt, Artificial Sequence
  Description of Artificial Sequence: Synthetic oligonucleotide
  Sense strand starting at position 402 of SEQ ID NO: 1561835
agugauucucccugaauau

SEQ ID NO: 1702056 - RNA, 19 nt, Artificial Sequence
  Description of Artificial Sequence: Synthetic oligonucleotide
  Antisense strand to SEQ ID NO: 1702055
auauucagggagaaucacu

SEQ ID NO: 1702057 - RNA, 19 nt, Artificial Sequence
  Description of Artificial Sequence: Synthetic oligonucleotide
  Sense strand starting at position 403 of SEQ ID NO: 1561835
gugauucucccugaauaua

SEQ ID NO: 1702058 - RNA, 19 nt, Artificial Sequence
  Description of Artificial Sequence: Synthetic oligonucleotide
  Antisense strand to SEQ ID NO: 1702057
uauauucagggagaaucac

SEQ ID NO: 1702059 - RNA, 19 nt, Artificial Sequence
  Description of Artificial Sequence: Synthetic oligonucleotide
  Sense strand starting at position 917 of SEQ ID NO: 1561835
ugauaagggcucuacucau

SEQ ID NO: 1702060 - RNA, 19 nt, Artificial Sequence
  Description of Artificial Sequence: Synthetic oligonucleotide
  Antisense strand to SEQ ID NO: 1702059
augaguagagcccuuauca

SEQ ID NO: 1702061 - RNA, 19 nt, Artificial Sequence
  Description of Artificial Sequence: Synthetic oligonucleotide
  Sense strand starting at position 1024 of SEQ ID NO: 1561835
agccauuuacuaugcuagu

SEQ ID NO: 1702062 - RNA, 19 nt, Artificial Sequence
  Description of Artificial Sequence: Synthetic oligonucleotide
  Antisense strand to SEQ ID NO: 1702061
acuagcauaguaaauggcu

SEQ ID NO: 1702063 - RNA, 19 nt, Artificial Sequence
  Description of Artificial Sequence: Synthetic oligonucleotide
  Sense strand starting at position 1218 of SEQ ID NO: 1561835
cuguuaauccuuuacagag

SEQ ID NO: 1702064 - RNA, 19 nt, Artificial Sequence
  Description of Artificial Sequence: Synthetic oligonucleotide
  Antisense strand to SEQ ID NO: 1702063
cucuguaaaggauuaacag

SEQ ID NO: 1702065 - RNA, 19 nt, Artificial Sequence
  Description of Artificial Sequence: Synthetic oligonucleotide
  Sense strand starting at position 1238 of SEQ ID NO: 1561835
cacauaagucuccaggagu

SEQ ID NO: 1702066 - RNA, 19 nt, Artificial Sequence
  Description of Artificial Sequence: Synthetic oligonucleotide
  Antisense strand to SEQ ID NO: 1702065
acuccuggagacuuaugug

SEQ ID NO: 1702067 - RNA, 19 nt, Artificial Sequence
  Description of Artificial Sequence: Synthetic oligonucleotide
  Sense strand starting at position 1393 of SEQ ID NO: 1561835
cuuuccuaucugugaagaa

SEQ ID NO: 1702068 - RNA, 19 nt, Artificial Sequence
  Description of Artificial Sequence: Synthetic oligonucleotide
  Antisense strand to SEQ ID NO: 1702067
uucuucacagauaggaaag

SEQ ID NO: 1702069 - RNA, 19 nt, Artificial Sequence
  Description of Artificial Sequence: Synthetic oligonucleotide
  Sense strand starting at position 1405 of SEQ ID NO: 1561835
ugaagaaucuccuuguauu

SEQ ID NO: 1702070 - RNA, 19 nt, Artificial Sequence
  Description of Artificial Sequence: Synthetic oligonucleotide
  Antisense strand to SEQ ID NO: 1702069
aauacaaggagauucuuca

SEQ ID NO: 1702071 - RNA, 19 nt, Artificial Sequence
  Description of Artificial Sequence: Synthetic oligonucleotide
  Sense strand starting at position 1625 of SEQ ID NO: 1561835
gagcaaacguuccuauuug

SEQ ID NO: 1702072 - RNA, 19 nt, Artificial Sequence
  Description of Artificial Sequence: Synthetic oligonucleotide
  Antisense strand to SEQ ID NO: 1702071
caaauaggaacguuugcuc

SEQ ID NO: 1702073 - RNA, 19 nt, Artificial Sequence
  Description of Artificial Sequence: Synthetic oligonucleotide
  Sense strand starting at position 1690 of SEQ ID NO: 1561835
gcaaacuuucugggacaau

SEQ ID NO: 1702074 - RNA, 19 nt, Artificial Sequence
  Description of Artificial Sequence: Synthetic oligonucleotide
  Antisense strand to SEQ ID NO: 1702073
auugucccagaaaguuugc

SEQ ID NO: 1702075 - RNA, 19 nt, Artificial Sequence
  Description of Artificial Sequence: Synthetic oligonucleotide
  Sense strand starting at position 1787 of SEQ ID NO: 1561835
uuccauugacagugaauug

SEQ ID NO: 1702076 - RNA, 19 nt, Artificial Sequence
  Description of Artificial Sequence: Synthetic oligonucleotide
  Antisense strand to SEQ ID NO: 1702075
caauucacugucaauggaa

SEQ ID NO: 1702077 - RNA, 19 nt, Artificial Sequence
  Description of Artificial Sequence: Synthetic oligonucleotide
  Sense strand starting at position 1792 of SEQ ID NO: 1561835
uugacagugaauuggagua

SEQ ID NO: 1702078 - RNA, 19 nt, Artificial Sequence
  Description of Artificial Sequence: Synthetic oligonucleotide
  Antisense strand to SEQ ID NO: 1702077
uacuccaauucacugucaa

SEQ ID NO: 1702079 - RNA, 19 nt, Artificial Sequence
  Description of Artificial Sequence: Synthetic oligonucleotide
  Sense strand starting at position 2011 of SEQ ID NO: 1561835
cauagaugggcaggacuua

SEQ ID NO: 1702080 - RNA, 19 nt, Artificial Sequence
  Description of Artificial Sequence: Synthetic oligonucleotide
  Antisense strand to SEQ ID NO: 1702079
uaaguccugcccaucuaug

SEQ ID NO: 1702081 - RNA, 19 nt, Artificial Sequence
  Description of Artificial Sequence: Synthetic oligonucleotide
  Sense strand starting at position 2020 of SEQ ID NO: 1561835
gcaggacuuagccaagauc

SEQ ID NO: 1702082 - RNA, 19 nt, Artificial Sequence
  Description of Artificial Sequence: Synthetic oligonucleotide
  Antisense strand to SEQ ID NO: 1702081
gaucuuggcuaaguccugc

SEQ ID NO: 1702083 - RNA, 19 nt, Artificial Sequence
  Description of Artificial Sequence: Synthetic oligonucleotide
  Sense strand starting at position 2739 of SEQ ID NO: 1561835
uaguuaugggaagggcaau

SEQ ID NO: 1702084 - RNA, 19 nt, Artificial Sequence
  Description of Artificial Sequence: Synthetic oligonucleotide
  Antisense strand to SEQ ID NO: 1702083
auugcccuucccauaacua

SEQ ID NO: 1702085 - RNA, 19 nt, Artificial Sequence
  Description of Artificial Sequence: Synthetic oligonucleotide
  Sense strand starting at position 2751 of SEQ ID NO: 1561835
gggcaauaggaaugccaaa

SEQ ID NO: 1702086 - RNA, 19 nt, Artificial Sequence
  Description of Artificial Sequence: Synthetic oligonucleotide
  Antisense strand to SEQ ID NO: 1702085
uuuggcauuccuauugccc

SEQ ID NO: 1702087 - RNA, 19 nt, Artificial Sequence
  Description of Artificial Sequence: Synthetic oligonucleotide
  Sense strand starting at position 2980 of SEQ ID NO: 1561835
ugagcauggguuuagauau

SEQ ID NO: 1702088 - RNA, 19 nt, Artificial Sequence
  Description of Artificial Sequence: Synthetic oligonucleotide
  Antisense strand to SEQ ID NO: 1702087
auaucuaaacccaugcuca

SEQ ID NO: 1702089 - RNA, 19 nt, Artificial Sequence
  Description of Artificial Sequence: Synthetic oligonucleotide
  Sense strand starting at position 3087 of SEQ ID NO: 1561835
aauuguaagacguggagau

SEQ ID NO: 1702090 - RNA, 19 nt, Artificial Sequence
  Description of Artificial Sequence: Synthetic oligonucleotide
  Antisense strand to SEQ ID NO: 1702089
aucuccacgucuuacaauu

SEQ ID NO: 1702091 - RNA, 19 nt, Artificial Sequence
  Description of Artificial Sequence: Synthetic oligonucleotide
  Sense strand starting at position 3089 of SEQ ID NO: 1561835
uuguaagacguggagauua

SEQ ID NO: 1702092 - RNA, 19 nt, Artificial Sequence
  Description of Artificial Sequence: Synthetic oligonucleotide
  Antisense strand to SEQ ID NO: 1702091
uaaucuccacgucuuacaa

SEQ ID NO: 1702093 - RNA, 19 nt, Artificial Sequence
  Description of Artificial Sequence: Synthetic oligonucleotide
  Sense strand starting at position 3091 of SEQ ID NO: 1561835
guaagacguggagauuaua

SEQ ID NO: 1702094 - RNA, 19 nt, Artificial Sequence
  Description of Artificial Sequence: Synthetic oligonucleotide
  Antisense strand to SEQ ID NO: 1702093
uauaaucuccacgucuuac

SEQ ID NO: 1702095 - RNA, 19 nt, Artificial Sequence
  Description of Artificial Sequence: Synthetic oligonucleotide
  Sense strand starting at position 3191 of SEQ ID NO: 1561835
aauugcuuugugcccguaa

SEQ ID NO: 1702096 - RNA, 19 nt, Artificial Sequence
  Description of Artificial Sequence: Synthetic oligonucleotide
  Antisense strand to SEQ ID NO: 1702095
uuacgggcacaaagcaauu

SEQ ID NO: 1702097 - RNA, 19 nt, Artificial Sequence
  Description of Artificial Sequence: Synthetic oligonucleotide
  Sense strand starting at position 3365 of SEQ ID NO: 1561835
ccugcauguuuauuucuga

SEQ ID NO: 1702098 - RNA, 19 nt, Artificial Sequence
  Description of Artificial Sequence: Synthetic oligonucleotide
  Antisense strand to SEQ ID NO: 1702097
ucagaaauaaacaugcagg

SEQ ID NO: 1702099 - RNA, 19 nt, Artificial Sequence
  Description of Artificial Sequence: Synthetic oligonucleotide
  Sense strand starting at position 3366 of SEQ ID NO: 1561835
cugcauguuuauuucugaa

SEQ ID NO: 1702100 - RNA, 19 nt, Artificial Sequence
  Description of Artificial Sequence: Synthetic oligonucleotide
  Antisense strand to SEQ ID NO: 1702099
uucagaaauaaacaugcag

SEQ ID NO: 1702101 - RNA, 19 nt, Artificial Sequence
  Description of Artificial Sequence: Synthetic oligonucleotide
  Sense strand starting at position 3394 of SEQ ID NO: 1561835
cuaauagucuuucccagga

SEQ ID NO: 1702102 - RNA, 19 nt, Artificial Sequence
  Description of Artificial Sequence: Synthetic oligonucleotide
  Antisense strand to SEQ ID NO: 1702101
uccugggaaagacuauuag

SEQ ID NO: 1702103 - RNA, 19 nt, Artificial Sequence
  Description of Artificial Sequence: Synthetic oligonucleotide
  Sense strand starting at position 3399 of SEQ ID NO: 1561835
agucuuucccaggacuauu

SEQ ID NO: 1702104 - RNA, 19 nt, Artificial Sequence
  Description of Artificial Sequence: Synthetic oligonucleotide
  Antisense strand to SEQ ID NO: 1702103
aauaguccugggaaagacu

SEQ ID NO: 1702105 - RNA, 19 nt, Artificial Sequence
  Description of Artificial Sequence: Synthetic oligonucleotide
  Sense strand starting at position 3473 of SEQ ID NO: 1561835
auaacaguuugaccugagu

SEQ ID NO: 1702106 - RNA, 19 nt, Artificial Sequence
  Description of Artificial Sequence: Synthetic oligonucleotide
  Antisense strand to SEQ ID NO: 1702105
acucaggucaaacuguuau

SEQ ID NO: 1702107 - RNA, 19 nt, Artificial Sequence
  Description of Artificial Sequence: Synthetic oligonucleotide
  Sense strand starting at position 3495 of SEQ ID NO: 1561835
cuuccaagaaugggugaua

SEQ ID NO: 1702108 - RNA, 19 nt, Artificial Sequence
  Description of Artificial Sequence: Synthetic oligonucleotide
  Antisense strand to SEQ ID NO: 1702107
uaucacccauucuuggaag

SEQ ID NO: 1702109 - RNA, 19 nt, Artificial Sequence
  Description of Artificial Sequence: Synthetic oligonucleotide
  Sense strand starting at position 3496 of SEQ ID NO: 1561835
uuccaagaaugggugauau

SEQ ID NO: 1702110 - RNA, 19 nt, Artificial Sequence
  Description of Artificial Sequence: Synthetic oligonucleotide
  Antisense strand to SEQ ID NO: 1702109
auaucacccauucuuggaa

SEQ ID NO: 1702111 - RNA, 19 nt, Artificial Sequence
  Description of Artificial Sequence: Synthetic oligonucleotide
  Sense strand starting at position 3508 of SEQ ID NO: 1561835
gugauaucaaaguagguga

SEQ ID NO: 1702112 - RNA, 19 nt, Artificial Sequence
  Description of Artificial Sequence: Synthetic oligonucleotide
  Antisense strand to SEQ ID NO: 1702111
ucaccuacuuugauaucac

SEQ ID NO: 1702113 - RNA, 19 nt, Artificial Sequence
  Description of Artificial Sequence: Synthetic oligonucleotide
  Sense strand starting at position 3541 of SEQ ID NO: 1561835
auguauugacccuauuguu

SEQ ID NO: 1702114 - RNA, 19 nt, Artificial Sequence
  Description of Artificial Sequence: Synthetic oligonucleotide
  Antisense strand to SEQ ID NO: 1702113
aacaauagggucaauacau

SEQ ID NO: 1702115 - RNA, 19 nt, Artificial Sequence
  Description of Artificial Sequence: Synthetic oligonucleotide
  Sense strand starting at position 3596 of SEQ ID NO: 1561835
ccauuaaaucuaggaguuu

SEQ ID NO: 1702116 - RNA, 19 nt, Artificial Sequence
  Description of Artificial Sequence: Synthetic oligonucleotide
  Antisense strand to SEQ ID NO: 1702115
aaacuccuagauuuaaugg

SEQ ID NO: 1702117 - RNA, 19 nt, Artificial Sequence
  Description of Artificial Sequence: Synthetic oligonucleotide
  Sense strand starting at position 3616 of SEQ ID NO: 1561835
agauucuaauguccauuga

SEQ ID NO: 1702118 - RNA, 19 nt, Artificial Sequence
  Description of Artificial Sequence: Synthetic oligonucleotide
  Antisense strand to SEQ ID NO: 1702117
ucaauggacauuagaaucu

SEQ ID NO: 1702119 - RNA, 19 nt, Artificial Sequence
  Description of Artificial Sequence: Synthetic oligonucleotide
  Sense strand starting at position 3917 of SEQ ID NO: 1561835
ggugaauuggguuauaggu

SEQ ID NO: 1702120 - RNA, 19 nt, Artificial Sequence
  Description of Artificial Sequence: Synthetic oligonucleotide
  Antisense strand to SEQ ID NO: 1702119
accuauaacccaauucacc

SEQ ID NO: 1702121 - RNA, 19 nt, Artificial Sequence
  Description of Artificial Sequence: Synthetic oligonucleotide
  Sense strand starting at position 16 of SEQ ID NO: 1561836
gguagcagccguucucgaa

SEQ ID NO: 1702122 - RNA, 19 nt, Artificial Sequence
  Description of Artificial Sequence: Synthetic oligonucleotide
  Antisense strand to SEQ ID NO: 1702121
uucgagaacggcugcuacc

SEQ ID NO: 1702123 - RNA, 19 nt, Artificial Sequence
  Description of Artificial Sequence: Synthetic oligonucleotide
  Sense strand starting at position 32 of SEQ ID NO: 1561836
gaacauguugcccgaguca

SEQ ID NO: 1702124 - RNA, 19 nt, Artificial Sequence
  Description of Artificial Sequence: Synthetic oligonucleotide
  Antisense strand to SEQ ID NO: 1702123
ugacucgggcaacauguuc

SEQ ID NO: 1702125 - RNA, 19 nt, Artificial Sequence
  Description of Artificial Sequence: Synthetic oligonucleotide
  Sense strand starting at position 106 of SEQ ID NO: 1561836
ucaggaaacagucguugaa

SEQ ID NO: 1702126 - RNA, 19 nt, Artificial Sequence
  Description of Artificial Sequence: Synthetic oligonucleotide
  Antisense strand to SEQ ID NO: 1702125
uucaacgacuguuuccuga

SEQ ID NO: 1702127 - RNA, 19 nt, Artificial Sequence
  Description of Artificial Sequence: Synthetic oligonucleotide
  Sense strand starting at position 109 of SEQ ID NO: 1561836
ggaaacagucguugaagga

SEQ ID NO: 1702128 - RNA, 19 nt, Artificial Sequence
  Description of Artificial Sequence: Synthetic oligonucleotide
  Antisense strand to SEQ ID NO: 1702127
uccuucaacgacuguuucc

SEQ ID NO: 1702129 - RNA, 19 nt, Artificial Sequence
  Description of Artificial Sequence: Synthetic oligonucleotide
  Sense strand starting at position 160 of SEQ ID NO: 1561836
gcugguucugccgguagaa

SEQ ID NO: 1702130 - RNA, 19 nt, Artificial Sequence
  Description of Artificial Sequence: Synthetic oligonucleotide
  Antisense strand to SEQ ID NO: 1702129
uucuaccggcagaaccagc

SEQ ID NO: 1702131 - RNA, 19 nt, Artificial Sequence
  Description of Artificial Sequence: Synthetic oligonucleotide
  Sense strand starting at position 364 of SEQ ID NO: 1561836
uggaguucauguuggcgua

SEQ ID NO: 1702132 - RNA, 19 nt, Artificial Sequence
  Description of Artificial Sequence: Synthetic oligonucleotide
  Antisense strand to SEQ ID NO: 1702131
uacgccaacaugaacucca

SEQ ID NO: 1702133 - RNA, 19 nt, Artificial Sequence
  Description of Artificial Sequence: Synthetic oligonucleotide
  Sense strand starting at position 664 of SEQ ID NO: 1561836
cguucauguugcucacgga

SEQ ID NO: 1702134 - RNA, 19 nt, Artificial Sequence
  Description of Artificial Sequence: Synthetic oligonucleotide
  Antisense strand to SEQ ID NO: 1702133
uccgugagcaacaugaacg

SEQ ID NO: 1702135 - RNA, 19 nt, Artificial Sequence
  Description of Artificial Sequence: Synthetic oligonucleotide
  Sense strand starting at position 667 of SEQ ID NO: 1561836
ucauguugcucacggagga

SEQ ID NO: 1702136 - RNA, 19 nt, Artificial Sequence
  Description of Artificial Sequence: Synthetic oligonucleotide
  Antisense strand to SEQ ID NO: 1702135
uccuccgugagcaacauga

SEQ ID NO: 1702137 - RNA, 19 nt, Artificial Sequence
  Description of Artificial Sequence: Synthetic oligonucleotide
  Sense strand starting at position 852 of SEQ ID NO: 1561836
cagggagagucaugaucga

SEQ ID NO: 1702138 - RNA, 19 nt, Artificial Sequence
  Description of Artificial Sequence: Synthetic oligonucleotide
  Antisense strand to SEQ ID NO: 1702137
ucgaucaugacucucccug

SEQ ID NO: 1702139 - RNA, 19 nt, Artificial Sequence
  Description of Artificial Sequence: Synthetic oligonucleotide
  Sense strand starting at position 1187 of SEQ ID NO: 1561836
ucccuugucccagggaaac

SEQ ID NO: 1702140 - RNA, 19 nt, Artificial Sequence
  Description of Artificial Sequence: Synthetic oligonucleotide
  Antisense strand to SEQ ID NO: 1702139
guuucccugggacaaggga

SEQ ID NO: 1702141 - RNA, 19 nt, Artificial Sequence
  Description of Artificial Sequence: Synthetic oligonucleotide
  Sense strand starting at position 1323 of SEQ ID NO: 1561836
cucuuuguccacuagucuu

SEQ ID NO: 1702142 - RNA, 19 nt, Artificial Sequence
  Description of Artificial Sequence: Synthetic oligonucleotide
  Antisense strand to SEQ ID NO: 1702141
aagacuaguggacaaagag

SEQ ID NO: 1702143 - RNA, 19 nt, Artificial Sequence
  Description of Artificial Sequence: Synthetic oligonucleotide
  Sense strand starting at position 1449 of SEQ ID NO: 1561836
acauaacucuguuaggaua

SEQ ID NO: 1702144 - RNA, 19 nt, Artificial Sequence
  Description of Artificial Sequence: Synthetic oligonucleotide
  Antisense strand to SEQ ID NO: 1702143
uauccuaacagaguuaugu

SEQ ID NO: 1702145 - RNA, 19 nt, Artificial Sequence
  Description of Artificial Sequence: Synthetic oligonucleotide
  Sense strand starting at position 1451 of SEQ ID NO: 1561836
auaacucuguuaggauagu

SEQ ID NO: 1702146 - RNA, 19 nt, Artificial Sequence
  Description of Artificial Sequence: Synthetic oligonucleotide
  Antisense strand to SEQ ID NO: 1702145
acuauccuaacagaguuau

SEQ ID NO: 1702147 - RNA, 19 nt, Artificial Sequence
  Description of Artificial Sequence: Synthetic oligonucleotide
  Sense strand starting at position 1543 of SEQ ID NO: 1561836
aggcuaacagugugucgua

SEQ ID NO: 1702148 - RNA, 19 nt, Artificial Sequence
  Description of Artificial Sequence: Synthetic oligonucleotide
  Antisense strand to SEQ ID NO: 1702147
uacgacacacuguuagccu

SEQ ID NO: 1702149 - RNA, 19 nt, Artificial Sequence
  Description of Artificial Sequence: Synthetic oligonucleotide
  Sense strand starting at position 1544 of SEQ ID NO: 1561836
ggcuaacagugugucguau

SEQ ID NO: 1702150 - RNA, 19 nt, Artificial Sequence
  Description of Artificial Sequence: Synthetic oligonucleotide
  Antisense strand to SEQ ID NO: 1702149
auacgacacacuguuagcc

SEQ ID NO: 1702151 - RNA, 19 nt, Artificial Sequence
  Description of Artificial Sequence: Synthetic oligonucleotide
  Sense strand starting at position 1545 of SEQ ID NO: 1561836
gcuaacagugugucguaua

SEQ ID NO: 1702152 - RNA, 19 nt, Artificial Sequence
  Description of Artificial Sequence: Synthetic oligonucleotide
  Antisense strand to SEQ ID NO: 1702151
uauacgacacacuguuagc

SEQ ID NO: 1702153 - RNA, 19 nt, Artificial Sequence
  Description of Artificial Sequence: Synthetic oligonucleotide
  Sense strand starting at position 1546 of SEQ ID NO: 1561836
cuaacagugugucguauaa

SEQ ID NO: 1702154 - RNA, 19 nt, Artificial Sequence
  Description of Artificial Sequence: Synthetic oligonucleotide
  Antisense strand to SEQ ID NO: 1702153
uuauacgacacacuguuag

SEQ ID NO: 1702155 - RNA, 19 nt, Artificial Sequence
  Description of Artificial Sequence: Synthetic oligonucleotide
  Sense strand starting at position 2288 of SEQ ID NO: 1561836
gugggaggcuggugauaua

SEQ ID NO: 1702156 - RNA, 19 nt, Artificial Sequence
  Description of Artificial Sequence: Synthetic oligonucleotide
  Antisense strand to SEQ ID NO: 1702155
uauaucaccagccucccac

SEQ ID NO: 1702157 - RNA, 19 nt, Artificial Sequence
  Description of Artificial Sequence: Synthetic oligonucleotide
  Sense strand starting at position 2675 of SEQ ID NO: 1561836
cccggcagaucccuaugaa

SEQ ID NO: 1702158 - RNA, 19 nt, Artificial Sequence
  Description of Artificial Sequence: Synthetic oligonucleotide
  Antisense strand to SEQ ID NO: 1702157
uucauagggaucugccggg

SEQ ID NO: 1702159 - RNA, 19 nt, Artificial Sequence
  Description of Artificial Sequence: Synthetic oligonucleotide
  Sense strand starting at position 2676 of SEQ ID NO: 1561836
ccggcagaucccuaugaaa

SEQ ID NO: 1702160 - RNA, 19 nt, Artificial Sequence
  Description of Artificial Sequence: Synthetic oligonucleotide
  Antisense strand to SEQ ID NO: 1702159
uuucauagggaucugccgg

SEQ ID NO: 1702161 - RNA, 19 nt, Artificial Sequence
  Description of Artificial Sequence: Synthetic oligonucleotide
  Sense strand starting at position 2678 of SEQ ID NO: 1561836
ggcagaucccuaugaaagc

SEQ ID NO: 1702162 - RNA, 19 nt, Artificial Sequence
  Description of Artificial Sequence: Synthetic oligonucleotide
  Antisense strand to SEQ ID NO: 1702161
gcuuucauagggaucugcc

SEQ ID NO: 1702163 - RNA, 19 nt, Artificial Sequence
  Description of Artificial Sequence: Synthetic oligonucleotide
  Sense strand starting at position 2702 of SEQ ID NO: 1561836
uuauuuaugccggguuucu

SEQ ID NO: 1702164 - RNA, 19 nt, Artificial Sequence
  Description of Artificial Sequence: Synthetic oligonucleotide
  Antisense strand to SEQ ID NO: 1702163
agaaacccggcauaaauaa

SEQ ID NO: 1702165 - RNA, 19 nt, Artificial Sequence
  Description of Artificial Sequence: Synthetic oligonucleotide
  Sense strand starting at position 2711 of SEQ ID NO: 1561836
ccggguuucuucgcucuca

SEQ ID NO: 1702166 - RNA, 19 nt, Artificial Sequence
  Description of Artificial Sequence: Synthetic oligonucleotide
  Antisense strand to SEQ ID NO: 1702165
ugagagcgaagaaacccgg

SEQ ID NO: 1702167 - RNA, 19 nt, Artificial Sequence
  Description of Artificial Sequence: Synthetic oligonucleotide
  Sense strand starting at position 2713 of SEQ ID NO: 1561836
ggguuucuucgcucucagu

SEQ ID NO: 1702168 - RNA, 19 nt, Artificial Sequence
  Description of Artificial Sequence: Synthetic oligonucleotide
  Antisense strand to SEQ ID NO: 1702167
acugagagcgaagaaaccc

SEQ ID NO: 1702169 - RNA, 19 nt, Artificial Sequence
  Description of Artificial Sequence: Synthetic oligonucleotide
  Sense strand starting at position 2729 of SEQ ID NO: 1561836
agugcucauucucugucaa

SEQ ID NO: 1702170 - RNA, 19 nt, Artificial Sequence
  Description of Artificial Sequence: Synthetic oligonucleotide
  Antisense strand to SEQ ID NO: 1702169
uugacagagaaugagcacu

SEQ ID NO: 1702171 - RNA, 19 nt, Artificial Sequence
  Description of Artificial Sequence: Synthetic oligonucleotide
  Sense strand starting at position 2730 of SEQ ID NO: 1561836
gugcucauucucugucaaa

SEQ ID NO: 1702172 - RNA, 19 nt, Artificial Sequence
  Description of Artificial Sequence: Synthetic oligonucleotide
  Antisense strand to SEQ ID NO: 1702171
uuugacagagaaugagcac

SEQ ID NO: 1702173 - RNA, 19 nt, Artificial Sequence
  Description of Artificial Sequence: Synthetic oligonucleotide
  Sense strand starting at position 2773 of SEQ ID NO: 1561836
ugcaaagcgcuguccuauu

SEQ ID NO: 1702174 - RNA, 19 nt, Artificial Sequence
  Description of Artificial Sequence: Synthetic oligonucleotide
  Antisense strand to SEQ ID NO: 1702173
aauaggacagcgcuuugca

SEQ ID NO: 1702175 - RNA, 19 nt, Artificial Sequence
  Description of Artificial Sequence: Synthetic oligonucleotide
  Sense strand starting at position 3016 of SEQ ID NO: 1561836
agauuugucucugauauuc

SEQ ID NO: 1702176 - RNA, 19 nt, Artificial Sequence
  Description of Artificial Sequence: Synthetic oligonucleotide
  Antisense strand to SEQ ID NO: 1702175
gaauaucagagacaaaucu

SEQ ID NO: 1702177 - RNA, 19 nt, Artificial Sequence
  Description of Artificial Sequence: Synthetic oligonucleotide
  Sense strand starting at position 3214 of SEQ ID NO: 1561836
gggacugcuuaauagaaau

SEQ ID NO: 1702178 - RNA, 19 nt, Artificial Sequence
  Description of Artificial Sequence: Synthetic oligonucleotide
  Antisense strand to SEQ ID NO: 1702177
auuucuauuaagcaguccc

SEQ ID NO: 1702179 - RNA, 19 nt, Artificial Sequence
  Description of Artificial Sequence: Synthetic oligonucleotide
  Sense strand starting at position 3290 of SEQ ID NO: 1561836
ugucuucuguucuggguua

SEQ ID NO: 1702180 - RNA, 19 nt, Artificial Sequence
  Description of Artificial Sequence: Synthetic oligonucleotide
  Antisense strand to SEQ ID NO: 1702179
uaacccagaacagaagaca

SEQ ID NO: 1702181 - RNA, 19 nt, Artificial Sequence
  Description of Artificial Sequence: Synthetic oligonucleotide
  Sense strand starting at position 3362 of SEQ ID NO: 1561836
ggcucuuucuugguucuga

SEQ ID NO: 1702182 - RNA, 19 nt, Artificial Sequence
  Description of Artificial Sequence: Synthetic oligonucleotide
  Antisense strand to SEQ ID NO: 1702181
ucagaaccaagaaagagcc

SEQ ID NO: 1702183 - RNA, 19 nt, Artificial Sequence
  Description of Artificial Sequence: Synthetic oligonucleotide
  Sense strand starting at position 3363 of SEQ ID NO: 1561836
gcucuuucuugguucugaa

SEQ ID NO: 1702184 - RNA, 19 nt, Artificial Sequence
  Description of Artificial Sequence: Synthetic oligonucleotide
  Antisense strand to SEQ ID NO: 1702183
uucagaaccaagaaagagc

SEQ ID NO: 1702185 - RNA, 19 nt, Artificial Sequence
  Description of Artificial Sequence: Synthetic oligonucleotide
  Sense strand starting at position 3517 of SEQ ID NO: 1561836
cacggagcuucgcauugaa

SEQ ID NO: 1702186 - RNA, 19 nt, Artificial Sequence
  Description of Artificial Sequence: Synthetic oligonucleotide
  Antisense strand to SEQ ID NO: 1702185
uucaaugcgaagcuccgug

SEQ ID NO: 1702187 - RNA, 19 nt, Artificial Sequence
  Description of Artificial Sequence: Synthetic oligonucleotide
  Sense strand starting at position 3670 of SEQ ID NO: 1561836
ugcugaaaugcagaugguu

SEQ ID NO: 1702188 - RNA, 19 nt, Artificial Sequence
  Description of Artificial Sequence: Synthetic oligonucleotide
  Antisense strand to SEQ ID NO: 1702187
aaccaucugcauuucagca

SEQ ID NO: 1702189 - RNA, 19 nt, Artificial Sequence
  Description of Artificial Sequence: Synthetic oligonucleotide
  Sense strand starting at position 3739 of SEQ ID NO: 1561836
gcgggauucucccacaaau

SEQ ID NO: 1702190 - RNA, 19 nt, Artificial Sequence
  Description of Artificial Sequence: Synthetic oligonucleotide
  Antisense strand to SEQ ID NO: 1702189
auuugugggagaaucccgc

SEQ ID NO: 1702191 - RNA, 19 nt, Artificial Sequence
  Description of Artificial Sequence: Synthetic oligonucleotide
  Sense strand starting at position 187 of SEQ ID NO: 1561837
ucccuugucccagggaaac

SEQ ID NO: 1702192 - RNA, 19 nt, Artificial Sequence
  Description of Artificial Sequence: Synthetic oligonucleotide
  Antisense strand to SEQ ID NO: 1702191
guuucccugggacaaggga

SEQ ID NO: 1702193 - RNA, 19 nt, Artificial Sequence
  Description of Artificial Sequence: Synthetic oligonucleotide
  Sense strand starting at position 323 of SEQ ID NO: 1561837
cucuuuguccacuagucuu

SEQ ID NO: 1702194 - RNA, 19 nt, Artificial Sequence
  Description of Artificial Sequence: Synthetic oligonucleotide
  Antisense strand to SEQ ID NO: 1702193
aagacuaguggacaaagag

SEQ ID NO: 1702195 - RNA, 19 nt, Artificial Sequence
  Description of Artificial Sequence: Synthetic oligonucleotide
  Sense strand starting at position 449 of SEQ ID NO: 1561837
acauaacucuguuaggaua

SEQ ID NO: 1702196 - RNA, 19 nt, Artificial Sequence
  Description of Artificial Sequence: Synthetic oligonucleotide
  Antisense strand to SEQ ID NO: 1702195
uauccuaacagaguuaugu

SEQ ID NO: 1702197 - RNA, 19 nt, Artificial Sequence
  Description of Artificial Sequence: Synthetic oligonucleotide
  Sense strand starting at position 451 of SEQ ID NO: 1561837
auaacucuguuaggauagu

SEQ ID NO: 1702198 - RNA, 19 nt, Artificial Sequence
  Description of Artificial Sequence: Synthetic oligonucleotide
  Antisense strand to SEQ ID NO: 1702197
acuauccuaacagaguuau

SEQ ID NO: 1702199 - RNA, 19 nt, Artificial Sequence
  Description of Artificial Sequence: Synthetic oligonucleotide
  Sense strand starting at position 543 of SEQ ID NO: 1561837
aggcuaacagugugucgua

SEQ ID NO: 1702200 - RNA, 19 nt, Artificial Sequence
  Description of Artificial Sequence: Synthetic oligonucleotide
  Antisense strand to SEQ ID NO: 1702199
uacgacacacuguuagccu

SEQ ID NO: 1702201 - RNA, 19 nt, Artificial Sequence
  Description of Artificial Sequence: Synthetic oligonucleotide
  Sense strand starting at position 544 of SEQ ID NO: 1561837
ggcuaacagugugucguau

SEQ ID NO: 1702202 - RNA, 19 nt, Artificial Sequence
  Description of Artificial Sequence: Synthetic oligonucleotide
  Antisense strand to SEQ ID NO: 1702201
auacgacacacuguuagcc

SEQ ID NO: 1702203 - RNA, 19 nt, Artificial Sequence
  Description of Artificial Sequence: Synthetic oligonucleotide
  Sense strand starting at position 545 of SEQ ID NO: 1561837
gcuaacagugugucguaua

SEQ ID NO: 1702204 - RNA, 19 nt, Artificial Sequence
  Description of Artificial Sequence: Synthetic oligonucleotide
  Antisense strand to SEQ ID NO: 1702203
uauacgacacacuguuagc

SEQ ID NO: 1702205 - RNA, 19 nt, Artificial Sequence
  Description of Artificial Sequence: Synthetic oligonucleotide
  Sense strand starting at position 1288 of SEQ ID NO: 1561837
gugggaggcuggugauaua

SEQ ID NO: 1702206 - RNA, 19 nt, Artificial Sequence
  Description of Artificial Sequence: Synthetic oligonucleotide
  Antisense strand to SEQ ID NO: 1702205
uauaucaccagccucccac

SEQ ID NO: 1702207 - RNA, 19 nt, Artificial Sequence
  Description of Artificial Sequence: Synthetic oligonucleotide
  Sense strand starting at position 1675 of SEQ ID NO: 1561837
cccggcagaucccuaugaa

SEQ ID NO: 1702208 - RNA, 19 nt, Artificial Sequence
  Description of Artificial Sequence: Synthetic oligonucleotide
  Antisense strand to SEQ ID NO: 1702207
uucauagggaucugccggg

SEQ ID NO: 1702209 - RNA, 19 nt, Artificial Sequence
  Description of Artificial Sequence: Synthetic oligonucleotide
  Sense strand starting at position 1676 of SEQ ID NO: 1561837
ccggcagaucccuaugaaa

SEQ ID NO: 1702210 - RNA, 19 nt, Artificial Sequence
  Description of Artificial Sequence: Synthetic oligonucleotide
  Antisense strand to SEQ ID NO: 1702209
uuucauagggaucugccgg

SEQ ID NO: 1702211 - RNA, 19 nt, Artificial Sequence
  Description of Artificial Sequence: Synthetic oligonucleotide
  Sense strand starting at position 1678 of SEQ ID NO: 1561837
ggcagaucccuaugaaagc

SEQ ID NO: 1702212 - RNA, 19 nt, Artificial Sequence
  Description of Artificial Sequence: Synthetic oligonucleotide
  Antisense strand to SEQ ID NO: 1702211
gcuuucauagggaucugcc

SEQ ID NO: 1702213 - RNA, 19 nt, Artificial Sequence
  Description of Artificial Sequence: Synthetic oligonucleotide
  Sense strand starting at position 1702 of SEQ ID NO: 1561837
uuauuuaugccggguuucu

SEQ ID NO: 1702214 - RNA, 19 nt, Artificial Sequence
  Description of Artificial Sequence: Synthetic oligonucleotide
  Antisense strand to SEQ ID NO: 1702213
agaaacccggcauaaauaa

SEQ ID NO: 1702215 - RNA, 19 nt, Artificial Sequence
  Description of Artificial Sequence: Synthetic oligonucleotide
  Sense strand starting at position 1711 of SEQ ID NO: 1561837
ccggguuucuucgcucuca

SEQ ID NO: 1702216 - RNA, 19 nt, Artificial Sequence
  Description of Artificial Sequence: Synthetic oligonucleotide
  Antisense strand to SEQ ID NO: 1702215
ugagagcgaagaaacccgg

SEQ ID NO: 1702217 - RNA, 19 nt, Artificial Sequence
  Description of Artificial Sequence: Synthetic oligonucleotide
  Sense strand starting at position 1713 of SEQ ID NO: 1561837
ggguuucuucgcucucagu

SEQ ID NO: 1702218 - RNA, 19 nt, Artificial Sequence
  Description of Artificial Sequence: Synthetic oligonucleotide
  Antisense strand to SEQ ID NO: 1702217
acugagagcgaagaaaccc

SEQ ID NO: 1702219 - RNA, 19 nt, Artificial Sequence
  Description of Artificial Sequence: Synthetic oligonucleotide
  Sense strand starting at position 1729 of SEQ ID NO: 1561837
agugcucauucucugucaa

SEQ ID NO: 1702220 - RNA, 19 nt, Artificial Sequence
  Description of Artificial Sequence: Synthetic oligonucleotide
  Antisense strand to SEQ ID NO: 1702219
uugacagagaaugagcacu

SEQ ID NO: 1702221 - RNA, 19 nt, Artificial Sequence
  Description of Artificial Sequence: Synthetic oligonucleotide
  Sense strand starting at position 1730 of SEQ ID NO: 1561837
gugcucauucucugucaaa

SEQ ID NO: 1702222 - RNA, 19 nt, Artificial Sequence
  Description of Artificial Sequence: Synthetic oligonucleotide
  Antisense strand to SEQ ID NO: 1702221
uuugacagagaaugagcac

SEQ ID NO: 1702223 - RNA, 19 nt, Artificial Sequence
  Description of Artificial Sequence: Synthetic oligonucleotide
  Sense strand starting at position 1773 of SEQ ID NO: 1561837
ugcaaagcgcuguccuauu

SEQ ID NO: 1702224 - RNA, 19 nt, Artificial Sequence
  Description of Artificial Sequence: Synthetic oligonucleotide
  Antisense strand to SEQ ID NO: 1702223
aauaggacagcgcuuugca

SEQ ID NO: 1702225 - RNA, 19 nt, Artificial Sequence
  Description of Artificial Sequence: Synthetic oligonucleotide
  Sense strand starting at position 2016 of SEQ ID NO: 1561837
agauuugucucugauauuc

SEQ ID NO: 1702226 - RNA, 19 nt, Artificial Sequence
  Description of Artificial Sequence: Synthetic oligonucleotide
  Antisense strand to SEQ ID NO: 1702225
gaauaucagagacaaaucu

SEQ ID NO: 1702227 - RNA, 19 nt, Artificial Sequence
  Description of Artificial Sequence: Synthetic oligonucleotide
  Sense strand starting at position 2214 of SEQ ID NO: 1561837
gggacugcuuaauagaaau

SEQ ID NO: 1702228 - RNA, 19 nt, Artificial Sequence
  Description of Artificial Sequence: Synthetic oligonucleotide
  Antisense strand to SEQ ID NO: 1702227
auuucuauuaagcaguccc

SEQ ID NO: 1702229 - RNA, 19 nt, Artificial Sequence
  Description of Artificial Sequence: Synthetic oligonucleotide
  Sense strand starting at position 2362 of SEQ ID NO: 1561837
ggcucuuucuugguucuga

SEQ ID NO: 1702230 - RNA, 19 nt, Artificial Sequence
  Description of Artificial Sequence: Synthetic oligonucleotide
  Antisense strand to SEQ ID NO: 1702229
ucagaaccaagaaagagcc

SEQ ID NO: 1702231 - RNA, 19 nt, Artificial Sequence
  Description of Artificial Sequence: Synthetic oligonucleotide
  Sense strand starting at position 2363 of SEQ ID NO: 1561837
gcucuuucuugguucugaa

SEQ ID NO: 1702232 - RNA, 19 nt, Artificial Sequence
  Description of Artificial Sequence: Synthetic oligonucleotide
  Antisense strand to SEQ ID NO: 1702231
uucagaaccaagaaagagc

SEQ ID NO: 1702233 - RNA, 19 nt, Artificial Sequence
  Description of Artificial Sequence: Synthetic oligonucleotide
  Sense strand starting at position 2517 of SEQ ID NO: 1561837
cacggagcuucgcauugaa

SEQ ID NO: 1702234 - RNA, 19 nt, Artificial Sequence
  Description of Artificial Sequence: Synthetic oligonucleotide
  Antisense strand to SEQ ID NO: 1702233
uucaaugcgaagcuccgug

SEQ ID NO: 1702235 - RNA, 19 nt, Artificial Sequence
  Description of Artificial Sequence: Synthetic oligonucleotide
  Sense strand starting at position 2670 of SEQ ID NO: 1561837
ugcugaaaugcagaugguu

SEQ ID NO: 1702236 - RNA, 19 nt, Artificial Sequence
  Description of Artificial Sequence: Synthetic oligonucleotide
  Antisense strand to SEQ ID NO: 1702235
aaccaucugcauuucagca

SEQ ID NO: 1702237 - RNA, 19 nt, Artificial Sequence
  Description of Artificial Sequence: Synthetic oligonucleotide
  Sense strand starting at position 2739 of SEQ ID NO: 1561837
gcgggauucucccacaaau

SEQ ID NO: 1702238 - RNA, 19 nt, Artificial Sequence
  Description of Artificial Sequence: Synthetic oligonucleotide
  Antisense strand to SEQ ID NO: 1702237
auuugugggagaaucccgc

SEQ ID NO: 1702239 - RNA, 19 nt, Artificial Sequence
  Description of Artificial Sequence: Synthetic oligonucleotide
  Sense strand starting at position 2997 of SEQ ID NO: 1561837
aggaguaagcauuggagcu

SEQ ID NO: 1702240 - RNA, 19 nt, Artificial Sequence
  Description of Artificial Sequence: Synthetic oligonucleotide
  Antisense strand to SEQ ID NO: 1702239
agcuccaaugcuuacuccu

SEQ ID NO: 1702241 - RNA, 19 nt, Artificial Sequence
  Description of Artificial Sequence: Synthetic oligonucleotide
  Sense strand starting at position 3106 of SEQ ID NO: 1561837
gaauguuaugguugaccua

SEQ ID NO: 1702242 - RNA, 19 nt, Artificial Sequence
  Description of Artificial Sequence: Synthetic oligonucleotide
  Antisense strand to SEQ ID NO: 1702241
uaggucaaccauaacauuc

SEQ ID NO: 1702243 - RNA, 19 nt, Artificial Sequence
  Description of Artificial Sequence: Synthetic oligonucleotide
  Sense strand starting at position 3129 of SEQ ID NO: 1561837
gugcgugugcuguaugaga

SEQ ID NO: 1702244 - RNA, 19 nt, Artificial Sequence
  Description of Artificial Sequence: Synthetic oligonucleotide
  Antisense strand to SEQ ID NO: 1702243
ucucauacagcacacgcac

SEQ ID NO: 1702245 - RNA, 19 nt, Artificial Sequence
  Description of Artificial Sequence: Synthetic oligonucleotide
  Sense strand starting at position 3131 of SEQ ID NO: 1561837
gcgugugcuguaugagagu

SEQ ID NO: 1702246 - RNA, 19 nt, Artificial Sequence
  Description of Artificial Sequence: Synthetic oligonucleotide
  Antisense strand to SEQ ID NO: 1702245
acucucauacagcacacgc

SEQ ID NO: 1702247 - RNA, 19 nt, Artificial Sequence
  Description of Artificial Sequence: Synthetic oligonucleotide
  Sense strand starting at position 3134 of SEQ ID NO: 1561837
ugugcuguaugagaguauu

SEQ ID NO: 1702248 - RNA, 19 nt, Artificial Sequence
  Description of Artificial Sequence: Synthetic oligonucleotide
  Antisense strand to SEQ ID NO: 1702247
aauacucucauacagcaca

SEQ ID NO: 1702249 - RNA, 19 nt, Artificial Sequence
  Description of Artificial Sequence: Synthetic oligonucleotide
  Sense strand starting at position 3144 of SEQ ID NO: 1561837
gagaguauuugugagcuua

SEQ ID NO: 1702250 - RNA, 19 nt, Artificial Sequence
  Description of Artificial Sequence: Synthetic oligonucleotide
  Antisense strand to SEQ ID NO: 1702249
uaagcucacaaauacucuc

SEQ ID NO: 1702251 - RNA, 19 nt, Artificial Sequence
  Description of Artificial Sequence: Synthetic oligonucleotide
  Sense strand starting at position 3202 of SEQ ID NO: 1561837
gaaauuuggucccagaaau

SEQ ID NO: 1702252 - RNA, 19 nt, Artificial Sequence
  Description of Artificial Sequence: Synthetic oligonucleotide
  Antisense strand to SEQ ID NO: 1702251
auuucugggaccaaauuuc

SEQ ID NO: 1702253 - RNA, 19 nt, Artificial Sequence
  Description of Artificial Sequence: Synthetic oligonucleotide
  Sense strand starting at position 3414 of SEQ ID NO: 1561837
cgacccgaguccucauuua

SEQ ID NO: 1702254 - RNA, 19 nt, Artificial Sequence
  Description of Artificial Sequence: Synthetic oligonucleotide
  Antisense strand to SEQ ID NO: 1702253
uaaaugaggacucgggucg

SEQ ID NO: 1702255 - RNA, 19 nt, Artificial Sequence
  Description of Artificial Sequence: Synthetic oligonucleotide
  Sense strand starting at position 3847 of SEQ ID NO: 1561837
agaguucuggcucaggcuu

SEQ ID NO: 1702256 - RNA, 19 nt, Artificial Sequence
  Description of Artificial Sequence: Synthetic oligonucleotide
  Antisense strand to SEQ ID NO: 1702255
aagccugagccagaacucu

SEQ ID NO: 1702257 - RNA, 19 nt, Artificial Sequence
  Description of Artificial Sequence: Synthetic oligonucleotide
  Sense strand starting at position 3860 of SEQ ID NO: 1561837
aggcuugaaugcugaagau

SEQ ID NO: 1702258 - RNA, 19 nt, Artificial Sequence
  Description of Artificial Sequence: Synthetic oligonucleotide
  Antisense strand to SEQ ID NO: 1702257
aucuucagcauucaagccu

SEQ ID NO: 1702259 - RNA, 19 nt, Artificial Sequence
  Description of Artificial Sequence: Synthetic oligonucleotide
  Sense strand starting at position 3870 of SEQ ID NO: 1561837
gcugaagauugcucccgga

SEQ ID NO: 1702260 - RNA, 19 nt, Artificial Sequence
  Description of Artificial Sequence: Synthetic oligonucleotide
  Antisense strand to SEQ ID NO: 1702259
uccgggagcaaucuucagc

SEQ ID NO: 1702261 - RNA, 19 nt, Artificial Sequence
  Description of Artificial Sequence: Synthetic oligonucleotide
  Sense strand starting at position 3873 of SEQ ID NO: 1561837
gaagauugcucccggaguu

SEQ ID NO: 1702262 - RNA, 19 nt, Artificial Sequence
  Description of Artificial Sequence: Synthetic oligonucleotide
  Antisense strand to SEQ ID NO: 1702261
aacuccgggagcaaucuuc

SEQ ID NO: 1702263 - RNA, 19 nt, Artificial Sequence
  Description of Artificial Sequence: Synthetic oligonucleotide
  Sense strand starting at position 3874 of SEQ ID NO: 1561837
aagauugcucccggaguuu

SEQ ID NO: 1702264 - RNA, 19 nt, Artificial Sequence
  Description of Artificial Sequence: Synthetic oligonucleotide
  Antisense strand to SEQ ID NO: 1702263
aaacuccgggagcaaucuu

SEQ ID NO: 1702265 - RNA, 19 nt, Artificial Sequence
  Description of Artificial Sequence: Synthetic oligonucleotide
  Sense strand starting at position 3885 of SEQ ID NO: 1561837
cggaguuucucuccaggaa

SEQ ID NO: 1702266 - RNA, 19 nt, Artificial Sequence
  Description of Artificial Sequence: Synthetic oligonucleotide
  Antisense strand to SEQ ID NO: 1702265
uuccuggagagaaacuccg

SEQ ID NO: 1702267 - RNA, 19 nt, Artificial Sequence
  Description of Artificial Sequence: Synthetic oligonucleotide
  Sense strand starting at position 3926 of SEQ ID NO: 1561837
ugcagauguuucucccaau

SEQ ID NO: 1702268 - RNA, 19 nt, Artificial Sequence
  Description of Artificial Sequence: Synthetic oligonucleotide
  Antisense strand to SEQ ID NO: 1702267
auugggagaaacaucugca

SEQ ID NO: 1702269 - RNA, 19 nt, Artificial Sequence
  Description of Artificial Sequence: Synthetic oligonucleotide
  Sense strand starting at position 3927 of SEQ ID NO: 1561837
gcagauguuucucccaauc

SEQ ID NO: 1702270 - RNA, 19 nt, Artificial Sequence
  Description of Artificial Sequence: Synthetic oligonucleotide
  Antisense strand to SEQ ID NO: 1702269
gauugggagaaacaucugc

SEQ ID NO: 1702271 - RNA, 19 nt, Artificial Sequence
  Description of Artificial Sequence: Synthetic oligonucleotide
  Sense strand starting at position 60 of SEQ ID NO: 1561838
gguaaagggugccuuucua

SEQ ID NO: 1702272 - RNA, 19 nt, Artificial Sequence
  Description of Artificial Sequence: Synthetic oligonucleotide
  Antisense strand to SEQ ID NO: 1702271
uagaaaggcacccuuuacc

SEQ ID NO: 1702273 - RNA, 19 nt, Artificial Sequence
  Description of Artificial Sequence: Synthetic oligonucleotide
  Sense strand starting at position 240 of SEQ ID NO: 1561838
ccauuugcccucuggaguu

SEQ ID NO: 1702274 - RNA, 19 nt, Artificial Sequence
  Description of Artificial Sequence: Synthetic oligonucleotide
  Antisense strand to SEQ ID NO: 1702273
aacuccagagggcaaaugg

SEQ ID NO: 1702275 - RNA, 19 nt, Artificial Sequence
  Description of Artificial Sequence: Synthetic oligonucleotide
  Sense strand starting at position 270 of SEQ ID NO: 1561838
gccuguuuccaccacugua

SEQ ID NO: 1702276 - RNA, 19 nt, Artificial Sequence
  Description of Artificial Sequence: Synthetic oligonucleotide
  Antisense strand to SEQ ID NO: 1702275
uacagugguggaaacaggc

SEQ ID NO: 1702277 - RNA, 19 nt, Artificial Sequence
  Description of Artificial Sequence: Synthetic oligonucleotide
  Sense strand starting at position 293 of SEQ ID NO: 1561838
gggccaacuuuccaaauca

SEQ ID NO: 1702278 - RNA, 19 nt, Artificial Sequence
  Description of Artificial Sequence: Synthetic oligonucleotide
  Antisense strand to SEQ ID NO: 1702277
ugauuuggaaaguuggccc

SEQ ID NO: 1702279 - RNA, 19 nt, Artificial Sequence
  Description of Artificial Sequence: Synthetic oligonucleotide
  Sense strand starting at position 309 of SEQ ID NO: 1561838
ucacacaggugagaugaua

SEQ ID NO: 1702280 - RNA, 19 nt, Artificial Sequence
  Description of Artificial Sequence: Synthetic oligonucleotide
  Antisense strand to SEQ ID NO: 1702279
uaucaucucaccuguguga

SEQ ID NO: 1702281 - RNA, 19 nt, Artificial Sequence
  Description of Artificial Sequence: Synthetic oligonucleotide
  Sense strand starting at position 343 of SEQ ID NO: 1561838
caggaucagugucacaaau

SEQ ID NO: 1702282 - RNA, 19 nt, Artificial Sequence
  Description of Artificial Sequence: Synthetic oligonucleotide
  Antisense strand to SEQ ID NO: 1702281
auuugugacacugauccug

SEQ ID NO: 1702283 - RNA, 19 nt, Artificial Sequence
  Description of Artificial Sequence: Synthetic oligonucleotide
  Sense strand starting at position 345 of SEQ ID NO: 1561838
ggaucagugucacaaauug

SEQ ID NO: 1702284 - RNA, 19 nt, Artificial Sequence
  Description of Artificial Sequence: Synthetic oligonucleotide
  Antisense strand to SEQ ID NO: 1702283
caauuugugacacugaucc

SEQ ID NO: 1702285 - RNA, 19 nt, Artificial Sequence
  Description of Artificial Sequence: Synthetic oligonucleotide
  Sense strand starting at position 356 of SEQ ID NO: 1561838
acaaauugucaggguuaug

SEQ ID NO: 1702286 - RNA, 19 nt, Artificial Sequence
  Description of Artificial Sequence: Synthetic oligonucleotide
  Antisense strand to SEQ ID NO: 1702285
cauaacccugacaauuugu

SEQ ID NO: 1702287 - RNA, 19 nt, Artificial Sequence
  Description of Artificial Sequence: Synthetic oligonucleotide
  Sense strand starting at position 359 of SEQ ID NO: 1561838
aauugucaggguuaugaug

SEQ ID NO: 1702288 - RNA, 19 nt, Artificial Sequence
  Description of Artificial Sequence: Synthetic oligonucleotide
  Antisense strand to SEQ ID NO: 1702287
caucauaacccugacaauu

SEQ ID NO: 1702289 - RNA, 19 nt, Artificial Sequence
  Description of Artificial Sequence: Synthetic oligonucleotide
  Sense strand starting at position 404 of SEQ ID NO: 1561838
gcaucugagacuggagaau

SEQ ID NO: 1702290 - RNA, 19 nt, Artificial Sequence
  Description of Artificial Sequence: Synthetic oligonucleotide
  Antisense strand to SEQ ID NO: 1702289
auucuccagucucagaugc

SEQ ID NO: 1702291 - RNA, 19 nt, Artificial Sequence
  Description of Artificial Sequence: Synthetic oligonucleotide
  Sense strand starting at position 569 of SEQ ID NO: 1561838
gugagauauucccaccaag

SEQ ID NO: 1702292 - RNA, 19 nt, Artificial Sequence
  Description of Artificial Sequence: Synthetic oligonucleotide
  Antisense strand to SEQ ID NO: 1702291
cuuggugggaauaucucac

SEQ ID NO: 1702293 - RNA, 19 nt, Artificial Sequence
  Description of Artificial Sequence: Synthetic oligonucleotide
  Sense strand starting at position 700 of SEQ ID NO: 1561838
cuuuauuggcccugagagc

SEQ ID NO: 1702294 - RNA, 19 nt, Artificial Sequence
  Description of Artificial Sequence: Synthetic oligonucleotide
  Antisense strand to SEQ ID NO: 1702293
gcucucagggccaauaaag

SEQ ID NO: 1702295 - RNA, 19 nt, Artificial Sequence
  Description of Artificial Sequence: Synthetic oligonucleotide
  Sense strand starting at position 841 of SEQ ID NO: 1561838
ggcuggguccuucgagagu

SEQ ID NO: 1702296 - RNA, 19 nt, Artificial Sequence
  Description of Artificial Sequence: Synthetic oligonucleotide
  Antisense strand to SEQ ID NO: 1702295
acucucgaaggacccagcc

SEQ ID NO: 1702297 - RNA, 19 nt, Artificial Sequence
  Description of Artificial Sequence: Synthetic oligonucleotide
  Sense strand starting at position 850 of SEQ ID NO: 1561838
cuucgagaguucuucaggu

SEQ ID NO: 1702298 - RNA, 19 nt, Artificial Sequence
  Description of Artificial Sequence: Synthetic oligonucleotide
  Antisense strand to SEQ ID NO: 1702297
accugaagaacucucgaag

SEQ ID NO: 1702299 - RNA, 19 nt, Artificial Sequence
  Description of Artificial Sequence: Synthetic oligonucleotide
  Sense strand starting at position 922 of SEQ ID NO: 1561838
ugaggcugccuuuacucaa

SEQ ID NO: 1702300 - RNA, 19 nt, Artificial Sequence
  Description of Artificial Sequence: Synthetic oligonucleotide
  Antisense strand to SEQ ID NO: 1702299
uugaguaaaggcagccuca

SEQ ID NO: 1702301 - RNA, 19 nt, Artificial Sequence
  Description of Artificial Sequence: Synthetic oligonucleotide
  Sense strand starting at position 925 of SEQ ID NO: 1561838
ggcugccuuuacucaaaga

SEQ ID NO: 1702302 - RNA, 19 nt, Artificial Sequence
  Description of Artificial Sequence: Synthetic oligonucleotide
  Antisense strand to SEQ ID NO: 1702301
ucuuugaguaaaggcagcc

SEQ ID NO: 1702303 - RNA, 19 nt, Artificial Sequence
  Description of Artificial Sequence: Synthetic oligonucleotide
  Sense strand starting at position 1325 of SEQ ID NO: 1561838
caggcuugggcguggaaau

SEQ ID NO: 1702304 - RNA, 19 nt, Artificial Sequence
  Description of Artificial Sequence: Synthetic oligonucleotide
  Antisense strand to SEQ ID NO: 1702303
auuuccacgcccaagccug

SEQ ID NO: 1702305 - RNA, 19 nt, Artificial Sequence
  Description of Artificial Sequence: Synthetic oligonucleotide
  Sense strand starting at position 1336 of SEQ ID NO: 1561838
guggaaaucucuuugggcu

SEQ ID NO: 1702306 - RNA, 19 nt, Artificial Sequence
  Description of Artificial Sequence: Synthetic oligonucleotide
  Antisense strand to SEQ ID NO: 1702305
agcccaaagagauuuccac

SEQ ID NO: 1702307 - RNA, 19 nt, Artificial Sequence
  Description of Artificial Sequence: Synthetic oligonucleotide
  Sense strand starting at position 1380 of SEQ ID NO: 1561838
agugguugcugggcacaua

SEQ ID NO: 1702308 - RNA, 19 nt, Artificial Sequence
  Description of Artificial Sequence: Synthetic oligonucleotide
  Antisense strand to SEQ ID NO: 1702307
uaugugcccagcaaccacu

SEQ ID NO: 1702309 - RNA, 19 nt, Artificial Sequence
  Description of Artificial Sequence: Synthetic oligonucleotide
  Sense strand starting at position 1697 of SEQ ID NO: 1561838
caaagcacucguugaguga

SEQ ID NO: 1702310 - RNA, 19 nt, Artificial Sequence
  Description of Artificial Sequence: Synthetic oligonucleotide
  Antisense strand to SEQ ID NO: 1702309
ucacucaacgagugcuuug

SEQ ID NO: 1702311 - RNA, 19 nt, Artificial Sequence
  Description of Artificial Sequence: Synthetic oligonucleotide
  Sense strand starting at position 1767 of SEQ ID NO: 1561838
ggcgaaucggcccaugaug

SEQ ID NO: 1702312 - RNA, 19 nt, Artificial Sequence
  Description of Artificial Sequence: Synthetic oligonucleotide
  Antisense strand to SEQ ID NO: 1702311
caucaugggccgauucgcc

SEQ ID NO: 1702313 - RNA, 19 nt, Artificial Sequence
  Description of Artificial Sequence: Synthetic oligonucleotide
  Sense strand starting at position 1769 of SEQ ID NO: 1561838
cgaaucggcccaugaugua

SEQ ID NO: 1702314 - RNA, 19 nt, Artificial Sequence
  Description of Artificial Sequence: Synthetic oligonucleotide
  Antisense strand to SEQ ID NO: 1702313
uacaucaugggccgauucg

SEQ ID NO: 1702315 - RNA, 19 nt, Artificial Sequence
  Description of Artificial Sequence: Synthetic oligonucleotide
  Sense strand starting at position 1778 of SEQ ID NO: 1561838
ccaugauguagcgguagau

SEQ ID NO: 1702316 - RNA, 19 nt, Artificial Sequence
  Description of Artificial Sequence: Synthetic oligonucleotide
  Antisense strand to SEQ ID NO: 1702315
aucuaccgcuacaucaugg

SEQ ID NO: 1702317 - RNA, 19 nt, Artificial Sequence
  Description of Artificial Sequence: Synthetic oligonucleotide
  Sense strand starting at position 1829 of SEQ ID NO: 1561838
ucuggauggccauagcaau

SEQ ID NO: 1702318 - RNA, 19 nt, Artificial Sequence
  Description of Artificial Sequence: Synthetic oligonucleotide
  Antisense strand to SEQ ID NO: 1702317
auugcuauggccauccaga

SEQ ID NO: 1702319 - RNA, 19 nt, Artificial Sequence
  Description of Artificial Sequence: Synthetic oligonucleotide
  Sense strand starting at position 2703 of SEQ ID NO: 1561838
acacguaguauacggagaa

SEQ ID NO: 1702320 - RNA, 19 nt, Artificial Sequence
  Description of Artificial Sequence: Synthetic oligonucleotide
  Antisense strand to SEQ ID NO: 1702319
uucuccguauacuacgugu

SEQ ID NO: 1702321 - RNA, 19 nt, Artificial Sequence
  Description of Artificial Sequence: Synthetic oligonucleotide
  Sense strand starting at position 2707 of SEQ ID NO: 1561838
guaguauacggagaaagug

SEQ ID NO: 1702322 - RNA, 19 nt, Artificial Sequence
  Description of Artificial Sequence: Synthetic oligonucleotide
  Antisense strand to SEQ ID NO: 1702321
cacuuucuccguauacuac

SEQ ID NO: 1702323 - RNA, 19 nt, Artificial Sequence
  Description of Artificial Sequence: Synthetic oligonucleotide
  Sense strand starting at position 3334 of SEQ ID NO: 1561838
ugcggauugucacucugaa

SEQ ID NO: 1702324 - RNA, 19 nt, Artificial Sequence
  Description of Artificial Sequence: Synthetic oligonucleotide
  Antisense strand to SEQ ID NO: 1702323
uucagagugacaauccgca

SEQ ID NO: 1702325 - RNA, 19 nt, Artificial Sequence
  Description of Artificial Sequence: Synthetic oligonucleotide
  Sense strand starting at position 3338 of SEQ ID NO: 1561838
gauugucacucugaacuga

SEQ ID NO: 1702326 - RNA, 19 nt, Artificial Sequence
  Description of Artificial Sequence: Synthetic oligonucleotide
  Antisense strand to SEQ ID NO: 1702325
ucaguucagagugacaauc

SEQ ID NO: 1702327 - RNA, 19 nt, Artificial Sequence
  Description of Artificial Sequence: Synthetic oligonucleotide
  Sense strand starting at position 3574 of SEQ ID NO: 1561838
ggcucugaggcucagagaa

SEQ ID NO: 1702328 - RNA, 19 nt, Artificial Sequence
  Description of Artificial Sequence: Synthetic oligonucleotide
  Antisense strand to SEQ ID NO: 1702327
uucucugagccucagagcc

SEQ ID NO: 1702329 - RNA, 19 nt, Artificial Sequence
  Description of Artificial Sequence: Synthetic oligonucleotide
  Sense strand starting at position 3594 of SEQ ID NO: 1561838
guaaguaaauucccugaug

SEQ ID NO: 1702330 - RNA, 19 nt, Artificial Sequence
  Description of Artificial Sequence: Synthetic oligonucleotide
  Antisense strand to SEQ ID NO: 1702329
caucagggaauuuacuuac

SEQ ID NO: 1702331 - RNA, 19 nt, Artificial Sequence
  Description of Artificial Sequence: Synthetic oligonucleotide
  Sense strand starting at position 3616 of SEQ ID NO: 1561838
cacaucuagugagugacaa

SEQ ID NO: 1702332 - RNA, 19 nt, Artificial Sequence
  Description of Artificial Sequence: Synthetic oligonucleotide
  Antisense strand to SEQ ID NO: 1702331
uugucacucacuagaugug

SEQ ID NO: 1702333 - RNA, 19 nt, Artificial Sequence
  Description of Artificial Sequence: Synthetic oligonucleotide
  Sense strand starting at position 3617 of SEQ ID NO: 1561838
acaucuagugagugacaaa

SEQ ID NO: 1702334 - RNA, 19 nt, Artificial Sequence
  Description of Artificial Sequence: Synthetic oligonucleotide
  Antisense strand to SEQ ID NO: 1702333
uuugucacucacuagaugu

SEQ ID NO: 1702335 - RNA, 19 nt, Artificial Sequence
  Description of Artificial Sequence: Synthetic oligonucleotide
  Sense strand starting at position 3651 of SEQ ID NO: 1561838
aggauucuguaauuccuaa

SEQ ID NO: 1702336 - RNA, 19 nt, Artificial Sequence
  Description of Artificial Sequence: Synthetic oligonucleotide
  Antisense strand to SEQ ID NO: 1702335
uuaggaauuacagaauccu

SEQ ID NO: 1702337 - RNA, 19 nt, Artificial Sequence
  Description of Artificial Sequence: Synthetic oligonucleotide
  Sense strand starting at position 3749 of SEQ ID NO: 1561838
gaguaaagagcaugcuguu

SEQ ID NO: 1702338 - RNA, 19 nt, Artificial Sequence
  Description of Artificial Sequence: Synthetic oligonucleotide
  Antisense strand to SEQ ID NO: 1702337
aacagcaugcucuuuacuc

SEQ ID NO: 1702339 - RNA, 19 nt, Artificial Sequence
  Description of Artificial Sequence: Synthetic oligonucleotide
  Sense strand starting at position 3830 of SEQ ID NO: 1561838
ucaagaaaugucugcuaaa

SEQ ID NO: 1702340 - RNA, 19 nt, Artificial Sequence
  Description of Artificial Sequence: Synthetic oligonucleotide
  Antisense strand to SEQ ID NO: 1702339
uuuagcagacauuucuuga

SEQ ID NO: 1702341 - RNA, 19 nt, Artificial Sequence
  Description of Artificial Sequence: Synthetic oligonucleotide
  Sense strand starting at position 3833 of SEQ ID NO: 1561838
agaaaugucugcuaaauga

SEQ ID NO: 1702342 - RNA, 19 nt, Artificial Sequence
  Description of Artificial Sequence: Synthetic oligonucleotide
  Antisense strand to SEQ ID NO: 1702341
ucauuuagcagacauuucu

SEQ ID NO: 1702343 - RNA, 19 nt, Artificial Sequence
  Description of Artificial Sequence: Synthetic oligonucleotide
  Sense strand starting at position 3867 of SEQ ID NO: 1561838
uugauugauuucuguccuu

SEQ ID NO: 1702344 - RNA, 19 nt, Artificial Sequence
  Description of Artificial Sequence: Synthetic oligonucleotide
  Antisense strand to SEQ ID NO: 1702343
aaggacagaaaucaaucaa

SEQ ID NO: 1702345 - RNA, 19 nt, Artificial Sequence
  Description of Artificial Sequence: Synthetic oligonucleotide
  Sense strand starting at position 3907 of SEQ ID NO: 1561838
ccaugaagguggcuuauua

SEQ ID NO: 1702346 - RNA, 19 nt, Artificial Sequence
  Description of Artificial Sequence: Synthetic oligonucleotide
  Antisense strand to SEQ ID NO: 1702345
uaauaagccaccuucaugg

SEQ ID NO: 1702347 - RNA, 19 nt, Artificial Sequence
  Description of Artificial Sequence: Synthetic oligonucleotide
  Sense strand starting at position 3911 of SEQ ID NO: 1561838
gaagguggcuuauuaaugu

SEQ ID NO: 1702348 - RNA, 19 nt, Artificial Sequence
  Description of Artificial Sequence: Synthetic oligonucleotide
  Antisense strand to SEQ ID NO: 1702347
acauuaauaagccaccuuc

SEQ ID NO: 1702349 - RNA, 19 nt, Artificial Sequence
  Description of Artificial Sequence: Synthetic oligonucleotide
  Sense strand starting at position 3954 of SEQ ID NO: 1561838
uggcaucuguaagaggauu

SEQ ID NO: 1702350 - RNA, 19 nt, Artificial Sequence
  Description of Artificial Sequence: Synthetic oligonucleotide
  Antisense strand to SEQ ID NO: 1702349
aauccucuuacagaugcca

SEQ ID NO: 1702351 - RNA, 19 nt, Artificial Sequence
  Description of Artificial Sequence: Synthetic oligonucleotide
  Sense strand starting at position 15 of SEQ ID NO: 1561839
ggcuuuaucuggcagacac

SEQ ID NO: 1702352 - RNA, 19 nt, Artificial Sequence
  Description of Artificial Sequence: Synthetic oligonucleotide
  Antisense strand to SEQ ID NO: 1702351
gugucugccagauaaagcc

SEQ ID NO: 1702353 - RNA, 19 nt, Artificial Sequence
  Description of Artificial Sequence: Synthetic oligonucleotide
  Sense strand starting at position 667 of SEQ ID NO: 1561839
agacgaauguggccacuua

SEQ ID NO: 1702354 - RNA, 19 nt, Artificial Sequence
  Description of Artificial Sequence: Synthetic oligonucleotide
  Antisense strand to SEQ ID NO: 1702353
uaaguggccacauucgucu

SEQ ID NO: 1702355 - RNA, 19 nt, Artificial Sequence
  Description of Artificial Sequence: Synthetic oligonucleotide
  Sense strand starting at position 668 of SEQ ID NO: 1561839
gacgaauguggccacuuaa

SEQ ID NO: 1702356 - RNA, 19 nt, Artificial Sequence
  Description of Artificial Sequence: Synthetic oligonucleotide
  Antisense strand to SEQ ID NO: 1702355
uuaaguggccacauucguc

SEQ ID NO: 1702357 - RNA, 19 nt, Artificial Sequence
  Description of Artificial Sequence: Synthetic oligonucleotide
  Sense strand starting at position 786 of SEQ ID NO: 1561839
ccggaaugcuguuuggaaa

SEQ ID NO: 1702358 - RNA, 19 nt, Artificial Sequence
  Description of Artificial Sequence: Synthetic oligonucleotide
  Antisense strand to SEQ ID NO: 1702357
uuuccaaacagcauuccgg

SEQ ID NO: 1702359 - RNA, 19 nt, Artificial Sequence
  Description of Artificial Sequence: Synthetic oligonucleotide
  Sense strand starting at position 787 of SEQ ID NO: 1561839
cggaaugcuguuuggaaau

SEQ ID NO: 1702360 - RNA, 19 nt, Artificial Sequence
  Description of Artificial Sequence: Synthetic oligonucleotide
  Antisense strand to SEQ ID NO: 1702359
auuuccaaacagcauuccg

SEQ ID NO: 1702361 - RNA, 19 nt, Artificial Sequence
  Description of Artificial Sequence: Synthetic oligonucleotide
  Sense strand starting at position 793 of SEQ ID NO: 1561839
gcuguuuggaaauagaugu

SEQ ID NO: 1702362 - RNA, 19 nt, Artificial Sequence
  Description of Artificial Sequence: Synthetic oligonucleotide
  Antisense strand to SEQ ID NO: 1702361
acaucuauuuccaaacagc

SEQ ID NO: 1702363 - RNA, 19 nt, Artificial Sequence
  Description of Artificial Sequence: Synthetic oligonucleotide
  Sense strand starting at position 800 of SEQ ID NO: 1561839
ggaaauagauguuccuucu

SEQ ID NO: 1702364 - RNA, 19 nt, Artificial Sequence
  Description of Artificial Sequence: Synthetic oligonucleotide
  Antisense strand to SEQ ID NO: 1702363
agaaggaacaucuauuucc

SEQ ID NO: 1702365 - RNA, 19 nt, Artificial Sequence
  Description of Artificial Sequence: Synthetic oligonucleotide
  Sense strand starting at position 835 of SEQ ID NO: 1561839
cagaauucuggaugggugu

SEQ ID NO: 1702366 - RNA, 19 nt, Artificial Sequence
  Description of Artificial Sequence: Synthetic oligonucleotide
  Antisense strand to SEQ ID NO: 1702365
acacccauccagaauucug

SEQ ID NO: 1702367 - RNA, 19 nt, Artificial Sequence
  Description of Artificial Sequence: Synthetic oligonucleotide
  Sense strand starting at position 836 of SEQ ID NO: 1561839
agaauucuggauggguguu

SEQ ID NO: 1702368 - RNA, 19 nt, Artificial Sequence
  Description of Artificial Sequence: Synthetic oligonucleotide
  Antisense strand to SEQ ID NO: 1702367
aacacccauccagaauucu

SEQ ID NO: 1702369 - RNA, 19 nt, Artificial Sequence
  Description of Artificial Sequence: Synthetic oligonucleotide
  Sense strand starting at position 837 of SEQ ID NO: 1561839
gaauucuggauggguguuu

SEQ ID NO: 1702370 - RNA, 19 nt, Artificial Sequence
  Description of Artificial Sequence: Synthetic oligonucleotide
  Antisense strand to SEQ ID NO: 1702369
aaacacccauccagaauuc

SEQ ID NO: 1702371 - RNA, 19 nt, Artificial Sequence
  Description of Artificial Sequence: Synthetic oligonucleotide
  Sense strand starting at position 864 of SEQ ID NO: 1561839
ggguguuacccagguuuac

SEQ ID NO: 1702372 - RNA, 19 nt, Artificial Sequence
  Description of Artificial Sequence: Synthetic oligonucleotide
  Antisense strand to SEQ ID NO: 1702371
guaaaccuggguaacaccc

SEQ ID NO: 1702373 - RNA, 19 nt, Artificial Sequence
  Description of Artificial Sequence: Synthetic oligonucleotide
  Sense strand starting at position 967 of SEQ ID NO: 1561839
gcggguuugcacccggauu

SEQ ID NO: 1702374 - RNA, 19 nt, Artificial Sequence
  Description of Artificial Sequence: Synthetic oligonucleotide
  Antisense strand to SEQ ID NO: 1702373
aauccgggugcaaacccgc

SEQ ID NO: 1702375 - RNA, 19 nt, Artificial Sequence
  Description of Artificial Sequence: Synthetic oligonucleotide
  Sense strand starting at position 1172 of SEQ ID NO: 1561839
gcgaacuguucucgaggca

SEQ ID NO: 1702376 - RNA, 19 nt, Artificial Sequence
  Description of Artificial Sequence: Synthetic oligonucleotide
  Antisense strand to SEQ ID NO: 1702375
ugccucgagaacaguucgc

SEQ ID NO: 1702377 - RNA, 19 nt, Artificial Sequence
  Description of Artificial Sequence: Synthetic oligonucleotide
  Sense strand starting at position 1173 of SEQ ID NO: 1561839
cgaacuguucucgaggcaa

SEQ ID NO: 1702378 - RNA, 19 nt, Artificial Sequence
  Description of Artificial Sequence: Synthetic oligonucleotide
  Antisense strand to SEQ ID NO: 1702377
uugccucgagaacaguucg

SEQ ID NO: 1702379 - RNA, 19 nt, Artificial Sequence
  Description of Artificial Sequence: Synthetic oligonucleotide
  Sense strand starting at position 1175 of SEQ ID NO: 1561839
aacuguucucgaggcaaca

SEQ ID NO: 1702380 - RNA, 19 nt, Artificial Sequence
  Description of Artificial Sequence: Synthetic oligonucleotide
  Antisense strand to SEQ ID NO: 1702379
uguugccucgagaacaguu

SEQ ID NO: 1702381 - RNA, 19 nt, Artificial Sequence
  Description of Artificial Sequence: Synthetic oligonucleotide
  Sense strand starting at position 1564 of SEQ ID NO: 1561839
ggucuugaccugcagggaa

SEQ ID NO: 1702382 - RNA, 19 nt, Artificial Sequence
  Description of Artificial Sequence: Synthetic oligonucleotide
  Antisense strand to SEQ ID NO: 1702381
uucccugcaggucaagacc

SEQ ID NO: 1702383 - RNA, 19 nt, Artificial Sequence
  Description of Artificial Sequence: Synthetic oligonucleotide
  Sense strand starting at position 2291 of SEQ ID NO: 1561839
cgcagagacuucuccaagu

SEQ ID NO: 1702384 - RNA, 19 nt, Artificial Sequence
  Description of Artificial Sequence: Synthetic oligonucleotide
  Antisense strand to SEQ ID NO: 1702383
acuuggagaagucucugcg

SEQ ID NO: 1702385 - RNA, 19 nt, Artificial Sequence
  Description of Artificial Sequence: Synthetic oligonucleotide
  Sense strand starting at position 2301 of SEQ ID NO: 1561839
ucuccaaguuugugcgagu

SEQ ID NO: 1702386 - RNA, 19 nt, Artificial Sequence
  Description of Artificial Sequence: Synthetic oligonucleotide
  Antisense strand to SEQ ID NO: 1702385
acucgcacaaacuuggaga

SEQ ID NO: 1702387 - RNA, 19 nt, Artificial Sequence
  Description of Artificial Sequence: Synthetic oligonucleotide
  Sense strand starting at position 2557 of SEQ ID NO: 1561839
cgcgauuuccucgguuucu

SEQ ID NO: 1702388 - RNA, 19 nt, Artificial Sequence
  Description of Artificial Sequence: Synthetic oligonucleotide
  Antisense strand to SEQ ID NO: 1702387
agaaaccgaggaaaucgcg

SEQ ID NO: 1702389 - RNA, 19 nt, Artificial Sequence
  Description of Artificial Sequence: Synthetic oligonucleotide
  Sense strand starting at position 2726 of SEQ ID NO: 1561839
gccagaaaugcgugugggu

SEQ ID NO: 1702390 - RNA, 19 nt, Artificial Sequence
  Description of Artificial Sequence: Synthetic oligonucleotide
  Antisense strand to SEQ ID NO: 1702389
acccacacgcauuucuggc

SEQ ID NO: 1702391 - RNA, 19 nt, Artificial Sequence
  Description of Artificial Sequence: Synthetic oligonucleotide
  Sense strand starting at position 2881 of SEQ ID NO: 1561839
aggcuuggcggccaugaaa

SEQ ID NO: 1702392 - RNA, 19 nt, Artificial Sequence
  Description of Artificial Sequence: Synthetic oligonucleotide
  Antisense strand to SEQ ID NO: 1702391
uuucauggccgccaagccu

SEQ ID NO: 1702393 - RNA, 19 nt, Artificial Sequence
  Description of Artificial Sequence: Synthetic oligonucleotide
  Sense strand starting at position 3188 of SEQ ID NO: 1561839
cuuucuuucucggagcaca

SEQ ID NO: 1702394 - RNA, 19 nt, Artificial Sequence
  Description of Artificial Sequence: Synthetic oligonucleotide
  Antisense strand to SEQ ID NO: 1702393
ugugcuccgagaaagaaag

SEQ ID NO: 1702395 - RNA, 19 nt, Artificial Sequence
  Description of Artificial Sequence: Synthetic oligonucleotide
  Sense strand starting at position 3219 of SEQ ID NO: 1561839
aggcgugguggccaugaaa

SEQ ID NO: 1702396 - RNA, 19 nt, Artificial Sequence
  Description of Artificial Sequence: Synthetic oligonucleotide
  Antisense strand to SEQ ID NO: 1702395
uuucauggccaccacgccu

SEQ ID NO: 1702397 - RNA, 19 nt, Artificial Sequence
  Description of Artificial Sequence: Synthetic oligonucleotide
  Sense strand starting at position 3221 of SEQ ID NO: 1561839
gcgugguggccaugaaagu

SEQ ID NO: 1702398 - RNA, 19 nt, Artificial Sequence
  Description of Artificial Sequence: Synthetic oligonucleotide
  Antisense strand to SEQ ID NO: 1702397
acuuucauggccaccacgc

SEQ ID NO: 1702399 - RNA, 19 nt, Artificial Sequence
  Description of Artificial Sequence: Synthetic oligonucleotide
  Sense strand starting at position 3222 of SEQ ID NO: 1561839
cgugguggccaugaaaguu

SEQ ID NO: 1702400 - RNA, 19 nt, Artificial Sequence
  Description of Artificial Sequence: Synthetic oligonucleotide
  Antisense strand to SEQ ID NO: 1702399
aacuuucauggccaccacg

SEQ ID NO: 1702401 - RNA, 19 nt, Artificial Sequence
  Description of Artificial Sequence: Synthetic oligonucleotide
  Sense strand starting at position 3645 of SEQ ID NO: 1561839
gcaugaaaguucuuccuug

SEQ ID NO: 1702402 - RNA, 19 nt, Artificial Sequence
  Description of Artificial Sequence: Synthetic oligonucleotide
  Antisense strand to SEQ ID NO: 1702401
caaggaagaacuuucaugc

SEQ ID NO: 1702403 - RNA, 19 nt, Artificial Sequence
  Description of Artificial Sequence: Synthetic oligonucleotide
  Sense strand starting at position 3649 of SEQ ID NO: 1561839
gaaaguucuuccuugcaga

SEQ ID NO: 1702404 - RNA, 19 nt, Artificial Sequence
  Description of Artificial Sequence: Synthetic oligonucleotide
  Antisense strand to SEQ ID NO: 1702403
ucugcaaggaagaacuuuc

SEQ ID NO: 1702405 - RNA, 19 nt, Artificial Sequence
  Description of Artificial Sequence: Synthetic oligonucleotide
  Sense strand starting at position 3652 of SEQ ID NO: 1561839
aguucuuccuugcagaaac

SEQ ID NO: 1702406 - RNA, 19 nt, Artificial Sequence
  Description of Artificial Sequence: Synthetic oligonucleotide
  Antisense strand to SEQ ID NO: 1702405
guuucugcaaggaagaacu

SEQ ID NO: 1702407 - RNA, 19 nt, Artificial Sequence
  Description of Artificial Sequence: Synthetic oligonucleotide
  Sense strand starting at position 3673 of SEQ ID NO: 1561839
gcccucaacuccugucagu

SEQ ID NO: 1702408 - RNA, 19 nt, Artificial Sequence
  Description of Artificial Sequence: Synthetic oligonucleotide
  Antisense strand to SEQ ID NO: 1702407
acugacaggaguugagggc

SEQ ID NO: 1702409 - RNA, 19 nt, Artificial Sequence
  Description of Artificial Sequence: Synthetic oligonucleotide
  Sense strand starting at position 3807 of SEQ ID NO: 1561839
ggcgcuguccgucugggaa

SEQ ID NO: 1702410 - RNA, 19 nt, Artificial Sequence
  Description of Artificial Sequence: Synthetic oligonucleotide
  Antisense strand to SEQ ID NO: 1702409
uucccagacggacagcgcc

SEQ ID NO: 1702411 - RNA, 19 nt, Artificial Sequence
  Description of Artificial Sequence: Synthetic oligonucleotide
  Sense strand starting at position 428 of SEQ ID NO: 1561840
uguuuaguuugagccacau

SEQ ID NO: 1702412 - RNA, 19 nt, Artificial Sequence
  Description of Artificial Sequence: Synthetic oligonucleotide
  Antisense strand to SEQ ID NO: 1702411
auguggcucaaacuaaaca

SEQ ID NO: 1702413 - RNA, 19 nt, Artificial Sequence
  Description of Artificial Sequence: Synthetic oligonucleotide
  Sense strand starting at position 432 of SEQ ID NO: 1561840
uaguuugagccacauaggu

SEQ ID NO: 1702414 - RNA, 19 nt, Artificial Sequence
  Description of Artificial Sequence: Synthetic oligonucleotide
  Antisense strand to SEQ ID NO: 1702413
accuauguggcucaaacua

SEQ ID NO: 1702415 - RNA, 19 nt, Artificial Sequence
  Description of Artificial Sequence: Synthetic oligonucleotide
  Sense strand starting at position 1196 of SEQ ID NO: 1561840
auguucuagugagucuaga

SEQ ID NO: 1702416 - RNA, 19 nt, Artificial Sequence
  Description of Artificial Sequence: Synthetic oligonucleotide
  Antisense strand to SEQ ID NO: 1702415
ucuagacucacuagaacau

SEQ ID NO: 1702417 - RNA, 19 nt, Artificial Sequence
  Description of Artificial Sequence: Synthetic oligonucleotide
  Sense strand starting at position 1337 of SEQ ID NO: 1561840
gaaagugaccucugcuuac

SEQ ID NO: 1702418 - RNA, 19 nt, Artificial Sequence
  Description of Artificial Sequence: Synthetic oligonucleotide
  Antisense strand to SEQ ID NO: 1702417
guaagcagaggucacuuuc

SEQ ID NO: 1702419 - RNA, 19 nt, Artificial Sequence
  Description of Artificial Sequence: Synthetic oligonucleotide
  Sense strand starting at position 1349 of SEQ ID NO: 1561840
ugcuuacuggcucacagau

SEQ ID NO: 1702420 - RNA, 19 nt, Artificial Sequence
  Description of Artificial Sequence: Synthetic oligonucleotide
  Antisense strand to SEQ ID NO: 1702419
aucugugagccaguaagca

SEQ ID NO: 1702421 - RNA, 19 nt, Artificial Sequence
  Description of Artificial Sequence: Synthetic oligonucleotide
  Sense strand starting at position 1351 of SEQ ID NO: 1561840
cuuacuggcucacagauuu

SEQ ID NO: 1702422 - RNA, 19 nt, Artificial Sequence
  Description of Artificial Sequence: Synthetic oligonucleotide
  Antisense strand to SEQ ID NO: 1702421
aaaucugugagccaguaag

SEQ ID NO: 1702423 - RNA, 19 nt, Artificial Sequence
  Description of Artificial Sequence: Synthetic oligonucleotide
  Sense strand starting at position 1474 of SEQ ID NO: 1561840
uuuaaauucuugcuagugu

SEQ ID NO: 1702424 - RNA, 19 nt, Artificial Sequence
  Description of Artificial Sequence: Synthetic oligonucleotide
  Antisense strand to SEQ ID NO: 1702423
acacuagcaagaauuuaaa

SEQ ID NO: 1702425 - RNA, 19 nt, Artificial Sequence
  Description of Artificial Sequence: Synthetic oligonucleotide
  Sense strand starting at position 1482 of SEQ ID NO: 1561840
cuugcuaguguuugacuua

SEQ ID NO: 1702426 - RNA, 19 nt, Artificial Sequence
  Description of Artificial Sequence: Synthetic oligonucleotide
  Antisense strand to SEQ ID NO: 1702425
uaagucaaacacuagcaag

SEQ ID NO: 1702427 - RNA, 19 nt, Artificial Sequence
  Description of Artificial Sequence: Synthetic oligonucleotide
  Sense strand starting at position 1485 of SEQ ID NO: 1561840
gcuaguguuugacuuacua

SEQ ID NO: 1702428 - RNA, 19 nt, Artificial Sequence
  Description of Artificial Sequence: Synthetic oligonucleotide
  Antisense strand to SEQ ID NO: 1702427
uaguaagucaaacacuagc

SEQ ID NO: 1702429 - RNA, 19 nt, Artificial Sequence
  Description of Artificial Sequence: Synthetic oligonucleotide
  Sense strand starting at position 1489 of SEQ ID NO: 1561840
guguuugacuuacuacaaa

SEQ ID NO: 1702430 - RNA, 19 nt, Artificial Sequence
  Description of Artificial Sequence: Synthetic oligonucleotide
  Antisense strand to SEQ ID NO: 1702429
uuuguaguaagucaaacac

SEQ ID NO: 1702431 - RNA, 19 nt, Artificial Sequence
  Description of Artificial Sequence: Synthetic oligonucleotide
  Sense strand starting at position 1521 of SEQ ID NO: 1561840
uggaaaugauaucauuauc

SEQ ID NO: 1702432 - RNA, 19 nt, Artificial Sequence
  Description of Artificial Sequence: Synthetic oligonucleotide
  Antisense strand to SEQ ID NO: 1702431
gauaaugauaucauuucca

SEQ ID NO: 1702433 - RNA, 19 nt, Artificial Sequence
  Description of Artificial Sequence: Synthetic oligonucleotide
  Sense strand starting at position 1588 of SEQ ID NO: 1561840
uugagcugguccucaaagu

SEQ ID NO: 1702434 - RNA, 19 nt, Artificial Sequence
  Description of Artificial Sequence: Synthetic oligonucleotide
  Antisense strand to SEQ ID NO: 1702433
acuuugaggaccagcucaa

SEQ ID NO: 1702435 - RNA, 19 nt, Artificial Sequence
  Description of Artificial Sequence: Synthetic oligonucleotide
  Sense strand starting at position 1718 of SEQ ID NO: 1561840
ggcaaacccuucccguaaa

SEQ ID NO: 1702436 - RNA, 19 nt, Artificial Sequence
  Description of Artificial Sequence: Synthetic oligonucleotide
  Antisense strand to SEQ ID NO: 1702435
uuuacgggaaggguuugcc

SEQ ID NO: 1702437 - RNA, 19 nt, Artificial Sequence
  Description of Artificial Sequence: Synthetic oligonucleotide
  Sense strand starting at position 1812 of SEQ ID NO: 1561840
uaacacgaacugugucaaa

SEQ ID NO: 1702438 - RNA, 19 nt, Artificial Sequence
  Description of Artificial Sequence: Synthetic oligonucleotide
  Antisense strand to SEQ ID NO: 1702437
uuugacacaguucguguua

SEQ ID NO: 1702439 - RNA, 19 nt, Artificial Sequence
  Description of Artificial Sequence: Synthetic oligonucleotide
  Sense strand starting at position 1857 of SEQ ID NO: 1561840
ccuugaguaucuuuccuga

SEQ ID NO: 1702440 - RNA, 19 nt, Artificial Sequence
  Description of Artificial Sequence: Synthetic oligonucleotide
  Antisense strand to SEQ ID NO: 1702439
ucaggaaagauacucaagg

SEQ ID NO: 1702441 - RNA, 19 nt, Artificial Sequence
  Description of Artificial Sequence: Synthetic oligonucleotide
  Sense strand starting at position 1859 of SEQ ID NO: 1561840
uugaguaucuuuccugaca

SEQ ID NO: 1702442 - RNA, 19 nt, Artificial Sequence
  Description of Artificial Sequence: Synthetic oligonucleotide
  Antisense strand to SEQ ID NO: 1702441
ugucaggaaagauacucaa

SEQ ID NO: 1702443 - RNA, 19 nt, Artificial Sequence
  Description of Artificial Sequence: Synthetic oligonucleotide
  Sense strand starting at position 1860 of SEQ ID NO: 1561840
ugaguaucuuuccugacag

SEQ ID NO: 1702444 - RNA, 19 nt, Artificial Sequence
  Description of Artificial Sequence: Synthetic oligonucleotide
  Antisense strand to SEQ ID NO: 1702443
cugucaggaaagauacuca

SEQ ID NO: 1702445 - RNA, 19 nt, Artificial Sequence
  Description of Artificial Sequence: Synthetic oligonucleotide
  Sense strand starting at position 2492 of SEQ ID NO: 1561840
gcaucuauuugugcaagau

SEQ ID NO: 1702446 - RNA, 19 nt, Artificial Sequence
  Description of Artificial Sequence: Synthetic oligonucleotide
  Antisense strand to SEQ ID NO: 1702445
aucuugcacaaauagaugc

SEQ ID NO: 1702447 - RNA, 19 nt, Artificial Sequence
  Description of Artificial Sequence: Synthetic oligonucleotide
  Sense strand starting at position 2655 of SEQ ID NO: 1561840
aaagguuccguguauauug

SEQ ID NO: 1702448 - RNA, 19 nt, Artificial Sequence
  Description of Artificial Sequence: Synthetic oligonucleotide
  Antisense strand to SEQ ID NO: 1702447
caauauacacggaaccuuu

SEQ ID NO: 1702449 - RNA, 19 nt, Artificial Sequence
  Description of Artificial Sequence: Synthetic oligonucleotide
  Sense strand starting at position 2919 of SEQ ID NO: 1561840
acugauugagccuaggagu

SEQ ID NO: 1702450 - RNA, 19 nt, Artificial Sequence
  Description of Artificial Sequence: Synthetic oligonucleotide
  Antisense strand to SEQ ID NO: 1702449
acuccuaggcucaaucagu

SEQ ID NO: 1702451 - RNA, 19 nt, Artificial Sequence
  Description of Artificial Sequence: Synthetic oligonucleotide
  Sense strand starting at position 3017 of SEQ ID NO: 1561840
auccuaugccauuggaguu

SEQ ID NO: 1702452 - RNA, 19 nt, Artificial Sequence
  Description of Artificial Sequence: Synthetic oligonucleotide
  Antisense strand to SEQ ID NO: 1702451
aacuccaauggcauaggau

SEQ ID NO: 1702453 - RNA, 19 nt, Artificial Sequence
  Description of Artificial Sequence: Synthetic oligonucleotide
  Sense strand starting at position 3035 of SEQ ID NO: 1561840
uuuggauacaagugugcua

SEQ ID NO: 1702454 - RNA, 19 nt, Artificial Sequence
  Description of Artificial Sequence: Synthetic oligonucleotide
  Antisense strand to SEQ ID NO: 1702453
uagcacacuuguauccaaa

SEQ ID NO: 1702455 - RNA, 19 nt, Artificial Sequence
  Description of Artificial Sequence: Synthetic oligonucleotide
  Sense strand starting at position 3074 of SEQ ID NO: 1561840
uugacauguucuuuauccu

SEQ ID NO: 1702456 - RNA, 19 nt, Artificial Sequence
  Description of Artificial Sequence: Synthetic oligonucleotide
  Antisense strand to SEQ ID NO: 1702455
aggauaaagaacaugucaa

SEQ ID NO: 1702457 - RNA, 19 nt, Artificial Sequence
  Description of Artificial Sequence: Synthetic oligonucleotide
  Sense strand starting at position 3075 of SEQ ID NO: 1561840
ugacauguucuuuauccua

SEQ ID NO: 1702458 - RNA, 19 nt, Artificial Sequence
  Description of Artificial Sequence: Synthetic oligonucleotide
  Antisense strand to SEQ ID NO: 1702457
uaggauaaagaacauguca

SEQ ID NO: 1702459 - RNA, 19 nt, Artificial Sequence
  Description of Artificial Sequence: Synthetic oligonucleotide
  Sense strand starting at position 3133 of SEQ ID NO: 1561840
gauggcaucucuguacaua

SEQ ID NO: 1702460 - RNA, 19 nt, Artificial Sequence
  Description of Artificial Sequence: Synthetic oligonucleotide
  Antisense strand to SEQ ID NO: 1702459
uauguacagagaugccauc

SEQ ID NO: 1702461 - RNA, 19 nt, Artificial Sequence
  Description of Artificial Sequence: Synthetic oligonucleotide
  Sense strand starting at position 3150 of SEQ ID NO: 1561840
uacuuaggugcuugccuaa

SEQ ID NO: 1702462 - RNA, 19 nt, Artificial Sequence
  Description of Artificial Sequence: Synthetic oligonucleotide
  Antisense strand to SEQ ID NO: 1702461
uuaggcaagcaccuaagua

SEQ ID NO: 1702463 - RNA, 19 nt, Artificial Sequence
  Description of Artificial Sequence: Synthetic oligonucleotide
  Sense strand starting at position 3190 of SEQ ID NO: 1561840
cuccuacaguguuuauuga

SEQ ID NO: 1702464 - RNA, 19 nt, Artificial Sequence
  Description of Artificial Sequence: Synthetic oligonucleotide
  Antisense strand to SEQ ID NO: 1702463
ucaauaaacacuguaggag

SEQ ID NO: 1702465 - RNA, 19 nt, Artificial Sequence
  Description of Artificial Sequence: Synthetic oligonucleotide
  Sense strand starting at position 3191 of SEQ ID NO: 1561840
uccuacaguguuuauugau

SEQ ID NO: 1702466 - RNA, 19 nt, Artificial Sequence
  Description of Artificial Sequence: Synthetic oligonucleotide
  Antisense strand to SEQ ID NO: 1702465
aucaauaaacacuguagga

SEQ ID NO: 1702467 - RNA, 19 nt, Artificial Sequence
  Description of Artificial Sequence: Synthetic oligonucleotide
  Sense strand starting at position 3197 of SEQ ID NO: 1561840
aguguuuauugauuggaau

SEQ ID NO: 1702468 - RNA, 19 nt, Artificial Sequence
  Description of Artificial Sequence: Synthetic oligonucleotide
  Antisense strand to SEQ ID NO: 1702467
auuccaaucaauaaacacu

SEQ ID NO: 1702469 - RNA, 19 nt, Artificial Sequence
  Description of Artificial Sequence: Synthetic oligonucleotide
  Sense strand starting at position 3198 of SEQ ID NO: 1561840
guguuuauugauuggaauu

SEQ ID NO: 1702470 - RNA, 19 nt, Artificial Sequence
  Description of Artificial Sequence: Synthetic oligonucleotide
  Antisense strand to SEQ ID NO: 1702469
aauuccaaucaauaaacac

SEQ ID NO: 1702471 - RNA, 19 nt, Artificial Sequence
  Description of Artificial Sequence: Synthetic oligonucleotide
  Sense strand starting at position 3235 of SEQ ID NO: 1561840
uuccuucgccgaugauuga

SEQ ID NO: 1702472 - RNA, 19 nt, Artificial Sequence
  Description of Artificial Sequence: Synthetic oligonucleotide
  Antisense strand to SEQ ID NO: 1702471
ucaaucaucggcgaaggaa

SEQ ID NO: 1702473 - RNA, 19 nt, Artificial Sequence
  Description of Artificial Sequence: Synthetic oligonucleotide
  Sense strand starting at position 3246 of SEQ ID NO: 1561840
augauugauggauggguuu

SEQ ID NO: 1702474 - RNA, 19 nt, Artificial Sequence
  Description of Artificial Sequence: Synthetic oligonucleotide
  Antisense strand to SEQ ID NO: 1702473
aaacccauccaucaaucau

SEQ ID NO: 1702475 - RNA, 19 nt, Artificial Sequence
  Description of Artificial Sequence: Synthetic oligonucleotide
  Sense strand starting at position 3248 of SEQ ID NO: 1561840
gauugauggauggguuucu

SEQ ID NO: 1702476 - RNA, 19 nt, Artificial Sequence
  Description of Artificial Sequence: Synthetic oligonucleotide
  Antisense strand to SEQ ID NO: 1702475
agaaacccauccaucaauc

SEQ ID NO: 1702477 - RNA, 19 nt, Artificial Sequence
  Description of Artificial Sequence: Synthetic oligonucleotide
  Sense strand starting at position 3270 of SEQ ID NO: 1561840
uggacuuacagguguguuu

SEQ ID NO: 1702478 - RNA, 19 nt, Artificial Sequence
  Description of Artificial Sequence: Synthetic oligonucleotide
  Antisense strand to SEQ ID NO: 1702477
aaacacaccuguaagucca

SEQ ID NO: 1702479 - RNA, 19 nt, Artificial Sequence
  Description of Artificial Sequence: Synthetic oligonucleotide
  Sense strand starting at position 3488 of SEQ ID NO: 1561840
guucccuuucuuggagaau

SEQ ID NO: 1702480 - RNA, 19 nt, Artificial Sequence
  Description of Artificial Sequence: Synthetic oligonucleotide
  Antisense strand to SEQ ID NO: 1702479
auucuccaagaaagggaac

SEQ ID NO: 1702481 - RNA, 19 nt, Artificial Sequence
  Description of Artificial Sequence: Synthetic oligonucleotide
  Sense strand starting at position 3491 of SEQ ID NO: 1561840
cccuuucuuggagaauggu

SEQ ID NO: 1702482 - RNA, 19 nt, Artificial Sequence
  Description of Artificial Sequence: Synthetic oligonucleotide
  Antisense strand to SEQ ID NO: 1702481
accauucuccaagaaaggg

SEQ ID NO: 1702483 - RNA, 19 nt, Artificial Sequence
  Description of Artificial Sequence: Synthetic oligonucleotide
  Sense strand starting at position 3527 of SEQ ID NO: 1561840
ccaggaucaugacuuaucu

SEQ ID NO: 1702484 - RNA, 19 nt, Artificial Sequence
  Description of Artificial Sequence: Synthetic oligonucleotide
  Antisense strand to SEQ ID NO: 1702483
agauaagucaugauccugg

SEQ ID NO: 1702485 - RNA, 19 nt, Artificial Sequence
  Description of Artificial Sequence: Synthetic oligonucleotide
  Sense strand starting at position 3874 of SEQ ID NO: 1561840
cagcaucuucccgggaaga

SEQ ID NO: 1702486 - RNA, 19 nt, Artificial Sequence
  Description of Artificial Sequence: Synthetic oligonucleotide
  Antisense strand to SEQ ID NO: 1702485
ucuucccgggaagaugcug

SEQ ID NO: 1702487 - RNA, 19 nt, Artificial Sequence
  Description of Artificial Sequence: Synthetic oligonucleotide
  Sense strand starting at position 3875 of SEQ ID NO: 1561840
agcaucuucccgggaagaa

SEQ ID NO: 1702488 - RNA, 19 nt, Artificial Sequence
  Description of Artificial Sequence: Synthetic oligonucleotide
  Antisense strand to SEQ ID NO: 1702487
uucuucccgggaagaugcu

SEQ ID NO: 1702489 - RNA, 19 nt, Artificial Sequence
  Description of Artificial Sequence: Synthetic oligonucleotide
  Sense strand starting at position 3876 of SEQ ID NO: 1561840
gcaucuucccgggaagaau

SEQ ID NO: 1702490 - RNA, 19 nt, Artificial Sequence
  Description of Artificial Sequence: Synthetic oligonucleotide
  Antisense strand to SEQ ID NO: 1702489
auucuucccgggaagaugc

SEQ ID NO: 1702491 - RNA, 19 nt, Artificial Sequence
  Description of Artificial Sequence: Synthetic oligonucleotide
  Sense strand starting at position 265 of SEQ ID NO: 1561841
cugccaucaucaguacuuu

SEQ ID NO: 1702492 - RNA, 19 nt, Artificial Sequence
  Description of Artificial Sequence: Synthetic oligonucleotide
  Antisense strand to SEQ ID NO: 1702491
aaaguacugaugauggcag

SEQ ID NO: 1702493 - RNA, 19 nt, Artificial Sequence
  Description of Artificial Sequence: Synthetic oligonucleotide
  Sense strand starting at position 310 of SEQ ID NO: 1561841
auaauagcccucugaggaa

SEQ ID NO: 1702494 - RNA, 19 nt, Artificial Sequence
  Description of Artificial Sequence: Synthetic oligonucleotide
  Antisense strand to SEQ ID NO: 1702493
uuccucagagggcuauuau

SEQ ID NO: 1702495 - RNA, 19 nt, Artificial Sequence
  Description of Artificial Sequence: Synthetic oligonucleotide
  Sense strand starting at position 405 of SEQ ID NO: 1561841
cagugagucagugggcaau

SEQ ID NO: 1702496 - RNA, 19 nt, Artificial Sequence
  Description of Artificial Sequence: Synthetic oligonucleotide
  Antisense strand to SEQ ID NO: 1702495
auugcccacugacucacug

SEQ ID NO: 1702497 - RNA, 19 nt, Artificial Sequence
  Description of Artificial Sequence: Synthetic oligonucleotide
  Sense strand starting at position 407 of SEQ ID NO: 1561841
gugagucagugggcaauau

SEQ ID NO: 1702498 - RNA, 19 nt, Artificial Sequence
  Description of Artificial Sequence: Synthetic oligonucleotide
  Antisense strand to SEQ ID NO: 1702497
auauugcccacugacucac

SEQ ID NO: 1702499 - RNA, 19 nt, Artificial Sequence
  Description of Artificial Sequence: Synthetic oligonucleotide
  Sense strand starting at position 411 of SEQ ID NO: 1561841
gucagugggcaauaugauu

SEQ ID NO: 1702500 - RNA, 19 nt, Artificial Sequence
  Description of Artificial Sequence: Synthetic oligonucleotide
  Antisense strand to SEQ ID NO: 1702499
aaucauauugcccacugac

SEQ ID NO: 1702501 - RNA, 19 nt, Artificial Sequence
  Description of Artificial Sequence: Synthetic oligonucleotide
  Sense strand starting at position 417 of SEQ ID NO: 1561841
gggcaauaugauuggugga

SEQ ID NO: 1702502 - RNA, 19 nt, Artificial Sequence
  Description of Artificial Sequence: Synthetic oligonucleotide
  Antisense strand to SEQ ID NO: 1702501
uccaccaaucauauugccc

SEQ ID NO: 1702503 - RNA, 19 nt, Artificial Sequence
  Description of Artificial Sequence: Synthetic oligonucleotide
  Sense strand starting at position 580 of SEQ ID NO: 1561841
aaguuugaguagucccagu

SEQ ID NO: 1702504 - RNA, 19 nt, Artificial Sequence
  Description of Artificial Sequence: Synthetic oligonucleotide
  Antisense strand to SEQ ID NO: 1702503
acugggacuacucaaacuu

SEQ ID NO: 1702505 - RNA, 19 nt, Artificial Sequence
  Description of Artificial Sequence: Synthetic oligonucleotide
  Sense strand starting at position 607 of SEQ ID NO: 1561841
cuaaguuccuaaguuauau

SEQ ID NO: 1702506 - RNA, 19 nt, Artificial Sequence
  Description of Artificial Sequence: Synthetic oligonucleotide
  Antisense strand to SEQ ID NO: 1702505
auauaacuuaggaacuuag

SEQ ID NO: 1702507 - RNA, 19 nt, Artificial Sequence
  Description of Artificial Sequence: Synthetic oligonucleotide
  Sense strand starting at position 700 of SEQ ID NO: 1561841
ccgcuuuccagaugaugaa

SEQ ID NO: 1702508 - RNA, 19 nt, Artificial Sequence
  Description of Artificial Sequence: Synthetic oligonucleotide
  Antisense strand to SEQ ID NO: 1702507
uucaucaucuggaaagcgg

SEQ ID NO: 1702509 - RNA, 19 nt, Artificial Sequence
  Description of Artificial Sequence: Synthetic oligonucleotide
  Sense strand starting at position 701 of SEQ ID NO: 1561841
cgcuuuccagaugaugaaa

SEQ ID NO: 1702510 - RNA, 19 nt, Artificial Sequence
  Description of Artificial Sequence: Synthetic oligonucleotide
  Antisense strand to SEQ ID NO: 1702509
uuucaucaucuggaaagcg

SEQ ID NO: 1702511 - RNA, 19 nt, Artificial Sequence
  Description of Artificial Sequence: Synthetic oligonucleotide
  Sense strand starting at position 715 of SEQ ID NO: 1561841
ugaaaugagccuggaccaa

SEQ ID NO: 1702512 - RNA, 19 nt, Artificial Sequence
  Description of Artificial Sequence: Synthetic oligonucleotide
  Antisense strand to SEQ ID NO: 1702511
uugguccaggcucauuuca

SEQ ID NO: 1702513 - RNA, 19 nt, Artificial Sequence
  Description of Artificial Sequence: Synthetic oligonucleotide
  Sense strand starting at position 743 of SEQ ID NO: 1561841
cuaagucuuugaguuccaa

SEQ ID NO: 1702514 - RNA, 19 nt, Artificial Sequence
  Description of Artificial Sequence: Synthetic oligonucleotide
  Antisense strand to SEQ ID NO: 1702513
uuggaacucaaagacuuag

SEQ ID NO: 1702515 - RNA, 19 nt, Artificial Sequence
  Description of Artificial Sequence: Synthetic oligonucleotide
  Sense strand starting at position 1489 of SEQ ID NO: 1561841
cggcuguuucugggaggga

SEQ ID NO: 1702516 - RNA, 19 nt, Artificial Sequence
  Description of Artificial Sequence: Synthetic oligonucleotide
  Antisense strand to SEQ ID NO: 1702515
ucccucccagaaacagccg

SEQ ID NO: 1702517 - RNA, 19 nt, Artificial Sequence
  Description of Artificial Sequence: Synthetic oligonucleotide
  Sense strand starting at position 1581 of SEQ ID NO: 1561841
gugagcaguccuggaagga

SEQ ID NO: 1702518 - RNA, 19 nt, Artificial Sequence
  Description of Artificial Sequence: Synthetic oligonucleotide
  Antisense strand to SEQ ID NO: 1702517
uccuuccaggacugcucac

SEQ ID NO: 1702519 - RNA, 19 nt, Artificial Sequence
  Description of Artificial Sequence: Synthetic oligonucleotide
  Sense strand starting at position 2037 of SEQ ID NO: 1561841
ccgugaaugucauuacuca

SEQ ID NO: 1702520 - RNA, 19 nt, Artificial Sequence
  Description of Artificial Sequence: Synthetic oligonucleotide
  Antisense strand to SEQ ID NO: 1702519
ugaguaaugacauucacgg

SEQ ID NO: 1702521 - RNA, 19 nt, Artificial Sequence
  Description of Artificial Sequence: Synthetic oligonucleotide
  Sense strand starting at position 2038 of SEQ ID NO: 1561841
cgugaaugucauuacucac

SEQ ID NO: 1702522 - RNA, 19 nt, Artificial Sequence
  Description of Artificial Sequence: Synthetic oligonucleotide
  Antisense strand to SEQ ID NO: 1702521
gugaguaaugacauucacg

SEQ ID NO: 1702523 - RNA, 19 nt, Artificial Sequence
  Description of Artificial Sequence: Synthetic oligonucleotide
  Sense strand starting at position 2198 of SEQ ID NO: 1561841
ccaaacagcucaguguauu

SEQ ID NO: 1702524 - RNA, 19 nt, Artificial Sequence
  Description of Artificial Sequence: Synthetic oligonucleotide
  Antisense strand to SEQ ID NO: 1702523
aauacacugagcuguuugg

SEQ ID NO: 1702525 - RNA, 19 nt, Artificial Sequence
  Description of Artificial Sequence: Synthetic oligonucleotide
  Sense strand starting at position 2281 of SEQ ID NO: 1561841
ggcaaauacuucuuaacug

SEQ ID NO: 1702526 - RNA, 19 nt, Artificial Sequence
  Description of Artificial Sequence: Synthetic oligonucleotide
  Antisense strand to SEQ ID NO: 1702525
caguuaagaaguauuugcc

SEQ ID NO: 1702527 - RNA, 19 nt, Artificial Sequence
  Description of Artificial Sequence: Synthetic oligonucleotide
  Sense strand starting at position 2323 of SEQ ID NO: 1561841
agaaauuagugucuggaaa

SEQ ID NO: 1702528 - RNA, 19 nt, Artificial Sequence
  Description of Artificial Sequence: Synthetic oligonucleotide
  Antisense strand to SEQ ID NO: 1702527
uuuccagacacuaauuucu

SEQ ID NO: 1702529 - RNA, 19 nt, Artificial Sequence
  Description of Artificial Sequence: Synthetic oligonucleotide
  Sense strand starting at position 2324 of SEQ ID NO: 1561841
gaaauuagugucuggaaau

SEQ ID NO: 1702530 - RNA, 19 nt, Artificial Sequence
  Description of Artificial Sequence: Synthetic oligonucleotide
  Antisense strand to SEQ ID NO: 1702529
auuuccagacacuaauuuc

SEQ ID NO: 1702531 - RNA, 19 nt, Artificial Sequence
  Description of Artificial Sequence: Synthetic oligonucleotide
  Sense strand starting at position 2357 of SEQ ID NO: 1561841
ugaagcuguuaucuucuaa

SEQ ID NO: 1702532 - RNA, 19 nt, Artificial Sequence
  Description of Artificial Sequence: Synthetic oligonucleotide
  Antisense strand to SEQ ID NO: 1702531
uuagaagauaacagcuuca

SEQ ID NO: 1702533 - RNA, 19 nt, Artificial Sequence
  Description of Artificial Sequence: Synthetic oligonucleotide
  Sense strand starting at position 2407 of SEQ ID NO: 1561841
ggaacagacuaugauuuau

SEQ ID NO: 1702534 - RNA, 19 nt, Artificial Sequence
  Description of Artificial Sequence: Synthetic oligonucleotide
  Antisense strand to SEQ ID NO: 1702533
auaaaucauagucuguucc

SEQ ID NO: 1702535 - RNA, 19 nt, Artificial Sequence
  Description of Artificial Sequence: Synthetic oligonucleotide
  Sense strand starting at position 2647 of SEQ ID NO: 1561841
uagccauaaggucaugaua

SEQ ID NO: 1702536 - RNA, 19 nt, Artificial Sequence
  Description of Artificial Sequence: Synthetic oligonucleotide
  Antisense strand to SEQ ID NO: 1702535
uaucaugaccuuauggcua

SEQ ID NO: 1702537 - RNA, 19 nt, Artificial Sequence
  Description of Artificial Sequence: Synthetic oligonucleotide
  Sense strand starting at position 2771 of SEQ ID NO: 1561841
gaaggcgaggcucagaaau

SEQ ID NO: 1702538 - RNA, 19 nt, Artificial Sequence
  Description of Artificial Sequence: Synthetic oligonucleotide
  Antisense strand to SEQ ID NO: 1702537
auuucugagccucgccuuc

SEQ ID NO: 1702539 - RNA, 19 nt, Artificial Sequence
  Description of Artificial Sequence: Synthetic oligonucleotide
  Sense strand starting at position 2924 of SEQ ID NO: 1561841
accuauacuuccguuacua

SEQ ID NO: 1702540 - RNA, 19 nt, Artificial Sequence
  Description of Artificial Sequence: Synthetic oligonucleotide
  Antisense strand to SEQ ID NO: 1702539
uaguaacggaaguauaggu

SEQ ID NO: 1702541 - RNA, 19 nt, Artificial Sequence
  Description of Artificial Sequence: Synthetic oligonucleotide
  Sense strand starting at position 2926 of SEQ ID NO: 1561841
cuauacuuccguuacuaua

SEQ ID NO: 1702542 - RNA, 19 nt, Artificial Sequence
  Description of Artificial Sequence: Synthetic oligonucleotide
  Antisense strand to SEQ ID NO: 1702541
uauaguaacggaaguauag

SEQ ID NO: 1702543 - RNA, 19 nt, Artificial Sequence
  Description of Artificial Sequence: Synthetic oligonucleotide
  Sense strand starting at position 2963 of SEQ ID NO: 1561841
auuuaccauugaggaaaua

SEQ ID NO: 1702544 - RNA, 19 nt, Artificial Sequence
  Description of Artificial Sequence: Synthetic oligonucleotide
  Antisense strand to SEQ ID NO: 1702543
uauuuccucaaugguaaau

SEQ ID NO: 1702545 - RNA, 19 nt, Artificial Sequence
  Description of Artificial Sequence: Synthetic oligonucleotide
  Sense strand starting at position 3024 of SEQ ID NO: 1561841
ggaagauaagcucaguccu

SEQ ID NO: 1702546 - RNA, 19 nt, Artificial Sequence
  Description of Artificial Sequence: Synthetic oligonucleotide
  Antisense strand to SEQ ID NO: 1702545
aggacugagcuuaucuucc

SEQ ID NO: 1702547 - RNA, 19 nt, Artificial Sequence
  Description of Artificial Sequence: Synthetic oligonucleotide
  Sense strand starting at position 3382 of SEQ ID NO: 1561841
cacaaucugguagguuuaa

SEQ ID NO: 1702548 - RNA, 19 nt, Artificial Sequence
  Description of Artificial Sequence: Synthetic oligonucleotide
  Antisense strand to SEQ ID NO: 1702547
uuaaaccuaccagauugug

SEQ ID NO: 1702549 - RNA, 19 nt, Artificial Sequence
  Description of Artificial Sequence: Synthetic oligonucleotide
  Sense strand starting at position 3398 of SEQ ID NO: 1561841
uaacaagugccauagguga

SEQ ID NO: 1702550 - RNA, 19 nt, Artificial Sequence
  Description of Artificial Sequence: Synthetic oligonucleotide
  Antisense strand to SEQ ID NO: 1702549
ucaccuauggcacuuguua

SEQ ID NO: 1702551 - RNA, 19 nt, Artificial Sequence
  Description of Artificial Sequence: Synthetic oligonucleotide
  Sense strand starting at position 3400 of SEQ ID NO: 1561841
acaagugccauaggugauu

SEQ ID NO: 1702552 - RNA, 19 nt, Artificial Sequence
  Description of Artificial Sequence: Synthetic oligonucleotide
  Antisense strand to SEQ ID NO: 1702551
aaucaccuauggcacuugu

SEQ ID NO: 1702553 - RNA, 19 nt, Artificial Sequence
  Description of Artificial Sequence: Synthetic oligonucleotide
  Sense strand starting at position 3405 of SEQ ID NO: 1561841
ugccauaggugauucucau

SEQ ID NO: 1702554 - RNA, 19 nt, Artificial Sequence
  Description of Artificial Sequence: Synthetic oligonucleotide
  Antisense strand to SEQ ID NO: 1702553
augagaaucaccuauggca

SEQ ID NO: 1702555 - RNA, 19 nt, Artificial Sequence
  Description of Artificial Sequence: Synthetic oligonucleotide
  Sense strand starting at position 3418 of SEQ ID NO: 1561841
ucucaugagaugcaagguu

SEQ ID NO: 1702556 - RNA, 19 nt, Artificial Sequence
  Description of Artificial Sequence: Synthetic oligonucleotide
  Antisense strand to SEQ ID NO: 1702555
aaccuugcaucucaugaga

SEQ ID NO: 1702557 - RNA, 19 nt, Artificial Sequence
  Description of Artificial Sequence: Synthetic oligonucleotide
  Sense strand starting at position 3425 of SEQ ID NO: 1561841
agaugcaagguuggugaua

SEQ ID NO: 1702558 - RNA, 19 nt, Artificial Sequence
  Description of Artificial Sequence: Synthetic oligonucleotide
  Antisense strand to SEQ ID NO: 1702557
uaucaccaaccuugcaucu

SEQ ID NO: 1702559 - RNA, 19 nt, Artificial Sequence
  Description of Artificial Sequence: Synthetic oligonucleotide
  Sense strand starting at position 3567 of SEQ ID NO: 1561841
gcaauagucagugaguucu

SEQ ID NO: 1702560 - RNA, 19 nt, Artificial Sequence
  Description of Artificial Sequence: Synthetic oligonucleotide
  Antisense strand to SEQ ID NO: 1702559
agaacucacugacuauugc

SEQ ID NO: 1702561 - RNA, 19 nt, Artificial Sequence
  Description of Artificial Sequence: Synthetic oligonucleotide
  Sense strand starting at position 3605 of SEQ ID NO: 1561841
aaaguauguggucaggaac

SEQ ID NO: 1702562 - RNA, 19 nt, Artificial Sequence
  Description of Artificial Sequence: Synthetic oligonucleotide
  Antisense strand to SEQ ID NO: 1702561
guuccugaccacauacuuu

SEQ ID NO: 1702563 - RNA, 19 nt, Artificial Sequence
  Description of Artificial Sequence: Synthetic oligonucleotide
  Sense strand starting at position 3608 of SEQ ID NO: 1561841
guauguggucaggaacaga

SEQ ID NO: 1702564 - RNA, 19 nt, Artificial Sequence
  Description of Artificial Sequence: Synthetic oligonucleotide
  Antisense strand to SEQ ID NO: 1702563
ucuguuccugaccacauac

SEQ ID NO: 1702565 - RNA, 19 nt, Artificial Sequence
  Description of Artificial Sequence: Synthetic oligonucleotide
  Sense strand starting at position 3890 of SEQ ID NO: 1561841
ucggguauuucuuuaucac

SEQ ID NO: 1702566 - RNA, 19 nt, Artificial Sequence
  Description of Artificial Sequence: Synthetic oligonucleotide
  Antisense strand to SEQ ID NO: 1702565
gugauaaagaaauacccga

SEQ ID NO: 1702567 - RNA, 19 nt, Artificial Sequence
  Description of Artificial Sequence: Synthetic oligonucleotide
  Sense strand starting at position 3910 of SEQ ID NO: 1561841
augugagaauggucuaaca

SEQ ID NO: 1702568 - RNA, 19 nt, Artificial Sequence
  Description of Artificial Sequence: Synthetic oligonucleotide
  Antisense strand to SEQ ID NO: 1702567
uguuagaccauucucacau

SEQ ID NO: 1702569 - RNA, 19 nt, Artificial Sequence
  Description of Artificial Sequence: Synthetic oligonucleotide
  Sense strand starting at position 3921 of SEQ ID NO: 1561841
gucuaacacagcugggaaa

SEQ ID NO: 1702570 - RNA, 19 nt, Artificial Sequence
  Description of Artificial Sequence: Synthetic oligonucleotide
  Antisense strand to SEQ ID NO: 1702569
uuucccagcuguguuagac

SEQ ID NO: 1702571 - RNA, 19 nt, Artificial Sequence
  Description of Artificial Sequence: Synthetic oligonucleotide
  Sense strand starting at position 151 of SEQ ID NO: 1561842
auaauagcccucugaggaa

SEQ ID NO: 1702572 - RNA, 19 nt, Artificial Sequence
  Description of Artificial Sequence: Synthetic oligonucleotide
  Antisense strand to SEQ ID NO: 1702571
uuccucagagggcuauuau

SEQ ID NO: 1702573 - RNA, 19 nt, Artificial Sequence
  Description of Artificial Sequence: Synthetic oligonucleotide
  Sense strand starting at position 252 of SEQ ID NO: 1561842
gucagugggcaauaugauu

SEQ ID NO: 1702574 - RNA, 19 nt, Artificial Sequence
  Description of Artificial Sequence: Synthetic oligonucleotide
  Antisense strand to SEQ ID NO: 1702573
aaucauauugcccacugac

SEQ ID NO: 1702575 - RNA, 19 nt, Artificial Sequence
  Description of Artificial Sequence: Synthetic oligonucleotide
  Sense strand starting at position 258 of SEQ ID NO: 1561842
gggcaauaugauuggugga

SEQ ID NO: 1702576 - RNA, 19 nt, Artificial Sequence
  Description of Artificial Sequence: Synthetic oligonucleotide
  Antisense strand to SEQ ID NO: 1702575
uccaccaaucauauugccc

SEQ ID NO: 1702577 - RNA, 19 nt, Artificial Sequence
  Description of Artificial Sequence: Synthetic oligonucleotide
  Sense strand starting at position 448 of SEQ ID NO: 1561842
cuaaguuccuaaguuauau

SEQ ID NO: 1702578 - RNA, 19 nt, Artificial Sequence
  Description of Artificial Sequence: Synthetic oligonucleotide
  Antisense strand to SEQ ID NO: 1702577
auauaacuuaggaacuuag

SEQ ID NO: 1702579 - RNA, 19 nt, Artificial Sequence
  Description of Artificial Sequence: Synthetic oligonucleotide
  Sense strand starting at position 541 of SEQ ID NO: 1561842
ccgcuuuccagaugaugaa

SEQ ID NO: 1702580 - RNA, 19 nt, Artificial Sequence
  Description of Artificial Sequence: Synthetic oligonucleotide
  Antisense strand to SEQ ID NO: 1702579
uucaucaucuggaaagcgg

SEQ ID NO: 1702581 - RNA, 19 nt, Artificial Sequence
  Description of Artificial Sequence: Synthetic oligonucleotide
  Sense strand starting at position 542 of SEQ ID NO: 1561842
cgcuuuccagaugaugaaa

SEQ ID NO: 1702582 - RNA, 19 nt, Artificial Sequence
  Description of Artificial Sequence: Synthetic oligonucleotide
  Antisense strand to SEQ ID NO: 1702581
uuucaucaucuggaaagcg

SEQ ID NO: 1702583 - RNA, 19 nt, Artificial Sequence
  Description of Artificial Sequence: Synthetic oligonucleotide
  Sense strand starting at position 556 of SEQ ID NO: 1561842
ugaaaugagccuggaccaa

SEQ ID NO: 1702584 - RNA, 19 nt, Artificial Sequence
  Description of Artificial Sequence: Synthetic oligonucleotide
  Antisense strand to SEQ ID NO: 1702583
uugguccaggcucauuuca

SEQ ID NO: 1702585 - RNA, 19 nt, Artificial Sequence
  Description of Artificial Sequence: Synthetic oligonucleotide
  Sense strand starting at position 584 of SEQ ID NO: 1561842
cuaagucuuugaguuccaa

SEQ ID NO: 1702586 - RNA, 19 nt, Artificial Sequence
  Description of Artificial Sequence: Synthetic oligonucleotide
  Antisense strand to SEQ ID NO: 1702585
uuggaacucaaagacuuag

SEQ ID NO: 1702587 - RNA, 19 nt, Artificial Sequence
  Description of Artificial Sequence: Synthetic oligonucleotide
  Sense strand starting at position 1422 of SEQ ID NO: 1561842
gugagcaguccuggaagga

SEQ ID NO: 1702588 - RNA, 19 nt, Artificial Sequence
  Description of Artificial Sequence: Synthetic oligonucleotide
  Antisense strand to SEQ ID NO: 1702587
uccuuccaggacugcucac

SEQ ID NO: 1702589 - RNA, 19 nt, Artificial Sequence
  Description of Artificial Sequence: Synthetic oligonucleotide
  Sense strand starting at position 1879 of SEQ ID NO: 1561842
cgugaaugucauuacucac

SEQ ID NO: 1702590 - RNA, 19 nt, Artificial Sequence
  Description of Artificial Sequence: Synthetic oligonucleotide
  Antisense strand to SEQ ID NO: 1702589
gugaguaaugacauucacg

SEQ ID NO: 1702591 - RNA, 19 nt, Artificial Sequence
  Description of Artificial Sequence: Synthetic oligonucleotide
  Sense strand starting at position 2122 of SEQ ID NO: 1561842
ggcaaauacuucuuaacug

SEQ ID NO: 1702592 - RNA, 19 nt, Artificial Sequence
  Description of Artificial Sequence: Synthetic oligonucleotide
  Antisense strand to SEQ ID NO: 1702591
caguuaagaaguauuugcc

SEQ ID NO: 1702593 - RNA, 19 nt, Artificial Sequence
  Description of Artificial Sequence: Synthetic oligonucleotide
  Sense strand starting at position 2164 of SEQ ID NO: 1561842
agaaauuagugucuggaaa

SEQ ID NO: 1702594 - RNA, 19 nt, Artificial Sequence
  Description of Artificial Sequence: Synthetic oligonucleotide
  Antisense strand to SEQ ID NO: 1702593
uuuccagacacuaauuucu

SEQ ID NO: 1702595 - RNA, 19 nt, Artificial Sequence
  Description of Artificial Sequence: Synthetic oligonucleotide
  Sense strand starting at position 2165 of SEQ ID NO: 1561842
gaaauuagugucuggaaau

SEQ ID NO: 1702596 - RNA, 19 nt, Artificial Sequence
  Description of Artificial Sequence: Synthetic oligonucleotide
  Antisense strand to SEQ ID NO: 1702595
auuuccagacacuaauuuc

SEQ ID NO: 1702597 - RNA, 19 nt, Artificial Sequence
  Description of Artificial Sequence: Synthetic oligonucleotide
  Sense strand starting at position 2198 of SEQ ID NO: 1561842
ugaagcuguuaucuucuaa

SEQ ID NO: 1702598 - RNA, 19 nt, Artificial Sequence
  Description of Artificial Sequence: Synthetic oligonucleotide
  Antisense strand to SEQ ID NO: 1702597
uuagaagauaacagcuuca

SEQ ID NO: 1702599 - RNA, 19 nt, Artificial Sequence
  Description of Artificial Sequence: Synthetic oligonucleotide
  Sense strand starting at position 2248 of SEQ ID NO: 1561842
ggaacagacuaugauuuau

SEQ ID NO: 1702600 - RNA, 19 nt, Artificial Sequence
  Description of Artificial Sequence: Synthetic oligonucleotide
  Antisense strand to SEQ ID NO: 1702599
auaaaucauagucuguucc

SEQ ID NO: 1702601 - RNA, 19 nt, Artificial Sequence
  Description of Artificial Sequence: Synthetic oligonucleotide
  Sense strand starting at position 2488 of SEQ ID NO: 1561842
uagccauaaggucaugaua

SEQ ID NO: 1702602 - RNA, 19 nt, Artificial Sequence
  Description of Artificial Sequence: Synthetic oligonucleotide
  Antisense strand to SEQ ID NO: 1702601
uaucaugaccuuauggcua

SEQ ID NO: 1702603 - RNA, 19 nt, Artificial Sequence
  Description of Artificial Sequence: Synthetic oligonucleotide
  Sense strand starting at position 2612 of SEQ ID NO: 1561842
gaaggcgaggcucagaaau

SEQ ID NO: 1702604 - RNA, 19 nt, Artificial Sequence
  Description of Artificial Sequence: Synthetic oligonucleotide
  Antisense strand to SEQ ID NO: 1702603
auuucugagccucgccuuc

SEQ ID NO: 1702605 - RNA, 19 nt, Artificial Sequence
  Description of Artificial Sequence: Synthetic oligonucleotide
  Sense strand starting at position 2765 of SEQ ID NO: 1561842
accuauacuuccguuacua

SEQ ID NO: 1702606 - RNA, 19 nt, Artificial Sequence
  Description of Artificial Sequence: Synthetic oligonucleotide
  Antisense strand to SEQ ID NO: 1702605
uaguaacggaaguauaggu

SEQ ID NO: 1702607 - RNA, 19 nt, Artificial Sequence
  Description of Artificial Sequence: Synthetic oligonucleotide
  Sense strand starting at position 2767 of SEQ ID NO: 1561842
cuauacuuccguuacuaua

SEQ ID NO: 1702608 - RNA, 19 nt, Artificial Sequence
  Description of Artificial Sequence: Synthetic oligonucleotide
  Antisense strand to SEQ ID NO: 1702607
uauaguaacggaaguauag

SEQ ID NO: 1702609 - RNA, 19 nt, Artificial Sequence
  Description of Artificial Sequence: Synthetic oligonucleotide
  Sense strand starting at position 2804 of SEQ ID NO: 1561842
auuuaccauugaggaaaua

SEQ ID NO: 1702610 - RNA, 19 nt, Artificial Sequence
  Description of Artificial Sequence: Synthetic oligonucleotide
  Antisense strand to SEQ ID NO: 1702609
uauuuccucaaugguaaau

SEQ ID NO: 1702611 - RNA, 19 nt, Artificial Sequence
  Description of Artificial Sequence: Synthetic oligonucleotide
  Sense strand starting at position 2865 of SEQ ID NO: 1561842
ggaagauaagcucaguccu

SEQ ID NO: 1702612 - RNA, 19 nt, Artificial Sequence
  Description of Artificial Sequence: Synthetic oligonucleotide
  Antisense strand to SEQ ID NO: 1702611
aggacugagcuuaucuucc

SEQ ID NO: 1702613 - RNA, 19 nt, Artificial Sequence
  Description of Artificial Sequence: Synthetic oligonucleotide
  Sense strand starting at position 3223 of SEQ ID NO: 1561842
cacaaucugguagguuuaa

SEQ ID NO: 1702614 - RNA, 19 nt, Artificial Sequence
  Description of Artificial Sequence: Synthetic oligonucleotide
  Antisense strand to SEQ ID NO: 1702613
uuaaaccuaccagauugug

SEQ ID NO: 1702615 - RNA, 19 nt, Artificial Sequence
  Description of Artificial Sequence: Synthetic oligonucleotide
  Sense strand starting at position 3239 of SEQ ID NO: 1561842
uaacaagugccauagguga

SEQ ID NO: 1702616 - RNA, 19 nt, Artificial Sequence
  Description of Artificial Sequence: Synthetic oligonucleotide
  Antisense strand to SEQ ID NO: 1702615
ucaccuauggcacuuguua

SEQ ID NO: 1702617 - RNA, 19 nt, Artificial Sequence
  Description of Artificial Sequence: Synthetic oligonucleotide
  Sense strand starting at position 3241 of SEQ ID NO: 1561842
acaagugccauaggugauu

SEQ ID NO: 1702618 - RNA, 19 nt, Artificial Sequence
  Description of Artificial Sequence: Synthetic oligonucleotide
  Antisense strand to SEQ ID NO: 1702617
aaucaccuauggcacuugu

SEQ ID NO: 1702619 - RNA, 19 nt, Artificial Sequence
  Description of Artificial Sequence: Synthetic oligonucleotide
  Sense strand starting at position 3246 of SEQ ID NO: 1561842
ugccauaggugauucucau

SEQ ID NO: 1702620 - RNA, 19 nt, Artificial Sequence
  Description of Artificial Sequence: Synthetic oligonucleotide
  Antisense strand to SEQ ID NO: 1702619
augagaaucaccuauggca

SEQ ID NO: 1702621 - RNA, 19 nt, Artificial Sequence
  Description of Artificial Sequence: Synthetic oligonucleotide
  Sense strand starting at position 3259 of SEQ ID NO: 1561842
ucucaugagaugcaagguu

SEQ ID NO: 1702622 - RNA, 19 nt, Artificial Sequence
  Description of Artificial Sequence: Synthetic oligonucleotide
  Antisense strand to SEQ ID NO: 1702621
aaccuugcaucucaugaga

SEQ ID NO: 1702623 - RNA, 19 nt, Artificial Sequence
  Description of Artificial Sequence: Synthetic oligonucleotide
  Sense strand starting at position 3266 of SEQ ID NO: 1561842
agaugcaagguuggugaua

SEQ ID NO: 1702624 - RNA, 19 nt, Artificial Sequence
  Description of Artificial Sequence: Synthetic oligonucleotide
  Antisense strand to SEQ ID NO: 1702623
uaucaccaaccuugcaucu

SEQ ID NO: 1702625 - RNA, 19 nt, Artificial Sequence
  Description of Artificial Sequence: Synthetic oligonucleotide
  Sense strand starting at position 3408 of SEQ ID NO: 1561842
gcaauagucagugaguucu

SEQ ID NO: 1702626 - RNA, 19 nt, Artificial Sequence
  Description of Artificial Sequence: Synthetic oligonucleotide
  Antisense strand to SEQ ID NO: 1702625
agaacucacugacuauugc

SEQ ID NO: 1702627 - RNA, 19 nt, Artificial Sequence
  Description of Artificial Sequence: Synthetic oligonucleotide
  Sense strand starting at position 3446 of SEQ ID NO: 1561842
aaaguauguggucaggaac

SEQ ID NO: 1702628 - RNA, 19 nt, Artificial Sequence
  Description of Artificial Sequence: Synthetic oligonucleotide
  Antisense strand to SEQ ID NO: 1702627
guuccugaccacauacuuu

SEQ ID NO: 1702629 - RNA, 19 nt, Artificial Sequence
  Description of Artificial Sequence: Synthetic oligonucleotide
  Sense strand starting at position 3449 of SEQ ID NO: 1561842
guauguggucaggaacaga

SEQ ID NO: 1702630 - RNA, 19 nt, Artificial Sequence
  Description of Artificial Sequence: Synthetic oligonucleotide
  Antisense strand to SEQ ID NO: 1702629
ucuguuccugaccacauac

SEQ ID NO: 1702631 - RNA, 19 nt, Artificial Sequence
  Description of Artificial Sequence: Synthetic oligonucleotide
  Sense strand starting at position 3731 of SEQ ID NO: 1561842
ucggguauuucuuuaucac

SEQ ID NO: 1702632 - RNA, 19 nt, Artificial Sequence
  Description of Artificial Sequence: Synthetic oligonucleotide
  Antisense strand to SEQ ID NO: 1702631
gugauaaagaaauacccga

SEQ ID NO: 1702633 - RNA, 19 nt, Artificial Sequence
  Description of Artificial Sequence: Synthetic oligonucleotide
  Sense strand starting at position 3751 of SEQ ID NO: 1561842
augugagaauggucuaaca

SEQ ID NO: 1702634 - RNA, 19 nt, Artificial Sequence
  Description of Artificial Sequence: Synthetic oligonucleotide
  Antisense strand to SEQ ID NO: 1702633
uguuagaccauucucacau

SEQ ID NO: 1702635 - RNA, 19 nt, Artificial Sequence
  Description of Artificial Sequence: Synthetic oligonucleotide
  Sense strand starting at position 3762 of SEQ ID NO: 1561842
gucuaacacagcugggaaa

SEQ ID NO: 1702636 - RNA, 19 nt, Artificial Sequence
  Description of Artificial Sequence: Synthetic oligonucleotide
  Antisense strand to SEQ ID NO: 1702635
uuucccagcuguguuagac

SEQ ID NO: 1702637 - RNA, 19 nt, Artificial Sequence
  Description of Artificial Sequence: Synthetic oligonucleotide
  Sense strand starting at position 3868 of SEQ ID NO: 1561842
ugagauucggcucaucauc

SEQ ID NO: 1702638 - RNA, 19 nt, Artificial Sequence
  Description of Artificial Sequence: Synthetic oligonucleotide
  Antisense strand to SEQ ID NO: 1702637
gaugaugagccgaaucuca

SEQ ID NO: 1702639 - RNA, 19 nt, Artificial Sequence
  Description of Artificial Sequence: Synthetic oligonucleotide
  Sense strand starting at position 3876 of SEQ ID NO: 1561842
ggcucaucaucugugaaau

SEQ ID NO: 1702640 - RNA, 19 nt, Artificial Sequence
  Description of Artificial Sequence: Synthetic oligonucleotide
  Antisense strand to SEQ ID NO: 1702639
auuucacagaugaugagcc

SEQ ID NO: 1702641 - RNA, 19 nt, Artificial Sequence
  Description of Artificial Sequence: Synthetic oligonucleotide
  Sense strand starting at position 3877 of SEQ ID NO: 1561842
gcucaucaucugugaaaua

SEQ ID NO: 1702642 - RNA, 19 nt, Artificial Sequence
  Description of Artificial Sequence: Synthetic oligonucleotide
  Antisense strand to SEQ ID NO: 1702641
uauuucacagaugaugagc

SEQ ID NO: 1702643 - RNA, 19 nt, Artificial Sequence
  Description of Artificial Sequence: Synthetic oligonucleotide
  Sense strand starting at position 3902 of SEQ ID NO: 1561842
augauaacugcaugaggca

SEQ ID NO: 1702644 - RNA, 19 nt, Artificial Sequence
  Description of Artificial Sequence: Synthetic oligonucleotide
  Antisense strand to SEQ ID NO: 1702643
ugccucaugcaguuaucau

SEQ ID NO: 1702645 - RNA, 19 nt, Artificial Sequence
  Description of Artificial Sequence: Synthetic oligonucleotide
  Sense strand starting at position 3941 of SEQ ID NO: 1561842
agagaucuguguucucagu

SEQ ID NO: 1702646 - RNA, 19 nt, Artificial Sequence
  Description of Artificial Sequence: Synthetic oligonucleotide
  Antisense strand to SEQ ID NO: 1702645
acugagaacacagaucucu

SEQ ID NO: 1702647 - RNA, 19 nt, Artificial Sequence
  Description of Artificial Sequence: Synthetic oligonucleotide
  Sense strand starting at position 3949 of SEQ ID NO: 1561842
guguucucaguccauagga

SEQ ID NO: 1702648 - RNA, 19 nt, Artificial Sequence
  Description of Artificial Sequence: Synthetic oligonucleotide
  Antisense strand to SEQ ID NO: 1702647
uccuauggacugagaacac

SEQ ID NO: 1702649 - RNA, 19 nt, Artificial Sequence
  Description of Artificial Sequence: Synthetic oligonucleotide
  Sense strand starting at position 3951 of SEQ ID NO: 1561842
guucucaguccauaggaca

SEQ ID NO: 1702650 - RNA, 19 nt, Artificial Sequence
  Description of Artificial Sequence: Synthetic oligonucleotide
  Antisense strand to SEQ ID NO: 1702649
uguccuauggacugagaac

SEQ ID NO: 1702651 - RNA, 19 nt, Artificial Sequence
  Description of Artificial Sequence: Synthetic oligonucleotide
  Sense strand starting at position 492 of SEQ ID NO: 1561843
cccauauagguguacagau

SEQ ID NO: 1702652 - RNA, 19 nt, Artificial Sequence
  Description of Artificial Sequence: Synthetic oligonucleotide
  Antisense strand to SEQ ID NO: 1702651
aucuguacaccuauauggg

SEQ ID NO: 1702653 - RNA, 19 nt, Artificial Sequence
  Description of Artificial Sequence: Synthetic oligonucleotide
  Sense strand starting at position 534 of SEQ ID NO: 1561843
gaaggagcuuucccaaggu

SEQ ID NO: 1702654 - RNA, 19 nt, Artificial Sequence
  Description of Artificial Sequence: Synthetic oligonucleotide
  Antisense strand to SEQ ID NO: 1702653
accuugggaaagcuccuuc

SEQ ID NO: 1702655 - RNA, 19 nt, Artificial Sequence
  Description of Artificial Sequence: Synthetic oligonucleotide
  Sense strand starting at position 538 of SEQ ID NO: 1561843
gagcuuucccaaggucaua

SEQ ID NO: 1702656 - RNA, 19 nt, Artificial Sequence
  Description of Artificial Sequence: Synthetic oligonucleotide
  Antisense strand to SEQ ID NO: 1702655
uaugaccuugggaaagcuc

SEQ ID NO: 1702657 - RNA, 19 nt, Artificial Sequence
  Description of Artificial Sequence: Synthetic oligonucleotide
  Sense strand starting at position 548 of SEQ ID NO: 1561843
aaggucauacugcgaguua

SEQ ID NO: 1702658 - RNA, 19 nt, Artificial Sequence
  Description of Artificial Sequence: Synthetic oligonucleotide
  Antisense strand to SEQ ID NO: 1702657
uaacucgcaguaugaccuu

SEQ ID NO: 1702659 - RNA, 19 nt, Artificial Sequence
  Description of Artificial Sequence: Synthetic oligonucleotide
  Sense strand starting at position 674 of SEQ ID NO: 1561843
ggcaaaguugcagaagcau

SEQ ID NO: 1702660 - RNA, 19 nt, Artificial Sequence
  Description of Artificial Sequence: Synthetic oligonucleotide
  Antisense strand to SEQ ID NO: 1702659
augcuucugcaacuuugcc

SEQ ID NO: 1702661 - RNA, 19 nt, Artificial Sequence
  Description of Artificial Sequence: Synthetic oligonucleotide
  Sense strand starting at position 735 of SEQ ID NO: 1561843
ccuacaaaccugugaagcu

SEQ ID NO: 1702662 - RNA, 19 nt, Artificial Sequence
  Description of Artificial Sequence: Synthetic oligonucleotide
  Antisense strand to SEQ ID NO: 1702661
agcuucacagguuuguagg

SEQ ID NO: 1702663 - RNA, 19 nt, Artificial Sequence
  Description of Artificial Sequence: Synthetic oligonucleotide
  Sense strand starting at position 742 of SEQ ID NO: 1561843
accugugaagcuuggaaag

SEQ ID NO: 1702664 - RNA, 19 nt, Artificial Sequence
  Description of Artificial Sequence: Synthetic oligonucleotide
  Antisense strand to SEQ ID NO: 1702663
cuuuccaagcuucacaggu

SEQ ID NO: 1702665 - RNA, 19 nt, Artificial Sequence
  Description of Artificial Sequence: Synthetic oligonucleotide
  Sense strand starting at position 806 of SEQ ID NO: 1561843
cucggaaucuggucuccaa

SEQ ID NO: 1702666 - RNA, 19 nt, Artificial Sequence
  Description of Artificial Sequence: Synthetic oligonucleotide
  Antisense strand to SEQ ID NO: 1702665
uuggagaccagauuccgag

SEQ ID NO: 1702667 - RNA, 19 nt, Artificial Sequence
  Description of Artificial Sequence: Synthetic oligonucleotide
  Sense strand starting at position 849 of SEQ ID NO: 1561843
gucucuucucuaggcuuua

SEQ ID NO: 1702668 - RNA, 19 nt, Artificial Sequence
  Description of Artificial Sequence: Synthetic oligonucleotide
  Antisense strand to SEQ ID NO: 1702667
uaaagccuagagaagagac

SEQ ID NO: 1702669 - RNA, 19 nt, Artificial Sequence
  Description of Artificial Sequence: Synthetic oligonucleotide
  Sense strand starting at position 943 of SEQ ID NO: 1561843
uaggaucugcuauguguga

SEQ ID NO: 1702670 - RNA, 19 nt, Artificial Sequence
  Description of Artificial Sequence: Synthetic oligonucleotide
  Antisense strand to SEQ ID NO: 1702669
ucacacauagcagauccua

SEQ ID NO: 1702671 - RNA, 19 nt, Artificial Sequence
  Description of Artificial Sequence: Synthetic oligonucleotide
  Sense strand starting at position 945 of SEQ ID NO: 1561843
ggaucugcuaugugugaga

SEQ ID NO: 1702672 - RNA, 19 nt, Artificial Sequence
  Description of Artificial Sequence: Synthetic oligonucleotide
  Antisense strand to SEQ ID NO: 1702671
ucucacacauagcagaucc

SEQ ID NO: 1702673 - RNA, 19 nt, Artificial Sequence
  Description of Artificial Sequence: Synthetic oligonucleotide
  Sense strand starting at position 947 of SEQ ID NO: 1561843
aucugcuaugugugagaua

SEQ ID NO: 1702674 - RNA, 19 nt, Artificial Sequence
  Description of Artificial Sequence: Synthetic oligonucleotide
  Antisense strand to SEQ ID NO: 1702673
uaucucacacauagcagau

SEQ ID NO: 1702675 - RNA, 19 nt, Artificial Sequence
  Description of Artificial Sequence: Synthetic oligonucleotide
  Sense strand starting at position 954 of SEQ ID NO: 1561843
augugugagauauguguca

SEQ ID NO: 1702676 - RNA, 19 nt, Artificial Sequence
  Description of Artificial Sequence: Synthetic oligonucleotide
  Antisense strand to SEQ ID NO: 1702675
ugacacauaucucacacau

SEQ ID NO: 1702677 - RNA, 19 nt, Artificial Sequence
  Description of Artificial Sequence: Synthetic oligonucleotide
  Sense strand starting at position 1111 of SEQ ID NO: 1561843
gcccuuugucaauaaagcu

SEQ ID NO: 1702678 - RNA, 19 nt, Artificial Sequence
  Description of Artificial Sequence: Synthetic oligonucleotide
  Antisense strand to SEQ ID NO: 1702677
agcuuuauugacaaagggc

SEQ ID NO: 1702679 - RNA, 19 nt, Artificial Sequence
  Description of Artificial Sequence: Synthetic oligonucleotide
  Sense strand starting at position 1117 of SEQ ID NO: 1561843
ugucaauaaagcuggugau

SEQ ID NO: 1702680 - RNA, 19 nt, Artificial Sequence
  Description of Artificial Sequence: Synthetic oligonucleotide
  Antisense strand to SEQ ID NO: 1702679
aucaccagcuuuauugaca

SEQ ID NO: 1702681 - RNA, 19 nt, Artificial Sequence
  Description of Artificial Sequence: Synthetic oligonucleotide
  Sense strand starting at position 1672 of SEQ ID NO: 1561843
agaugaauuccagguccag

SEQ ID NO: 1702682 - RNA, 19 nt, Artificial Sequence
  Description of Artificial Sequence: Synthetic oligonucleotide
  Antisense strand to SEQ ID NO: 1702681
cuggaccuggaauucaucu

SEQ ID NO: 1702683 - RNA, 19 nt, Artificial Sequence
  Description of Artificial Sequence: Synthetic oligonucleotide
  Sense strand starting at position 1987 of SEQ ID NO: 1561843
uaacucguucuugaaagga

SEQ ID NO: 1702684 - RNA, 19 nt, Artificial Sequence
  Description of Artificial Sequence: Synthetic oligonucleotide
  Antisense strand to SEQ ID NO: 1702683
uccuuucaagaacgaguua

SEQ ID NO: 1702685 - RNA, 19 nt, Artificial Sequence
  Description of Artificial Sequence: Synthetic oligonucleotide
  Sense strand starting at position 1991 of SEQ ID NO: 1561843
ucguucuugaaaggagaaa

SEQ ID NO: 1702686 - RNA, 19 nt, Artificial Sequence
  Description of Artificial Sequence: Synthetic oligonucleotide
  Antisense strand to SEQ ID NO: 1702685
uuucuccuuucaagaacga

SEQ ID NO: 1702687 - RNA, 19 nt, Artificial Sequence
  Description of Artificial Sequence: Synthetic oligonucleotide
  Sense strand starting at position 2060 of SEQ ID NO: 1561843
uuguauaaggcugagggau

SEQ ID NO: 1702688 - RNA, 19 nt, Artificial Sequence
  Description of Artificial Sequence: Synthetic oligonucleotide
  Antisense strand to SEQ ID NO: 1702687
aucccucagccuuauacaa

SEQ ID NO: 1702689 - RNA, 19 nt, Artificial Sequence
  Description of Artificial Sequence: Synthetic oligonucleotide
  Sense strand starting at position 2062 of SEQ ID NO: 1561843
guauaaggcugagggauuu

SEQ ID NO: 1702690 - RNA, 19 nt, Artificial Sequence
  Description of Artificial Sequence: Synthetic oligonucleotide
  Antisense strand to SEQ ID NO: 1702689
aaaucccucagccuuauac

SEQ ID NO: 1702691 - RNA, 19 nt, Artificial Sequence
  Description of Artificial Sequence: Synthetic oligonucleotide
  Sense strand starting at position 2090 of SEQ ID NO: 1561843
ggaagaauggcguaaugcu

SEQ ID NO: 1702692 - RNA, 19 nt, Artificial Sequence
  Description of Artificial Sequence: Synthetic oligonucleotide
  Antisense strand to SEQ ID NO: 1702691
agcauuacgccauucuucc

SEQ ID NO: 1702693 - RNA, 19 nt, Artificial Sequence
  Description of Artificial Sequence: Synthetic oligonucleotide
  Sense strand starting at position 2098 of SEQ ID NO: 1561843
ggcguaaugcugccugugu

SEQ ID NO: 1702694 - RNA, 19 nt, Artificial Sequence
  Description of Artificial Sequence: Synthetic oligonucleotide
  Antisense strand to SEQ ID NO: 1702693
acacaggcagcauuacgcc

SEQ ID NO: 1702695 - RNA, 19 nt, Artificial Sequence
  Description of Artificial Sequence: Synthetic oligonucleotide
  Sense strand starting at position 2142 of SEQ ID NO: 1561843
uuugaauccuuuccaguga

SEQ ID NO: 1702696 - RNA, 19 nt, Artificial Sequence
  Description of Artificial Sequence: Synthetic oligonucleotide
  Antisense strand to SEQ ID NO: 1702695
ucacuggaaaggauucaaa

SEQ ID NO: 1702697 - RNA, 19 nt, Artificial Sequence
  Description of Artificial Sequence: Synthetic oligonucleotide
  Sense strand starting at position 2297 of SEQ ID NO: 1561843
augucaugcugucuaaacu

SEQ ID NO: 1702698 - RNA, 19 nt, Artificial Sequence
  Description of Artificial Sequence: Synthetic oligonucleotide
  Antisense strand to SEQ ID NO: 1702697
aguuuagacagcaugacau

SEQ ID NO: 1702699 - RNA, 19 nt, Artificial Sequence
  Description of Artificial Sequence: Synthetic oligonucleotide
  Sense strand starting at position 2314 of SEQ ID NO: 1561843
cucauuuaagugcgauaua

SEQ ID NO: 1702700 - RNA, 19 nt, Artificial Sequence
  Description of Artificial Sequence: Synthetic oligonucleotide
  Antisense strand to SEQ ID NO: 1702699
uauaucgcacuuaaaugag

SEQ ID NO: 1702701 - RNA, 19 nt, Artificial Sequence
  Description of Artificial Sequence: Synthetic oligonucleotide
  Sense strand starting at position 2487 of SEQ ID NO: 1561843
ccacuuucccgaggagaga

SEQ ID NO: 1702702 - RNA, 19 nt, Artificial Sequence
  Description of Artificial Sequence: Synthetic oligonucleotide
  Antisense strand to SEQ ID NO: 1702701
ucucuccucgggaaagugg

SEQ ID NO: 1702703 - RNA, 19 nt, Artificial Sequence
  Description of Artificial Sequence: Synthetic oligonucleotide
  Sense strand starting at position 2507 of SEQ ID NO: 1561843
gcugaagaaugagcucaaa

SEQ ID NO: 1702704 - RNA, 19 nt, Artificial Sequence
  Description of Artificial Sequence: Synthetic oligonucleotide
  Antisense strand to SEQ ID NO: 1702703
uuugagcucauucuucagc

SEQ ID NO: 1702705 - RNA, 19 nt, Artificial Sequence
  Description of Artificial Sequence: Synthetic oligonucleotide
  Sense strand starting at position 2558 of SEQ ID NO: 1561843
guuuguaguuaaguucuua

SEQ ID NO: 1702706 - RNA, 19 nt, Artificial Sequence
  Description of Artificial Sequence: Synthetic oligonucleotide
  Antisense strand to SEQ ID NO: 1702705
uaagaacuuaacuacaaac

SEQ ID NO: 1702707 - RNA, 19 nt, Artificial Sequence
  Description of Artificial Sequence: Synthetic oligonucleotide
  Sense strand starting at position 2562 of SEQ ID NO: 1561843
guaguuaaguucuuagagu

SEQ ID NO: 1702708 - RNA, 19 nt, Artificial Sequence
  Description of Artificial Sequence: Synthetic oligonucleotide
  Antisense strand to SEQ ID NO: 1702707
acucuaagaacuuaacuac

SEQ ID NO: 1702709 - RNA, 19 nt, Artificial Sequence
  Description of Artificial Sequence: Synthetic oligonucleotide
  Sense strand starting at position 2622 of SEQ ID NO: 1561843
ugauuuguuaugcgugugu

SEQ ID NO: 1702710 - RNA, 19 nt, Artificial Sequence
  Description of Artificial Sequence: Synthetic oligonucleotide
  Antisense strand to SEQ ID NO: 1702709
acacacgcauaacaaauca

SEQ ID NO: 1702711 - RNA, 19 nt, Artificial Sequence
  Description of Artificial Sequence: Synthetic oligonucleotide
  Sense strand starting at position 2840 of SEQ ID NO: 1561843
cccaaaugccauugacuga

SEQ ID NO: 1702712 - RNA, 19 nt, Artificial Sequence
  Description of Artificial Sequence: Synthetic oligonucleotide
  Antisense strand to SEQ ID NO: 1702711
ucagucaauggcauuuggg

SEQ ID NO: 1702713 - RNA, 19 nt, Artificial Sequence
  Description of Artificial Sequence: Synthetic oligonucleotide
  Sense strand starting at position 2847 of SEQ ID NO: 1561843
gccauugacugagugcaua

SEQ ID NO: 1702714 - RNA, 19 nt, Artificial Sequence
  Description of Artificial Sequence: Synthetic oligonucleotide
  Antisense strand to SEQ ID NO: 1702713
uaugcacucagucaauggc

SEQ ID NO: 1702715 - RNA, 19 nt, Artificial Sequence
  Description of Artificial Sequence: Synthetic oligonucleotide
  Sense strand starting at position 2881 of SEQ ID NO: 1561843
ggcacugucgcccuuaagu

SEQ ID NO: 1702716 - RNA, 19 nt, Artificial Sequence
  Description of Artificial Sequence: Synthetic oligonucleotide
  Antisense strand to SEQ ID NO: 1702715
acuuaagggcgacagugcc

SEQ ID NO: 1702717 - RNA, 19 nt, Artificial Sequence
  Description of Artificial Sequence: Synthetic oligonucleotide
  Sense strand starting at position 2951 of SEQ ID NO: 1561843
agagacguccucugaguuu

SEQ ID NO: 1702718 - RNA, 19 nt, Artificial Sequence
  Description of Artificial Sequence: Synthetic oligonucleotide
  Antisense strand to SEQ ID NO: 1702717
aaacucagaggacgucucu

SEQ ID NO: 1702719 - RNA, 19 nt, Artificial Sequence
  Description of Artificial Sequence: Synthetic oligonucleotide
  Sense strand starting at position 3333 of SEQ ID NO: 1561843
ggcacaauuucccacauga

SEQ ID NO: 1702720 - RNA, 19 nt, Artificial Sequence
  Description of Artificial Sequence: Synthetic oligonucleotide
  Antisense strand to SEQ ID NO: 1702719
ucaugugggaaauugugcc

SEQ ID NO: 1702721 - RNA, 19 nt, Artificial Sequence
  Description of Artificial Sequence: Synthetic oligonucleotide
  Sense strand starting at position 3404 of SEQ ID NO: 1561843
cuuaaagugccucauugaa

SEQ ID NO: 1702722 - RNA, 19 nt, Artificial Sequence
  Description of Artificial Sequence: Synthetic oligonucleotide
  Antisense strand to SEQ ID NO: 1702721
uucaaugaggcacuuuaag

SEQ ID NO: 1702723 - RNA, 19 nt, Artificial Sequence
  Description of Artificial Sequence: Synthetic oligonucleotide
  Sense strand starting at position 3406 of SEQ ID NO: 1561843
uaaagugccucauugaagu

SEQ ID NO: 1702724 - RNA, 19 nt, Artificial Sequence
  Description of Artificial Sequence: Synthetic oligonucleotide
  Antisense strand to SEQ ID NO: 1702723
acuucaaugaggcacuuua

SEQ ID NO: 1702725 - RNA, 19 nt, Artificial Sequence
  Description of Artificial Sequence: Synthetic oligonucleotide
  Sense strand starting at position 3562 of SEQ ID NO: 1561843
uccugagaaguuuagcuga

SEQ ID NO: 1702726 - RNA, 19 nt, Artificial Sequence
  Description of Artificial Sequence: Synthetic oligonucleotide
  Antisense strand to SEQ ID NO: 1702725
ucagcuaaacuucucagga

SEQ ID NO: 1702727 - RNA, 19 nt, Artificial Sequence
  Description of Artificial Sequence: Synthetic oligonucleotide
  Sense strand starting at position 3564 of SEQ ID NO: 1561843
cugagaaguuuagcugaaa

SEQ ID NO: 1702728 - RNA, 19 nt, Artificial Sequence
  Description of Artificial Sequence: Synthetic oligonucleotide
  Antisense strand to SEQ ID NO: 1702727
uuucagcuaaacuucucag

SEQ ID NO: 1702729 - RNA, 19 nt, Artificial Sequence
  Description of Artificial Sequence: Synthetic oligonucleotide
  Sense strand starting at position 3695 of SEQ ID NO: 1561843
gcaauagucagauaggcuu

SEQ ID NO: 1702730 - RNA, 19 nt, Artificial Sequence
  Description of Artificial Sequence: Synthetic oligonucleotide
  Antisense strand to SEQ ID NO: 1702729
aagccuaucugacuauugc

SEQ ID NO: 1702731 - RNA, 19 nt, Artificial Sequence
  Description of Artificial Sequence: Synthetic oligonucleotide
  Sense strand starting at position 319 of SEQ ID NO: 1561844
ggcugcuccuagucucuua

SEQ ID NO: 1702732 - RNA, 19 nt, Artificial Sequence
  Description of Artificial Sequence: Synthetic oligonucleotide
  Antisense strand to SEQ ID NO: 1702731
uaagagacuaggagcagcc

SEQ ID NO: 1702733 - RNA, 19 nt, Artificial Sequence
  Description of Artificial Sequence: Synthetic oligonucleotide
  Sense strand starting at position 507 of SEQ ID NO: 1561844
uccugaugcucccuugagu

SEQ ID NO: 1702734 - RNA, 19 nt, Artificial Sequence
  Description of Artificial Sequence: Synthetic oligonucleotide
  Antisense strand to SEQ ID NO: 1702733
acucaagggagcaucagga

SEQ ID NO: 1702735 - RNA, 19 nt, Artificial Sequence
  Description of Artificial Sequence: Synthetic oligonucleotide
  Sense strand starting at position 608 of SEQ ID NO: 1561844
agcucuggccacugaagaa

SEQ ID NO: 1702736 - RNA, 19 nt, Artificial Sequence
  Description of Artificial Sequence: Synthetic oligonucleotide
  Antisense strand to SEQ ID NO: 1702735
uucuucaguggccagagcu

SEQ ID NO: 1702737 - RNA, 19 nt, Artificial Sequence
  Description of Artificial Sequence: Synthetic oligonucleotide
  Sense strand starting at position 659 of SEQ ID NO: 1561844
cagagaagucccugacgac

SEQ ID NO: 1702738 - RNA, 19 nt, Artificial Sequence
  Description of Artificial Sequence: Synthetic oligonucleotide
  Antisense strand to SEQ ID NO: 1702737
gucgucagggacuucucug

SEQ ID NO: 1702739 - RNA, 19 nt, Artificial Sequence
  Description of Artificial Sequence: Synthetic oligonucleotide
  Sense strand starting at position 1117 of SEQ ID NO: 1561844
uggcaauggcugugucuuu

SEQ ID NO: 1702740 - RNA, 19 nt, Artificial Sequence
  Description of Artificial Sequence: Synthetic oligonucleotide
  Antisense strand to SEQ ID NO: 1702739
aaagacacagccauugcca

SEQ ID NO: 1702741 - RNA, 19 nt, Artificial Sequence
  Description of Artificial Sequence: Synthetic oligonucleotide
  Sense strand starting at position 1152 of SEQ ID NO: 1561844
ccgcguggugagagugauu

SEQ ID NO: 1702742 - RNA, 19 nt, Artificial Sequence
  Description of Artificial Sequence: Synthetic oligonucleotide
  Antisense strand to SEQ ID NO: 1702741
aaucacucucaccacgcgg

SEQ ID NO: 1702743 - RNA, 19 nt, Artificial Sequence
  Description of Artificial Sequence: Synthetic oligonucleotide
  Sense strand starting at position 1210 of SEQ ID NO: 1561844
aacauagcucgagggcuua

SEQ ID NO: 1702744 - RNA, 19 nt, Artificial Sequence
  Description of Artificial Sequence: Synthetic oligonucleotide
  Antisense strand to SEQ ID NO: 1702743
uaagcccucgagcuauguu

SEQ ID NO: 1702745 - RNA, 19 nt, Artificial Sequence
  Description of Artificial Sequence: Synthetic oligonucleotide
  Sense strand starting at position 1223 of SEQ ID NO: 1561844
ggcuuagaauggucccuga

SEQ ID NO: 1702746 - RNA, 19 nt, Artificial Sequence
  Description of Artificial Sequence: Synthetic oligonucleotide
  Antisense strand to SEQ ID NO: 1702745
ucagggaccauucuaagcc

SEQ ID NO: 1702747 - RNA, 19 nt, Artificial Sequence
  Description of Artificial Sequence: Synthetic oligonucleotide
  Sense strand starting at position 1226 of SEQ ID NO: 1561844
uuagaauggucccugagug

SEQ ID NO: 1702748 - RNA, 19 nt, Artificial Sequence
  Description of Artificial Sequence: Synthetic oligonucleotide
  Antisense strand to SEQ ID NO: 1702747
cacucagggaccauucuaa

SEQ ID NO: 1702749 - RNA, 19 nt, Artificial Sequence
  Description of Artificial Sequence: Synthetic oligonucleotide
  Sense strand starting at position 1516 of SEQ ID NO: 1561844
acacuacacucgguaaagu

SEQ ID NO: 1702750 - RNA, 19 nt, Artificial Sequence
  Description of Artificial Sequence: Synthetic oligonucleotide
  Antisense strand to SEQ ID NO: 1702749
acuuuaccgaguguagugu

SEQ ID NO: 1702751 - RNA, 19 nt, Artificial Sequence
  Description of Artificial Sequence: Synthetic oligonucleotide
  Sense strand starting at position 1868 of SEQ ID NO: 1561844
ggaauaucuugcccuccca

SEQ ID NO: 1702752 - RNA, 19 nt, Artificial Sequence
  Description of Artificial Sequence: Synthetic oligonucleotide
  Antisense strand to SEQ ID NO: 1702751
ugggagggcaagauauucc

SEQ ID NO: 1702753 - RNA, 19 nt, Artificial Sequence
  Description of Artificial Sequence: Synthetic oligonucleotide
  Sense strand starting at position 2094 of SEQ ID NO: 1561844
ccagcugucugcgcugaua

SEQ ID NO: 1702754 - RNA, 19 nt, Artificial Sequence
  Description of Artificial Sequence: Synthetic oligonucleotide
  Antisense strand to SEQ ID NO: 1702753
uaucagcgcagacagcugg

SEQ ID NO: 1702755 - RNA, 19 nt, Artificial Sequence
  Description of Artificial Sequence: Synthetic oligonucleotide
  Sense strand starting at position 2294 of SEQ ID NO: 1561844
uggucucucccaugcuaaa

SEQ ID NO: 1702756 - RNA, 19 nt, Artificial Sequence
  Description of Artificial Sequence: Synthetic oligonucleotide
  Antisense strand to SEQ ID NO: 1702755
uuuagcaugggagagacca

SEQ ID NO: 1702757 - RNA, 19 nt, Artificial Sequence
  Description of Artificial Sequence: Synthetic oligonucleotide
  Sense strand starting at position 2313 of SEQ ID NO: 1561844
cuaggaacgcuaugaaaca

SEQ ID NO: 1702758 - RNA, 19 nt, Artificial Sequence
  Description of Artificial Sequence: Synthetic oligonucleotide
  Antisense strand to SEQ ID NO: 1702757
uguuucauagcguuccuag

SEQ ID NO: 1702759 - RNA, 19 nt, Artificial Sequence
  Description of Artificial Sequence: Synthetic oligonucleotide
  Sense strand starting at position 2632 of SEQ ID NO: 1561844
ucauuacagcuaggaaacu

SEQ ID NO: 1702760 - RNA, 19 nt, Artificial Sequence
  Description of Artificial Sequence: Synthetic oligonucleotide
  Antisense strand to SEQ ID NO: 1702759
aguuuccuagcuguaauga

SEQ ID NO: 1702761 - RNA, 19 nt, Artificial Sequence
  Description of Artificial Sequence: Synthetic oligonucleotide
  Sense strand starting at position 2644 of SEQ ID NO: 1561844
ggaaacuaaccuugguaca

SEQ ID NO: 1702762 - RNA, 19 nt, Artificial Sequence
  Description of Artificial Sequence: Synthetic oligonucleotide
  Antisense strand to SEQ ID NO: 1702761
uguaccaagguuaguuucc

SEQ ID NO: 1702763 - RNA, 19 nt, Artificial Sequence
  Description of Artificial Sequence: Synthetic oligonucleotide
  Sense strand starting at position 2658 of SEQ ID NO: 1561844
guacaauccuguuaacgaa

SEQ ID NO: 1702764 - RNA, 19 nt, Artificial Sequence
  Description of Artificial Sequence: Synthetic oligonucleotide
  Antisense strand to SEQ ID NO: 1702763
uucguuaacaggauuguac

SEQ ID NO: 1702765 - RNA, 19 nt, Artificial Sequence
  Description of Artificial Sequence: Synthetic oligonucleotide
  Sense strand starting at position 2756 of SEQ ID NO: 1561844
acaguugucuccuuauucu

SEQ ID NO: 1702766 - RNA, 19 nt, Artificial Sequence
  Description of Artificial Sequence: Synthetic oligonucleotide
  Antisense strand to SEQ ID NO: 1702765
agaauaaggagacaacugu

SEQ ID NO: 1702767 - RNA, 19 nt, Artificial Sequence
  Description of Artificial Sequence: Synthetic oligonucleotide
  Sense strand starting at position 2827 of SEQ ID NO: 1561844
gaagaauccuggccaguua

SEQ ID NO: 1702768 - RNA, 19 nt, Artificial Sequence
  Description of Artificial Sequence: Synthetic oligonucleotide
  Antisense strand to SEQ ID NO: 1702767
uaacuggccaggauucuuc

SEQ ID NO: 1702769 - RNA, 19 nt, Artificial Sequence
  Description of Artificial Sequence: Synthetic oligonucleotide
  Sense strand starting at position 2850 of SEQ ID NO: 1561844
gcagaauguuucucuugag

SEQ ID NO: 1702770 - RNA, 19 nt, Artificial Sequence
  Description of Artificial Sequence: Synthetic oligonucleotide
  Antisense strand to SEQ ID NO: 1702769
cucaagagaaacauucugc

SEQ ID NO: 1702771 - RNA, 19 nt, Artificial Sequence
  Description of Artificial Sequence: Synthetic oligonucleotide
  Sense strand starting at position 2851 of SEQ ID NO: 1561844
cagaauguuucucuugagu

SEQ ID NO: 1702772 - RNA, 19 nt, Artificial Sequence
  Description of Artificial Sequence: Synthetic oligonucleotide
  Antisense strand to SEQ ID NO: 1702771
acucaagagaaacauucug

SEQ ID NO: 1702773 - RNA, 19 nt, Artificial Sequence
  Description of Artificial Sequence: Synthetic oligonucleotide
  Sense strand starting at position 2854 of SEQ ID NO: 1561844
aauguuucucuugaguugu

SEQ ID NO: 1702774 - RNA, 19 nt, Artificial Sequence
  Description of Artificial Sequence: Synthetic oligonucleotide
  Antisense strand to SEQ ID NO: 1702773
acaacucaagagaaacauu

SEQ ID NO: 1702775 - RNA, 19 nt, Artificial Sequence
  Description of Artificial Sequence: Synthetic oligonucleotide
  Sense strand starting at position 2860 of SEQ ID NO: 1561844
ucucuugaguugucugaug

SEQ ID NO: 1702776 - RNA, 19 nt, Artificial Sequence
  Description of Artificial Sequence: Synthetic oligonucleotide
  Antisense strand to SEQ ID NO: 1702775
caucagacaacucaagaga

SEQ ID NO: 1702777 - RNA, 19 nt, Artificial Sequence
  Description of Artificial Sequence: Synthetic oligonucleotide
  Sense strand starting at position 2862 of SEQ ID NO: 1561844
ucuugaguugucugauguu

SEQ ID NO: 1702778 - RNA, 19 nt, Artificial Sequence
  Description of Artificial Sequence: Synthetic oligonucleotide
  Antisense strand to SEQ ID NO: 1702777
aacaucagacaacucaaga

SEQ ID NO: 1702779 - RNA, 19 nt, Artificial Sequence
  Description of Artificial Sequence: Synthetic oligonucleotide
  Sense strand starting at position 3417 of SEQ ID NO: 1561844
ggguguguuccuuacuauu

SEQ ID NO: 1702780 - RNA, 19 nt, Artificial Sequence
  Description of Artificial Sequence: Synthetic oligonucleotide
  Antisense strand to SEQ ID NO: 1702779
aauaguaaggaacacaccc

SEQ ID NO: 1702781 - RNA, 19 nt, Artificial Sequence
  Description of Artificial Sequence: Synthetic oligonucleotide
  Sense strand starting at position 3419 of SEQ ID NO: 1561844
guguguuccuuacuauuau

SEQ ID NO: 1702782 - RNA, 19 nt, Artificial Sequence
  Description of Artificial Sequence: Synthetic oligonucleotide
  Antisense strand to SEQ ID NO: 1702781
auaauaguaaggaacacac

SEQ ID NO: 1702783 - RNA, 19 nt, Artificial Sequence
  Description of Artificial Sequence: Synthetic oligonucleotide
  Sense strand starting at position 3428 of SEQ ID NO: 1561844
uuacuauuauaaggagcaa

SEQ ID NO: 1702784 - RNA, 19 nt, Artificial Sequence
  Description of Artificial Sequence: Synthetic oligonucleotide
  Antisense strand to SEQ ID NO: 1702783
uugcuccuuauaauaguaa

SEQ ID NO: 1702785 - RNA, 19 nt, Artificial Sequence
  Description of Artificial Sequence: Synthetic oligonucleotide
  Sense strand starting at position 3495 of SEQ ID NO: 1561844
gggagaagucccugcugaa

SEQ ID NO: 1702786 - RNA, 19 nt, Artificial Sequence
  Description of Artificial Sequence: Synthetic oligonucleotide
  Antisense strand to SEQ ID NO: 1702785
uucagcagggacuucuccc

SEQ ID NO: 1702787 - RNA, 19 nt, Artificial Sequence
  Description of Artificial Sequence: Synthetic oligonucleotide
  Sense strand starting at position 3498 of SEQ ID NO: 1561844
agaagucccugcugaagau

SEQ ID NO: 1702788 - RNA, 19 nt, Artificial Sequence
  Description of Artificial Sequence: Synthetic oligonucleotide
  Antisense strand to SEQ ID NO: 1702787
aucuucagcagggacuucu

SEQ ID NO: 1702789 - RNA, 19 nt, Artificial Sequence
  Description of Artificial Sequence: Synthetic oligonucleotide
  Sense strand starting at position 3499 of SEQ ID NO: 1561844
gaagucccugcugaagaua

SEQ ID NO: 1702790 - RNA, 19 nt, Artificial Sequence
  Description of Artificial Sequence: Synthetic oligonucleotide
  Antisense strand to SEQ ID NO: 1702789
uaucuucagcagggacuuc

SEQ ID NO: 1702791 - RNA, 19 nt, Artificial Sequence
  Description of Artificial Sequence: Synthetic oligonucleotide
  Sense strand starting at position 3533 of SEQ ID NO: 1561844
gcucaauugcaaugccagu

SEQ ID NO: 1702792 - RNA, 19 nt, Artificial Sequence
  Description of Artificial Sequence: Synthetic oligonucleotide
  Antisense strand to SEQ ID NO: 1702791
acuggcauugcaauugagc

SEQ ID NO: 1702793 - RNA, 19 nt, Artificial Sequence
  Description of Artificial Sequence: Synthetic oligonucleotide
  Sense strand starting at position 3597 of SEQ ID NO: 1561844
ccuagaacauggucacuuu

SEQ ID NO: 1702794 - RNA, 19 nt, Artificial Sequence
  Description of Artificial Sequence: Synthetic oligonucleotide
  Antisense strand to SEQ ID NO: 1702793
aaagugaccauguucuagg

SEQ ID NO: 1702795 - RNA, 19 nt, Artificial Sequence
  Description of Artificial Sequence: Synthetic oligonucleotide
  Sense strand starting at position 3637 of SEQ ID NO: 1561844
aguacaucugucugugguu

SEQ ID NO: 1702796 - RNA, 19 nt, Artificial Sequence
  Description of Artificial Sequence: Synthetic oligonucleotide
  Antisense strand to SEQ ID NO: 1702795
aaccacagacagauguacu

SEQ ID NO: 1702797 - RNA, 19 nt, Artificial Sequence
  Description of Artificial Sequence: Synthetic oligonucleotide
  Sense strand starting at position 3638 of SEQ ID NO: 1561844
guacaucugucugugguuu

SEQ ID NO: 1702798 - RNA, 19 nt, Artificial Sequence
  Description of Artificial Sequence: Synthetic oligonucleotide
  Antisense strand to SEQ ID NO: 1702797
aaaccacagacagauguac

SEQ ID NO: 1702799 - RNA, 19 nt, Artificial Sequence
  Description of Artificial Sequence: Synthetic oligonucleotide
  Sense strand starting at position 3704 of SEQ ID NO: 1561844
gugcuuuccgcugugcuaa

SEQ ID NO: 1702800 - RNA, 19 nt, Artificial Sequence
  Description of Artificial Sequence: Synthetic oligonucleotide
  Antisense strand to SEQ ID NO: 1702799
uuagcacagcggaaagcac

SEQ ID NO: 1702801 - RNA, 19 nt, Artificial Sequence
  Description of Artificial Sequence: Synthetic oligonucleotide
  Sense strand starting at position 3784 of SEQ ID NO: 1561844
cgacaucuguuaccggaaa

SEQ ID NO: 1702802 - RNA, 19 nt, Artificial Sequence
  Description of Artificial Sequence: Synthetic oligonucleotide
  Antisense strand to SEQ ID NO: 1702801
uuuccgguaacagaugucg

SEQ ID NO: 1702803 - RNA, 19 nt, Artificial Sequence
  Description of Artificial Sequence: Synthetic oligonucleotide
  Sense strand starting at position 3785 of SEQ ID NO: 1561844
gacaucuguuaccggaaag

SEQ ID NO: 1702804 - RNA, 19 nt, Artificial Sequence
  Description of Artificial Sequence: Synthetic oligonucleotide
  Antisense strand to SEQ ID NO: 1702803
cuuuccgguaacagauguc

SEQ ID NO: 1702805 - RNA, 19 nt, Artificial Sequence
  Description of Artificial Sequence: Synthetic oligonucleotide
  Sense strand starting at position 3970 of SEQ ID NO: 1561844
guuguuucuggaugaucug

SEQ ID NO: 1702806 - RNA, 19 nt, Artificial Sequence
  Description of Artificial Sequence: Synthetic oligonucleotide
  Antisense strand to SEQ ID NO: 1702805
cagaucauccagaaacaac

SEQ ID NO: 1702807 - RNA, 19 nt, Artificial Sequence
  Description of Artificial Sequence: Synthetic oligonucleotide
  Sense strand starting at position 3973 of SEQ ID NO: 1561844
guuucuggaugaucugcua

SEQ ID NO: 1702808 - RNA, 19 nt, Artificial Sequence
  Description of Artificial Sequence: Synthetic oligonucleotide
  Antisense strand to SEQ ID NO: 1702807
uagcagaucauccagaaac

SEQ ID NO: 1702809 - RNA, 19 nt, Artificial Sequence
  Description of Artificial Sequence: Synthetic oligonucleotide
  Sense strand starting at position 3976 of SEQ ID NO: 1561844
ucuggaugaucugcuaaac

SEQ ID NO: 1702810 - RNA, 19 nt, Artificial Sequence
  Description of Artificial Sequence: Synthetic oligonucleotide
  Antisense strand to SEQ ID NO: 1702809
guuuagcagaucauccaga

SEQ ID NO: 1702811 - RNA, 19 nt, Artificial Sequence
  Description of Artificial Sequence: Synthetic oligonucleotide
  Sense strand starting at position 213 of SEQ ID NO: 1561845
ggauaaggucuugaugcug

SEQ ID NO: 1702812 - RNA, 19 nt, Artificial Sequence
  Description of Artificial Sequence: Synthetic oligonucleotide
  Antisense strand to SEQ ID NO: 1702811
cagcaucaagaccuuaucc

SEQ ID NO: 1702813 - RNA, 19 nt, Artificial Sequence
  Description of Artificial Sequence: Synthetic oligonucleotide
  Sense strand starting at position 219 of SEQ ID NO: 1561845
ggucuugaugcuggagaaa

SEQ ID NO: 1702814 - RNA, 19 nt, Artificial Sequence
  Description of Artificial Sequence: Synthetic oligonucleotide
  Antisense strand to SEQ ID NO: 1702813
uuucuccagcaucaagacc

SEQ ID NO: 1702815 - RNA, 19 nt, Artificial Sequence
  Description of Artificial Sequence: Synthetic oligonucleotide
  Sense strand starting at position 293 of SEQ ID NO: 1561845
guaaucagauaauugcaca

SEQ ID NO: 1702816 - RNA, 19 nt, Artificial Sequence
  Description of Artificial Sequence: Synthetic oligonucleotide
  Antisense strand to SEQ ID NO: 1702815
ugugcaauuaucugauuac

SEQ ID NO: 1702817 - RNA, 19 nt, Artificial Sequence
  Description of Artificial Sequence: Synthetic oligonucleotide
  Sense strand starting at position 332 of SEQ ID NO: 1561845
gguaaaugcuaagacauuu

SEQ ID NO: 1702818 - RNA, 19 nt, Artificial Sequence
  Description of Artificial Sequence: Synthetic oligonucleotide
  Antisense strand to SEQ ID NO: 1702817
aaaugucuuagcauuuacc

SEQ ID NO: 1702819 - RNA, 19 nt, Artificial Sequence
  Description of Artificial Sequence: Synthetic oligonucleotide
  Sense strand starting at position 383 of SEQ ID NO: 1561845
uccaaucucuaggucaaga

SEQ ID NO: 1702820 - RNA, 19 nt, Artificial Sequence
  Description of Artificial Sequence: Synthetic oligonucleotide
  Antisense strand to SEQ ID NO: 1702819
ucuugaccuagagauugga

SEQ ID NO: 1702821 - RNA, 19 nt, Artificial Sequence
  Description of Artificial Sequence: Synthetic oligonucleotide
  Sense strand starting at position 462 of SEQ ID NO: 1561845
gccuguugucgcuugguga

SEQ ID NO: 1702822 - RNA, 19 nt, Artificial Sequence
  Description of Artificial Sequence: Synthetic oligonucleotide
  Antisense strand to SEQ ID NO: 1702821
ucaccaagcgacaacaggc

SEQ ID NO: 1702823 - RNA, 19 nt, Artificial Sequence
  Description of Artificial Sequence: Synthetic oligonucleotide
  Sense strand starting at position 499 of SEQ ID NO: 1561845
ccagaagucucacuccuga

SEQ ID NO: 1702824 - RNA, 19 nt, Artificial Sequence
  Description of Artificial Sequence: Synthetic oligonucleotide
  Antisense strand to SEQ ID NO: 1702823
ucaggagugagacuucugg

SEQ ID NO: 1702825 - RNA, 19 nt, Artificial Sequence
  Description of Artificial Sequence: Synthetic oligonucleotide
  Sense strand starting at position 544 of SEQ ID NO: 1561845
gcugauauccaucaugaca

SEQ ID NO: 1702826 - RNA, 19 nt, Artificial Sequence
  Description of Artificial Sequence: Synthetic oligonucleotide
  Antisense strand to SEQ ID NO: 1702825
ugucaugauggauaucagc

SEQ ID NO: 1702827 - RNA, 19 nt, Artificial Sequence
  Description of Artificial Sequence: Synthetic oligonucleotide
  Sense strand starting at position 886 of SEQ ID NO: 1561845
gagguagaaggaugcucua

SEQ ID NO: 1702828 - RNA, 19 nt, Artificial Sequence
  Description of Artificial Sequence: Synthetic oligonucleotide
  Antisense strand to SEQ ID NO: 1702827
uagagcauccuucuaccuc

SEQ ID NO: 1702829 - RNA, 19 nt, Artificial Sequence
  Description of Artificial Sequence: Synthetic oligonucleotide
  Sense strand starting at position 889 of SEQ ID NO: 1561845
guagaaggaugcucuaaug

SEQ ID NO: 1702830 - RNA, 19 nt, Artificial Sequence
  Description of Artificial Sequence: Synthetic oligonucleotide
  Antisense strand to SEQ ID NO: 1702829
cauuagagcauccuucuac

SEQ ID NO: 1702831 - RNA, 19 nt, Artificial Sequence
  Description of Artificial Sequence: Synthetic oligonucleotide
  Sense strand starting at position 899 of SEQ ID NO: 1561845
gcucuaaugccaggaagug

SEQ ID NO: 1702832 - RNA, 19 nt, Artificial Sequence
  Description of Artificial Sequence: Synthetic oligonucleotide
  Antisense strand to SEQ ID NO: 1702831
cacuuccuggcauuagagc

SEQ ID NO: 1702833 - RNA, 19 nt, Artificial Sequence
  Description of Artificial Sequence: Synthetic oligonucleotide
  Sense strand starting at position 900 of SEQ ID NO: 1561845
cucuaaugccaggaaguga

SEQ ID NO: 1702834 - RNA, 19 nt, Artificial Sequence
  Description of Artificial Sequence: Synthetic oligonucleotide
  Antisense strand to SEQ ID NO: 1702833
ucacuuccuggcauuagag

SEQ ID NO: 1702835 - RNA, 19 nt, Artificial Sequence
  Description of Artificial Sequence: Synthetic oligonucleotide
  Sense strand starting at position 1126 of SEQ ID NO: 1561845
ggagacugcuuccuaggga

SEQ ID NO: 1702836 - RNA, 19 nt, Artificial Sequence
  Description of Artificial Sequence: Synthetic oligonucleotide
  Antisense strand to SEQ ID NO: 1702835
ucccuaggaagcagucucc

SEQ ID NO: 1702837 - RNA, 19 nt, Artificial Sequence
  Description of Artificial Sequence: Synthetic oligonucleotide
  Sense strand starting at position 1129 of SEQ ID NO: 1561845
gacugcuuccuagggagca

SEQ ID NO: 1702838 - RNA, 19 nt, Artificial Sequence
  Description of Artificial Sequence: Synthetic oligonucleotide
  Antisense strand to SEQ ID NO: 1702837
ugcucccuaggaagcaguc

SEQ ID NO: 1702839 - RNA, 19 nt, Artificial Sequence
  Description of Artificial Sequence: Synthetic oligonucleotide
  Sense strand starting at position 1142 of SEQ ID NO: 1561845
ggagcagaguaccuuacua

SEQ ID NO: 1702840 - RNA, 19 nt, Artificial Sequence
  Description of Artificial Sequence: Synthetic oligonucleotide
  Antisense strand to SEQ ID NO: 1702839
uaguaagguacucugcucc

SEQ ID NO: 1702841 - RNA, 19 nt, Artificial Sequence
  Description of Artificial Sequence: Synthetic oligonucleotide
  Sense strand starting at position 1144 of SEQ ID NO: 1561845
agcagaguaccuuacuaau

SEQ ID NO: 1702842 - RNA, 19 nt, Artificial Sequence
  Description of Artificial Sequence: Synthetic oligonucleotide
  Antisense strand to SEQ ID NO: 1702841
auuaguaagguacucugcu

SEQ ID NO: 1702843 - RNA, 19 nt, Artificial Sequence
  Description of Artificial Sequence: Synthetic oligonucleotide
  Sense strand starting at position 1196 of SEQ ID NO: 1561845
ggguaauccacaggagagu

SEQ ID NO: 1702844 - RNA, 19 nt, Artificial Sequence
  Description of Artificial Sequence: Synthetic oligonucleotide
  Antisense strand to SEQ ID NO: 1702843
acucuccuguggauuaccc

SEQ ID NO: 1702845 - RNA, 19 nt, Artificial Sequence
  Description of Artificial Sequence: Synthetic oligonucleotide
  Sense strand starting at position 1445 of SEQ ID NO: 1561845
guccucuguggcuagagaa

SEQ ID NO: 1702846 - RNA, 19 nt, Artificial Sequence
  Description of Artificial Sequence: Synthetic oligonucleotide
  Antisense strand to SEQ ID NO: 1702845
uucucuagccacagaggac

SEQ ID NO: 1702847 - RNA, 19 nt, Artificial Sequence
  Description of Artificial Sequence: Synthetic oligonucleotide
  Sense strand starting at position 1465 of SEQ ID NO: 1561845
gcccucuucugggugauca

SEQ ID NO: 1702848 - RNA, 19 nt, Artificial Sequence
  Description of Artificial Sequence: Synthetic oligonucleotide
  Antisense strand to SEQ ID NO: 1702847
ugaucacccagaagagggc

SEQ ID NO: 1702849 - RNA, 19 nt, Artificial Sequence
  Description of Artificial Sequence: Synthetic oligonucleotide
  Sense strand starting at position 1467 of SEQ ID NO: 1561845
ccucuucugggugaucaca

SEQ ID NO: 1702850 - RNA, 19 nt, Artificial Sequence
  Description of Artificial Sequence: Synthetic oligonucleotide
  Antisense strand to SEQ ID NO: 1702849
ugugaucacccagaagagg

SEQ ID NO: 1702851 - RNA, 19 nt, Artificial Sequence
  Description of Artificial Sequence: Synthetic oligonucleotide
  Sense strand starting at position 1525 of SEQ ID NO: 1561845
uuaguugguucuucccaga

SEQ ID NO: 1702852 - RNA, 19 nt, Artificial Sequence
  Description of Artificial Sequence: Synthetic oligonucleotide
  Antisense strand to SEQ ID NO: 1702851
ucugggaagaaccaacuaa

SEQ ID NO: 1702853 - RNA, 19 nt, Artificial Sequence
  Description of Artificial Sequence: Synthetic oligonucleotide
  Sense strand starting at position 1530 of SEQ ID NO: 1561845
ugguucuucccagaaggua

SEQ ID NO: 1702854 - RNA, 19 nt, Artificial Sequence
  Description of Artificial Sequence: Synthetic oligonucleotide
  Antisense strand to SEQ ID NO: 1702853
uaccuucugggaagaacca

SEQ ID NO: 1702855 - RNA, 19 nt, Artificial Sequence
  Description of Artificial Sequence: Synthetic oligonucleotide
  Sense strand starting at position 2397 of SEQ ID NO: 1561845
cuugaauuccgagauccuc

SEQ ID NO: 1702856 - RNA, 19 nt, Artificial Sequence
  Description of Artificial Sequence: Synthetic oligonucleotide
  Antisense strand to SEQ ID NO: 1702855
gaggaucucggaauucaag

SEQ ID NO: 1702857 - RNA, 19 nt, Artificial Sequence
  Description of Artificial Sequence: Synthetic oligonucleotide
  Sense strand starting at position 2641 of SEQ ID NO: 1561845
guguuaggaucuuugaaag

SEQ ID NO: 1702858 - RNA, 19 nt, Artificial Sequence
  Description of Artificial Sequence: Synthetic oligonucleotide
  Antisense strand to SEQ ID NO: 1702857
cuuucaaagauccuaacac

SEQ ID NO: 1702859 - RNA, 19 nt, Artificial Sequence
  Description of Artificial Sequence: Synthetic oligonucleotide
  Sense strand starting at position 2829 of SEQ ID NO: 1561845
gggaauaggucuccauauu

SEQ ID NO: 1702860 - RNA, 19 nt, Artificial Sequence
  Description of Artificial Sequence: Synthetic oligonucleotide
  Antisense strand to SEQ ID NO: 1702859
aauauggagaccuauuccc

SEQ ID NO: 1702861 - RNA, 19 nt, Artificial Sequence
  Description of Artificial Sequence: Synthetic oligonucleotide
  Sense strand starting at position 2876 of SEQ ID NO: 1561845
gcucaaacacuguguaauc

SEQ ID NO: 1702862 - RNA, 19 nt, Artificial Sequence
  Description of Artificial Sequence: Synthetic oligonucleotide
  Antisense strand to SEQ ID NO: 1702861
gauuacacaguguuugagc

SEQ ID NO: 1702863 - RNA, 19 nt, Artificial Sequence
  Description of Artificial Sequence: Synthetic oligonucleotide
  Sense strand starting at position 2878 of SEQ ID NO: 1561845
ucaaacacuguguaaucuu

SEQ ID NO: 1702864 - RNA, 19 nt, Artificial Sequence
  Description of Artificial Sequence: Synthetic oligonucleotide
  Antisense strand to SEQ ID NO: 1702863
aagauuacacaguguuuga

SEQ ID NO: 1702865 - RNA, 19 nt, Artificial Sequence
  Description of Artificial Sequence: Synthetic oligonucleotide
  Sense strand starting at position 2996 of SEQ ID NO: 1561845
auggaaagcgauuaguaua

SEQ ID NO: 1702866 - RNA, 19 nt, Artificial Sequence
  Description of Artificial Sequence: Synthetic oligonucleotide
  Antisense strand to SEQ ID NO: 1702865
uauacuaaucgcuuuccau

SEQ ID NO: 1702867 - RNA, 19 nt, Artificial Sequence
  Description of Artificial Sequence: Synthetic oligonucleotide
  Sense strand starting at position 3015 of SEQ ID NO: 1561845
gggcuuggcaccuacucaa

SEQ ID NO: 1702868 - RNA, 19 nt, Artificial Sequence
  Description of Artificial Sequence: Synthetic oligonucleotide
  Antisense strand to SEQ ID NO: 1702867
uugaguaggugccaagccc

SEQ ID NO: 1702869 - RNA, 19 nt, Artificial Sequence
  Description of Artificial Sequence: Synthetic oligonucleotide
  Sense strand starting at position 3186 of SEQ ID NO: 1561845
cgaggucucuguuccaaac

SEQ ID NO: 1702870 - RNA, 19 nt, Artificial Sequence
  Description of Artificial Sequence: Synthetic oligonucleotide
  Antisense strand to SEQ ID NO: 1702869
guuuggaacagagaccucg

SEQ ID NO: 1702871 - RNA, 19 nt, Artificial Sequence
  Description of Artificial Sequence: Synthetic oligonucleotide
  Sense strand starting at position 3239 of SEQ ID NO: 1561845
uggugaagccucuauacac

SEQ ID NO: 1702872 - RNA, 19 nt, Artificial Sequence
  Description of Artificial Sequence: Synthetic oligonucleotide
  Antisense strand to SEQ ID NO: 1702871
guguauagaggcuucacca

SEQ ID NO: 1702873 - RNA, 19 nt, Artificial Sequence
  Description of Artificial Sequence: Synthetic oligonucleotide
  Sense strand starting at position 3397 of SEQ ID NO: 1561845
ggguguaggacuugggaga

SEQ ID NO: 1702874 - RNA, 19 nt, Artificial Sequence
  Description of Artificial Sequence: Synthetic oligonucleotide
  Antisense strand to SEQ ID NO: 1702873
ucucccaaguccuacaccc

SEQ ID NO: 1702875 - RNA, 19 nt, Artificial Sequence
  Description of Artificial Sequence: Synthetic oligonucleotide
  Sense strand starting at position 3529 of SEQ ID NO: 1561845
guucuuaucuccucaguga

SEQ ID NO: 1702876 - RNA, 19 nt, Artificial Sequence
  Description of Artificial Sequence: Synthetic oligonucleotide
  Antisense strand to SEQ ID NO: 1702875
ucacugaggagauaagaac

SEQ ID NO: 1702877 - RNA, 19 nt, Artificial Sequence
  Description of Artificial Sequence: Synthetic oligonucleotide
  Sense strand starting at position 3530 of SEQ ID NO: 1561845
uucuuaucuccucagugau

SEQ ID NO: 1702878 - RNA, 19 nt, Artificial Sequence
  Description of Artificial Sequence: Synthetic oligonucleotide
  Antisense strand to SEQ ID NO: 1702877
aucacugaggagauaagaa

SEQ ID NO: 1702879 - RNA, 19 nt, Artificial Sequence
  Description of Artificial Sequence: Synthetic oligonucleotide
  Sense strand starting at position 3549 of SEQ ID NO: 1561845
guuuguagggucuauuaca

SEQ ID NO: 1702880 - RNA, 19 nt, Artificial Sequence
  Description of Artificial Sequence: Synthetic oligonucleotide
  Antisense strand to SEQ ID NO: 1702879
uguaauagacccuacaaac

SEQ ID NO: 1702881 - RNA, 19 nt, Artificial Sequence
  Description of Artificial Sequence: Synthetic oligonucleotide
  Sense strand starting at position 3673 of SEQ ID NO: 1561845
gaguuugaguccucuggua

SEQ ID NO: 1702882 - RNA, 19 nt, Artificial Sequence
  Description of Artificial Sequence: Synthetic oligonucleotide
  Antisense strand to SEQ ID NO: 1702881
uaccagaggacucaaacuc

SEQ ID NO: 1702883 - RNA, 19 nt, Artificial Sequence
  Description of Artificial Sequence: Synthetic oligonucleotide
  Sense strand starting at position 3675 of SEQ ID NO: 1561845
guuugaguccucugguagg

SEQ ID NO: 1702884 - RNA, 19 nt, Artificial Sequence
  Description of Artificial Sequence: Synthetic oligonucleotide
  Antisense strand to SEQ ID NO: 1702883
ccuaccagaggacucaaac

SEQ ID NO: 1702885 - RNA, 19 nt, Artificial Sequence
  Description of Artificial Sequence: Synthetic oligonucleotide
  Sense strand starting at position 3865 of SEQ ID NO: 1561845
cauguacugucagugaagu

SEQ ID NO: 1702886 - RNA, 19 nt, Artificial Sequence
  Description of Artificial Sequence: Synthetic oligonucleotide
  Antisense strand to SEQ ID NO: 1702885
acuucacugacaguacaug

SEQ ID NO: 1702887 - RNA, 19 nt, Artificial Sequence
  Description of Artificial Sequence: Synthetic oligonucleotide
  Sense strand starting at position 3867 of SEQ ID NO: 1561845
uguacugucagugaagugu

SEQ ID NO: 1702888 - RNA, 19 nt, Artificial Sequence
  Description of Artificial Sequence: Synthetic oligonucleotide
  Antisense strand to SEQ ID NO: 1702887
acacuucacugacaguaca

SEQ ID NO: 1702889 - RNA, 19 nt, Artificial Sequence
  Description of Artificial Sequence: Synthetic oligonucleotide
  Sense strand starting at position 3902 of SEQ ID NO: 1561845
gugaauaucuccuuuauga

SEQ ID NO: 1702890 - RNA, 19 nt, Artificial Sequence
  Description of Artificial Sequence: Synthetic oligonucleotide
  Antisense strand to SEQ ID NO: 1702889
ucauaaaggagauauucac

SEQ ID NO: 1702891 - RNA, 19 nt, Artificial Sequence
  Description of Artificial Sequence: Synthetic oligonucleotide
  Sense strand starting at position 35 of SEQ ID NO: 1561846
uccagcaacucugaauguu

SEQ ID NO: 1702892 - RNA, 19 nt, Artificial Sequence
  Description of Artificial Sequence: Synthetic oligonucleotide
  Antisense strand to SEQ ID NO: 1702891
aacauucagaguugcugga

SEQ ID NO: 1702893 - RNA, 19 nt, Artificial Sequence
  Description of Artificial Sequence: Synthetic oligonucleotide
  Sense strand starting at position 47 of SEQ ID NO: 1561846
gaauguuugucugccuggu

SEQ ID NO: 1702894 - RNA, 19 nt, Artificial Sequence
  Description of Artificial Sequence: Synthetic oligonucleotide
  Antisense strand to SEQ ID NO: 1702893
accaggcagacaaacauuc

SEQ ID NO: 1702895 - RNA, 19 nt, Artificial Sequence
  Description of Artificial Sequence: Synthetic oligonucleotide
  Sense strand starting at position 285 of SEQ ID NO: 1561846
gggagagcuucucagagga

SEQ ID NO: 1702896 - RNA, 19 nt, Artificial Sequence
  Description of Artificial Sequence: Synthetic oligonucleotide
  Antisense strand to SEQ ID NO: 1702895
uccucugagaagcucuccc

SEQ ID NO: 1702897 - RNA, 19 nt, Artificial Sequence
  Description of Artificial Sequence: Synthetic oligonucleotide
  Sense strand starting at position 660 of SEQ ID NO: 1561846
cgccgacuagcgagguaaa

SEQ ID NO: 1702898 - RNA, 19 nt, Artificial Sequence
  Description of Artificial Sequence: Synthetic oligonucleotide
  Antisense strand to SEQ ID NO: 1702897
uuuaccucgcuagucggcg

SEQ ID NO: 1702899 - RNA, 19 nt, Artificial Sequence
  Description of Artificial Sequence: Synthetic oligonucleotide
  Sense strand starting at position 670 of SEQ ID NO: 1561846
cgagguaaacucugcagaa

SEQ ID NO: 1702900 - RNA, 19 nt, Artificial Sequence
  Description of Artificial Sequence: Synthetic oligonucleotide
  Antisense strand to SEQ ID NO: 1702899
uucugcagaguuuaccucg

SEQ ID NO: 1702901 - RNA, 19 nt, Artificial Sequence
  Description of Artificial Sequence: Synthetic oligonucleotide
  Sense strand starting at position 671 of SEQ ID NO: 1561846
gagguaaacucugcagaag

SEQ ID NO: 1702902 - RNA, 19 nt, Artificial Sequence
  Description of Artificial Sequence: Synthetic oligonucleotide
  Antisense strand to SEQ ID NO: 1702901
cuucugcagaguuuaccuc

SEQ ID NO: 1702903 - RNA, 19 nt, Artificial Sequence
  Description of Artificial Sequence: Synthetic oligonucleotide
  Sense strand starting at position 1749 of SEQ ID NO: 1561846
cgugucucuccuuccagua

SEQ ID NO: 1702904 - RNA, 19 nt, Artificial Sequence
  Description of Artificial Sequence: Synthetic oligonucleotide
  Antisense strand to SEQ ID NO: 1702903
uacuggaaggagagacacg

SEQ ID NO: 1702905 - RNA, 19 nt, Artificial Sequence
  Description of Artificial Sequence: Synthetic oligonucleotide
  Sense strand starting at position 3099 of SEQ ID NO: 1561846
agcauuccagcgcaucaau

SEQ ID NO: 1702906 - RNA, 19 nt, Artificial Sequence
  Description of Artificial Sequence: Synthetic oligonucleotide
  Antisense strand to SEQ ID NO: 1702905
auugaugcgcuggaaugcu

SEQ ID NO: 1702907 - RNA, 19 nt, Artificial Sequence
  Description of Artificial Sequence: Synthetic oligonucleotide
  Sense strand starting at position 281 of SEQ ID NO: 1561847
ccucguccuggugaguauu

SEQ ID NO: 1702908 - RNA, 19 nt, Artificial Sequence
  Description of Artificial Sequence: Synthetic oligonucleotide
  Antisense strand to SEQ ID NO: 1702907
aauacucaccaggacgagg

SEQ ID NO: 1702909 - RNA, 19 nt, Artificial Sequence
  Description of Artificial Sequence: Synthetic oligonucleotide
  Sense strand starting at position 437 of SEQ ID NO: 1561847
ggacgugaucuggguguga

SEQ ID NO: 1702910 - RNA, 19 nt, Artificial Sequence
  Description of Artificial Sequence: Synthetic oligonucleotide
  Antisense strand to SEQ ID NO: 1702909
ucacacccagaucacgucc

SEQ ID NO: 1702911 - RNA, 19 nt, Artificial Sequence
  Description of Artificial Sequence: Synthetic oligonucleotide
  Sense strand starting at position 439 of SEQ ID NO: 1561847
acgugaucugggugugaug

SEQ ID NO: 1702912 - RNA, 19 nt, Artificial Sequence
  Description of Artificial Sequence: Synthetic oligonucleotide
  Antisense strand to SEQ ID NO: 1702911
caucacacccagaucacgu

SEQ ID NO: 1702913 - RNA, 19 nt, Artificial Sequence
  Description of Artificial Sequence: Synthetic oligonucleotide
  Sense strand starting at position 621 of SEQ ID NO: 1561847
cugggucucauuggagcaa

SEQ ID NO: 1702914 - RNA, 19 nt, Artificial Sequence
  Description of Artificial Sequence: Synthetic oligonucleotide
  Antisense strand to SEQ ID NO: 1702913
uugcuccaaugagacccag

SEQ ID NO: 1702915 - RNA, 19 nt, Artificial Sequence
  Description of Artificial Sequence: Synthetic oligonucleotide
  Sense strand starting at position 972 of SEQ ID NO: 1561847
aggugugacacauaccagu

SEQ ID NO: 1702916 - RNA, 19 nt, Artificial Sequence
  Description of Artificial Sequence: Synthetic oligonucleotide
  Antisense strand to SEQ ID NO: 1702915
acugguaugugucacaccu

SEQ ID NO: 1702917 - RNA, 19 nt, Artificial Sequence
  Description of Artificial Sequence: Synthetic oligonucleotide
  Sense strand starting at position 1634 of SEQ ID NO: 1561847
cgucauccggcauguagaa

SEQ ID NO: 1702918 - RNA, 19 nt, Artificial Sequence
  Description of Artificial Sequence: Synthetic oligonucleotide
  Antisense strand to SEQ ID NO: 1702917
uucuacaugccggaugacg

SEQ ID NO: 1702919 - RNA, 19 nt, Artificial Sequence
  Description of Artificial Sequence: Synthetic oligonucleotide
  Sense strand starting at position 1719 of SEQ ID NO: 1561847
gaagaacucggaggucaug

SEQ ID NO: 1702920 - RNA, 19 nt, Artificial Sequence
  Description of Artificial Sequence: Synthetic oligonucleotide
  Antisense strand to SEQ ID NO: 1702919
caugaccuccgaguucuuc

SEQ ID NO: 1702921 - RNA, 19 nt, Artificial Sequence
  Description of Artificial Sequence: Synthetic oligonucleotide
  Sense strand starting at position 1939 of SEQ ID NO: 1561847
uccagcaacucugaauguu

SEQ ID NO: 1702922 - RNA, 19 nt, Artificial Sequence
  Description of Artificial Sequence: Synthetic oligonucleotide
  Antisense strand to SEQ ID NO: 1702921
aacauucagaguugcugga

SEQ ID NO: 1702923 - RNA, 19 nt, Artificial Sequence
  Description of Artificial Sequence: Synthetic oligonucleotide
  Sense strand starting at position 1951 of SEQ ID NO: 1561847
gaauguuugucugccuggu

SEQ ID NO: 1702924 - RNA, 19 nt, Artificial Sequence
  Description of Artificial Sequence: Synthetic oligonucleotide
  Antisense strand to SEQ ID NO: 1702923
accaggcagacaaacauuc

SEQ ID NO: 1702925 - RNA, 19 nt, Artificial Sequence
  Description of Artificial Sequence: Synthetic oligonucleotide
  Sense strand starting at position 2189 of SEQ ID NO: 1561847
gggagagcuucucagagga

SEQ ID NO: 1702926 - RNA, 19 nt, Artificial Sequence
  Description of Artificial Sequence: Synthetic oligonucleotide
  Antisense strand to SEQ ID NO: 1702925
uccucugagaagcucuccc

SEQ ID NO: 1702927 - RNA, 19 nt, Artificial Sequence
  Description of Artificial Sequence: Synthetic oligonucleotide
  Sense strand starting at position 2564 of SEQ ID NO: 1561847
cgccgacuagcgagguaaa

SEQ ID NO: 1702928 - RNA, 19 nt, Artificial Sequence
  Description of Artificial Sequence: Synthetic oligonucleotide
  Antisense strand to SEQ ID NO: 1702927
uuuaccucgcuagucggcg

SEQ ID NO: 1702929 - RNA, 19 nt, Artificial Sequence
  Description of Artificial Sequence: Synthetic oligonucleotide
  Sense strand starting at position 2574 of SEQ ID NO: 1561847
cgagguaaacucugcagaa

SEQ ID NO: 1702930 - RNA, 19 nt, Artificial Sequence
  Description of Artificial Sequence: Synthetic oligonucleotide
  Antisense strand to SEQ ID NO: 1702929
uucugcagaguuuaccucg

SEQ ID NO: 1702931 - RNA, 19 nt, Artificial Sequence
  Description of Artificial Sequence: Synthetic oligonucleotide
  Sense strand starting at position 2575 of SEQ ID NO: 1561847
gagguaaacucugcagaag

SEQ ID NO: 1702932 - RNA, 19 nt, Artificial Sequence
  Description of Artificial Sequence: Synthetic oligonucleotide
  Antisense strand to SEQ ID NO: 1702931
cuucugcagaguuuaccuc

SEQ ID NO: 1702933 - RNA, 19 nt, Artificial Sequence
  Description of Artificial Sequence: Synthetic oligonucleotide
  Sense strand starting at position 3653 of SEQ ID NO: 1561847
cgugucucuccuuccagua

SEQ ID NO: 1702934 - RNA, 19 nt, Artificial Sequence
  Description of Artificial Sequence: Synthetic oligonucleotide
  Antisense strand to SEQ ID NO: 1702933
uacuggaaggagagacacg

SEQ ID NO: 1702935 - RNA, 19 nt, Artificial Sequence
  Description of Artificial Sequence: Synthetic oligonucleotide
  Sense strand starting at position 126 of SEQ ID NO: 1561848
gauguccuuugguuaggua

SEQ ID NO: 1702936 - RNA, 19 nt, Artificial Sequence
  Description of Artificial Sequence: Synthetic oligonucleotide
  Antisense strand to SEQ ID NO: 1702935
uaccuaaccaaaggacauc

SEQ ID NO: 1702937 - RNA, 19 nt, Artificial Sequence
  Description of Artificial Sequence: Synthetic oligonucleotide
  Sense strand starting at position 127 of SEQ ID NO: 1561848
auguccuuugguuagguau

SEQ ID NO: 1702938 - RNA, 19 nt, Artificial Sequence
  Description of Artificial Sequence: Synthetic oligonucleotide
  Antisense strand to SEQ ID NO: 1702937
auaccuaaccaaaggacau

SEQ ID NO: 1702939 - RNA, 19 nt, Artificial Sequence
  Description of Artificial Sequence: Synthetic oligonucleotide
  Sense strand starting at position 179 of SEQ ID NO: 1561848
gggucaugaugacugcaau

SEQ ID NO: 1702940 - RNA, 19 nt, Artificial Sequence
  Description of Artificial Sequence: Synthetic oligonucleotide
  Antisense strand to SEQ ID NO: 1702939
auugcagucaucaugaccc

SEQ ID NO: 1702941 - RNA, 19 nt, Artificial Sequence
  Description of Artificial Sequence: Synthetic oligonucleotide
  Sense strand starting at position 180 of SEQ ID NO: 1561848
ggucaugaugacugcaauu

SEQ ID NO: 1702942 - RNA, 19 nt, Artificial Sequence
  Description of Artificial Sequence: Synthetic oligonucleotide
  Antisense strand to SEQ ID NO: 1702941
aauugcagucaucaugacc

SEQ ID NO: 1702943 - RNA, 19 nt, Artificial Sequence
  Description of Artificial Sequence: Synthetic oligonucleotide
  Sense strand starting at position 241 of SEQ ID NO: 1561848
ugcauauguguuucugugu

SEQ ID NO: 1702944 - RNA, 19 nt, Artificial Sequence
  Description of Artificial Sequence: Synthetic oligonucleotide
  Antisense strand to SEQ ID NO: 1702943
acacagaaacacauaugca

SEQ ID NO: 1702945 - RNA, 19 nt, Artificial Sequence
  Description of Artificial Sequence: Synthetic oligonucleotide
  Sense strand starting at position 288 of SEQ ID NO: 1561848
agaguaagcaaaugugaua

SEQ ID NO: 1702946 - RNA, 19 nt, Artificial Sequence
  Description of Artificial Sequence: Synthetic oligonucleotide
  Antisense strand to SEQ ID NO: 1702945
uaucacauuugcuuacucu

SEQ ID NO: 1702947 - RNA, 19 nt, Artificial Sequence
  Description of Artificial Sequence: Synthetic oligonucleotide
  Sense strand starting at position 314 of SEQ ID NO: 1561848
aggaauuggaaguguauau

SEQ ID NO: 1702948 - RNA, 19 nt, Artificial Sequence
  Description of Artificial Sequence: Synthetic oligonucleotide
  Antisense strand to SEQ ID NO: 1702947
auauacacuuccaauuccu

SEQ ID NO: 1702949 - RNA, 19 nt, Artificial Sequence
  Description of Artificial Sequence: Synthetic oligonucleotide
  Sense strand starting at position 331 of SEQ ID NO: 1561848
auggaaguccauugugcuu

SEQ ID NO: 1702950 - RNA, 19 nt, Artificial Sequence
  Description of Artificial Sequence: Synthetic oligonucleotide
  Antisense strand to SEQ ID NO: 1702949
aagcacaauggacuuccau

SEQ ID NO: 1702951 - RNA, 19 nt, Artificial Sequence
  Description of Artificial Sequence: Synthetic oligonucleotide
  Sense strand starting at position 448 of SEQ ID NO: 1561848
cucuuuguguguccuuuaa

SEQ ID NO: 1702952 - RNA, 19 nt, Artificial Sequence
  Description of Artificial Sequence: Synthetic oligonucleotide
  Antisense strand to SEQ ID NO: 1702951
uuaaaggacacacaaagag

SEQ ID NO: 1702953 - RNA, 19 nt, Artificial Sequence
  Description of Artificial Sequence: Synthetic oligonucleotide
  Sense strand starting at position 814 of SEQ ID NO: 1561848
ggauaaggguuguuaugaa

SEQ ID NO: 1702954 - RNA, 19 nt, Artificial Sequence
  Description of Artificial Sequence: Synthetic oligonucleotide
  Antisense strand to SEQ ID NO: 1702953
uucauaacaacccuuaucc

SEQ ID NO: 1702955 - RNA, 19 nt, Artificial Sequence
  Description of Artificial Sequence: Synthetic oligonucleotide
  Sense strand starting at position 1066 of SEQ ID NO: 1561848
guuacaaugaggcaugauc

SEQ ID NO: 1702956 - RNA, 19 nt, Artificial Sequence
  Description of Artificial Sequence: Synthetic oligonucleotide
  Antisense strand to SEQ ID NO: 1702955
gaucaugccucauuguaac

SEQ ID NO: 1702957 - RNA, 19 nt, Artificial Sequence
  Description of Artificial Sequence: Synthetic oligonucleotide
  Sense strand starting at position 1157 of SEQ ID NO: 1561848
auaauaguagcugacacua

SEQ ID NO: 1702958 - RNA, 19 nt, Artificial Sequence
  Description of Artificial Sequence: Synthetic oligonucleotide
  Antisense strand to SEQ ID NO: 1702957
uagugucagcuacuauuau

SEQ ID NO: 1702959 - RNA, 19 nt, Artificial Sequence
  Description of Artificial Sequence: Synthetic oligonucleotide
  Sense strand starting at position 1201 of SEQ ID NO: 1561848
ugugccaagugucuguaaa

SEQ ID NO: 1702960 - RNA, 19 nt, Artificial Sequence
  Description of Artificial Sequence: Synthetic oligonucleotide
  Antisense strand to SEQ ID NO: 1702959
uuuacagacacuuggcaca

SEQ ID NO: 1702961 - RNA, 19 nt, Artificial Sequence
  Description of Artificial Sequence: Synthetic oligonucleotide
  Sense strand starting at position 1202 of SEQ ID NO: 1561848
gugccaagugucuguaaau

SEQ ID NO: 1702962 - RNA, 19 nt, Artificial Sequence
  Description of Artificial Sequence: Synthetic oligonucleotide
  Antisense strand to SEQ ID NO: 1702961
auuuacagacacuuggcac

SEQ ID NO: 1702963 - RNA, 19 nt, Artificial Sequence
  Description of Artificial Sequence: Synthetic oligonucleotide
  Sense strand starting at position 1208 of SEQ ID NO: 1561848
agugucuguaaauguccua

SEQ ID NO: 1702964 - RNA, 19 nt, Artificial Sequence
  Description of Artificial Sequence: Synthetic oligonucleotide
  Antisense strand to SEQ ID NO: 1702963
uaggacauuuacagacacu

SEQ ID NO: 1702965 - RNA, 19 nt, Artificial Sequence
  Description of Artificial Sequence: Synthetic oligonucleotide
  Sense strand starting at position 1215 of SEQ ID NO: 1561848
guaaauguccuagggcaga

SEQ ID NO: 1702966 - RNA, 19 nt, Artificial Sequence
  Description of Artificial Sequence: Synthetic oligonucleotide
  Antisense strand to SEQ ID NO: 1702965
ucugcccuaggacauuuac

SEQ ID NO: 1702967 - RNA, 19 nt, Artificial Sequence
  Description of Artificial Sequence: Synthetic oligonucleotide
  Sense strand starting at position 1244 of SEQ ID NO: 1561848
uuggcauggagucaugauu

SEQ ID NO: 1702968 - RNA, 19 nt, Artificial Sequence
  Description of Artificial Sequence: Synthetic oligonucleotide
  Antisense strand to SEQ ID NO: 1702967
aaucaugacuccaugccaa

SEQ ID NO: 1702969 - RNA, 19 nt, Artificial Sequence
  Description of Artificial Sequence: Synthetic oligonucleotide
  Sense strand starting at position 1295 of SEQ ID NO: 1561848
ggagccuagccugaagaga

SEQ ID NO: 1702970 - RNA, 19 nt, Artificial Sequence
  Description of Artificial Sequence: Synthetic oligonucleotide
  Antisense strand to SEQ ID NO: 1702969
ucucuucaggcuaggcucc

SEQ ID NO: 1702971 - RNA, 19 nt, Artificial Sequence
  Description of Artificial Sequence: Synthetic oligonucleotide
  Sense strand starting at position 1328 of SEQ ID NO: 1561848
ggagguaaguugagguuua

SEQ ID NO: 1702972 - RNA, 19 nt, Artificial Sequence
  Description of Artificial Sequence: Synthetic oligonucleotide
  Antisense strand to SEQ ID NO: 1702971
uaaaccucaacuuaccucc

SEQ ID NO: 1702973 - RNA, 19 nt, Artificial Sequence
  Description of Artificial Sequence: Synthetic oligonucleotide
  Sense strand starting at position 1511 of SEQ ID NO: 1561848
ucaugauguccuggagcag

SEQ ID NO: 1702974 - RNA, 19 nt, Artificial Sequence
  Description of Artificial Sequence: Synthetic oligonucleotide
  Antisense strand to SEQ ID NO: 1702973
cugcuccaggacaucauga

SEQ ID NO: 1702975 - RNA, 19 nt, Artificial Sequence
  Description of Artificial Sequence: Synthetic oligonucleotide
  Sense strand starting at position 1672 of SEQ ID NO: 1561848
cgccaugucucugcaagau

SEQ ID NO: 1702976 - RNA, 19 nt, Artificial Sequence
  Description of Artificial Sequence: Synthetic oligonucleotide
  Antisense strand to SEQ ID NO: 1702975
aucuugcagagacauggcg

SEQ ID NO: 1702977 - RNA, 19 nt, Artificial Sequence
  Description of Artificial Sequence: Synthetic oligonucleotide
  Sense strand starting at position 1681 of SEQ ID NO: 1561848
ucugcaagauccuucuguu

SEQ ID NO: 1702978 - RNA, 19 nt, Artificial Sequence
  Description of Artificial Sequence: Synthetic oligonucleotide
  Antisense strand to SEQ ID NO: 1702977
aacagaaggaucuugcaga

SEQ ID NO: 1702979 - RNA, 19 nt, Artificial Sequence
  Description of Artificial Sequence: Synthetic oligonucleotide
  Sense strand starting at position 1740 of SEQ ID NO: 1561848
cugagugaccucugugaag

SEQ ID NO: 1702980 - RNA, 19 nt, Artificial Sequence
  Description of Artificial Sequence: Synthetic oligonucleotide
  Antisense strand to SEQ ID NO: 1702979
cuucacagaggucacucag

SEQ ID NO: 1702981 - RNA, 19 nt, Artificial Sequence
  Description of Artificial Sequence: Synthetic oligonucleotide
  Sense strand starting at position 1742 of SEQ ID NO: 1561848
gagugaccucugugaagcu

SEQ ID NO: 1702982 - RNA, 19 nt, Artificial Sequence
  Description of Artificial Sequence: Synthetic oligonucleotide
  Antisense strand to SEQ ID NO: 1702981
agcuucacagaggucacuc

SEQ ID NO: 1702983 - RNA, 19 nt, Artificial Sequence
  Description of Artificial Sequence: Synthetic oligonucleotide
  Sense strand starting at position 1791 of SEQ ID NO: 1561848
gggugcugccuggagacau

SEQ ID NO: 1702984 - RNA, 19 nt, Artificial Sequence
  Description of Artificial Sequence: Synthetic oligonucleotide
  Antisense strand to SEQ ID NO: 1702983
augucuccaggcagcaccc

SEQ ID NO: 1702985 - RNA, 19 nt, Artificial Sequence
  Description of Artificial Sequence: Synthetic oligonucleotide
  Sense strand starting at position 1904 of SEQ ID NO: 1561848
ugcuuaccugagggucaaa

SEQ ID NO: 1702986 - RNA, 19 nt, Artificial Sequence
  Description of Artificial Sequence: Synthetic oligonucleotide
  Antisense strand to SEQ ID NO: 1702985
uuugacccucagguaagca

SEQ ID NO: 1702987 - RNA, 19 nt, Artificial Sequence
  Description of Artificial Sequence: Synthetic oligonucleotide
  Sense strand starting at position 1957 of SEQ ID NO: 1561848
gggugaggaucacaaagaa

SEQ ID NO: 1702988 - RNA, 19 nt, Artificial Sequence
  Description of Artificial Sequence: Synthetic oligonucleotide
  Antisense strand to SEQ ID NO: 1702987
uucuuugugauccucaccc

SEQ ID NO: 1702989 - RNA, 19 nt, Artificial Sequence
  Description of Artificial Sequence: Synthetic oligonucleotide
  Sense strand starting at position 2123 of SEQ ID NO: 1561848
gaagcugugggaugggaaa

SEQ ID NO: 1702990 - RNA, 19 nt, Artificial Sequence
  Description of Artificial Sequence: Synthetic oligonucleotide
  Antisense strand to SEQ ID NO: 1702989
uuucccaucccacagcuuc

SEQ ID NO: 1702991 - RNA, 19 nt, Artificial Sequence
  Description of Artificial Sequence: Synthetic oligonucleotide
  Sense strand starting at position 2228 of SEQ ID NO: 1561848
guagaaugggcgugaugga

SEQ ID NO: 1702992 - RNA, 19 nt, Artificial Sequence
  Description of Artificial Sequence: Synthetic oligonucleotide
  Antisense strand to SEQ ID NO: 1702991
uccaucacgcccauucuac

SEQ ID NO: 1702993 - RNA, 19 nt, Artificial Sequence
  Description of Artificial Sequence: Synthetic oligonucleotide
  Sense strand starting at position 2815 of SEQ ID NO: 1561848
cugugugucccaggacaag

SEQ ID NO: 1702994 - RNA, 19 nt, Artificial Sequence
  Description of Artificial Sequence: Synthetic oligonucleotide
  Antisense strand to SEQ ID NO: 1702993
cuuguccugggacacacag

SEQ ID NO: 1702995 - RNA, 19 nt, Artificial Sequence
  Description of Artificial Sequence: Synthetic oligonucleotide
  Sense strand starting at position 2923 of SEQ ID NO: 1561848
gagguaagugccugaacca

SEQ ID NO: 1702996 - RNA, 19 nt, Artificial Sequence
  Description of Artificial Sequence: Synthetic oligonucleotide
  Antisense strand to SEQ ID NO: 1702995
ugguucaggcacuuaccuc

SEQ ID NO: 1702997 - RNA, 19 nt, Artificial Sequence
  Description of Artificial Sequence: Synthetic oligonucleotide
  Sense strand starting at position 2924 of SEQ ID NO: 1561848
agguaagugccugaaccaa

SEQ ID NO: 1702998 - RNA, 19 nt, Artificial Sequence
  Description of Artificial Sequence: Synthetic oligonucleotide
  Antisense strand to SEQ ID NO: 1702997
uugguucaggcacuuaccu

SEQ ID NO: 1702999 - RNA, 19 nt, Artificial Sequence
  Description of Artificial Sequence: Synthetic oligonucleotide
  Sense strand starting at position 2962 of SEQ ID NO: 1561848
cuuugcugugucuaccuaa

SEQ ID NO: 1703000 - RNA, 19 nt, Artificial Sequence
  Description of Artificial Sequence: Synthetic oligonucleotide
  Antisense strand to SEQ ID NO: 1702999
uuagguagacacagcaaag

SEQ ID NO: 1703001 - RNA, 19 nt, Artificial Sequence
  Description of Artificial Sequence: Synthetic oligonucleotide
  Sense strand starting at position 3021 of SEQ ID NO: 1561848
uuguuuggaguuggagaga

SEQ ID NO: 1703002 - RNA, 19 nt, Artificial Sequence
  Description of Artificial Sequence: Synthetic oligonucleotide
  Antisense strand to SEQ ID NO: 1703001
ucucuccaacuccaaacaa

SEQ ID NO: 1703003 - RNA, 19 nt, Artificial Sequence
  Description of Artificial Sequence: Synthetic oligonucleotide
  Sense strand starting at position 3042 of SEQ ID NO: 1561848
ggagaagggcucuaagucu

SEQ ID NO: 1703004 - RNA, 19 nt, Artificial Sequence
  Description of Artificial Sequence: Synthetic oligonucleotide
  Antisense strand to SEQ ID NO: 1703003
agacuuagagcccuucucc

SEQ ID NO: 1703005 - RNA, 19 nt, Artificial Sequence
  Description of Artificial Sequence: Synthetic oligonucleotide
  Sense strand starting at position 3051 of SEQ ID NO: 1561848
cucuaagucuugcuccaga

SEQ ID NO: 1703006 - RNA, 19 nt, Artificial Sequence
  Description of Artificial Sequence: Synthetic oligonucleotide
  Antisense strand to SEQ ID NO: 1703005
ucuggagcaagacuuagag

SEQ ID NO: 1703007 - RNA, 19 nt, Artificial Sequence
  Description of Artificial Sequence: Synthetic oligonucleotide
  Sense strand starting at position 3056 of SEQ ID NO: 1561848
agucuugcuccagaugcuu

SEQ ID NO: 1703008 - RNA, 19 nt, Artificial Sequence
  Description of Artificial Sequence: Synthetic oligonucleotide
  Antisense strand to SEQ ID NO: 1703007
aagcaucuggagcaagacu

SEQ ID NO: 1703009 - RNA, 19 nt, Artificial Sequence
  Description of Artificial Sequence: Synthetic oligonucleotide
  Sense strand starting at position 3061 of SEQ ID NO: 1561848
ugcuccagaugcuuagauu

SEQ ID NO: 1703010 - RNA, 19 nt, Artificial Sequence
  Description of Artificial Sequence: Synthetic oligonucleotide
  Antisense strand to SEQ ID NO: 1703009
aaucuaagcaucuggagca

SEQ ID NO: 1703011 - RNA, 19 nt, Artificial Sequence
  Description of Artificial Sequence: Synthetic oligonucleotide
  Sense strand starting at position 3183 of SEQ ID NO: 1561848
acagcaugcucugcaauua

SEQ ID NO: 1703012 - RNA, 19 nt, Artificial Sequence
  Description of Artificial Sequence: Synthetic oligonucleotide
  Antisense strand to SEQ ID NO: 1703011
uaauugcagagcaugcugu

SEQ ID NO: 1703013 - RNA, 19 nt, Artificial Sequence
  Description of Artificial Sequence: Synthetic oligonucleotide
  Sense strand starting at position 3758 of SEQ ID NO: 1561848
ccacuuccugcucgaguga

SEQ ID NO: 1703014 - RNA, 19 nt, Artificial Sequence
  Description of Artificial Sequence: Synthetic oligonucleotide
  Antisense strand to SEQ ID NO: 1703013
ucacucgagcaggaagugg

SEQ ID NO: 1703015 - RNA, 19 nt, Artificial Sequence
  Description of Artificial Sequence: Synthetic oligonucleotide
  Sense strand starting at position 2 of SEQ ID NO: 1561849
acaaauauguacguggcaa

SEQ ID NO: 1703016 - RNA, 19 nt, Artificial Sequence
  Description of Artificial Sequence: Synthetic oligonucleotide
  Antisense strand to SEQ ID NO: 1703015
uugccacguacauauuugu

SEQ ID NO: 1703017 - RNA, 19 nt, Artificial Sequence
  Description of Artificial Sequence: Synthetic oligonucleotide
  Sense strand starting at position 203 of SEQ ID NO: 1561849
ugauacauacguuacacau

SEQ ID NO: 1703018 - RNA, 19 nt, Artificial Sequence
  Description of Artificial Sequence: Synthetic oligonucleotide
  Antisense strand to SEQ ID NO: 1703017
auguguaacguauguauca

SEQ ID NO: 1703019 - RNA, 19 nt, Artificial Sequence
  Description of Artificial Sequence: Synthetic oligonucleotide
  Sense strand starting at position 270 of SEQ ID NO: 1561849
uuuggucucuuggcugaaa

SEQ ID NO: 1703020 - RNA, 19 nt, Artificial Sequence
  Description of Artificial Sequence: Synthetic oligonucleotide
  Antisense strand to SEQ ID NO: 1703019
uuucagccaagagaccaaa

SEQ ID NO: 1703021 - RNA, 19 nt, Artificial Sequence
  Description of Artificial Sequence: Synthetic oligonucleotide
  Sense strand starting at position 384 of SEQ ID NO: 1561849
gugagaucaagaugcuuug

SEQ ID NO: 1703022 - RNA, 19 nt, Artificial Sequence
  Description of Artificial Sequence: Synthetic oligonucleotide
  Antisense strand to SEQ ID NO: 1703021
caaagcaucuugaucucac

SEQ ID NO: 1703023 - RNA, 19 nt, Artificial Sequence
  Description of Artificial Sequence: Synthetic oligonucleotide
  Sense strand starting at position 395 of SEQ ID NO: 1561849
augcuuuggccagagucaa

SEQ ID NO: 1703024 - RNA, 19 nt, Artificial Sequence
  Description of Artificial Sequence: Synthetic oligonucleotide
  Antisense strand to SEQ ID NO: 1703023
uugacucuggccaaagcau

SEQ ID NO: 1703025 - RNA, 19 nt, Artificial Sequence
  Description of Artificial Sequence: Synthetic oligonucleotide
  Sense strand starting at position 416 of SEQ ID NO: 1561849
gcugcugcuagacagauua

SEQ ID NO: 1703026 - RNA, 19 nt, Artificial Sequence
  Description of Artificial Sequence: Synthetic oligonucleotide
  Antisense strand to SEQ ID NO: 1703025
uaaucugucuagcagcagc

SEQ ID NO: 1703027 - RNA, 19 nt, Artificial Sequence
  Description of Artificial Sequence: Synthetic oligonucleotide
  Sense strand starting at position 424 of SEQ ID NO: 1561849
uagacagauuaccggacaa

SEQ ID NO: 1703028 - RNA, 19 nt, Artificial Sequence
  Description of Artificial Sequence: Synthetic oligonucleotide
  Antisense strand to SEQ ID NO: 1703027
uuguccgguaaucugucua

SEQ ID NO: 1703029 - RNA, 19 nt, Artificial Sequence
  Description of Artificial Sequence: Synthetic oligonucleotide
  Sense strand starting at position 458 of SEQ ID NO: 1561849
agaagauggucacagguuu

SEQ ID NO: 1703030 - RNA, 19 nt, Artificial Sequence
  Description of Artificial Sequence: Synthetic oligonucleotide
  Antisense strand to SEQ ID NO: 1703029
aaaccugugaccaucuucu

SEQ ID NO: 1703031 - RNA, 19 nt, Artificial Sequence
  Description of Artificial Sequence: Synthetic oligonucleotide
  Sense strand starting at position 554 of SEQ ID NO: 1561849
gcaaguuugacgugacuau

SEQ ID NO: 1703032 - RNA, 19 nt, Artificial Sequence
  Description of Artificial Sequence: Synthetic oligonucleotide
  Antisense strand to SEQ ID NO: 1703031
auagucacgucaaacuugc

SEQ ID NO: 1703033 - RNA, 19 nt, Artificial Sequence
  Description of Artificial Sequence: Synthetic oligonucleotide
  Sense strand starting at position 555 of SEQ ID NO: 1561849
caaguuugacgugacuauu

SEQ ID NO: 1703034 - RNA, 19 nt, Artificial Sequence
  Description of Artificial Sequence: Synthetic oligonucleotide
  Antisense strand to SEQ ID NO: 1703033
aauagucacgucaaacuug

SEQ ID NO: 1703035 - RNA, 19 nt, Artificial Sequence
  Description of Artificial Sequence: Synthetic oligonucleotide
  Sense strand starting at position 558 of SEQ ID NO: 1561849
guuugacgugacuauuaga

SEQ ID NO: 1703036 - RNA, 19 nt, Artificial Sequence
  Description of Artificial Sequence: Synthetic oligonucleotide
  Antisense strand to SEQ ID NO: 1703035
ucuaauagucacgucaaac

SEQ ID NO: 1703037 - RNA, 19 nt, Artificial Sequence
  Description of Artificial Sequence: Synthetic oligonucleotide
  Sense strand starting at position 565 of SEQ ID NO: 1561849
gugacuauuagacaugcgu

SEQ ID NO: 1703038 - RNA, 19 nt, Artificial Sequence
  Description of Artificial Sequence: Synthetic oligonucleotide
  Antisense strand to SEQ ID NO: 1703037
acgcaugucuaauagucac

SEQ ID NO: 1703039 - RNA, 19 nt, Artificial Sequence
  Description of Artificial Sequence: Synthetic oligonucleotide
  Sense strand starting at position 573 of SEQ ID NO: 1561849
uagacaugcgucuggagaa

SEQ ID NO: 1703040 - RNA, 19 nt, Artificial Sequence
  Description of Artificial Sequence: Synthetic oligonucleotide
  Antisense strand to SEQ ID NO: 1703039
uucuccagacgcaugucua

SEQ ID NO: 1703041 - RNA, 19 nt, Artificial Sequence
  Description of Artificial Sequence: Synthetic oligonucleotide
  Sense strand starting at position 586 of SEQ ID NO: 1561849
ggagaaaucaagcaggugu

SEQ ID NO: 1703042 - RNA, 19 nt, Artificial Sequence
  Description of Artificial Sequence: Synthetic oligonucleotide
  Antisense strand to SEQ ID NO: 1703041
acaccugcuugauuucucc

SEQ ID NO: 1703043 - RNA, 19 nt, Artificial Sequence
  Description of Artificial Sequence: Synthetic oligonucleotide
  Sense strand starting at position 593 of SEQ ID NO: 1561849
ucaagcaggugucugaauu

SEQ ID NO: 1703044 - RNA, 19 nt, Artificial Sequence
  Description of Artificial Sequence: Synthetic oligonucleotide
  Antisense strand to SEQ ID NO: 1703043
aauucagacaccugcuuga

SEQ ID NO: 1703045 - RNA, 19 nt, Artificial Sequence
  Description of Artificial Sequence: Synthetic oligonucleotide
  Sense strand starting at position 594 of SEQ ID NO: 1561849
caagcaggugucugaauua

SEQ ID NO: 1703046 - RNA, 19 nt, Artificial Sequence
  Description of Artificial Sequence: Synthetic oligonucleotide
  Antisense strand to SEQ ID NO: 1703045
uaauucagacaccugcuug

SEQ ID NO: 1703047 - RNA, 19 nt, Artificial Sequence
  Description of Artificial Sequence: Synthetic oligonucleotide
  Sense strand starting at position 611 of SEQ ID NO: 1561849
uacagauccugagcucaga

SEQ ID NO: 1703048 - RNA, 19 nt, Artificial Sequence
  Description of Artificial Sequence: Synthetic oligonucleotide
  Antisense strand to SEQ ID NO: 1703047
ucugagcucaggaucugua

SEQ ID NO: 1703049 - RNA, 19 nt, Artificial Sequence
  Description of Artificial Sequence: Synthetic oligonucleotide
  Sense strand starting at position 735 of SEQ ID NO: 1561849
gggaaugagaaucgccauu

SEQ ID NO: 1703050 - RNA, 19 nt, Artificial Sequence
  Description of Artificial Sequence: Synthetic oligonucleotide
  Antisense strand to SEQ ID NO: 1703049
aauggcgauucucauuccc

SEQ ID NO: 1703051 - RNA, 19 nt, Artificial Sequence
  Description of Artificial Sequence: Synthetic oligonucleotide
  Sense strand starting at position 737 of SEQ ID NO: 1561849
gaaugagaaucgccauuac

SEQ ID NO: 1703052 - RNA, 19 nt, Artificial Sequence
  Description of Artificial Sequence: Synthetic oligonucleotide
  Antisense strand to SEQ ID NO: 1703051
guaauggcgauucucauuc

SEQ ID NO: 1703053 - RNA, 19 nt, Artificial Sequence
  Description of Artificial Sequence: Synthetic oligonucleotide
  Sense strand starting at position 746 of SEQ ID NO: 1561849
ucgccauuacuuggaggau

SEQ ID NO: 1703054 - RNA, 19 nt, Artificial Sequence
  Description of Artificial Sequence: Synthetic oligonucleotide
  Antisense strand to SEQ ID NO: 1703053
auccuccaaguaauggcga

SEQ ID NO: 1703055 - RNA, 19 nt, Artificial Sequence
  Description of Artificial Sequence: Synthetic oligonucleotide
  Sense strand starting at position 872 of SEQ ID NO: 1561849
acccaucuuucguugucaa

SEQ ID NO: 1703056 - RNA, 19 nt, Artificial Sequence
  Description of Artificial Sequence: Synthetic oligonucleotide
  Antisense strand to SEQ ID NO: 1703055
uugacaacgaaagaugggu

SEQ ID NO: 1703057 - RNA, 19 nt, Artificial Sequence
  Description of Artificial Sequence: Synthetic oligonucleotide
  Sense strand starting at position 1373 of SEQ ID NO: 1561849
gcaggaagaacucgguagu

SEQ ID NO: 1703058 - RNA, 19 nt, Artificial Sequence
  Description of Artificial Sequence: Synthetic oligonucleotide
  Antisense strand to SEQ ID NO: 1703057
acuaccgaguucuuccugc

SEQ ID NO: 1703059 - RNA, 19 nt, Artificial Sequence
  Description of Artificial Sequence: Synthetic oligonucleotide
  Sense strand starting at position 1379 of SEQ ID NO: 1561849
agaacucgguagucucaaa

SEQ ID NO: 1703060 - RNA, 19 nt, Artificial Sequence
  Description of Artificial Sequence: Synthetic oligonucleotide
  Antisense strand to SEQ ID NO: 1703059
uuugagacuaccgaguucu

SEQ ID NO: 1703061 - RNA, 19 nt, Artificial Sequence
  Description of Artificial Sequence: Synthetic oligonucleotide
  Sense strand starting at position 1483 of SEQ ID NO: 1561849
cucgguuucugcuuuaaag

SEQ ID NO: 1703062 - RNA, 19 nt, Artificial Sequence
  Description of Artificial Sequence: Synthetic oligonucleotide
  Antisense strand to SEQ ID NO: 1703061
cuuuaaagcagaaaccgag

SEQ ID NO: 1703063 - RNA, 19 nt, Artificial Sequence
  Description of Artificial Sequence: Synthetic oligonucleotide
  Sense strand starting at position 1485 of SEQ ID NO: 1561849
cgguuucugcuuuaaagca

SEQ ID NO: 1703064 - RNA, 19 nt, Artificial Sequence
  Description of Artificial Sequence: Synthetic oligonucleotide
  Antisense strand to SEQ ID NO: 1703063
ugcuuuaaagcagaaaccg

SEQ ID NO: 1703065 - RNA, 19 nt, Artificial Sequence
  Description of Artificial Sequence: Synthetic oligonucleotide
  Sense strand starting at position 2417 of SEQ ID NO: 1561849
gggcuagugucccugaggu

SEQ ID NO: 1703066 - RNA, 19 nt, Artificial Sequence
  Description of Artificial Sequence: Synthetic oligonucleotide
  Antisense strand to SEQ ID NO: 1703065
accucagggacacuagccc

SEQ ID NO: 1703067 - RNA, 19 nt, Artificial Sequence
  Description of Artificial Sequence: Synthetic oligonucleotide
  Sense strand starting at position 2507 of SEQ ID NO: 1561849
cccgcuuuacucgagaugu

SEQ ID NO: 1703068 - RNA, 19 nt, Artificial Sequence
  Description of Artificial Sequence: Synthetic oligonucleotide
  Antisense strand to SEQ ID NO: 1703067
acaucucgaguaaagcggg

SEQ ID NO: 1703069 - RNA, 19 nt, Artificial Sequence
  Description of Artificial Sequence: Synthetic oligonucleotide
  Sense strand starting at position 2509 of SEQ ID NO: 1561849
cgcuuuacucgagauguug

SEQ ID NO: 1703070 - RNA, 19 nt, Artificial Sequence
  Description of Artificial Sequence: Synthetic oligonucleotide
  Antisense strand to SEQ ID NO: 1703069
caacaucucgaguaaagcg

SEQ ID NO: 1703071 - RNA, 19 nt, Artificial Sequence
  Description of Artificial Sequence: Synthetic oligonucleotide
  Sense strand starting at position 2511 of SEQ ID NO: 1561849
cuuuacucgagauguuguu

SEQ ID NO: 1703072 - RNA, 19 nt, Artificial Sequence
  Description of Artificial Sequence: Synthetic oligonucleotide
  Antisense strand to SEQ ID NO: 1703071
aacaacaucucgaguaaag

SEQ ID NO: 1703073 - RNA, 19 nt, Artificial Sequence
  Description of Artificial Sequence: Synthetic oligonucleotide
  Sense strand starting at position 2749 of SEQ ID NO: 1561849
uuggguauuugcgcguuua

SEQ ID NO: 1703074 - RNA, 19 nt, Artificial Sequence
  Description of Artificial Sequence: Synthetic oligonucleotide
  Antisense strand to SEQ ID NO: 1703073
uaaacgcgcaaauacccaa

SEQ ID NO: 1703075 - RNA, 19 nt, Artificial Sequence
  Description of Artificial Sequence: Synthetic oligonucleotide
  Sense strand starting at position 2750 of SEQ ID NO: 1561849
uggguauuugcgcguuuac

SEQ ID NO: 1703076 - RNA, 19 nt, Artificial Sequence
  Description of Artificial Sequence: Synthetic oligonucleotide
  Antisense strand to SEQ ID NO: 1703075
guaaacgcgcaaauaccca

SEQ ID NO: 1703077 - RNA, 19 nt, Artificial Sequence
  Description of Artificial Sequence: Synthetic oligonucleotide
  Sense strand starting at position 2759 of SEQ ID NO: 1561849
gcgcguuuacuugcuuauu

SEQ ID NO: 1703078 - RNA, 19 nt, Artificial Sequence
  Description of Artificial Sequence: Synthetic oligonucleotide
  Antisense strand to SEQ ID NO: 1703077
aauaagcaaguaaacgcgc

SEQ ID NO: 1703079 - RNA, 19 nt, Artificial Sequence
  Description of Artificial Sequence: Synthetic oligonucleotide
  Sense strand starting at position 2795 of SEQ ID NO: 1561849
gaaugcgaagucugucauu

SEQ ID NO: 1703080 - RNA, 19 nt, Artificial Sequence
  Description of Artificial Sequence: Synthetic oligonucleotide
  Antisense strand to SEQ ID NO: 1703079
aaugacagacuucgcauuc

SEQ ID NO: 1703081 - RNA, 19 nt, Artificial Sequence
  Description of Artificial Sequence: Synthetic oligonucleotide
  Sense strand starting at position 2928 of SEQ ID NO: 1561849
gacggcuucuuucugaagu

SEQ ID NO: 1703082 - RNA, 19 nt, Artificial Sequence
  Description of Artificial Sequence: Synthetic oligonucleotide
  Antisense strand to SEQ ID NO: 1703081
acuucagaaagaagccguc

SEQ ID NO: 1703083 - RNA, 19 nt, Artificial Sequence
  Description of Artificial Sequence: Synthetic oligonucleotide
  Sense strand starting at position 3013 of SEQ ID NO: 1561849
ggucuacucagcgacagua

SEQ ID NO: 1703084 - RNA, 19 nt, Artificial Sequence
  Description of Artificial Sequence: Synthetic oligonucleotide
  Antisense strand to SEQ ID NO: 1703083
uacugucgcugaguagacc

SEQ ID NO: 1703085 - RNA, 19 nt, Artificial Sequence
  Description of Artificial Sequence: Synthetic oligonucleotide
  Sense strand starting at position 3031 of SEQ ID NO: 1561849
aaguccaguucggcaaaua

SEQ ID NO: 1703086 - RNA, 19 nt, Artificial Sequence
  Description of Artificial Sequence: Synthetic oligonucleotide
  Antisense strand to SEQ ID NO: 1703085
uauuugccgaacuggacuu

SEQ ID NO: 1703087 - RNA, 19 nt, Artificial Sequence
  Description of Artificial Sequence: Synthetic oligonucleotide
  Sense strand starting at position 3080 of SEQ ID NO: 1561849
cguuaaucgaaagagcuaa

SEQ ID NO: 1703088 - RNA, 19 nt, Artificial Sequence
  Description of Artificial Sequence: Synthetic oligonucleotide
  Antisense strand to SEQ ID NO: 1703087
uuagcucuuucgauuaacg

SEQ ID NO: 1703089 - RNA, 19 nt, Artificial Sequence
  Description of Artificial Sequence: Synthetic oligonucleotide
  Sense strand starting at position 3091 of SEQ ID NO: 1561849
agagcuaaaucugcaggua

SEQ ID NO: 1703090 - RNA, 19 nt, Artificial Sequence
  Description of Artificial Sequence: Synthetic oligonucleotide
  Antisense strand to SEQ ID NO: 1703089
uaccugcagauuuagcucu

SEQ ID NO: 1703091 - RNA, 19 nt, Artificial Sequence
  Description of Artificial Sequence: Synthetic oligonucleotide
  Sense strand starting at position 3092 of SEQ ID NO: 1561849
gagcuaaaucugcagguau

SEQ ID NO: 1703092 - RNA, 19 nt, Artificial Sequence
  Description of Artificial Sequence: Synthetic oligonucleotide
  Antisense strand to SEQ ID NO: 1703091
auaccugcagauuuagcuc

SEQ ID NO: 1703093 - RNA, 19 nt, Artificial Sequence
  Description of Artificial Sequence: Synthetic oligonucleotide
  Sense strand starting at position 3094 of SEQ ID NO: 1561849
gcuaaaucugcagguauaa

SEQ ID NO: 1703094 - RNA, 19 nt, Artificial Sequence
  Description of Artificial Sequence: Synthetic oligonucleotide
  Antisense strand to SEQ ID NO: 1703093
uuauaccugcagauuuagc

SEQ ID NO: 1703095 - RNA, 19 nt, Artificial Sequence
  Description of Artificial Sequence: Synthetic oligonucleotide
  Sense strand starting at position 3 of SEQ ID NO: 1561850
ucagacgaguuccuuaacu

SEQ ID NO: 1703096 - RNA, 19 nt, Artificial Sequence
  Description of Artificial Sequence: Synthetic oligonucleotide
  Antisense strand to SEQ ID NO: 1703095
aguuaaggaacucgucuga

SEQ ID NO: 1703097 - RNA, 19 nt, Artificial Sequence
  Description of Artificial Sequence: Synthetic oligonucleotide
  Sense strand starting at position 5 of SEQ ID NO: 1561850
agacgaguuccuuaacuug

SEQ ID NO: 1703098 - RNA, 19 nt, Artificial Sequence
  Description of Artificial Sequence: Synthetic oligonucleotide
  Antisense strand to SEQ ID NO: 1703097
caaguuaaggaacucgucu

SEQ ID NO: 1703099 - RNA, 19 nt, Artificial Sequence
  Description of Artificial Sequence: Synthetic oligonucleotide
  Sense strand starting at position 25 of SEQ ID NO: 1561850
cccauaauuugugucagcu

SEQ ID NO: 1703100 - RNA, 19 nt, Artificial Sequence
  Description of Artificial Sequence: Synthetic oligonucleotide
  Antisense strand to SEQ ID NO: 1703099
agcugacacaaauuauggg

SEQ ID NO: 1703101 - RNA, 19 nt, Artificial Sequence
  Description of Artificial Sequence: Synthetic oligonucleotide
  Sense strand starting at position 29 of SEQ ID NO: 1561850
uaauuugugucagcucagu

SEQ ID NO: 1703102 - RNA, 19 nt, Artificial Sequence
  Description of Artificial Sequence: Synthetic oligonucleotide
  Antisense strand to SEQ ID NO: 1703101
acugagcugacacaaauua

SEQ ID NO: 1703103 - RNA, 19 nt, Artificial Sequence
  Description of Artificial Sequence: Synthetic oligonucleotide
  Sense strand starting at position 135 of SEQ ID NO: 1561850
ucuccugaacucugauguu

SEQ ID NO: 1703104 - RNA, 19 nt, Artificial Sequence
  Description of Artificial Sequence: Synthetic oligonucleotide
  Antisense strand to SEQ ID NO: 1703103
aacaucagaguucaggaga

SEQ ID NO: 1703105 - RNA, 19 nt, Artificial Sequence
  Description of Artificial Sequence: Synthetic oligonucleotide
  Sense strand starting at position 144 of SEQ ID NO: 1561850
cucugauguuguuuaccca

SEQ ID NO: 1703106 - RNA, 19 nt, Artificial Sequence
  Description of Artificial Sequence: Synthetic oligonucleotide
  Antisense strand to SEQ ID NO: 1703105
uggguaaacaacaucagag

SEQ ID NO: 1703107 - RNA, 19 nt, Artificial Sequence
  Description of Artificial Sequence: Synthetic oligonucleotide
  Sense strand starting at position 396 of SEQ ID NO: 1561850
cauauugcugccgcaguua

SEQ ID NO: 1703108 - RNA, 19 nt, Artificial Sequence
  Description of Artificial Sequence: Synthetic oligonucleotide
  Antisense strand to SEQ ID NO: 1703107
uaacugcggcagcaauaug

SEQ ID NO: 1703109 - RNA, 19 nt, Artificial Sequence
  Description of Artificial Sequence: Synthetic oligonucleotide
  Sense strand starting at position 471 of SEQ ID NO: 1561850
cccagcaugccuuauaagu

SEQ ID NO: 1703110 - RNA, 19 nt, Artificial Sequence
  Description of Artificial Sequence: Synthetic oligonucleotide
  Antisense strand to SEQ ID NO: 1703109
acuuauaaggcaugcuggg

SEQ ID NO: 1703111 - RNA, 19 nt, Artificial Sequence
  Description of Artificial Sequence: Synthetic oligonucleotide
  Sense strand starting at position 628 of SEQ ID NO: 1561850
guaaccucauccuugagga

SEQ ID NO: 1703112 - RNA, 19 nt, Artificial Sequence
  Description of Artificial Sequence: Synthetic oligonucleotide
  Antisense strand to SEQ ID NO: 1703111
uccucaaggaugagguuac

SEQ ID NO: 1703113 - RNA, 19 nt, Artificial Sequence
  Description of Artificial Sequence: Synthetic oligonucleotide
  Sense strand starting at position 712 of SEQ ID NO: 1561850
gcuauaccuccuuaguauc

SEQ ID NO: 1703114 - RNA, 19 nt, Artificial Sequence
  Description of Artificial Sequence: Synthetic oligonucleotide
  Antisense strand to SEQ ID NO: 1703113
gauacuaaggagguauagc

SEQ ID NO: 1703115 - RNA, 19 nt, Artificial Sequence
  Description of Artificial Sequence: Synthetic oligonucleotide
  Sense strand starting at position 776 of SEQ ID NO: 1561850
agcagaauguguccugaca

SEQ ID NO: 1703116 - RNA, 19 nt, Artificial Sequence
  Description of Artificial Sequence: Synthetic oligonucleotide
  Antisense strand to SEQ ID NO: 1703115
ugucaggacacauucugcu

SEQ ID NO: 1703117 - RNA, 19 nt, Artificial Sequence
  Description of Artificial Sequence: Synthetic oligonucleotide
  Sense strand starting at position 808 of SEQ ID NO: 1561850
ugcucuaugacguaaguga

SEQ ID NO: 1703118 - RNA, 19 nt, Artificial Sequence
  Description of Artificial Sequence: Synthetic oligonucleotide
  Antisense strand to SEQ ID NO: 1703117
ucacuuacgucauagagca

SEQ ID NO: 1703119 - RNA, 19 nt, Artificial Sequence
  Description of Artificial Sequence: Synthetic oligonucleotide
  Sense strand starting at position 812 of SEQ ID NO: 1561850
cuaugacguaagugaaaua

SEQ ID NO: 1703120 - RNA, 19 nt, Artificial Sequence
  Description of Artificial Sequence: Synthetic oligonucleotide
  Antisense strand to SEQ ID NO: 1703119
uauuucacuuacgucauag

SEQ ID NO: 1703121 - RNA, 19 nt, Artificial Sequence
  Description of Artificial Sequence: Synthetic oligonucleotide
  Sense strand starting at position 893 of SEQ ID NO: 1561850
gugucaccuuaggcaauau

SEQ ID NO: 1703122 - RNA, 19 nt, Artificial Sequence
  Description of Artificial Sequence: Synthetic oligonucleotide
  Antisense strand to SEQ ID NO: 1703121
auauugccuaaggugacac

SEQ ID NO: 1703123 - RNA, 19 nt, Artificial Sequence
  Description of Artificial Sequence: Synthetic oligonucleotide
  Sense strand starting at position 1138 of SEQ ID NO: 1561850
agauaauguacaugaagug

SEQ ID NO: 1703124 - RNA, 19 nt, Artificial Sequence
  Description of Artificial Sequence: Synthetic oligonucleotide
  Antisense strand to SEQ ID NO: 1703123
cacuucauguacauuaucu

SEQ ID NO: 1703125 - RNA, 19 nt, Artificial Sequence
  Description of Artificial Sequence: Synthetic oligonucleotide
  Sense strand starting at position 1147 of SEQ ID NO: 1561850
acaugaagugcuuagcacu

SEQ ID NO: 1703126 - RNA, 19 nt, Artificial Sequence
  Description of Artificial Sequence: Synthetic oligonucleotide
  Antisense strand to SEQ ID NO: 1703125
agugcuaagcacuucaugu

SEQ ID NO: 1703127 - RNA, 19 nt, Artificial Sequence
  Description of Artificial Sequence: Synthetic oligonucleotide
  Sense strand starting at position 1259 of SEQ ID NO: 1561850
ugacucagcccuuacugua

SEQ ID NO: 1703128 - RNA, 19 nt, Artificial Sequence
  Description of Artificial Sequence: Synthetic oligonucleotide
  Antisense strand to SEQ ID NO: 1703127
uacaguaagggcugaguca

SEQ ID NO: 1703129 - RNA, 19 nt, Artificial Sequence
  Description of Artificial Sequence: Synthetic oligonucleotide
  Sense strand starting at position 1289 of SEQ ID NO: 1561850
ugcagagacccuuacacau

SEQ ID NO: 1703130 - RNA, 19 nt, Artificial Sequence
  Description of Artificial Sequence: Synthetic oligonucleotide
  Antisense strand to SEQ ID NO: 1703129
auguguaagggucucugca

SEQ ID NO: 1703131 - RNA, 19 nt, Artificial Sequence
  Description of Artificial Sequence: Synthetic oligonucleotide
  Sense strand starting at position 1478 of SEQ ID NO: 1561850
cgauuagaugccugaguga

SEQ ID NO: 1703132 - RNA, 19 nt, Artificial Sequence
  Description of Artificial Sequence: Synthetic oligonucleotide
  Antisense strand to SEQ ID NO: 1703131
ucacucaggcaucuaaucg

SEQ ID NO: 1703133 - RNA, 19 nt, Artificial Sequence
  Description of Artificial Sequence: Synthetic oligonucleotide
  Sense strand starting at position 1493 of SEQ ID NO: 1561850
gugagcaagaaaugcuaaa

SEQ ID NO: 1703134 - RNA, 19 nt, Artificial Sequence
  Description of Artificial Sequence: Synthetic oligonucleotide
  Antisense strand to SEQ ID NO: 1703133
uuuagcauuucuugcucac

SEQ ID NO: 1703135 - RNA, 19 nt, Artificial Sequence
  Description of Artificial Sequence: Synthetic oligonucleotide
  Sense strand starting at position 1515 of SEQ ID NO: 1561850
ucaggcaaccuguaaauau

SEQ ID NO: 1703136 - RNA, 19 nt, Artificial Sequence
  Description of Artificial Sequence: Synthetic oligonucleotide
  Antisense strand to SEQ ID NO: 1703135
auauuuacagguugccuga

SEQ ID NO: 1703137 - RNA, 19 nt, Artificial Sequence
  Description of Artificial Sequence: Synthetic oligonucleotide
  Sense strand starting at position 2204 of SEQ ID NO: 1561850
ggcagcagagcuggaaaua

SEQ ID NO: 1703138 - RNA, 19 nt, Artificial Sequence
  Description of Artificial Sequence: Synthetic oligonucleotide
  Antisense strand to SEQ ID NO: 1703137
uauuuccagcucugcugcc

SEQ ID NO: 1703139 - RNA, 19 nt, Artificial Sequence
  Description of Artificial Sequence: Synthetic oligonucleotide
  Sense strand starting at position 2205 of SEQ ID NO: 1561850
gcagcagagcuggaaauaa

SEQ ID NO: 1703140 - RNA, 19 nt, Artificial Sequence
  Description of Artificial Sequence: Synthetic oligonucleotide
  Antisense strand to SEQ ID NO: 1703139
uuauuuccagcucugcugc

SEQ ID NO: 1703141 - RNA, 19 nt, Artificial Sequence
  Description of Artificial Sequence: Synthetic oligonucleotide
  Sense strand starting at position 2429 of SEQ ID NO: 1561850
gggacugcaguguguauuu

SEQ ID NO: 1703142 - RNA, 19 nt, Artificial Sequence
  Description of Artificial Sequence: Synthetic oligonucleotide
  Antisense strand to SEQ ID NO: 1703141
aaauacacacugcaguccc

SEQ ID NO: 1703143 - RNA, 19 nt, Artificial Sequence
  Description of Artificial Sequence: Synthetic oligonucleotide
  Sense strand starting at position 2526 of SEQ ID NO: 1561850
cacacagcuccagagugau

SEQ ID NO: 1703144 - RNA, 19 nt, Artificial Sequence
  Description of Artificial Sequence: Synthetic oligonucleotide
  Antisense strand to SEQ ID NO: 1703143
aucacucuggagcugugug

SEQ ID NO: 1703145 - RNA, 19 nt, Artificial Sequence
  Description of Artificial Sequence: Synthetic oligonucleotide
  Sense strand starting at position 2532 of SEQ ID NO: 1561850
gcuccagagugauuagacu

SEQ ID NO: 1703146 - RNA, 19 nt, Artificial Sequence
  Description of Artificial Sequence: Synthetic oligonucleotide
  Antisense strand to SEQ ID NO: 1703145
agucuaaucacucuggagc

SEQ ID NO: 1703147 - RNA, 19 nt, Artificial Sequence
  Description of Artificial Sequence: Synthetic oligonucleotide
  Sense strand starting at position 2538 of SEQ ID NO: 1561850
gagugauuagacuguuauu

SEQ ID NO: 1703148 - RNA, 19 nt, Artificial Sequence
  Description of Artificial Sequence: Synthetic oligonucleotide
  Antisense strand to SEQ ID NO: 1703147
aauaacagucuaaucacuc

SEQ ID NO: 1703149 - RNA, 19 nt, Artificial Sequence
  Description of Artificial Sequence: Synthetic oligonucleotide
  Sense strand starting at position 2541 of SEQ ID NO: 1561850
ugauuagacuguuauuuag

SEQ ID NO: 1703150 - RNA, 19 nt, Artificial Sequence
  Description of Artificial Sequence: Synthetic oligonucleotide
  Antisense strand to SEQ ID NO: 1703149
cuaaauaacagucuaauca

SEQ ID NO: 1703151 - RNA, 19 nt, Artificial Sequence
  Description of Artificial Sequence: Synthetic oligonucleotide
  Sense strand starting at position 2622 of SEQ ID NO: 1561850
uguaauaucugcccuagau

SEQ ID NO: 1703152 - RNA, 19 nt, Artificial Sequence
  Description of Artificial Sequence: Synthetic oligonucleotide
  Antisense strand to SEQ ID NO: 1703151
aucuagggcagauauuaca

SEQ ID NO: 1703153 - RNA, 19 nt, Artificial Sequence
  Description of Artificial Sequence: Synthetic oligonucleotide
  Sense strand starting at position 2667 of SEQ ID NO: 1561850
uggcuagaugguuauggaa

SEQ ID NO: 1703154 - RNA, 19 nt, Artificial Sequence
  Description of Artificial Sequence: Synthetic oligonucleotide
  Antisense strand to SEQ ID NO: 1703153
uuccauaaccaucuagcca

SEQ ID NO: 1703155 - RNA, 19 nt, Artificial Sequence
  Description of Artificial Sequence: Synthetic oligonucleotide
  Sense strand starting at position 2681 of SEQ ID NO: 1561850
uggaauauuucuuaagcau

SEQ ID NO: 1703156 - RNA, 19 nt, Artificial Sequence
  Description of Artificial Sequence: Synthetic oligonucleotide
  Antisense strand to SEQ ID NO: 1703155
augcuuaagaaauauucca

SEQ ID NO: 1703157 - RNA, 19 nt, Artificial Sequence
  Description of Artificial Sequence: Synthetic oligonucleotide
  Sense strand starting at position 3081 of SEQ ID NO: 1561850
gcaaucuuggauuaauucu

SEQ ID NO: 1703158 - RNA, 19 nt, Artificial Sequence
  Description of Artificial Sequence: Synthetic oligonucleotide
  Antisense strand to SEQ ID NO: 1703157
agaauuaauccaagauugc

SEQ ID NO: 1703159 - RNA, 19 nt, Artificial Sequence
  Description of Artificial Sequence: Synthetic oligonucleotide
  Sense strand starting at position 3107 of SEQ ID NO: 1561850
ccuagaaacuauguugauc

SEQ ID NO: 1703160 - RNA, 19 nt, Artificial Sequence
  Description of Artificial Sequence: Synthetic oligonucleotide
  Antisense strand to SEQ ID NO: 1703159
gaucaacauaguuucuagg

SEQ ID NO: 1703161 - RNA, 19 nt, Artificial Sequence
  Description of Artificial Sequence: Synthetic oligonucleotide
  Sense strand starting at position 3141 of SEQ ID NO: 1561850
guagauaugucaucuaagg

SEQ ID NO: 1703162 - RNA, 19 nt, Artificial Sequence
  Description of Artificial Sequence: Synthetic oligonucleotide
  Antisense strand to SEQ ID NO: 1703161
ccuuagaugacauaucuac

SEQ ID NO: 1703163 - RNA, 19 nt, Artificial Sequence
  Description of Artificial Sequence: Synthetic oligonucleotide
  Sense strand starting at position 3183 of SEQ ID NO: 1561850
caggcuuauguugaauaau

SEQ ID NO: 1703164 - RNA, 19 nt, Artificial Sequence
  Description of Artificial Sequence: Synthetic oligonucleotide
  Antisense strand to SEQ ID NO: 1703163
auuauucaacauaagccug

SEQ ID NO: 1703165 - RNA, 19 nt, Artificial Sequence
  Description of Artificial Sequence: Synthetic oligonucleotide
  Sense strand starting at position 3186 of SEQ ID NO: 1561850
gcuuauguugaauaaugac

SEQ ID NO: 1703166 - RNA, 19 nt, Artificial Sequence
  Description of Artificial Sequence: Synthetic oligonucleotide
  Antisense strand to SEQ ID NO: 1703165
gucauuauucaacauaagc

SEQ ID NO: 1703167 - RNA, 19 nt, Artificial Sequence
  Description of Artificial Sequence: Synthetic oligonucleotide
  Sense strand starting at position 3409 of SEQ ID NO: 1561850
gccagucuggucgacaacu

SEQ ID NO: 1703168 - RNA, 19 nt, Artificial Sequence
  Description of Artificial Sequence: Synthetic oligonucleotide
  Antisense strand to SEQ ID NO: 1703167
aguugucgaccagacuggc

SEQ ID NO: 1703169 - RNA, 19 nt, Artificial Sequence
  Description of Artificial Sequence: Synthetic oligonucleotide
  Sense strand starting at position 3623 of SEQ ID NO: 1561850
cugggcuuagggcgaauua

SEQ ID NO: 1703170 - RNA, 19 nt, Artificial Sequence
  Description of Artificial Sequence: Synthetic oligonucleotide
  Antisense strand to SEQ ID NO: 1703169
uaauucgcccuaagcccag

SEQ ID NO: 1703171 - RNA, 19 nt, Artificial Sequence
  Description of Artificial Sequence: Synthetic oligonucleotide
  Sense strand starting at position 3624 of SEQ ID NO: 1561850
ugggcuuagggcgaauuaa

SEQ ID NO: 1703172 - RNA, 19 nt, Artificial Sequence
  Description of Artificial Sequence: Synthetic oligonucleotide
  Antisense strand to SEQ ID NO: 1703171
uuaauucgcccuaagccca

SEQ ID NO: 1703173 - RNA, 19 nt, Artificial Sequence
  Description of Artificial Sequence: Synthetic oligonucleotide
  Sense strand starting at position 3827 of SEQ ID NO: 1561850
uagggauagcagcacuauu

SEQ ID NO: 1703174 - RNA, 19 nt, Artificial Sequence
  Description of Artificial Sequence: Synthetic oligonucleotide
  Antisense strand to SEQ ID NO: 1703173
aauagugcugcuaucccua

SEQ ID NO: 1703175 - RNA, 19 nt, Artificial Sequence
  Description of Artificial Sequence: Synthetic oligonucleotide
  Sense strand starting at position 39 of SEQ ID NO: 1561851
agugcaaguccuugauaca

SEQ ID NO: 1703176 - RNA, 19 nt, Artificial Sequence
  Description of Artificial Sequence: Synthetic oligonucleotide
  Antisense strand to SEQ ID NO: 1703175
uguaucaaggacuugcacu

SEQ ID NO: 1703177 - RNA, 19 nt, Artificial Sequence
  Description of Artificial Sequence: Synthetic oligonucleotide
  Sense strand starting at position 40 of SEQ ID NO: 1561851
gugcaaguccuugauacaa

SEQ ID NO: 1703178 - RNA, 19 nt, Artificial Sequence
  Description of Artificial Sequence: Synthetic oligonucleotide
  Antisense strand to SEQ ID NO: 1703177
uuguaucaaggacuugcac

SEQ ID NO: 1703179 - RNA, 19 nt, Artificial Sequence
  Description of Artificial Sequence: Synthetic oligonucleotide
  Sense strand starting at position 42 of SEQ ID NO: 1561851
gcaaguccuugauacaaug

SEQ ID NO: 1703180 - RNA, 19 nt, Artificial Sequence
  Description of Artificial Sequence: Synthetic oligonucleotide
  Antisense strand to SEQ ID NO: 1703179
cauuguaucaaggacuugc

SEQ ID NO: 1703181 - RNA, 19 nt, Artificial Sequence
  Description of Artificial Sequence: Synthetic oligonucleotide
  Sense strand starting at position 519 of SEQ ID NO: 1561851
ugaagugaguuuccaaauu

SEQ ID NO: 1703182 - RNA, 19 nt, Artificial Sequence
  Description of Artificial Sequence: Synthetic oligonucleotide
  Antisense strand to SEQ ID NO: 1703181
aauuuggaaacucacuuca

SEQ ID NO: 1703183 - RNA, 19 nt, Artificial Sequence
  Description of Artificial Sequence: Synthetic oligonucleotide
  Sense strand starting at position 527 of SEQ ID NO: 1561851
guuuccaaauuauuaggua

SEQ ID NO: 1703184 - RNA, 19 nt, Artificial Sequence
  Description of Artificial Sequence: Synthetic oligonucleotide
  Antisense strand to SEQ ID NO: 1703183
uaccuaauaauuuggaaac

SEQ ID NO: 1703185 - RNA, 19 nt, Artificial Sequence
  Description of Artificial Sequence: Synthetic oligonucleotide
  Sense strand starting at position 539 of SEQ ID NO: 1561851
uuagguaaaucagauauga

SEQ ID NO: 1703186 - RNA, 19 nt, Artificial Sequence
  Description of Artificial Sequence: Synthetic oligonucleotide
  Antisense strand to SEQ ID NO: 1703185
ucauaucugauuuaccuaa

SEQ ID NO: 1703187 - RNA, 19 nt, Artificial Sequence
  Description of Artificial Sequence: Synthetic oligonucleotide
  Sense strand starting at position 591 of SEQ ID NO: 1561851
acgcaaucuugcuccguca

SEQ ID NO: 1703188 - RNA, 19 nt, Artificial Sequence
  Description of Artificial Sequence: Synthetic oligonucleotide
  Antisense strand to SEQ ID NO: 1703187
ugacggagcaagauugcgu

SEQ ID NO: 1703189 - RNA, 19 nt, Artificial Sequence
  Description of Artificial Sequence: Synthetic oligonucleotide
  Sense strand starting at position 903 of SEQ ID NO: 1561851
cacggucaacacugaugua

SEQ ID NO: 1703190 - RNA, 19 nt, Artificial Sequence
  Description of Artificial Sequence: Synthetic oligonucleotide
  Antisense strand to SEQ ID NO: 1703189
uacaucaguguugaccgug

SEQ ID NO: 1703191 - RNA, 19 nt, Artificial Sequence
  Description of Artificial Sequence: Synthetic oligonucleotide
  Sense strand starting at position 904 of SEQ ID NO: 1561851
acggucaacacugauguaa

SEQ ID NO: 1703192 - RNA, 19 nt, Artificial Sequence
  Description of Artificial Sequence: Synthetic oligonucleotide
  Antisense strand to SEQ ID NO: 1703191
uuacaucaguguugaccgu

SEQ ID NO: 1703193 - RNA, 19 nt, Artificial Sequence
  Description of Artificial Sequence: Synthetic oligonucleotide
  Sense strand starting at position 906 of SEQ ID NO: 1561851
ggucaacacugauguaauu

SEQ ID NO: 1703194 - RNA, 19 nt, Artificial Sequence
  Description of Artificial Sequence: Synthetic oligonucleotide
  Antisense strand to SEQ ID NO: 1703193
aauuacaucaguguugacc

SEQ ID NO: 1703195 - RNA, 19 nt, Artificial Sequence
  Description of Artificial Sequence: Synthetic oligonucleotide
  Sense strand starting at position 923 of SEQ ID NO: 1561851
uugaaacuguuguauuuga

SEQ ID NO: 1703196 - RNA, 19 nt, Artificial Sequence
  Description of Artificial Sequence: Synthetic oligonucleotide
  Antisense strand to SEQ ID NO: 1703195
ucaaauacaacaguuucaa

SEQ ID NO: 1703197 - RNA, 19 nt, Artificial Sequence
  Description of Artificial Sequence: Synthetic oligonucleotide
  Sense strand starting at position 937 of SEQ ID NO: 1561851
uuugaaguguuagcaaaga

SEQ ID NO: 1703198 - RNA, 19 nt, Artificial Sequence
  Description of Artificial Sequence: Synthetic oligonucleotide
  Antisense strand to SEQ ID NO: 1703197
ucuuugcuaacacuucaaa

SEQ ID NO: 1703199 - RNA, 19 nt, Artificial Sequence
  Description of Artificial Sequence: Synthetic oligonucleotide
  Sense strand starting at position 1167 of SEQ ID NO: 1561851
aggucaggucccugagagu

SEQ ID NO: 1703200 - RNA, 19 nt, Artificial Sequence
  Description of Artificial Sequence: Synthetic oligonucleotide
  Antisense strand to SEQ ID NO: 1703199
acucucagggaccugaccu

SEQ ID NO: 1703201 - RNA, 19 nt, Artificial Sequence
  Description of Artificial Sequence: Synthetic oligonucleotide
  Sense strand starting at position 2960 of SEQ ID NO: 1561851
gcaccucgaucccauagau

SEQ ID NO: 1703202 - RNA, 19 nt, Artificial Sequence
  Description of Artificial Sequence: Synthetic oligonucleotide
  Antisense strand to SEQ ID NO: 1703201
aucuaugggaucgaggugc

SEQ ID NO: 1703203 - RNA, 19 nt, Artificial Sequence
  Description of Artificial Sequence: Synthetic oligonucleotide
  Sense strand starting at position 3134 of SEQ ID NO: 1561851
agggcucauuuauauguuu

SEQ ID NO: 1703204 - RNA, 19 nt, Artificial Sequence
  Description of Artificial Sequence: Synthetic oligonucleotide
  Antisense strand to SEQ ID NO: 1703203
aaacauauaaaugagcccu

SEQ ID NO: 1703205 - RNA, 19 nt, Artificial Sequence
  Description of Artificial Sequence: Synthetic oligonucleotide
  Sense strand starting at position 3312 of SEQ ID NO: 1561851
gaccgaaauuagucggaaa

SEQ ID NO: 1703206 - RNA, 19 nt, Artificial Sequence
  Description of Artificial Sequence: Synthetic oligonucleotide
  Antisense strand to SEQ ID NO: 1703205
uuuccgacuaauuucgguc

SEQ ID NO: 1703207 - RNA, 19 nt, Artificial Sequence
  Description of Artificial Sequence: Synthetic oligonucleotide
  Sense strand starting at position 3369 of SEQ ID NO: 1561851
ugugcucacacuuguagga

SEQ ID NO: 1703208 - RNA, 19 nt, Artificial Sequence
  Description of Artificial Sequence: Synthetic oligonucleotide
  Antisense strand to SEQ ID NO: 1703207
uccuacaagugugagcaca

SEQ ID NO: 1703209 - RNA, 19 nt, Artificial Sequence
  Description of Artificial Sequence: Synthetic oligonucleotide
  Sense strand starting at position 3674 of SEQ ID NO: 1561851
agccuuugucagugcuacu

SEQ ID NO: 1703210 - RNA, 19 nt, Artificial Sequence
  Description of Artificial Sequence: Synthetic oligonucleotide
  Antisense strand to SEQ ID NO: 1703209
aguagcacugacaaaggcu

SEQ ID NO: 1703211 - RNA, 19 nt, Artificial Sequence
  Description of Artificial Sequence: Synthetic oligonucleotide
  Sense strand starting at position 3677 of SEQ ID NO: 1561851
cuuugucagugcuacuauu

SEQ ID NO: 1703212 - RNA, 19 nt, Artificial Sequence
  Description of Artificial Sequence: Synthetic oligonucleotide
  Antisense strand to SEQ ID NO: 1703211
aauaguagcacugacaaag

SEQ ID NO: 1703213 - RNA, 19 nt, Artificial Sequence
  Description of Artificial Sequence: Synthetic oligonucleotide
  Sense strand starting at position 3704 of SEQ ID NO: 1561851
ugguaaauaugagaggguu

SEQ ID NO: 1703214 - RNA, 19 nt, Artificial Sequence
  Description of Artificial Sequence: Synthetic oligonucleotide
  Antisense strand to SEQ ID NO: 1703213
aacccucucauauuuacca

SEQ ID NO: 1703215 - RNA, 19 nt, Artificial Sequence
  Description of Artificial Sequence: Synthetic oligonucleotide
  Sense strand starting at position 3716 of SEQ ID NO: 1561851
gaggguucacgcggucuau

SEQ ID NO: 1703216 - RNA, 19 nt, Artificial Sequence
  Description of Artificial Sequence: Synthetic oligonucleotide
  Antisense strand to SEQ ID NO: 1703215
auagaccgcgugaacccuc

SEQ ID NO: 1703217 - RNA, 19 nt, Artificial Sequence
  Description of Artificial Sequence: Synthetic oligonucleotide
  Sense strand starting at position 3726 of SEQ ID NO: 1561851
gcggucuaugugugucauu

SEQ ID NO: 1703218 - RNA, 19 nt, Artificial Sequence
  Description of Artificial Sequence: Synthetic oligonucleotide
  Antisense strand to SEQ ID NO: 1703217
aaugacacacauagaccgc

SEQ ID NO: 1703219 - RNA, 19 nt, Artificial Sequence
  Description of Artificial Sequence: Synthetic oligonucleotide
  Sense strand starting at position 3727 of SEQ ID NO: 1561851
cggucuaugugugucauuu

SEQ ID NO: 1703220 - RNA, 19 nt, Artificial Sequence
  Description of Artificial Sequence: Synthetic oligonucleotide
  Antisense strand to SEQ ID NO: 1703219
aaaugacacacauagaccg

SEQ ID NO: 1703221 - RNA, 19 nt, Artificial Sequence
  Description of Artificial Sequence: Synthetic oligonucleotide
  Sense strand starting at position 3729 of SEQ ID NO: 1561851
gucuaugugugucauuuau

SEQ ID NO: 1703222 - RNA, 19 nt, Artificial Sequence
  Description of Artificial Sequence: Synthetic oligonucleotide
  Antisense strand to SEQ ID NO: 1703221
auaaaugacacacauagac

SEQ ID NO: 1703223 - RNA, 19 nt, Artificial Sequence
  Description of Artificial Sequence: Synthetic oligonucleotide
  Sense strand starting at position 3735 of SEQ ID NO: 1561851
gugugucauuuaucugagu

SEQ ID NO: 1703224 - RNA, 19 nt, Artificial Sequence
  Description of Artificial Sequence: Synthetic oligonucleotide
  Antisense strand to SEQ ID NO: 1703223
acucagauaaaugacacac

SEQ ID NO: 1703225 - RNA, 19 nt, Artificial Sequence
  Description of Artificial Sequence: Synthetic oligonucleotide
  Sense strand starting at position 3736 of SEQ ID NO: 1561851
ugugucauuuaucugaguu

SEQ ID NO: 1703226 - RNA, 19 nt, Artificial Sequence
  Description of Artificial Sequence: Synthetic oligonucleotide
  Antisense strand to SEQ ID NO: 1703225
aacucagauaaaugacaca

SEQ ID NO: 1703227 - RNA, 19 nt, Artificial Sequence
  Description of Artificial Sequence: Synthetic oligonucleotide
  Sense strand starting at position 3737 of SEQ ID NO: 1561851
gugucauuuaucugaguuu

SEQ ID NO: 1703228 - RNA, 19 nt, Artificial Sequence
  Description of Artificial Sequence: Synthetic oligonucleotide
  Antisense strand to SEQ ID NO: 1703227
aaacucagauaaaugacac

SEQ ID NO: 1703229 - RNA, 19 nt, Artificial Sequence
  Description of Artificial Sequence: Synthetic oligonucleotide
  Sense strand starting at position 3738 of SEQ ID NO: 1561851
ugucauuuaucugaguuug

SEQ ID NO: 1703230 - RNA, 19 nt, Artificial Sequence
  Description of Artificial Sequence: Synthetic oligonucleotide
  Antisense strand to SEQ ID NO: 1703229
caaacucagauaaaugaca

SEQ ID NO: 1703231 - RNA, 19 nt, Artificial Sequence
  Description of Artificial Sequence: Synthetic oligonucleotide
  Sense strand starting at position 3746 of SEQ ID NO: 1561851
aucugaguuugccuaucgu

SEQ ID NO: 1703232 - RNA, 19 nt, Artificial Sequence
  Description of Artificial Sequence: Synthetic oligonucleotide
  Antisense strand to SEQ ID NO: 1703231
acgauaggcaaacucagau

SEQ ID NO: 1703233 - RNA, 19 nt, Artificial Sequence
  Description of Artificial Sequence: Synthetic oligonucleotide
  Sense strand starting at position 77 of SEQ ID NO: 1561852
aggccaucuccuuauaguu

SEQ ID NO: 1703234 - RNA, 19 nt, Artificial Sequence
  Description of Artificial Sequence: Synthetic oligonucleotide
  Antisense strand to SEQ ID NO: 1703233
aacuauaaggagauggccu

SEQ ID NO: 1703235 - RNA, 19 nt, Artificial Sequence
  Description of Artificial Sequence: Synthetic oligonucleotide
  Sense strand starting at position 364 of SEQ ID NO: 1561852
uuaucugauuugugaaugu

SEQ ID NO: 1703236 - RNA, 19 nt, Artificial Sequence
  Description of Artificial Sequence: Synthetic oligonucleotide
  Antisense strand to SEQ ID NO: 1703235
acauucacaaaucagauaa

SEQ ID NO: 1703237 - RNA, 19 nt, Artificial Sequence
  Description of Artificial Sequence: Synthetic oligonucleotide
  Sense strand starting at position 371 of SEQ ID NO: 1561852
auuugugaaugucuuuguu

SEQ ID NO: 1703238 - RNA, 19 nt, Artificial Sequence
  Description of Artificial Sequence: Synthetic oligonucleotide
  Antisense strand to SEQ ID NO: 1703237
aacaaagacauucacaaau

SEQ ID NO: 1703239 - RNA, 19 nt, Artificial Sequence
  Description of Artificial Sequence: Synthetic oligonucleotide
  Sense strand starting at position 605 of SEQ ID NO: 1561852
gggcacuucucguacuaac

SEQ ID NO: 1703240 - RNA, 19 nt, Artificial Sequence
  Description of Artificial Sequence: Synthetic oligonucleotide
  Antisense strand to SEQ ID NO: 1703239
guuaguacgagaagugccc

SEQ ID NO: 1703241 - RNA, 19 nt, Artificial Sequence
  Description of Artificial Sequence: Synthetic oligonucleotide
  Sense strand starting at position 1178 of SEQ ID NO: 1561852
cguguaggccucgcggaaa

SEQ ID NO: 1703242 - RNA, 19 nt, Artificial Sequence
  Description of Artificial Sequence: Synthetic oligonucleotide
  Antisense strand to SEQ ID NO: 1703241
uuuccgcgaggccuacacg

SEQ ID NO: 1703243 - RNA, 19 nt, Artificial Sequence
  Description of Artificial Sequence: Synthetic oligonucleotide
  Sense strand starting at position 3259 of SEQ ID NO: 1561852
uugcgcuccuugucuguua

SEQ ID NO: 1703244 - RNA, 19 nt, Artificial Sequence
  Description of Artificial Sequence: Synthetic oligonucleotide
  Antisense strand to SEQ ID NO: 1703243
uaacagacaaggagcgcaa

SEQ ID NO: 1703245 - RNA, 19 nt, Artificial Sequence
  Description of Artificial Sequence: Synthetic oligonucleotide
  Sense strand starting at position 3264 of SEQ ID NO: 1561852
cuccuugucuguuaggaac

SEQ ID NO: 1703246 - RNA, 19 nt, Artificial Sequence
  Description of Artificial Sequence: Synthetic oligonucleotide
  Antisense strand to SEQ ID NO: 1703245
guuccuaacagacaaggag

SEQ ID NO: 1703247 - RNA, 19 nt, Artificial Sequence
  Description of Artificial Sequence: Synthetic oligonucleotide
  Sense strand starting at position 3266 of SEQ ID NO: 1561852
ccuugucuguuaggaacuu

SEQ ID NO: 1703248 - RNA, 19 nt, Artificial Sequence
  Description of Artificial Sequence: Synthetic oligonucleotide
  Antisense strand to SEQ ID NO: 1703247
aaguuccuaacagacaagg

SEQ ID NO: 1703249 - RNA, 19 nt, Artificial Sequence
  Description of Artificial Sequence: Synthetic oligonucleotide
  Sense strand starting at position 3316 of SEQ ID NO: 1561852
ggguucuucgcgagcuucu

SEQ ID NO: 1703250 - RNA, 19 nt, Artificial Sequence
  Description of Artificial Sequence: Synthetic oligonucleotide
  Antisense strand to SEQ ID NO: 1703249
agaagcucgcgaagaaccc

SEQ ID NO: 1703251 - RNA, 19 nt, Artificial Sequence
  Description of Artificial Sequence: Synthetic oligonucleotide
  Sense strand starting at position 3807 of SEQ ID NO: 1561852
gcaggagucuguuuacccu

SEQ ID NO: 1703252 - RNA, 19 nt, Artificial Sequence
  Description of Artificial Sequence: Synthetic oligonucleotide
  Antisense strand to SEQ ID NO: 1703251
aggguaaacagacuccugc

SEQ ID NO: 1703253 - RNA, 19 nt, Artificial Sequence
  Description of Artificial Sequence: Synthetic oligonucleotide
  Sense strand starting at position 2064 of SEQ ID NO: 1561853
gugccgauucgguccgaaa

SEQ ID NO: 1703254 - RNA, 19 nt, Artificial Sequence
  Description of Artificial Sequence: Synthetic oligonucleotide
  Antisense strand to SEQ ID NO: 1703253
uuucggaccgaaucggcac

SEQ ID NO: 1703255 - RNA, 19 nt, Artificial Sequence
  Description of Artificial Sequence: Synthetic oligonucleotide
  Sense strand starting at position 2438 of SEQ ID NO: 1561853
cccugaaacucugagucau

SEQ ID NO: 1703256 - RNA, 19 nt, Artificial Sequence
  Description of Artificial Sequence: Synthetic oligonucleotide
  Antisense strand to SEQ ID NO: 1703255
augacucagaguuucaggg

SEQ ID NO: 1703257 - RNA, 19 nt, Artificial Sequence
  Description of Artificial Sequence: Synthetic oligonucleotide
  Sense strand starting at position 2636 of SEQ ID NO: 1561853
uuuaaaugccuugggugua

SEQ ID NO: 1703258 - RNA, 19 nt, Artificial Sequence
  Description of Artificial Sequence: Synthetic oligonucleotide
  Antisense strand to SEQ ID NO: 1703257
uacacccaaggcauuuaaa

SEQ ID NO: 1703259 - RNA, 19 nt, Artificial Sequence
  Description of Artificial Sequence: Synthetic oligonucleotide
  Sense strand starting at position 2683 of SEQ ID NO: 1561853
ugagguuggcuccgguaaa

SEQ ID NO: 1703260 - RNA, 19 nt, Artificial Sequence
  Description of Artificial Sequence: Synthetic oligonucleotide
  Antisense strand to SEQ ID NO: 1703259
uuuaccggagccaaccuca

SEQ ID NO: 1703261 - RNA, 19 nt, Artificial Sequence
  Description of Artificial Sequence: Synthetic oligonucleotide
  Sense strand starting at position 2684 of SEQ ID NO: 1561853
gagguuggcuccgguaaag

SEQ ID NO: 1703262 - RNA, 19 nt, Artificial Sequence
  Description of Artificial Sequence: Synthetic oligonucleotide
  Antisense strand to SEQ ID NO: 1703261
cuuuaccggagccaaccuc

SEQ ID NO: 1703263 - RNA, 19 nt, Artificial Sequence
  Description of Artificial Sequence: Synthetic oligonucleotide
  Sense strand starting at position 2771 of SEQ ID NO: 1561853
ggugcucucuuguuuaugu

SEQ ID NO: 1703264 - RNA, 19 nt, Artificial Sequence
  Description of Artificial Sequence: Synthetic oligonucleotide
  Antisense strand to SEQ ID NO: 1703263
acauaaacaagagagcacc

SEQ ID NO: 1703265 - RNA, 19 nt, Artificial Sequence
  Description of Artificial Sequence: Synthetic oligonucleotide
  Sense strand starting at position 2945 of SEQ ID NO: 1561853
uguucuagggaaggguuaa

SEQ ID NO: 1703266 - RNA, 19 nt, Artificial Sequence
  Description of Artificial Sequence: Synthetic oligonucleotide
  Antisense strand to SEQ ID NO: 1703265
uuaacccuucccuagaaca

SEQ ID NO: 1703267 - RNA, 19 nt, Artificial Sequence
  Description of Artificial Sequence: Synthetic oligonucleotide
  Sense strand starting at position 2946 of SEQ ID NO: 1561853
guucuagggaaggguuaaa

SEQ ID NO: 1703268 - RNA, 19 nt, Artificial Sequence
  Description of Artificial Sequence: Synthetic oligonucleotide
  Antisense strand to SEQ ID NO: 1703267
uuuaacccuucccuagaac

SEQ ID NO: 1703269 - RNA, 19 nt, Artificial Sequence
  Description of Artificial Sequence: Synthetic oligonucleotide
  Sense strand starting at position 2997 of SEQ ID NO: 1561853
gggugguuucgagacugga

SEQ ID NO: 1703270 - RNA, 19 nt, Artificial Sequence
  Description of Artificial Sequence: Synthetic oligonucleotide
  Antisense strand to SEQ ID NO: 1703269
uccagucucgaaaccaccc

SEQ ID NO: 1703271 - RNA, 19 nt, Artificial Sequence
  Description of Artificial Sequence: Synthetic oligonucleotide
  Sense strand starting at position 3000 of SEQ ID NO: 1561853
ugguuucgagacuggacaa

SEQ ID NO: 1703272 - RNA, 19 nt, Artificial Sequence
  Description of Artificial Sequence: Synthetic oligonucleotide
  Antisense strand to SEQ ID NO: 1703271
uuguccagucucgaaacca

SEQ ID NO: 1703273 - RNA, 19 nt, Artificial Sequence
  Description of Artificial Sequence: Synthetic oligonucleotide
  Sense strand starting at position 3175 of SEQ ID NO: 1561853
ucucgcucuggguaucuua

SEQ ID NO: 1703274 - RNA, 19 nt, Artificial Sequence
  Description of Artificial Sequence: Synthetic oligonucleotide
  Antisense strand to SEQ ID NO: 1703273
uaagauacccagagcgaga

SEQ ID NO: 1703275 - RNA, 19 nt, Artificial Sequence
  Description of Artificial Sequence: Synthetic oligonucleotide
  Sense strand starting at position 3182 of SEQ ID NO: 1561853
cuggguaucuuaggguagu

SEQ ID NO: 1703276 - RNA, 19 nt, Artificial Sequence
  Description of Artificial Sequence: Synthetic oligonucleotide
  Antisense strand to SEQ ID NO: 1703275
acuacccuaagauacccag

SEQ ID NO: 1703277 - RNA, 19 nt, Artificial Sequence
  Description of Artificial Sequence: Synthetic oligonucleotide
  Sense strand starting at position 3352 of SEQ ID NO: 1561853
ggccuugaugugugcacau

SEQ ID NO: 1703278 - RNA, 19 nt, Artificial Sequence
  Description of Artificial Sequence: Synthetic oligonucleotide
  Antisense strand to SEQ ID NO: 1703277
augugcacacaucaaggcc

SEQ ID NO: 1703279 - RNA, 19 nt, Artificial Sequence
  Description of Artificial Sequence: Synthetic oligonucleotide
  Sense strand starting at position 3466 of SEQ ID NO: 1561853
cggucucaccagugagaca

SEQ ID NO: 1703280 - RNA, 19 nt, Artificial Sequence
  Description of Artificial Sequence: Synthetic oligonucleotide
  Antisense strand to SEQ ID NO: 1703279
ugucucacuggugagaccg

SEQ ID NO: 1703281 - RNA, 19 nt, Artificial Sequence
  Description of Artificial Sequence: Synthetic oligonucleotide
  Sense strand starting at position 3533 of SEQ ID NO: 1561853
ggucaucugaccugcagaa

SEQ ID NO: 1703282 - RNA, 19 nt, Artificial Sequence
  Description of Artificial Sequence: Synthetic oligonucleotide
  Antisense strand to SEQ ID NO: 1703281
uucugcaggucagaugacc

SEQ ID NO: 1703283 - RNA, 19 nt, Artificial Sequence
  Description of Artificial Sequence: Synthetic oligonucleotide
  Sense strand starting at position 3655 of SEQ ID NO: 1561853
caaguugcgaucccguuua

SEQ ID NO: 1703284 - RNA, 19 nt, Artificial Sequence
  Description of Artificial Sequence: Synthetic oligonucleotide
  Antisense strand to SEQ ID NO: 1703283
uaaacgggaucgcaacuug

SEQ ID NO: 1703285 - RNA, 19 nt, Artificial Sequence
  Description of Artificial Sequence: Synthetic oligonucleotide
  Sense strand starting at position 3657 of SEQ ID NO: 1561853
aguugcgaucccguuuagu

SEQ ID NO: 1703286 - RNA, 19 nt, Artificial Sequence
  Description of Artificial Sequence: Synthetic oligonucleotide
  Antisense strand to SEQ ID NO: 1703285
acuaaacgggaucgcaacu

SEQ ID NO: 1703287 - RNA, 19 nt, Artificial Sequence
  Description of Artificial Sequence: Synthetic oligonucleotide
  Sense strand starting at position 3659 of SEQ ID NO: 1561853
uugcgaucccguuuagucu

SEQ ID NO: 1703288 - RNA, 19 nt, Artificial Sequence
  Description of Artificial Sequence: Synthetic oligonucleotide
  Antisense strand to SEQ ID NO: 1703287
agacuaaacgggaucgcaa

SEQ ID NO: 1703289 - RNA, 19 nt, Artificial Sequence
  Description of Artificial Sequence: Synthetic oligonucleotide
  Sense strand starting at position 3660 of SEQ ID NO: 1561853
ugcgaucccguuuagucua

SEQ ID NO: 1703290 - RNA, 19 nt, Artificial Sequence
  Description of Artificial Sequence: Synthetic oligonucleotide
  Antisense strand to SEQ ID NO: 1703289
uagacuaaacgggaucgca

SEQ ID NO: 1703291 - RNA, 19 nt, Artificial Sequence
  Description of Artificial Sequence: Synthetic oligonucleotide
  Sense strand starting at position 3665 of SEQ ID NO: 1561853
ucccguuuagucuaaugca

SEQ ID NO: 1703292 - RNA, 19 nt, Artificial Sequence
  Description of Artificial Sequence: Synthetic oligonucleotide
  Antisense strand to SEQ ID NO: 1703291
ugcauuagacuaaacggga

SEQ ID NO: 1703293 - RNA, 19 nt, Artificial Sequence
  Description of Artificial Sequence: Synthetic oligonucleotide
  Sense strand starting at position 3788 of SEQ ID NO: 1561853
cugggaaacguuugggauc

SEQ ID NO: 1703294 - RNA, 19 nt, Artificial Sequence
  Description of Artificial Sequence: Synthetic oligonucleotide
  Antisense strand to SEQ ID NO: 1703293
gaucccaaacguuucccag

SEQ ID NO: 1703295 - RNA, 19 nt, Artificial Sequence
  Description of Artificial Sequence: Synthetic oligonucleotide
  Sense strand starting at position 3814 of SEQ ID NO: 1561853
gauauaucgcuuuagcucu

SEQ ID NO: 1703296 - RNA, 19 nt, Artificial Sequence
  Description of Artificial Sequence: Synthetic oligonucleotide
  Antisense strand to SEQ ID NO: 1703295
agagcuaaagcgauauauc

SEQ ID NO: 1703297 - RNA, 19 nt, Artificial Sequence
  Description of Artificial Sequence: Synthetic oligonucleotide
  Sense strand starting at position 3851 of SEQ ID NO: 1561853
agaugucaacacugaacuu

SEQ ID NO: 1703298 - RNA, 19 nt, Artificial Sequence
  Description of Artificial Sequence: Synthetic oligonucleotide
  Antisense strand to SEQ ID NO: 1703297
aaguucaguguugacaucu

SEQ ID NO: 1703299 - RNA, 19 nt, Artificial Sequence
  Description of Artificial Sequence: Synthetic oligonucleotide
  Sense strand starting at position 316 of SEQ ID NO: 1561854
gguggucagucucuagagu

SEQ ID NO: 1703300 - RNA, 19 nt, Artificial Sequence
  Description of Artificial Sequence: Synthetic oligonucleotide
  Antisense strand to SEQ ID NO: 1703299
acucuagagacugaccacc

SEQ ID NO: 1703301 - RNA, 19 nt, Artificial Sequence
  Description of Artificial Sequence: Synthetic oligonucleotide
  Sense strand starting at position 351 of SEQ ID NO: 1561854
ucagauuacuuuccgcaca

SEQ ID NO: 1703302 - RNA, 19 nt, Artificial Sequence
  Description of Artificial Sequence: Synthetic oligonucleotide
  Antisense strand to SEQ ID NO: 1703301
ugugcggaaaguaaucuga

SEQ ID NO: 1703303 - RNA, 19 nt, Artificial Sequence
  Description of Artificial Sequence: Synthetic oligonucleotide
  Sense strand starting at position 353 of SEQ ID NO: 1561854
agauuacuuuccgcacauu

SEQ ID NO: 1703304 - RNA, 19 nt, Artificial Sequence
  Description of Artificial Sequence: Synthetic oligonucleotide
  Antisense strand to SEQ ID NO: 1703303
aaugugcggaaaguaaucu

SEQ ID NO: 1703305 - RNA, 19 nt, Artificial Sequence
  Description of Artificial Sequence: Synthetic oligonucleotide
  Sense strand starting at position 395 of SEQ ID NO: 1561854
cugcucucacaucgugaaa

SEQ ID NO: 1703306 - RNA, 19 nt, Artificial Sequence
  Description of Artificial Sequence: Synthetic oligonucleotide
  Antisense strand to SEQ ID NO: 1703305
uuucacgaugugagagcag

SEQ ID NO: 1703307 - RNA, 19 nt, Artificial Sequence
  Description of Artificial Sequence: Synthetic oligonucleotide
  Sense strand starting at position 458 of SEQ ID NO: 1561854
gccaacuuauuugagacua

SEQ ID NO: 1703308 - RNA, 19 nt, Artificial Sequence
  Description of Artificial Sequence: Synthetic oligonucleotide
  Antisense strand to SEQ ID NO: 1703307
uagucucaaauaaguuggc

SEQ ID NO: 1703309 - RNA, 19 nt, Artificial Sequence
  Description of Artificial Sequence: Synthetic oligonucleotide
  Sense strand starting at position 471 of SEQ ID NO: 1561854
agacuagucuuucuaggag

SEQ ID NO: 1703310 - RNA, 19 nt, Artificial Sequence
  Description of Artificial Sequence: Synthetic oligonucleotide
  Antisense strand to SEQ ID NO: 1703309
cuccuagaaagacuagucu

SEQ ID NO: 1703311 - RNA, 19 nt, Artificial Sequence
  Description of Artificial Sequence: Synthetic oligonucleotide
  Sense strand starting at position 474 of SEQ ID NO: 1561854
cuagucuuucuaggaggaa

SEQ ID NO: 1703312 - RNA, 19 nt, Artificial Sequence
  Description of Artificial Sequence: Synthetic oligonucleotide
  Antisense strand to SEQ ID NO: 1703311
uuccuccuagaaagacuag

SEQ ID NO: 1703313 - RNA, 19 nt, Artificial Sequence
  Description of Artificial Sequence: Synthetic oligonucleotide
  Sense strand starting at position 671 of SEQ ID NO: 1561854
ccuggcauccugggaaguu

SEQ ID NO: 1703314 - RNA, 19 nt, Artificial Sequence
  Description of Artificial Sequence: Synthetic oligonucleotide
  Antisense strand to SEQ ID NO: 1703313
aacuucccaggaugccagg

SEQ ID NO: 1703315 - RNA, 19 nt, Artificial Sequence
  Description of Artificial Sequence: Synthetic oligonucleotide
  Sense strand starting at position 2150 of SEQ ID NO: 1561854
ggaaccuuguuugaaagga

SEQ ID NO: 1703316 - RNA, 19 nt, Artificial Sequence
  Description of Artificial Sequence: Synthetic oligonucleotide
  Antisense strand to SEQ ID NO: 1703315
uccuuucaaacaagguucc

SEQ ID NO: 1703317 - RNA, 19 nt, Artificial Sequence
  Description of Artificial Sequence: Synthetic oligonucleotide
  Sense strand starting at position 2367 of SEQ ID NO: 1561854
gaaugagggucugucuaua

SEQ ID NO: 1703318 - RNA, 19 nt, Artificial Sequence
  Description of Artificial Sequence: Synthetic oligonucleotide
  Antisense strand to SEQ ID NO: 1703317
uauagacagacccucauuc

SEQ ID NO: 1703319 - RNA, 19 nt, Artificial Sequence
  Description of Artificial Sequence: Synthetic oligonucleotide
  Sense strand starting at position 2377 of SEQ ID NO: 1561854
cugucuauacacgaguauu

SEQ ID NO: 1703320 - RNA, 19 nt, Artificial Sequence
  Description of Artificial Sequence: Synthetic oligonucleotide
  Antisense strand to SEQ ID NO: 1703319
aauacucguguauagacag

SEQ ID NO: 1703321 - RNA, 19 nt, Artificial Sequence
  Description of Artificial Sequence: Synthetic oligonucleotide
  Sense strand starting at position 2380 of SEQ ID NO: 1561854
ucuauacacgaguauuaag

SEQ ID NO: 1703322 - RNA, 19 nt, Artificial Sequence
  Description of Artificial Sequence: Synthetic oligonucleotide
  Antisense strand to SEQ ID NO: 1703321
cuuaauacucguguauaga

SEQ ID NO: 1703323 - RNA, 19 nt, Artificial Sequence
  Description of Artificial Sequence: Synthetic oligonucleotide
  Sense strand starting at position 2391 of SEQ ID NO: 1561854
guauuaagccucuagcauu

SEQ ID NO: 1703324 - RNA, 19 nt, Artificial Sequence
  Description of Artificial Sequence: Synthetic oligonucleotide
  Antisense strand to SEQ ID NO: 1703323
aaugcuagaggcuuaauac

SEQ ID NO: 1703325 - RNA, 19 nt, Artificial Sequence
  Description of Artificial Sequence: Synthetic oligonucleotide
  Sense strand starting at position 2409 of SEQ ID NO: 1561854
uuuccaauggcuuaauagu

SEQ ID NO: 1703326 - RNA, 19 nt, Artificial Sequence
  Description of Artificial Sequence: Synthetic oligonucleotide
  Antisense strand to SEQ ID NO: 1703325
acuauuaagccauuggaaa

SEQ ID NO: 1703327 - RNA, 19 nt, Artificial Sequence
  Description of Artificial Sequence: Synthetic oligonucleotide
  Sense strand starting at position 2417 of SEQ ID NO: 1561854
ggcuuaauaguuugaggau

SEQ ID NO: 1703328 - RNA, 19 nt, Artificial Sequence
  Description of Artificial Sequence: Synthetic oligonucleotide
  Antisense strand to SEQ ID NO: 1703327
auccucaaacuauuaagcc

SEQ ID NO: 1703329 - RNA, 19 nt, Artificial Sequence
  Description of Artificial Sequence: Synthetic oligonucleotide
  Sense strand starting at position 2446 of SEQ ID NO: 1561854
ggcagccauuaaucaugaa

SEQ ID NO: 1703330 - RNA, 19 nt, Artificial Sequence
  Description of Artificial Sequence: Synthetic oligonucleotide
  Antisense strand to SEQ ID NO: 1703329
uucaugauuaauggcugcc

SEQ ID NO: 1703331 - RNA, 19 nt, Artificial Sequence
  Description of Artificial Sequence: Synthetic oligonucleotide
  Sense strand starting at position 2479 of SEQ ID NO: 1561854
aucuguuauagugacugua

SEQ ID NO: 1703332 - RNA, 19 nt, Artificial Sequence
  Description of Artificial Sequence: Synthetic oligonucleotide
  Antisense strand to SEQ ID NO: 1703331
uacagucacuauaacagau

SEQ ID NO: 1703333 - RNA, 19 nt, Artificial Sequence
  Description of Artificial Sequence: Synthetic oligonucleotide
  Sense strand starting at position 2481 of SEQ ID NO: 1561854
cuguuauagugacuguaau

SEQ ID NO: 1703334 - RNA, 19 nt, Artificial Sequence
  Description of Artificial Sequence: Synthetic oligonucleotide
  Antisense strand to SEQ ID NO: 1703333
auuacagucacuauaacag

SEQ ID NO: 1703335 - RNA, 19 nt, Artificial Sequence
  Description of Artificial Sequence: Synthetic oligonucleotide
  Sense strand starting at position 2482 of SEQ ID NO: 1561854
uguuauagugacuguaauu

SEQ ID NO: 1703336 - RNA, 19 nt, Artificial Sequence
  Description of Artificial Sequence: Synthetic oligonucleotide
  Antisense strand to SEQ ID NO: 1703335
aauuacagucacuauaaca

SEQ ID NO: 1703337 - RNA, 19 nt, Artificial Sequence
  Description of Artificial Sequence: Synthetic oligonucleotide
  Sense strand starting at position 2487 of SEQ ID NO: 1561854
uagugacuguaauuagaaa

SEQ ID NO: 1703338 - RNA, 19 nt, Artificial Sequence
  Description of Artificial Sequence: Synthetic oligonucleotide
  Antisense strand to SEQ ID NO: 1703337
uuucuaauuacagucacua

SEQ ID NO: 1703339 - RNA, 19 nt, Artificial Sequence
  Description of Artificial Sequence: Synthetic oligonucleotide
  Sense strand starting at position 2524 of SEQ ID NO: 1561854
gcucaaacagucugaauug

SEQ ID NO: 1703340 - RNA, 19 nt, Artificial Sequence
  Description of Artificial Sequence: Synthetic oligonucleotide
  Antisense strand to SEQ ID NO: 1703339
caauucagacuguuugagc

SEQ ID NO: 1703341 - RNA, 19 nt, Artificial Sequence
  Description of Artificial Sequence: Synthetic oligonucleotide
  Sense strand starting at position 2531 of SEQ ID NO: 1561854
cagucugaauuggcuaauu

SEQ ID NO: 1703342 - RNA, 19 nt, Artificial Sequence
  Description of Artificial Sequence: Synthetic oligonucleotide
  Antisense strand to SEQ ID NO: 1703341
aauuagccaauucagacug

SEQ ID NO: 1703343 - RNA, 19 nt, Artificial Sequence
  Description of Artificial Sequence: Synthetic oligonucleotide
  Sense strand starting at position 2533 of SEQ ID NO: 1561854
gucugaauuggcuaauuac

SEQ ID NO: 1703344 - RNA, 19 nt, Artificial Sequence
  Description of Artificial Sequence: Synthetic oligonucleotide
  Antisense strand to SEQ ID NO: 1703343
guaauuagccaauucagac

SEQ ID NO: 1703345 - RNA, 19 nt, Artificial Sequence
  Description of Artificial Sequence: Synthetic oligonucleotide
  Sense strand starting at position 2583 of SEQ ID NO: 1561854
gagguaguaguuugcaagu

SEQ ID NO: 1703346 - RNA, 19 nt, Artificial Sequence
  Description of Artificial Sequence: Synthetic oligonucleotide
  Antisense strand to SEQ ID NO: 1703345
acuugcaaacuacuaccuc

SEQ ID NO: 1703347 - RNA, 19 nt, Artificial Sequence
  Description of Artificial Sequence: Synthetic oligonucleotide
  Sense strand starting at position 2630 of SEQ ID NO: 1561854
gcucgauugagcugagaag

SEQ ID NO: 1703348 - RNA, 19 nt, Artificial Sequence
  Description of Artificial Sequence: Synthetic oligonucleotide
  Antisense strand to SEQ ID NO: 1703347
cuucucagcucaaucgagc

SEQ ID NO: 1703349 - RNA, 19 nt, Artificial Sequence
  Description of Artificial Sequence: Synthetic oligonucleotide
  Sense strand starting at position 2670 of SEQ ID NO: 1561854
agcugagagcauggguaaa

SEQ ID NO: 1703350 - RNA, 19 nt, Artificial Sequence
  Description of Artificial Sequence: Synthetic oligonucleotide
  Antisense strand to SEQ ID NO: 1703349
uuuacccaugcucucagcu

SEQ ID NO: 1703351 - RNA, 19 nt, Artificial Sequence
  Description of Artificial Sequence: Synthetic oligonucleotide
  Sense strand starting at position 2782 of SEQ ID NO: 1561854
agccauuuccuagguaggu

SEQ ID NO: 1703352 - RNA, 19 nt, Artificial Sequence
  Description of Artificial Sequence: Synthetic oligonucleotide
  Antisense strand to SEQ ID NO: 1703351
accuaccuaggaaauggcu

SEQ ID NO: 1703353 - RNA, 19 nt, Artificial Sequence
  Description of Artificial Sequence: Synthetic oligonucleotide
  Sense strand starting at position 2783 of SEQ ID NO: 1561854
gccauuuccuagguagguu

SEQ ID NO: 1703354 - RNA, 19 nt, Artificial Sequence
  Description of Artificial Sequence: Synthetic oligonucleotide
  Antisense strand to SEQ ID NO: 1703353
aaccuaccuaggaaauggc

SEQ ID NO: 1703355 - RNA, 19 nt, Artificial Sequence
  Description of Artificial Sequence: Synthetic oligonucleotide
  Sense strand starting at position 3242 of SEQ ID NO: 1561854
ggauuaauuugcugugaau

SEQ ID NO: 1703356 - RNA, 19 nt, Artificial Sequence
  Description of Artificial Sequence: Synthetic oligonucleotide
  Antisense strand to SEQ ID NO: 1703355
auucacagcaaauuaaucc

SEQ ID NO: 1703357 - RNA, 19 nt, Artificial Sequence
  Description of Artificial Sequence: Synthetic oligonucleotide
  Sense strand starting at position 3245 of SEQ ID NO: 1561854
uuaauuugcugugaaucag

SEQ ID NO: 1703358 - RNA, 19 nt, Artificial Sequence
  Description of Artificial Sequence: Synthetic oligonucleotide
  Antisense strand to SEQ ID NO: 1703357
cugauucacagcaaauuaa

SEQ ID NO: 1703359 - RNA, 19 nt, Artificial Sequence
  Description of Artificial Sequence: Synthetic oligonucleotide
  Sense strand starting at position 3304 of SEQ ID NO: 1561854
uguuuaaucuagcuugaau

SEQ ID NO: 1703360 - RNA, 19 nt, Artificial Sequence
  Description of Artificial Sequence: Synthetic oligonucleotide
  Antisense strand to SEQ ID NO: 1703359
auucaagcuagauuaaaca

SEQ ID NO: 1703361 - RNA, 19 nt, Artificial Sequence
  Description of Artificial Sequence: Synthetic oligonucleotide
  Sense strand starting at position 3390 of SEQ ID NO: 1561854
cucugcaaggcugaagauu

SEQ ID NO: 1703362 - RNA, 19 nt, Artificial Sequence
  Description of Artificial Sequence: Synthetic oligonucleotide
  Antisense strand to SEQ ID NO: 1703361
aaucuucagccuugcagag

SEQ ID NO: 1703363 - RNA, 19 nt, Artificial Sequence
  Description of Artificial Sequence: Synthetic oligonucleotide
  Sense strand starting at position 3413 of SEQ ID NO: 1561854
guaaauagugccgcucuuu

SEQ ID NO: 1703364 - RNA, 19 nt, Artificial Sequence
  Description of Artificial Sequence: Synthetic oligonucleotide
  Antisense strand to SEQ ID NO: 1703363
aaagagcggcacuauuuac

SEQ ID NO: 1703365 - RNA, 19 nt, Artificial Sequence
  Description of Artificial Sequence: Synthetic oligonucleotide
  Sense strand starting at position 3425 of SEQ ID NO: 1561854
gcucuuucuuggcccuaga

SEQ ID NO: 1703366 - RNA, 19 nt, Artificial Sequence
  Description of Artificial Sequence: Synthetic oligonucleotide
  Antisense strand to SEQ ID NO: 1703365
ucuagggccaagaaagagc

SEQ ID NO: 1703367 - RNA, 19 nt, Artificial Sequence
  Description of Artificial Sequence: Synthetic oligonucleotide
  Sense strand starting at position 3584 of SEQ ID NO: 1561854
cgaaacaacucagagcaaa

SEQ ID NO: 1703368 - RNA, 19 nt, Artificial Sequence
  Description of Artificial Sequence: Synthetic oligonucleotide
  Antisense strand to SEQ ID NO: 1703367
uuugcucugaguuguuucg

SEQ ID NO: 1703369 - RNA, 19 nt, Artificial Sequence
  Description of Artificial Sequence: Synthetic oligonucleotide
  Sense strand starting at position 3625 of SEQ ID NO: 1561854
gaguaucaagaagguuguu

SEQ ID NO: 1703370 - RNA, 19 nt, Artificial Sequence
  Description of Artificial Sequence: Synthetic oligonucleotide
  Antisense strand to SEQ ID NO: 1703369
aacaaccuucuugauacuc

SEQ ID NO: 1703371 - RNA, 19 nt, Artificial Sequence
  Description of Artificial Sequence: Synthetic oligonucleotide
  Sense strand starting at position 3652 of SEQ ID NO: 1561854
gacacaugucauggguugu

SEQ ID NO: 1703372 - RNA, 19 nt, Artificial Sequence
  Description of Artificial Sequence: Synthetic oligonucleotide
  Antisense strand to SEQ ID NO: 1703371
acaacccaugacauguguc

SEQ ID NO: 1703373 - RNA, 19 nt, Artificial Sequence
  Description of Artificial Sequence: Synthetic oligonucleotide
  Sense strand starting at position 3679 of SEQ ID NO: 1561854
ucuccuucuugagucagua

SEQ ID NO: 1703374 - RNA, 19 nt, Artificial Sequence
  Description of Artificial Sequence: Synthetic oligonucleotide
  Antisense strand to SEQ ID NO: 1703373
uacugacucaagaaggaga

SEQ ID NO: 1703375 - RNA, 19 nt, Artificial Sequence
  Description of Artificial Sequence: Synthetic oligonucleotide
  Sense strand starting at position 3802 of SEQ ID NO: 1561854
ccauucucaccaugaugga

SEQ ID NO: 1703376 - RNA, 19 nt, Artificial Sequence
  Description of Artificial Sequence: Synthetic oligonucleotide
  Antisense strand to SEQ ID NO: 1703375
uccaucauggugagaaugg

SEQ ID NO: 1703377 - RNA, 19 nt, Artificial Sequence
  Description of Artificial Sequence: Synthetic oligonucleotide
  Sense strand starting at position 3905 of SEQ ID NO: 1561854
uuuggauguguugagguuu

SEQ ID NO: 1703378 - RNA, 19 nt, Artificial Sequence
  Description of Artificial Sequence: Synthetic oligonucleotide
  Antisense strand to SEQ ID NO: 1703377
aaaccucaacacauccaaa

SEQ ID NO: 1703379 - RNA, 19 nt, Artificial Sequence
  Description of Artificial Sequence: Synthetic oligonucleotide
  Sense strand starting at position 72 of SEQ ID NO: 1561855
cccguagaagccugaggau

SEQ ID NO: 1703380 - RNA, 19 nt, Artificial Sequence
  Description of Artificial Sequence: Synthetic oligonucleotide
  Antisense strand to SEQ ID NO: 1703379
auccucaggcuucuacggg

SEQ ID NO: 1703381 - RNA, 19 nt, Artificial Sequence
  Description of Artificial Sequence: Synthetic oligonucleotide
  Sense strand starting at position 180 of SEQ ID NO: 1561855
cacaaaucaggcgguaaga

SEQ ID NO: 1703382 - RNA, 19 nt, Artificial Sequence
  Description of Artificial Sequence: Synthetic oligonucleotide
  Antisense strand to SEQ ID NO: 1703381
ucuuaccgccugauuugug

SEQ ID NO: 1703383 - RNA, 19 nt, Artificial Sequence
  Description of Artificial Sequence: Synthetic oligonucleotide
  Sense strand starting at position 193 of SEQ ID NO: 1561855
guaagacauugccucauag

SEQ ID NO: 1703384 - RNA, 19 nt, Artificial Sequence
  Description of Artificial Sequence: Synthetic oligonucleotide
  Antisense strand to SEQ ID NO: 1703383
cuaugaggcaaugucuuac

SEQ ID NO: 1703385 - RNA, 19 nt, Artificial Sequence
  Description of Artificial Sequence: Synthetic oligonucleotide
  Sense strand starting at position 247 of SEQ ID NO: 1561855
ccugaugcacuguaaaugu

SEQ ID NO: 1703386 - RNA, 19 nt, Artificial Sequence
  Description of Artificial Sequence: Synthetic oligonucleotide
  Antisense strand to SEQ ID NO: 1703385
acauuuacagugcaucagg

SEQ ID NO: 1703387 - RNA, 19 nt, Artificial Sequence
  Description of Artificial Sequence: Synthetic oligonucleotide
  Sense strand starting at position 330 of SEQ ID NO: 1561855
ucugcagucccugagaugu

SEQ ID NO: 1703388 - RNA, 19 nt, Artificial Sequence
  Description of Artificial Sequence: Synthetic oligonucleotide
  Antisense strand to SEQ ID NO: 1703387
acaucucagggacugcaga

SEQ ID NO: 1703389 - RNA, 19 nt, Artificial Sequence
  Description of Artificial Sequence: Synthetic oligonucleotide
  Sense strand starting at position 453 of SEQ ID NO: 1561855
ucaagacagucauuggcuu

SEQ ID NO: 1703390 - RNA, 19 nt, Artificial Sequence
  Description of Artificial Sequence: Synthetic oligonucleotide
  Antisense strand to SEQ ID NO: 1703389
aagccaaugacugucuuga

SEQ ID NO: 1703391 - RNA, 19 nt, Artificial Sequence
  Description of Artificial Sequence: Synthetic oligonucleotide
  Sense strand starting at position 457 of SEQ ID NO: 1561855
gacagucauuggcuuguca

SEQ ID NO: 1703392 - RNA, 19 nt, Artificial Sequence
  Description of Artificial Sequence: Synthetic oligonucleotide
  Antisense strand to SEQ ID NO: 1703391
ugacaagccaaugacuguc

SEQ ID NO: 1703393 - RNA, 19 nt, Artificial Sequence
  Description of Artificial Sequence: Synthetic oligonucleotide
  Sense strand starting at position 461 of SEQ ID NO: 1561855
gucauuggcuugucaggau

SEQ ID NO: 1703394 - RNA, 19 nt, Artificial Sequence
  Description of Artificial Sequence: Synthetic oligonucleotide
  Antisense strand to SEQ ID NO: 1703393
auccugacaagccaaugac

SEQ ID NO: 1703395 - RNA, 19 nt, Artificial Sequence
  Description of Artificial Sequence: Synthetic oligonucleotide
  Sense strand starting at position 473 of SEQ ID NO: 1561855
ucaggaugccugugggauc

SEQ ID NO: 1703396 - RNA, 19 nt, Artificial Sequence
  Description of Artificial Sequence: Synthetic oligonucleotide
  Antisense strand to SEQ ID NO: 1703395
gaucccacaggcauccuga

SEQ ID NO: 1703397 - RNA, 19 nt, Artificial Sequence
  Description of Artificial Sequence: Synthetic oligonucleotide
  Sense strand starting at position 539 of SEQ ID NO: 1561855
uagugacuuuggucuuuaa

SEQ ID NO: 1703398 - RNA, 19 nt, Artificial Sequence
  Description of Artificial Sequence: Synthetic oligonucleotide
  Antisense strand to SEQ ID NO: 1703397
uuaaagaccaaagucacua

SEQ ID NO: 1703399 - RNA, 19 nt, Artificial Sequence
  Description of Artificial Sequence: Synthetic oligonucleotide
  Sense strand starting at position 557 of SEQ ID NO: 1561855
acccaagugcuuuguaaau

SEQ ID NO: 1703400 - RNA, 19 nt, Artificial Sequence
  Description of Artificial Sequence: Synthetic oligonucleotide
  Antisense strand to SEQ ID NO: 1703399
auuuacaaagcacuugggu

SEQ ID NO: 1703401 - RNA, 19 nt, Artificial Sequence
  Description of Artificial Sequence: Synthetic oligonucleotide
  Sense strand starting at position 568 of SEQ ID NO: 1561855
uuguaaauugucuagaauc

SEQ ID NO: 1703402 - RNA, 19 nt, Artificial Sequence
  Description of Artificial Sequence: Synthetic oligonucleotide
  Antisense strand to SEQ ID NO: 1703401
gauucuagacaauuuacaa

SEQ ID NO: 1703403 - RNA, 19 nt, Artificial Sequence
  Description of Artificial Sequence: Synthetic oligonucleotide
  Sense strand starting at position 570 of SEQ ID NO: 1561855
guaaauugucuagaauccu

SEQ ID NO: 1703404 - RNA, 19 nt, Artificial Sequence
  Description of Artificial Sequence: Synthetic oligonucleotide
  Antisense strand to SEQ ID NO: 1703403
aggauucuagacaauuuac

SEQ ID NO: 1703405 - RNA, 19 nt, Artificial Sequence
  Description of Artificial Sequence: Synthetic oligonucleotide
  Sense strand starting at position 582 of SEQ ID NO: 1561855
gaauccuccugggaaauag

SEQ ID NO: 1703406 - RNA, 19 nt, Artificial Sequence
  Description of Artificial Sequence: Synthetic oligonucleotide
  Antisense strand to SEQ ID NO: 1703405
cuauuucccaggaggauuc

SEQ ID NO: 1703407 - RNA, 19 nt, Artificial Sequence
  Description of Artificial Sequence: Synthetic oligonucleotide
  Sense strand starting at position 1604 of SEQ ID NO: 1561855
gggaguucucaauguaggc

SEQ ID NO: 1703408 - RNA, 19 nt, Artificial Sequence
  Description of Artificial Sequence: Synthetic oligonucleotide
  Antisense strand to SEQ ID NO: 1703407
gccuacauugagaacuccc

SEQ ID NO: 1703409 - RNA, 19 nt, Artificial Sequence
  Description of Artificial Sequence: Synthetic oligonucleotide
  Sense strand starting at position 1686 of SEQ ID NO: 1561855
ugcuguaucucuuccauag

SEQ ID NO: 1703410 - RNA, 19 nt, Artificial Sequence
  Description of Artificial Sequence: Synthetic oligonucleotide
  Antisense strand to SEQ ID NO: 1703409
cuauggaagagauacagca

SEQ ID NO: 1703411 - RNA, 19 nt, Artificial Sequence
  Description of Artificial Sequence: Synthetic oligonucleotide
  Sense strand starting at position 1690 of SEQ ID NO: 1561855
guaucucuuccauaguagu

SEQ ID NO: 1703412 - RNA, 19 nt, Artificial Sequence
  Description of Artificial Sequence: Synthetic oligonucleotide
  Antisense strand to SEQ ID NO: 1703411
acuacuauggaagagauac

SEQ ID NO: 1703413 - RNA, 19 nt, Artificial Sequence
  Description of Artificial Sequence: Synthetic oligonucleotide
  Sense strand starting at position 1907 of SEQ ID NO: 1561855
gaugaaacuugguccaggu

SEQ ID NO: 1703414 - RNA, 19 nt, Artificial Sequence
  Description of Artificial Sequence: Synthetic oligonucleotide
  Antisense strand to SEQ ID NO: 1703413
accuggaccaaguuucauc

SEQ ID NO: 1703415 - RNA, 19 nt, Artificial Sequence
  Description of Artificial Sequence: Synthetic oligonucleotide
  Sense strand starting at position 1925 of SEQ ID NO: 1561855
uguccuagcccuuagggaa

SEQ ID NO: 1703416 - RNA, 19 nt, Artificial Sequence
  Description of Artificial Sequence: Synthetic oligonucleotide
  Antisense strand to SEQ ID NO: 1703415
uucccuaagggcuaggaca

SEQ ID NO: 1703417 - RNA, 19 nt, Artificial Sequence
  Description of Artificial Sequence: Synthetic oligonucleotide
  Sense strand starting at position 2113 of SEQ ID NO: 1561855
gcauccaguccaugaacau

SEQ ID NO: 1703418 - RNA, 19 nt, Artificial Sequence
  Description of Artificial Sequence: Synthetic oligonucleotide
  Antisense strand to SEQ ID NO: 1703417
auguucauggacuggaugc

SEQ ID NO: 1703419 - RNA, 19 nt, Artificial Sequence
  Description of Artificial Sequence: Synthetic oligonucleotide
  Sense strand starting at position 2649 of SEQ ID NO: 1561855
agugcagucucccuaggua

SEQ ID NO: 1703420 - RNA, 19 nt, Artificial Sequence
  Description of Artificial Sequence: Synthetic oligonucleotide
  Antisense strand to SEQ ID NO: 1703419
uaccuagggagacugcacu

SEQ ID NO: 1703421 - RNA, 19 nt, Artificial Sequence
  Description of Artificial Sequence: Synthetic oligonucleotide
  Sense strand starting at position 2812 of SEQ ID NO: 1561855
gggucagaggccuguuuac

SEQ ID NO: 1703422 - RNA, 19 nt, Artificial Sequence
  Description of Artificial Sequence: Synthetic oligonucleotide
  Antisense strand to SEQ ID NO: 1703421
guaaacaggccucugaccc

SEQ ID NO: 1703423 - RNA, 19 nt, Artificial Sequence
  Description of Artificial Sequence: Synthetic oligonucleotide
  Sense strand starting at position 2892 of SEQ ID NO: 1561855
ggagagcuggugcgucaaa

SEQ ID NO: 1703424 - RNA, 19 nt, Artificial Sequence
  Description of Artificial Sequence: Synthetic oligonucleotide
  Antisense strand to SEQ ID NO: 1703423
uuugacgcaccagcucucc

SEQ ID NO: 1703425 - RNA, 19 nt, Artificial Sequence
  Description of Artificial Sequence: Synthetic oligonucleotide
  Sense strand starting at position 2904 of SEQ ID NO: 1561855
cgucaaauccugugacaaa

SEQ ID NO: 1703426 - RNA, 19 nt, Artificial Sequence
  Description of Artificial Sequence: Synthetic oligonucleotide
  Antisense strand to SEQ ID NO: 1703425
uuugucacaggauuugacg

SEQ ID NO: 1703427 - RNA, 19 nt, Artificial Sequence
  Description of Artificial Sequence: Synthetic oligonucleotide
  Sense strand starting at position 2993 of SEQ ID NO: 1561855
ugggcacaccugugaacuu

SEQ ID NO: 1703428 - RNA, 19 nt, Artificial Sequence
  Description of Artificial Sequence: Synthetic oligonucleotide
  Antisense strand to SEQ ID NO: 1703427
aaguucacaggugugccca

SEQ ID NO: 1703429 - RNA, 19 nt, Artificial Sequence
  Description of Artificial Sequence: Synthetic oligonucleotide
  Sense strand starting at position 3078 of SEQ ID NO: 1561855
ggcuuaaauaugcggacuu

SEQ ID NO: 1703430 - RNA, 19 nt, Artificial Sequence
  Description of Artificial Sequence: Synthetic oligonucleotide
  Antisense strand to SEQ ID NO: 1703429
aaguccgcauauuuaagcc

SEQ ID NO: 1703431 - RNA, 19 nt, Artificial Sequence
  Description of Artificial Sequence: Synthetic oligonucleotide
  Sense strand starting at position 3092 of SEQ ID NO: 1561855
gacuuuguuaacuggguga

SEQ ID NO: 1703432 - RNA, 19 nt, Artificial Sequence
  Description of Artificial Sequence: Synthetic oligonucleotide
  Antisense strand to SEQ ID NO: 1703431
ucacccaguuaacaaaguc

SEQ ID NO: 1703433 - RNA, 19 nt, Artificial Sequence
  Description of Artificial Sequence: Synthetic oligonucleotide
  Sense strand starting at position 3094 of SEQ ID NO: 1561855
cuuuguuaacugggugauu

SEQ ID NO: 1703434 - RNA, 19 nt, Artificial Sequence
  Description of Artificial Sequence: Synthetic oligonucleotide
  Antisense strand to SEQ ID NO: 1703433
aaucacccaguuaacaaag

SEQ ID NO: 1703435 - RNA, 19 nt, Artificial Sequence
  Description of Artificial Sequence: Synthetic oligonucleotide
  Sense strand starting at position 3126 of SEQ ID NO: 1561855
uugcuugugguuuagugaa

SEQ ID NO: 1703436 - RNA, 19 nt, Artificial Sequence
  Description of Artificial Sequence: Synthetic oligonucleotide
  Antisense strand to SEQ ID NO: 1703435
uucacuaaaccacaagcaa

SEQ ID NO: 1703437 - RNA, 19 nt, Artificial Sequence
  Description of Artificial Sequence: Synthetic oligonucleotide
  Sense strand starting at position 3144 of SEQ ID NO: 1561855
aaaugaaucugaguucgac

SEQ ID NO: 1703438 - RNA, 19 nt, Artificial Sequence
  Description of Artificial Sequence: Synthetic oligonucleotide
  Antisense strand to SEQ ID NO: 1703437
gucgaacucagauucauuu

SEQ ID NO: 1703439 - RNA, 19 nt, Artificial Sequence
  Description of Artificial Sequence: Synthetic oligonucleotide
  Sense strand starting at position 3147 of SEQ ID NO: 1561855
ugaaucugaguucgacgua

SEQ ID NO: 1703440 - RNA, 19 nt, Artificial Sequence
  Description of Artificial Sequence: Synthetic oligonucleotide
  Antisense strand to SEQ ID NO: 1703439
uacgucgaacucagauuca

SEQ ID NO: 1703441 - RNA, 19 nt, Artificial Sequence
  Description of Artificial Sequence: Synthetic oligonucleotide
  Sense strand starting at position 3150 of SEQ ID NO: 1561855
aucugaguucgacguacua

SEQ ID NO: 1703442 - RNA, 19 nt, Artificial Sequence
  Description of Artificial Sequence: Synthetic oligonucleotide
  Antisense strand to SEQ ID NO: 1703441
uaguacgucgaacucagau

SEQ ID NO: 1703443 - RNA, 19 nt, Artificial Sequence
  Description of Artificial Sequence: Synthetic oligonucleotide
  Sense strand starting at position 3152 of SEQ ID NO: 1561855
cugaguucgacguacuagu

SEQ ID NO: 1703444 - RNA, 19 nt, Artificial Sequence
  Description of Artificial Sequence: Synthetic oligonucleotide
  Antisense strand to SEQ ID NO: 1703443
acuaguacgucgaacucag

SEQ ID NO: 1703445 - RNA, 19 nt, Artificial Sequence
  Description of Artificial Sequence: Synthetic oligonucleotide
  Sense strand starting at position 3248 of SEQ ID NO: 1561855
ugccuuuauuuauucugua

SEQ ID NO: 1703446 - RNA, 19 nt, Artificial Sequence
  Description of Artificial Sequence: Synthetic oligonucleotide
  Antisense strand to SEQ ID NO: 1703445
uacagaauaaauaaaggca

SEQ ID NO: 1703447 - RNA, 19 nt, Artificial Sequence
  Description of Artificial Sequence: Synthetic oligonucleotide
  Sense strand starting at position 3361 of SEQ ID NO: 1561855
uuaagaaauguuugguccu

SEQ ID NO: 1703448 - RNA, 19 nt, Artificial Sequence
  Description of Artificial Sequence: Synthetic oligonucleotide
  Antisense strand to SEQ ID NO: 1703447
aggaccaaacauuucuuaa

SEQ ID NO: 1703449 - RNA, 19 nt, Artificial Sequence
  Description of Artificial Sequence: Synthetic oligonucleotide
  Sense strand starting at position 3363 of SEQ ID NO: 1561855
aagaaauguuugguccuuu

SEQ ID NO: 1703450 - RNA, 19 nt, Artificial Sequence
  Description of Artificial Sequence: Synthetic oligonucleotide
  Antisense strand to SEQ ID NO: 1703449
aaaggaccaaacauuucuu

SEQ ID NO: 1703451 - RNA, 19 nt, Artificial Sequence
  Description of Artificial Sequence: Synthetic oligonucleotide
  Sense strand starting at position 3373 of SEQ ID NO: 1561855
ugguccuuuccagacuaga

SEQ ID NO: 1703452 - RNA, 19 nt, Artificial Sequence
  Description of Artificial Sequence: Synthetic oligonucleotide
  Antisense strand to SEQ ID NO: 1703451
ucuagucuggaaaggacca

SEQ ID NO: 1703453 - RNA, 19 nt, Artificial Sequence
  Description of Artificial Sequence: Synthetic oligonucleotide
  Sense strand starting at position 3450 of SEQ ID NO: 1561855
agcuccaguccucaggaua

SEQ ID NO: 1703454 - RNA, 19 nt, Artificial Sequence
  Description of Artificial Sequence: Synthetic oligonucleotide
  Antisense strand to SEQ ID NO: 1703453
uauccugaggacuggagcu

SEQ ID NO: 1703455 - RNA, 19 nt, Artificial Sequence
  Description of Artificial Sequence: Synthetic oligonucleotide
  Sense strand starting at position 3493 of SEQ ID NO: 1561855
cguguacucaggugggaaa

SEQ ID NO: 1703456 - RNA, 19 nt, Artificial Sequence
  Description of Artificial Sequence: Synthetic oligonucleotide
  Antisense strand to SEQ ID NO: 1703455
uuucccaccugaguacacg

SEQ ID NO: 1703457 - RNA, 19 nt, Artificial Sequence
  Description of Artificial Sequence: Synthetic oligonucleotide
  Sense strand starting at position 3714 of SEQ ID NO: 1561855
gugggaagguuagaggaaa

SEQ ID NO: 1703458 - RNA, 19 nt, Artificial Sequence
  Description of Artificial Sequence: Synthetic oligonucleotide
  Antisense strand to SEQ ID NO: 1703457
uuuccucuaaccuucccac

SEQ ID NO: 1703459 - RNA, 19 nt, Artificial Sequence
  Description of Artificial Sequence: Synthetic oligonucleotide
  Sense strand starting at position 131 of SEQ ID NO: 1561856
ucagucuuccuucgaauuu

SEQ ID NO: 1703460 - RNA, 19 nt, Artificial Sequence
  Description of Artificial Sequence: Synthetic oligonucleotide
  Antisense strand to SEQ ID NO: 1703459
aaauucgaaggaagacuga

SEQ ID NO: 1703461 - RNA, 19 nt, Artificial Sequence
  Description of Artificial Sequence: Synthetic oligonucleotide
  Sense strand starting at position 273 of SEQ ID NO: 1561856
gcucaucuuggugaaggau

SEQ ID NO: 1703462 - RNA, 19 nt, Artificial Sequence
  Description of Artificial Sequence: Synthetic oligonucleotide
  Antisense strand to SEQ ID NO: 1703461
auccuucaccaagaugagc

SEQ ID NO: 1703463 - RNA, 19 nt, Artificial Sequence
  Description of Artificial Sequence: Synthetic oligonucleotide
  Sense strand starting at position 276 of SEQ ID NO: 1561856
caucuuggugaaggaucau

SEQ ID NO: 1703464 - RNA, 19 nt, Artificial Sequence
  Description of Artificial Sequence: Synthetic oligonucleotide
  Antisense strand to SEQ ID NO: 1703463
augauccuucaccaagaug

SEQ ID NO: 1703465 - RNA, 19 nt, Artificial Sequence
  Description of Artificial Sequence: Synthetic oligonucleotide
  Sense strand starting at position 282 of SEQ ID NO: 1561856
ggugaaggaucauuacgac

SEQ ID NO: 1703466 - RNA, 19 nt, Artificial Sequence
  Description of Artificial Sequence: Synthetic oligonucleotide
  Antisense strand to SEQ ID NO: 1703465
gucguaaugauccuucacc

SEQ ID NO: 1703467 - RNA, 19 nt, Artificial Sequence
  Description of Artificial Sequence: Synthetic oligonucleotide
  Sense strand starting at position 306 of SEQ ID NO: 1561856
cuacauuucugacaaguug

SEQ ID NO: 1703468 - RNA, 19 nt, Artificial Sequence
  Description of Artificial Sequence: Synthetic oligonucleotide
  Antisense strand to SEQ ID NO: 1703467
caacuugucagaaauguag

SEQ ID NO: 1703469 - RNA, 19 nt, Artificial Sequence
  Description of Artificial Sequence: Synthetic oligonucleotide
  Sense strand starting at position 328 of SEQ ID NO: 1561856
cugucauucugauucccau

SEQ ID NO: 1703470 - RNA, 19 nt, Artificial Sequence
  Description of Artificial Sequence: Synthetic oligonucleotide
  Antisense strand to SEQ ID NO: 1703469
augggaaucagaaugacag

SEQ ID NO: 1703471 - RNA, 19 nt, Artificial Sequence
  Description of Artificial Sequence: Synthetic oligonucleotide
  Sense strand starting at position 375 of SEQ ID NO: 1561856
auguuaagacguuaaugga

SEQ ID NO: 1703472 - RNA, 19 nt, Artificial Sequence
  Description of Artificial Sequence: Synthetic oligonucleotide
  Antisense strand to SEQ ID NO: 1703471
uccauuaacgucuuaacau

SEQ ID NO: 1703473 - RNA, 19 nt, Artificial Sequence
  Description of Artificial Sequence: Synthetic oligonucleotide
  Sense strand starting at position 408 of SEQ ID NO: 1561856
guguuucuggaauaaguuu

SEQ ID NO: 1703474 - RNA, 19 nt, Artificial Sequence
  Description of Artificial Sequence: Synthetic oligonucleotide
  Antisense strand to SEQ ID NO: 1703473
aaacuuauuccagaaacac

SEQ ID NO: 1703475 - RNA, 19 nt, Artificial Sequence
  Description of Artificial Sequence: Synthetic oligonucleotide
  Sense strand starting at position 550 of SEQ ID NO: 1561856
uuuaacucauacguaaaga

SEQ ID NO: 1703476 - RNA, 19 nt, Artificial Sequence
  Description of Artificial Sequence: Synthetic oligonucleotide
  Antisense strand to SEQ ID NO: 1703475
ucuuuacguaugaguuaaa

SEQ ID NO: 1703477 - RNA, 19 nt, Artificial Sequence
  Description of Artificial Sequence: Synthetic oligonucleotide
  Sense strand starting at position 660 of SEQ ID NO: 1561856
cagcuuucccacgucguua

SEQ ID NO: 1703478 - RNA, 19 nt, Artificial Sequence
  Description of Artificial Sequence: Synthetic oligonucleotide
  Antisense strand to SEQ ID NO: 1703477
uaacgacgugggaaagcug

SEQ ID NO: 1703479 - RNA, 19 nt, Artificial Sequence
  Description of Artificial Sequence: Synthetic oligonucleotide
  Sense strand starting at position 661 of SEQ ID NO: 1561856
agcuuucccacgucguuau

SEQ ID NO: 1703480 - RNA, 19 nt, Artificial Sequence
  Description of Artificial Sequence: Synthetic oligonucleotide
  Antisense strand to SEQ ID NO: 1703479
auaacgacgugggaaagcu

SEQ ID NO: 1703481 - RNA, 19 nt, Artificial Sequence
  Description of Artificial Sequence: Synthetic oligonucleotide
  Sense strand starting at position 910 of SEQ ID NO: 1561856
gguagaguagugggugaga

SEQ ID NO: 1703482 - RNA, 19 nt, Artificial Sequence
  Description of Artificial Sequence: Synthetic oligonucleotide
  Antisense strand to SEQ ID NO: 1703481
ucucacccacuacucuacc

SEQ ID NO: 1703483 - RNA, 19 nt, Artificial Sequence
  Description of Artificial Sequence: Synthetic oligonucleotide
  Sense strand starting at position 911 of SEQ ID NO: 1561856
guagaguagugggugagaa

SEQ ID NO: 1703484 - RNA, 19 nt, Artificial Sequence
  Description of Artificial Sequence: Synthetic oligonucleotide
  Antisense strand to SEQ ID NO: 1703483
uucucacccacuacucuac

SEQ ID NO: 1703485 - RNA, 19 nt, Artificial Sequence
  Description of Artificial Sequence: Synthetic oligonucleotide
  Sense strand starting at position 912 of SEQ ID NO: 1561856
uagaguagugggugagaac

SEQ ID NO: 1703486 - RNA, 19 nt, Artificial Sequence
  Description of Artificial Sequence: Synthetic oligonucleotide
  Antisense strand to SEQ ID NO: 1703485
guucucacccacuacucua

SEQ ID NO: 1703487 - RNA, 19 nt, Artificial Sequence
  Description of Artificial Sequence: Synthetic oligonucleotide
  Sense strand starting at position 921 of SEQ ID NO: 1561856
gggugagaacugugcagaa

SEQ ID NO: 1703488 - RNA, 19 nt, Artificial Sequence
  Description of Artificial Sequence: Synthetic oligonucleotide
  Antisense strand to SEQ ID NO: 1703487
uucugcacaguucucaccc

SEQ ID NO: 1703489 - RNA, 19 nt, Artificial Sequence
  Description of Artificial Sequence: Synthetic oligonucleotide
  Sense strand starting at position 953 of SEQ ID NO: 1561856
acagaagaguaugaagaaa

SEQ ID NO: 1703490 - RNA, 19 nt, Artificial Sequence
  Description of Artificial Sequence: Synthetic oligonucleotide
  Antisense strand to SEQ ID NO: 1703489
uuucuucauacucuucugu

SEQ ID NO: 1703491 - RNA, 19 nt, Artificial Sequence
  Description of Artificial Sequence: Synthetic oligonucleotide
  Sense strand starting at position 1018 of SEQ ID NO: 1561856
gcaggucuacaucagacua

SEQ ID NO: 1703492 - RNA, 19 nt, Artificial Sequence
  Description of Artificial Sequence: Synthetic oligonucleotide
  Antisense strand to SEQ ID NO: 1703491
uagucugauguagaccugc

SEQ ID NO: 1703493 - RNA, 19 nt, Artificial Sequence
  Description of Artificial Sequence: Synthetic oligonucleotide
  Sense strand starting at position 1041 of SEQ ID NO: 1561856
cugccuuaagguggaagaa

SEQ ID NO: 1703494 - RNA, 19 nt, Artificial Sequence
  Description of Artificial Sequence: Synthetic oligonucleotide
  Antisense strand to SEQ ID NO: 1703493
uucuuccaccuuaaggcag

SEQ ID NO: 1703495 - RNA, 19 nt, Artificial Sequence
  Description of Artificial Sequence: Synthetic oligonucleotide
  Sense strand starting at position 1051 of SEQ ID NO: 1561856
guggaagaauccucuacaa

SEQ ID NO: 1703496 - RNA, 19 nt, Artificial Sequence
  Description of Artificial Sequence: Synthetic oligonucleotide
  Antisense strand to SEQ ID NO: 1703495
uuguagaggauucuuccac

SEQ ID NO: 1703497 - RNA, 19 nt, Artificial Sequence
  Description of Artificial Sequence: Synthetic oligonucleotide
  Sense strand starting at position 1172 of SEQ ID NO: 1561856
ucugaagagcuuugggaaa

SEQ ID NO: 1703498 - RNA, 19 nt, Artificial Sequence
  Description of Artificial Sequence: Synthetic oligonucleotide
  Antisense strand to SEQ ID NO: 1703497
uuucccaaagcucuucaga

SEQ ID NO: 1703499 - RNA, 19 nt, Artificial Sequence
  Description of Artificial Sequence: Synthetic oligonucleotide
  Sense strand starting at position 1245 of SEQ ID NO: 1561856
ucaugacuauuccuggaac

SEQ ID NO: 1703500 - RNA, 19 nt, Artificial Sequence
  Description of Artificial Sequence: Synthetic oligonucleotide
  Antisense strand to SEQ ID NO: 1703499
guuccaggaauagucauga

SEQ ID NO: 1703501 - RNA, 19 nt, Artificial Sequence
  Description of Artificial Sequence: Synthetic oligonucleotide
  Sense strand starting at position 1247 of SEQ ID NO: 1561856
augacuauuccuggaaccu

SEQ ID NO: 1703502 - RNA, 19 nt, Artificial Sequence
  Description of Artificial Sequence: Synthetic oligonucleotide
  Antisense strand to SEQ ID NO: 1703501
agguuccaggaauagucau

SEQ ID NO: 1703503 - RNA, 19 nt, Artificial Sequence
  Description of Artificial Sequence: Synthetic oligonucleotide
  Sense strand starting at position 1488 of SEQ ID NO: 1561856
gcauauuugcgguaguccu

SEQ ID NO: 1703504 - RNA, 19 nt, Artificial Sequence
  Description of Artificial Sequence: Synthetic oligonucleotide
  Antisense strand to SEQ ID NO: 1703503
aggacuaccgcaaauaugc

SEQ ID NO: 1703505 - RNA, 19 nt, Artificial Sequence
  Description of Artificial Sequence: Synthetic oligonucleotide
  Sense strand starting at position 1531 of SEQ ID NO: 1561856
ucaaaugcuccacguauuu

SEQ ID NO: 1703506 - RNA, 19 nt, Artificial Sequence
  Description of Artificial Sequence: Synthetic oligonucleotide
  Antisense strand to SEQ ID NO: 1703505
aaauacguggagcauuuga

SEQ ID NO: 1703507 - RNA, 19 nt, Artificial Sequence
  Description of Artificial Sequence: Synthetic oligonucleotide
  Sense strand starting at position 1629 of SEQ ID NO: 1561856
accgauuuagcgcagcgaa

SEQ ID NO: 1703508 - RNA, 19 nt, Artificial Sequence
  Description of Artificial Sequence: Synthetic oligonucleotide
  Antisense strand to SEQ ID NO: 1703507
uucgcugcgcuaaaucggu

SEQ ID NO: 1703509 - RNA, 19 nt, Artificial Sequence
  Description of Artificial Sequence: Synthetic oligonucleotide
  Sense strand starting at position 2232 of SEQ ID NO: 1561856
uguacugugguccaccaaa

SEQ ID NO: 1703510 - RNA, 19 nt, Artificial Sequence
  Description of Artificial Sequence: Synthetic oligonucleotide
  Antisense strand to SEQ ID NO: 1703509
uuugguggaccacaguaca

SEQ ID NO: 1703511 - RNA, 19 nt, Artificial Sequence
  Description of Artificial Sequence: Synthetic oligonucleotide
  Sense strand starting at position 2682 of SEQ ID NO: 1561856
gcaaucacacuuggaucaa

SEQ ID NO: 1703512 - RNA, 19 nt, Artificial Sequence
  Description of Artificial Sequence: Synthetic oligonucleotide
  Antisense strand to SEQ ID NO: 1703511
uugauccaagugugauugc

SEQ ID NO: 1703513 - RNA, 19 nt, Artificial Sequence
  Description of Artificial Sequence: Synthetic oligonucleotide
  Sense strand starting at position 2868 of SEQ ID NO: 1561856
guuaacaaguaugcaaauu

SEQ ID NO: 1703514 - RNA, 19 nt, Artificial Sequence
  Description of Artificial Sequence: Synthetic oligonucleotide
  Antisense strand to SEQ ID NO: 1703513
aauuugcauacuuguuaac

SEQ ID NO: 1703515 - RNA, 19 nt, Artificial Sequence
  Description of Artificial Sequence: Synthetic oligonucleotide
  Sense strand starting at position 2992 of SEQ ID NO: 1561856
uuugguggucuccagaaag

SEQ ID NO: 1703516 - RNA, 19 nt, Artificial Sequence
  Description of Artificial Sequence: Synthetic oligonucleotide
  Antisense strand to SEQ ID NO: 1703515
cuuucuggagaccaccaaa

SEQ ID NO: 1703517 - RNA, 19 nt, Artificial Sequence
  Description of Artificial Sequence: Synthetic oligonucleotide
  Sense strand starting at position 3003 of SEQ ID NO: 1561856
ccagaaaguuaaucagcau

SEQ ID NO: 1703518 - RNA, 19 nt, Artificial Sequence
  Description of Artificial Sequence: Synthetic oligonucleotide
  Antisense strand to SEQ ID NO: 1703517
augcugauuaacuuucugg

SEQ ID NO: 1703519 - RNA, 19 nt, Artificial Sequence
  Description of Artificial Sequence: Synthetic oligonucleotide
  Sense strand starting at position 3027 of SEQ ID NO: 1561856
acuugaaguucucuuacga

SEQ ID NO: 1703520 - RNA, 19 nt, Artificial Sequence
  Description of Artificial Sequence: Synthetic oligonucleotide
  Antisense strand to SEQ ID NO: 1703519
ucguaagagaacuucaagu

SEQ ID NO: 1703521 - RNA, 19 nt, Artificial Sequence
  Description of Artificial Sequence: Synthetic oligonucleotide
  Sense strand starting at position 3040 of SEQ ID NO: 1561856
uuacgaaacuuugcaacuu

SEQ ID NO: 1703522 - RNA, 19 nt, Artificial Sequence
  Description of Artificial Sequence: Synthetic oligonucleotide
  Antisense strand to SEQ ID NO: 1703521
aaguugcaaaguuucguaa

SEQ ID NO: 1703523 - RNA, 19 nt, Artificial Sequence
  Description of Artificial Sequence: Synthetic oligonucleotide
  Sense strand starting at position 3386 of SEQ ID NO: 1561856
acuguuaccuuaccaguau

SEQ ID NO: 1703524 - RNA, 19 nt, Artificial Sequence
  Description of Artificial Sequence: Synthetic oligonucleotide
  Antisense strand to SEQ ID NO: 1703523
auacugguaagguaacagu

SEQ ID NO: 1703525 - RNA, 19 nt, Artificial Sequence
  Description of Artificial Sequence: Synthetic oligonucleotide
  Sense strand starting at position 3417 of SEQ ID NO: 1561856
cugguuaguguccaauaua

SEQ ID NO: 1703526 - RNA, 19 nt, Artificial Sequence
  Description of Artificial Sequence: Synthetic oligonucleotide
  Antisense strand to SEQ ID NO: 1703525
uauauuggacacuaaccag

SEQ ID NO: 1703527 - RNA, 19 nt, Artificial Sequence
  Description of Artificial Sequence: Synthetic oligonucleotide
  Sense strand starting at position 3634 of SEQ ID NO: 1561856
guggucgagcgccuguaau

SEQ ID NO: 1703528 - RNA, 19 nt, Artificial Sequence
  Description of Artificial Sequence: Synthetic oligonucleotide
  Antisense strand to SEQ ID NO: 1703527
auuacaggcgcucgaccac

SEQ ID NO: 1703529 - RNA, 19 nt, Artificial Sequence
  Description of Artificial Sequence: Synthetic oligonucleotide
  Sense strand starting at position 3636 of SEQ ID NO: 1561856
ggucgagcgccuguaauuc

SEQ ID NO: 1703530 - RNA, 19 nt, Artificial Sequence
  Description of Artificial Sequence: Synthetic oligonucleotide
  Antisense strand to SEQ ID NO: 1703529
gaauuacaggcgcucgacc

SEQ ID NO: 1703531 - RNA, 19 nt, Artificial Sequence
  Description of Artificial Sequence: Synthetic oligonucleotide
  Sense strand starting at position 3851 of SEQ ID NO: 1561856
agagaaauagcucgaguug

SEQ ID NO: 1703532 - RNA, 19 nt, Artificial Sequence
  Description of Artificial Sequence: Synthetic oligonucleotide
  Antisense strand to SEQ ID NO: 1703531
caacucgagcuauuucucu

SEQ ID NO: 1703533 - RNA, 19 nt, Artificial Sequence
  Description of Artificial Sequence: Synthetic oligonucleotide
  Sense strand starting at position 3899 of SEQ ID NO: 1561856
auguguuuggauuagauga

SEQ ID NO: 1703534 - RNA, 19 nt, Artificial Sequence
  Description of Artificial Sequence: Synthetic oligonucleotide
  Antisense strand to SEQ ID NO: 1703533
ucaucuaauccaaacacau

SEQ ID NO: 1703535 - RNA, 19 nt, Artificial Sequence
  Description of Artificial Sequence: Synthetic oligonucleotide
  Sense strand starting at position 3910 of SEQ ID NO: 1561856
uuagaugagcucuagcuuu

SEQ ID NO: 1703536 - RNA, 19 nt, Artificial Sequence
  Description of Artificial Sequence: Synthetic oligonucleotide
  Antisense strand to SEQ ID NO: 1703535
aaagcuagagcucaucuaa

SEQ ID NO: 1703537 - RNA, 19 nt, Artificial Sequence
  Description of Artificial Sequence: Synthetic oligonucleotide
  Sense strand starting at position 3954 of SEQ ID NO: 1561856
cggauuguccucuaccaca

SEQ ID NO: 1703538 - RNA, 19 nt, Artificial Sequence
  Description of Artificial Sequence: Synthetic oligonucleotide
  Antisense strand to SEQ ID NO: 1703537
ugugguagaggacaauccg

SEQ ID NO: 1703539 - RNA, 19 nt, Artificial Sequence
  Description of Artificial Sequence: Synthetic oligonucleotide
  Sense strand starting at position 124 of SEQ ID NO: 1561857
uaagauugcuguguggauu

SEQ ID NO: 1703540 - RNA, 19 nt, Artificial Sequence
  Description of Artificial Sequence: Synthetic oligonucleotide
  Antisense strand to SEQ ID NO: 1703539
aauccacacagcaaucuua

SEQ ID NO: 1703541 - RNA, 19 nt, Artificial Sequence
  Description of Artificial Sequence: Synthetic oligonucleotide
  Sense strand starting at position 125 of SEQ ID NO: 1561857
aagauugcuguguggauua

SEQ ID NO: 1703542 - RNA, 19 nt, Artificial Sequence
  Description of Artificial Sequence: Synthetic oligonucleotide
  Antisense strand to SEQ ID NO: 1703541
uaauccacacagcaaucuu

SEQ ID NO: 1703543 - RNA, 19 nt, Artificial Sequence
  Description of Artificial Sequence: Synthetic oligonucleotide
  Sense strand starting at position 127 of SEQ ID NO: 1561857
gauugcuguguggauuaaa

SEQ ID NO: 1703544 - RNA, 19 nt, Artificial Sequence
  Description of Artificial Sequence: Synthetic oligonucleotide
  Antisense strand to SEQ ID NO: 1703543
uuuaauccacacagcaauc

SEQ ID NO: 1703545 - RNA, 19 nt, Artificial Sequence
  Description of Artificial Sequence: Synthetic oligonucleotide
  Sense strand starting at position 165 of SEQ ID NO: 1561857
auuuaucagcaguguuuga

SEQ ID NO: 1703546 - RNA, 19 nt, Artificial Sequence
  Description of Artificial Sequence: Synthetic oligonucleotide
  Antisense strand to SEQ ID NO: 1703545
ucaaacacugcugauaaau

SEQ ID NO: 1703547 - RNA, 19 nt, Artificial Sequence
  Description of Artificial Sequence: Synthetic oligonucleotide
  Sense strand starting at position 179 of SEQ ID NO: 1561857
uuugaagcucuauacauga

SEQ ID NO: 1703548 - RNA, 19 nt, Artificial Sequence
  Description of Artificial Sequence: Synthetic oligonucleotide
  Antisense strand to SEQ ID NO: 1703547
ucauguauagagcuucaaa

SEQ ID NO: 1703549 - RNA, 19 nt, Artificial Sequence
  Description of Artificial Sequence: Synthetic oligonucleotide
  Sense strand starting at position 979 of SEQ ID NO: 1561857
uguugucucccacaaaucu

SEQ ID NO: 1703550 - RNA, 19 nt, Artificial Sequence
  Description of Artificial Sequence: Synthetic oligonucleotide
  Antisense strand to SEQ ID NO: 1703549
agauuugugggagacaaca

SEQ ID NO: 1703551 - RNA, 19 nt, Artificial Sequence
  Description of Artificial Sequence: Synthetic oligonucleotide
  Sense strand starting at position 995 of SEQ ID NO: 1561857
ucugcuucuucucugauga

SEQ ID NO: 1703552 - RNA, 19 nt, Artificial Sequence
  Description of Artificial Sequence: Synthetic oligonucleotide
  Antisense strand to SEQ ID NO: 1703551
ucaucagagaagaagcaga

SEQ ID NO: 1703553 - RNA, 19 nt, Artificial Sequence
  Description of Artificial Sequence: Synthetic oligonucleotide
  Sense strand starting at position 996 of SEQ ID NO: 1561857
cugcuucuucucugaugaa

SEQ ID NO: 1703554 - RNA, 19 nt, Artificial Sequence
  Description of Artificial Sequence: Synthetic oligonucleotide
  Antisense strand to SEQ ID NO: 1703553
uucaucagagaagaagcag

SEQ ID NO: 1703555 - RNA, 19 nt, Artificial Sequence
  Description of Artificial Sequence: Synthetic oligonucleotide
  Sense strand starting at position 1258 of SEQ ID NO: 1561857
cugucuucucuuuggaacu

SEQ ID NO: 1703556 - RNA, 19 nt, Artificial Sequence
  Description of Artificial Sequence: Synthetic oligonucleotide
  Antisense strand to SEQ ID NO: 1703555
aguuccaaagagaagacag

SEQ ID NO: 1703557 - RNA, 19 nt, Artificial Sequence
  Description of Artificial Sequence: Synthetic oligonucleotide
  Sense strand starting at position 1382 of SEQ ID NO: 1561857
uaggaacaguguuugucuu

SEQ ID NO: 1703558 - RNA, 19 nt, Artificial Sequence
  Description of Artificial Sequence: Synthetic oligonucleotide
  Antisense strand to SEQ ID NO: 1703557
aagacaaacacuguuccua

SEQ ID NO: 1703559 - RNA, 19 nt, Artificial Sequence
  Description of Artificial Sequence: Synthetic oligonucleotide
  Sense strand starting at position 1384 of SEQ ID NO: 1561857
ggaacaguguuugucuuga

SEQ ID NO: 1703560 - RNA, 19 nt, Artificial Sequence
  Description of Artificial Sequence: Synthetic oligonucleotide
  Antisense strand to SEQ ID NO: 1703559
ucaagacaaacacuguucc

SEQ ID NO: 1703561 - RNA, 19 nt, Artificial Sequence
  Description of Artificial Sequence: Synthetic oligonucleotide
  Sense strand starting at position 1386 of SEQ ID NO: 1561857
aacaguguuugucuugauc

SEQ ID NO: 1703562 - RNA, 19 nt, Artificial Sequence
  Description of Artificial Sequence: Synthetic oligonucleotide
  Antisense strand to SEQ ID NO: 1703561
gaucaagacaaacacuguu

SEQ ID NO: 1703563 - RNA, 19 nt, Artificial Sequence
  Description of Artificial Sequence: Synthetic oligonucleotide
  Sense strand starting at position 1389 of SEQ ID NO: 1561857
aguguuugucuugaucacu

SEQ ID NO: 1703564 - RNA, 19 nt, Artificial Sequence
  Description of Artificial Sequence: Synthetic oligonucleotide
  Antisense strand to SEQ ID NO: 1703563
agugaucaagacaaacacu

SEQ ID NO: 1703565 - RNA, 19 nt, Artificial Sequence
  Description of Artificial Sequence: Synthetic oligonucleotide
  Sense strand starting at position 1416 of SEQ ID NO: 1561857
uaguaauuagccgcgcuua

SEQ ID NO: 1703566 - RNA, 19 nt, Artificial Sequence
  Description of Artificial Sequence: Synthetic oligonucleotide
  Antisense strand to SEQ ID NO: 1703565
uaagcgcggcuaauuacua

SEQ ID NO: 1703567 - RNA, 19 nt, Artificial Sequence
  Description of Artificial Sequence: Synthetic oligonucleotide
  Sense strand starting at position 1418 of SEQ ID NO: 1561857
guaauuagccgcgcuuagu

SEQ ID NO: 1703568 - RNA, 19 nt, Artificial Sequence
  Description of Artificial Sequence: Synthetic oligonucleotide
  Antisense strand to SEQ ID NO: 1703567
acuaagcgcggcuaauuac

SEQ ID NO: 1703569 - RNA, 19 nt, Artificial Sequence
  Description of Artificial Sequence: Synthetic oligonucleotide
  Sense strand starting at position 1419 of SEQ ID NO: 1561857
uaauuagccgcgcuuagua

SEQ ID NO: 1703570 - RNA, 19 nt, Artificial Sequence
  Description of Artificial Sequence: Synthetic oligonucleotide
  Antisense strand to SEQ ID NO: 1703569
uacuaagcgcggcuaauua

SEQ ID NO: 1703571 - RNA, 19 nt, Artificial Sequence
  Description of Artificial Sequence: Synthetic oligonucleotide
  Sense strand starting at position 1516 of SEQ ID NO: 1561857
aaggaaaucggucgcacuu

SEQ ID NO: 1703572 - RNA, 19 nt, Artificial Sequence
  Description of Artificial Sequence: Synthetic oligonucleotide
  Antisense strand to SEQ ID NO: 1703571
aagugcgaccgauuuccuu

SEQ ID NO: 1703573 - RNA, 19 nt, Artificial Sequence
  Description of Artificial Sequence: Synthetic oligonucleotide
  Sense strand starting at position 1529 of SEQ ID NO: 1561857
gcacuuuaucgccaggacu

SEQ ID NO: 1703574 - RNA, 19 nt, Artificial Sequence
  Description of Artificial Sequence: Synthetic oligonucleotide
  Antisense strand to SEQ ID NO: 1703573
aguccuggcgauaaagugc

SEQ ID NO: 1703575 - RNA, 19 nt, Artificial Sequence
  Description of Artificial Sequence: Synthetic oligonucleotide
  Sense strand starting at position 1531 of SEQ ID NO: 1561857
acuuuaucgccaggacuua

SEQ ID NO: 1703576 - RNA, 19 nt, Artificial Sequence
  Description of Artificial Sequence: Synthetic oligonucleotide
  Antisense strand to SEQ ID NO: 1703575
uaaguccuggcgauaaagu

SEQ ID NO: 1703577 - RNA, 19 nt, Artificial Sequence
  Description of Artificial Sequence: Synthetic oligonucleotide
  Sense strand starting at position 1636 of SEQ ID NO: 1561857
ggacaaaguuuggcccuaa

SEQ ID NO: 1703578 - RNA, 19 nt, Artificial Sequence
  Description of Artificial Sequence: Synthetic oligonucleotide
  Antisense strand to SEQ ID NO: 1703577
uuagggccaaacuuugucc

SEQ ID NO: 1703579 - RNA, 19 nt, Artificial Sequence
  Description of Artificial Sequence: Synthetic oligonucleotide
  Sense strand starting at position 1637 of SEQ ID NO: 1561857
gacaaaguuuggcccuaau

SEQ ID NO: 1703580 - RNA, 19 nt, Artificial Sequence
  Description of Artificial Sequence: Synthetic oligonucleotide
  Antisense strand to SEQ ID NO: 1703579
auuagggccaaacuuuguc

SEQ ID NO: 1703581 - RNA, 19 nt, Artificial Sequence
  Description of Artificial Sequence: Synthetic oligonucleotide
  Sense strand starting at position 1872 of SEQ ID NO: 1561857
aucguuccucccgaggaaa

SEQ ID NO: 1703582 - RNA, 19 nt, Artificial Sequence
  Description of Artificial Sequence: Synthetic oligonucleotide
  Antisense strand to SEQ ID NO: 1703581
uuuccucgggaggaacgau

SEQ ID NO: 1703583 - RNA, 19 nt, Artificial Sequence
  Description of Artificial Sequence: Synthetic oligonucleotide
  Sense strand starting at position 2527 of SEQ ID NO: 1561857
ugcugaagucaggacuguu

SEQ ID NO: 1703584 - RNA, 19 nt, Artificial Sequence
  Description of Artificial Sequence: Synthetic oligonucleotide
  Antisense strand to SEQ ID NO: 1703583
aacaguccugacuucagca

SEQ ID NO: 1703585 - RNA, 19 nt, Artificial Sequence
  Description of Artificial Sequence: Synthetic oligonucleotide
  Sense strand starting at position 2530 of SEQ ID NO: 1561857
ugaagucaggacuguuuga

SEQ ID NO: 1703586 - RNA, 19 nt, Artificial Sequence
  Description of Artificial Sequence: Synthetic oligonucleotide
  Antisense strand to SEQ ID NO: 1703585
ucaaacaguccugacuuca

SEQ ID NO: 1703587 - RNA, 19 nt, Artificial Sequence
  Description of Artificial Sequence: Synthetic oligonucleotide
  Sense strand starting at position 2574 of SEQ ID NO: 1561857
ucuuguaccguuuacauca

SEQ ID NO: 1703588 - RNA, 19 nt, Artificial Sequence
  Description of Artificial Sequence: Synthetic oligonucleotide
  Antisense strand to SEQ ID NO: 1703587
ugauguaaacgguacaaga

SEQ ID NO: 1703589 - RNA, 19 nt, Artificial Sequence
  Description of Artificial Sequence: Synthetic oligonucleotide
  Sense strand starting at position 2683 of SEQ ID NO: 1561857
uuccuucuggguugugaua

SEQ ID NO: 1703590 - RNA, 19 nt, Artificial Sequence
  Description of Artificial Sequence: Synthetic oligonucleotide
  Antisense strand to SEQ ID NO: 1703589
uaucacaacccagaaggaa

SEQ ID NO: 1703591 - RNA, 19 nt, Artificial Sequence
  Description of Artificial Sequence: Synthetic oligonucleotide
  Sense strand starting at position 2739 of SEQ ID NO: 1561857
aguuaaauggaauguauca

SEQ ID NO: 1703592 - RNA, 19 nt, Artificial Sequence
  Description of Artificial Sequence: Synthetic oligonucleotide
  Antisense strand to SEQ ID NO: 1703591
ugauacauuccauuuaacu

SEQ ID NO: 1703593 - RNA, 19 nt, Artificial Sequence
  Description of Artificial Sequence: Synthetic oligonucleotide
  Sense strand starting at position 2831 of SEQ ID NO: 1561857
ugccuuucugaaggaauca

SEQ ID NO: 1703594 - RNA, 19 nt, Artificial Sequence
  Description of Artificial Sequence: Synthetic oligonucleotide
  Antisense strand to SEQ ID NO: 1703593
ugauuccuucagaaaggca

SEQ ID NO: 1703595 - RNA, 19 nt, Artificial Sequence
  Description of Artificial Sequence: Synthetic oligonucleotide
  Sense strand starting at position 3325 of SEQ ID NO: 1561857
aggaguuugguguggauaa

SEQ ID NO: 1703596 - RNA, 19 nt, Artificial Sequence
  Description of Artificial Sequence: Synthetic oligonucleotide
  Antisense strand to SEQ ID NO: 1703595
uuauccacaccaaacuccu

SEQ ID NO: 1703597 - RNA, 19 nt, Artificial Sequence
  Description of Artificial Sequence: Synthetic oligonucleotide
  Sense strand starting at position 3327 of SEQ ID NO: 1561857
gaguuugguguggauaaug

SEQ ID NO: 1703598 - RNA, 19 nt, Artificial Sequence
  Description of Artificial Sequence: Synthetic oligonucleotide
  Antisense strand to SEQ ID NO: 1703597
cauuauccacaccaaacuc

SEQ ID NO: 1703599 - RNA, 19 nt, Artificial Sequence
  Description of Artificial Sequence: Synthetic oligonucleotide
  Sense strand starting at position 3482 of SEQ ID NO: 1561857
cugguuacagcgugacaaa

SEQ ID NO: 1703600 - RNA, 19 nt, Artificial Sequence
  Description of Artificial Sequence: Synthetic oligonucleotide
  Antisense strand to SEQ ID NO: 1703599
uuugucacgcuguaaccag

SEQ ID NO: 1703601 - RNA, 19 nt, Artificial Sequence
  Description of Artificial Sequence: Synthetic oligonucleotide
  Sense strand starting at position 3483 of SEQ ID NO: 1561857
ugguuacagcgugacaaau

SEQ ID NO: 1703602 - RNA, 19 nt, Artificial Sequence
  Description of Artificial Sequence: Synthetic oligonucleotide
  Antisense strand to SEQ ID NO: 1703601
auuugucacgcuguaacca

SEQ ID NO: 1703603 - RNA, 19 nt, Artificial Sequence
  Description of Artificial Sequence: Synthetic oligonucleotide
  Sense strand starting at position 3492 of SEQ ID NO: 1561857
cgugacaaaugguuuggaa

SEQ ID NO: 1703604 - RNA, 19 nt, Artificial Sequence
  Description of Artificial Sequence: Synthetic oligonucleotide
  Antisense strand to SEQ ID NO: 1703603
uuccaaaccauuugucacg

SEQ ID NO: 1703605 - RNA, 19 nt, Artificial Sequence
  Description of Artificial Sequence: Synthetic oligonucleotide
  Sense strand starting at position 3494 of SEQ ID NO: 1561857
ugacaaaugguuuggaagu

SEQ ID NO: 1703606 - RNA, 19 nt, Artificial Sequence
  Description of Artificial Sequence: Synthetic oligonucleotide
  Antisense strand to SEQ ID NO: 1703605
acuuccaaaccauuuguca

SEQ ID NO: 1703607 - RNA, 19 nt, Artificial Sequence
  Description of Artificial Sequence: Synthetic oligonucleotide
  Sense strand starting at position 3539 of SEQ ID NO: 1561857
agaguuaagaugugagauc

SEQ ID NO: 1703608 - RNA, 19 nt, Artificial Sequence
  Description of Artificial Sequence: Synthetic oligonucleotide
  Antisense strand to SEQ ID NO: 1703607
gaucucacaucuuaacucu

SEQ ID NO: 1703609 - RNA, 19 nt, Artificial Sequence
  Description of Artificial Sequence: Synthetic oligonucleotide
  Sense strand starting at position 3628 of SEQ ID NO: 1561857
agaacuccuagugaucgua

SEQ ID NO: 1703610 - RNA, 19 nt, Artificial Sequence
  Description of Artificial Sequence: Synthetic oligonucleotide
  Antisense strand to SEQ ID NO: 1703609
uacgaucacuaggaguucu

SEQ ID NO: 1703611 - RNA, 19 nt, Artificial Sequence
  Description of Artificial Sequence: Synthetic oligonucleotide
  Sense strand starting at position 3630 of SEQ ID NO: 1561857
aacuccuagugaucguaaa

SEQ ID NO: 1703612 - RNA, 19 nt, Artificial Sequence
  Description of Artificial Sequence: Synthetic oligonucleotide
  Antisense strand to SEQ ID NO: 1703611
uuuacgaucacuaggaguu

SEQ ID NO: 1703613 - RNA, 19 nt, Artificial Sequence
  Description of Artificial Sequence: Synthetic oligonucleotide
  Sense strand starting at position 3631 of SEQ ID NO: 1561857
acuccuagugaucguaaau

SEQ ID NO: 1703614 - RNA, 19 nt, Artificial Sequence
  Description of Artificial Sequence: Synthetic oligonucleotide
  Antisense strand to SEQ ID NO: 1703613
auuuacgaucacuaggagu

SEQ ID NO: 1703615 - RNA, 19 nt, Artificial Sequence
  Description of Artificial Sequence: Synthetic oligonucleotide
  Sense strand starting at position 3896 of SEQ ID NO: 1561857
uggccagauuggucugaaa

SEQ ID NO: 1703616 - RNA, 19 nt, Artificial Sequence
  Description of Artificial Sequence: Synthetic oligonucleotide
  Antisense strand to SEQ ID NO: 1703615
uuucagaccaaucuggcca

SEQ ID NO: 1703617 - RNA, 19 nt, Artificial Sequence
  Description of Artificial Sequence: Synthetic oligonucleotide
  Sense strand starting at position 3898 of SEQ ID NO: 1561857
gccagauuggucugaaacu

SEQ ID NO: 1703618 - RNA, 19 nt, Artificial Sequence
  Description of Artificial Sequence: Synthetic oligonucleotide
  Antisense strand to SEQ ID NO: 1703617
aguuucagaccaaucuggc

SEQ ID NO: 1703619 - RNA, 19 nt, Artificial Sequence
  Description of Artificial Sequence: Synthetic oligonucleotide
  Sense strand starting at position 13 of SEQ ID NO: 1561858
uauagacugcucuggacuu

SEQ ID NO: 1703620 - RNA, 19 nt, Artificial Sequence
  Description of Artificial Sequence: Synthetic oligonucleotide
  Antisense strand to SEQ ID NO: 1703619
aaguccagagcagucuaua

SEQ ID NO: 1703621 - RNA, 19 nt, Artificial Sequence
  Description of Artificial Sequence: Synthetic oligonucleotide
  Sense strand starting at position 496 of SEQ ID NO: 1561858
guggcagggccgaguaguu

SEQ ID NO: 1703622 - RNA, 19 nt, Artificial Sequence
  Description of Artificial Sequence: Synthetic oligonucleotide
  Antisense strand to SEQ ID NO: 1703621
aacuacucggcccugccac

SEQ ID NO: 1703623 - RNA, 19 nt, Artificial Sequence
  Description of Artificial Sequence: Synthetic oligonucleotide
  Sense strand starting at position 671 of SEQ ID NO: 1561858
uguuguauggcugcaguau

SEQ ID NO: 1703624 - RNA, 19 nt, Artificial Sequence
  Description of Artificial Sequence: Synthetic oligonucleotide
  Antisense strand to SEQ ID NO: 1703623
auacugcagccauacaaca

SEQ ID NO: 1703625 - RNA, 19 nt, Artificial Sequence
  Description of Artificial Sequence: Synthetic oligonucleotide
  Sense strand starting at position 902 of SEQ ID NO: 1561858
gcuaguacuuagcucauuu

SEQ ID NO: 1703626 - RNA, 19 nt, Artificial Sequence
  Description of Artificial Sequence: Synthetic oligonucleotide
  Antisense strand to SEQ ID NO: 1703625
aaaugagcuaaguacuagc

SEQ ID NO: 1703627 - RNA, 19 nt, Artificial Sequence
  Description of Artificial Sequence: Synthetic oligonucleotide
  Sense strand starting at position 922 of SEQ ID NO: 1561858
ccacaugugugauuauauu

SEQ ID NO: 1703628 - RNA, 19 nt, Artificial Sequence
  Description of Artificial Sequence: Synthetic oligonucleotide
  Antisense strand to SEQ ID NO: 1703627
aauauaaucacacaugugg

SEQ ID NO: 1703629 - RNA, 19 nt, Artificial Sequence
  Description of Artificial Sequence: Synthetic oligonucleotide
  Sense strand starting at position 943 of SEQ ID NO: 1561858
cagaaugaagccuggaagu

SEQ ID NO: 1703630 - RNA, 19 nt, Artificial Sequence
  Description of Artificial Sequence: Synthetic oligonucleotide
  Antisense strand to SEQ ID NO: 1703629
acuuccaggcuucauucug

SEQ ID NO: 1703631 - RNA, 19 nt, Artificial Sequence
  Description of Artificial Sequence: Synthetic oligonucleotide
  Sense strand starting at position 959 of SEQ ID NO: 1561858
aguggaauugcucaaucaa

SEQ ID NO: 1703632 - RNA, 19 nt, Artificial Sequence
  Description of Artificial Sequence: Synthetic oligonucleotide
  Antisense strand to SEQ ID NO: 1703631
uugauugagcaauuccacu

SEQ ID NO: 1703633 - RNA, 19 nt, Artificial Sequence
  Description of Artificial Sequence: Synthetic oligonucleotide
  Sense strand starting at position 1122 of SEQ ID NO: 1561858
aucaaucugccagguuaaa

SEQ ID NO: 1703634 - RNA, 19 nt, Artificial Sequence
  Description of Artificial Sequence: Synthetic oligonucleotide
  Antisense strand to SEQ ID NO: 1703633
uuuaaccuggcagauugau

SEQ ID NO: 1703635 - RNA, 19 nt, Artificial Sequence
  Description of Artificial Sequence: Synthetic oligonucleotide
  Sense strand starting at position 1626 of SEQ ID NO: 1561858
ggaaucugcugagugggau

SEQ ID NO: 1703636 - RNA, 19 nt, Artificial Sequence
  Description of Artificial Sequence: Synthetic oligonucleotide
  Antisense strand to SEQ ID NO: 1703635
aucccacucagcagauucc

SEQ ID NO: 1703637 - RNA, 19 nt, Artificial Sequence
  Description of Artificial Sequence: Synthetic oligonucleotide
  Sense strand starting at position 1627 of SEQ ID NO: 1561858
gaaucugcugagugggauu

SEQ ID NO: 1703638 - RNA, 19 nt, Artificial Sequence
  Description of Artificial Sequence: Synthetic oligonucleotide
  Antisense strand to SEQ ID NO: 1703637
aaucccacucagcagauuc

SEQ ID NO: 1703639 - RNA, 19 nt, Artificial Sequence
  Description of Artificial Sequence: Synthetic oligonucleotide
  Sense strand starting at position 1644 of SEQ ID NO: 1561858
uucgguggugaggaucaua

SEQ ID NO: 1703640 - RNA, 19 nt, Artificial Sequence
  Description of Artificial Sequence: Synthetic oligonucleotide
  Antisense strand to SEQ ID NO: 1703639
uaugauccucaccaccgaa

SEQ ID NO: 1703641 - RNA, 19 nt, Artificial Sequence
  Description of Artificial Sequence: Synthetic oligonucleotide
  Sense strand starting at position 1709 of SEQ ID NO: 1561858
aggguaucucacugcuaga

SEQ ID NO: 1703642 - RNA, 19 nt, Artificial Sequence
  Description of Artificial Sequence: Synthetic oligonucleotide
  Antisense strand to SEQ ID NO: 1703641
ucuagcagugagauacccu

SEQ ID NO: 1703643 - RNA, 19 nt, Artificial Sequence
  Description of Artificial Sequence: Synthetic oligonucleotide
  Sense strand starting at position 1714 of SEQ ID NO: 1561858
aucucacugcuagagucua

SEQ ID NO: 1703644 - RNA, 19 nt, Artificial Sequence
  Description of Artificial Sequence: Synthetic oligonucleotide
  Antisense strand to SEQ ID NO: 1703643
uagacucuagcagugagau

SEQ ID NO: 1703645 - RNA, 19 nt, Artificial Sequence
  Description of Artificial Sequence: Synthetic oligonucleotide
  Sense strand starting at position 1762 of SEQ ID NO: 1561858
uuguaagaaggauggaguu

SEQ ID NO: 1703646 - RNA, 19 nt, Artificial Sequence
  Description of Artificial Sequence: Synthetic oligonucleotide
  Antisense strand to SEQ ID NO: 1703645
aacuccauccuucuuacaa

SEQ ID NO: 1703647 - RNA, 19 nt, Artificial Sequence
  Description of Artificial Sequence: Synthetic oligonucleotide
  Sense strand starting at position 1834 of SEQ ID NO: 1561858
uggucuguucucuaggacu

SEQ ID NO: 1703648 - RNA, 19 nt, Artificial Sequence
  Description of Artificial Sequence: Synthetic oligonucleotide
  Antisense strand to SEQ ID NO: 1703647
aguccuagagaacagacca

SEQ ID NO: 1703649 - RNA, 19 nt, Artificial Sequence
  Description of Artificial Sequence: Synthetic oligonucleotide
  Sense strand starting at position 1851 of SEQ ID NO: 1561858
cugugagugguggauuaga

SEQ ID NO: 1703650 - RNA, 19 nt, Artificial Sequence
  Description of Artificial Sequence: Synthetic oligonucleotide
  Antisense strand to SEQ ID NO: 1703649
ucuaauccaccacucacag

SEQ ID NO: 1703651 - RNA, 19 nt, Artificial Sequence
  Description of Artificial Sequence: Synthetic oligonucleotide
  Sense strand starting at position 1973 of SEQ ID NO: 1561858
gcuugacucacggauauac

SEQ ID NO: 1703652 - RNA, 19 nt, Artificial Sequence
  Description of Artificial Sequence: Synthetic oligonucleotide
  Antisense strand to SEQ ID NO: 1703651
guauauccgugagucaagc

SEQ ID NO: 1703653 - RNA, 19 nt, Artificial Sequence
  Description of Artificial Sequence: Synthetic oligonucleotide
  Sense strand starting at position 2030 of SEQ ID NO: 1561858
cagccuaagucaucaggaa

SEQ ID NO: 1703654 - RNA, 19 nt, Artificial Sequence
  Description of Artificial Sequence: Synthetic oligonucleotide
  Antisense strand to SEQ ID NO: 1703653
uuccugaugacuuaggcug

SEQ ID NO: 1703655 - RNA, 19 nt, Artificial Sequence
  Description of Artificial Sequence: Synthetic oligonucleotide
  Sense strand starting at position 2075 of SEQ ID NO: 1561858
gguggauggcuuugggaau

SEQ ID NO: 1703656 - RNA, 19 nt, Artificial Sequence
  Description of Artificial Sequence: Synthetic oligonucleotide
  Antisense strand to SEQ ID NO: 1703655
auucccaaagccauccacc

SEQ ID NO: 1703657 - RNA, 19 nt, Artificial Sequence
  Description of Artificial Sequence: Synthetic oligonucleotide
  Sense strand starting at position 2577 of SEQ ID NO: 1561858
ucauauaucgcagaaggug

SEQ ID NO: 1703658 - RNA, 19 nt, Artificial Sequence
  Description of Artificial Sequence: Synthetic oligonucleotide
  Antisense strand to SEQ ID NO: 1703657
caccuucugcgauauauga

SEQ ID NO: 1703659 - RNA, 19 nt, Artificial Sequence
  Description of Artificial Sequence: Synthetic oligonucleotide
  Sense strand starting at position 2694 of SEQ ID NO: 1561858
ucugaauggacgcaauuga

SEQ ID NO: 1703660 - RNA, 19 nt, Artificial Sequence
  Description of Artificial Sequence: Synthetic oligonucleotide
  Antisense strand to SEQ ID NO: 1703659
ucaauugcguccauucaga

SEQ ID NO: 1703661 - RNA, 19 nt, Artificial Sequence
  Description of Artificial Sequence: Synthetic oligonucleotide
  Sense strand starting at position 2713 of SEQ ID NO: 1561858
cacauaucucaggguguua

SEQ ID NO: 1703662 - RNA, 19 nt, Artificial Sequence
  Description of Artificial Sequence: Synthetic oligonucleotide
  Antisense strand to SEQ ID NO: 1703661
uaacacccugagauaugug

SEQ ID NO: 1703663 - RNA, 19 nt, Artificial Sequence
  Description of Artificial Sequence: Synthetic oligonucleotide
  Sense strand starting at position 2755 of SEQ ID NO: 1561858
uauuuacaugucugguguu

SEQ ID NO: 1703664 - RNA, 19 nt, Artificial Sequence
  Description of Artificial Sequence: Synthetic oligonucleotide
  Antisense strand to SEQ ID NO: 1703663
aacaccagacauguaaaua

SEQ ID NO: 1703665 - RNA, 19 nt, Artificial Sequence
  Description of Artificial Sequence: Synthetic oligonucleotide
  Sense strand starting at position 2765 of SEQ ID NO: 1561858
ucugguguuagguaggauu

SEQ ID NO: 1703666 - RNA, 19 nt, Artificial Sequence
  Description of Artificial Sequence: Synthetic oligonucleotide
  Antisense strand to SEQ ID NO: 1703665
aauccuaccuaacaccaga

SEQ ID NO: 1703667 - RNA, 19 nt, Artificial Sequence
  Description of Artificial Sequence: Synthetic oligonucleotide
  Sense strand starting at position 2827 of SEQ ID NO: 1561858
guuaaauuguuucucaaga

SEQ ID NO: 1703668 - RNA, 19 nt, Artificial Sequence
  Description of Artificial Sequence: Synthetic oligonucleotide
  Antisense strand to SEQ ID NO: 1703667
ucuugagaaacaauuuaac

SEQ ID NO: 1703669 - RNA, 19 nt, Artificial Sequence
  Description of Artificial Sequence: Synthetic oligonucleotide
  Sense strand starting at position 2832 of SEQ ID NO: 1561858
auuguuucucaagaucuga

SEQ ID NO: 1703670 - RNA, 19 nt, Artificial Sequence
  Description of Artificial Sequence: Synthetic oligonucleotide
  Antisense strand to SEQ ID NO: 1703669
ucagaucuugagaaacaau

SEQ ID NO: 1703671 - RNA, 19 nt, Artificial Sequence
  Description of Artificial Sequence: Synthetic oligonucleotide
  Sense strand starting at position 2840 of SEQ ID NO: 1561858
ucaagaucugagugacagu

SEQ ID NO: 1703672 - RNA, 19 nt, Artificial Sequence
  Description of Artificial Sequence: Synthetic oligonucleotide
  Antisense strand to SEQ ID NO: 1703671
acugucacucagaucuuga

SEQ ID NO: 1703673 - RNA, 19 nt, Artificial Sequence
  Description of Artificial Sequence: Synthetic oligonucleotide
  Sense strand starting at position 2998 of SEQ ID NO: 1561858
ugugcugauaucugauaga

SEQ ID NO: 1703674 - RNA, 19 nt, Artificial Sequence
  Description of Artificial Sequence: Synthetic oligonucleotide
  Antisense strand to SEQ ID NO: 1703673
ucuaucagauaucagcaca

SEQ ID NO: 1703675 - RNA, 19 nt, Artificial Sequence
  Description of Artificial Sequence: Synthetic oligonucleotide
  Sense strand starting at position 3073 of SEQ ID NO: 1561858
uuuguuauucuagaucaug

SEQ ID NO: 1703676 - RNA, 19 nt, Artificial Sequence
  Description of Artificial Sequence: Synthetic oligonucleotide
  Antisense strand to SEQ ID NO: 1703675
caugaucuagaauaacaaa

SEQ ID NO: 1703677 - RNA, 19 nt, Artificial Sequence
  Description of Artificial Sequence: Synthetic oligonucleotide
  Sense strand starting at position 3076 of SEQ ID NO: 1561858
guuauucuagaucaugugu

SEQ ID NO: 1703678 - RNA, 19 nt, Artificial Sequence
  Description of Artificial Sequence: Synthetic oligonucleotide
  Antisense strand to SEQ ID NO: 1703677
acacaugaucuagaauaac

SEQ ID NO: 1703679 - RNA, 19 nt, Artificial Sequence
  Description of Artificial Sequence: Synthetic oligonucleotide
  Sense strand starting at position 3081 of SEQ ID NO: 1561858
ucuagaucaugugucaaca

SEQ ID NO: 1703680 - RNA, 19 nt, Artificial Sequence
  Description of Artificial Sequence: Synthetic oligonucleotide
  Antisense strand to SEQ ID NO: 1703679
uguugacacaugaucuaga

SEQ ID NO: 1703681 - RNA, 19 nt, Artificial Sequence
  Description of Artificial Sequence: Synthetic oligonucleotide
  Sense strand starting at position 3265 of SEQ ID NO: 1561858
uucugucuggcccauuaua

SEQ ID NO: 1703682 - RNA, 19 nt, Artificial Sequence
  Description of Artificial Sequence: Synthetic oligonucleotide
  Antisense strand to SEQ ID NO: 1703681
uauaaugggccagacagaa

SEQ ID NO: 1703683 - RNA, 19 nt, Artificial Sequence
  Description of Artificial Sequence: Synthetic oligonucleotide
  Sense strand starting at position 3318 of SEQ ID NO: 1561858
uaaggaagcugacuguauu

SEQ ID NO: 1703684 - RNA, 19 nt, Artificial Sequence
  Description of Artificial Sequence: Synthetic oligonucleotide
  Antisense strand to SEQ ID NO: 1703683
aauacagucagcuuccuua

SEQ ID NO: 1703685 - RNA, 19 nt, Artificial Sequence
  Description of Artificial Sequence: Synthetic oligonucleotide
  Sense strand starting at position 3621 of SEQ ID NO: 1561858
aauugaagugauuggcuuu

SEQ ID NO: 1703686 - RNA, 19 nt, Artificial Sequence
  Description of Artificial Sequence: Synthetic oligonucleotide
  Antisense strand to SEQ ID NO: 1703685
aaagccaaucacuucaauu

SEQ ID NO: 1703687 - RNA, 19 nt, Artificial Sequence
  Description of Artificial Sequence: Synthetic oligonucleotide
  Sense strand starting at position 3663 of SEQ ID NO: 1561858
acugaucauacauguggga

SEQ ID NO: 1703688 - RNA, 19 nt, Artificial Sequence
  Description of Artificial Sequence: Synthetic oligonucleotide
  Antisense strand to SEQ ID NO: 1703687
ucccacauguaugaucagu

SEQ ID NO: 1703689 - RNA, 19 nt, Artificial Sequence
  Description of Artificial Sequence: Synthetic oligonucleotide
  Sense strand starting at position 3665 of SEQ ID NO: 1561858
ugaucauacaugugggaug

SEQ ID NO: 1703690 - RNA, 19 nt, Artificial Sequence
  Description of Artificial Sequence: Synthetic oligonucleotide
  Antisense strand to SEQ ID NO: 1703689
caucccacauguaugauca

SEQ ID NO: 1703691 - RNA, 19 nt, Artificial Sequence
  Description of Artificial Sequence: Synthetic oligonucleotide
  Sense strand starting at position 3827 of SEQ ID NO: 1561858
auuuauucugggugugcca

SEQ ID NO: 1703692 - RNA, 19 nt, Artificial Sequence
  Description of Artificial Sequence: Synthetic oligonucleotide
  Antisense strand to SEQ ID NO: 1703691
uggcacacccagaauaaau

SEQ ID NO: 1703693 - RNA, 19 nt, Artificial Sequence
  Description of Artificial Sequence: Synthetic oligonucleotide
  Sense strand starting at position 3836 of SEQ ID NO: 1561858
gggugugccagucaggaua

SEQ ID NO: 1703694 - RNA, 19 nt, Artificial Sequence
  Description of Artificial Sequence: Synthetic oligonucleotide
  Antisense strand to SEQ ID NO: 1703693
uauccugacuggcacaccc

SEQ ID NO: 1703695 - RNA, 19 nt, Artificial Sequence
  Description of Artificial Sequence: Synthetic oligonucleotide
  Sense strand starting at position 3911 of SEQ ID NO: 1561858
gaaggcuuaugagucacuu

SEQ ID NO: 1703696 - RNA, 19 nt, Artificial Sequence
  Description of Artificial Sequence: Synthetic oligonucleotide
  Antisense strand to SEQ ID NO: 1703695
aagugacucauaagccuuc

SEQ ID NO: 1703697 - RNA, 19 nt, Artificial Sequence
  Description of Artificial Sequence: Synthetic oligonucleotide
  Sense strand starting at position 3977 of SEQ ID NO: 1561858
gcuccuugugguuaaugga

SEQ ID NO: 1703698 - RNA, 19 nt, Artificial Sequence
  Description of Artificial Sequence: Synthetic oligonucleotide
  Antisense strand to SEQ ID NO: 1703697
uccauuaaccacaaggagc

SEQ ID NO: 1703699 - RNA, 19 nt, Artificial Sequence
  Description of Artificial Sequence: Synthetic oligonucleotide
  Sense strand starting at position 152 of SEQ ID NO: 1561859
agcacugucuguccugauu

SEQ ID NO: 1703700 - RNA, 19 nt, Artificial Sequence
  Description of Artificial Sequence: Synthetic oligonucleotide
  Antisense strand to SEQ ID NO: 1703699
aaucaggacagacagugcu

SEQ ID NO: 1703701 - RNA, 19 nt, Artificial Sequence
  Description of Artificial Sequence: Synthetic oligonucleotide
  Sense strand starting at position 233 of SEQ ID NO: 1561859
aguccuaaagccugaaaug

SEQ ID NO: 1703702 - RNA, 19 nt, Artificial Sequence
  Description of Artificial Sequence: Synthetic oligonucleotide
  Antisense strand to SEQ ID NO: 1703701
cauuucaggcuuuaggacu

SEQ ID NO: 1703703 - RNA, 19 nt, Artificial Sequence
  Description of Artificial Sequence: Synthetic oligonucleotide
  Sense strand starting at position 500 of SEQ ID NO: 1561859
acuaaacgcugucucgaaa

SEQ ID NO: 1703704 - RNA, 19 nt, Artificial Sequence
  Description of Artificial Sequence: Synthetic oligonucleotide
  Antisense strand to SEQ ID NO: 1703703
uuucgagacagcguuuagu

SEQ ID NO: 1703705 - RNA, 19 nt, Artificial Sequence
  Description of Artificial Sequence: Synthetic oligonucleotide
  Sense strand starting at position 503 of SEQ ID NO: 1561859
aaacgcugucucgaaauaa

SEQ ID NO: 1703706 - RNA, 19 nt, Artificial Sequence
  Description of Artificial Sequence: Synthetic oligonucleotide
  Antisense strand to SEQ ID NO: 1703705
uuauuucgagacagcguuu

SEQ ID NO: 1703707 - RNA, 19 nt, Artificial Sequence
  Description of Artificial Sequence: Synthetic oligonucleotide
  Sense strand starting at position 526 of SEQ ID NO: 1561859
ccagguuuggagcggagaa

SEQ ID NO: 1703708 - RNA, 19 nt, Artificial Sequence
  Description of Artificial Sequence: Synthetic oligonucleotide
  Antisense strand to SEQ ID NO: 1703707
uucuccgcuccaaaccugg

SEQ ID NO: 1703709 - RNA, 19 nt, Artificial Sequence
  Description of Artificial Sequence: Synthetic oligonucleotide
  Sense strand starting at position 527 of SEQ ID NO: 1561859
cagguuuggagcggagaaa

SEQ ID NO: 1703710 - RNA, 19 nt, Artificial Sequence
  Description of Artificial Sequence: Synthetic oligonucleotide
  Antisense strand to SEQ ID NO: 1703709
uuucuccgcuccaaaccug

SEQ ID NO: 1703711 - RNA, 19 nt, Artificial Sequence
  Description of Artificial Sequence: Synthetic oligonucleotide
  Sense strand starting at position 528 of SEQ ID NO: 1561859
agguuuggagcggagaaau

SEQ ID NO: 1703712 - RNA, 19 nt, Artificial Sequence
  Description of Artificial Sequence: Synthetic oligonucleotide
  Antisense strand to SEQ ID NO: 1703711
auuucuccgcuccaaaccu

SEQ ID NO: 1703713 - RNA, 19 nt, Artificial Sequence
  Description of Artificial Sequence: Synthetic oligonucleotide
  Sense strand starting at position 538 of SEQ ID NO: 1561859
cggagaaauuaagcaguga

SEQ ID NO: 1703714 - RNA, 19 nt, Artificial Sequence
  Description of Artificial Sequence: Synthetic oligonucleotide
  Antisense strand to SEQ ID NO: 1703713
ucacugcuuaauuucuccg

SEQ ID NO: 1703715 - RNA, 19 nt, Artificial Sequence
  Description of Artificial Sequence: Synthetic oligonucleotide
  Sense strand starting at position 542 of SEQ ID NO: 1561859
gaaauuaagcagugagaca

SEQ ID NO: 1703716 - RNA, 19 nt, Artificial Sequence
  Description of Artificial Sequence: Synthetic oligonucleotide
  Antisense strand to SEQ ID NO: 1703715
ugucucacugcuuaauuuc

SEQ ID NO: 1703717 - RNA, 19 nt, Artificial Sequence
  Description of Artificial Sequence: Synthetic oligonucleotide
  Sense strand starting at position 575 of SEQ ID NO: 1561859
gaccucagugcuugacaca

SEQ ID NO: 1703718 - RNA, 19 nt, Artificial Sequence
  Description of Artificial Sequence: Synthetic oligonucleotide
  Antisense strand to SEQ ID NO: 1703717
ugugucaagcacugagguc

SEQ ID NO: 1703719 - RNA, 19 nt, Artificial Sequence
  Description of Artificial Sequence: Synthetic oligonucleotide
  Sense strand starting at position 2039 of SEQ ID NO: 1561859
agaauuaugcaugagcaac

SEQ ID NO: 1703720 - RNA, 19 nt, Artificial Sequence
  Description of Artificial Sequence: Synthetic oligonucleotide
  Antisense strand to SEQ ID NO: 1703719
guugcucaugcauaauucu

SEQ ID NO: 1703721 - RNA, 19 nt, Artificial Sequence
  Description of Artificial Sequence: Synthetic oligonucleotide
  Sense strand starting at position 2184 of SEQ ID NO: 1561859
aagugagguuccucaugca

SEQ ID NO: 1703722 - RNA, 19 nt, Artificial Sequence
  Description of Artificial Sequence: Synthetic oligonucleotide
  Antisense strand to SEQ ID NO: 1703721
ugcaugaggaaccucacuu

SEQ ID NO: 1703723 - RNA, 19 nt, Artificial Sequence
  Description of Artificial Sequence: Synthetic oligonucleotide
  Sense strand starting at position 2244 of SEQ ID NO: 1561859
uaagguuuccuccagugau

SEQ ID NO: 1703724 - RNA, 19 nt, Artificial Sequence
  Description of Artificial Sequence: Synthetic oligonucleotide
  Antisense strand to SEQ ID NO: 1703723
aucacuggaggaaaccuua

SEQ ID NO: 1703725 - RNA, 19 nt, Artificial Sequence
  Description of Artificial Sequence: Synthetic oligonucleotide
  Sense strand starting at position 2247 of SEQ ID NO: 1561859
gguuuccuccagugauaaa

SEQ ID NO: 1703726 - RNA, 19 nt, Artificial Sequence
  Description of Artificial Sequence: Synthetic oligonucleotide
  Antisense strand to SEQ ID NO: 1703725
uuuaucacuggaggaaacc

SEQ ID NO: 1703727 - RNA, 19 nt, Artificial Sequence
  Description of Artificial Sequence: Synthetic oligonucleotide
  Sense strand starting at position 2274 of SEQ ID NO: 1561859
ggaaguugugauuagugaa

SEQ ID NO: 1703728 - RNA, 19 nt, Artificial Sequence
  Description of Artificial Sequence: Synthetic oligonucleotide
  Antisense strand to SEQ ID NO: 1703727
uucacuaaucacaacuucc

SEQ ID NO: 1703729 - RNA, 19 nt, Artificial Sequence
  Description of Artificial Sequence: Synthetic oligonucleotide
  Sense strand starting at position 2306 of SEQ ID NO: 1561859
guaauuugcucaccaaggu

SEQ ID NO: 1703730 - RNA, 19 nt, Artificial Sequence
  Description of Artificial Sequence: Synthetic oligonucleotide
  Antisense strand to SEQ ID NO: 1703729
accuuggugagcaaauuac

SEQ ID NO: 1703731 - RNA, 19 nt, Artificial Sequence
  Description of Artificial Sequence: Synthetic oligonucleotide
  Sense strand starting at position 2383 of SEQ ID NO: 1561859
augucuaguucucugauca

SEQ ID NO: 1703732 - RNA, 19 nt, Artificial Sequence
  Description of Artificial Sequence: Synthetic oligonucleotide
  Antisense strand to SEQ ID NO: 1703731
ugaucagagaacuagacau

SEQ ID NO: 1703733 - RNA, 19 nt, Artificial Sequence
  Description of Artificial Sequence: Synthetic oligonucleotide
  Sense strand starting at position 2384 of SEQ ID NO: 1561859
ugucuaguucucugaucag

SEQ ID NO: 1703734 - RNA, 19 nt, Artificial Sequence
  Description of Artificial Sequence: Synthetic oligonucleotide
  Antisense strand to SEQ ID NO: 1703733
cugaucagagaacuagaca

SEQ ID NO: 1703735 - RNA, 19 nt, Artificial Sequence
  Description of Artificial Sequence: Synthetic oligonucleotide
  Sense strand starting at position 2387 of SEQ ID NO: 1561859
cuaguucucugaucaggaa

SEQ ID NO: 1703736 - RNA, 19 nt, Artificial Sequence
  Description of Artificial Sequence: Synthetic oligonucleotide
  Antisense strand to SEQ ID NO: 1703735
uuccugaucagagaacuag

SEQ ID NO: 1703737 - RNA, 19 nt, Artificial Sequence
  Description of Artificial Sequence: Synthetic oligonucleotide
  Sense strand starting at position 2608 of SEQ ID NO: 1561859
uguuaaguuccacagcuuu

SEQ ID NO: 1703738 - RNA, 19 nt, Artificial Sequence
  Description of Artificial Sequence: Synthetic oligonucleotide
  Antisense strand to SEQ ID NO: 1703737
aaagcuguggaacuuaaca

SEQ ID NO: 1703739 - RNA, 19 nt, Artificial Sequence
  Description of Artificial Sequence: Synthetic oligonucleotide
  Sense strand starting at position 2636 of SEQ ID NO: 1561859
ugcuacuuugagcaagcaa

SEQ ID NO: 1703740 - RNA, 19 nt, Artificial Sequence
  Description of Artificial Sequence: Synthetic oligonucleotide
  Antisense strand to SEQ ID NO: 1703739
uugcuugcucaaaguagca

SEQ ID NO: 1703741 - RNA, 19 nt, Artificial Sequence
  Description of Artificial Sequence: Synthetic oligonucleotide
  Sense strand starting at position 2694 of SEQ ID NO: 1561859
ggcuguuaccaggguucca

SEQ ID NO: 1703742 - RNA, 19 nt, Artificial Sequence
  Description of Artificial Sequence: Synthetic oligonucleotide
  Antisense strand to SEQ ID NO: 1703741
uggaacccugguaacagcc

SEQ ID NO: 1703743 - RNA, 19 nt, Artificial Sequence
  Description of Artificial Sequence: Synthetic oligonucleotide
  Sense strand starting at position 2707 of SEQ ID NO: 1561859
guuccaugagccugaaacu

SEQ ID NO: 1703744 - RNA, 19 nt, Artificial Sequence
  Description of Artificial Sequence: Synthetic oligonucleotide
  Antisense strand to SEQ ID NO: 1703743
aguuucaggcucauggaac

SEQ ID NO: 1703745 - RNA, 19 nt, Artificial Sequence
  Description of Artificial Sequence: Synthetic oligonucleotide
  Sense strand starting at position 2708 of SEQ ID NO: 1561859
uuccaugagccugaaacuu

SEQ ID NO: 1703746 - RNA, 19 nt, Artificial Sequence
  Description of Artificial Sequence: Synthetic oligonucleotide
  Antisense strand to SEQ ID NO: 1703745
aaguuucaggcucauggaa

SEQ ID NO: 1703747 - RNA, 19 nt, Artificial Sequence
  Description of Artificial Sequence: Synthetic oligonucleotide
  Sense strand starting at position 2716 of SEQ ID NO: 1561859
gccugaaacuuguuggcua

SEQ ID NO: 1703748 - RNA, 19 nt, Artificial Sequence
  Description of Artificial Sequence: Synthetic oligonucleotide
  Antisense strand to SEQ ID NO: 1703747
uagccaacaaguuucaggc

SEQ ID NO: 1703749 - RNA, 19 nt, Artificial Sequence
  Description of Artificial Sequence: Synthetic oligonucleotide
  Sense strand starting at position 2718 of SEQ ID NO: 1561859
cugaaacuuguuggcuagu

SEQ ID NO: 1703750 - RNA, 19 nt, Artificial Sequence
  Description of Artificial Sequence: Synthetic oligonucleotide
  Antisense strand to SEQ ID NO: 1703749
acuagccaacaaguuucag

SEQ ID NO: 1703751 - RNA, 19 nt, Artificial Sequence
  Description of Artificial Sequence: Synthetic oligonucleotide
  Sense strand starting at position 2719 of SEQ ID NO: 1561859
ugaaacuuguuggcuaguu

SEQ ID NO: 1703752 - RNA, 19 nt, Artificial Sequence
  Description of Artificial Sequence: Synthetic oligonucleotide
  Antisense strand to SEQ ID NO: 1703751
aacuagccaacaaguuuca

SEQ ID NO: 1703753 - RNA, 19 nt, Artificial Sequence
  Description of Artificial Sequence: Synthetic oligonucleotide
  Sense strand starting at position 2720 of SEQ ID NO: 1561859
gaaacuuguuggcuaguuu

SEQ ID NO: 1703754 - RNA, 19 nt, Artificial Sequence
  Description of Artificial Sequence: Synthetic oligonucleotide
  Antisense strand to SEQ ID NO: 1703753
aaacuagccaacaaguuuc

SEQ ID NO: 1703755 - RNA, 19 nt, Artificial Sequence
  Description of Artificial Sequence: Synthetic oligonucleotide
  Sense strand starting at position 2721 of SEQ ID NO: 1561859
aaacuuguuggcuaguuua

SEQ ID NO: 1703756 - RNA, 19 nt, Artificial Sequence
  Description of Artificial Sequence: Synthetic oligonucleotide
  Antisense strand to SEQ ID NO: 1703755
uaaacuagccaacaaguuu

SEQ ID NO: 1703757 - RNA, 19 nt, Artificial Sequence
  Description of Artificial Sequence: Synthetic oligonucleotide
  Sense strand starting at position 2732 of SEQ ID NO: 1561859
cuaguuuauugguuuccca

SEQ ID NO: 1703758 - RNA, 19 nt, Artificial Sequence
  Description of Artificial Sequence: Synthetic oligonucleotide
  Antisense strand to SEQ ID NO: 1703757
ugggaaaccaauaaacuag

SEQ ID NO: 1703759 - RNA, 19 nt, Artificial Sequence
  Description of Artificial Sequence: Synthetic oligonucleotide
  Sense strand starting at position 2736 of SEQ ID NO: 1561859
uuuauugguuucccacaca

SEQ ID NO: 1703760 - RNA, 19 nt, Artificial Sequence
  Description of Artificial Sequence: Synthetic oligonucleotide
  Antisense strand to SEQ ID NO: 1703759
ugugugggaaaccaauaaa

SEQ ID NO: 1703761 - RNA, 19 nt, Artificial Sequence
  Description of Artificial Sequence: Synthetic oligonucleotide
  Sense strand starting at position 2739 of SEQ ID NO: 1561859
auugguuucccacacauag

SEQ ID NO: 1703762 - RNA, 19 nt, Artificial Sequence
  Description of Artificial Sequence: Synthetic oligonucleotide
  Antisense strand to SEQ ID NO: 1703761
cuaugugugggaaaccaau

SEQ ID NO: 1703763 - RNA, 19 nt, Artificial Sequence
  Description of Artificial Sequence: Synthetic oligonucleotide
  Sense strand starting at position 3179 of SEQ ID NO: 1561859
gucaucaucuucccugaua

SEQ ID NO: 1703764 - RNA, 19 nt, Artificial Sequence
  Description of Artificial Sequence: Synthetic oligonucleotide
  Antisense strand to SEQ ID NO: 1703763
uaucagggaagaugaugac

SEQ ID NO: 1703765 - RNA, 19 nt, Artificial Sequence
  Description of Artificial Sequence: Synthetic oligonucleotide
  Sense strand starting at position 3292 of SEQ ID NO: 1561859
ggaguuccgcuguaaacag

SEQ ID NO: 1703766 - RNA, 19 nt, Artificial Sequence
  Description of Artificial Sequence: Synthetic oligonucleotide
  Antisense strand to SEQ ID NO: 1703765
cuguuuacagcggaacucc

SEQ ID NO: 1703767 - RNA, 19 nt, Artificial Sequence
  Description of Artificial Sequence: Synthetic oligonucleotide
  Sense strand starting at position 3313 of SEQ ID NO: 1561859
accuaugaggcuugaucaa

SEQ ID NO: 1703768 - RNA, 19 nt, Artificial Sequence
  Description of Artificial Sequence: Synthetic oligonucleotide
  Antisense strand to SEQ ID NO: 1703767
uugaucaagccucauaggu

SEQ ID NO: 1703769 - RNA, 19 nt, Artificial Sequence
  Description of Artificial Sequence: Synthetic oligonucleotide
  Sense strand starting at position 3325 of SEQ ID NO: 1561859
ugaucaaugucgccugaag

SEQ ID NO: 1703770 - RNA, 19 nt, Artificial Sequence
  Description of Artificial Sequence: Synthetic oligonucleotide
  Antisense strand to SEQ ID NO: 1703769
cuucaggcgacauugauca

SEQ ID NO: 1703771 - RNA, 19 nt, Artificial Sequence
  Description of Artificial Sequence: Synthetic oligonucleotide
  Sense strand starting at position 3327 of SEQ ID NO: 1561859
aucaaugucgccugaagga

SEQ ID NO: 1703772 - RNA, 19 nt, Artificial Sequence
  Description of Artificial Sequence: Synthetic oligonucleotide
  Antisense strand to SEQ ID NO: 1703771
uccuucaggcgacauugau

SEQ ID NO: 1703773 - RNA, 19 nt, Artificial Sequence
  Description of Artificial Sequence: Synthetic oligonucleotide
  Sense strand starting at position 3564 of SEQ ID NO: 1561859
gagcgcgauuuccuauguu

SEQ ID NO: 1703774 - RNA, 19 nt, Artificial Sequence
  Description of Artificial Sequence: Synthetic oligonucleotide
  Antisense strand to SEQ ID NO: 1703773
aacauaggaaaucgcgcuc

SEQ ID NO: 1703775 - RNA, 19 nt, Artificial Sequence
  Description of Artificial Sequence: Synthetic oligonucleotide
  Sense strand starting at position 3567 of SEQ ID NO: 1561859
cgcgauuuccuauguugcu

SEQ ID NO: 1703776 - RNA, 19 nt, Artificial Sequence
  Description of Artificial Sequence: Synthetic oligonucleotide
  Antisense strand to SEQ ID NO: 1703775
agcaacauaggaaaucgcg

SEQ ID NO: 1703777 - RNA, 19 nt, Artificial Sequence
  Description of Artificial Sequence: Synthetic oligonucleotide
  Sense strand starting at position 3568 of SEQ ID NO: 1561859
gcgauuuccuauguugcuu

SEQ ID NO: 1703778 - RNA, 19 nt, Artificial Sequence
  Description of Artificial Sequence: Synthetic oligonucleotide
  Antisense strand to SEQ ID NO: 1703777
aagcaacauaggaaaucgc

SEQ ID NO: 1703779 - RNA, 19 nt, Artificial Sequence
  Description of Artificial Sequence: Synthetic oligonucleotide
  Sense strand starting at position 170 of SEQ ID NO: 1561860
gguugcauaggugauccau

SEQ ID NO: 1703780 - RNA, 19 nt, Artificial Sequence
  Description of Artificial Sequence: Synthetic oligonucleotide
  Antisense strand to SEQ ID NO: 1703779
auggaucaccuaugcaacc

SEQ ID NO: 1703781 - RNA, 19 nt, Artificial Sequence
  Description of Artificial Sequence: Synthetic oligonucleotide
  Sense strand starting at position 305 of SEQ ID NO: 1561860
gaauguaaguuccuaggga

SEQ ID NO: 1703782 - RNA, 19 nt, Artificial Sequence
  Description of Artificial Sequence: Synthetic oligonucleotide
  Antisense strand to SEQ ID NO: 1703781
ucccuaggaacuuacauuc

SEQ ID NO: 1703783 - RNA, 19 nt, Artificial Sequence
  Description of Artificial Sequence: Synthetic oligonucleotide
  Sense strand starting at position 523 of SEQ ID NO: 1561860
cugucaagggucugaaauu

SEQ ID NO: 1703784 - RNA, 19 nt, Artificial Sequence
  Description of Artificial Sequence: Synthetic oligonucleotide
  Antisense strand to SEQ ID NO: 1703783
aauuucagacccuugacag

SEQ ID NO: 1703785 - RNA, 19 nt, Artificial Sequence
  Description of Artificial Sequence: Synthetic oligonucleotide
  Sense strand starting at position 617 of SEQ ID NO: 1561860
uuaauaucggcccaagaag

SEQ ID NO: 1703786 - RNA, 19 nt, Artificial Sequence
  Description of Artificial Sequence: Synthetic oligonucleotide
  Antisense strand to SEQ ID NO: 1703785
cuucuugggccgauauuaa

SEQ ID NO: 1703787 - RNA, 19 nt, Artificial Sequence
  Description of Artificial Sequence: Synthetic oligonucleotide
  Sense strand starting at position 637 of SEQ ID NO: 1561860
ggcaucuuccaagagcaga

SEQ ID NO: 1703788 - RNA, 19 nt, Artificial Sequence
  Description of Artificial Sequence: Synthetic oligonucleotide
  Antisense strand to SEQ ID NO: 1703787
ucugcucuuggaagaugcc

SEQ ID NO: 1703789 - RNA, 19 nt, Artificial Sequence
  Description of Artificial Sequence: Synthetic oligonucleotide
  Sense strand starting at position 745 of SEQ ID NO: 1561860
ggcauuuguugagcucauu

SEQ ID NO: 1703790 - RNA, 19 nt, Artificial Sequence
  Description of Artificial Sequence: Synthetic oligonucleotide
  Antisense strand to SEQ ID NO: 1703789
aaugagcucaacaaaugcc

SEQ ID NO: 1703791 - RNA, 19 nt, Artificial Sequence
  Description of Artificial Sequence: Synthetic oligonucleotide
  Sense strand starting at position 894 of SEQ ID NO: 1561860
ccaccuuggccaggauaau

SEQ ID NO: 1703792 - RNA, 19 nt, Artificial Sequence
  Description of Artificial Sequence: Synthetic oligonucleotide
  Antisense strand to SEQ ID NO: 1703791
auuauccuggccaaggugg

SEQ ID NO: 1703793 - RNA, 19 nt, Artificial Sequence
  Description of Artificial Sequence: Synthetic oligonucleotide
  Sense strand starting at position 1091 of SEQ ID NO: 1561860
gauggaugagacugagugu

SEQ ID NO: 1703794 - RNA, 19 nt, Artificial Sequence
  Description of Artificial Sequence: Synthetic oligonucleotide
  Antisense strand to SEQ ID NO: 1703793
acacucagucucauccauc

SEQ ID NO: 1703795 - RNA, 19 nt, Artificial Sequence
  Description of Artificial Sequence: Synthetic oligonucleotide
  Sense strand starting at position 1094 of SEQ ID NO: 1561860
ggaugagacugaguguagu

SEQ ID NO: 1703796 - RNA, 19 nt, Artificial Sequence
  Description of Artificial Sequence: Synthetic oligonucleotide
  Antisense strand to SEQ ID NO: 1703795
acuacacucagucucaucc

SEQ ID NO: 1703797 - RNA, 19 nt, Artificial Sequence
  Description of Artificial Sequence: Synthetic oligonucleotide
  Sense strand starting at position 1337 of SEQ ID NO: 1561860
auuaaugcugcauagacaa

SEQ ID NO: 1703798 - RNA, 19 nt, Artificial Sequence
  Description of Artificial Sequence: Synthetic oligonucleotide
  Antisense strand to SEQ ID NO: 1703797
uugucuaugcagcauuaau

SEQ ID NO: 1703799 - RNA, 19 nt, Artificial Sequence
  Description of Artificial Sequence: Synthetic oligonucleotide
  Sense strand starting at position 1452 of SEQ ID NO: 1561860
cugguucauccggauaaga

SEQ ID NO: 1703800 - RNA, 19 nt, Artificial Sequence
  Description of Artificial Sequence: Synthetic oligonucleotide
  Antisense strand to SEQ ID NO: 1703799
ucuuauccggaugaaccag

SEQ ID NO: 1703801 - RNA, 19 nt, Artificial Sequence
  Description of Artificial Sequence: Synthetic oligonucleotide
  Sense strand starting at position 1454 of SEQ ID NO: 1561860
gguucauccggauaagaug

SEQ ID NO: 1703802 - RNA, 19 nt, Artificial Sequence
  Description of Artificial Sequence: Synthetic oligonucleotide
  Antisense strand to SEQ ID NO: 1703801
caucuuauccggaugaacc

SEQ ID NO: 1703803 - RNA, 19 nt, Artificial Sequence
  Description of Artificial Sequence: Synthetic oligonucleotide
  Sense strand starting at position 1460 of SEQ ID NO: 1561860
uccggauaagaugguuauc

SEQ ID NO: 1703804 - RNA, 19 nt, Artificial Sequence
  Description of Artificial Sequence: Synthetic oligonucleotide
  Antisense strand to SEQ ID NO: 1703803
gauaaccaucuuauccgga

SEQ ID NO: 1703805 - RNA, 19 nt, Artificial Sequence
  Description of Artificial Sequence: Synthetic oligonucleotide
  Sense strand starting at position 1462 of SEQ ID NO: 1561860
cggauaagaugguuaucug

SEQ ID NO: 1703806 - RNA, 19 nt, Artificial Sequence
  Description of Artificial Sequence: Synthetic oligonucleotide
  Antisense strand to SEQ ID NO: 1703805
cagauaaccaucuuauccg

SEQ ID NO: 1703807 - RNA, 19 nt, Artificial Sequence
  Description of Artificial Sequence: Synthetic oligonucleotide
  Sense strand starting at position 1465 of SEQ ID NO: 1561860
auaagaugguuaucuggca

SEQ ID NO: 1703808 - RNA, 19 nt, Artificial Sequence
  Description of Artificial Sequence: Synthetic oligonucleotide
  Antisense strand to SEQ ID NO: 1703807
ugccagauaaccaucuuau

SEQ ID NO: 1703809 - RNA, 19 nt, Artificial Sequence
  Description of Artificial Sequence: Synthetic oligonucleotide
  Sense strand starting at position 1466 of SEQ ID NO: 1561860
uaagaugguuaucuggcau

SEQ ID NO: 1703810 - RNA, 19 nt, Artificial Sequence
  Description of Artificial Sequence: Synthetic oligonucleotide
  Antisense strand to SEQ ID NO: 1703809
augccagauaaccaucuua

SEQ ID NO: 1703811 - RNA, 19 nt, Artificial Sequence
  Description of Artificial Sequence: Synthetic oligonucleotide
  Sense strand starting at position 1604 of SEQ ID NO: 1561860
agugaaguaacauagguuu

SEQ ID NO: 1703812 - RNA, 19 nt, Artificial Sequence
  Description of Artificial Sequence: Synthetic oligonucleotide
  Antisense strand to SEQ ID NO: 1703811
aaaccuauguuacuucacu

SEQ ID NO: 1703813 - RNA, 19 nt, Artificial Sequence
  Description of Artificial Sequence: Synthetic oligonucleotide
  Sense strand starting at position 1788 of SEQ ID NO: 1561860
uacggucuuuguguaauuu

SEQ ID NO: 1703814 - RNA, 19 nt, Artificial Sequence
  Description of Artificial Sequence: Synthetic oligonucleotide
  Antisense strand to SEQ ID NO: 1703813
aaauuacacaaagaccgua

SEQ ID NO: 1703815 - RNA, 19 nt, Artificial Sequence
  Description of Artificial Sequence: Synthetic oligonucleotide
  Sense strand starting at position 1852 of SEQ ID NO: 1561860
gcaauauuaucagccaaag

SEQ ID NO: 1703816 - RNA, 19 nt, Artificial Sequence
  Description of Artificial Sequence: Synthetic oligonucleotide
  Antisense strand to SEQ ID NO: 1703815
cuuuggcugauaauauugc

SEQ ID NO: 1703817 - RNA, 19 nt, Artificial Sequence
  Description of Artificial Sequence: Synthetic oligonucleotide
  Sense strand starting at position 1905 of SEQ ID NO: 1561860
auauauagacuuuggaagu

SEQ ID NO: 1703818 - RNA, 19 nt, Artificial Sequence
  Description of Artificial Sequence: Synthetic oligonucleotide
  Antisense strand to SEQ ID NO: 1703817
acuuccaaagucuauauau

SEQ ID NO: 1703819 - RNA, 19 nt, Artificial Sequence
  Description of Artificial Sequence: Synthetic oligonucleotide
  Sense strand starting at position 1924 of SEQ ID NO: 1561860
acugauuuagcauguuguu

SEQ ID NO: 1703820 - RNA, 19 nt, Artificial Sequence
  Description of Artificial Sequence: Synthetic oligonucleotide
  Antisense strand to SEQ ID NO: 1703819
aacaacaugcuaaaucagu

SEQ ID NO: 1703821 - RNA, 19 nt, Artificial Sequence
  Description of Artificial Sequence: Synthetic oligonucleotide
  Sense strand starting at position 2046 of SEQ ID NO: 1561860
ccucacuguucuguuauuu

SEQ ID NO: 1703822 - RNA, 19 nt, Artificial Sequence
  Description of Artificial Sequence: Synthetic oligonucleotide
  Antisense strand to SEQ ID NO: 1703821
aaauaacagaacagugagg

SEQ ID NO: 1703823 - RNA, 19 nt, Artificial Sequence
  Description of Artificial Sequence: Synthetic oligonucleotide
  Sense strand starting at position 2051 of SEQ ID NO: 1561860
cuguucuguuauuugucaa

SEQ ID NO: 1703824 - RNA, 19 nt, Artificial Sequence
  Description of Artificial Sequence: Synthetic oligonucleotide
  Antisense strand to SEQ ID NO: 1703823
uugacaaauaacagaacag

SEQ ID NO: 1703825 - RNA, 19 nt, Artificial Sequence
  Description of Artificial Sequence: Synthetic oligonucleotide
  Sense strand starting at position 2097 of SEQ ID NO: 1561860
gauuuaguucucuguugcu

SEQ ID NO: 1703826 - RNA, 19 nt, Artificial Sequence
  Description of Artificial Sequence: Synthetic oligonucleotide
  Antisense strand to SEQ ID NO: 1703825
agcaacagagaacuaaauc

SEQ ID NO: 1703827 - RNA, 19 nt, Artificial Sequence
  Description of Artificial Sequence: Synthetic oligonucleotide
  Sense strand starting at position 2109 of SEQ ID NO: 1561860
uguugcuuacaucaaguga

SEQ ID NO: 1703828 - RNA, 19 nt, Artificial Sequence
  Description of Artificial Sequence: Synthetic oligonucleotide
  Antisense strand to SEQ ID NO: 1703827
ucacuugauguaagcaaca

SEQ ID NO: 1703829 - RNA, 19 nt, Artificial Sequence
  Description of Artificial Sequence: Synthetic oligonucleotide
  Sense strand starting at position 2238 of SEQ ID NO: 1561860
gaaggugauuaggugucua

SEQ ID NO: 1703830 - RNA, 19 nt, Artificial Sequence
  Description of Artificial Sequence: Synthetic oligonucleotide
  Antisense strand to SEQ ID NO: 1703829
uagacaccuaaucaccuuc

SEQ ID NO: 1703831 - RNA, 19 nt, Artificial Sequence
  Description of Artificial Sequence: Synthetic oligonucleotide
  Sense strand starting at position 2243 of SEQ ID NO: 1561860
ugauuaggugucuaucaca

SEQ ID NO: 1703832 - RNA, 19 nt, Artificial Sequence
  Description of Artificial Sequence: Synthetic oligonucleotide
  Antisense strand to SEQ ID NO: 1703831
ugugauagacaccuaauca

SEQ ID NO: 1703833 - RNA, 19 nt, Artificial Sequence
  Description of Artificial Sequence: Synthetic oligonucleotide
  Sense strand starting at position 2290 of SEQ ID NO: 1561860
auuaaagacuuagaggaau

SEQ ID NO: 1703834 - RNA, 19 nt, Artificial Sequence
  Description of Artificial Sequence: Synthetic oligonucleotide
  Antisense strand to SEQ ID NO: 1703833
auuccucuaagucuuuaau

SEQ ID NO: 1703835 - RNA, 19 nt, Artificial Sequence
  Description of Artificial Sequence: Synthetic oligonucleotide
  Sense strand starting at position 2443 of SEQ ID NO: 1561860
ucauguaaacaagagcuua

SEQ ID NO: 1703836 - RNA, 19 nt, Artificial Sequence
  Description of Artificial Sequence: Synthetic oligonucleotide
  Antisense strand to SEQ ID NO: 1703835
uaagcucuuguuuacauga

SEQ ID NO: 1703837 - RNA, 19 nt, Artificial Sequence
  Description of Artificial Sequence: Synthetic oligonucleotide
  Sense strand starting at position 2508 of SEQ ID NO: 1561860
agggcuucugcacaauaua

SEQ ID NO: 1703838 - RNA, 19 nt, Artificial Sequence
  Description of Artificial Sequence: Synthetic oligonucleotide
  Antisense strand to SEQ ID NO: 1703837
uauauugugcagaagcccu

SEQ ID NO: 1703839 - RNA, 19 nt, Artificial Sequence
  Description of Artificial Sequence: Synthetic oligonucleotide
  Sense strand starting at position 2556 of SEQ ID NO: 1561860
uggcuuuaacauggaacau

SEQ ID NO: 1703840 - RNA, 19 nt, Artificial Sequence
  Description of Artificial Sequence: Synthetic oligonucleotide
  Antisense strand to SEQ ID NO: 1703839
auguuccauguuaaagcca

SEQ ID NO: 1703841 - RNA, 19 nt, Artificial Sequence
  Description of Artificial Sequence: Synthetic oligonucleotide
  Sense strand starting at position 2809 of SEQ ID NO: 1561860
gcacguuugcucucuagac

SEQ ID NO: 1703842 - RNA, 19 nt, Artificial Sequence
  Description of Artificial Sequence: Synthetic oligonucleotide
  Antisense strand to SEQ ID NO: 1703841
gucuagagagcaaacgugc

SEQ ID NO: 1703843 - RNA, 19 nt, Artificial Sequence
  Description of Artificial Sequence: Synthetic oligonucleotide
  Sense strand starting at position 3126 of SEQ ID NO: 1561860
agauuuauguauccuacgu

SEQ ID NO: 1703844 - RNA, 19 nt, Artificial Sequence
  Description of Artificial Sequence: Synthetic oligonucleotide
  Antisense strand to SEQ ID NO: 1703843
acguaggauacauaaaucu

SEQ ID NO: 1703845 - RNA, 19 nt, Artificial Sequence
  Description of Artificial Sequence: Synthetic oligonucleotide
  Sense strand starting at position 3225 of SEQ ID NO: 1561860
ucucuagcucugugcauuu

SEQ ID NO: 1703846 - RNA, 19 nt, Artificial Sequence
  Description of Artificial Sequence: Synthetic oligonucleotide
  Antisense strand to SEQ ID NO: 1703845
aaaugcacagagcuagaga

SEQ ID NO: 1703847 - RNA, 19 nt, Artificial Sequence
  Description of Artificial Sequence: Synthetic oligonucleotide
  Sense strand starting at position 3369 of SEQ ID NO: 1561860
cucuuauaaggcugaauaa

SEQ ID NO: 1703848 - RNA, 19 nt, Artificial Sequence
  Description of Artificial Sequence: Synthetic oligonucleotide
  Antisense strand to SEQ ID NO: 1703847
uuauucagccuuauaagag

SEQ ID NO: 1703849 - RNA, 19 nt, Artificial Sequence
  Description of Artificial Sequence: Synthetic oligonucleotide
  Sense strand starting at position 3805 of SEQ ID NO: 1561860
gguauagggaagugcuauu

SEQ ID NO: 1703850 - RNA, 19 nt, Artificial Sequence
  Description of Artificial Sequence: Synthetic oligonucleotide
  Antisense strand to SEQ ID NO: 1703849
aauagcacuucccuauacc

SEQ ID NO: 1703851 - RNA, 19 nt, Artificial Sequence
  Description of Artificial Sequence: Synthetic oligonucleotide
  Sense strand starting at position 3835 of SEQ ID NO: 1561860
guggucucagucuauaauu

SEQ ID NO: 1703852 - RNA, 19 nt, Artificial Sequence
  Description of Artificial Sequence: Synthetic oligonucleotide
  Antisense strand to SEQ ID NO: 1703851
aauuauagacugagaccac

SEQ ID NO: 1703853 - RNA, 19 nt, Artificial Sequence
  Description of Artificial Sequence: Synthetic oligonucleotide
  Sense strand starting at position 3886 of SEQ ID NO: 1561860
acauuaguaggauaugcuu

SEQ ID NO: 1703854 - RNA, 19 nt, Artificial Sequence
  Description of Artificial Sequence: Synthetic oligonucleotide
  Antisense strand to SEQ ID NO: 1703853
aagcauauccuacuaaugu

SEQ ID NO: 1703855 - RNA, 19 nt, Artificial Sequence
  Description of Artificial Sequence: Synthetic oligonucleotide
  Sense strand starting at position 3888 of SEQ ID NO: 1561860
auuaguaggauaugcuuga

SEQ ID NO: 1703856 - RNA, 19 nt, Artificial Sequence
  Description of Artificial Sequence: Synthetic oligonucleotide
  Antisense strand to SEQ ID NO: 1703855
ucaagcauauccuacuaau

SEQ ID NO: 1703857 - RNA, 19 nt, Artificial Sequence
  Description of Artificial Sequence: Synthetic oligonucleotide
  Sense strand starting at position 3892 of SEQ ID NO: 1561860
guaggauaugcuugagaaa

SEQ ID NO: 1703858 - RNA, 19 nt, Artificial Sequence
  Description of Artificial Sequence: Synthetic oligonucleotide
  Antisense strand to SEQ ID NO: 1703857
uuucucaagcauauccuac

SEQ ID NO: 1703859 - RNA, 19 nt, Artificial Sequence
  Description of Artificial Sequence: Synthetic oligonucleotide
  Sense strand starting at position 97 of SEQ ID NO: 1561861
guuaauucuggauggugga

SEQ ID NO: 1703860 - RNA, 19 nt, Artificial Sequence
  Description of Artificial Sequence: Synthetic oligonucleotide
  Antisense strand to SEQ ID NO: 1703859
uccaccauccagaauuaac

SEQ ID NO: 1703861 - RNA, 19 nt, Artificial Sequence
  Description of Artificial Sequence: Synthetic oligonucleotide
  Sense strand starting at position 111 of SEQ ID NO: 1561861
guggauucucgggacaucu

SEQ ID NO: 1703862 - RNA, 19 nt, Artificial Sequence
  Description of Artificial Sequence: Synthetic oligonucleotide
  Antisense strand to SEQ ID NO: 1703861
agaugucccgagaauccac

SEQ ID NO: 1703863 - RNA, 19 nt, Artificial Sequence
  Description of Artificial Sequence: Synthetic oligonucleotide
  Sense strand starting at position 120 of SEQ ID NO: 1561861
cgggacaucuaauauauua

SEQ ID NO: 1703864 - RNA, 19 nt, Artificial Sequence
  Description of Artificial Sequence: Synthetic oligonucleotide
  Antisense strand to SEQ ID NO: 1703863
uaauauauuagaugucccg

SEQ ID NO: 1703865 - RNA, 19 nt, Artificial Sequence
  Description of Artificial Sequence: Synthetic oligonucleotide
  Sense strand starting at position 282 of SEQ ID NO: 1561861
aaguguccuccuuggauca

SEQ ID NO: 1703866 - RNA, 19 nt, Artificial Sequence
  Description of Artificial Sequence: Synthetic oligonucleotide
  Antisense strand to SEQ ID NO: 1703865
ugauccaaggaggacacuu

SEQ ID NO: 1703867 - RNA, 19 nt, Artificial Sequence
  Description of Artificial Sequence: Synthetic oligonucleotide
  Sense strand starting at position 368 of SEQ ID NO: 1561861
uaggauucggcccagcaau

SEQ ID NO: 1703868 - RNA, 19 nt, Artificial Sequence
  Description of Artificial Sequence: Synthetic oligonucleotide
  Antisense strand to SEQ ID NO: 1703867
auugcugggccgaauccua

SEQ ID NO: 1703869 - RNA, 19 nt, Artificial Sequence
  Description of Artificial Sequence: Synthetic oligonucleotide
  Sense strand starting at position 421 of SEQ ID NO: 1561861
aggcuaaagucugagaaca

SEQ ID NO: 1703870 - RNA, 19 nt, Artificial Sequence
  Description of Artificial Sequence: Synthetic oligonucleotide
  Antisense strand to SEQ ID NO: 1703869
uguucucagacuuuagccu

SEQ ID NO: 1703871 - RNA, 19 nt, Artificial Sequence
  Description of Artificial Sequence: Synthetic oligonucleotide
  Sense strand starting at position 442 of SEQ ID NO: 1561861
gggccauaugucuagcuag

SEQ ID NO: 1703872 - RNA, 19 nt, Artificial Sequence
  Description of Artificial Sequence: Synthetic oligonucleotide
  Antisense strand to SEQ ID NO: 1703871
cuagcuagacauauggccc

SEQ ID NO: 1703873 - RNA, 19 nt, Artificial Sequence
  Description of Artificial Sequence: Synthetic oligonucleotide
  Sense strand starting at position 460 of SEQ ID NO: 1561861
gggcaauguuaacauacau

SEQ ID NO: 1703874 - RNA, 19 nt, Artificial Sequence
  Description of Artificial Sequence: Synthetic oligonucleotide
  Antisense strand to SEQ ID NO: 1703873
auguauguuaacauugccc

SEQ ID NO: 1703875 - RNA, 19 nt, Artificial Sequence
  Description of Artificial Sequence: Synthetic oligonucleotide
  Sense strand starting at position 475 of SEQ ID NO: 1561861
acauuaagccuguguacug

SEQ ID NO: 1703876 - RNA, 19 nt, Artificial Sequence
  Description of Artificial Sequence: Synthetic oligonucleotide
  Antisense strand to SEQ ID NO: 1703875
caguacacaggcuuaaugu

SEQ ID NO: 1703877 - RNA, 19 nt, Artificial Sequence
  Description of Artificial Sequence: Synthetic oligonucleotide
  Sense strand starting at position 866 of SEQ ID NO: 1561861
cugugaaggagguacuauu

SEQ ID NO: 1703878 - RNA, 19 nt, Artificial Sequence
  Description of Artificial Sequence: Synthetic oligonucleotide
  Antisense strand to SEQ ID NO: 1703877
aauaguaccuccuucacag

SEQ ID NO: 1703879 - RNA, 19 nt, Artificial Sequence
  Description of Artificial Sequence: Synthetic oligonucleotide
  Sense strand starting at position 1094 of SEQ ID NO: 1561861
ggcggagaauucguccaag

SEQ ID NO: 1703880 - RNA, 19 nt, Artificial Sequence
  Description of Artificial Sequence: Synthetic oligonucleotide
  Antisense strand to SEQ ID NO: 1703879
cuuggacgaauucuccgcc

SEQ ID NO: 1703881 - RNA, 19 nt, Artificial Sequence
  Description of Artificial Sequence: Synthetic oligonucleotide
  Sense strand starting at position 1100 of SEQ ID NO: 1561861
gaauucguccaaggaggaa

SEQ ID NO: 1703882 - RNA, 19 nt, Artificial Sequence
  Description of Artificial Sequence: Synthetic oligonucleotide
  Antisense strand to SEQ ID NO: 1703881
uuccuccuuggacgaauuc

SEQ ID NO: 1703883 - RNA, 19 nt, Artificial Sequence
  Description of Artificial Sequence: Synthetic oligonucleotide
  Sense strand starting at position 2312 of SEQ ID NO: 1561861
cuccaaggcucccaagaua

SEQ ID NO: 1703884 - RNA, 19 nt, Artificial Sequence
  Description of Artificial Sequence: Synthetic oligonucleotide
  Antisense strand to SEQ ID NO: 1703883
uaucuugggagccuuggag

SEQ ID NO: 1703885 - RNA, 19 nt, Artificial Sequence
  Description of Artificial Sequence: Synthetic oligonucleotide
  Sense strand starting at position 2445 of SEQ ID NO: 1561861
ggauucuaacccugcccua

SEQ ID NO: 1703886 - RNA, 19 nt, Artificial Sequence
  Description of Artificial Sequence: Synthetic oligonucleotide
  Antisense strand to SEQ ID NO: 1703885
uagggcaggguuagaaucc

SEQ ID NO: 1703887 - RNA, 19 nt, Artificial Sequence
  Description of Artificial Sequence: Synthetic oligonucleotide
  Sense strand starting at position 2655 of SEQ ID NO: 1561861
cuggaaaggccuuacccua

SEQ ID NO: 1703888 - RNA, 19 nt, Artificial Sequence
  Description of Artificial Sequence: Synthetic oligonucleotide
  Antisense strand to SEQ ID NO: 1703887
uaggguaaggccuuuccag

SEQ ID NO: 1703889 - RNA, 19 nt, Artificial Sequence
  Description of Artificial Sequence: Synthetic oligonucleotide
  Sense strand starting at position 2679 of SEQ ID NO: 1561861
gaagcaucgugaucucuuu

SEQ ID NO: 1703890 - RNA, 19 nt, Artificial Sequence
  Description of Artificial Sequence: Synthetic oligonucleotide
  Antisense strand to SEQ ID NO: 1703889
aaagagaucacgaugcuuc

SEQ ID NO: 1703891 - RNA, 19 nt, Artificial Sequence
  Description of Artificial Sequence: Synthetic oligonucleotide
  Sense strand starting at position 2820 of SEQ ID NO: 1561861
caaaguuccucucucgaag

SEQ ID NO: 1703892 - RNA, 19 nt, Artificial Sequence
  Description of Artificial Sequence: Synthetic oligonucleotide
  Antisense strand to SEQ ID NO: 1703891
cuucgagagaggaacuuug

SEQ ID NO: 1703893 - RNA, 19 nt, Artificial Sequence
  Description of Artificial Sequence: Synthetic oligonucleotide
  Sense strand starting at position 2823 of SEQ ID NO: 1561861
aguuccucucucgaaggaa

SEQ ID NO: 1703894 - RNA, 19 nt, Artificial Sequence
  Description of Artificial Sequence: Synthetic oligonucleotide
  Antisense strand to SEQ ID NO: 1703893
uuccuucgagagaggaacu

SEQ ID NO: 1703895 - RNA, 19 nt, Artificial Sequence
  Description of Artificial Sequence: Synthetic oligonucleotide
  Sense strand starting at position 3044 of SEQ ID NO: 1561861
cccuaaaugcuguguaaca

SEQ ID NO: 1703896 - RNA, 19 nt, Artificial Sequence
  Description of Artificial Sequence: Synthetic oligonucleotide
  Antisense strand to SEQ ID NO: 1703895
uguuacacagcauuuaggg

SEQ ID NO: 1703897 - RNA, 19 nt, Artificial Sequence
  Description of Artificial Sequence: Synthetic oligonucleotide
  Sense strand starting at position 3046 of SEQ ID NO: 1561861
cuaaaugcuguguaacaca

SEQ ID NO: 1703898 - RNA, 19 nt, Artificial Sequence
  Description of Artificial Sequence: Synthetic oligonucleotide
  Antisense strand to SEQ ID NO: 1703897
uguguuacacagcauuuag

SEQ ID NO: 1703899 - RNA, 19 nt, Artificial Sequence
  Description of Artificial Sequence: Synthetic oligonucleotide
  Sense strand starting at position 3209 of SEQ ID NO: 1561861
guucuuaaauuuggcacua

SEQ ID NO: 1703900 - RNA, 19 nt, Artificial Sequence
  Description of Artificial Sequence: Synthetic oligonucleotide
  Antisense strand to SEQ ID NO: 1703899
uagugccaaauuuaagaac

SEQ ID NO: 1703901 - RNA, 19 nt, Artificial Sequence
  Description of Artificial Sequence: Synthetic oligonucleotide
  Sense strand starting at position 3261 of SEQ ID NO: 1561861
gggacuguccugugaauga

SEQ ID NO: 1703902 - RNA, 19 nt, Artificial Sequence
  Description of Artificial Sequence: Synthetic oligonucleotide
  Antisense strand to SEQ ID NO: 1703901
ucauucacaggacaguccc

SEQ ID NO: 1703903 - RNA, 19 nt, Artificial Sequence
  Description of Artificial Sequence: Synthetic oligonucleotide
  Sense strand starting at position 3266 of SEQ ID NO: 1561861
uguccugugaaugauagga

SEQ ID NO: 1703904 - RNA, 19 nt, Artificial Sequence
  Description of Artificial Sequence: Synthetic oligonucleotide
  Antisense strand to SEQ ID NO: 1703903
uccuaucauucacaggaca

SEQ ID NO: 1703905 - RNA, 19 nt, Artificial Sequence
  Description of Artificial Sequence: Synthetic oligonucleotide
  Sense strand starting at position 3270 of SEQ ID NO: 1561861
cugugaaugauaggauguu

SEQ ID NO: 1703906 - RNA, 19 nt, Artificial Sequence
  Description of Artificial Sequence: Synthetic oligonucleotide
  Antisense strand to SEQ ID NO: 1703905
aacauccuaucauucacag

SEQ ID NO: 1703907 - RNA, 19 nt, Artificial Sequence
  Description of Artificial Sequence: Synthetic oligonucleotide
  Sense strand starting at position 3271 of SEQ ID NO: 1561861
ugugaaugauaggauguuu

SEQ ID NO: 1703908 - RNA, 19 nt, Artificial Sequence
  Description of Artificial Sequence: Synthetic oligonucleotide
  Antisense strand to SEQ ID NO: 1703907
aaacauccuaucauucaca

SEQ ID NO: 1703909 - RNA, 19 nt, Artificial Sequence
  Description of Artificial Sequence: Synthetic oligonucleotide
  Sense strand starting at position 3291 of SEQ ID NO: 1561861
acagcauuccugggcucua

SEQ ID NO: 1703910 - RNA, 19 nt, Artificial Sequence
  Description of Artificial Sequence: Synthetic oligonucleotide
  Antisense strand to SEQ ID NO: 1703909
uagagcccaggaaugcugu

SEQ ID NO: 1703911 - RNA, 19 nt, Artificial Sequence
  Description of Artificial Sequence: Synthetic oligonucleotide
  Sense strand starting at position 3311 of SEQ ID NO: 1561861
ccacuaguugucuauagca

SEQ ID NO: 1703912 - RNA, 19 nt, Artificial Sequence
  Description of Artificial Sequence: Synthetic oligonucleotide
  Antisense strand to SEQ ID NO: 1703911
ugcuauagacaacuagugg

SEQ ID NO: 1703913 - RNA, 19 nt, Artificial Sequence
  Description of Artificial Sequence: Synthetic oligonucleotide
  Sense strand starting at position 3313 of SEQ ID NO: 1561861
acuaguugucuauagcauc

SEQ ID NO: 1703914 - RNA, 19 nt, Artificial Sequence
  Description of Artificial Sequence: Synthetic oligonucleotide
  Antisense strand to SEQ ID NO: 1703913
gaugcuauagacaacuagu

SEQ ID NO: 1703915 - RNA, 19 nt, Artificial Sequence
  Description of Artificial Sequence: Synthetic oligonucleotide
  Sense strand starting at position 3536 of SEQ ID NO: 1561861
gcuugauccugcuuagcuu

SEQ ID NO: 1703916 - RNA, 19 nt, Artificial Sequence
  Description of Artificial Sequence: Synthetic oligonucleotide
  Antisense strand to SEQ ID NO: 1703915
aagcuaagcaggaucaagc

SEQ ID NO: 1703917 - RNA, 19 nt, Artificial Sequence
  Description of Artificial Sequence: Synthetic oligonucleotide
  Sense strand starting at position 3573 of SEQ ID NO: 1561861
agauguguucgguguggua

SEQ ID NO: 1703918 - RNA, 19 nt, Artificial Sequence
  Description of Artificial Sequence: Synthetic oligonucleotide
  Antisense strand to SEQ ID NO: 1703917
uaccacaccgaacacaucu

SEQ ID NO: 1703919 - RNA, 19 nt, Artificial Sequence
  Description of Artificial Sequence: Synthetic oligonucleotide
  Sense strand starting at position 3580 of SEQ ID NO: 1561861
uucggugugguauggcaua

SEQ ID NO: 1703920 - RNA, 19 nt, Artificial Sequence
  Description of Artificial Sequence: Synthetic oligonucleotide
  Antisense strand to SEQ ID NO: 1703919
uaugccauaccacaccgaa

SEQ ID NO: 1703921 - RNA, 19 nt, Artificial Sequence
  Description of Artificial Sequence: Synthetic oligonucleotide
  Sense strand starting at position 3585 of SEQ ID NO: 1561861
ugugguauggcauagacaa

SEQ ID NO: 1703922 - RNA, 19 nt, Artificial Sequence
  Description of Artificial Sequence: Synthetic oligonucleotide
  Antisense strand to SEQ ID NO: 1703921
uugucuaugccauaccaca

SEQ ID NO: 1703923 - RNA, 19 nt, Artificial Sequence
  Description of Artificial Sequence: Synthetic oligonucleotide
  Sense strand starting at position 3756 of SEQ ID NO: 1561861
agauaauguucugaaugua

SEQ ID NO: 1703924 - RNA, 19 nt, Artificial Sequence
  Description of Artificial Sequence: Synthetic oligonucleotide
  Antisense strand to SEQ ID NO: 1703923
uacauucagaacauuaucu

SEQ ID NO: 1703925 - RNA, 19 nt, Artificial Sequence
  Description of Artificial Sequence: Synthetic oligonucleotide
  Sense strand starting at position 3759 of SEQ ID NO: 1561861
uaauguucugaauguaugu

SEQ ID NO: 1703926 - RNA, 19 nt, Artificial Sequence
  Description of Artificial Sequence: Synthetic oligonucleotide
  Antisense strand to SEQ ID NO: 1703925
acauacauucagaacauua

SEQ ID NO: 1703927 - RNA, 19 nt, Artificial Sequence
  Description of Artificial Sequence: Synthetic oligonucleotide
  Sense strand starting at position 3766 of SEQ ID NO: 1561861
cugaauguauguuuaaugu

SEQ ID NO: 1703928 - RNA, 19 nt, Artificial Sequence
  Description of Artificial Sequence: Synthetic oligonucleotide
  Antisense strand to SEQ ID NO: 1703927
acauuaaacauacauucag

SEQ ID NO: 1703929 - RNA, 19 nt, Artificial Sequence
  Description of Artificial Sequence: Synthetic oligonucleotide
  Sense strand starting at position 3821 of SEQ ID NO: 1561861
ccaucacuguuguuaauau

SEQ ID NO: 1703930 - RNA, 19 nt, Artificial Sequence
  Description of Artificial Sequence: Synthetic oligonucleotide
  Antisense strand to SEQ ID NO: 1703929
auauuaacaacagugaugg

SEQ ID NO: 1703931 - RNA, 19 nt, Artificial Sequence
  Description of Artificial Sequence: Synthetic oligonucleotide
  Sense strand starting at position 3869 of SEQ ID NO: 1561861
acguguagucacuguuuac

SEQ ID NO: 1703932 - RNA, 19 nt, Artificial Sequence
  Description of Artificial Sequence: Synthetic oligonucleotide
  Antisense strand to SEQ ID NO: 1703931
guaaacagugacuacacgu

SEQ ID NO: 1703933 - RNA, 19 nt, Artificial Sequence
  Description of Artificial Sequence: Synthetic oligonucleotide
  Sense strand starting at position 3872 of SEQ ID NO: 1561861
uguagucacuguuuacauc

SEQ ID NO: 1703934 - RNA, 19 nt, Artificial Sequence
  Description of Artificial Sequence: Synthetic oligonucleotide
  Antisense strand to SEQ ID NO: 1703933
gauguaaacagugacuaca

SEQ ID NO: 1703935 - RNA, 19 nt, Artificial Sequence
  Description of Artificial Sequence: Synthetic oligonucleotide
  Sense strand starting at position 3908 of SEQ ID NO: 1561861
ccauucuccuagucaugga

SEQ ID NO: 1703936 - RNA, 19 nt, Artificial Sequence
  Description of Artificial Sequence: Synthetic oligonucleotide
  Antisense strand to SEQ ID NO: 1703935
uccaugacuaggagaaugg

SEQ ID NO: 1703937 - RNA, 19 nt, Artificial Sequence
  Description of Artificial Sequence: Synthetic oligonucleotide
  Sense strand starting at position 3944 of SEQ ID NO: 1561861
auuucccacuaguguaaau

SEQ ID NO: 1703938 - RNA, 19 nt, Artificial Sequence
  Description of Artificial Sequence: Synthetic oligonucleotide
  Antisense strand to SEQ ID NO: 1703937
auuuacacuagugggaaau

SEQ ID NO: 1703939 - RNA, 19 nt, Artificial Sequence
  Description of Artificial Sequence: Synthetic oligonucleotide
  Sense strand starting at position 416 of SEQ ID NO: 1561862
cgccaaacuccguaaggau

SEQ ID NO: 1703940 - RNA, 19 nt, Artificial Sequence
  Description of Artificial Sequence: Synthetic oligonucleotide
  Antisense strand to SEQ ID NO: 1703939
auccuuacggaguuuggcg

SEQ ID NO: 1703941 - RNA, 19 nt, Artificial Sequence
  Description of Artificial Sequence: Synthetic oligonucleotide
  Sense strand starting at position 723 of SEQ ID NO: 1561862
gcagucaugcuccacccua

SEQ ID NO: 1703942 - RNA, 19 nt, Artificial Sequence
  Description of Artificial Sequence: Synthetic oligonucleotide
  Antisense strand to SEQ ID NO: 1703941
uaggguggagcaugacugc

SEQ ID NO: 1703943 - RNA, 19 nt, Artificial Sequence
  Description of Artificial Sequence: Synthetic oligonucleotide
  Sense strand starting at position 746 of SEQ ID NO: 1561862
ggacguaggugcuuucauu

SEQ ID NO: 1703944 - RNA, 19 nt, Artificial Sequence
  Description of Artificial Sequence: Synthetic oligonucleotide
  Antisense strand to SEQ ID NO: 1703943
aaugaaagcaccuacgucc

SEQ ID NO: 1703945 - RNA, 19 nt, Artificial Sequence
  Description of Artificial Sequence: Synthetic oligonucleotide
  Sense strand starting at position 974 of SEQ ID NO: 1561862
guucgaagccugcgacaga

SEQ ID NO: 1703946 - RNA, 19 nt, Artificial Sequence
  Description of Artificial Sequence: Synthetic oligonucleotide
  Antisense strand to SEQ ID NO: 1703945
ucugucgcaggcuucgaac

SEQ ID NO: 1703947 - RNA, 19 nt, Artificial Sequence
  Description of Artificial Sequence: Synthetic oligonucleotide
  Sense strand starting at position 1175 of SEQ ID NO: 1561862
uguguccugucagggagua

SEQ ID NO: 1703948 - RNA, 19 nt, Artificial Sequence
  Description of Artificial Sequence: Synthetic oligonucleotide
  Antisense strand to SEQ ID NO: 1703947
uacucccugacaggacaca

SEQ ID NO: 1703949 - RNA, 19 nt, Artificial Sequence
  Description of Artificial Sequence: Synthetic oligonucleotide
  Sense strand starting at position 1177 of SEQ ID NO: 1561862
uguccugucagggaguaca

SEQ ID NO: 1703950 - RNA, 19 nt, Artificial Sequence
  Description of Artificial Sequence: Synthetic oligonucleotide
  Antisense strand to SEQ ID NO: 1703949
uguacucccugacaggaca

SEQ ID NO: 1703951 - RNA, 19 nt, Artificial Sequence
  Description of Artificial Sequence: Synthetic oligonucleotide
  Sense strand starting at position 1383 of SEQ ID NO: 1561862
ugacucuucuaaggacaca

SEQ ID NO: 1703952 - RNA, 19 nt, Artificial Sequence
  Description of Artificial Sequence: Synthetic oligonucleotide
  Antisense strand to SEQ ID NO: 1703951
uguguccuuagaagaguca

SEQ ID NO: 1703953 - RNA, 19 nt, Artificial Sequence
  Description of Artificial Sequence: Synthetic oligonucleotide
  Sense strand starting at position 2012 of SEQ ID NO: 1561862
ugacgcugaucgcggaaau

SEQ ID NO: 1703954 - RNA, 19 nt, Artificial Sequence
  Description of Artificial Sequence: Synthetic oligonucleotide
  Antisense strand to SEQ ID NO: 1703953
auuuccgcgaucagcguca

SEQ ID NO: 1703955 - RNA, 19 nt, Artificial Sequence
  Description of Artificial Sequence: Synthetic oligonucleotide
  Sense strand starting at position 2013 of SEQ ID NO: 1561862
gacgcugaucgcggaaauu

SEQ ID NO: 1703956 - RNA, 19 nt, Artificial Sequence
  Description of Artificial Sequence: Synthetic oligonucleotide
  Antisense strand to SEQ ID NO: 1703955
aauuuccgcgaucagcguc

SEQ ID NO: 1703957 - RNA, 19 nt, Artificial Sequence
  Description of Artificial Sequence: Synthetic oligonucleotide
  Sense strand starting at position 2296 of SEQ ID NO: 1561862
gcaggauggucuggugacu

SEQ ID NO: 1703958 - RNA, 19 nt, Artificial Sequence
  Description of Artificial Sequence: Synthetic oligonucleotide
  Antisense strand to SEQ ID NO: 1703957
agucaccagaccauccugc

SEQ ID NO: 1703959 - RNA, 19 nt, Artificial Sequence
  Description of Artificial Sequence: Synthetic oligonucleotide
  Sense strand starting at position 2653 of SEQ ID NO: 1561862
gcuguuagaugucuauguu

SEQ ID NO: 1703960 - RNA, 19 nt, Artificial Sequence
  Description of Artificial Sequence: Synthetic oligonucleotide
  Antisense strand to SEQ ID NO: 1703959
aacauagacaucuaacagc

SEQ ID NO: 1703961 - RNA, 19 nt, Artificial Sequence
  Description of Artificial Sequence: Synthetic oligonucleotide
  Sense strand starting at position 2654 of SEQ ID NO: 1561862
cuguuagaugucuauguuu

SEQ ID NO: 1703962 - RNA, 19 nt, Artificial Sequence
  Description of Artificial Sequence: Synthetic oligonucleotide
  Antisense strand to SEQ ID NO: 1703961
aaacauagacaucuaacag

SEQ ID NO: 1703963 - RNA, 19 nt, Artificial Sequence
  Description of Artificial Sequence: Synthetic oligonucleotide
  Sense strand starting at position 2656 of SEQ ID NO: 1561862
guuagaugucuauguuuaa

SEQ ID NO: 1703964 - RNA, 19 nt, Artificial Sequence
  Description of Artificial Sequence: Synthetic oligonucleotide
  Antisense strand to SEQ ID NO: 1703963
uuaaacauagacaucuaac

SEQ ID NO: 1703965 - RNA, 19 nt, Artificial Sequence
  Description of Artificial Sequence: Synthetic oligonucleotide
  Sense strand starting at position 2743 of SEQ ID NO: 1561862
agaagcauugcuugaacca

SEQ ID NO: 1703966 - RNA, 19 nt, Artificial Sequence
  Description of Artificial Sequence: Synthetic oligonucleotide
  Antisense strand to SEQ ID NO: 1703965
ugguucaagcaaugcuucu

SEQ ID NO: 1703967 - RNA, 19 nt, Artificial Sequence
  Description of Artificial Sequence: Synthetic oligonucleotide
  Sense strand starting at position 2894 of SEQ ID NO: 1561862
ggcgaucuguucugcagca

SEQ ID NO: 1703968 - RNA, 19 nt, Artificial Sequence
  Description of Artificial Sequence: Synthetic oligonucleotide
  Antisense strand to SEQ ID NO: 1703967
ugcugcagaacagaucgcc

SEQ ID NO: 1703969 - RNA, 19 nt, Artificial Sequence
  Description of Artificial Sequence: Synthetic oligonucleotide
  Sense strand starting at position 2896 of SEQ ID NO: 1561862
cgaucuguucugcagcagu

SEQ ID NO: 1703970 - RNA, 19 nt, Artificial Sequence
  Description of Artificial Sequence: Synthetic oligonucleotide
  Antisense strand to SEQ ID NO: 1703969
acugcugcagaacagaucg

SEQ ID NO: 1703971 - RNA, 19 nt, Artificial Sequence
  Description of Artificial Sequence: Synthetic oligonucleotide
  Sense strand starting at position 2913 of SEQ ID NO: 1561862
guagauaacggacagugau

SEQ ID NO: 1703972 - RNA, 19 nt, Artificial Sequence
  Description of Artificial Sequence: Synthetic oligonucleotide
  Antisense strand to SEQ ID NO: 1703971
aucacuguccguuaucuac

SEQ ID NO: 1703973 - RNA, 19 nt, Artificial Sequence
  Description of Artificial Sequence: Synthetic oligonucleotide
  Sense strand starting at position 3149 of SEQ ID NO: 1561862
cguggaacgcugggagaau

SEQ ID NO: 1703974 - RNA, 19 nt, Artificial Sequence
  Description of Artificial Sequence: Synthetic oligonucleotide
  Antisense strand to SEQ ID NO: 1703973
auucucccagcguuccacg

SEQ ID NO: 1703975 - RNA, 19 nt, Artificial Sequence
  Description of Artificial Sequence: Synthetic oligonucleotide
  Sense strand starting at position 3150 of SEQ ID NO: 1561862
guggaacgcugggagaauu

SEQ ID NO: 1703976 - RNA, 19 nt, Artificial Sequence
  Description of Artificial Sequence: Synthetic oligonucleotide
  Antisense strand to SEQ ID NO: 1703975
aauucucccagcguuccac

SEQ ID NO: 1703977 - RNA, 19 nt, Artificial Sequence
  Description of Artificial Sequence: Synthetic oligonucleotide
  Sense strand starting at position 3178 of SEQ ID NO: 1561862
cgcuguguuccuggaugga

SEQ ID NO: 1703978 - RNA, 19 nt, Artificial Sequence
  Description of Artificial Sequence: Synthetic oligonucleotide
  Antisense strand to SEQ ID NO: 1703977
uccauccaggaacacagcg

SEQ ID NO: 1703979 - RNA, 19 nt, Artificial Sequence
  Description of Artificial Sequence: Synthetic oligonucleotide
  Sense strand starting at position 3216 of SEQ ID NO: 1561862
agacgugaguuccuccuaa

SEQ ID NO: 1703980 - RNA, 19 nt, Artificial Sequence
  Description of Artificial Sequence: Synthetic oligonucleotide
  Antisense strand to SEQ ID NO: 1703979
uuaggaggaacucacgucu

SEQ ID NO: 1703981 - RNA, 19 nt, Artificial Sequence
  Description of Artificial Sequence: Synthetic oligonucleotide
  Sense strand starting at position 3220 of SEQ ID NO: 1561862
gugaguuccuccuaaacua

SEQ ID NO: 1703982 - RNA, 19 nt, Artificial Sequence
  Description of Artificial Sequence: Synthetic oligonucleotide
  Antisense strand to SEQ ID NO: 1703981
uaguuuaggaggaacucac

SEQ ID NO: 1703983 - RNA, 19 nt, Artificial Sequence
  Description of Artificial Sequence: Synthetic oligonucleotide
  Sense strand starting at position 3603 of SEQ ID NO: 1561862
gagugccgggauuagauua

SEQ ID NO: 1703984 - RNA, 19 nt, Artificial Sequence
  Description of Artificial Sequence: Synthetic oligonucleotide
  Antisense strand to SEQ ID NO: 1703983
uaaucuaaucccggcacuc

SEQ ID NO: 1703985 - RNA, 19 nt, Artificial Sequence
  Description of Artificial Sequence: Synthetic oligonucleotide
  Sense strand starting at position 20 of SEQ ID NO: 1561863
ugugguugccgugauguca

SEQ ID NO: 1703986 - RNA, 19 nt, Artificial Sequence
  Description of Artificial Sequence: Synthetic oligonucleotide
  Antisense strand to SEQ ID NO: 1703985
ugacaucacggcaaccaca

SEQ ID NO: 1703987 - RNA, 19 nt, Artificial Sequence
  Description of Artificial Sequence: Synthetic oligonucleotide
  Sense strand starting at position 1187 of SEQ ID NO: 1561863
ugcgcaaucucagccagau

SEQ ID NO: 1703988 - RNA, 19 nt, Artificial Sequence
  Description of Artificial Sequence: Synthetic oligonucleotide
  Antisense strand to SEQ ID NO: 1703987
aucuggcugagauugcgca

SEQ ID NO: 1703989 - RNA, 19 nt, Artificial Sequence
  Description of Artificial Sequence: Synthetic oligonucleotide
  Sense strand starting at position 1329 of SEQ ID NO: 1561863
cguagaagugccgcgagau

SEQ ID NO: 1703990 - RNA, 19 nt, Artificial Sequence
  Description of Artificial Sequence: Synthetic oligonucleotide
  Antisense strand to SEQ ID NO: 1703989
aucucgcggcacuucuacg

SEQ ID NO: 1703991 - RNA, 19 nt, Artificial Sequence
  Description of Artificial Sequence: Synthetic oligonucleotide
  Sense strand starting at position 1330 of SEQ ID NO: 1561863
guagaagugccgcgagaug

SEQ ID NO: 1703992 - RNA, 19 nt, Artificial Sequence
  Description of Artificial Sequence: Synthetic oligonucleotide
  Antisense strand to SEQ ID NO: 1703991
caucucgcggcacuucuac

SEQ ID NO: 1703993 - RNA, 19 nt, Artificial Sequence
  Description of Artificial Sequence: Synthetic oligonucleotide
  Sense strand starting at position 1341 of SEQ ID NO: 1561863
gcgagaugaagcugacaau

SEQ ID NO: 1703994 - RNA, 19 nt, Artificial Sequence
  Description of Artificial Sequence: Synthetic oligonucleotide
  Antisense strand to SEQ ID NO: 1703993
auugucagcuucaucucgc

SEQ ID NO: 1703995 - RNA, 19 nt, Artificial Sequence
  Description of Artificial Sequence: Synthetic oligonucleotide
  Sense strand starting at position 1371 of SEQ ID NO: 1561863
agcgguaguucucguggaa

SEQ ID NO: 1703996 - RNA, 19 nt, Artificial Sequence
  Description of Artificial Sequence: Synthetic oligonucleotide
  Antisense strand to SEQ ID NO: 1703995
uuccacgagaacuaccgcu

SEQ ID NO: 1703997 - RNA, 19 nt, Artificial Sequence
  Description of Artificial Sequence: Synthetic oligonucleotide
  Sense strand starting at position 1372 of SEQ ID NO: 1561863
gcgguaguucucguggaag

SEQ ID NO: 1703998 - RNA, 19 nt, Artificial Sequence
  Description of Artificial Sequence: Synthetic oligonucleotide
  Antisense strand to SEQ ID NO: 1703997
cuuccacgagaacuaccgc

SEQ ID NO: 1703999 - RNA, 19 nt, Artificial Sequence
  Description of Artificial Sequence: Synthetic oligonucleotide
  Sense strand starting at position 1373 of SEQ ID NO: 1561863
cgguaguucucguggaaga

SEQ ID NO: 1704000 - RNA, 19 nt, Artificial Sequence
  Description of Artificial Sequence: Synthetic oligonucleotide
  Antisense strand to SEQ ID NO: 1703999
ucuuccacgagaacuaccg

SEQ ID NO: 1704001 - RNA, 19 nt, Artificial Sequence
  Description of Artificial Sequence: Synthetic oligonucleotide
  Sense strand starting at position 1374 of SEQ ID NO: 1561863
gguaguucucguggaagac

SEQ ID NO: 1704002 - RNA, 19 nt, Artificial Sequence
  Description of Artificial Sequence: Synthetic oligonucleotide
  Antisense strand to SEQ ID NO: 1704001
gucuuccacgagaacuacc

SEQ ID NO: 1704003 - RNA, 19 nt, Artificial Sequence
  Description of Artificial Sequence: Synthetic oligonucleotide
  Sense strand starting at position 1594 of SEQ ID NO: 1561863
ggccgccucaucgaugaga

SEQ ID NO: 1704004 - RNA, 19 nt, Artificial Sequence
  Description of Artificial Sequence: Synthetic oligonucleotide
  Antisense strand to SEQ ID NO: 1704003
ucucaucgaugaggcggcc

SEQ ID NO: 1704005 - RNA, 19 nt, Artificial Sequence
  Description of Artificial Sequence: Synthetic oligonucleotide
  Sense strand starting at position 1596 of SEQ ID NO: 1561863
ccgccucaucgaugagaau

SEQ ID NO: 1704006 - RNA, 19 nt, Artificial Sequence
  Description of Artificial Sequence: Synthetic oligonucleotide
  Antisense strand to SEQ ID NO: 1704005
auucucaucgaugaggcgg

SEQ ID NO: 1704007 - RNA, 19 nt, Artificial Sequence
  Description of Artificial Sequence: Synthetic oligonucleotide
  Sense strand starting at position 1597 of SEQ ID NO: 1561863
cgccucaucgaugagaaug

SEQ ID NO: 1704008 - RNA, 19 nt, Artificial Sequence
  Description of Artificial Sequence: Synthetic oligonucleotide
  Antisense strand to SEQ ID NO: 1704007
cauucucaucgaugaggcg

SEQ ID NO: 1704009 - RNA, 19 nt, Artificial Sequence
  Description of Artificial Sequence: Synthetic oligonucleotide
  Sense strand starting at position 1830 of SEQ ID NO: 1561863
ugacguggcuguggaaaua

SEQ ID NO: 1704010 - RNA, 19 nt, Artificial Sequence
  Description of Artificial Sequence: Synthetic oligonucleotide
  Antisense strand to SEQ ID NO: 1704009
uauuuccacagccacguca

SEQ ID NO: 1704011 - RNA, 19 nt, Artificial Sequence
  Description of Artificial Sequence: Synthetic oligonucleotide
  Sense strand starting at position 1841 of SEQ ID NO: 1561863
uggaaauacucccggaugu

SEQ ID NO: 1704012 - RNA, 19 nt, Artificial Sequence
  Description of Artificial Sequence: Synthetic oligonucleotide
  Antisense strand to SEQ ID NO: 1704011
acauccgggaguauuucca

SEQ ID NO: 1704013 - RNA, 19 nt, Artificial Sequence
  Description of Artificial Sequence: Synthetic oligonucleotide
  Sense strand starting at position 1842 of SEQ ID NO: 1561863
ggaaauacucccggaugua

SEQ ID NO: 1704014 - RNA, 19 nt, Artificial Sequence
  Description of Artificial Sequence: Synthetic oligonucleotide
  Antisense strand to SEQ ID NO: 1704013
uacauccgggaguauuucc

SEQ ID NO: 1704015 - RNA, 19 nt, Artificial Sequence
  Description of Artificial Sequence: Synthetic oligonucleotide
  Sense strand starting at position 1845 of SEQ ID NO: 1561863
aauacucccggauguagau

SEQ ID NO: 1704016 - RNA, 19 nt, Artificial Sequence
  Description of Artificial Sequence: Synthetic oligonucleotide
  Antisense strand to SEQ ID NO: 1704015
aucuacauccgggaguauu

SEQ ID NO: 1704017 - RNA, 19 nt, Artificial Sequence
  Description of Artificial Sequence: Synthetic oligonucleotide
  Sense strand starting at position 1913 of SEQ ID NO: 1561863
gccucagugcuguccgcua

SEQ ID NO: 1704018 - RNA, 19 nt, Artificial Sequence
  Description of Artificial Sequence: Synthetic oligonucleotide
  Antisense strand to SEQ ID NO: 1704017
uagcggacagcacugaggc

SEQ ID NO: 1704019 - RNA, 19 nt, Artificial Sequence
  Description of Artificial Sequence: Synthetic oligonucleotide
  Sense strand starting at position 1915 of SEQ ID NO: 1561863
cucagugcuguccgcuaaa

SEQ ID NO: 1704020 - RNA, 19 nt, Artificial Sequence
  Description of Artificial Sequence: Synthetic oligonucleotide
  Antisense strand to SEQ ID NO: 1704019
uuuagcggacagcacugag

SEQ ID NO: 1704021 - RNA, 19 nt, Artificial Sequence
  Description of Artificial Sequence: Synthetic oligonucleotide
  Sense strand starting at position 1918 of SEQ ID NO: 1561863
agugcuguccgcuaaagca

SEQ ID NO: 1704022 - RNA, 19 nt, Artificial Sequence
  Description of Artificial Sequence: Synthetic oligonucleotide
  Antisense strand to SEQ ID NO: 1704021
ugcuuuagcggacagcacu

SEQ ID NO: 1704023 - RNA, 19 nt, Artificial Sequence
  Description of Artificial Sequence: Synthetic oligonucleotide
  Sense strand starting at position 2141 of SEQ ID NO: 1561863
gaaaucagcccgggacgua

SEQ ID NO: 1704024 - RNA, 19 nt, Artificial Sequence
  Description of Artificial Sequence: Synthetic oligonucleotide
  Antisense strand to SEQ ID NO: 1704023
uacgucccgggcugauuuc

SEQ ID NO: 1704025 - RNA, 19 nt, Artificial Sequence
  Description of Artificial Sequence: Synthetic oligonucleotide
  Sense strand starting at position 2272 of SEQ ID NO: 1561863
gaaccuugugguuaggaca

SEQ ID NO: 1704026 - RNA, 19 nt, Artificial Sequence
  Description of Artificial Sequence: Synthetic oligonucleotide
  Antisense strand to SEQ ID NO: 1704025
uguccuaaccacaagguuc

SEQ ID NO: 1704027 - RNA, 19 nt, Artificial Sequence
  Description of Artificial Sequence: Synthetic oligonucleotide
  Sense strand starting at position 2285 of SEQ ID NO: 1561863
aggacaaagaucuguguuu

SEQ ID NO: 1704028 - RNA, 19 nt, Artificial Sequence
  Description of Artificial Sequence: Synthetic oligonucleotide
  Antisense strand to SEQ ID NO: 1704027
aaacacagaucuuuguccu

SEQ ID NO: 1704029 - RNA, 19 nt, Artificial Sequence
  Description of Artificial Sequence: Synthetic oligonucleotide
  Sense strand starting at position 2286 of SEQ ID NO: 1561863
ggacaaagaucuguguuuc

SEQ ID NO: 1704030 - RNA, 19 nt, Artificial Sequence
  Description of Artificial Sequence: Synthetic oligonucleotide
  Antisense strand to SEQ ID NO: 1704029
gaaacacagaucuuugucc

SEQ ID NO: 1704031 - RNA, 19 nt, Artificial Sequence
  Description of Artificial Sequence: Synthetic oligonucleotide
  Sense strand starting at position 2287 of SEQ ID NO: 1561863
gacaaagaucuguguuucu

SEQ ID NO: 1704032 - RNA, 19 nt, Artificial Sequence
  Description of Artificial Sequence: Synthetic oligonucleotide
  Antisense strand to SEQ ID NO: 1704031
agaaacacagaucuuuguc

SEQ ID NO: 1704033 - RNA, 19 nt, Artificial Sequence
  Description of Artificial Sequence: Synthetic oligonucleotide
  Sense strand starting at position 2449 of SEQ ID NO: 1561863
cugagcugggccugauaaa

SEQ ID NO: 1704034 - RNA, 19 nt, Artificial Sequence
  Description of Artificial Sequence: Synthetic oligonucleotide
  Antisense strand to SEQ ID NO: 1704033
uuuaucaggcccagcucag

SEQ ID NO: 1704035 - RNA, 19 nt, Artificial Sequence
  Description of Artificial Sequence: Synthetic oligonucleotide
  Sense strand starting at position 2680 of SEQ ID NO: 1561863
aggucuugccggugccaaa

SEQ ID NO: 1704036 - RNA, 19 nt, Artificial Sequence
  Description of Artificial Sequence: Synthetic oligonucleotide
  Antisense strand to SEQ ID NO: 1704035
uuuggcaccggcaagaccu

SEQ ID NO: 1704037 - RNA, 19 nt, Artificial Sequence
  Description of Artificial Sequence: Synthetic oligonucleotide
  Sense strand starting at position 3048 of SEQ ID NO: 1561863
guauugucgggugcaggua

SEQ ID NO: 1704038 - RNA, 19 nt, Artificial Sequence
  Description of Artificial Sequence: Synthetic oligonucleotide
  Antisense strand to SEQ ID NO: 1704037
uaccugcacccgacaauac

SEQ ID NO: 1704039 - RNA, 19 nt, Artificial Sequence
  Description of Artificial Sequence: Synthetic oligonucleotide
  Sense strand starting at position 3418 of SEQ ID NO: 1561863
gccuccuccucauagagaa

SEQ ID NO: 1704040 - RNA, 19 nt, Artificial Sequence
  Description of Artificial Sequence: Synthetic oligonucleotide
  Antisense strand to SEQ ID NO: 1704039
uucucuaugaggaggaggc

SEQ ID NO: 1704041 - RNA, 19 nt, Artificial Sequence
  Description of Artificial Sequence: Synthetic oligonucleotide
  Sense strand starting at position 3440 of SEQ ID NO: 1561863
ggugcauccucugccgaua

SEQ ID NO: 1704042 - RNA, 19 nt, Artificial Sequence
  Description of Artificial Sequence: Synthetic oligonucleotide
  Antisense strand to SEQ ID NO: 1704041
uaucggcagaggaugcacc

SEQ ID NO: 1704043 - RNA, 19 nt, Artificial Sequence
  Description of Artificial Sequence: Synthetic oligonucleotide
  Sense strand starting at position 3443 of SEQ ID NO: 1561863
gcauccucugccgauaguu

SEQ ID NO: 1704044 - RNA, 19 nt, Artificial Sequence
  Description of Artificial Sequence: Synthetic oligonucleotide
  Antisense strand to SEQ ID NO: 1704043
aacuaucggcagaggaugc

SEQ ID NO: 1704045 - RNA, 19 nt, Artificial Sequence
  Description of Artificial Sequence: Synthetic oligonucleotide
  Sense strand starting at position 3452 of SEQ ID NO: 1561863
gccgauaguugguugguga

SEQ ID NO: 1704046 - RNA, 19 nt, Artificial Sequence
  Description of Artificial Sequence: Synthetic oligonucleotide
  Antisense strand to SEQ ID NO: 1704045
ucaccaaccaacuaucggc

SEQ ID NO: 1704047 - RNA, 19 nt, Artificial Sequence
  Description of Artificial Sequence: Synthetic oligonucleotide
  Sense strand starting at position 3454 of SEQ ID NO: 1561863
cgauaguugguuggugaga

SEQ ID NO: 1704048 - RNA, 19 nt, Artificial Sequence
  Description of Artificial Sequence: Synthetic oligonucleotide
  Antisense strand to SEQ ID NO: 1704047
ucucaccaaccaacuaucg

SEQ ID NO: 1704049 - RNA, 19 nt, Artificial Sequence
  Description of Artificial Sequence: Synthetic oligonucleotide
  Sense strand starting at position 3455 of SEQ ID NO: 1561863
gauaguugguuggugagau

SEQ ID NO: 1704050 - RNA, 19 nt, Artificial Sequence
  Description of Artificial Sequence: Synthetic oligonucleotide
  Antisense strand to SEQ ID NO: 1704049
aucucaccaaccaacuauc

SEQ ID NO: 1704051 - RNA, 19 nt, Artificial Sequence
  Description of Artificial Sequence: Synthetic oligonucleotide
  Sense strand starting at position 3456 of SEQ ID NO: 1561863
auaguugguuggugagaug

SEQ ID NO: 1704052 - RNA, 19 nt, Artificial Sequence
  Description of Artificial Sequence: Synthetic oligonucleotide
  Antisense strand to SEQ ID NO: 1704051
caucucaccaaccaacuau

SEQ ID NO: 1704053 - RNA, 19 nt, Artificial Sequence
  Description of Artificial Sequence: Synthetic oligonucleotide
  Sense strand starting at position 49 of SEQ ID NO: 1561864
gguggaaguucaggaaaua

SEQ ID NO: 1704054 - RNA, 19 nt, Artificial Sequence
  Description of Artificial Sequence: Synthetic oligonucleotide
  Antisense strand to SEQ ID NO: 1704053
uauuuccugaacuuccacc

SEQ ID NO: 1704055 - RNA, 19 nt, Artificial Sequence
  Description of Artificial Sequence: Synthetic oligonucleotide
  Sense strand starting at position 62 of SEQ ID NO: 1561864
gaaauacuguugccuggaa

SEQ ID NO: 1704056 - RNA, 19 nt, Artificial Sequence
  Description of Artificial Sequence: Synthetic oligonucleotide
  Antisense strand to SEQ ID NO: 1704055
uuccaggcaacaguauuuc

SEQ ID NO: 1704057 - RNA, 19 nt, Artificial Sequence
  Description of Artificial Sequence: Synthetic oligonucleotide
  Sense strand starting at position 93 of SEQ ID NO: 1561864
agagauuagugauccaugu

SEQ ID NO: 1704058 - RNA, 19 nt, Artificial Sequence
  Description of Artificial Sequence: Synthetic oligonucleotide
  Antisense strand to SEQ ID NO: 1704057
acauggaucacuaaucucu

SEQ ID NO: 1704059 - RNA, 19 nt, Artificial Sequence
  Description of Artificial Sequence: Synthetic oligonucleotide
  Sense strand starting at position 97 of SEQ ID NO: 1561864
auuagugauccauguacag

SEQ ID NO: 1704060 - RNA, 19 nt, Artificial Sequence
  Description of Artificial Sequence: Synthetic oligonucleotide
  Antisense strand to SEQ ID NO: 1704059
cuguacauggaucacuaau

SEQ ID NO: 1704061 - RNA, 19 nt, Artificial Sequence
  Description of Artificial Sequence: Synthetic oligonucleotide
  Sense strand starting at position 127 of SEQ ID NO: 1561864
gagaauuacucaguuugga

SEQ ID NO: 1704062 - RNA, 19 nt, Artificial Sequence
  Description of Artificial Sequence: Synthetic oligonucleotide
  Antisense strand to SEQ ID NO: 1704061
uccaaacugaguaauucuc

SEQ ID NO: 1704063 - RNA, 19 nt, Artificial Sequence
  Description of Artificial Sequence: Synthetic oligonucleotide
  Sense strand starting at position 199 of SEQ ID NO: 1561864
uguccuggguuaucucaga

SEQ ID NO: 1704064 - RNA, 19 nt, Artificial Sequence
  Description of Artificial Sequence: Synthetic oligonucleotide
  Antisense strand to SEQ ID NO: 1704063
ucugagauaacccaggaca

SEQ ID NO: 1704065 - RNA, 19 nt, Artificial Sequence
  Description of Artificial Sequence: Synthetic oligonucleotide
  Sense strand starting at position 228 of SEQ ID NO: 1561864
acacuaagugucuaccuga

SEQ ID NO: 1704066 - RNA, 19 nt, Artificial Sequence
  Description of Artificial Sequence: Synthetic oligonucleotide
  Antisense strand to SEQ ID NO: 1704065
ucagguagacacuuagugu

SEQ ID NO: 1704067 - RNA, 19 nt, Artificial Sequence
  Description of Artificial Sequence: Synthetic oligonucleotide
  Sense strand starting at position 262 of SEQ ID NO: 1561864
ggcuuaauaucaccugaac

SEQ ID NO: 1704068 - RNA, 19 nt, Artificial Sequence
  Description of Artificial Sequence: Synthetic oligonucleotide
  Antisense strand to SEQ ID NO: 1704067
guucaggugauauuaagcc

SEQ ID NO: 1704069 - RNA, 19 nt, Artificial Sequence
  Description of Artificial Sequence: Synthetic oligonucleotide
  Sense strand starting at position 313 of SEQ ID NO: 1561864
uggagucauguuugagucu

SEQ ID NO: 1704070 - RNA, 19 nt, Artificial Sequence
  Description of Artificial Sequence: Synthetic oligonucleotide
  Antisense strand to SEQ ID NO: 1704069
agacucaaacaugacucca

SEQ ID NO: 1704071 - RNA, 19 nt, Artificial Sequence
  Description of Artificial Sequence: Synthetic oligonucleotide
  Sense strand starting at position 361 of SEQ ID NO: 1561864
cuuugcaucugaucgcaua

SEQ ID NO: 1704072 - RNA, 19 nt, Artificial Sequence
  Description of Artificial Sequence: Synthetic oligonucleotide
  Antisense strand to SEQ ID NO: 1704071
uaugcgaucagaugcaaag

SEQ ID NO: 1704073 - RNA, 19 nt, Artificial Sequence
  Description of Artificial Sequence: Synthetic oligonucleotide
  Sense strand starting at position 389 of SEQ ID NO: 1561864
uagugaguucucugcuccu

SEQ ID NO: 1704074 - RNA, 19 nt, Artificial Sequence
  Description of Artificial Sequence: Synthetic oligonucleotide
  Antisense strand to SEQ ID NO: 1704073
aggagcagagaacucacua

SEQ ID NO: 1704075 - RNA, 19 nt, Artificial Sequence
  Description of Artificial Sequence: Synthetic oligonucleotide
  Sense strand starting at position 438 of SEQ ID NO: 1561864
gcucaaguuggguaguguu

SEQ ID NO: 1704076 - RNA, 19 nt, Artificial Sequence
  Description of Artificial Sequence: Synthetic oligonucleotide
  Antisense strand to SEQ ID NO: 1704075
aacacuacccaacuugagc

SEQ ID NO: 1704077 - RNA, 19 nt, Artificial Sequence
  Description of Artificial Sequence: Synthetic oligonucleotide
  Sense strand starting at position 509 of SEQ ID NO: 1561864
gcccucuuugggcaagacu

SEQ ID NO: 1704078 - RNA, 19 nt, Artificial Sequence
  Description of Artificial Sequence: Synthetic oligonucleotide
  Antisense strand to SEQ ID NO: 1704077
agucuugcccaaagagggc

SEQ ID NO: 1704079 - RNA, 19 nt, Artificial Sequence
  Description of Artificial Sequence: Synthetic oligonucleotide
  Sense strand starting at position 518 of SEQ ID NO: 1561864
gggcaagacuuccacuuag

SEQ ID NO: 1704080 - RNA, 19 nt, Artificial Sequence
  Description of Artificial Sequence: Synthetic oligonucleotide
  Antisense strand to SEQ ID NO: 1704079
cuaaguggaagucuugccc

SEQ ID NO: 1704081 - RNA, 19 nt, Artificial Sequence
  Description of Artificial Sequence: Synthetic oligonucleotide
  Sense strand starting at position 945 of SEQ ID NO: 1561864
aagguuggaugguaguuaa

SEQ ID NO: 1704082 - RNA, 19 nt, Artificial Sequence
  Description of Artificial Sequence: Synthetic oligonucleotide
  Antisense strand to SEQ ID NO: 1704081
uuaacuaccauccaaccuu

SEQ ID NO: 1704083 - RNA, 19 nt, Artificial Sequence
  Description of Artificial Sequence: Synthetic oligonucleotide
  Sense strand starting at position 948 of SEQ ID NO: 1561864
guuggaugguaguuaagag

SEQ ID NO: 1704084 - RNA, 19 nt, Artificial Sequence
  Description of Artificial Sequence: Synthetic oligonucleotide
  Antisense strand to SEQ ID NO: 1704083
cucuuaacuaccauccaac

SEQ ID NO: 1704085 - RNA, 19 nt, Artificial Sequence
  Description of Artificial Sequence: Synthetic oligonucleotide
  Sense strand starting at position 988 of SEQ ID NO: 1561864
guccaugccuaguuggaaa

SEQ ID NO: 1704086 - RNA, 19 nt, Artificial Sequence
  Description of Artificial Sequence: Synthetic oligonucleotide
  Antisense strand to SEQ ID NO: 1704085
uuuccaacuaggcauggac

SEQ ID NO: 1704087 - RNA, 19 nt, Artificial Sequence
  Description of Artificial Sequence: Synthetic oligonucleotide
  Sense strand starting at position 1047 of SEQ ID NO: 1561864
cugggaugguuccagaaag

SEQ ID NO: 1704088 - RNA, 19 nt, Artificial Sequence
  Description of Artificial Sequence: Synthetic oligonucleotide
  Antisense strand to SEQ ID NO: 1704087
cuuucuggaaccaucccag

SEQ ID NO: 1704089 - RNA, 19 nt, Artificial Sequence
  Description of Artificial Sequence: Synthetic oligonucleotide
  Sense strand starting at position 1082 of SEQ ID NO: 1561864
gcucuaagagaucauuguu

SEQ ID NO: 1704090 - RNA, 19 nt, Artificial Sequence
  Description of Artificial Sequence: Synthetic oligonucleotide
  Antisense strand to SEQ ID NO: 1704089
aacaaugaucucuuagagc

SEQ ID NO: 1704091 - RNA, 19 nt, Artificial Sequence
  Description of Artificial Sequence: Synthetic oligonucleotide
  Sense strand starting at position 1131 of SEQ ID NO: 1561864
ggaucuaggugagcacaua

SEQ ID NO: 1704092 - RNA, 19 nt, Artificial Sequence
  Description of Artificial Sequence: Synthetic oligonucleotide
  Antisense strand to SEQ ID NO: 1704091
uaugugcucaccuagaucc

SEQ ID NO: 1704093 - RNA, 19 nt, Artificial Sequence
  Description of Artificial Sequence: Synthetic oligonucleotide
  Sense strand starting at position 1144 of SEQ ID NO: 1561864
cacauaaggugccauagau

SEQ ID NO: 1704094 - RNA, 19 nt, Artificial Sequence
  Description of Artificial Sequence: Synthetic oligonucleotide
  Antisense strand to SEQ ID NO: 1704093
aucuauggcaccuuaugug

SEQ ID NO: 1704095 - RNA, 19 nt, Artificial Sequence
  Description of Artificial Sequence: Synthetic oligonucleotide
  Sense strand starting at position 1156 of SEQ ID NO: 1561864
cauagauuccagugagaca

SEQ ID NO: 1704096 - RNA, 19 nt, Artificial Sequence
  Description of Artificial Sequence: Synthetic oligonucleotide
  Antisense strand to SEQ ID NO: 1704095
ugucucacuggaaucuaug

SEQ ID NO: 1704097 - RNA, 19 nt, Artificial Sequence
  Description of Artificial Sequence: Synthetic oligonucleotide
  Sense strand starting at position 1233 of SEQ ID NO: 1561864
caggguuccuaacagggaa

SEQ ID NO: 1704098 - RNA, 19 nt, Artificial Sequence
  Description of Artificial Sequence: Synthetic oligonucleotide
  Antisense strand to SEQ ID NO: 1704097
uucccuguuaggaacccug

SEQ ID NO: 1704099 - RNA, 19 nt, Artificial Sequence
  Description of Artificial Sequence: Synthetic oligonucleotide
  Sense strand starting at position 1287 of SEQ ID NO: 1561864
accaguauccaucagguau

SEQ ID NO: 1704100 - RNA, 19 nt, Artificial Sequence
  Description of Artificial Sequence: Synthetic oligonucleotide
  Antisense strand to SEQ ID NO: 1704099
auaccugauggauacuggu

SEQ ID NO: 1704101 - RNA, 19 nt, Artificial Sequence
  Description of Artificial Sequence: Synthetic oligonucleotide
  Sense strand starting at position 1332 of SEQ ID NO: 1561864
ccaacaggcucagaacaau

SEQ ID NO: 1704102 - RNA, 19 nt, Artificial Sequence
  Description of Artificial Sequence: Synthetic oligonucleotide
  Antisense strand to SEQ ID NO: 1704101
auuguucugagccuguugg

SEQ ID NO: 1704103 - RNA, 19 nt, Artificial Sequence
  Description of Artificial Sequence: Synthetic oligonucleotide
  Sense strand starting at position 2304 of SEQ ID NO: 1561864
uugaaugucccucaauaug

SEQ ID NO: 1704104 - RNA, 19 nt, Artificial Sequence
  Description of Artificial Sequence: Synthetic oligonucleotide
  Antisense strand to SEQ ID NO: 1704103
cauauugagggacauucaa

SEQ ID NO: 1704105 - RNA, 19 nt, Artificial Sequence
  Description of Artificial Sequence: Synthetic oligonucleotide
  Sense strand starting at position 2379 of SEQ ID NO: 1561864
cuccuugccuucgugaagu

SEQ ID NO: 1704106 - RNA, 19 nt, Artificial Sequence
  Description of Artificial Sequence: Synthetic oligonucleotide
  Antisense strand to SEQ ID NO: 1704105
acuucacgaaggcaaggag

SEQ ID NO: 1704107 - RNA, 19 nt, Artificial Sequence
  Description of Artificial Sequence: Synthetic oligonucleotide
  Sense strand starting at position 2381 of SEQ ID NO: 1561864
ccuugccuucgugaaguuu

SEQ ID NO: 1704108 - RNA, 19 nt, Artificial Sequence
  Description of Artificial Sequence: Synthetic oligonucleotide
  Antisense strand to SEQ ID NO: 1704107
aaacuucacgaaggcaagg

SEQ ID NO: 1704109 - RNA, 19 nt, Artificial Sequence
  Description of Artificial Sequence: Synthetic oligonucleotide
  Sense strand starting at position 2385 of SEQ ID NO: 1561864
gccuucgugaaguuugcau

SEQ ID NO: 1704110 - RNA, 19 nt, Artificial Sequence
  Description of Artificial Sequence: Synthetic oligonucleotide
  Antisense strand to SEQ ID NO: 1704109
augcaaacuucacgaaggc

SEQ ID NO: 1704111 - RNA, 19 nt, Artificial Sequence
  Description of Artificial Sequence: Synthetic oligonucleotide
  Sense strand starting at position 2387 of SEQ ID NO: 1561864
cuucgugaaguuugcauuu

SEQ ID NO: 1704112 - RNA, 19 nt, Artificial Sequence
  Description of Artificial Sequence: Synthetic oligonucleotide
  Antisense strand to SEQ ID NO: 1704111
aaaugcaaacuucacgaag

SEQ ID NO: 1704113 - RNA, 19 nt, Artificial Sequence
  Description of Artificial Sequence: Synthetic oligonucleotide
  Sense strand starting at position 3112 of SEQ ID NO: 1561864
uguauaguuauguguuaca

SEQ ID NO: 1704114 - RNA, 19 nt, Artificial Sequence
  Description of Artificial Sequence: Synthetic oligonucleotide
  Antisense strand to SEQ ID NO: 1704113
uguaacacauaacuauaca

SEQ ID NO: 1704115 - RNA, 19 nt, Artificial Sequence
  Description of Artificial Sequence: Synthetic oligonucleotide
  Sense strand starting at position 3124 of SEQ ID NO: 1561864
uguuacauagcauguuaau

SEQ ID NO: 1704116 - RNA, 19 nt, Artificial Sequence
  Description of Artificial Sequence: Synthetic oligonucleotide
  Antisense strand to SEQ ID NO: 1704115
auuaacaugcuauguaaca

SEQ ID NO: 1704117 - RNA, 19 nt, Artificial Sequence
  Description of Artificial Sequence: Synthetic oligonucleotide
  Sense strand starting at position 3183 of SEQ ID NO: 1561864
guguguggaguuugcaaau

SEQ ID NO: 1704118 - RNA, 19 nt, Artificial Sequence
  Description of Artificial Sequence: Synthetic oligonucleotide
  Antisense strand to SEQ ID NO: 1704117
auuugcaaacuccacacac

SEQ ID NO: 1704119 - RNA, 19 nt, Artificial Sequence
  Description of Artificial Sequence: Synthetic oligonucleotide
  Sense strand starting at position 3189 of SEQ ID NO: 1561864
ggaguuugcaaauguauug

SEQ ID NO: 1704120 - RNA, 19 nt, Artificial Sequence
  Description of Artificial Sequence: Synthetic oligonucleotide
  Antisense strand to SEQ ID NO: 1704119
caauacauuugcaaacucc

SEQ ID NO: 1704121 - RNA, 19 nt, Artificial Sequence
  Description of Artificial Sequence: Synthetic oligonucleotide
  Sense strand starting at position 3230 of SEQ ID NO: 1561864
auuauaauaccuuacgagu

SEQ ID NO: 1704122 - RNA, 19 nt, Artificial Sequence
  Description of Artificial Sequence: Synthetic oligonucleotide
  Antisense strand to SEQ ID NO: 1704121
acucguaagguauuauaau

SEQ ID NO: 1704123 - RNA, 19 nt, Artificial Sequence
  Description of Artificial Sequence: Synthetic oligonucleotide
  Sense strand starting at position 3304 of SEQ ID NO: 1561864
cuguuuauuuaugugauuc

SEQ ID NO: 1704124 - RNA, 19 nt, Artificial Sequence
  Description of Artificial Sequence: Synthetic oligonucleotide
  Antisense strand to SEQ ID NO: 1704123
gaaucacauaaauaaacag

SEQ ID NO: 1704125 - RNA, 19 nt, Artificial Sequence
  Description of Artificial Sequence: Synthetic oligonucleotide
  Sense strand starting at position 3480 of SEQ ID NO: 1561864
agccuacuguggcuauauu

SEQ ID NO: 1704126 - RNA, 19 nt, Artificial Sequence
  Description of Artificial Sequence: Synthetic oligonucleotide
  Antisense strand to SEQ ID NO: 1704125
aauauagccacaguaggcu

SEQ ID NO: 1704127 - RNA, 19 nt, Artificial Sequence
  Description of Artificial Sequence: Synthetic oligonucleotide
  Sense strand starting at position 3481 of SEQ ID NO: 1561864
gccuacuguggcuauauua

SEQ ID NO: 1704128 - RNA, 19 nt, Artificial Sequence
  Description of Artificial Sequence: Synthetic oligonucleotide
  Antisense strand to SEQ ID NO: 1704127
uaauauagccacaguaggc

SEQ ID NO: 1704129 - RNA, 19 nt, Artificial Sequence
  Description of Artificial Sequence: Synthetic oligonucleotide
  Sense strand starting at position 3514 of SEQ ID NO: 1561864
uaagcaucacugugugacu

SEQ ID NO: 1704130 - RNA, 19 nt, Artificial Sequence
  Description of Artificial Sequence: Synthetic oligonucleotide
  Antisense strand to SEQ ID NO: 1704129
agucacacagugaugcuua

SEQ ID NO: 1704131 - RNA, 19 nt, Artificial Sequence
  Description of Artificial Sequence: Synthetic oligonucleotide
  Sense strand starting at position 3523 of SEQ ID NO: 1561864
cugugugacugugcaaaca

SEQ ID NO: 1704132 - RNA, 19 nt, Artificial Sequence
  Description of Artificial Sequence: Synthetic oligonucleotide
  Antisense strand to SEQ ID NO: 1704131
uguuugcacagucacacag

SEQ ID NO: 1704133 - RNA, 19 nt, Artificial Sequence
  Description of Artificial Sequence: Synthetic oligonucleotide
  Sense strand starting at position 187 of SEQ ID NO: 1561865
uugcuaucucugguguguu

SEQ ID NO: 1704134 - RNA, 19 nt, Artificial Sequence
  Description of Artificial Sequence: Synthetic oligonucleotide
  Antisense strand to SEQ ID NO: 1704133
aacacaccagagauagcaa

SEQ ID NO: 1704135 - RNA, 19 nt, Artificial Sequence
  Description of Artificial Sequence: Synthetic oligonucleotide
  Sense strand starting at position 720 of SEQ ID NO: 1561865
ggacauguugcugauauga

SEQ ID NO: 1704136 - RNA, 19 nt, Artificial Sequence
  Description of Artificial Sequence: Synthetic oligonucleotide
  Antisense strand to SEQ ID NO: 1704135
ucauaucagcaacaugucc

SEQ ID NO: 1704137 - RNA, 19 nt, Artificial Sequence
  Description of Artificial Sequence: Synthetic oligonucleotide
  Sense strand starting at position 736 of SEQ ID NO: 1561865
ugaaucucacuuggugagu

SEQ ID NO: 1704138 - RNA, 19 nt, Artificial Sequence
  Description of Artificial Sequence: Synthetic oligonucleotide
  Antisense strand to SEQ ID NO: 1704137
acucaccaagugagauuca

SEQ ID NO: 1704139 - RNA, 19 nt, Artificial Sequence
  Description of Artificial Sequence: Synthetic oligonucleotide
  Sense strand starting at position 1317 of SEQ ID NO: 1561865
gagaaaugcgguuaugucu

SEQ ID NO: 1704140 - RNA, 19 nt, Artificial Sequence
  Description of Artificial Sequence: Synthetic oligonucleotide
  Antisense strand to SEQ ID NO: 1704139
agacauaaccgcauuucuc

SEQ ID NO: 1704141 - RNA, 19 nt, Artificial Sequence
  Description of Artificial Sequence: Synthetic oligonucleotide
  Sense strand starting at position 1523 of SEQ ID NO: 1561865
gaggaauagccgggaucga

SEQ ID NO: 1704142 - RNA, 19 nt, Artificial Sequence
  Description of Artificial Sequence: Synthetic oligonucleotide
  Antisense strand to SEQ ID NO: 1704141
ucgaucccggcuauuccuc

SEQ ID NO: 1704143 - RNA, 19 nt, Artificial Sequence
  Description of Artificial Sequence: Synthetic oligonucleotide
  Sense strand starting at position 1684 of SEQ ID NO: 1561865
cccaaaguugagugccaaa

SEQ ID NO: 1704144 - RNA, 19 nt, Artificial Sequence
  Description of Artificial Sequence: Synthetic oligonucleotide
  Antisense strand to SEQ ID NO: 1704143
uuuggcacucaacuuuggg

SEQ ID NO: 1704145 - RNA, 19 nt, Artificial Sequence
  Description of Artificial Sequence: Synthetic oligonucleotide
  Sense strand starting at position 1998 of SEQ ID NO: 1561865
aaccguccucugggaagau

SEQ ID NO: 1704146 - RNA, 19 nt, Artificial Sequence
  Description of Artificial Sequence: Synthetic oligonucleotide
  Antisense strand to SEQ ID NO: 1704145
aucuucccagaggacgguu

SEQ ID NO: 1704147 - RNA, 19 nt, Artificial Sequence
  Description of Artificial Sequence: Synthetic oligonucleotide
  Sense strand starting at position 2010 of SEQ ID NO: 1561865
ggaagaucugcugggaguc

SEQ ID NO: 1704148 - RNA, 19 nt, Artificial Sequence
  Description of Artificial Sequence: Synthetic oligonucleotide
  Antisense strand to SEQ ID NO: 1704147
gacucccagcagaucuucc

SEQ ID NO: 1704149 - RNA, 19 nt, Artificial Sequence
  Description of Artificial Sequence: Synthetic oligonucleotide
  Sense strand starting at position 2127 of SEQ ID NO: 1561865
cagggauuuggcuguuugu

SEQ ID NO: 1704150 - RNA, 19 nt, Artificial Sequence
  Description of Artificial Sequence: Synthetic oligonucleotide
  Antisense strand to SEQ ID NO: 1704149
acaaacagccaaaucccug

SEQ ID NO: 1704151 - RNA, 19 nt, Artificial Sequence
  Description of Artificial Sequence: Synthetic oligonucleotide
  Sense strand starting at position 2827 of SEQ ID NO: 1561865
uucaaagggugguuugaga

SEQ ID NO: 1704152 - RNA, 19 nt, Artificial Sequence
  Description of Artificial Sequence: Synthetic oligonucleotide
  Antisense strand to SEQ ID NO: 1704151
ucucaaaccacccuuugaa

SEQ ID NO: 1704153 - RNA, 19 nt, Artificial Sequence
  Description of Artificial Sequence: Synthetic oligonucleotide
  Sense strand starting at position 2835 of SEQ ID NO: 1561865
gugguuugagaaggaaaug

SEQ ID NO: 1704154 - RNA, 19 nt, Artificial Sequence
  Description of Artificial Sequence: Synthetic oligonucleotide
  Antisense strand to SEQ ID NO: 1704153
cauuuccuucucaaaccac

SEQ ID NO: 1704155 - RNA, 19 nt, Artificial Sequence
  Description of Artificial Sequence: Synthetic oligonucleotide
  Sense strand starting at position 3093 of SEQ ID NO: 1561865
ugaacaagggauugugcau

SEQ ID NO: 1704156 - RNA, 19 nt, Artificial Sequence
  Description of Artificial Sequence: Synthetic oligonucleotide
  Antisense strand to SEQ ID NO: 1704155
augcacaaucccuuguuca

SEQ ID NO: 1704157 - RNA, 19 nt, Artificial Sequence
  Description of Artificial Sequence: Synthetic oligonucleotide
  Sense strand starting at position 3209 of SEQ ID NO: 1561865
gccuucugugcagacauuu

SEQ ID NO: 1704158 - RNA, 19 nt, Artificial Sequence
  Description of Artificial Sequence: Synthetic oligonucleotide
  Antisense strand to SEQ ID NO: 1704157
aaaugucugcacagaaggc

SEQ ID NO: 1704159 - RNA, 19 nt, Artificial Sequence
  Description of Artificial Sequence: Synthetic oligonucleotide
  Sense strand starting at position 3253 of SEQ ID NO: 1561865
aaguaaagucuugauguag

SEQ ID NO: 1704160 - RNA, 19 nt, Artificial Sequence
  Description of Artificial Sequence: Synthetic oligonucleotide
  Antisense strand to SEQ ID NO: 1704159
cuacaucaagacuuuacuu

SEQ ID NO: 1704161 - RNA, 19 nt, Artificial Sequence
  Description of Artificial Sequence: Synthetic oligonucleotide
  Sense strand starting at position 3411 of SEQ ID NO: 1561865
ccaauuaaugagugagugu

SEQ ID NO: 1704162 - RNA, 19 nt, Artificial Sequence
  Description of Artificial Sequence: Synthetic oligonucleotide
  Antisense strand to SEQ ID NO: 1704161
acacucacucauuaauugg

SEQ ID NO: 1704163 - RNA, 19 nt, Artificial Sequence
  Description of Artificial Sequence: Synthetic oligonucleotide
  Sense strand starting at position 3435 of SEQ ID NO: 1561865
ggaauugaugaguggguga

SEQ ID NO: 1704164 - RNA, 19 nt, Artificial Sequence
  Description of Artificial Sequence: Synthetic oligonucleotide
  Antisense strand to SEQ ID NO: 1704163
ucacccacucaucaauucc

SEQ ID NO: 1704165 - RNA, 19 nt, Artificial Sequence
  Description of Artificial Sequence: Synthetic oligonucleotide
  Sense strand starting at position 3437 of SEQ ID NO: 1561865
aauugaugagugggugaau

SEQ ID NO: 1704166 - RNA, 19 nt, Artificial Sequence
  Description of Artificial Sequence: Synthetic oligonucleotide
  Antisense strand to SEQ ID NO: 1704165
auucacccacucaucaauu

SEQ ID NO: 1704167 - RNA, 19 nt, Artificial Sequence
  Description of Artificial Sequence: Synthetic oligonucleotide
  Sense strand starting at position 3438 of SEQ ID NO: 1561865
auugaugagugggugaauu

SEQ ID NO: 1704168 - RNA, 19 nt, Artificial Sequence
  Description of Artificial Sequence: Synthetic oligonucleotide
  Antisense strand to SEQ ID NO: 1704167
aauucacccacucaucaau

SEQ ID NO: 1704169 - RNA, 19 nt, Artificial Sequence
  Description of Artificial Sequence: Synthetic oligonucleotide
  Sense strand starting at position 3450 of SEQ ID NO: 1561865
gugaauuaggagugaguga

SEQ ID NO: 1704170 - RNA, 19 nt, Artificial Sequence
  Description of Artificial Sequence: Synthetic oligonucleotide
  Antisense strand to SEQ ID NO: 1704169
ucacucacuccuaauucac

SEQ ID NO: 1704171 - RNA, 19 nt, Artificial Sequence
  Description of Artificial Sequence: Synthetic oligonucleotide
  Sense strand starting at position 3481 of SEQ ID NO: 1561865
gagaauuaaugagugaguu

SEQ ID NO: 1704172 - RNA, 19 nt, Artificial Sequence
  Description of Artificial Sequence: Synthetic oligonucleotide
  Antisense strand to SEQ ID NO: 1704171
aacucacucauuaauucuc

SEQ ID NO: 1704173 - RNA, 19 nt, Artificial Sequence
  Description of Artificial Sequence: Synthetic oligonucleotide
  Sense strand starting at position 3482 of SEQ ID NO: 1561865
agaauuaaugagugaguug

SEQ ID NO: 1704174 - RNA, 19 nt, Artificial Sequence
  Description of Artificial Sequence: Synthetic oligonucleotide
  Antisense strand to SEQ ID NO: 1704173
caacucacucauuaauucu

SEQ ID NO: 1704175 - RNA, 19 nt, Artificial Sequence
  Description of Artificial Sequence: Synthetic oligonucleotide
  Sense strand starting at position 3485 of SEQ ID NO: 1561865
auuaaugagugaguugagu

SEQ ID NO: 1704176 - RNA, 19 nt, Artificial Sequence
  Description of Artificial Sequence: Synthetic oligonucleotide
  Antisense strand to SEQ ID NO: 1704175
acucaacucacucauuaau

SEQ ID NO: 1704177 - RNA, 19 nt, Artificial Sequence
  Description of Artificial Sequence: Synthetic oligonucleotide
  Sense strand starting at position 3487 of SEQ ID NO: 1561865
uaaugagugaguugaguga

SEQ ID NO: 1704178 - RNA, 19 nt, Artificial Sequence
  Description of Artificial Sequence: Synthetic oligonucleotide
  Antisense strand to SEQ ID NO: 1704177
ucacucaacucacucauua

SEQ ID NO: 1704179 - RNA, 19 nt, Artificial Sequence
  Description of Artificial Sequence: Synthetic oligonucleotide
  Sense strand starting at position 3536 of SEQ ID NO: 1561865
gaggguaaauuacugagua

SEQ ID NO: 1704180 - RNA, 19 nt, Artificial Sequence
  Description of Artificial Sequence: Synthetic oligonucleotide
  Antisense strand to SEQ ID NO: 1704179
uacucaguaauuuacccuc

SEQ ID NO: 1704181 - RNA, 19 nt, Artificial Sequence
  Description of Artificial Sequence: Synthetic oligonucleotide
  Sense strand starting at position 3540 of SEQ ID NO: 1561865
guaaauuacugaguaagug

SEQ ID NO: 1704182 - RNA, 19 nt, Artificial Sequence
  Description of Artificial Sequence: Synthetic oligonucleotide
  Antisense strand to SEQ ID NO: 1704181
cacuuacucaguaauuuac

SEQ ID NO: 1704183 - RNA, 19 nt, Artificial Sequence
  Description of Artificial Sequence: Synthetic oligonucleotide
  Sense strand starting at position 3559 of SEQ ID NO: 1561865
agcaaaugggugggugaau

SEQ ID NO: 1704184 - RNA, 19 nt, Artificial Sequence
  Description of Artificial Sequence: Synthetic oligonucleotide
  Antisense strand to SEQ ID NO: 1704183
auucacccacccauuugcu

SEQ ID NO: 1704185 - RNA, 19 nt, Artificial Sequence
  Description of Artificial Sequence: Synthetic oligonucleotide
  Sense strand starting at position 3560 of SEQ ID NO: 1561865
gcaaaugggugggugaauu

SEQ ID NO: 1704186 - RNA, 19 nt, Artificial Sequence
  Description of Artificial Sequence: Synthetic oligonucleotide
  Antisense strand to SEQ ID NO: 1704185
aauucacccacccauuugc

SEQ ID NO: 1704187 - RNA, 19 nt, Artificial Sequence
  Description of Artificial Sequence: Synthetic oligonucleotide
  Sense strand starting at position 3584 of SEQ ID NO: 1561865
gugaaugggugggugaauu

SEQ ID NO: 1704188 - RNA, 19 nt, Artificial Sequence
  Description of Artificial Sequence: Synthetic oligonucleotide
  Antisense strand to SEQ ID NO: 1704187
aauucacccacccauucac

SEQ ID NO: 1704189 - RNA, 19 nt, Artificial Sequence
  Description of Artificial Sequence: Synthetic oligonucleotide
  Sense strand starting at position 3622 of SEQ ID NO: 1561865
gaauguguggguggauuaa

SEQ ID NO: 1704190 - RNA, 19 nt, Artificial Sequence
  Description of Artificial Sequence: Synthetic oligonucleotide
  Antisense strand to SEQ ID NO: 1704189
uuaauccacccacacauuc

SEQ ID NO: 1704191 - RNA, 19 nt, Artificial Sequence
  Description of Artificial Sequence: Synthetic oligonucleotide
  Sense strand starting at position 3632 of SEQ ID NO: 1561865
guggauuaaugagugagca

SEQ ID NO: 1704192 - RNA, 19 nt, Artificial Sequence
  Description of Artificial Sequence: Synthetic oligonucleotide
  Antisense strand to SEQ ID NO: 1704191
ugcucacucauuaauccac

SEQ ID NO: 1704193 - RNA, 19 nt, Artificial Sequence
  Description of Artificial Sequence: Synthetic oligonucleotide
  Sense strand starting at position 3633 of SEQ ID NO: 1561865
uggauuaaugagugagcaa

SEQ ID NO: 1704194 - RNA, 19 nt, Artificial Sequence
  Description of Artificial Sequence: Synthetic oligonucleotide
  Antisense strand to SEQ ID NO: 1704193
uugcucacucauuaaucca

SEQ ID NO: 1704195 - RNA, 19 nt, Artificial Sequence
  Description of Artificial Sequence: Synthetic oligonucleotide
  Sense strand starting at position 3636 of SEQ ID NO: 1561865
auuaaugagugagcaaauc

SEQ ID NO: 1704196 - RNA, 19 nt, Artificial Sequence
  Description of Artificial Sequence: Synthetic oligonucleotide
  Antisense strand to SEQ ID NO: 1704195
gauuugcucacucauuaau

SEQ ID NO: 1704197 - RNA, 19 nt, Artificial Sequence
  Description of Artificial Sequence: Synthetic oligonucleotide
  Sense strand starting at position 3662 of SEQ ID NO: 1561865
agggcauguguguucgagu

SEQ ID NO: 1704198 - RNA, 19 nt, Artificial Sequence
  Description of Artificial Sequence: Synthetic oligonucleotide
  Antisense strand to SEQ ID NO: 1704197
acucgaacacacaugcccu

SEQ ID NO: 1704199 - RNA, 19 nt, Artificial Sequence
  Description of Artificial Sequence: Synthetic oligonucleotide
  Sense strand starting at position 3667 of SEQ ID NO: 1561865
auguguguucgagugguau

SEQ ID NO: 1704200 - RNA, 19 nt, Artificial Sequence
  Description of Artificial Sequence: Synthetic oligonucleotide
  Antisense strand to SEQ ID NO: 1704199
auaccacucgaacacacau

SEQ ID NO: 1704201 - RNA, 19 nt, Artificial Sequence
  Description of Artificial Sequence: Synthetic oligonucleotide
  Sense strand starting at position 3743 of SEQ ID NO: 1561865
cuuuauucuguccacuuga

SEQ ID NO: 1704202 - RNA, 19 nt, Artificial Sequence
  Description of Artificial Sequence: Synthetic oligonucleotide
  Antisense strand to SEQ ID NO: 1704201
ucaaguggacagaauaaag

SEQ ID NO: 1704203 - RNA, 19 nt, Artificial Sequence
  Description of Artificial Sequence: Synthetic oligonucleotide
  Sense strand starting at position 3759 of SEQ ID NO: 1561865
ugaucugaccucugaagcu

SEQ ID NO: 1704204 - RNA, 19 nt, Artificial Sequence
  Description of Artificial Sequence: Synthetic oligonucleotide
  Antisense strand to SEQ ID NO: 1704203
agcuucagaggucagauca

SEQ ID NO: 1704205 - RNA, 19 nt, Artificial Sequence
  Description of Artificial Sequence: Synthetic oligonucleotide
  Sense strand starting at position 3793 of SEQ ID NO: 1561865
ugcuauugccuguagggaa

SEQ ID NO: 1704206 - RNA, 19 nt, Artificial Sequence
  Description of Artificial Sequence: Synthetic oligonucleotide
  Antisense strand to SEQ ID NO: 1704205
uucccuacaggcaauagca

SEQ ID NO: 1704207 - RNA, 19 nt, Artificial Sequence
  Description of Artificial Sequence: Synthetic oligonucleotide
  Sense strand starting at position 3851 of SEQ ID NO: 1561865
uagauuugaugucaggaga

SEQ ID NO: 1704208 - RNA, 19 nt, Artificial Sequence
  Description of Artificial Sequence: Synthetic oligonucleotide
  Antisense strand to SEQ ID NO: 1704207
ucuccugacaucaaaucua

SEQ ID NO: 1704209 - RNA, 19 nt, Artificial Sequence
  Description of Artificial Sequence: Synthetic oligonucleotide
  Sense strand starting at position 3880 of SEQ ID NO: 1561865
ggaacuagcucagucacua

SEQ ID NO: 1704210 - RNA, 19 nt, Artificial Sequence
  Description of Artificial Sequence: Synthetic oligonucleotide
  Antisense strand to SEQ ID NO: 1704209
uagugacugagcuaguucc

SEQ ID NO: 1704211 - RNA, 19 nt, Artificial Sequence
  Description of Artificial Sequence: Synthetic oligonucleotide
  Sense strand starting at position 3983 of SEQ ID NO: 1561865
ucuguuagccaggacaaga

SEQ ID NO: 1704212 - RNA, 19 nt, Artificial Sequence
  Description of Artificial Sequence: Synthetic oligonucleotide
  Antisense strand to SEQ ID NO: 1704211
ucuuguccuggcuaacaga

SEQ ID NO: 1704213 - RNA, 19 nt, Artificial Sequence
  Description of Artificial Sequence: Synthetic oligonucleotide
  Sense strand starting at position 49 of SEQ ID NO: 1561866
gagagauaauaguagaaca

SEQ ID NO: 1704214 - RNA, 19 nt, Artificial Sequence
  Description of Artificial Sequence: Synthetic oligonucleotide
  Antisense strand to SEQ ID NO: 1704213
uguucuacuauuaucucuc

SEQ ID NO: 1704215 - RNA, 19 nt, Artificial Sequence
  Description of Artificial Sequence: Synthetic oligonucleotide
  Sense strand starting at position 98 of SEQ ID NO: 1561866
caccuaccugucgauagaa

SEQ ID NO: 1704216 - RNA, 19 nt, Artificial Sequence
  Description of Artificial Sequence: Synthetic oligonucleotide
  Antisense strand to SEQ ID NO: 1704215
uucuaucgacagguaggug

SEQ ID NO: 1704217 - RNA, 19 nt, Artificial Sequence
  Description of Artificial Sequence: Synthetic oligonucleotide
  Sense strand starting at position 126 of SEQ ID NO: 1561866
cuaauaauugcugaauguu

SEQ ID NO: 1704218 - RNA, 19 nt, Artificial Sequence
  Description of Artificial Sequence: Synthetic oligonucleotide
  Antisense strand to SEQ ID NO: 1704217
aacauucagcaauuauuag

SEQ ID NO: 1704219 - RNA, 19 nt, Artificial Sequence
  Description of Artificial Sequence: Synthetic oligonucleotide
  Sense strand starting at position 138 of SEQ ID NO: 1561866
gaauguuugcuauauaaug

SEQ ID NO: 1704220 - RNA, 19 nt, Artificial Sequence
  Description of Artificial Sequence: Synthetic oligonucleotide
  Antisense strand to SEQ ID NO: 1704219
cauuauauagcaaacauuc

SEQ ID NO: 1704221 - RNA, 19 nt, Artificial Sequence
  Description of Artificial Sequence: Synthetic oligonucleotide
  Sense strand starting at position 146 of SEQ ID NO: 1561866
gcuauauaaugaguaugac

SEQ ID NO: 1704222 - RNA, 19 nt, Artificial Sequence
  Description of Artificial Sequence: Synthetic oligonucleotide
  Antisense strand to SEQ ID NO: 1704221
gucauacucauuauauagc

SEQ ID NO: 1704223 - RNA, 19 nt, Artificial Sequence
  Description of Artificial Sequence: Synthetic oligonucleotide
  Sense strand starting at position 399 of SEQ ID NO: 1561866
aucuauacuccaggucuua

SEQ ID NO: 1704224 - RNA, 19 nt, Artificial Sequence
  Description of Artificial Sequence: Synthetic oligonucleotide
  Antisense strand to SEQ ID NO: 1704223
uaagaccuggaguauagau

SEQ ID NO: 1704225 - RNA, 19 nt, Artificial Sequence
  Description of Artificial Sequence: Synthetic oligonucleotide
  Sense strand starting at position 618 of SEQ ID NO: 1561866
ugccauuuccagugcauca

SEQ ID NO: 1704226 - RNA, 19 nt, Artificial Sequence
  Description of Artificial Sequence: Synthetic oligonucleotide
  Antisense strand to SEQ ID NO: 1704225
ugaugcacuggaaauggca

SEQ ID NO: 1704227 - RNA, 19 nt, Artificial Sequence
  Description of Artificial Sequence: Synthetic oligonucleotide
  Sense strand starting at position 623 of SEQ ID NO: 1561866
uuuccagugcaucacauau

SEQ ID NO: 1704228 - RNA, 19 nt, Artificial Sequence
  Description of Artificial Sequence: Synthetic oligonucleotide
  Antisense strand to SEQ ID NO: 1704227
auaugugaugcacuggaaa

SEQ ID NO: 1704229 - RNA, 19 nt, Artificial Sequence
  Description of Artificial Sequence: Synthetic oligonucleotide
  Sense strand starting at position 671 of SEQ ID NO: 1561866
gauucuuccugacuagagu

SEQ ID NO: 1704230 - RNA, 19 nt, Artificial Sequence
  Description of Artificial Sequence: Synthetic oligonucleotide
  Antisense strand to SEQ ID NO: 1704229
acucuagucaggaagaauc

SEQ ID NO: 1704231 - RNA, 19 nt, Artificial Sequence
  Description of Artificial Sequence: Synthetic oligonucleotide
  Sense strand starting at position 693 of SEQ ID NO: 1561866
gagaucaggcccugauucu

SEQ ID NO: 1704232 - RNA, 19 nt, Artificial Sequence
  Description of Artificial Sequence: Synthetic oligonucleotide
  Antisense strand to SEQ ID NO: 1704231
agaaucagggccugaucuc

SEQ ID NO: 1704233 - RNA, 19 nt, Artificial Sequence
  Description of Artificial Sequence: Synthetic oligonucleotide
  Sense strand starting at position 726 of SEQ ID NO: 1561866
cucuguccucagcaauuga

SEQ ID NO: 1704234 - RNA, 19 nt, Artificial Sequence
  Description of Artificial Sequence: Synthetic oligonucleotide
  Antisense strand to SEQ ID NO: 1704233
ucaauugcugaggacagag

SEQ ID NO: 1704235 - RNA, 19 nt, Artificial Sequence
  Description of Artificial Sequence: Synthetic oligonucleotide
  Sense strand starting at position 953 of SEQ ID NO: 1561866
gcgggugugugauuugaac

SEQ ID NO: 1704236 - RNA, 19 nt, Artificial Sequence
  Description of Artificial Sequence: Synthetic oligonucleotide
  Antisense strand to SEQ ID NO: 1704235
guucaaaucacacacccgc

SEQ ID NO: 1704237 - RNA, 19 nt, Artificial Sequence
  Description of Artificial Sequence: Synthetic oligonucleotide
  Sense strand starting at position 957 of SEQ ID NO: 1561866
gugugugauuugaacaggu

SEQ ID NO: 1704238 - RNA, 19 nt, Artificial Sequence
  Description of Artificial Sequence: Synthetic oligonucleotide
  Antisense strand to SEQ ID NO: 1704237
accuguucaaaucacacac

SEQ ID NO: 1704239 - RNA, 19 nt, Artificial Sequence
  Description of Artificial Sequence: Synthetic oligonucleotide
  Sense strand starting at position 1080 of SEQ ID NO: 1561866
ugugucauuccacgaauuu

SEQ ID NO: 1704240 - RNA, 19 nt, Artificial Sequence
  Description of Artificial Sequence: Synthetic oligonucleotide
  Antisense strand to SEQ ID NO: 1704239
aaauucguggaaugacaca

SEQ ID NO: 1704241 - RNA, 19 nt, Artificial Sequence
  Description of Artificial Sequence: Synthetic oligonucleotide
  Sense strand starting at position 1106 of SEQ ID NO: 1561866
guggaauguacacguauac

SEQ ID NO: 1704242 - RNA, 19 nt, Artificial Sequence
  Description of Artificial Sequence: Synthetic oligonucleotide
  Antisense strand to SEQ ID NO: 1704241
guauacguguacauuccac

SEQ ID NO: 1704243 - RNA, 19 nt, Artificial Sequence
  Description of Artificial Sequence: Synthetic oligonucleotide
  Sense strand starting at position 1115 of SEQ ID NO: 1561866
acacguauacgcgugugua

SEQ ID NO: 1704244 - RNA, 19 nt, Artificial Sequence
  Description of Artificial Sequence: Synthetic oligonucleotide
  Antisense strand to SEQ ID NO: 1704243
uacacacgcguauacgugu

SEQ ID NO: 1704245 - RNA, 19 nt, Artificial Sequence
  Description of Artificial Sequence: Synthetic oligonucleotide
  Sense strand starting at position 1142 of SEQ ID NO: 1561866
caucuauauccguuucgcu

SEQ ID NO: 1704246 - RNA, 19 nt, Artificial Sequence
  Description of Artificial Sequence: Synthetic oligonucleotide
  Antisense strand to SEQ ID NO: 1704245
agcgaaacggauauagaug

SEQ ID NO: 1704247 - RNA, 19 nt, Artificial Sequence
  Description of Artificial Sequence: Synthetic oligonucleotide
  Sense strand starting at position 1144 of SEQ ID NO: 1561866
ucuauauccguuucgcuau

SEQ ID NO: 1704248 - RNA, 19 nt, Artificial Sequence
  Description of Artificial Sequence: Synthetic oligonucleotide
  Antisense strand to SEQ ID NO: 1704247
auagcgaaacggauauaga

SEQ ID NO: 1704249 - RNA, 19 nt, Artificial Sequence
  Description of Artificial Sequence: Synthetic oligonucleotide
  Sense strand starting at position 1150 of SEQ ID NO: 1561866
uccguuucgcuaucagcaa

SEQ ID NO: 1704250 - RNA, 19 nt, Artificial Sequence
  Description of Artificial Sequence: Synthetic oligonucleotide
  Antisense strand to SEQ ID NO: 1704249
uugcugauagcgaaacgga

SEQ ID NO: 1704251 - RNA, 19 nt, Artificial Sequence
  Description of Artificial Sequence: Synthetic oligonucleotide
  Sense strand starting at position 1200 of SEQ ID NO: 1561866
uaauuuaacugagagguuc

SEQ ID NO: 1704252 - RNA, 19 nt, Artificial Sequence
  Description of Artificial Sequence: Synthetic oligonucleotide
  Antisense strand to SEQ ID NO: 1704251
gaaccucucaguuaaauua

SEQ ID NO: 1704253 - RNA, 19 nt, Artificial Sequence
  Description of Artificial Sequence: Synthetic oligonucleotide
  Sense strand starting at position 1208 of SEQ ID NO: 1561866
cugagagguucuucccugu

SEQ ID NO: 1704254 - RNA, 19 nt, Artificial Sequence
  Description of Artificial Sequence: Synthetic oligonucleotide
  Antisense strand to SEQ ID NO: 1704253
acagggaagaaccucucag

SEQ ID NO: 1704255 - RNA, 19 nt, Artificial Sequence
  Description of Artificial Sequence: Synthetic oligonucleotide
  Sense strand starting at position 1212 of SEQ ID NO: 1561866
gagguucuucccugucaca

SEQ ID NO: 1704256 - RNA, 19 nt, Artificial Sequence
  Description of Artificial Sequence: Synthetic oligonucleotide
  Antisense strand to SEQ ID NO: 1704255
ugugacagggaagaaccuc

SEQ ID NO: 1704257 - RNA, 19 nt, Artificial Sequence
  Description of Artificial Sequence: Synthetic oligonucleotide
  Sense strand starting at position 1241 of SEQ ID NO: 1561866
cguuguuuccuugaacaau

SEQ ID NO: 1704258 - RNA, 19 nt, Artificial Sequence
  Description of Artificial Sequence: Synthetic oligonucleotide
  Antisense strand to SEQ ID NO: 1704257
auuguucaaggaaacaacg

SEQ ID NO: 1704259 - RNA, 19 nt, Artificial Sequence
  Description of Artificial Sequence: Synthetic oligonucleotide
  Sense strand starting at position 1263 of SEQ ID NO: 1561866
auagcauuccacuguaaag

SEQ ID NO: 1704260 - RNA, 19 nt, Artificial Sequence
  Description of Artificial Sequence: Synthetic oligonucleotide
  Antisense strand to SEQ ID NO: 1704259
cuuuacaguggaaugcuau

SEQ ID NO: 1704261 - RNA, 19 nt, Artificial Sequence
  Description of Artificial Sequence: Synthetic oligonucleotide
  Sense strand starting at position 1265 of SEQ ID NO: 1561866
agcauuccacuguaaagac

SEQ ID NO: 1704262 - RNA, 19 nt, Artificial Sequence
  Description of Artificial Sequence: Synthetic oligonucleotide
  Antisense strand to SEQ ID NO: 1704261
gucuuuacaguggaaugcu

SEQ ID NO: 1704263 - RNA, 19 nt, Artificial Sequence
  Description of Artificial Sequence: Synthetic oligonucleotide
  Sense strand starting at position 1427 of SEQ ID NO: 1561866
cgcacaagauauucucauu

SEQ ID NO: 1704264 - RNA, 19 nt, Artificial Sequence
  Description of Artificial Sequence: Synthetic oligonucleotide
  Antisense strand to SEQ ID NO: 1704263
aaugagaauaucuugugcg

SEQ ID NO: 1704265 - RNA, 19 nt, Artificial Sequence
  Description of Artificial Sequence: Synthetic oligonucleotide
  Sense strand starting at position 1670 of SEQ ID NO: 1561866
ugagaugcauucccaggaa

SEQ ID NO: 1704266 - RNA, 19 nt, Artificial Sequence
  Description of Artificial Sequence: Synthetic oligonucleotide
  Antisense strand to SEQ ID NO: 1704265
uuccugggaaugcaucuca

SEQ ID NO: 1704267 - RNA, 19 nt, Artificial Sequence
  Description of Artificial Sequence: Synthetic oligonucleotide
  Sense strand starting at position 2397 of SEQ ID NO: 1561866
ccaaacuauggguguguca

SEQ ID NO: 1704268 - RNA, 19 nt, Artificial Sequence
  Description of Artificial Sequence: Synthetic oligonucleotide
  Antisense strand to SEQ ID NO: 1704267
ugacacacccauaguuugg

SEQ ID NO: 1704269 - RNA, 19 nt, Artificial Sequence
  Description of Artificial Sequence: Synthetic oligonucleotide
  Sense strand starting at position 2467 of SEQ ID NO: 1561866
gguggagaacuguguuuag

SEQ ID NO: 1704270 - RNA, 19 nt, Artificial Sequence
  Description of Artificial Sequence: Synthetic oligonucleotide
  Antisense strand to SEQ ID NO: 1704269
cuaaacacaguucuccacc

SEQ ID NO: 1704271 - RNA, 19 nt, Artificial Sequence
  Description of Artificial Sequence: Synthetic oligonucleotide
  Sense strand starting at position 2470 of SEQ ID NO: 1561866
ggagaacuguguuuaguga

SEQ ID NO: 1704272 - RNA, 19 nt, Artificial Sequence
  Description of Artificial Sequence: Synthetic oligonucleotide
  Antisense strand to SEQ ID NO: 1704271
ucacuaaacacaguucucc

SEQ ID NO: 1704273 - RNA, 19 nt, Artificial Sequence
  Description of Artificial Sequence: Synthetic oligonucleotide
  Sense strand starting at position 2512 of SEQ ID NO: 1561866
gcauacaggcguuaccaua

SEQ ID NO: 1704274 - RNA, 19 nt, Artificial Sequence
  Description of Artificial Sequence: Synthetic oligonucleotide
  Antisense strand to SEQ ID NO: 1704273
uaugguaacgccuguaugc

SEQ ID NO: 1704275 - RNA, 19 nt, Artificial Sequence
  Description of Artificial Sequence: Synthetic oligonucleotide
  Sense strand starting at position 2520 of SEQ ID NO: 1561866
gcguuaccauauuuaaauu

SEQ ID NO: 1704276 - RNA, 19 nt, Artificial Sequence
  Description of Artificial Sequence: Synthetic oligonucleotide
  Antisense strand to SEQ ID NO: 1704275
aauuuaaauaugguaacgc

SEQ ID NO: 1704277 - RNA, 19 nt, Artificial Sequence
  Description of Artificial Sequence: Synthetic oligonucleotide
  Sense strand starting at position 2536 of SEQ ID NO: 1561866
auuaaaccuugagaugaag

SEQ ID NO: 1704278 - RNA, 19 nt, Artificial Sequence
  Description of Artificial Sequence: Synthetic oligonucleotide
  Antisense strand to SEQ ID NO: 1704277
cuucaucucaagguuuaau

SEQ ID NO: 1704279 - RNA, 19 nt, Artificial Sequence
  Description of Artificial Sequence: Synthetic oligonucleotide
  Sense strand starting at position 2598 of SEQ ID NO: 1561866
cuaguacauagagguguua

SEQ ID NO: 1704280 - RNA, 19 nt, Artificial Sequence
  Description of Artificial Sequence: Synthetic oligonucleotide
  Antisense strand to SEQ ID NO: 1704279
uaacaccucuauguacuag

SEQ ID NO: 1704281 - RNA, 19 nt, Artificial Sequence
  Description of Artificial Sequence: Synthetic oligonucleotide
  Sense strand starting at position 2600 of SEQ ID NO: 1561866
aguacauagagguguuauc

SEQ ID NO: 1704282 - RNA, 19 nt, Artificial Sequence
  Description of Artificial Sequence: Synthetic oligonucleotide
  Antisense strand to SEQ ID NO: 1704281
gauaacaccucuauguacu

SEQ ID NO: 1704283 - RNA, 19 nt, Artificial Sequence
  Description of Artificial Sequence: Synthetic oligonucleotide
  Sense strand starting at position 2713 of SEQ ID NO: 1561866
ccgaaacuuguggacuaau

SEQ ID NO: 1704284 - RNA, 19 nt, Artificial Sequence
  Description of Artificial Sequence: Synthetic oligonucleotide
  Antisense strand to SEQ ID NO: 1704283
auuaguccacaaguuucgg

SEQ ID NO: 1704285 - RNA, 19 nt, Artificial Sequence
  Description of Artificial Sequence: Synthetic oligonucleotide
  Sense strand starting at position 2744 of SEQ ID NO: 1561866
ccuuaaucagaucgucauu

SEQ ID NO: 1704286 - RNA, 19 nt, Artificial Sequence
  Description of Artificial Sequence: Synthetic oligonucleotide
  Antisense strand to SEQ ID NO: 1704285
aaugacgaucugauuaagg

SEQ ID NO: 1704287 - RNA, 19 nt, Artificial Sequence
  Description of Artificial Sequence: Synthetic oligonucleotide
  Sense strand starting at position 2776 of SEQ ID NO: 1561866
acaaacuggugagugauau

SEQ ID NO: 1704288 - RNA, 19 nt, Artificial Sequence
  Description of Artificial Sequence: Synthetic oligonucleotide
  Antisense strand to SEQ ID NO: 1704287
auaucacucaccaguuugu

SEQ ID NO: 1704289 - RNA, 19 nt, Artificial Sequence
  Description of Artificial Sequence: Synthetic oligonucleotide
  Sense strand starting at position 3017 of SEQ ID NO: 1561866
uucugaaaucaaggucauu

SEQ ID NO: 1704290 - RNA, 19 nt, Artificial Sequence
  Description of Artificial Sequence: Synthetic oligonucleotide
  Antisense strand to SEQ ID NO: 1704289
aaugaccuugauuucagaa

SEQ ID NO: 1704291 - RNA, 19 nt, Artificial Sequence
  Description of Artificial Sequence: Synthetic oligonucleotide
  Sense strand starting at position 3330 of SEQ ID NO: 1561866
agugauaacaaacguuaga

SEQ ID NO: 1704292 - RNA, 19 nt, Artificial Sequence
  Description of Artificial Sequence: Synthetic oligonucleotide
  Antisense strand to SEQ ID NO: 1704291
ucuaacguuuguuaucacu

SEQ ID NO: 1704293 - RNA, 19 nt, Artificial Sequence
  Description of Artificial Sequence: Synthetic oligonucleotide
  Sense strand starting at position 74 of SEQ ID NO: 1561867
ucgaguggcccauguguca

SEQ ID NO: 1704294 - RNA, 19 nt, Artificial Sequence
  Description of Artificial Sequence: Synthetic oligonucleotide
  Antisense strand to SEQ ID NO: 1704293
ugacacaugggccacucga

SEQ ID NO: 1704295 - RNA, 19 nt, Artificial Sequence
  Description of Artificial Sequence: Synthetic oligonucleotide
  Sense strand starting at position 81 of SEQ ID NO: 1561867
gcccaugugucagcagcaa

SEQ ID NO: 1704296 - RNA, 19 nt, Artificial Sequence
  Description of Artificial Sequence: Synthetic oligonucleotide
  Antisense strand to SEQ ID NO: 1704295
uugcugcugacacaugggc

SEQ ID NO: 1704297 - RNA, 19 nt, Artificial Sequence
  Description of Artificial Sequence: Synthetic oligonucleotide
  Sense strand starting at position 256 of SEQ ID NO: 1561867
ugaugagcacgauguugaa

SEQ ID NO: 1704298 - RNA, 19 nt, Artificial Sequence
  Description of Artificial Sequence: Synthetic oligonucleotide
  Antisense strand to SEQ ID NO: 1704297
uucaacaucgugcucauca

SEQ ID NO: 1704299 - RNA, 19 nt, Artificial Sequence
  Description of Artificial Sequence: Synthetic oligonucleotide
  Sense strand starting at position 262 of SEQ ID NO: 1561867
gcacgauguugaaggcaga

SEQ ID NO: 1704300 - RNA, 19 nt, Artificial Sequence
  Description of Artificial Sequence: Synthetic oligonucleotide
  Antisense strand to SEQ ID NO: 1704299
ucugccuucaacaucgugc

SEQ ID NO: 1704301 - RNA, 19 nt, Artificial Sequence
  Description of Artificial Sequence: Synthetic oligonucleotide
  Sense strand starting at position 795 of SEQ ID NO: 1561867
ucggucucagcuuagacaa

SEQ ID NO: 1704302 - RNA, 19 nt, Artificial Sequence
  Description of Artificial Sequence: Synthetic oligonucleotide
  Antisense strand to SEQ ID NO: 1704301
uugucuaagcugagaccga

SEQ ID NO: 1704303 - RNA, 19 nt, Artificial Sequence
  Description of Artificial Sequence: Synthetic oligonucleotide
  Sense strand starting at position 820 of SEQ ID NO: 1561867
agccuuucuccuggcugaa

SEQ ID NO: 1704304 - RNA, 19 nt, Artificial Sequence
  Description of Artificial Sequence: Synthetic oligonucleotide
  Antisense strand to SEQ ID NO: 1704303
uucagccaggagaaaggcu

SEQ ID NO: 1704305 - RNA, 19 nt, Artificial Sequence
  Description of Artificial Sequence: Synthetic oligonucleotide
  Sense strand starting at position 1487 of SEQ ID NO: 1561867
ggaagaaguuguucugggu

SEQ ID NO: 1704306 - RNA, 19 nt, Artificial Sequence
  Description of Artificial Sequence: Synthetic oligonucleotide
  Antisense strand to SEQ ID NO: 1704305
acccagaacaacuucuucc

SEQ ID NO: 1704307 - RNA, 19 nt, Artificial Sequence
  Description of Artificial Sequence: Synthetic oligonucleotide
  Sense strand starting at position 2401 of SEQ ID NO: 1561867
gggcauuuccucggugcau

SEQ ID NO: 1704308 - RNA, 19 nt, Artificial Sequence
  Description of Artificial Sequence: Synthetic oligonucleotide
  Antisense strand to SEQ ID NO: 1704307
augcaccgaggaaaugccc

SEQ ID NO: 1704309 - RNA, 19 nt, Artificial Sequence
  Description of Artificial Sequence: Synthetic oligonucleotide
  Sense strand starting at position 2613 of SEQ ID NO: 1561867
ggaguuacauaagggaaga

SEQ ID NO: 1704310 - RNA, 19 nt, Artificial Sequence
  Description of Artificial Sequence: Synthetic oligonucleotide
  Antisense strand to SEQ ID NO: 1704309
ucuucccuuauguaacucc

SEQ ID NO: 1704311 - RNA, 19 nt, Artificial Sequence
  Description of Artificial Sequence: Synthetic oligonucleotide
  Sense strand starting at position 2810 of SEQ ID NO: 1561867
uguguuagcgccuguggga

SEQ ID NO: 1704312 - RNA, 19 nt, Artificial Sequence
  Description of Artificial Sequence: Synthetic oligonucleotide
  Antisense strand to SEQ ID NO: 1704311
ucccacaggcgcuaacaca

SEQ ID NO: 1704313 - RNA, 19 nt, Artificial Sequence
  Description of Artificial Sequence: Synthetic oligonucleotide
  Sense strand starting at position 2880 of SEQ ID NO: 1561867
gacacaugcgcucagauac

SEQ ID NO: 1704314 - RNA, 19 nt, Artificial Sequence
  Description of Artificial Sequence: Synthetic oligonucleotide
  Antisense strand to SEQ ID NO: 1704313
guaucugagcgcauguguc

SEQ ID NO: 1704315 - RNA, 19 nt, Artificial Sequence
  Description of Artificial Sequence: Synthetic oligonucleotide
  Sense strand starting at position 3424 of SEQ ID NO: 1561867
cucugacugcuugguugua

SEQ ID NO: 1704316 - RNA, 19 nt, Artificial Sequence
  Description of Artificial Sequence: Synthetic oligonucleotide
  Antisense strand to SEQ ID NO: 1704315
uacaaccaagcagucagag

SEQ ID NO: 1704317 - RNA, 19 nt, Artificial Sequence
  Description of Artificial Sequence: Synthetic oligonucleotide
  Sense strand starting at position 3659 of SEQ ID NO: 1561867
accagaacuccuuguugag

SEQ ID NO: 1704318 - RNA, 19 nt, Artificial Sequence
  Description of Artificial Sequence: Synthetic oligonucleotide
  Antisense strand to SEQ ID NO: 1704317
cucaacaaggaguucuggu

SEQ ID NO: 1704319 - RNA, 19 nt, Artificial Sequence
  Description of Artificial Sequence: Synthetic oligonucleotide
  Sense strand starting at position 3665 of SEQ ID NO: 1561867
acuccuuguugagaggacu

SEQ ID NO: 1704320 - RNA, 19 nt, Artificial Sequence
  Description of Artificial Sequence: Synthetic oligonucleotide
  Antisense strand to SEQ ID NO: 1704319
aguccucucaacaaggagu

SEQ ID NO: 1704321 - RNA, 19 nt, Artificial Sequence
  Description of Artificial Sequence: Synthetic oligonucleotide
  Sense strand starting at position 161 of SEQ ID NO: 1561868
ugccuauggguuugagagu

SEQ ID NO: 1704322 - RNA, 19 nt, Artificial Sequence
  Description of Artificial Sequence: Synthetic oligonucleotide
  Antisense strand to SEQ ID NO: 1704321
acucucaaacccauaggca

SEQ ID NO: 1704323 - RNA, 19 nt, Artificial Sequence
  Description of Artificial Sequence: Synthetic oligonucleotide
  Sense strand starting at position 162 of SEQ ID NO: 1561868
gccuauggguuugagagua

SEQ ID NO: 1704324 - RNA, 19 nt, Artificial Sequence
  Description of Artificial Sequence: Synthetic oligonucleotide
  Antisense strand to SEQ ID NO: 1704323
uacucucaaacccauaggc

SEQ ID NO: 1704325 - RNA, 19 nt, Artificial Sequence
  Description of Artificial Sequence: Synthetic oligonucleotide
  Sense strand starting at position 170 of SEQ ID NO: 1561868
guuugagaguaauugagug

SEQ ID NO: 1704326 - RNA, 19 nt, Artificial Sequence
  Description of Artificial Sequence: Synthetic oligonucleotide
  Antisense strand to SEQ ID NO: 1704325
cacucaauuacucucaaac

SEQ ID NO: 1704327 - RNA, 19 nt, Artificial Sequence
  Description of Artificial Sequence: Synthetic oligonucleotide
  Sense strand starting at position 175 of SEQ ID NO: 1561868
agaguaauugagugggaca

SEQ ID NO: 1704328 - RNA, 19 nt, Artificial Sequence
  Description of Artificial Sequence: Synthetic oligonucleotide
  Antisense strand to SEQ ID NO: 1704327
ugucccacucaauuacucu

SEQ ID NO: 1704329 - RNA, 19 nt, Artificial Sequence
  Description of Artificial Sequence: Synthetic oligonucleotide
  Sense strand starting at position 176 of SEQ ID NO: 1561868
gaguaauugagugggacag

SEQ ID NO: 1704330 - RNA, 19 nt, Artificial Sequence
  Description of Artificial Sequence: Synthetic oligonucleotide
  Antisense strand to SEQ ID NO: 1704329
cugucccacucaauuacuc

SEQ ID NO: 1704331 - RNA, 19 nt, Artificial Sequence
  Description of Artificial Sequence: Synthetic oligonucleotide
  Sense strand starting at position 177 of SEQ ID NO: 1561868
aguaauugagugggacagu

SEQ ID NO: 1704332 - RNA, 19 nt, Artificial Sequence
  Description of Artificial Sequence: Synthetic oligonucleotide
  Antisense strand to SEQ ID NO: 1704331
acugucccacucaauuacu

SEQ ID NO: 1704333 - RNA, 19 nt, Artificial Sequence
  Description of Artificial Sequence: Synthetic oligonucleotide
  Sense strand starting at position 178 of SEQ ID NO: 1561868
guaauugagugggacaguu

SEQ ID NO: 1704334 - RNA, 19 nt, Artificial Sequence
  Description of Artificial Sequence: Synthetic oligonucleotide
  Antisense strand to SEQ ID NO: 1704333
aacugucccacucaauuac

SEQ ID NO: 1704335 - RNA, 19 nt, Artificial Sequence
  Description of Artificial Sequence: Synthetic oligonucleotide
  Sense strand starting at position 343 of SEQ ID NO: 1561868
ggcccugacuucuacccaa

SEQ ID NO: 1704336 - RNA, 19 nt, Artificial Sequence
  Description of Artificial Sequence: Synthetic oligonucleotide
  Antisense strand to SEQ ID NO: 1704335
uuggguagaagucagggcc

SEQ ID NO: 1704337 - RNA, 19 nt, Artificial Sequence
  Description of Artificial Sequence: Synthetic oligonucleotide
  Sense strand starting at position 655 of SEQ ID NO: 1561868
cccuuugccugacagaauc

SEQ ID NO: 1704338 - RNA, 19 nt, Artificial Sequence
  Description of Artificial Sequence: Synthetic oligonucleotide
  Antisense strand to SEQ ID NO: 1704337
gauucugucaggcaaaggg

SEQ ID NO: 1704339 - RNA, 19 nt, Artificial Sequence
  Description of Artificial Sequence: Synthetic oligonucleotide
  Sense strand starting at position 666 of SEQ ID NO: 1561868
acagaauccucggaggauc

SEQ ID NO: 1704340 - RNA, 19 nt, Artificial Sequence
  Description of Artificial Sequence: Synthetic oligonucleotide
  Antisense strand to SEQ ID NO: 1704339
gauccuccgaggauucugu

SEQ ID NO: 1704341 - RNA, 19 nt, Artificial Sequence
  Description of Artificial Sequence: Synthetic oligonucleotide
  Sense strand starting at position 724 of SEQ ID NO: 1561868
ccaggagcacuaugggaau

SEQ ID NO: 1704342 - RNA, 19 nt, Artificial Sequence
  Description of Artificial Sequence: Synthetic oligonucleotide
  Antisense strand to SEQ ID NO: 1704341
auucccauagugcuccugg

SEQ ID NO: 1704343 - RNA, 19 nt, Artificial Sequence
  Description of Artificial Sequence: Synthetic oligonucleotide
  Sense strand starting at position 742 of SEQ ID NO: 1561868
ugcaguguucuggguuuca

SEQ ID NO: 1704344 - RNA, 19 nt, Artificial Sequence
  Description of Artificial Sequence: Synthetic oligonucleotide
  Antisense strand to SEQ ID NO: 1704343
ugaaacccagaacacugca

SEQ ID NO: 1704345 - RNA, 19 nt, Artificial Sequence
  Description of Artificial Sequence: Synthetic oligonucleotide
  Sense strand starting at position 768 of SEQ ID NO: 1561868
acacgaugccuguguagac

SEQ ID NO: 1704346 - RNA, 19 nt, Artificial Sequence
  Description of Artificial Sequence: Synthetic oligonucleotide
  Antisense strand to SEQ ID NO: 1704345
gucuacacaggcaucgugu

SEQ ID NO: 1704347 - RNA, 19 nt, Artificial Sequence
  Description of Artificial Sequence: Synthetic oligonucleotide
  Sense strand starting at position 1275 of SEQ ID NO: 1561868
gucccuaguuucgugauca

SEQ ID NO: 1704348 - RNA, 19 nt, Artificial Sequence
  Description of Artificial Sequence: Synthetic oligonucleotide
  Antisense strand to SEQ ID NO: 1704347
ugaucacgaaacuagggac

SEQ ID NO: 1704349 - RNA, 19 nt, Artificial Sequence
  Description of Artificial Sequence: Synthetic oligonucleotide
  Sense strand starting at position 1767 of SEQ ID NO: 1561868
cagacaaagucuggagguu

SEQ ID NO: 1704350 - RNA, 19 nt, Artificial Sequence
  Description of Artificial Sequence: Synthetic oligonucleotide
  Antisense strand to SEQ ID NO: 1704349
aaccuccagacuuugucug

SEQ ID NO: 1704351 - RNA, 19 nt, Artificial Sequence
  Description of Artificial Sequence: Synthetic oligonucleotide
  Sense strand starting at position 2490 of SEQ ID NO: 1561868
gguccucaguggccagaaa

SEQ ID NO: 1704352 - RNA, 19 nt, Artificial Sequence
  Description of Artificial Sequence: Synthetic oligonucleotide
  Antisense strand to SEQ ID NO: 1704351
uuucuggccacugaggacc

SEQ ID NO: 1704353 - RNA, 19 nt, Artificial Sequence
  Description of Artificial Sequence: Synthetic oligonucleotide
  Sense strand starting at position 2562 of SEQ ID NO: 1561868
cucugucuuugcucaaguu

SEQ ID NO: 1704354 - RNA, 19 nt, Artificial Sequence
  Description of Artificial Sequence: Synthetic oligonucleotide
  Antisense strand to SEQ ID NO: 1704353
aacuugagcaaagacagag

SEQ ID NO: 1704355 - RNA, 19 nt, Artificial Sequence
  Description of Artificial Sequence: Synthetic oligonucleotide
  Sense strand starting at position 2992 of SEQ ID NO: 1561868
ugcaguaagugugaucaca

SEQ ID NO: 1704356 - RNA, 19 nt, Artificial Sequence
  Description of Artificial Sequence: Synthetic oligonucleotide
  Antisense strand to SEQ ID NO: 1704355
ugugaucacacuuacugca

SEQ ID NO: 1704357 - RNA, 19 nt, Artificial Sequence
  Description of Artificial Sequence: Synthetic oligonucleotide
  Sense strand starting at position 3038 of SEQ ID NO: 1561868
gagagaaccugucauaaau

SEQ ID NO: 1704358 - RNA, 19 nt, Artificial Sequence
  Description of Artificial Sequence: Synthetic oligonucleotide
  Antisense strand to SEQ ID NO: 1704357
auuuaugacagguucucuc

SEQ ID NO: 1704359 - RNA, 19 nt, Artificial Sequence
  Description of Artificial Sequence: Synthetic oligonucleotide
  Sense strand starting at position 3167 of SEQ ID NO: 1561868
acagaaguuccagaugcuu

SEQ ID NO: 1704360 - RNA, 19 nt, Artificial Sequence
  Description of Artificial Sequence: Synthetic oligonucleotide
  Antisense strand to SEQ ID NO: 1704359
aagcaucuggaacuucugu

SEQ ID NO: 1704361 - RNA, 19 nt, Artificial Sequence
  Description of Artificial Sequence: Synthetic oligonucleotide
  Sense strand starting at position 3255 of SEQ ID NO: 1561868
aggcacaguucuugggaca

SEQ ID NO: 1704362 - RNA, 19 nt, Artificial Sequence
  Description of Artificial Sequence: Synthetic oligonucleotide
  Antisense strand to SEQ ID NO: 1704361
ugucccaagaacugugccu

SEQ ID NO: 1704363 - RNA, 19 nt, Artificial Sequence
  Description of Artificial Sequence: Synthetic oligonucleotide
  Sense strand starting at position 3256 of SEQ ID NO: 1561868
ggcacaguucuugggacau

SEQ ID NO: 1704364 - RNA, 19 nt, Artificial Sequence
  Description of Artificial Sequence: Synthetic oligonucleotide
  Antisense strand to SEQ ID NO: 1704363
augucccaagaacugugcc

SEQ ID NO: 1704365 - RNA, 19 nt, Artificial Sequence
  Description of Artificial Sequence: Synthetic oligonucleotide
  Sense strand starting at position 3433 of SEQ ID NO: 1561868
ccuuaaugaggucaggcau

SEQ ID NO: 1704366 - RNA, 19 nt, Artificial Sequence
  Description of Artificial Sequence: Synthetic oligonucleotide
  Antisense strand to SEQ ID NO: 1704365
augccugaccucauuaagg

SEQ ID NO: 1704367 - RNA, 19 nt, Artificial Sequence
  Description of Artificial Sequence: Synthetic oligonucleotide
  Sense strand starting at position 3569 of SEQ ID NO: 1561868
guguuugugucugugcuua

SEQ ID NO: 1704368 - RNA, 19 nt, Artificial Sequence
  Description of Artificial Sequence: Synthetic oligonucleotide
  Antisense strand to SEQ ID NO: 1704367
uaagcacagacacaaacac

SEQ ID NO: 1704369 - RNA, 19 nt, Artificial Sequence
  Description of Artificial Sequence: Synthetic oligonucleotide
  Sense strand starting at position 3571 of SEQ ID NO: 1561868
guuugugucugugcuuaag

SEQ ID NO: 1704370 - RNA, 19 nt, Artificial Sequence
  Description of Artificial Sequence: Synthetic oligonucleotide
  Antisense strand to SEQ ID NO: 1704369
cuuaagcacagacacaaac

SEQ ID NO: 1704371 - RNA, 19 nt, Artificial Sequence
  Description of Artificial Sequence: Synthetic oligonucleotide
  Sense strand starting at position 3583 of SEQ ID NO: 1561868
gcuuaagugugucuuugua

SEQ ID NO: 1704372 - RNA, 19 nt, Artificial Sequence
  Description of Artificial Sequence: Synthetic oligonucleotide
  Antisense strand to SEQ ID NO: 1704371
uacaaagacacacuuaagc

SEQ ID NO: 1704373 - RNA, 19 nt, Artificial Sequence
  Description of Artificial Sequence: Synthetic oligonucleotide
  Sense strand starting at position 3585 of SEQ ID NO: 1561868
uuaagugugucuuuguaug

SEQ ID NO: 1704374 - RNA, 19 nt, Artificial Sequence
  Description of Artificial Sequence: Synthetic oligonucleotide
  Antisense strand to SEQ ID NO: 1704373
cauacaaagacacacuuaa

SEQ ID NO: 1704375 - RNA, 19 nt, Artificial Sequence
  Description of Artificial Sequence: Synthetic oligonucleotide
  Sense strand starting at position 3590 of SEQ ID NO: 1561868
ugugucuuuguauguguaa

SEQ ID NO: 1704376 - RNA, 19 nt, Artificial Sequence
  Description of Artificial Sequence: Synthetic oligonucleotide
  Antisense strand to SEQ ID NO: 1704375
uuacacauacaaagacaca

SEQ ID NO: 1704377 - RNA, 19 nt, Artificial Sequence
  Description of Artificial Sequence: Synthetic oligonucleotide
  Sense strand starting at position 3592 of SEQ ID NO: 1561868
ugucuuuguauguguaaga

SEQ ID NO: 1704378 - RNA, 19 nt, Artificial Sequence
  Description of Artificial Sequence: Synthetic oligonucleotide
  Antisense strand to SEQ ID NO: 1704377
ucuuacacauacaaagaca

SEQ ID NO: 1704379 - RNA, 19 nt, Artificial Sequence
  Description of Artificial Sequence: Synthetic oligonucleotide
  Sense strand starting at position 3602 of SEQ ID NO: 1561868
uguguaagacuuugcuuau

SEQ ID NO: 1704380 - RNA, 19 nt, Artificial Sequence
  Description of Artificial Sequence: Synthetic oligonucleotide
  Antisense strand to SEQ ID NO: 1704379
auaagcaaagucuuacaca

SEQ ID NO: 1704381 - RNA, 19 nt, Artificial Sequence
  Description of Artificial Sequence: Synthetic oligonucleotide
  Sense strand starting at position 3603 of SEQ ID NO: 1561868
guguaagacuuugcuuaua

SEQ ID NO: 1704382 - RNA, 19 nt, Artificial Sequence
  Description of Artificial Sequence: Synthetic oligonucleotide
  Antisense strand to SEQ ID NO: 1704381
uauaagcaaagucuuacac

SEQ ID NO: 1704383 - RNA, 19 nt, Artificial Sequence
  Description of Artificial Sequence: Synthetic oligonucleotide
  Sense strand starting at position 3605 of SEQ ID NO: 1561868
guaagacuuugcuuauaug

SEQ ID NO: 1704384 - RNA, 19 nt, Artificial Sequence
  Description of Artificial Sequence: Synthetic oligonucleotide
  Antisense strand to SEQ ID NO: 1704383
cauauaagcaaagucuuac

SEQ ID NO: 1704385 - RNA, 19 nt, Artificial Sequence
  Description of Artificial Sequence: Synthetic oligonucleotide
  Sense strand starting at position 3627 of SEQ ID NO: 1561868
guucaugugugaguguguu

SEQ ID NO: 1704386 - RNA, 19 nt, Artificial Sequence
  Description of Artificial Sequence: Synthetic oligonucleotide
  Antisense strand to SEQ ID NO: 1704385
aacacacucacacaugaac

SEQ ID NO: 1704387 - RNA, 19 nt, Artificial Sequence
  Description of Artificial Sequence: Synthetic oligonucleotide
  Sense strand starting at position 3635 of SEQ ID NO: 1561868
gugaguguguuucuuggau

SEQ ID NO: 1704388 - RNA, 19 nt, Artificial Sequence
  Description of Artificial Sequence: Synthetic oligonucleotide
  Antisense strand to SEQ ID NO: 1704387
auccaagaaacacacucac

SEQ ID NO: 1704389 - RNA, 19 nt, Artificial Sequence
  Description of Artificial Sequence: Synthetic oligonucleotide
  Sense strand starting at position 3637 of SEQ ID NO: 1561868
gaguguguuucuuggauug

SEQ ID NO: 1704390 - RNA, 19 nt, Artificial Sequence
  Description of Artificial Sequence: Synthetic oligonucleotide
  Antisense strand to SEQ ID NO: 1704389
caauccaagaaacacacuc

SEQ ID NO: 1704391 - RNA, 19 nt, Artificial Sequence
  Description of Artificial Sequence: Synthetic oligonucleotide
  Sense strand starting at position 3642 of SEQ ID NO: 1561868
uguuucuuggauugucuga

SEQ ID NO: 1704392 - RNA, 19 nt, Artificial Sequence
  Description of Artificial Sequence: Synthetic oligonucleotide
  Antisense strand to SEQ ID NO: 1704391
ucagacaauccaagaaaca

SEQ ID NO: 1704393 - RNA, 19 nt, Artificial Sequence
  Description of Artificial Sequence: Synthetic oligonucleotide
  Sense strand starting at position 3683 of SEQ ID NO: 1561868
gugugacuguguuucugua

SEQ ID NO: 1704394 - RNA, 19 nt, Artificial Sequence
  Description of Artificial Sequence: Synthetic oligonucleotide
  Antisense strand to SEQ ID NO: 1704393
uacagaaacacagucacac

SEQ ID NO: 1704395 - RNA, 19 nt, Artificial Sequence
  Description of Artificial Sequence: Synthetic oligonucleotide
  Sense strand starting at position 3685 of SEQ ID NO: 1561868
gugacuguguuucuguauu

SEQ ID NO: 1704396 - RNA, 19 nt, Artificial Sequence
  Description of Artificial Sequence: Synthetic oligonucleotide
  Antisense strand to SEQ ID NO: 1704395
aauacagaaacacagucac

SEQ ID NO: 1704397 - RNA, 19 nt, Artificial Sequence
  Description of Artificial Sequence: Synthetic oligonucleotide
  Sense strand starting at position 3687 of SEQ ID NO: 1561868
gacuguguuucuguauuac

SEQ ID NO: 1704398 - RNA, 19 nt, Artificial Sequence
  Description of Artificial Sequence: Synthetic oligonucleotide
  Antisense strand to SEQ ID NO: 1704397
guaauacagaaacacaguc

SEQ ID NO: 1704399 - RNA, 19 nt, Artificial Sequence
  Description of Artificial Sequence: Synthetic oligonucleotide
  Sense strand starting at position 3933 of SEQ ID NO: 1561868
caaagaugggcucgucucu

SEQ ID NO: 1704400 - RNA, 19 nt, Artificial Sequence
  Description of Artificial Sequence: Synthetic oligonucleotide
  Antisense strand to SEQ ID NO: 1704399
agagacgagcccaucuuug

SEQ ID NO: 1704401 - RNA, 19 nt, Artificial Sequence
  Description of Artificial Sequence: Synthetic oligonucleotide
  Sense strand starting at position 9 of SEQ ID NO: 1561869
ggaagauucuuagacccuu

SEQ ID NO: 1704402 - RNA, 19 nt, Artificial Sequence
  Description of Artificial Sequence: Synthetic oligonucleotide
  Antisense strand to SEQ ID NO: 1704401
aagggucuaagaaucuucc

SEQ ID NO: 1704403 - RNA, 19 nt, Artificial Sequence
  Description of Artificial Sequence: Synthetic oligonucleotide
  Sense strand starting at position 383 of SEQ ID NO: 1561869
uccacaucuuggcaaggaa

SEQ ID NO: 1704404 - RNA, 19 nt, Artificial Sequence
  Description of Artificial Sequence: Synthetic oligonucleotide
  Antisense strand to SEQ ID NO: 1704403
uuccuugccaagaugugga

SEQ ID NO: 1704405 - RNA, 19 nt, Artificial Sequence
  Description of Artificial Sequence: Synthetic oligonucleotide
  Sense strand starting at position 430 of SEQ ID NO: 1561869
acuuaaauggcuugcucaa

SEQ ID NO: 1704406 - RNA, 19 nt, Artificial Sequence
  Description of Artificial Sequence: Synthetic oligonucleotide
  Antisense strand to SEQ ID NO: 1704405
uugagcaagccauuuaagu

SEQ ID NO: 1704407 - RNA, 19 nt, Artificial Sequence
  Description of Artificial Sequence: Synthetic oligonucleotide
  Sense strand starting at position 520 of SEQ ID NO: 1561869
cccaaugaucacugugaga

SEQ ID NO: 1704408 - RNA, 19 nt, Artificial Sequence
  Description of Artificial Sequence: Synthetic oligonucleotide
  Antisense strand to SEQ ID NO: 1704407
ucucacagugaucauuggg

SEQ ID NO: 1704409 - RNA, 19 nt, Artificial Sequence
  Description of Artificial Sequence: Synthetic oligonucleotide
  Sense strand starting at position 523 of SEQ ID NO: 1561869
aaugaucacugugagaaac

SEQ ID NO: 1704410 - RNA, 19 nt, Artificial Sequence
  Description of Artificial Sequence: Synthetic oligonucleotide
  Antisense strand to SEQ ID NO: 1704409
guuucucacagugaucauu

SEQ ID NO: 1704411 - RNA, 19 nt, Artificial Sequence
  Description of Artificial Sequence: Synthetic oligonucleotide
  Sense strand starting at position 638 of SEQ ID NO: 1561869
cucauucaggccgguaaga

SEQ ID NO: 1704412 - RNA, 19 nt, Artificial Sequence
  Description of Artificial Sequence: Synthetic oligonucleotide
  Antisense strand to SEQ ID NO: 1704411
ucuuaccggccugaaugag

SEQ ID NO: 1704413 - RNA, 19 nt, Artificial Sequence
  Description of Artificial Sequence: Synthetic oligonucleotide
  Sense strand starting at position 2271 of SEQ ID NO: 1561869
ggcauugccuuauaaugaa

SEQ ID NO: 1704414 - RNA, 19 nt, Artificial Sequence
  Description of Artificial Sequence: Synthetic oligonucleotide
  Antisense strand to SEQ ID NO: 1704413
uucauuauaaggcaaugcc

SEQ ID NO: 1704415 - RNA, 19 nt, Artificial Sequence
  Description of Artificial Sequence: Synthetic oligonucleotide
  Sense strand starting at position 2440 of SEQ ID NO: 1561869
cucggacccugaucuacaa

SEQ ID NO: 1704416 - RNA, 19 nt, Artificial Sequence
  Description of Artificial Sequence: Synthetic oligonucleotide
  Antisense strand to SEQ ID NO: 1704415
uuguagaucaggguccgag

SEQ ID NO: 1704417 - RNA, 19 nt, Artificial Sequence
  Description of Artificial Sequence: Synthetic oligonucleotide
  Sense strand starting at position 2535 of SEQ ID NO: 1561869
gcuguucguguuccugaga

SEQ ID NO: 1704418 - RNA, 19 nt, Artificial Sequence
  Description of Artificial Sequence: Synthetic oligonucleotide
  Antisense strand to SEQ ID NO: 1704417
ucucaggaacacgaacagc

SEQ ID NO: 1704419 - RNA, 19 nt, Artificial Sequence
  Description of Artificial Sequence: Synthetic oligonucleotide
  Sense strand starting at position 2588 of SEQ ID NO: 1561869
agcaauuaauucgggaaag

SEQ ID NO: 1704420 - RNA, 19 nt, Artificial Sequence
  Description of Artificial Sequence: Synthetic oligonucleotide
  Antisense strand to SEQ ID NO: 1704419
cuuucccgaauuaauugcu

SEQ ID NO: 1704421 - RNA, 19 nt, Artificial Sequence
  Description of Artificial Sequence: Synthetic oligonucleotide
  Sense strand starting at position 2589 of SEQ ID NO: 1561869
gcaauuaauucgggaaagu

SEQ ID NO: 1704422 - RNA, 19 nt, Artificial Sequence
  Description of Artificial Sequence: Synthetic oligonucleotide
  Antisense strand to SEQ ID NO: 1704421
acuuucccgaauuaauugc

SEQ ID NO: 1704423 - RNA, 19 nt, Artificial Sequence
  Description of Artificial Sequence: Synthetic oligonucleotide
  Sense strand starting at position 2600 of SEQ ID NO: 1561869
gggaaagucuaguaaguuu

SEQ ID NO: 1704424 - RNA, 19 nt, Artificial Sequence
  Description of Artificial Sequence: Synthetic oligonucleotide
  Antisense strand to SEQ ID NO: 1704423
aaacuuacuagacuuuccc

SEQ ID NO: 1704425 - RNA, 19 nt, Artificial Sequence
  Description of Artificial Sequence: Synthetic oligonucleotide
  Sense strand starting at position 2719 of SEQ ID NO: 1561869
ccugcaacaguucgugauu

SEQ ID NO: 1704426 - RNA, 19 nt, Artificial Sequence
  Description of Artificial Sequence: Synthetic oligonucleotide
  Antisense strand to SEQ ID NO: 1704425
aaucacgaacuguugcagg

SEQ ID NO: 1704427 - RNA, 19 nt, Artificial Sequence
  Description of Artificial Sequence: Synthetic oligonucleotide
  Sense strand starting at position 3239 of SEQ ID NO: 1561869
cucugcagcugagugaauu

SEQ ID NO: 1704428 - RNA, 19 nt, Artificial Sequence
  Description of Artificial Sequence: Synthetic oligonucleotide
  Antisense strand to SEQ ID NO: 1704427
aauucacucagcugcagag

SEQ ID NO: 1704429 - RNA, 19 nt, Artificial Sequence
  Description of Artificial Sequence: Synthetic oligonucleotide
  Sense strand starting at position 3294 of SEQ ID NO: 1561869
uaauaucugcuugguguuu

SEQ ID NO: 1704430 - RNA, 19 nt, Artificial Sequence
  Description of Artificial Sequence: Synthetic oligonucleotide
  Antisense strand to SEQ ID NO: 1704429
aaacaccaagcagauauua

SEQ ID NO: 1704431 - RNA, 19 nt, Artificial Sequence
  Description of Artificial Sequence: Synthetic oligonucleotide
  Sense strand starting at position 3295 of SEQ ID NO: 1561869
aauaucugcuugguguuua

SEQ ID NO: 1704432 - RNA, 19 nt, Artificial Sequence
  Description of Artificial Sequence: Synthetic oligonucleotide
  Antisense strand to SEQ ID NO: 1704431
uaaacaccaagcagauauu

SEQ ID NO: 1704433 - RNA, 19 nt, Artificial Sequence
  Description of Artificial Sequence: Synthetic oligonucleotide
  Sense strand starting at position 3296 of SEQ ID NO: 1561869
auaucugcuugguguuuaa

SEQ ID NO: 1704434 - RNA, 19 nt, Artificial Sequence
  Description of Artificial Sequence: Synthetic oligonucleotide
  Antisense strand to SEQ ID NO: 1704433
uuaaacaccaagcagauau

SEQ ID NO: 1704435 - RNA, 19 nt, Artificial Sequence
  Description of Artificial Sequence: Synthetic oligonucleotide
  Sense strand starting at position 3299 of SEQ ID NO: 1561869
ucugcuugguguuuaaaua

SEQ ID NO: 1704436 - RNA, 19 nt, Artificial Sequence
  Description of Artificial Sequence: Synthetic oligonucleotide
  Antisense strand to SEQ ID NO: 1704435
uauuuaaacaccaagcaga

SEQ ID NO: 1704437 - RNA, 19 nt, Artificial Sequence
  Description of Artificial Sequence: Synthetic oligonucleotide
  Sense strand starting at position 3300 of SEQ ID NO: 1561869
cugcuugguguuuaaauaa

SEQ ID NO: 1704438 - RNA, 19 nt, Artificial Sequence
  Description of Artificial Sequence: Synthetic oligonucleotide
  Antisense strand to SEQ ID NO: 1704437
uuauuuaaacaccaagcag

SEQ ID NO: 1704439 - RNA, 19 nt, Artificial Sequence
  Description of Artificial Sequence: Synthetic oligonucleotide
  Sense strand starting at position 3322 of SEQ ID NO: 1561869
ucacaaacgugaccauuau

SEQ ID NO: 1704440 - RNA, 19 nt, Artificial Sequence
  Description of Artificial Sequence: Synthetic oligonucleotide
  Antisense strand to SEQ ID NO: 1704439
auaauggucacguuuguga

SEQ ID NO: 1704441 - RNA, 19 nt, Artificial Sequence
  Description of Artificial Sequence: Synthetic oligonucleotide
  Sense strand starting at position 3369 of SEQ ID NO: 1561869
guaugaagaguuugucuug

SEQ ID NO: 1704442 - RNA, 19 nt, Artificial Sequence
  Description of Artificial Sequence: Synthetic oligonucleotide
  Antisense strand to SEQ ID NO: 1704441
caagacaaacucuucauac

SEQ ID NO: 1704443 - RNA, 19 nt, Artificial Sequence
  Description of Artificial Sequence: Synthetic oligonucleotide
  Sense strand starting at position 3370 of SEQ ID NO: 1561869
uaugaagaguuugucuuga

SEQ ID NO: 1704444 - RNA, 19 nt, Artificial Sequence
  Description of Artificial Sequence: Synthetic oligonucleotide
  Antisense strand to SEQ ID NO: 1704443
ucaagacaaacucuucaua

SEQ ID NO: 1704445 - RNA, 19 nt, Artificial Sequence
  Description of Artificial Sequence: Synthetic oligonucleotide
  Sense strand starting at position 3374 of SEQ ID NO: 1561869
aagaguuugucuugaucau

SEQ ID NO: 1704446 - RNA, 19 nt, Artificial Sequence
  Description of Artificial Sequence: Synthetic oligonucleotide
  Antisense strand to SEQ ID NO: 1704445
augaucaagacaaacucuu

SEQ ID NO: 1704447 - RNA, 19 nt, Artificial Sequence
  Description of Artificial Sequence: Synthetic oligonucleotide
  Sense strand starting at position 3375 of SEQ ID NO: 1561869
agaguuugucuugaucauc

SEQ ID NO: 1704448 - RNA, 19 nt, Artificial Sequence
  Description of Artificial Sequence: Synthetic oligonucleotide
  Antisense strand to SEQ ID NO: 1704447
gaugaucaagacaaacucu

SEQ ID NO: 1704449 - RNA, 19 nt, Artificial Sequence
  Description of Artificial Sequence: Synthetic oligonucleotide
  Sense strand starting at position 3378 of SEQ ID NO: 1561869
guuugucuugaucaucuuu

SEQ ID NO: 1704450 - RNA, 19 nt, Artificial Sequence
  Description of Artificial Sequence: Synthetic oligonucleotide
  Antisense strand to SEQ ID NO: 1704449
aaagaugaucaagacaaac

SEQ ID NO: 1704451 - RNA, 19 nt, Artificial Sequence
  Description of Artificial Sequence: Synthetic oligonucleotide
  Sense strand starting at position 3571 of SEQ ID NO: 1561869
gguagcguucgccuguaau

SEQ ID NO: 1704452 - RNA, 19 nt, Artificial Sequence
  Description of Artificial Sequence: Synthetic oligonucleotide
  Antisense strand to SEQ ID NO: 1704451
auuacaggcgaacgcuacc

SEQ ID NO: 1704453 - RNA, 19 nt, Artificial Sequence
  Description of Artificial Sequence: Synthetic oligonucleotide
  Sense strand starting at position 61 of SEQ ID NO: 1561870
auauaagucagguaguaca

SEQ ID NO: 1704454 - RNA, 19 nt, Artificial Sequence
  Description of Artificial Sequence: Synthetic oligonucleotide
  Antisense strand to SEQ ID NO: 1704453
uguacuaccugacuuauau

SEQ ID NO: 1704455 - RNA, 19 nt, Artificial Sequence
  Description of Artificial Sequence: Synthetic oligonucleotide
  Sense strand starting at position 74 of SEQ ID NO: 1561870
aguacauauuuggaaucua

SEQ ID NO: 1704456 - RNA, 19 nt, Artificial Sequence
  Description of Artificial Sequence: Synthetic oligonucleotide
  Antisense strand to SEQ ID NO: 1704455
uagauuccaaauauguacu

SEQ ID NO: 1704457 - RNA, 19 nt, Artificial Sequence
  Description of Artificial Sequence: Synthetic oligonucleotide
  Sense strand starting at position 96 of SEQ ID NO: 1561870
cacaaucuagugugauuga

SEQ ID NO: 1704458 - RNA, 19 nt, Artificial Sequence
  Description of Artificial Sequence: Synthetic oligonucleotide
  Antisense strand to SEQ ID NO: 1704457
ucaaucacacuagauugug

SEQ ID NO: 1704459 - RNA, 19 nt, Artificial Sequence
  Description of Artificial Sequence: Synthetic oligonucleotide
  Sense strand starting at position 105 of SEQ ID NO: 1561870
gugugauugaagcacagaa

SEQ ID NO: 1704460 - RNA, 19 nt, Artificial Sequence
  Description of Artificial Sequence: Synthetic oligonucleotide
  Antisense strand to SEQ ID NO: 1704459
uucugugcuucaaucacac

SEQ ID NO: 1704461 - RNA, 19 nt, Artificial Sequence
  Description of Artificial Sequence: Synthetic oligonucleotide
  Sense strand starting at position 284 of SEQ ID NO: 1561870
gagauuaaagcgcggaaga

SEQ ID NO: 1704462 - RNA, 19 nt, Artificial Sequence
  Description of Artificial Sequence: Synthetic oligonucleotide
  Antisense strand to SEQ ID NO: 1704461
ucuuccgcgcuuuaaucuc

SEQ ID NO: 1704463 - RNA, 19 nt, Artificial Sequence
  Description of Artificial Sequence: Synthetic oligonucleotide
  Sense strand starting at position 956 of SEQ ID NO: 1561870
agugguauuccagaaaugc

SEQ ID NO: 1704464 - RNA, 19 nt, Artificial Sequence
  Description of Artificial Sequence: Synthetic oligonucleotide
  Antisense strand to SEQ ID NO: 1704463
gcauuucuggaauaccacu

SEQ ID NO: 1704465 - RNA, 19 nt, Artificial Sequence
  Description of Artificial Sequence: Synthetic oligonucleotide
  Sense strand starting at position 972 of SEQ ID NO: 1561870
ugcaaugaauaagauuuga

SEQ ID NO: 1704466 - RNA, 19 nt, Artificial Sequence
  Description of Artificial Sequence: Synthetic oligonucleotide
  Antisense strand to SEQ ID NO: 1704465
ucaaaucuuauucauugca

SEQ ID NO: 1704467 - RNA, 19 nt, Artificial Sequence
  Description of Artificial Sequence: Synthetic oligonucleotide
  Sense strand starting at position 982 of SEQ ID NO: 1561870
aagauuugaugacaguuga

SEQ ID NO: 1704468 - RNA, 19 nt, Artificial Sequence
  Description of Artificial Sequence: Synthetic oligonucleotide
  Antisense strand to SEQ ID NO: 1704467
ucaacugucaucaaaucuu

SEQ ID NO: 1704469 - RNA, 19 nt, Artificial Sequence
  Description of Artificial Sequence: Synthetic oligonucleotide
  Sense strand starting at position 986 of SEQ ID NO: 1561870
uuugaugacaguugaugua

SEQ ID NO: 1704470 - RNA, 19 nt, Artificial Sequence
  Description of Artificial Sequence: Synthetic oligonucleotide
  Antisense strand to SEQ ID NO: 1704469
uacaucaacugucaucaaa

SEQ ID NO: 1704471 - RNA, 19 nt, Artificial Sequence
  Description of Artificial Sequence: Synthetic oligonucleotide
  Sense strand starting at position 1113 of SEQ ID NO: 1561870
gugguugcccuggaguuaa

SEQ ID NO: 1704472 - RNA, 19 nt, Artificial Sequence
  Description of Artificial Sequence: Synthetic oligonucleotide
  Antisense strand to SEQ ID NO: 1704471
uuaacuccagggcaaccac

SEQ ID NO: 1704473 - RNA, 19 nt, Artificial Sequence
  Description of Artificial Sequence: Synthetic oligonucleotide
  Sense strand starting at position 1482 of SEQ ID NO: 1561870
caccgucucccggaagcau

SEQ ID NO: 1704474 - RNA, 19 nt, Artificial Sequence
  Description of Artificial Sequence: Synthetic oligonucleotide
  Antisense strand to SEQ ID NO: 1704473
augcuuccgggagacggug

SEQ ID NO: 1704475 - RNA, 19 nt, Artificial Sequence
  Description of Artificial Sequence: Synthetic oligonucleotide
  Sense strand starting at position 1689 of SEQ ID NO: 1561870
gccagauucgugcauaccu

SEQ ID NO: 1704476 - RNA, 19 nt, Artificial Sequence
  Description of Artificial Sequence: Synthetic oligonucleotide
  Antisense strand to SEQ ID NO: 1704475
agguaugcacgaaucuggc

SEQ ID NO: 1704477 - RNA, 19 nt, Artificial Sequence
  Description of Artificial Sequence: Synthetic oligonucleotide
  Sense strand starting at position 1807 of SEQ ID NO: 1561870
ccuguaaggucagcuuuga

SEQ ID NO: 1704478 - RNA, 19 nt, Artificial Sequence
  Description of Artificial Sequence: Synthetic oligonucleotide
  Antisense strand to SEQ ID NO: 1704477
ucaaagcugaccuuacagg

SEQ ID NO: 1704479 - RNA, 19 nt, Artificial Sequence
  Description of Artificial Sequence: Synthetic oligonucleotide
  Sense strand starting at position 1811 of SEQ ID NO: 1561870
uaaggucagcuuugagaca

SEQ ID NO: 1704480 - RNA, 19 nt, Artificial Sequence
  Description of Artificial Sequence: Synthetic oligonucleotide
  Antisense strand to SEQ ID NO: 1704479
ugucucaaagcugaccuua

SEQ ID NO: 1704481 - RNA, 19 nt, Artificial Sequence
  Description of Artificial Sequence: Synthetic oligonucleotide
  Sense strand starting at position 1855 of SEQ ID NO: 1561870
cuuugcccuguuuaggaaa

SEQ ID NO: 1704482 - RNA, 19 nt, Artificial Sequence
  Description of Artificial Sequence: Synthetic oligonucleotide
  Antisense strand to SEQ ID NO: 1704481
uuuccuaaacagggcaaag

SEQ ID NO: 1704483 - RNA, 19 nt, Artificial Sequence
  Description of Artificial Sequence: Synthetic oligonucleotide
  Sense strand starting at position 1966 of SEQ ID NO: 1561870
ccauguuucccgcaggaag

SEQ ID NO: 1704484 - RNA, 19 nt, Artificial Sequence
  Description of Artificial Sequence: Synthetic oligonucleotide
  Antisense strand to SEQ ID NO: 1704483
cuuccugcgggaaacaugg

SEQ ID NO: 1704485 - RNA, 19 nt, Artificial Sequence
  Description of Artificial Sequence: Synthetic oligonucleotide
  Sense strand starting at position 2040 of SEQ ID NO: 1561870
uguacugaguuccugguau

SEQ ID NO: 1704486 - RNA, 19 nt, Artificial Sequence
  Description of Artificial Sequence: Synthetic oligonucleotide
  Antisense strand to SEQ ID NO: 1704485
auaccaggaacucaguaca

SEQ ID NO: 1704487 - RNA, 19 nt, Artificial Sequence
  Description of Artificial Sequence: Synthetic oligonucleotide
  Sense strand starting at position 2170 of SEQ ID NO: 1561870
cgccauauuuaaucuacgu

SEQ ID NO: 1704488 - RNA, 19 nt, Artificial Sequence
  Description of Artificial Sequence: Synthetic oligonucleotide
  Antisense strand to SEQ ID NO: 1704487
acguagauuaaauauggcg

SEQ ID NO: 1704489 - RNA, 19 nt, Artificial Sequence
  Description of Artificial Sequence: Synthetic oligonucleotide
  Sense strand starting at position 2177 of SEQ ID NO: 1561870
uuuaaucuacgucgaaacu

SEQ ID NO: 1704490 - RNA, 19 nt, Artificial Sequence
  Description of Artificial Sequence: Synthetic oligonucleotide
  Antisense strand to SEQ ID NO: 1704489
aguuucgacguagauuaaa

SEQ ID NO: 1704491 - RNA, 19 nt, Artificial Sequence
  Description of Artificial Sequence: Synthetic oligonucleotide
  Sense strand starting at position 2178 of SEQ ID NO: 1561870
uuaaucuacgucgaaacuu

SEQ ID NO: 1704492 - RNA, 19 nt, Artificial Sequence
  Description of Artificial Sequence: Synthetic oligonucleotide
  Antisense strand to SEQ ID NO: 1704491
aaguuucgacguagauuaa

SEQ ID NO: 1704493 - RNA, 19 nt, Artificial Sequence
  Description of Artificial Sequence: Synthetic oligonucleotide
  Sense strand starting at position 2220 of SEQ ID NO: 1561870
uguagcgucauguuuauca

SEQ ID NO: 1704494 - RNA, 19 nt, Artificial Sequence
  Description of Artificial Sequence: Synthetic oligonucleotide
  Antisense strand to SEQ ID NO: 1704493
ugauaaacaugacgcuaca

SEQ ID NO: 1704495 - RNA, 19 nt, Artificial Sequence
  Description of Artificial Sequence: Synthetic oligonucleotide
  Sense strand starting at position 2222 of SEQ ID NO: 1561870
uagcgucauguuuaucaga

SEQ ID NO: 1704496 - RNA, 19 nt, Artificial Sequence
  Description of Artificial Sequence: Synthetic oligonucleotide
  Antisense strand to SEQ ID NO: 1704495
ucugauaaacaugacgcua

SEQ ID NO: 1704497 - RNA, 19 nt, Artificial Sequence
  Description of Artificial Sequence: Synthetic oligonucleotide
  Sense strand starting at position 2229 of SEQ ID NO: 1561870
auguuuaucagacgaggac

SEQ ID NO: 1704498 - RNA, 19 nt, Artificial Sequence
  Description of Artificial Sequence: Synthetic oligonucleotide
  Antisense strand to SEQ ID NO: 1704497
guccucgucugauaaacau

SEQ ID NO: 1704499 - RNA, 19 nt, Artificial Sequence
  Description of Artificial Sequence: Synthetic oligonucleotide
  Sense strand starting at position 2254 of SEQ ID NO: 1561870
uuaacaagcgauugagaga

SEQ ID NO: 1704500 - RNA, 19 nt, Artificial Sequence
  Description of Artificial Sequence: Synthetic oligonucleotide
  Antisense strand to SEQ ID NO: 1704499
ucucucaaucgcuuguuaa

SEQ ID NO: 1704501 - RNA, 19 nt, Artificial Sequence
  Description of Artificial Sequence: Synthetic oligonucleotide
  Sense strand starting at position 2300 of SEQ ID NO: 1561870
ugugucaaugcguuuguua

SEQ ID NO: 1704502 - RNA, 19 nt, Artificial Sequence
  Description of Artificial Sequence: Synthetic oligonucleotide
  Antisense strand to SEQ ID NO: 1704501
uaacaaacgcauugacaca

SEQ ID NO: 1704503 - RNA, 19 nt, Artificial Sequence
  Description of Artificial Sequence: Synthetic oligonucleotide
  Sense strand starting at position 2301 of SEQ ID NO: 1561870
gugucaaugcguuuguuau

SEQ ID NO: 1704504 - RNA, 19 nt, Artificial Sequence
  Description of Artificial Sequence: Synthetic oligonucleotide
  Antisense strand to SEQ ID NO: 1704503
auaacaaacgcauugacac

SEQ ID NO: 1704505 - RNA, 19 nt, Artificial Sequence
  Description of Artificial Sequence: Synthetic oligonucleotide
  Sense strand starting at position 2337 of SEQ ID NO: 1561870
acugaauaccuguauguca

SEQ ID NO: 1704506 - RNA, 19 nt, Artificial Sequence
  Description of Artificial Sequence: Synthetic oligonucleotide
  Antisense strand to SEQ ID NO: 1704505
ugacauacagguauucagu

SEQ ID NO: 1704507 - RNA, 19 nt, Artificial Sequence
  Description of Artificial Sequence: Synthetic oligonucleotide
  Sense strand starting at position 2354 of SEQ ID NO: 1561870
caggcucucgaggaauaca

SEQ ID NO: 1704508 - RNA, 19 nt, Artificial Sequence
  Description of Artificial Sequence: Synthetic oligonucleotide
  Antisense strand to SEQ ID NO: 1704507
uguauuccucgagagccug

SEQ ID NO: 1704509 - RNA, 19 nt, Artificial Sequence
  Description of Artificial Sequence: Synthetic oligonucleotide
  Sense strand starting at position 2357 of SEQ ID NO: 1561870
gcucucgaggaauacagua

SEQ ID NO: 1704510 - RNA, 19 nt, Artificial Sequence
  Description of Artificial Sequence: Synthetic oligonucleotide
  Antisense strand to SEQ ID NO: 1704509
uacuguauuccucgagagc

SEQ ID NO: 1704511 - RNA, 19 nt, Artificial Sequence
  Description of Artificial Sequence: Synthetic oligonucleotide
  Sense strand starting at position 2505 of SEQ ID NO: 1561870
uagugugucccggacuuga

SEQ ID NO: 1704512 - RNA, 19 nt, Artificial Sequence
  Description of Artificial Sequence: Synthetic oligonucleotide
  Antisense strand to SEQ ID NO: 1704511
ucaaguccgggacacacua

SEQ ID NO: 1704513 - RNA, 19 nt, Artificial Sequence
  Description of Artificial Sequence: Synthetic oligonucleotide
  Sense strand starting at position 2594 of SEQ ID NO: 1561870
ucagacugauccuuaaagu

SEQ ID NO: 1704514 - RNA, 19 nt, Artificial Sequence
  Description of Artificial Sequence: Synthetic oligonucleotide
  Antisense strand to SEQ ID NO: 1704513
acuuuaaggaucagucuga

SEQ ID NO: 1704515 - RNA, 19 nt, Artificial Sequence
  Description of Artificial Sequence: Synthetic oligonucleotide
  Sense strand starting at position 3213 of SEQ ID NO: 1561870
cccgcucuucuggaaguau

SEQ ID NO: 1704516 - RNA, 19 nt, Artificial Sequence
  Description of Artificial Sequence: Synthetic oligonucleotide
  Antisense strand to SEQ ID NO: 1704515
auacuuccagaagagcggg

SEQ ID NO: 1704517 - RNA, 19 nt, Artificial Sequence
  Description of Artificial Sequence: Synthetic oligonucleotide
  Sense strand starting at position 3280 of SEQ ID NO: 1561870
aggcuugugagucauacuu

SEQ ID NO: 1704518 - RNA, 19 nt, Artificial Sequence
  Description of Artificial Sequence: Synthetic oligonucleotide
  Antisense strand to SEQ ID NO: 1704517
aaguaugacucacaagccu

SEQ ID NO: 1704519 - RNA, 19 nt, Artificial Sequence
  Description of Artificial Sequence: Synthetic oligonucleotide
  Sense strand starting at position 3390 of SEQ ID NO: 1561870
uagcuagguucucugugau

SEQ ID NO: 1704520 - RNA, 19 nt, Artificial Sequence
  Description of Artificial Sequence: Synthetic oligonucleotide
  Antisense strand to SEQ ID NO: 1704519
aucacagagaaccuagcua

SEQ ID NO: 1704521 - RNA, 19 nt, Artificial Sequence
  Description of Artificial Sequence: Synthetic oligonucleotide
  Sense strand starting at position 3393 of SEQ ID NO: 1561870
cuagguucucugugauaag

SEQ ID NO: 1704522 - RNA, 19 nt, Artificial Sequence
  Description of Artificial Sequence: Synthetic oligonucleotide
  Antisense strand to SEQ ID NO: 1704521
cuuaucacagagaaccuag

SEQ ID NO: 1704523 - RNA, 19 nt, Artificial Sequence
  Description of Artificial Sequence: Synthetic oligonucleotide
  Sense strand starting at position 3407 of SEQ ID NO: 1561870
auaaguuccuccuucguau

SEQ ID NO: 1704524 - RNA, 19 nt, Artificial Sequence
  Description of Artificial Sequence: Synthetic oligonucleotide
  Antisense strand to SEQ ID NO: 1704523
auacgaaggaggaacuuau

SEQ ID NO: 1704525 - RNA, 19 nt, Artificial Sequence
  Description of Artificial Sequence: Synthetic oligonucleotide
  Sense strand starting at position 3410 of SEQ ID NO: 1561870
aguuccuccuucguauaua

SEQ ID NO: 1704526 - RNA, 19 nt, Artificial Sequence
  Description of Artificial Sequence: Synthetic oligonucleotide
  Antisense strand to SEQ ID NO: 1704525
uauauacgaaggaggaacu

SEQ ID NO: 1704527 - RNA, 19 nt, Artificial Sequence
  Description of Artificial Sequence: Synthetic oligonucleotide
  Sense strand starting at position 3518 of SEQ ID NO: 1561870
auccuuuaggugcgacauu

SEQ ID NO: 1704528 - RNA, 19 nt, Artificial Sequence
  Description of Artificial Sequence: Synthetic oligonucleotide
  Antisense strand to SEQ ID NO: 1704527
aaugucgcaccuaaaggau

SEQ ID NO: 1704529 - RNA, 19 nt, Artificial Sequence
  Description of Artificial Sequence: Synthetic oligonucleotide
  Sense strand starting at position 3561 of SEQ ID NO: 1561870
agauuaaacuagguaaugu

SEQ ID NO: 1704530 - RNA, 19 nt, Artificial Sequence
  Description of Artificial Sequence: Synthetic oligonucleotide
  Antisense strand to SEQ ID NO: 1704529
acauuaccuaguuuaaucu

SEQ ID NO: 1704531 - RNA, 19 nt, Artificial Sequence
  Description of Artificial Sequence: Synthetic oligonucleotide
  Sense strand starting at position 3569 of SEQ ID NO: 1561870
cuagguaauguguaagagu

SEQ ID NO: 1704532 - RNA, 19 nt, Artificial Sequence
  Description of Artificial Sequence: Synthetic oligonucleotide
  Antisense strand to SEQ ID NO: 1704531
acucuuacacauuaccuag

SEQ ID NO: 1704533 - RNA, 19 nt, Artificial Sequence
  Description of Artificial Sequence: Synthetic oligonucleotide
  Sense strand starting at position 272 of SEQ ID NO: 1561871
augaaacacuuagaagagu

SEQ ID NO: 1704534 - RNA, 19 nt, Artificial Sequence
  Description of Artificial Sequence: Synthetic oligonucleotide
  Antisense strand to SEQ ID NO: 1704533
acucuucuaaguguuucau

SEQ ID NO: 1704535 - RNA, 19 nt, Artificial Sequence
  Description of Artificial Sequence: Synthetic oligonucleotide
  Sense strand starting at position 507 of SEQ ID NO: 1561871
cggcuaauucgugauguaa

SEQ ID NO: 1704536 - RNA, 19 nt, Artificial Sequence
  Description of Artificial Sequence: Synthetic oligonucleotide
  Antisense strand to SEQ ID NO: 1704535
uuacaucacgaauuagccg

SEQ ID NO: 1704537 - RNA, 19 nt, Artificial Sequence
  Description of Artificial Sequence: Synthetic oligonucleotide
  Sense strand starting at position 860 of SEQ ID NO: 1561871
gcucgacugguuuaauuau

SEQ ID NO: 1704538 - RNA, 19 nt, Artificial Sequence
  Description of Artificial Sequence: Synthetic oligonucleotide
  Antisense strand to SEQ ID NO: 1704537
auaauuaaaccagucgagc

SEQ ID NO: 1704539 - RNA, 19 nt, Artificial Sequence
  Description of Artificial Sequence: Synthetic oligonucleotide
  Sense strand starting at position 1188 of SEQ ID NO: 1561871
augcuaguuuaauugcuau

SEQ ID NO: 1704540 - RNA, 19 nt, Artificial Sequence
  Description of Artificial Sequence: Synthetic oligonucleotide
  Antisense strand to SEQ ID NO: 1704539
auagcaauuaaacuagcau

SEQ ID NO: 1704541 - RNA, 19 nt, Artificial Sequence
  Description of Artificial Sequence: Synthetic oligonucleotide
  Sense strand starting at position 1200 of SEQ ID NO: 1561871
uugcuauaccuuuauguua

SEQ ID NO: 1704542 - RNA, 19 nt, Artificial Sequence
  Description of Artificial Sequence: Synthetic oligonucleotide
  Antisense strand to SEQ ID NO: 1704541
uaacauaaagguauagcaa

SEQ ID NO: 1704543 - RNA, 19 nt, Artificial Sequence
  Description of Artificial Sequence: Synthetic oligonucleotide
  Sense strand starting at position 1227 of SEQ ID NO: 1561871
ggugguucuggagagcuaa

SEQ ID NO: 1704544 - RNA, 19 nt, Artificial Sequence
  Description of Artificial Sequence: Synthetic oligonucleotide
  Antisense strand to SEQ ID NO: 1704543
uuagcucuccagaaccacc

SEQ ID NO: 1704545 - RNA, 19 nt, Artificial Sequence
  Description of Artificial Sequence: Synthetic oligonucleotide
  Sense strand starting at position 1418 of SEQ ID NO: 1561871
gcaggucugcguuccugua

SEQ ID NO: 1704546 - RNA, 19 nt, Artificial Sequence
  Description of Artificial Sequence: Synthetic oligonucleotide
  Antisense strand to SEQ ID NO: 1704545
uacaggaacgcagaccugc

SEQ ID NO: 1704547 - RNA, 19 nt, Artificial Sequence
  Description of Artificial Sequence: Synthetic oligonucleotide
  Sense strand starting at position 1437 of SEQ ID NO: 1561871
cugucagacuuagccagaa

SEQ ID NO: 1704548 - RNA, 19 nt, Artificial Sequence
  Description of Artificial Sequence: Synthetic oligonucleotide
  Antisense strand to SEQ ID NO: 1704547
uucuggcuaagucugacag

SEQ ID NO: 1704549 - RNA, 19 nt, Artificial Sequence
  Description of Artificial Sequence: Synthetic oligonucleotide
  Sense strand starting at position 1614 of SEQ ID NO: 1561871
aagagagauuaagacugua

SEQ ID NO: 1704550 - RNA, 19 nt, Artificial Sequence
  Description of Artificial Sequence: Synthetic oligonucleotide
  Antisense strand to SEQ ID NO: 1704549
uacagucuuaaucucucuu

SEQ ID NO: 1704551 - RNA, 19 nt, Artificial Sequence
  Description of Artificial Sequence: Synthetic oligonucleotide
  Sense strand starting at position 1617 of SEQ ID NO: 1561871
agagauuaagacuguacga

SEQ ID NO: 1704552 - RNA, 19 nt, Artificial Sequence
  Description of Artificial Sequence: Synthetic oligonucleotide
  Antisense strand to SEQ ID NO: 1704551
ucguacagucuuaaucucu

SEQ ID NO: 1704553 - RNA, 19 nt, Artificial Sequence
  Description of Artificial Sequence: Synthetic oligonucleotide
  Sense strand starting at position 1772 of SEQ ID NO: 1561871
gacccuggauguucuauga

SEQ ID NO: 1704554 - RNA, 19 nt, Artificial Sequence
  Description of Artificial Sequence: Synthetic oligonucleotide
  Antisense strand to SEQ ID NO: 1704553
ucauagaacauccaggguc

SEQ ID NO: 1704555 - RNA, 19 nt, Artificial Sequence
  Description of Artificial Sequence: Synthetic oligonucleotide
  Sense strand starting at position 2121 of SEQ ID NO: 1561871
auccaaacauaaggagaau

SEQ ID NO: 1704556 - RNA, 19 nt, Artificial Sequence
  Description of Artificial Sequence: Synthetic oligonucleotide
  Antisense strand to SEQ ID NO: 1704555
auucuccuuauguuuggau

SEQ ID NO: 1704557 - RNA, 19 nt, Artificial Sequence
  Description of Artificial Sequence: Synthetic oligonucleotide
  Sense strand starting at position 2406 of SEQ ID NO: 1561871
agguuuaguguugagaaug

SEQ ID NO: 1704558 - RNA, 19 nt, Artificial Sequence
  Description of Artificial Sequence: Synthetic oligonucleotide
  Antisense strand to SEQ ID NO: 1704557
cauucucaacacuaaaccu

SEQ ID NO: 1704559 - RNA, 19 nt, Artificial Sequence
  Description of Artificial Sequence: Synthetic oligonucleotide
  Sense strand starting at position 2411 of SEQ ID NO: 1561871
uaguguugagaaugauaaa

SEQ ID NO: 1704560 - RNA, 19 nt, Artificial Sequence
  Description of Artificial Sequence: Synthetic oligonucleotide
  Antisense strand to SEQ ID NO: 1704559
uuuaucauucucaacacua

SEQ ID NO: 1704561 - RNA, 19 nt, Artificial Sequence
  Description of Artificial Sequence: Synthetic oligonucleotide
  Sense strand starting at position 2423 of SEQ ID NO: 1561871
ugauaaaccguauaauucu

SEQ ID NO: 1704562 - RNA, 19 nt, Artificial Sequence
  Description of Artificial Sequence: Synthetic oligonucleotide
  Antisense strand to SEQ ID NO: 1704561
agaauuauacgguuuauca

SEQ ID NO: 1704563 - RNA, 19 nt, Artificial Sequence
  Description of Artificial Sequence: Synthetic oligonucleotide
  Sense strand starting at position 2568 of SEQ ID NO: 1561871
aacgacuaagcuggucaaa

SEQ ID NO: 1704564 - RNA, 19 nt, Artificial Sequence
  Description of Artificial Sequence: Synthetic oligonucleotide
  Antisense strand to SEQ ID NO: 1704563
uuugaccagcuuagucguu

SEQ ID NO: 1704565 - RNA, 19 nt, Artificial Sequence
  Description of Artificial Sequence: Synthetic oligonucleotide
  Sense strand starting at position 2652 of SEQ ID NO: 1561871
gggcguucccggcagaaag

SEQ ID NO: 1704566 - RNA, 19 nt, Artificial Sequence
  Description of Artificial Sequence: Synthetic oligonucleotide
  Antisense strand to SEQ ID NO: 1704565
cuuucugccgggaacgccc

SEQ ID NO: 1704567 - RNA, 19 nt, Artificial Sequence
  Description of Artificial Sequence: Synthetic oligonucleotide
  Sense strand starting at position 2653 of SEQ ID NO: 1561871
ggcguucccggcagaaaga

SEQ ID NO: 1704568 - RNA, 19 nt, Artificial Sequence
  Description of Artificial Sequence: Synthetic oligonucleotide
  Antisense strand to SEQ ID NO: 1704567
ucuuucugccgggaacgcc

SEQ ID NO: 1704569 - RNA, 19 nt, Artificial Sequence
  Description of Artificial Sequence: Synthetic oligonucleotide
  Sense strand starting at position 2666 of SEQ ID NO: 1561871
gaaagaacugcuugugcaa

SEQ ID NO: 1704570 - RNA, 19 nt, Artificial Sequence
  Description of Artificial Sequence: Synthetic oligonucleotide
  Antisense strand to SEQ ID NO: 1704569
uugcacaagcaguucuuuc

SEQ ID NO: 1704571 - RNA, 19 nt, Artificial Sequence
  Description of Artificial Sequence: Synthetic oligonucleotide
  Sense strand starting at position 2709 of SEQ ID NO: 1561871
ugccaucgccauuaagaug

SEQ ID NO: 1704572 - RNA, 19 nt, Artificial Sequence
  Description of Artificial Sequence: Synthetic oligonucleotide
  Antisense strand to SEQ ID NO: 1704571
caucuuaauggcgauggca

SEQ ID NO: 1704573 - RNA, 19 nt, Artificial Sequence
  Description of Artificial Sequence: Synthetic oligonucleotide
  Sense strand starting at position 2714 of SEQ ID NO: 1561871
ucgccauuaagaugggaaa

SEQ ID NO: 1704574 - RNA, 19 nt, Artificial Sequence
  Description of Artificial Sequence: Synthetic oligonucleotide
  Antisense strand to SEQ ID NO: 1704573
uuucccaucuuaauggcga

SEQ ID NO: 1704575 - RNA, 19 nt, Artificial Sequence
  Description of Artificial Sequence: Synthetic oligonucleotide
  Sense strand starting at position 2792 of SEQ ID NO: 1561871
ccuuuagagguguguggau

SEQ ID NO: 1704576 - RNA, 19 nt, Artificial Sequence
  Description of Artificial Sequence: Synthetic oligonucleotide
  Antisense strand to SEQ ID NO: 1704575
auccacacaccucuaaagg

SEQ ID NO: 1704577 - RNA, 19 nt, Artificial Sequence
  Description of Artificial Sequence: Synthetic oligonucleotide
  Sense strand starting at position 2801 of SEQ ID NO: 1561871
guguguggauuugugaaca

SEQ ID NO: 1704578 - RNA, 19 nt, Artificial Sequence
  Description of Artificial Sequence: Synthetic oligonucleotide
  Antisense strand to SEQ ID NO: 1704577
uguucacaaauccacacac

SEQ ID NO: 1704579 - RNA, 19 nt, Artificial Sequence
  Description of Artificial Sequence: Synthetic oligonucleotide
  Sense strand starting at position 2855 of SEQ ID NO: 1561871
ugcagagagcucugacagu

SEQ ID NO: 1704580 - RNA, 19 nt, Artificial Sequence
  Description of Artificial Sequence: Synthetic oligonucleotide
  Antisense strand to SEQ ID NO: 1704579
acugucagagcucucugca

SEQ ID NO: 1704581 - RNA, 19 nt, Artificial Sequence
  Description of Artificial Sequence: Synthetic oligonucleotide
  Sense strand starting at position 2884 of SEQ ID NO: 1561871
auuuauguuugucuucgaa

SEQ ID NO: 1704582 - RNA, 19 nt, Artificial Sequence
  Description of Artificial Sequence: Synthetic oligonucleotide
  Antisense strand to SEQ ID NO: 1704581
uucgaagacaaacauaaau

SEQ ID NO: 1704583 - RNA, 19 nt, Artificial Sequence
  Description of Artificial Sequence: Synthetic oligonucleotide
  Sense strand starting at position 2893 of SEQ ID NO: 1561871
ugucuucgaaucuaggaua

SEQ ID NO: 1704584 - RNA, 19 nt, Artificial Sequence
  Description of Artificial Sequence: Synthetic oligonucleotide
  Antisense strand to SEQ ID NO: 1704583
uauccuagauucgaagaca

SEQ ID NO: 1704585 - RNA, 19 nt, Artificial Sequence
  Description of Artificial Sequence: Synthetic oligonucleotide
  Sense strand starting at position 3293 of SEQ ID NO: 1561871
ugagaauucucuuugguca

SEQ ID NO: 1704586 - RNA, 19 nt, Artificial Sequence
  Description of Artificial Sequence: Synthetic oligonucleotide
  Antisense strand to SEQ ID NO: 1704585
ugaccaaagagaauucuca

SEQ ID NO: 1704587 - RNA, 19 nt, Artificial Sequence
  Description of Artificial Sequence: Synthetic oligonucleotide
  Sense strand starting at position 3294 of SEQ ID NO: 1561871
gagaauucucuuuggucag

SEQ ID NO: 1704588 - RNA, 19 nt, Artificial Sequence
  Description of Artificial Sequence: Synthetic oligonucleotide
  Antisense strand to SEQ ID NO: 1704587
cugaccaaagagaauucuc

SEQ ID NO: 1704589 - RNA, 19 nt, Artificial Sequence
  Description of Artificial Sequence: Synthetic oligonucleotide
  Sense strand starting at position 3296 of SEQ ID NO: 1561871
gaauucucuuuggucagau

SEQ ID NO: 1704590 - RNA, 19 nt, Artificial Sequence
  Description of Artificial Sequence: Synthetic oligonucleotide
  Antisense strand to SEQ ID NO: 1704589
aucugaccaaagagaauuc

SEQ ID NO: 1704591 - RNA, 19 nt, Artificial Sequence
  Description of Artificial Sequence: Synthetic oligonucleotide
  Sense strand starting at position 3297 of SEQ ID NO: 1561871
aauucucuuuggucagaug

SEQ ID NO: 1704592 - RNA, 19 nt, Artificial Sequence
  Description of Artificial Sequence: Synthetic oligonucleotide
  Antisense strand to SEQ ID NO: 1704591
caucugaccaaagagaauu

SEQ ID NO: 1704593 - RNA, 19 nt, Artificial Sequence
  Description of Artificial Sequence: Synthetic oligonucleotide
  Sense strand starting at position 3298 of SEQ ID NO: 1561871
auucucuuuggucagauga

SEQ ID NO: 1704594 - RNA, 19 nt, Artificial Sequence
  Description of Artificial Sequence: Synthetic oligonucleotide
  Antisense strand to SEQ ID NO: 1704593
ucaucugaccaaagagaau

SEQ ID NO: 1704595 - RNA, 19 nt, Artificial Sequence
  Description of Artificial Sequence: Synthetic oligonucleotide
  Sense strand starting at position 3644 of SEQ ID NO: 1561871
ugcagaauugggugaauac

SEQ ID NO: 1704596 - RNA, 19 nt, Artificial Sequence
  Description of Artificial Sequence: Synthetic oligonucleotide
  Antisense strand to SEQ ID NO: 1704595
guauucacccaauucugca

SEQ ID NO: 1704597 - RNA, 19 nt, Artificial Sequence
  Description of Artificial Sequence: Synthetic oligonucleotide
  Sense strand starting at position 3656 of SEQ ID NO: 1561871
ugaauacaguuugcaguua

SEQ ID NO: 1704598 - RNA, 19 nt, Artificial Sequence
  Description of Artificial Sequence: Synthetic oligonucleotide
  Antisense strand to SEQ ID NO: 1704597
uaacugcaaacuguauuca

SEQ ID NO: 1704599 - RNA, 19 nt, Artificial Sequence
  Description of Artificial Sequence: Synthetic oligonucleotide
  Sense strand starting at position 3691 of SEQ ID NO: 1561871
gaaguauucucacugaaga

SEQ ID NO: 1704600 - RNA, 19 nt, Artificial Sequence
  Description of Artificial Sequence: Synthetic oligonucleotide
  Antisense strand to SEQ ID NO: 1704599
ucuucagugagaauacuuc

SEQ ID NO: 1704601 - RNA, 19 nt, Artificial Sequence
  Description of Artificial Sequence: Synthetic oligonucleotide
  Sense strand starting at position 3692 of SEQ ID NO: 1561871
aaguauucucacugaagag

SEQ ID NO: 1704602 - RNA, 19 nt, Artificial Sequence
  Description of Artificial Sequence: Synthetic oligonucleotide
  Antisense strand to SEQ ID NO: 1704601
cucuucagugagaauacuu

SEQ ID NO: 1704603 - RNA, 19 nt, Artificial Sequence
  Description of Artificial Sequence: Synthetic oligonucleotide
  Sense strand starting at position 3748 of SEQ ID NO: 1561871
ugggaucuuucugccugau

SEQ ID NO: 1704604 - RNA, 19 nt, Artificial Sequence
  Description of Artificial Sequence: Synthetic oligonucleotide
  Antisense strand to SEQ ID NO: 1704603
aucaggcagaaagauccca

SEQ ID NO: 1704605 - RNA, 19 nt, Artificial Sequence
  Description of Artificial Sequence: Synthetic oligonucleotide
  Sense strand starting at position 3750 of SEQ ID NO: 1561871
ggaucuuucugccugauau

SEQ ID NO: 1704606 - RNA, 19 nt, Artificial Sequence
  Description of Artificial Sequence: Synthetic oligonucleotide
  Antisense strand to SEQ ID NO: 1704605
auaucaggcagaaagaucc

SEQ ID NO: 1704607 - RNA, 19 nt, Artificial Sequence
  Description of Artificial Sequence: Synthetic oligonucleotide
  Sense strand starting at position 3751 of SEQ ID NO: 1561871
gaucuuucugccugauaug

SEQ ID NO: 1704608 - RNA, 19 nt, Artificial Sequence
  Description of Artificial Sequence: Synthetic oligonucleotide
  Antisense strand to SEQ ID NO: 1704607
cauaucaggcagaaagauc

SEQ ID NO: 1704609 - RNA, 19 nt, Artificial Sequence
  Description of Artificial Sequence: Synthetic oligonucleotide
  Sense strand starting at position 3762 of SEQ ID NO: 1561871
cugauaugcagucaguguu

SEQ ID NO: 1704610 - RNA, 19 nt, Artificial Sequence
  Description of Artificial Sequence: Synthetic oligonucleotide
  Antisense strand to SEQ ID NO: 1704609
aacacugacugcauaucag

SEQ ID NO: 1704611 - RNA, 19 nt, Artificial Sequence
  Description of Artificial Sequence: Synthetic oligonucleotide
  Sense strand starting at position 3812 of SEQ ID NO: 1561871
acuguuagagauugcagaa

SEQ ID NO: 1704612 - RNA, 19 nt, Artificial Sequence
  Description of Artificial Sequence: Synthetic oligonucleotide
  Antisense strand to SEQ ID NO: 1704611
uucugcaaucucuaacagu

SEQ ID NO: 1704613 - RNA, 19 nt, Artificial Sequence
  Description of Artificial Sequence: Synthetic oligonucleotide
  Sense strand starting at position 2379 of SEQ ID NO: 1561872
cguccaucagcgcgacaau

SEQ ID NO: 1704614 - RNA, 19 nt, Artificial Sequence
  Description of Artificial Sequence: Synthetic oligonucleotide
  Antisense strand to SEQ ID NO: 1704613
auugucgcgcugauggacg

SEQ ID NO: 1704615 - RNA, 19 nt, Artificial Sequence
  Description of Artificial Sequence: Synthetic oligonucleotide
  Sense strand starting at position 2469 of SEQ ID NO: 1561872
ccaaauaugucaggagggu

SEQ ID NO: 1704616 - RNA, 19 nt, Artificial Sequence
  Description of Artificial Sequence: Synthetic oligonucleotide
  Antisense strand to SEQ ID NO: 1704615
acccuccugacauauuugg

SEQ ID NO: 1704617 - RNA, 19 nt, Artificial Sequence
  Description of Artificial Sequence: Synthetic oligonucleotide
  Sense strand starting at position 2473 of SEQ ID NO: 1561872
auaugucaggaggguucaa

SEQ ID NO: 1704618 - RNA, 19 nt, Artificial Sequence
  Description of Artificial Sequence: Synthetic oligonucleotide
  Antisense strand to SEQ ID NO: 1704617
uugaacccuccugacauau

SEQ ID NO: 1704619 - RNA, 19 nt, Artificial Sequence
  Description of Artificial Sequence: Synthetic oligonucleotide
  Sense strand starting at position 2513 of SEQ ID NO: 1561872
ggaaguugugcgcgcugau

SEQ ID NO: 1704620 - RNA, 19 nt, Artificial Sequence
  Description of Artificial Sequence: Synthetic oligonucleotide
  Antisense strand to SEQ ID NO: 1704619
aucagcgcgcacaacuucc

SEQ ID NO: 1704621 - RNA, 19 nt, Artificial Sequence
  Description of Artificial Sequence: Synthetic oligonucleotide
  Sense strand starting at position 2514 of SEQ ID NO: 1561872
gaaguugugcgcgcugauu

SEQ ID NO: 1704622 - RNA, 19 nt, Artificial Sequence
  Description of Artificial Sequence: Synthetic oligonucleotide
  Antisense strand to SEQ ID NO: 1704621
aaucagcgcgcacaacuuc

SEQ ID NO: 1704623 - RNA, 19 nt, Artificial Sequence
  Description of Artificial Sequence: Synthetic oligonucleotide
  Sense strand starting at position 2594 of SEQ ID NO: 1561872
ccgcgugguguuugggaaa

SEQ ID NO: 1704624 - RNA, 19 nt, Artificial Sequence
  Description of Artificial Sequence: Synthetic oligonucleotide
  Antisense strand to SEQ ID NO: 1704623
uuucccaaacaccacgcgg

SEQ ID NO: 1704625 - RNA, 19 nt, Artificial Sequence
  Description of Artificial Sequence: Synthetic oligonucleotide
  Sense strand starting at position 2596 of SEQ ID NO: 1561872
gcgugguguuugggaaaua

SEQ ID NO: 1704626 - RNA, 19 nt, Artificial Sequence
  Description of Artificial Sequence: Synthetic oligonucleotide
  Antisense strand to SEQ ID NO: 1704625
uauuucccaaacaccacgc

SEQ ID NO: 1704627 - RNA, 19 nt, Artificial Sequence
  Description of Artificial Sequence: Synthetic oligonucleotide
  Sense strand starting at position 2597 of SEQ ID NO: 1561872
cgugguguuugggaaauaa

SEQ ID NO: 1704628 - RNA, 19 nt, Artificial Sequence
  Description of Artificial Sequence: Synthetic oligonucleotide
  Antisense strand to SEQ ID NO: 1704627
uuauuucccaaacaccacg

SEQ ID NO: 1704629 - RNA, 19 nt, Artificial Sequence
  Description of Artificial Sequence: Synthetic oligonucleotide
  Sense strand starting at position 2801 of SEQ ID NO: 1561872
uagagaagguuucuuucga

SEQ ID NO: 1704630 - RNA, 19 nt, Artificial Sequence
  Description of Artificial Sequence: Synthetic oligonucleotide
  Antisense strand to SEQ ID NO: 1704629
ucgaaagaaaccuucucua

SEQ ID NO: 1704631 - RNA, 19 nt, Artificial Sequence
  Description of Artificial Sequence: Synthetic oligonucleotide
  Sense strand starting at position 2802 of SEQ ID NO: 1561872
agagaagguuucuuucgag

SEQ ID NO: 1704632 - RNA, 19 nt, Artificial Sequence
  Description of Artificial Sequence: Synthetic oligonucleotide
  Antisense strand to SEQ ID NO: 1704631
cucgaaagaaaccuucucu

SEQ ID NO: 1704633 - RNA, 19 nt, Artificial Sequence
  Description of Artificial Sequence: Synthetic oligonucleotide
  Sense strand starting at position 2805 of SEQ ID NO: 1561872
gaagguuucuuucgaguuu

SEQ ID NO: 1704634 - RNA, 19 nt, Artificial Sequence
  Description of Artificial Sequence: Synthetic oligonucleotide
  Antisense strand to SEQ ID NO: 1704633
aaacucgaaagaaaccuuc

SEQ ID NO: 1704635 - RNA, 19 nt, Artificial Sequence
  Description of Artificial Sequence: Synthetic oligonucleotide
  Sense strand starting at position 2811 of SEQ ID NO: 1561872
uucuuucgaguuugagaag

SEQ ID NO: 1704636 - RNA, 19 nt, Artificial Sequence
  Description of Artificial Sequence: Synthetic oligonucleotide
  Antisense strand to SEQ ID NO: 1704635
cuucucaaacucgaaagaa

SEQ ID NO: 1704637 - RNA, 19 nt, Artificial Sequence
  Description of Artificial Sequence: Synthetic oligonucleotide
  Sense strand starting at position 2814 of SEQ ID NO: 1561872
uuucgaguuugagaaggaa

SEQ ID NO: 1704638 - RNA, 19 nt, Artificial Sequence
  Description of Artificial Sequence: Synthetic oligonucleotide
  Antisense strand to SEQ ID NO: 1704637
uuccuucucaaacucgaaa

SEQ ID NO: 1704639 - RNA, 19 nt, Artificial Sequence
  Description of Artificial Sequence: Synthetic oligonucleotide
  Sense strand starting at position 2817 of SEQ ID NO: 1561872
cgaguuugagaaggaauug

SEQ ID NO: 1704640 - RNA, 19 nt, Artificial Sequence
  Description of Artificial Sequence: Synthetic oligonucleotide
  Antisense strand to SEQ ID NO: 1704639
caauuccuucucaaacucg

SEQ ID NO: 1704641 - RNA, 19 nt, Artificial Sequence
  Description of Artificial Sequence: Synthetic oligonucleotide
  Sense strand starting at position 2842 of SEQ ID NO: 1561872
ccuucucagucucccgaaa

SEQ ID NO: 1704642 - RNA, 19 nt, Artificial Sequence
  Description of Artificial Sequence: Synthetic oligonucleotide
  Antisense strand to SEQ ID NO: 1704641
uuucgggagacugagaagg

SEQ ID NO: 1704643 - RNA, 19 nt, Artificial Sequence
  Description of Artificial Sequence: Synthetic oligonucleotide
  Sense strand starting at position 2906 of SEQ ID NO: 1561872
acgugaauuucugaacuuu

SEQ ID NO: 1704644 - RNA, 19 nt, Artificial Sequence
  Description of Artificial Sequence: Synthetic oligonucleotide
  Antisense strand to SEQ ID NO: 1704643
aaaguucagaaauucacgu

SEQ ID NO: 1704645 - RNA, 19 nt, Artificial Sequence
  Description of Artificial Sequence: Synthetic oligonucleotide
  Sense strand starting at position 2994 of SEQ ID NO: 1561872
gguccaaggcucgguuaau

SEQ ID NO: 1704646 - RNA, 19 nt, Artificial Sequence
  Description of Artificial Sequence: Synthetic oligonucleotide
  Antisense strand to SEQ ID NO: 1704645
auuaaccgagccuuggacc

SEQ ID NO: 1704647 - RNA, 19 nt, Artificial Sequence
  Description of Artificial Sequence: Synthetic oligonucleotide
  Sense strand starting at position 2995 of SEQ ID NO: 1561872
guccaaggcucgguuaauc

SEQ ID NO: 1704648 - RNA, 19 nt, Artificial Sequence
  Description of Artificial Sequence: Synthetic oligonucleotide
  Antisense strand to SEQ ID NO: 1704647
gauuaaccgagccuuggac

SEQ ID NO: 1704649 - RNA, 19 nt, Artificial Sequence
  Description of Artificial Sequence: Synthetic oligonucleotide
  Sense strand starting at position 3005 of SEQ ID NO: 1561872
cgguuaauccgggucgagu

SEQ ID NO: 1704650 - RNA, 19 nt, Artificial Sequence
  Description of Artificial Sequence: Synthetic oligonucleotide
  Antisense strand to SEQ ID NO: 1704649
acucgacccggauuaaccg

SEQ ID NO: 1704651 - RNA, 19 nt, Artificial Sequence
  Description of Artificial Sequence: Synthetic oligonucleotide
  Sense strand starting at position 3231 of SEQ ID NO: 1561872
caccuuugugaaggaaauu

SEQ ID NO: 1704652 - RNA, 19 nt, Artificial Sequence
  Description of Artificial Sequence: Synthetic oligonucleotide
  Antisense strand to SEQ ID NO: 1704651
aauuuccuucacaaaggug

SEQ ID NO: 1704653 - RNA, 19 nt, Artificial Sequence
  Description of Artificial Sequence: Synthetic oligonucleotide
  Sense strand starting at position 3326 of SEQ ID NO: 1561872
caaucuguacucugaggca

SEQ ID NO: 1704654 - RNA, 19 nt, Artificial Sequence
  Description of Artificial Sequence: Synthetic oligonucleotide
  Antisense strand to SEQ ID NO: 1704653
ugccucagaguacagauug

SEQ ID NO: 1704655 - RNA, 19 nt, Artificial Sequence
  Description of Artificial Sequence: Synthetic oligonucleotide
  Sense strand starting at position 3613 of SEQ ID NO: 1561872
ugucauaugcugugaggaa

SEQ ID NO: 1704656 - RNA, 19 nt, Artificial Sequence
  Description of Artificial Sequence: Synthetic oligonucleotide
  Antisense strand to SEQ ID NO: 1704655
uuccucacagcauaugaca

SEQ ID NO: 1704657 - RNA, 19 nt, Artificial Sequence
  Description of Artificial Sequence: Synthetic oligonucleotide
  Sense strand starting at position 3614 of SEQ ID NO: 1561872
gucauaugcugugaggaaa

SEQ ID NO: 1704658 - RNA, 19 nt, Artificial Sequence
  Description of Artificial Sequence: Synthetic oligonucleotide
  Antisense strand to SEQ ID NO: 1704657
uuuccucacagcauaugac

SEQ ID NO: 1704659 - RNA, 19 nt, Artificial Sequence
  Description of Artificial Sequence: Synthetic oligonucleotide
  Sense strand starting at position 3633 of SEQ ID NO: 1561872
augucacuuuauugaaaga

SEQ ID NO: 1704660 - RNA, 19 nt, Artificial Sequence
  Description of Artificial Sequence: Synthetic oligonucleotide
  Antisense strand to SEQ ID NO: 1704659
ucuuucaauaaagugacau

SEQ ID NO: 1704661 - RNA, 19 nt, Artificial Sequence
  Description of Artificial Sequence: Synthetic oligonucleotide
  Sense strand starting at position 3666 of SEQ ID NO: 1561872
ucugcaaagcuuuguauac

SEQ ID NO: 1704662 - RNA, 19 nt, Artificial Sequence
  Description of Artificial Sequence: Synthetic oligonucleotide
  Antisense strand to SEQ ID NO: 1704661
guauacaaagcuuugcaga

SEQ ID NO: 1704663 - RNA, 19 nt, Artificial Sequence
  Description of Artificial Sequence: Synthetic oligonucleotide
  Sense strand starting at position 3713 of SEQ ID NO: 1561872
gcuuaauuccacugaaggu

SEQ ID NO: 1704664 - RNA, 19 nt, Artificial Sequence
  Description of Artificial Sequence: Synthetic oligonucleotide
  Antisense strand to SEQ ID NO: 1704663
accuucaguggaauuaagc

SEQ ID NO: 1704665 - RNA, 19 nt, Artificial Sequence
  Description of Artificial Sequence: Synthetic oligonucleotide
  Sense strand starting at position 3761 of SEQ ID NO: 1561872
aauacccuggcguagaaau

SEQ ID NO: 1704666 - RNA, 19 nt, Artificial Sequence
  Description of Artificial Sequence: Synthetic oligonucleotide
  Antisense strand to SEQ ID NO: 1704665
auuucuacgccaggguauu

SEQ ID NO: 1704667 - RNA, 19 nt, Artificial Sequence
  Description of Artificial Sequence: Synthetic oligonucleotide
  Sense strand starting at position 3763 of SEQ ID NO: 1561872
uacccuggcguagaaauua

SEQ ID NO: 1704668 - RNA, 19 nt, Artificial Sequence
  Description of Artificial Sequence: Synthetic oligonucleotide
  Antisense strand to SEQ ID NO: 1704667
uaauuucuacgccagggua

SEQ ID NO: 1704669 - RNA, 19 nt, Artificial Sequence
  Description of Artificial Sequence: Synthetic oligonucleotide
  Sense strand starting at position 3768 of SEQ ID NO: 1561872
uggcguagaaauuaaacau

SEQ ID NO: 1704670 - RNA, 19 nt, Artificial Sequence
  Description of Artificial Sequence: Synthetic oligonucleotide
  Antisense strand to SEQ ID NO: 1704669
auguuuaauuucuacgcca

SEQ ID NO: 1704671 - RNA, 19 nt, Artificial Sequence
  Description of Artificial Sequence: Synthetic oligonucleotide
  Sense strand starting at position 3794 of SEQ ID NO: 1561872
uagaguccacaugagucau

SEQ ID NO: 1704672 - RNA, 19 nt, Artificial Sequence
  Description of Artificial Sequence: Synthetic oligonucleotide
  Antisense strand to SEQ ID NO: 1704671
augacucauguggacucua

SEQ ID NO: 1704673 - RNA, 19 nt, Artificial Sequence
  Description of Artificial Sequence: Synthetic oligonucleotide
  Sense strand starting at position 3796 of SEQ ID NO: 1561872
gaguccacaugagucauaa

SEQ ID NO: 1704674 - RNA, 19 nt, Artificial Sequence
  Description of Artificial Sequence: Synthetic oligonucleotide
  Antisense strand to SEQ ID NO: 1704673
uuaugacucauguggacuc

SEQ ID NO: 1704675 - RNA, 19 nt, Artificial Sequence
  Description of Artificial Sequence: Synthetic oligonucleotide
  Sense strand starting at position 3798 of SEQ ID NO: 1561872
guccacaugagucauaagu

SEQ ID NO: 1704676 - RNA, 19 nt, Artificial Sequence
  Description of Artificial Sequence: Synthetic oligonucleotide
  Antisense strand to SEQ ID NO: 1704675
acuuaugacucauguggac

SEQ ID NO: 1704677 - RNA, 19 nt, Artificial Sequence
  Description of Artificial Sequence: Synthetic oligonucleotide
  Sense strand starting at position 3800 of SEQ ID NO: 1561872
ccacaugagucauaaguug

SEQ ID NO: 1704678 - RNA, 19 nt, Artificial Sequence
  Description of Artificial Sequence: Synthetic oligonucleotide
  Antisense strand to SEQ ID NO: 1704677
caacuuaugacucaugugg

SEQ ID NO: 1704679 - RNA, 19 nt, Artificial Sequence
  Description of Artificial Sequence: Synthetic oligonucleotide
  Sense strand starting at position 3805 of SEQ ID NO: 1561872
ugagucauaaguugugaug

SEQ ID NO: 1704680 - RNA, 19 nt, Artificial Sequence
  Description of Artificial Sequence: Synthetic oligonucleotide
  Antisense strand to SEQ ID NO: 1704679
caucacaacuuaugacuca

SEQ ID NO: 1704681 - RNA, 19 nt, Artificial Sequence
  Description of Artificial Sequence: Synthetic oligonucleotide
  Sense strand starting at position 3826 of SEQ ID NO: 1561872
gacaguuguuaggcuuaau

SEQ ID NO: 1704682 - RNA, 19 nt, Artificial Sequence
  Description of Artificial Sequence: Synthetic oligonucleotide
  Antisense strand to SEQ ID NO: 1704681
auuaagccuaacaacuguc

SEQ ID NO: 1704683 - RNA, 19 nt, Artificial Sequence
  Description of Artificial Sequence: Synthetic oligonucleotide
  Sense strand starting at position 3829 of SEQ ID NO: 1561872
aguuguuaggcuuaauuaa

SEQ ID NO: 1704684 - RNA, 19 nt, Artificial Sequence
  Description of Artificial Sequence: Synthetic oligonucleotide
  Antisense strand to SEQ ID NO: 1704683
uuaauuaagccuaacaacu

SEQ ID NO: 1704685 - RNA, 19 nt, Artificial Sequence
  Description of Artificial Sequence: Synthetic oligonucleotide
  Sense strand starting at position 3854 of SEQ ID NO: 1561872
gguuaaucagguugguuaa

SEQ ID NO: 1704686 - RNA, 19 nt, Artificial Sequence
  Description of Artificial Sequence: Synthetic oligonucleotide
  Antisense strand to SEQ ID NO: 1704685
uuaaccaaccugauuaacc

SEQ ID NO: 1704687 - RNA, 19 nt, Artificial Sequence
  Description of Artificial Sequence: Synthetic oligonucleotide
  Sense strand starting at position 3855 of SEQ ID NO: 1561872
guuaaucagguugguuaau

SEQ ID NO: 1704688 - RNA, 19 nt, Artificial Sequence
  Description of Artificial Sequence: Synthetic oligonucleotide
  Antisense strand to SEQ ID NO: 1704687
auuaaccaaccugauuaac

SEQ ID NO: 1704689 - RNA, 19 nt, Artificial Sequence
  Description of Artificial Sequence: Synthetic oligonucleotide
  Sense strand starting at position 3857 of SEQ ID NO: 1561872
uaaucagguugguuaauca

SEQ ID NO: 1704690 - RNA, 19 nt, Artificial Sequence
  Description of Artificial Sequence: Synthetic oligonucleotide
  Antisense strand to SEQ ID NO: 1704689
ugauuaaccaaccugauua

SEQ ID NO: 1704691 - RNA, 19 nt, Artificial Sequence
  Description of Artificial Sequence: Synthetic oligonucleotide
  Sense strand starting at position 3937 of SEQ ID NO: 1561872
gaaugcauauagugaaaua

SEQ ID NO: 1704692 - RNA, 19 nt, Artificial Sequence
  Description of Artificial Sequence: Synthetic oligonucleotide
  Antisense strand to SEQ ID NO: 1704691
uauuucacuauaugcauuc

SEQ ID NO: 1704693 - RNA, 19 nt, Artificial Sequence
  Description of Artificial Sequence: Synthetic oligonucleotide
  Sense strand starting at position 45 of SEQ ID NO: 1561873
ucaacuuccgcauagaaau

SEQ ID NO: 1704694 - RNA, 19 nt, Artificial Sequence
  Description of Artificial Sequence: Synthetic oligonucleotide
  Antisense strand to SEQ ID NO: 1704693
auuucuaugcggaaguuga

SEQ ID NO: 1704695 - RNA, 19 nt, Artificial Sequence
  Description of Artificial Sequence: Synthetic oligonucleotide
  Sense strand starting at position 73 of SEQ ID NO: 1561873
cugucacuguacuuaucua

SEQ ID NO: 1704696 - RNA, 19 nt, Artificial Sequence
  Description of Artificial Sequence: Synthetic oligonucleotide
  Antisense strand to SEQ ID NO: 1704695
uagauaaguacagugacag

SEQ ID NO: 1704697 - RNA, 19 nt, Artificial Sequence
  Description of Artificial Sequence: Synthetic oligonucleotide
  Sense strand starting at position 85 of SEQ ID NO: 1561873
uuaucuacccacgggagaa

SEQ ID NO: 1704698 - RNA, 19 nt, Artificial Sequence
  Description of Artificial Sequence: Synthetic oligonucleotide
  Antisense strand to SEQ ID NO: 1704697
uucucccguggguagauaa

SEQ ID NO: 1704699 - RNA, 19 nt, Artificial Sequence
  Description of Artificial Sequence: Synthetic oligonucleotide
  Sense strand starting at position 195 of SEQ ID NO: 1561873
uguaauugcgugcaauaau

SEQ ID NO: 1704700 - RNA, 19 nt, Artificial Sequence
  Description of Artificial Sequence: Synthetic oligonucleotide
  Antisense strand to SEQ ID NO: 1704699
auuauugcacgcaauuaca

SEQ ID NO: 1704701 - RNA, 19 nt, Artificial Sequence
  Description of Artificial Sequence: Synthetic oligonucleotide
  Sense strand starting at position 220 of SEQ ID NO: 1561873
gcuuuagucuauccuggua

SEQ ID NO: 1704702 - RNA, 19 nt, Artificial Sequence
  Description of Artificial Sequence: Synthetic oligonucleotide
  Antisense strand to SEQ ID NO: 1704701
uaccaggauagacuaaagc

SEQ ID NO: 1704703 - RNA, 19 nt, Artificial Sequence
  Description of Artificial Sequence: Synthetic oligonucleotide
  Sense strand starting at position 260 of SEQ ID NO: 1561873
aagaguuuggaaugucuga

SEQ ID NO: 1704704 - RNA, 19 nt, Artificial Sequence
  Description of Artificial Sequence: Synthetic oligonucleotide
  Antisense strand to SEQ ID NO: 1704703
ucagacauuccaaacucuu

SEQ ID NO: 1704705 - RNA, 19 nt, Artificial Sequence
  Description of Artificial Sequence: Synthetic oligonucleotide
  Sense strand starting at position 271 of SEQ ID NO: 1561873
augucugaacuuugacaag

SEQ ID NO: 1704706 - RNA, 19 nt, Artificial Sequence
  Description of Artificial Sequence: Synthetic oligonucleotide
  Antisense strand to SEQ ID NO: 1704705
cuugucaaaguucagacau

SEQ ID NO: 1704707 - RNA, 19 nt, Artificial Sequence
  Description of Artificial Sequence: Synthetic oligonucleotide
  Sense strand starting at position 324 of SEQ ID NO: 1561873
uguaaaugaggcuauauua

SEQ ID NO: 1704708 - RNA, 19 nt, Artificial Sequence
  Description of Artificial Sequence: Synthetic oligonucleotide
  Antisense strand to SEQ ID NO: 1704707
uaauauagccucauuuaca

SEQ ID NO: 1704709 - RNA, 19 nt, Artificial Sequence
  Description of Artificial Sequence: Synthetic oligonucleotide
  Sense strand starting at position 343 of SEQ ID NO: 1561873
acaguaccaugucuuguaa

SEQ ID NO: 1704710 - RNA, 19 nt, Artificial Sequence
  Description of Artificial Sequence: Synthetic oligonucleotide
  Antisense strand to SEQ ID NO: 1704709
uuacaagacaugguacugu

SEQ ID NO: 1704711 - RNA, 19 nt, Artificial Sequence
  Description of Artificial Sequence: Synthetic oligonucleotide
  Sense strand starting at position 367 of SEQ ID NO: 1561873
ugguuaaauuaagugaguu

SEQ ID NO: 1704712 - RNA, 19 nt, Artificial Sequence
  Description of Artificial Sequence: Synthetic oligonucleotide
  Antisense strand to SEQ ID NO: 1704711
aacucacuuaauuuaacca

SEQ ID NO: 1704713 - RNA, 19 nt, Artificial Sequence
  Description of Artificial Sequence: Synthetic oligonucleotide
  Sense strand starting at position 368 of SEQ ID NO: 1561873
gguuaaauuaagugaguua

SEQ ID NO: 1704714 - RNA, 19 nt, Artificial Sequence
  Description of Artificial Sequence: Synthetic oligonucleotide
  Antisense strand to SEQ ID NO: 1704713
uaacucacuuaauuuaacc

SEQ ID NO: 1704715 - RNA, 19 nt, Artificial Sequence
  Description of Artificial Sequence: Synthetic oligonucleotide
  Sense strand starting at position 381 of SEQ ID NO: 1561873
gaguuaaauucuguaaagu

SEQ ID NO: 1704716 - RNA, 19 nt, Artificial Sequence
  Description of Artificial Sequence: Synthetic oligonucleotide
  Antisense strand to SEQ ID NO: 1704715
acuuuacagaauuuaacuc

SEQ ID NO: 1704717 - RNA, 19 nt, Artificial Sequence
  Description of Artificial Sequence: Synthetic oligonucleotide
  Sense strand starting at position 406 of SEQ ID NO: 1561873
aacgguggcacguaguaaa

SEQ ID NO: 1704718 - RNA, 19 nt, Artificial Sequence
  Description of Artificial Sequence: Synthetic oligonucleotide
  Antisense strand to SEQ ID NO: 1704717
uuuacuacgugccaccguu

SEQ ID NO: 1704719 - RNA, 19 nt, Artificial Sequence
  Description of Artificial Sequence: Synthetic oligonucleotide
  Sense strand starting at position 449 of SEQ ID NO: 1561873
uucucuuuacgguaaaguu

SEQ ID NO: 1704720 - RNA, 19 nt, Artificial Sequence
  Description of Artificial Sequence: Synthetic oligonucleotide
  Antisense strand to SEQ ID NO: 1704719
aacuuuaccguaaagagaa

SEQ ID NO: 1704721 - RNA, 19 nt, Artificial Sequence
  Description of Artificial Sequence: Synthetic oligonucleotide
  Sense strand starting at position 952 of SEQ ID NO: 1561873
uugccuaugcuccaaguuu

SEQ ID NO: 1704722 - RNA, 19 nt, Artificial Sequence
  Description of Artificial Sequence: Synthetic oligonucleotide
  Antisense strand to SEQ ID NO: 1704721
aaacuuggagcauaggcaa

SEQ ID NO: 1704723 - RNA, 19 nt, Artificial Sequence
  Description of Artificial Sequence: Synthetic oligonucleotide
  Sense strand starting at position 994 of SEQ ID NO: 1561873
aaggaaaggcgcuaacaua

SEQ ID NO: 1704724 - RNA, 19 nt, Artificial Sequence
  Description of Artificial Sequence: Synthetic oligonucleotide
  Antisense strand to SEQ ID NO: 1704723
uauguuagcgccuuuccuu

SEQ ID NO: 1704725 - RNA, 19 nt, Artificial Sequence
  Description of Artificial Sequence: Synthetic oligonucleotide
  Sense strand starting at position 1033 of SEQ ID NO: 1561873
gggcaauucuauuccuaag

SEQ ID NO: 1704726 - RNA, 19 nt, Artificial Sequence
  Description of Artificial Sequence: Synthetic oligonucleotide
  Antisense strand to SEQ ID NO: 1704725
cuuaggaauagaauugccc

SEQ ID NO: 1704727 - RNA, 19 nt, Artificial Sequence
  Description of Artificial Sequence: Synthetic oligonucleotide
  Sense strand starting at position 1151 of SEQ ID NO: 1561873
ggaagauccuugggagaaa

SEQ ID NO: 1704728 - RNA, 19 nt, Artificial Sequence
  Description of Artificial Sequence: Synthetic oligonucleotide
  Antisense strand to SEQ ID NO: 1704727
uuucucccaaggaucuucc

SEQ ID NO: 1704729 - RNA, 19 nt, Artificial Sequence
  Description of Artificial Sequence: Synthetic oligonucleotide
  Sense strand starting at position 1152 of SEQ ID NO: 1561873
gaagauccuugggagaaag

SEQ ID NO: 1704730 - RNA, 19 nt, Artificial Sequence
  Description of Artificial Sequence: Synthetic oligonucleotide
  Antisense strand to SEQ ID NO: 1704729
cuuucucccaaggaucuuc

SEQ ID NO: 1704731 - RNA, 19 nt, Artificial Sequence
  Description of Artificial Sequence: Synthetic oligonucleotide
  Sense strand starting at position 1163 of SEQ ID NO: 1561873
ggagaaagacuuugcuaca

SEQ ID NO: 1704732 - RNA, 19 nt, Artificial Sequence
  Description of Artificial Sequence: Synthetic oligonucleotide
  Antisense strand to SEQ ID NO: 1704731
uguagcaaagucuuucucc

SEQ ID NO: 1704733 - RNA, 19 nt, Artificial Sequence
  Description of Artificial Sequence: Synthetic oligonucleotide
  Sense strand starting at position 1351 of SEQ ID NO: 1561873
uggcuauucuccuugggaa

SEQ ID NO: 1704734 - RNA, 19 nt, Artificial Sequence
  Description of Artificial Sequence: Synthetic oligonucleotide
  Antisense strand to SEQ ID NO: 1704733
uucccaaggagaauagcca

SEQ ID NO: 1704735 - RNA, 19 nt, Artificial Sequence
  Description of Artificial Sequence: Synthetic oligonucleotide
  Sense strand starting at position 1352 of SEQ ID NO: 1561873
ggcuauucuccuugggaaa

SEQ ID NO: 1704736 - RNA, 19 nt, Artificial Sequence
  Description of Artificial Sequence: Synthetic oligonucleotide
  Antisense strand to SEQ ID NO: 1704735
uuucccaaggagaauagcc

SEQ ID NO: 1704737 - RNA, 19 nt, Artificial Sequence
  Description of Artificial Sequence: Synthetic oligonucleotide
  Sense strand starting at position 1353 of SEQ ID NO: 1561873
gcuauucuccuugggaaau

SEQ ID NO: 1704738 - RNA, 19 nt, Artificial Sequence
  Description of Artificial Sequence: Synthetic oligonucleotide
  Antisense strand to SEQ ID NO: 1704737
auuucccaaggagaauagc

SEQ ID NO: 1704739 - RNA, 19 nt, Artificial Sequence
  Description of Artificial Sequence: Synthetic oligonucleotide
  Sense strand starting at position 1365 of SEQ ID NO: 1561873
gggaaauuauguccugacc

SEQ ID NO: 1704740 - RNA, 19 nt, Artificial Sequence
  Description of Artificial Sequence: Synthetic oligonucleotide
  Antisense strand to SEQ ID NO: 1704739
ggucaggacauaauuuccc

SEQ ID NO: 1704741 - RNA, 19 nt, Artificial Sequence
  Description of Artificial Sequence: Synthetic oligonucleotide
  Sense strand starting at position 1374 of SEQ ID NO: 1561873
uguccugaccuuuggcauu

SEQ ID NO: 1704742 - RNA, 19 nt, Artificial Sequence
  Description of Artificial Sequence: Synthetic oligonucleotide
  Antisense strand to SEQ ID NO: 1704741
aaugccaaaggucaggaca

SEQ ID NO: 1704743 - RNA, 19 nt, Artificial Sequence
  Description of Artificial Sequence: Synthetic oligonucleotide
  Sense strand starting at position 1415 of SEQ ID NO: 1561873
cggaguucuuucucccaaa

SEQ ID NO: 1704744 - RNA, 19 nt, Artificial Sequence
  Description of Artificial Sequence: Synthetic oligonucleotide
  Antisense strand to SEQ ID NO: 1704743
uuugggagaaagaacuccg

SEQ ID NO: 1704745 - RNA, 19 nt, Artificial Sequence
  Description of Artificial Sequence: Synthetic oligonucleotide
  Sense strand starting at position 1416 of SEQ ID NO: 1561873
ggaguucuuucucccaaag

SEQ ID NO: 1704746 - RNA, 19 nt, Artificial Sequence
  Description of Artificial Sequence: Synthetic oligonucleotide
  Antisense strand to SEQ ID NO: 1704745
cuuugggagaaagaacucc

SEQ ID NO: 1704747 - RNA, 19 nt, Artificial Sequence
  Description of Artificial Sequence: Synthetic oligonucleotide
  Sense strand starting at position 1441 of SEQ ID NO: 1561873
gggauaucauccuauaaag

SEQ ID NO: 1704748 - RNA, 19 nt, Artificial Sequence
  Description of Artificial Sequence: Synthetic oligonucleotide
  Antisense strand to SEQ ID NO: 1704747
cuuuauaggaugauauccc

SEQ ID NO: 1704749 - RNA, 19 nt, Artificial Sequence
  Description of Artificial Sequence: Synthetic oligonucleotide
  Sense strand starting at position 1474 of SEQ ID NO: 1561873
uccagccucgaguaacauu

SEQ ID NO: 1704750 - RNA, 19 nt, Artificial Sequence
  Description of Artificial Sequence: Synthetic oligonucleotide
  Antisense strand to SEQ ID NO: 1704749
aauguuacucgaggcugga

SEQ ID NO: 1704751 - RNA, 19 nt, Artificial Sequence
  Description of Artificial Sequence: Synthetic oligonucleotide
  Sense strand starting at position 1605 of SEQ ID NO: 1561873
gcaccugacccgugacaga

SEQ ID NO: 1704752 - RNA, 19 nt, Artificial Sequence
  Description of Artificial Sequence: Synthetic oligonucleotide
  Antisense strand to SEQ ID NO: 1704751
ucugucacgggucaggugc

SEQ ID NO: 1704753 - RNA, 19 nt, Artificial Sequence
  Description of Artificial Sequence: Synthetic oligonucleotide
  Sense strand starting at position 2575 of SEQ ID NO: 1561873
gggaguuaccuccacgcuu

SEQ ID NO: 1704754 - RNA, 19 nt, Artificial Sequence
  Description of Artificial Sequence: Synthetic oligonucleotide
  Antisense strand to SEQ ID NO: 1704753
aagcguggagguaacuccc

SEQ ID NO: 1704755 - RNA, 19 nt, Artificial Sequence
  Description of Artificial Sequence: Synthetic oligonucleotide
  Sense strand starting at position 2932 of SEQ ID NO: 1561873
uggaguugcagugauggaa

SEQ ID NO: 1704756 - RNA, 19 nt, Artificial Sequence
  Description of Artificial Sequence: Synthetic oligonucleotide
  Antisense strand to SEQ ID NO: 1704755
uuccaucacugcaacucca

SEQ ID NO: 1704757 - RNA, 19 nt, Artificial Sequence
  Description of Artificial Sequence: Synthetic oligonucleotide
  Sense strand starting at position 3227 of SEQ ID NO: 1561873
gagugaaucucagcucuag

SEQ ID NO: 1704758 - RNA, 19 nt, Artificial Sequence
  Description of Artificial Sequence: Synthetic oligonucleotide
  Antisense strand to SEQ ID NO: 1704757
cuagagcugagauucacuc

SEQ ID NO: 1704759 - RNA, 19 nt, Artificial Sequence
  Description of Artificial Sequence: Synthetic oligonucleotide
  Sense strand starting at position 3527 of SEQ ID NO: 1561873
accgaagugacucggagua

SEQ ID NO: 1704760 - RNA, 19 nt, Artificial Sequence
  Description of Artificial Sequence: Synthetic oligonucleotide
  Antisense strand to SEQ ID NO: 1704759
uacuccgagucacuucggu

SEQ ID NO: 1704761 - RNA, 19 nt, Artificial Sequence
  Description of Artificial Sequence: Synthetic oligonucleotide
  Sense strand starting at position 3747 of SEQ ID NO: 1561873
cgaauucucccuuggugaa

SEQ ID NO: 1704762 - RNA, 19 nt, Artificial Sequence
  Description of Artificial Sequence: Synthetic oligonucleotide
  Antisense strand to SEQ ID NO: 1704761
uucaccaagggagaauucg

SEQ ID NO: 1704763 - RNA, 19 nt, Artificial Sequence
  Description of Artificial Sequence: Synthetic oligonucleotide
  Sense strand starting at position 3748 of SEQ ID NO: 1561873
gaauucucccuuggugaau

SEQ ID NO: 1704764 - RNA, 19 nt, Artificial Sequence
  Description of Artificial Sequence: Synthetic oligonucleotide
  Antisense strand to SEQ ID NO: 1704763
auucaccaagggagaauuc

SEQ ID NO: 1704765 - RNA, 19 nt, Artificial Sequence
  Description of Artificial Sequence: Synthetic oligonucleotide
  Sense strand starting at position 3754 of SEQ ID NO: 1561873
ucccuuggugaaugaaauu

SEQ ID NO: 1704766 - RNA, 19 nt, Artificial Sequence
  Description of Artificial Sequence: Synthetic oligonucleotide
  Antisense strand to SEQ ID NO: 1704765
aauuucauucaccaaggga

SEQ ID NO: 1704767 - RNA, 19 nt, Artificial Sequence
  Description of Artificial Sequence: Synthetic oligonucleotide
  Sense strand starting at position 3841 of SEQ ID NO: 1561873
cuccgcguccuagaaagau

SEQ ID NO: 1704768 - RNA, 19 nt, Artificial Sequence
  Description of Artificial Sequence: Synthetic oligonucleotide
  Antisense strand to SEQ ID NO: 1704767
aucuuucuaggacgcggag

SEQ ID NO: 1704769 - RNA, 19 nt, Artificial Sequence
  Description of Artificial Sequence: Synthetic oligonucleotide
  Sense strand starting at position 3878 of SEQ ID NO: 1561873
cugcuuucgaguucucgca

SEQ ID NO: 1704770 - RNA, 19 nt, Artificial Sequence
  Description of Artificial Sequence: Synthetic oligonucleotide
  Antisense strand to SEQ ID NO: 1704769
ugcgagaacucgaaagcag

SEQ ID NO: 1704771 - RNA, 19 nt, Artificial Sequence
  Description of Artificial Sequence: Synthetic oligonucleotide
  Sense strand starting at position 3879 of SEQ ID NO: 1561873
ugcuuucgaguucucgcaa

SEQ ID NO: 1704772 - RNA, 19 nt, Artificial Sequence
  Description of Artificial Sequence: Synthetic oligonucleotide
  Antisense strand to SEQ ID NO: 1704771
uugcgagaacucgaaagca

SEQ ID NO: 1704773 - RNA, 19 nt, Artificial Sequence
  Description of Artificial Sequence: Synthetic oligonucleotide
  Sense strand starting at position 708 of SEQ ID NO: 1561874
gcagaucugccaugagaac

SEQ ID NO: 1704774 - RNA, 19 nt, Artificial Sequence
  Description of Artificial Sequence: Synthetic oligonucleotide
  Antisense strand to SEQ ID NO: 1704773
guucucauggcagaucugc

SEQ ID NO: 1704775 - RNA, 19 nt, Artificial Sequence
  Description of Artificial Sequence: Synthetic oligonucleotide
  Sense strand starting at position 920 of SEQ ID NO: 1561874
guauacuguagcuguggaa

SEQ ID NO: 1704776 - RNA, 19 nt, Artificial Sequence
  Description of Artificial Sequence: Synthetic oligonucleotide
  Antisense strand to SEQ ID NO: 1704775
uuccacagcuacaguauac

SEQ ID NO: 1704777 - RNA, 19 nt, Artificial Sequence
  Description of Artificial Sequence: Synthetic oligonucleotide
  Sense strand starting at position 924 of SEQ ID NO: 1561874
acuguagcuguggaagaau

SEQ ID NO: 1704778 - RNA, 19 nt, Artificial Sequence
  Description of Artificial Sequence: Synthetic oligonucleotide
  Antisense strand to SEQ ID NO: 1704777
auucuuccacagcuacagu

SEQ ID NO: 1704779 - RNA, 19 nt, Artificial Sequence
  Description of Artificial Sequence: Synthetic oligonucleotide
  Sense strand starting at position 1013 of SEQ ID NO: 1561874
augaauuccuggcccuuua

SEQ ID NO: 1704780 - RNA, 19 nt, Artificial Sequence
  Description of Artificial Sequence: Synthetic oligonucleotide
  Antisense strand to SEQ ID NO: 1704779
uaaagggccaggaauucau

SEQ ID NO: 1704781 - RNA, 19 nt, Artificial Sequence
  Description of Artificial Sequence: Synthetic oligonucleotide
  Sense strand starting at position 1041 of SEQ ID NO: 1561874
cugguuacauguccaacua

SEQ ID NO: 1704782 - RNA, 19 nt, Artificial Sequence
  Description of Artificial Sequence: Synthetic oligonucleotide
  Antisense strand to SEQ ID NO: 1704781
uaguuggacauguaaccag

SEQ ID NO: 1704783 - RNA, 19 nt, Artificial Sequence
  Description of Artificial Sequence: Synthetic oligonucleotide
  Sense strand starting at position 1042 of SEQ ID NO: 1561874
ugguuacauguccaacuaa

SEQ ID NO: 1704784 - RNA, 19 nt, Artificial Sequence
  Description of Artificial Sequence: Synthetic oligonucleotide
  Antisense strand to SEQ ID NO: 1704783
uuaguuggacauguaacca

SEQ ID NO: 1704785 - RNA, 19 nt, Artificial Sequence
  Description of Artificial Sequence: Synthetic oligonucleotide
  Sense strand starting at position 1172 of SEQ ID NO: 1561874
ugcuucgacccuuagaaua

SEQ ID NO: 1704786 - RNA, 19 nt, Artificial Sequence
  Description of Artificial Sequence: Synthetic oligonucleotide
  Antisense strand to SEQ ID NO: 1704785
uauucuaagggucgaagca

SEQ ID NO: 1704787 - RNA, 19 nt, Artificial Sequence
  Description of Artificial Sequence: Synthetic oligonucleotide
  Sense strand starting at position 2000 of SEQ ID NO: 1561874
gcggaaguggucuagacua

SEQ ID NO: 1704788 - RNA, 19 nt, Artificial Sequence
  Description of Artificial Sequence: Synthetic oligonucleotide
  Antisense strand to SEQ ID NO: 1704787
uagucuagaccacuuccgc

SEQ ID NO: 1704789 - RNA, 19 nt, Artificial Sequence
  Description of Artificial Sequence: Synthetic oligonucleotide
  Sense strand starting at position 2082 of SEQ ID NO: 1561874
ggugguaaaucaguuaaau

SEQ ID NO: 1704790 - RNA, 19 nt, Artificial Sequence
  Description of Artificial Sequence: Synthetic oligonucleotide
  Antisense strand to SEQ ID NO: 1704789
auuuaacugauuuaccacc

SEQ ID NO: 1704791 - RNA, 19 nt, Artificial Sequence
  Description of Artificial Sequence: Synthetic oligonucleotide
  Sense strand starting at position 2191 of SEQ ID NO: 1561874
gccuauaaggacugugauu

SEQ ID NO: 1704792 - RNA, 19 nt, Artificial Sequence
  Description of Artificial Sequence: Synthetic oligonucleotide
  Antisense strand to SEQ ID NO: 1704791
aaucacaguccuuauaggc

SEQ ID NO: 1704793 - RNA, 19 nt, Artificial Sequence
  Description of Artificial Sequence: Synthetic oligonucleotide
  Sense strand starting at position 2193 of SEQ ID NO: 1561874
cuauaaggacugugauucu

SEQ ID NO: 1704794 - RNA, 19 nt, Artificial Sequence
  Description of Artificial Sequence: Synthetic oligonucleotide
  Antisense strand to SEQ ID NO: 1704793
agaaucacaguccuuauag

SEQ ID NO: 1704795 - RNA, 19 nt, Artificial Sequence
  Description of Artificial Sequence: Synthetic oligonucleotide
  Sense strand starting at position 2196 of SEQ ID NO: 1561874
uaaggacugugauucucaa

SEQ ID NO: 1704796 - RNA, 19 nt, Artificial Sequence
  Description of Artificial Sequence: Synthetic oligonucleotide
  Antisense strand to SEQ ID NO: 1704795
uugagaaucacaguccuua

SEQ ID NO: 1704797 - RNA, 19 nt, Artificial Sequence
  Description of Artificial Sequence: Synthetic oligonucleotide
  Sense strand starting at position 2212 of SEQ ID NO: 1561874
caaacuauggugugcauca

SEQ ID NO: 1704798 - RNA, 19 nt, Artificial Sequence
  Description of Artificial Sequence: Synthetic oligonucleotide
  Antisense strand to SEQ ID NO: 1704797
ugaugcacaccauaguuug

SEQ ID NO: 1704799 - RNA, 19 nt, Artificial Sequence
  Description of Artificial Sequence: Synthetic oligonucleotide
  Sense strand starting at position 2214 of SEQ ID NO: 1561874
aacuauggugugcaucaga

SEQ ID NO: 1704800 - RNA, 19 nt, Artificial Sequence
  Description of Artificial Sequence: Synthetic oligonucleotide
  Antisense strand to SEQ ID NO: 1704799
ucugaugcacaccauaguu

SEQ ID NO: 1704801 - RNA, 19 nt, Artificial Sequence
  Description of Artificial Sequence: Synthetic oligonucleotide
  Sense strand starting at position 2217 of SEQ ID NO: 1561874
uauggugugcaucagaauc

SEQ ID NO: 1704802 - RNA, 19 nt, Artificial Sequence
  Description of Artificial Sequence: Synthetic oligonucleotide
  Antisense strand to SEQ ID NO: 1704801
gauucugaugcacaccaua

SEQ ID NO: 1704803 - RNA, 19 nt, Artificial Sequence
  Description of Artificial Sequence: Synthetic oligonucleotide
  Sense strand starting at position 2279 of SEQ ID NO: 1561874
cagaguuucugaucagaag

SEQ ID NO: 1704804 - RNA, 19 nt, Artificial Sequence
  Description of Artificial Sequence: Synthetic oligonucleotide
  Antisense strand to SEQ ID NO: 1704803
cuucugaucagaaacucug

SEQ ID NO: 1704805 - RNA, 19 nt, Artificial Sequence
  Description of Artificial Sequence: Synthetic oligonucleotide
  Sense strand starting at position 2336 of SEQ ID NO: 1561874
ccaacaagcugucuaguga

SEQ ID NO: 1704806 - RNA, 19 nt, Artificial Sequence
  Description of Artificial Sequence: Synthetic oligonucleotide
  Antisense strand to SEQ ID NO: 1704805
ucacuagacagcuuguugg

SEQ ID NO: 1704807 - RNA, 19 nt, Artificial Sequence
  Description of Artificial Sequence: Synthetic oligonucleotide
  Sense strand starting at position 2337 of SEQ ID NO: 1561874
caacaagcugucuagugau

SEQ ID NO: 1704808 - RNA, 19 nt, Artificial Sequence
  Description of Artificial Sequence: Synthetic oligonucleotide
  Antisense strand to SEQ ID NO: 1704807
aucacuagacagcuuguug

SEQ ID NO: 1704809 - RNA, 19 nt, Artificial Sequence
  Description of Artificial Sequence: Synthetic oligonucleotide
  Sense strand starting at position 2353 of SEQ ID NO: 1561874
gauacugcuagugagugaa

SEQ ID NO: 1704810 - RNA, 19 nt, Artificial Sequence
  Description of Artificial Sequence: Synthetic oligonucleotide
  Antisense strand to SEQ ID NO: 1704809
uucacucacuagcaguauc

SEQ ID NO: 1704811 - RNA, 19 nt, Artificial Sequence
  Description of Artificial Sequence: Synthetic oligonucleotide
  Sense strand starting at position 2355 of SEQ ID NO: 1561874
uacugcuagugagugaaau

SEQ ID NO: 1704812 - RNA, 19 nt, Artificial Sequence
  Description of Artificial Sequence: Synthetic oligonucleotide
  Antisense strand to SEQ ID NO: 1704811
auuucacucacuagcagua

SEQ ID NO: 1704813 - RNA, 19 nt, Artificial Sequence
  Description of Artificial Sequence: Synthetic oligonucleotide
  Sense strand starting at position 2356 of SEQ ID NO: 1561874
acugcuagugagugaaauc

SEQ ID NO: 1704814 - RNA, 19 nt, Artificial Sequence
  Description of Artificial Sequence: Synthetic oligonucleotide
  Antisense strand to SEQ ID NO: 1704813
gauuucacucacuagcagu

SEQ ID NO: 1704815 - RNA, 19 nt, Artificial Sequence
  Description of Artificial Sequence: Synthetic oligonucleotide
  Sense strand starting at position 2357 of SEQ ID NO: 1561874
cugcuagugagugaaauca

SEQ ID NO: 1704816 - RNA, 19 nt, Artificial Sequence
  Description of Artificial Sequence: Synthetic oligonucleotide
  Antisense strand to SEQ ID NO: 1704815
ugauuucacucacuagcag

SEQ ID NO: 1704817 - RNA, 19 nt, Artificial Sequence
  Description of Artificial Sequence: Synthetic oligonucleotide
  Sense strand starting at position 2393 of SEQ ID NO: 1561874
ggcuauauagcuuaguuua

SEQ ID NO: 1704818 - RNA, 19 nt, Artificial Sequence
  Description of Artificial Sequence: Synthetic oligonucleotide
  Antisense strand to SEQ ID NO: 1704817
uaaacuaagcuauauagcc

SEQ ID NO: 1704819 - RNA, 19 nt, Artificial Sequence
  Description of Artificial Sequence: Synthetic oligonucleotide
  Sense strand starting at position 2618 of SEQ ID NO: 1561874
uuguucuauucuuuguaga

SEQ ID NO: 1704820 - RNA, 19 nt, Artificial Sequence
  Description of Artificial Sequence: Synthetic oligonucleotide
  Antisense strand to SEQ ID NO: 1704819
ucuacaaagaauagaacaa

SEQ ID NO: 1704821 - RNA, 19 nt, Artificial Sequence
  Description of Artificial Sequence: Synthetic oligonucleotide
  Sense strand starting at position 2619 of SEQ ID NO: 1561874
uguucuauucuuuguagag

SEQ ID NO: 1704822 - RNA, 19 nt, Artificial Sequence
  Description of Artificial Sequence: Synthetic oligonucleotide
  Antisense strand to SEQ ID NO: 1704821
cucuacaaagaauagaaca

SEQ ID NO: 1704823 - RNA, 19 nt, Artificial Sequence
  Description of Artificial Sequence: Synthetic oligonucleotide
  Sense strand starting at position 2620 of SEQ ID NO: 1561874
guucuauucuuuguagaga

SEQ ID NO: 1704824 - RNA, 19 nt, Artificial Sequence
  Description of Artificial Sequence: Synthetic oligonucleotide
  Antisense strand to SEQ ID NO: 1704823
ucucuacaaagaauagaac

SEQ ID NO: 1704825 - RNA, 19 nt, Artificial Sequence
  Description of Artificial Sequence: Synthetic oligonucleotide
  Sense strand starting at position 2750 of SEQ ID NO: 1561874
ccucccaaucgcugagauu

SEQ ID NO: 1704826 - RNA, 19 nt, Artificial Sequence
  Description of Artificial Sequence: Synthetic oligonucleotide
  Antisense strand to SEQ ID NO: 1704825
aaucucagcgauugggagg

SEQ ID NO: 1704827 - RNA, 19 nt, Artificial Sequence
  Description of Artificial Sequence: Synthetic oligonucleotide
  Sense strand starting at position 2751 of SEQ ID NO: 1561874
cucccaaucgcugagauua

SEQ ID NO: 1704828 - RNA, 19 nt, Artificial Sequence
  Description of Artificial Sequence: Synthetic oligonucleotide
  Antisense strand to SEQ ID NO: 1704827
uaaucucagcgauugggag

SEQ ID NO: 1704829 - RNA, 19 nt, Artificial Sequence
  Description of Artificial Sequence: Synthetic oligonucleotide
  Sense strand starting at position 2756 of SEQ ID NO: 1561874
aaucgcugagauuacagau

SEQ ID NO: 1704830 - RNA, 19 nt, Artificial Sequence
  Description of Artificial Sequence: Synthetic oligonucleotide
  Antisense strand to SEQ ID NO: 1704829
aucuguaaucucagcgauu

SEQ ID NO: 1704831 - RNA, 19 nt, Artificial Sequence
  Description of Artificial Sequence: Synthetic oligonucleotide
  Sense strand starting at position 2795 of SEQ ID NO: 1561874
uggcuuagccuuuaacaau

SEQ ID NO: 1704832 - RNA, 19 nt, Artificial Sequence
  Description of Artificial Sequence: Synthetic oligonucleotide
  Antisense strand to SEQ ID NO: 1704831
auuguuaaaggcuaagcca

SEQ ID NO: 1704833 - RNA, 19 nt, Artificial Sequence
  Description of Artificial Sequence: Synthetic oligonucleotide
  Sense strand starting at position 2817 of SEQ ID NO: 1561874
cauuaaagggcgugguuaa

SEQ ID NO: 1704834 - RNA, 19 nt, Artificial Sequence
  Description of Artificial Sequence: Synthetic oligonucleotide
  Antisense strand to SEQ ID NO: 1704833
uuaaccacgcccuuuaaug

SEQ ID NO: 1704835 - RNA, 19 nt, Artificial Sequence
  Description of Artificial Sequence: Synthetic oligonucleotide
  Sense strand starting at position 2818 of SEQ ID NO: 1561874
auuaaagggcgugguuaaa

SEQ ID NO: 1704836 - RNA, 19 nt, Artificial Sequence
  Description of Artificial Sequence: Synthetic oligonucleotide
  Antisense strand to SEQ ID NO: 1704835
uuuaaccacgcccuuuaau

SEQ ID NO: 1704837 - RNA, 19 nt, Artificial Sequence
  Description of Artificial Sequence: Synthetic oligonucleotide
  Sense strand starting at position 2869 of SEQ ID NO: 1561874
gaguuacacugaccggauu

SEQ ID NO: 1704838 - RNA, 19 nt, Artificial Sequence
  Description of Artificial Sequence: Synthetic oligonucleotide
  Antisense strand to SEQ ID NO: 1704837
aauccggucaguguaacuc

SEQ ID NO: 1704839 - RNA, 19 nt, Artificial Sequence
  Description of Artificial Sequence: Synthetic oligonucleotide
  Sense strand starting at position 2962 of SEQ ID NO: 1561874
ccuguccgguauucuaaga

SEQ ID NO: 1704840 - RNA, 19 nt, Artificial Sequence
  Description of Artificial Sequence: Synthetic oligonucleotide
  Antisense strand to SEQ ID NO: 1704839
ucuuagaauaccggacagg

SEQ ID NO: 1704841 - RNA, 19 nt, Artificial Sequence
  Description of Artificial Sequence: Synthetic oligonucleotide
  Sense strand starting at position 3099 of SEQ ID NO: 1561874
cgugaaaguccguugucuu

SEQ ID NO: 1704842 - RNA, 19 nt, Artificial Sequence
  Description of Artificial Sequence: Synthetic oligonucleotide
  Antisense strand to SEQ ID NO: 1704841
aagacaacggacuuucacg

SEQ ID NO: 1704843 - RNA, 19 nt, Artificial Sequence
  Description of Artificial Sequence: Synthetic oligonucleotide
  Sense strand starting at position 3178 of SEQ ID NO: 1561874
augacuaagugcucaauac

SEQ ID NO: 1704844 - RNA, 19 nt, Artificial Sequence
  Description of Artificial Sequence: Synthetic oligonucleotide
  Antisense strand to SEQ ID NO: 1704843
guauugagcacuuagucau

SEQ ID NO: 1704845 - RNA, 19 nt, Artificial Sequence
  Description of Artificial Sequence: Synthetic oligonucleotide
  Sense strand starting at position 3179 of SEQ ID NO: 1561874
ugacuaagugcucaauacu

SEQ ID NO: 1704846 - RNA, 19 nt, Artificial Sequence
  Description of Artificial Sequence: Synthetic oligonucleotide
  Antisense strand to SEQ ID NO: 1704845
aguauugagcacuuaguca

SEQ ID NO: 1704847 - RNA, 19 nt, Artificial Sequence
  Description of Artificial Sequence: Synthetic oligonucleotide
  Sense strand starting at position 3185 of SEQ ID NO: 1561874
agugcucaauacuuaguga

SEQ ID NO: 1704848 - RNA, 19 nt, Artificial Sequence
  Description of Artificial Sequence: Synthetic oligonucleotide
  Antisense strand to SEQ ID NO: 1704847
ucacuaaguauugagcacu

SEQ ID NO: 1704849 - RNA, 19 nt, Artificial Sequence
  Description of Artificial Sequence: Synthetic oligonucleotide
  Sense strand starting at position 3188 of SEQ ID NO: 1561874
gcucaauacuuagugaccu

SEQ ID NO: 1704850 - RNA, 19 nt, Artificial Sequence
  Description of Artificial Sequence: Synthetic oligonucleotide
  Antisense strand to SEQ ID NO: 1704849
aggucacuaaguauugagc

SEQ ID NO: 1704851 - RNA, 19 nt, Artificial Sequence
  Description of Artificial Sequence: Synthetic oligonucleotide
  Sense strand starting at position 3938 of SEQ ID NO: 1561874
gcugaagcacgauaauuga

SEQ ID NO: 1704852 - RNA, 19 nt, Artificial Sequence
  Description of Artificial Sequence: Synthetic oligonucleotide
  Antisense strand to SEQ ID NO: 1704851
ucaauuaucgugcuucagc

SEQ ID NO: 1704853 - RNA, 19 nt, Artificial Sequence
  Description of Artificial Sequence: Synthetic oligonucleotide
  Sense strand starting at position 222 of SEQ ID NO: 1561875
aguccauguucuccaagga

SEQ ID NO: 1704854 - RNA, 19 nt, Artificial Sequence
  Description of Artificial Sequence: Synthetic oligonucleotide
  Antisense strand to SEQ ID NO: 1704853
uccuuggagaacauggacu

SEQ ID NO: 1704855 - RNA, 19 nt, Artificial Sequence
  Description of Artificial Sequence: Synthetic oligonucleotide
  Sense strand starting at position 590 of SEQ ID NO: 1561875
gguuccagcuccuucuuua

SEQ ID NO: 1704856 - RNA, 19 nt, Artificial Sequence
  Description of Artificial Sequence: Synthetic oligonucleotide
  Antisense strand to SEQ ID NO: 1704855
uaaagaaggagcuggaacc

SEQ ID NO: 1704857 - RNA, 19 nt, Artificial Sequence
  Description of Artificial Sequence: Synthetic oligonucleotide
  Sense strand starting at position 603 of SEQ ID NO: 1561875
ucuuuaagugagggcaaua

SEQ ID NO: 1704858 - RNA, 19 nt, Artificial Sequence
  Description of Artificial Sequence: Synthetic oligonucleotide
  Antisense strand to SEQ ID NO: 1704857
uauugcccucacuuaaaga

SEQ ID NO: 1704859 - RNA, 19 nt, Artificial Sequence
  Description of Artificial Sequence: Synthetic oligonucleotide
  Sense strand starting at position 616 of SEQ ID NO: 1561875
gcaauauucucagccagag

SEQ ID NO: 1704860 - RNA, 19 nt, Artificial Sequence
  Description of Artificial Sequence: Synthetic oligonucleotide
  Antisense strand to SEQ ID NO: 1704859
cucuggcugagaauauugc

SEQ ID NO: 1704861 - RNA, 19 nt, Artificial Sequence
  Description of Artificial Sequence: Synthetic oligonucleotide
  Sense strand starting at position 620 of SEQ ID NO: 1561875
uauucucagccagagguuu

SEQ ID NO: 1704862 - RNA, 19 nt, Artificial Sequence
  Description of Artificial Sequence: Synthetic oligonucleotide
  Antisense strand to SEQ ID NO: 1704861
aaaccucuggcugagaaua

SEQ ID NO: 1704863 - RNA, 19 nt, Artificial Sequence
  Description of Artificial Sequence: Synthetic oligonucleotide
  Sense strand starting at position 731 of SEQ ID NO: 1561875
aggcucugguuccugagaa

SEQ ID NO: 1704864 - RNA, 19 nt, Artificial Sequence
  Description of Artificial Sequence: Synthetic oligonucleotide
  Antisense strand to SEQ ID NO: 1704863
uucucaggaaccagagccu

SEQ ID NO: 1704865 - RNA, 19 nt, Artificial Sequence
  Description of Artificial Sequence: Synthetic oligonucleotide
  Sense strand starting at position 810 of SEQ ID NO: 1561875
ggugucccuagugauuaca

SEQ ID NO: 1704866 - RNA, 19 nt, Artificial Sequence
  Description of Artificial Sequence: Synthetic oligonucleotide
  Antisense strand to SEQ ID NO: 1704865
uguaaucacuagggacacc

SEQ ID NO: 1704867 - RNA, 19 nt, Artificial Sequence
  Description of Artificial Sequence: Synthetic oligonucleotide
  Sense strand starting at position 833 of SEQ ID NO: 1561875
acuggucugccucagacau

SEQ ID NO: 1704868 - RNA, 19 nt, Artificial Sequence
  Description of Artificial Sequence: Synthetic oligonucleotide
  Antisense strand to SEQ ID NO: 1704867
augucugaggcagaccagu

SEQ ID NO: 1704869 - RNA, 19 nt, Artificial Sequence
  Description of Artificial Sequence: Synthetic oligonucleotide
  Sense strand starting at position 846 of SEQ ID NO: 1561875
agacauauccagugggugu

SEQ ID NO: 1704870 - RNA, 19 nt, Artificial Sequence
  Description of Artificial Sequence: Synthetic oligonucleotide
  Antisense strand to SEQ ID NO: 1704869
acacccacuggauaugucu

SEQ ID NO: 1704871 - RNA, 19 nt, Artificial Sequence
  Description of Artificial Sequence: Synthetic oligonucleotide
  Sense strand starting at position 896 of SEQ ID NO: 1561875
cauggcuauggcugauuga

SEQ ID NO: 1704872 - RNA, 19 nt, Artificial Sequence
  Description of Artificial Sequence: Synthetic oligonucleotide
  Antisense strand to SEQ ID NO: 1704871
ucaaucagccauagccaug

SEQ ID NO: 1704873 - RNA, 19 nt, Artificial Sequence
  Description of Artificial Sequence: Synthetic oligonucleotide
  Sense strand starting at position 897 of SEQ ID NO: 1561875
auggcuauggcugauugaa

SEQ ID NO: 1704874 - RNA, 19 nt, Artificial Sequence
  Description of Artificial Sequence: Synthetic oligonucleotide
  Antisense strand to SEQ ID NO: 1704873
uucaaucagccauagccau

SEQ ID NO: 1704875 - RNA, 19 nt, Artificial Sequence
  Description of Artificial Sequence: Synthetic oligonucleotide
  Sense strand starting at position 899 of SEQ ID NO: 1561875
ggcuauggcugauugaaca

SEQ ID NO: 1704876 - RNA, 19 nt, Artificial Sequence
  Description of Artificial Sequence: Synthetic oligonucleotide
  Antisense strand to SEQ ID NO: 1704875
uguucaaucagccauagcc

SEQ ID NO: 1704877 - RNA, 19 nt, Artificial Sequence
  Description of Artificial Sequence: Synthetic oligonucleotide
  Sense strand starting at position 950 of SEQ ID NO: 1561875
ggagcugauaucugguaga

SEQ ID NO: 1704878 - RNA, 19 nt, Artificial Sequence
  Description of Artificial Sequence: Synthetic oligonucleotide
  Antisense strand to SEQ ID NO: 1704877
ucuaccagauaucagcucc

SEQ ID NO: 1704879 - RNA, 19 nt, Artificial Sequence
  Description of Artificial Sequence: Synthetic oligonucleotide
  Sense strand starting at position 1057 of SEQ ID NO: 1561875
ucagcuucuugagagaacu

SEQ ID NO: 1704880 - RNA, 19 nt, Artificial Sequence
  Description of Artificial Sequence: Synthetic oligonucleotide
  Antisense strand to SEQ ID NO: 1704879
aguucucucaagaagcuga

SEQ ID NO: 1704881 - RNA, 19 nt, Artificial Sequence
  Description of Artificial Sequence: Synthetic oligonucleotide
  Sense strand starting at position 1079 of SEQ ID NO: 1561875
gguccugugggacacgaua

SEQ ID NO: 1704882 - RNA, 19 nt, Artificial Sequence
  Description of Artificial Sequence: Synthetic oligonucleotide
  Antisense strand to SEQ ID NO: 1704881
uaucgugucccacaggacc

SEQ ID NO: 1704883 - RNA, 19 nt, Artificial Sequence
  Description of Artificial Sequence: Synthetic oligonucleotide
  Sense strand starting at position 1117 of SEQ ID NO: 1561875
gucaucugguggcuuacau

SEQ ID NO: 1704884 - RNA, 19 nt, Artificial Sequence
  Description of Artificial Sequence: Synthetic oligonucleotide
  Antisense strand to SEQ ID NO: 1704883
auguaagccaccagaugac

SEQ ID NO: 1704885 - RNA, 19 nt, Artificial Sequence
  Description of Artificial Sequence: Synthetic oligonucleotide
  Sense strand starting at position 1134 of SEQ ID NO: 1561875
augagcucccuguguguuu

SEQ ID NO: 1704886 - RNA, 19 nt, Artificial Sequence
  Description of Artificial Sequence: Synthetic oligonucleotide
  Antisense strand to SEQ ID NO: 1704885
aaacacacagggagcucau

SEQ ID NO: 1704887 - RNA, 19 nt, Artificial Sequence
  Description of Artificial Sequence: Synthetic oligonucleotide
  Sense strand starting at position 1143 of SEQ ID NO: 1561875
cuguguguuucuguuacuu

SEQ ID NO: 1704888 - RNA, 19 nt, Artificial Sequence
  Description of Artificial Sequence: Synthetic oligonucleotide
  Antisense strand to SEQ ID NO: 1704887
aaguaacagaaacacacag

SEQ ID NO: 1704889 - RNA, 19 nt, Artificial Sequence
  Description of Artificial Sequence: Synthetic oligonucleotide
  Sense strand starting at position 1147 of SEQ ID NO: 1561875
guguuucuguuacuugcua

SEQ ID NO: 1704890 - RNA, 19 nt, Artificial Sequence
  Description of Artificial Sequence: Synthetic oligonucleotide
  Antisense strand to SEQ ID NO: 1704889
uagcaaguaacagaaacac

SEQ ID NO: 1704891 - RNA, 19 nt, Artificial Sequence
  Description of Artificial Sequence: Synthetic oligonucleotide
  Sense strand starting at position 1155 of SEQ ID NO: 1561875
guuacuugcuagccacaaa

SEQ ID NO: 1704892 - RNA, 19 nt, Artificial Sequence
  Description of Artificial Sequence: Synthetic oligonucleotide
  Antisense strand to SEQ ID NO: 1704891
uuuguggcuagcaaguaac

SEQ ID NO: 1704893 - RNA, 19 nt, Artificial Sequence
  Description of Artificial Sequence: Synthetic oligonucleotide
  Sense strand starting at position 1221 of SEQ ID NO: 1561875
ucucuauagcgcugugaag

SEQ ID NO: 1704894 - RNA, 19 nt, Artificial Sequence
  Description of Artificial Sequence: Synthetic oligonucleotide
  Antisense strand to SEQ ID NO: 1704893
cuucacagcgcuauagaga

SEQ ID NO: 1704895 - RNA, 19 nt, Artificial Sequence
  Description of Artificial Sequence: Synthetic oligonucleotide
  Sense strand starting at position 1239 of SEQ ID NO: 1561875
gcaaauguccugcaucauc

SEQ ID NO: 1704896 - RNA, 19 nt, Artificial Sequence
  Description of Artificial Sequence: Synthetic oligonucleotide
  Antisense strand to SEQ ID NO: 1704895
gaugaugcaggacauuugc

SEQ ID NO: 1704897 - RNA, 19 nt, Artificial Sequence
  Description of Artificial Sequence: Synthetic oligonucleotide
  Sense strand starting at position 1312 of SEQ ID NO: 1561875
cggacugcucaguguggaa

SEQ ID NO: 1704898 - RNA, 19 nt, Artificial Sequence
  Description of Artificial Sequence: Synthetic oligonucleotide
  Antisense strand to SEQ ID NO: 1704897
uuccacacugagcaguccg

SEQ ID NO: 1704899 - RNA, 19 nt, Artificial Sequence
  Description of Artificial Sequence: Synthetic oligonucleotide
  Sense strand starting at position 1383 of SEQ ID NO: 1561875
guggauaagucccagaaga

SEQ ID NO: 1704900 - RNA, 19 nt, Artificial Sequence
  Description of Artificial Sequence: Synthetic oligonucleotide
  Antisense strand to SEQ ID NO: 1704899
ucuucugggacuuauccac

SEQ ID NO: 1704901 - RNA, 19 nt, Artificial Sequence
  Description of Artificial Sequence: Synthetic oligonucleotide
  Sense strand starting at position 1396 of SEQ ID NO: 1561875
agaagagugucgggacacu

SEQ ID NO: 1704902 - RNA, 19 nt, Artificial Sequence
  Description of Artificial Sequence: Synthetic oligonucleotide
  Antisense strand to SEQ ID NO: 1704901
agugucccgacacucuucu

SEQ ID NO: 1704903 - RNA, 19 nt, Artificial Sequence
  Description of Artificial Sequence: Synthetic oligonucleotide
  Sense strand starting at position 1616 of SEQ ID NO: 1561875
cccauucuuccgggcugaa

SEQ ID NO: 1704904 - RNA, 19 nt, Artificial Sequence
  Description of Artificial Sequence: Synthetic oligonucleotide
  Antisense strand to SEQ ID NO: 1704903
uucagcccggaagaauggg

SEQ ID NO: 1704905 - RNA, 19 nt, Artificial Sequence
  Description of Artificial Sequence: Synthetic oligonucleotide
  Sense strand starting at position 1629 of SEQ ID NO: 1561875
gcugaauucuguucucucu

SEQ ID NO: 1704906 - RNA, 19 nt, Artificial Sequence
  Description of Artificial Sequence: Synthetic oligonucleotide
  Antisense strand to SEQ ID NO: 1704905
agagagaacagaauucagc

SEQ ID NO: 1704907 - RNA, 19 nt, Artificial Sequence
  Description of Artificial Sequence: Synthetic oligonucleotide
  Sense strand starting at position 2166 of SEQ ID NO: 1561875
gagguuugcgcucuccuau

SEQ ID NO: 1704908 - RNA, 19 nt, Artificial Sequence
  Description of Artificial Sequence: Synthetic oligonucleotide
  Antisense strand to SEQ ID NO: 1704907
auaggagagcgcaaaccuc

SEQ ID NO: 1704909 - RNA, 19 nt, Artificial Sequence
  Description of Artificial Sequence: Synthetic oligonucleotide
  Sense strand starting at position 2269 of SEQ ID NO: 1561875
gauccacucgacugugaac

SEQ ID NO: 1704910 - RNA, 19 nt, Artificial Sequence
  Description of Artificial Sequence: Synthetic oligonucleotide
  Antisense strand to SEQ ID NO: 1704909
guucacagucgaguggauc

SEQ ID NO: 1704911 - RNA, 19 nt, Artificial Sequence
  Description of Artificial Sequence: Synthetic oligonucleotide
  Sense strand starting at position 2272 of SEQ ID NO: 1561875
ccacucgacugugaacuua

SEQ ID NO: 1704912 - RNA, 19 nt, Artificial Sequence
  Description of Artificial Sequence: Synthetic oligonucleotide
  Antisense strand to SEQ ID NO: 1704911
uaaguucacagucgagugg

SEQ ID NO: 1704913 - RNA, 19 nt, Artificial Sequence
  Description of Artificial Sequence: Synthetic oligonucleotide
  Sense strand starting at position 2492 of SEQ ID NO: 1561875
ugcugaaccucugcugaua

SEQ ID NO: 1704914 - RNA, 19 nt, Artificial Sequence
  Description of Artificial Sequence: Synthetic oligonucleotide
  Antisense strand to SEQ ID NO: 1704913
uaucagcagagguucagca

SEQ ID NO: 1704915 - RNA, 19 nt, Artificial Sequence
  Description of Artificial Sequence: Synthetic oligonucleotide
  Sense strand starting at position 2503 of SEQ ID NO: 1561875
ugcugauacucucuuugca

SEQ ID NO: 1704916 - RNA, 19 nt, Artificial Sequence
  Description of Artificial Sequence: Synthetic oligonucleotide
  Antisense strand to SEQ ID NO: 1704915
ugcaaagagaguaucagca

SEQ ID NO: 1704917 - RNA, 19 nt, Artificial Sequence
  Description of Artificial Sequence: Synthetic oligonucleotide
  Sense strand starting at position 2629 of SEQ ID NO: 1561875
gagggagucugaguucuua

SEQ ID NO: 1704918 - RNA, 19 nt, Artificial Sequence
  Description of Artificial Sequence: Synthetic oligonucleotide
  Antisense strand to SEQ ID NO: 1704917
uaagaacucagacucccuc

SEQ ID NO: 1704919 - RNA, 19 nt, Artificial Sequence
  Description of Artificial Sequence: Synthetic oligonucleotide
  Sense strand starting at position 2633 of SEQ ID NO: 1561875
gagucugaguucuuaccaa

SEQ ID NO: 1704920 - RNA, 19 nt, Artificial Sequence
  Description of Artificial Sequence: Synthetic oligonucleotide
  Antisense strand to SEQ ID NO: 1704919
uugguaagaacucagacuc

SEQ ID NO: 1704921 - RNA, 19 nt, Artificial Sequence
  Description of Artificial Sequence: Synthetic oligonucleotide
  Sense strand starting at position 2665 of SEQ ID NO: 1561875
uucugaugcucaucaaagu

SEQ ID NO: 1704922 - RNA, 19 nt, Artificial Sequence
  Description of Artificial Sequence: Synthetic oligonucleotide
  Antisense strand to SEQ ID NO: 1704921
acuuugaugagcaucagaa

SEQ ID NO: 1704923 - RNA, 19 nt, Artificial Sequence
  Description of Artificial Sequence: Synthetic oligonucleotide
  Sense strand starting at position 2673 of SEQ ID NO: 1561875
cucaucaaagugugggaaa

SEQ ID NO: 1704924 - RNA, 19 nt, Artificial Sequence
  Description of Artificial Sequence: Synthetic oligonucleotide
  Antisense strand to SEQ ID NO: 1704923
uuucccacacuuugaugag

SEQ ID NO: 1704925 - RNA, 19 nt, Artificial Sequence
  Description of Artificial Sequence: Synthetic oligonucleotide
  Sense strand starting at position 2875 of SEQ ID NO: 1561875
ggagaaucgccugaauucg

SEQ ID NO: 1704926 - RNA, 19 nt, Artificial Sequence
  Description of Artificial Sequence: Synthetic oligonucleotide
  Antisense strand to SEQ ID NO: 1704925
cgaauucaggcgauucucc

SEQ ID NO: 1704927 - RNA, 19 nt, Artificial Sequence
  Description of Artificial Sequence: Synthetic oligonucleotide
  Sense strand starting at position 3161 of SEQ ID NO: 1561875
augccuuucuuggaucuua

SEQ ID NO: 1704928 - RNA, 19 nt, Artificial Sequence
  Description of Artificial Sequence: Synthetic oligonucleotide
  Antisense strand to SEQ ID NO: 1704927
uaagauccaagaaaggcau

SEQ ID NO: 1704929 - RNA, 19 nt, Artificial Sequence
  Description of Artificial Sequence: Synthetic oligonucleotide
  Sense strand starting at position 3244 of SEQ ID NO: 1561875
ugaccucugcacugcaaau

SEQ ID NO: 1704930 - RNA, 19 nt, Artificial Sequence
  Description of Artificial Sequence: Synthetic oligonucleotide
  Antisense strand to SEQ ID NO: 1704929
auuugcagugcagagguca

SEQ ID NO: 1704931 - RNA, 19 nt, Artificial Sequence
  Description of Artificial Sequence: Synthetic oligonucleotide
  Sense strand starting at position 3570 of SEQ ID NO: 1561875
aacuccugacgucgugaua

SEQ ID NO: 1704932 - RNA, 19 nt, Artificial Sequence
  Description of Artificial Sequence: Synthetic oligonucleotide
  Antisense strand to SEQ ID NO: 1704931
uaucacgacgucaggaguu

SEQ ID NO: 1704933 - RNA, 19 nt, Artificial Sequence
  Description of Artificial Sequence: Synthetic oligonucleotide
  Sense strand starting at position 350 of SEQ ID NO: 1561876
aguccauguucuccaagga

SEQ ID NO: 1704934 - RNA, 19 nt, Artificial Sequence
  Description of Artificial Sequence: Synthetic oligonucleotide
  Antisense strand to SEQ ID NO: 1704933
uccuuggagaacauggacu

SEQ ID NO: 1704935 - RNA, 19 nt, Artificial Sequence
  Description of Artificial Sequence: Synthetic oligonucleotide
  Sense strand starting at position 718 of SEQ ID NO: 1561876
gguuccagcuccuucuuua

SEQ ID NO: 1704936 - RNA, 19 nt, Artificial Sequence
  Description of Artificial Sequence: Synthetic oligonucleotide
  Antisense strand to SEQ ID NO: 1704935
uaaagaaggagcuggaacc

SEQ ID NO: 1704937 - RNA, 19 nt, Artificial Sequence
  Description of Artificial Sequence: Synthetic oligonucleotide
  Sense strand starting at position 731 of SEQ ID NO: 1561876
ucuuuaagugagggcaaua

SEQ ID NO: 1704938 - RNA, 19 nt, Artificial Sequence
  Description of Artificial Sequence: Synthetic oligonucleotide
  Antisense strand to SEQ ID NO: 1704937
uauugcccucacuuaaaga

SEQ ID NO: 1704939 - RNA, 19 nt, Artificial Sequence
  Description of Artificial Sequence: Synthetic oligonucleotide
  Sense strand starting at position 744 of SEQ ID NO: 1561876
gcaauauucucagccagag

SEQ ID NO: 1704940 - RNA, 19 nt, Artificial Sequence
  Description of Artificial Sequence: Synthetic oligonucleotide
  Antisense strand to SEQ ID NO: 1704939
cucuggcugagaauauugc

SEQ ID NO: 1704941 - RNA, 19 nt, Artificial Sequence
  Description of Artificial Sequence: Synthetic oligonucleotide
  Sense strand starting at position 748 of SEQ ID NO: 1561876
uauucucagccagagguuu

SEQ ID NO: 1704942 - RNA, 19 nt, Artificial Sequence
  Description of Artificial Sequence: Synthetic oligonucleotide
  Antisense strand to SEQ ID NO: 1704941
aaaccucuggcugagaaua

SEQ ID NO: 1704943 - RNA, 19 nt, Artificial Sequence
  Description of Artificial Sequence: Synthetic oligonucleotide
  Sense strand starting at position 859 of SEQ ID NO: 1561876
aggcucugguuccugagaa

SEQ ID NO: 1704944 - RNA, 19 nt, Artificial Sequence
  Description of Artificial Sequence: Synthetic oligonucleotide
  Antisense strand to SEQ ID NO: 1704943
uucucaggaaccagagccu

SEQ ID NO: 1704945 - RNA, 19 nt, Artificial Sequence
  Description of Artificial Sequence: Synthetic oligonucleotide
  Sense strand starting at position 938 of SEQ ID NO: 1561876
ggugucccuagugauuaca

SEQ ID NO: 1704946 - RNA, 19 nt, Artificial Sequence
  Description of Artificial Sequence: Synthetic oligonucleotide
  Antisense strand to SEQ ID NO: 1704945
uguaaucacuagggacacc

SEQ ID NO: 1704947 - RNA, 19 nt, Artificial Sequence
  Description of Artificial Sequence: Synthetic oligonucleotide
  Sense strand starting at position 961 of SEQ ID NO: 1561876
acuggucugccucagacau

SEQ ID NO: 1704948 - RNA, 19 nt, Artificial Sequence
  Description of Artificial Sequence: Synthetic oligonucleotide
  Antisense strand to SEQ ID NO: 1704947
augucugaggcagaccagu

SEQ ID NO: 1704949 - RNA, 19 nt, Artificial Sequence
  Description of Artificial Sequence: Synthetic oligonucleotide
  Sense strand starting at position 974 of SEQ ID NO: 1561876
agacauauccagugggugu

SEQ ID NO: 1704950 - RNA, 19 nt, Artificial Sequence
  Description of Artificial Sequence: Synthetic oligonucleotide
  Antisense strand to SEQ ID NO: 1704949
acacccacuggauaugucu

SEQ ID NO: 1704951 - RNA, 19 nt, Artificial Sequence
  Description of Artificial Sequence: Synthetic oligonucleotide
  Sense strand starting at position 1024 of SEQ ID NO: 1561876
cauggcuauggcugauuga

SEQ ID NO: 1704952 - RNA, 19 nt, Artificial Sequence
  Description of Artificial Sequence: Synthetic oligonucleotide
  Antisense strand to SEQ ID NO: 1704951
ucaaucagccauagccaug

SEQ ID NO: 1704953 - RNA, 19 nt, Artificial Sequence
  Description of Artificial Sequence: Synthetic oligonucleotide
  Sense strand starting at position 1025 of SEQ ID NO: 1561876
auggcuauggcugauugaa

SEQ ID NO: 1704954 - RNA, 19 nt, Artificial Sequence
  Description of Artificial Sequence: Synthetic oligonucleotide
  Antisense strand to SEQ ID NO: 1704953
uucaaucagccauagccau

SEQ ID NO: 1704955 - RNA, 19 nt, Artificial Sequence
  Description of Artificial Sequence: Synthetic oligonucleotide
  Sense strand starting at position 1027 of SEQ ID NO: 1561876
ggcuauggcugauugaaca

SEQ ID NO: 1704956 - RNA, 19 nt, Artificial Sequence
  Description of Artificial Sequence: Synthetic oligonucleotide
  Antisense strand to SEQ ID NO: 1704955
uguucaaucagccauagcc

SEQ ID NO: 1704957 - RNA, 19 nt, Artificial Sequence
  Description of Artificial Sequence: Synthetic oligonucleotide
  Sense strand starting at position 1078 of SEQ ID NO: 1561876
ggagcugauaucugguaga

SEQ ID NO: 1704958 - RNA, 19 nt, Artificial Sequence
  Description of Artificial Sequence: Synthetic oligonucleotide
  Antisense strand to SEQ ID NO: 1704957
ucuaccagauaucagcucc

SEQ ID NO: 1704959 - RNA, 19 nt, Artificial Sequence
  Description of Artificial Sequence: Synthetic oligonucleotide
  Sense strand starting at position 1185 of SEQ ID NO: 1561876
ucagcuucuugagagaacu

SEQ ID NO: 1704960 - RNA, 19 nt, Artificial Sequence
  Description of Artificial Sequence: Synthetic oligonucleotide
  Antisense strand to SEQ ID NO: 1704959
aguucucucaagaagcuga

SEQ ID NO: 1704961 - RNA, 19 nt, Artificial Sequence
  Description of Artificial Sequence: Synthetic oligonucleotide
  Sense strand starting at position 1207 of SEQ ID NO: 1561876
gguccugugggacacgaua

SEQ ID NO: 1704962 - RNA, 19 nt, Artificial Sequence
  Description of Artificial Sequence: Synthetic oligonucleotide
  Antisense strand to SEQ ID NO: 1704961
uaucgugucccacaggacc

SEQ ID NO: 1704963 - RNA, 19 nt, Artificial Sequence
  Description of Artificial Sequence: Synthetic oligonucleotide
  Sense strand starting at position 1245 of SEQ ID NO: 1561876
gucaucugguggcuuacau

SEQ ID NO: 1704964 - RNA, 19 nt, Artificial Sequence
  Description of Artificial Sequence: Synthetic oligonucleotide
  Antisense strand to SEQ ID NO: 1704963
auguaagccaccagaugac

SEQ ID NO: 1704965 - RNA, 19 nt, Artificial Sequence
  Description of Artificial Sequence: Synthetic oligonucleotide
  Sense strand starting at position 1262 of SEQ ID NO: 1561876
augagcucccuguguguuu

SEQ ID NO: 1704966 - RNA, 19 nt, Artificial Sequence
  Description of Artificial Sequence: Synthetic oligonucleotide
  Antisense strand to SEQ ID NO: 1704965
aaacacacagggagcucau

SEQ ID NO: 1704967 - RNA, 19 nt, Artificial Sequence
  Description of Artificial Sequence: Synthetic oligonucleotide
  Sense strand starting at position 1271 of SEQ ID NO: 1561876
cuguguguuucuguuacuu

SEQ ID NO: 1704968 - RNA, 19 nt, Artificial Sequence
  Description of Artificial Sequence: Synthetic oligonucleotide
  Antisense strand to SEQ ID NO: 1704967
aaguaacagaaacacacag

SEQ ID NO: 1704969 - RNA, 19 nt, Artificial Sequence
  Description of Artificial Sequence: Synthetic oligonucleotide
  Sense strand starting at position 1275 of SEQ ID NO: 1561876
guguuucuguuacuugcua

SEQ ID NO: 1704970 - RNA, 19 nt, Artificial Sequence
  Description of Artificial Sequence: Synthetic oligonucleotide
  Antisense strand to SEQ ID NO: 1704969
uagcaaguaacagaaacac

SEQ ID NO: 1704971 - RNA, 19 nt, Artificial Sequence
  Description of Artificial Sequence: Synthetic oligonucleotide
  Sense strand starting at position 1283 of SEQ ID NO: 1561876
guuacuugcuagccacaaa

SEQ ID NO: 1704972 - RNA, 19 nt, Artificial Sequence
  Description of Artificial Sequence: Synthetic oligonucleotide
  Antisense strand to SEQ ID NO: 1704971
uuuguggcuagcaaguaac

SEQ ID NO: 1704973 - RNA, 19 nt, Artificial Sequence
  Description of Artificial Sequence: Synthetic oligonucleotide
  Sense strand starting at position 1349 of SEQ ID NO: 1561876
ucucuauagcgcugugaag

SEQ ID NO: 1704974 - RNA, 19 nt, Artificial Sequence
  Description of Artificial Sequence: Synthetic oligonucleotide
  Antisense strand to SEQ ID NO: 1704973
cuucacagcgcuauagaga

SEQ ID NO: 1704975 - RNA, 19 nt, Artificial Sequence
  Description of Artificial Sequence: Synthetic oligonucleotide
  Sense strand starting at position 1367 of SEQ ID NO: 1561876
gcaaauguccugcaucauc

SEQ ID NO: 1704976 - RNA, 19 nt, Artificial Sequence
  Description of Artificial Sequence: Synthetic oligonucleotide
  Antisense strand to SEQ ID NO: 1704975
gaugaugcaggacauuugc

SEQ ID NO: 1704977 - RNA, 19 nt, Artificial Sequence
  Description of Artificial Sequence: Synthetic oligonucleotide
  Sense strand starting at position 1440 of SEQ ID NO: 1561876
cggacugcucaguguggaa

SEQ ID NO: 1704978 - RNA, 19 nt, Artificial Sequence
  Description of Artificial Sequence: Synthetic oligonucleotide
  Antisense strand to SEQ ID NO: 1704977
uuccacacugagcaguccg

SEQ ID NO: 1704979 - RNA, 19 nt, Artificial Sequence
  Description of Artificial Sequence: Synthetic oligonucleotide
  Sense strand starting at position 1511 of SEQ ID NO: 1561876
guggauaagucccagaaga

SEQ ID NO: 1704980 - RNA, 19 nt, Artificial Sequence
  Description of Artificial Sequence: Synthetic oligonucleotide
  Antisense strand to SEQ ID NO: 1704979
ucuucugggacuuauccac

SEQ ID NO: 1704981 - RNA, 19 nt, Artificial Sequence
  Description of Artificial Sequence: Synthetic oligonucleotide
  Sense strand starting at position 1524 of SEQ ID NO: 1561876
agaagagugucgggacacu

SEQ ID NO: 1704982 - RNA, 19 nt, Artificial Sequence
  Description of Artificial Sequence: Synthetic oligonucleotide
  Antisense strand to SEQ ID NO: 1704981
agugucccgacacucuucu

SEQ ID NO: 1704983 - RNA, 19 nt, Artificial Sequence
  Description of Artificial Sequence: Synthetic oligonucleotide
  Sense strand starting at position 1744 of SEQ ID NO: 1561876
cccauucuuccgggcugaa

SEQ ID NO: 1704984 - RNA, 19 nt, Artificial Sequence
  Description of Artificial Sequence: Synthetic oligonucleotide
  Antisense strand to SEQ ID NO: 1704983
uucagcccggaagaauggg

SEQ ID NO: 1704985 - RNA, 19 nt, Artificial Sequence
  Description of Artificial Sequence: Synthetic oligonucleotide
  Sense strand starting at position 1757 of SEQ ID NO: 1561876
gcugaauucuguucucucu

SEQ ID NO: 1704986 - RNA, 19 nt, Artificial Sequence
  Description of Artificial Sequence: Synthetic oligonucleotide
  Antisense strand to SEQ ID NO: 1704985
agagagaacagaauucagc

SEQ ID NO: 1704987 - RNA, 19 nt, Artificial Sequence
  Description of Artificial Sequence: Synthetic oligonucleotide
  Sense strand starting at position 2294 of SEQ ID NO: 1561876
gagguuugcgcucuccuau

SEQ ID NO: 1704988 - RNA, 19 nt, Artificial Sequence
  Description of Artificial Sequence: Synthetic oligonucleotide
  Antisense strand to SEQ ID NO: 1704987
auaggagagcgcaaaccuc

SEQ ID NO: 1704989 - RNA, 19 nt, Artificial Sequence
  Description of Artificial Sequence: Synthetic oligonucleotide
  Sense strand starting at position 2397 of SEQ ID NO: 1561876
gauccacucgacugugaac

SEQ ID NO: 1704990 - RNA, 19 nt, Artificial Sequence
  Description of Artificial Sequence: Synthetic oligonucleotide
  Antisense strand to SEQ ID NO: 1704989
guucacagucgaguggauc

SEQ ID NO: 1704991 - RNA, 19 nt, Artificial Sequence
  Description of Artificial Sequence: Synthetic oligonucleotide
  Sense strand starting at position 2400 of SEQ ID NO: 1561876
ccacucgacugugaacuua

SEQ ID NO: 1704992 - RNA, 19 nt, Artificial Sequence
  Description of Artificial Sequence: Synthetic oligonucleotide
  Antisense strand to SEQ ID NO: 1704991
uaaguucacagucgagugg

SEQ ID NO: 1704993 - RNA, 19 nt, Artificial Sequence
  Description of Artificial Sequence: Synthetic oligonucleotide
  Sense strand starting at position 2620 of SEQ ID NO: 1561876
ugcugaaccucugcugaua

SEQ ID NO: 1704994 - RNA, 19 nt, Artificial Sequence
  Description of Artificial Sequence: Synthetic oligonucleotide
  Antisense strand to SEQ ID NO: 1704993
uaucagcagagguucagca

SEQ ID NO: 1704995 - RNA, 19 nt, Artificial Sequence
  Description of Artificial Sequence: Synthetic oligonucleotide
  Sense strand starting at position 2631 of SEQ ID NO: 1561876
ugcugauacucucuuugca

SEQ ID NO: 1704996 - RNA, 19 nt, Artificial Sequence
  Description of Artificial Sequence: Synthetic oligonucleotide
  Antisense strand to SEQ ID NO: 1704995
ugcaaagagaguaucagca

SEQ ID NO: 1704997 - RNA, 19 nt, Artificial Sequence
  Description of Artificial Sequence: Synthetic oligonucleotide
  Sense strand starting at position 2757 of SEQ ID NO: 1561876
gagggagucugaguucuua

SEQ ID NO: 1704998 - RNA, 19 nt, Artificial Sequence
  Description of Artificial Sequence: Synthetic oligonucleotide
  Antisense strand to SEQ ID NO: 1704997
uaagaacucagacucccuc

SEQ ID NO: 1704999 - RNA, 19 nt, Artificial Sequence
  Description of Artificial Sequence: Synthetic oligonucleotide
  Sense strand starting at position 2761 of SEQ ID NO: 1561876
gagucugaguucuuaccaa

SEQ ID NO: 1705000 - RNA, 19 nt, Artificial Sequence
  Description of Artificial Sequence: Synthetic oligonucleotide
  Antisense strand to SEQ ID NO: 1704999
uugguaagaacucagacuc

SEQ ID NO: 1705001 - RNA, 19 nt, Artificial Sequence
  Description of Artificial Sequence: Synthetic oligonucleotide
  Sense strand starting at position 2793 of SEQ ID NO: 1561876
uucugaugcucaucaaagu

SEQ ID NO: 1705002 - RNA, 19 nt, Artificial Sequence
  Description of Artificial Sequence: Synthetic oligonucleotide
  Antisense strand to SEQ ID NO: 1705001
acuuugaugagcaucagaa

SEQ ID NO: 1705003 - RNA, 19 nt, Artificial Sequence
  Description of Artificial Sequence: Synthetic oligonucleotide
  Sense strand starting at position 2801 of SEQ ID NO: 1561876
cucaucaaagugugggaaa

SEQ ID NO: 1705004 - RNA, 19 nt, Artificial Sequence
  Description of Artificial Sequence: Synthetic oligonucleotide
  Antisense strand to SEQ ID NO: 1705003
uuucccacacuuugaugag

SEQ ID NO: 1705005 - RNA, 19 nt, Artificial Sequence
  Description of Artificial Sequence: Synthetic oligonucleotide
  Sense strand starting at position 3003 of SEQ ID NO: 1561876
ggagaaucgccugaauucg

SEQ ID NO: 1705006 - RNA, 19 nt, Artificial Sequence
  Description of Artificial Sequence: Synthetic oligonucleotide
  Antisense strand to SEQ ID NO: 1705005
cgaauucaggcgauucucc

SEQ ID NO: 1705007 - RNA, 19 nt, Artificial Sequence
  Description of Artificial Sequence: Synthetic oligonucleotide
  Sense strand starting at position 3289 of SEQ ID NO: 1561876
augccuuucuuggaucuua

SEQ ID NO: 1705008 - RNA, 19 nt, Artificial Sequence
  Description of Artificial Sequence: Synthetic oligonucleotide
  Antisense strand to SEQ ID NO: 1705007
uaagauccaagaaaggcau

SEQ ID NO: 1705009 - RNA, 19 nt, Artificial Sequence
  Description of Artificial Sequence: Synthetic oligonucleotide
  Sense strand starting at position 3372 of SEQ ID NO: 1561876
ugaccucugcacugcaaau

SEQ ID NO: 1705010 - RNA, 19 nt, Artificial Sequence
  Description of Artificial Sequence: Synthetic oligonucleotide
  Antisense strand to SEQ ID NO: 1705009
auuugcagugcagagguca

SEQ ID NO: 1705011 - RNA, 19 nt, Artificial Sequence
  Description of Artificial Sequence: Synthetic oligonucleotide
  Sense strand starting at position 3698 of SEQ ID NO: 1561876
aacuccugacgucgugaua

SEQ ID NO: 1705012 - RNA, 19 nt, Artificial Sequence
  Description of Artificial Sequence: Synthetic oligonucleotide
  Antisense strand to SEQ ID NO: 1705011
uaucacgacgucaggaguu

SEQ ID NO: 1705013 - RNA, 19 nt, Artificial Sequence
  Description of Artificial Sequence: Synthetic oligonucleotide
  Sense strand starting at position 278 of SEQ ID NO: 1561877
cggcgcaccagguuuaauu

SEQ ID NO: 1705014 - RNA, 19 nt, Artificial Sequence
  Description of Artificial Sequence: Synthetic oligonucleotide
  Antisense strand to SEQ ID NO: 1705013
aauuaaaccuggugcgccg

SEQ ID NO: 1705015 - RNA, 19 nt, Artificial Sequence
  Description of Artificial Sequence: Synthetic oligonucleotide
  Sense strand starting at position 287 of SEQ ID NO: 1561877
agguuuaauuaguuaagca

SEQ ID NO: 1705016 - RNA, 19 nt, Artificial Sequence
  Description of Artificial Sequence: Synthetic oligonucleotide
  Antisense strand to SEQ ID NO: 1705015
ugcuuaacuaauuaaaccu

SEQ ID NO: 1705017 - RNA, 19 nt, Artificial Sequence
  Description of Artificial Sequence: Synthetic oligonucleotide
  Sense strand starting at position 390 of SEQ ID NO: 1561877
cuaggagccuggucccaua

SEQ ID NO: 1705018 - RNA, 19 nt, Artificial Sequence
  Description of Artificial Sequence: Synthetic oligonucleotide
  Antisense strand to SEQ ID NO: 1705017
uaugggaccaggcuccuag

SEQ ID NO: 1705019 - RNA, 19 nt, Artificial Sequence
  Description of Artificial Sequence: Synthetic oligonucleotide
  Sense strand starting at position 404 of SEQ ID NO: 1561877
ccauaaacccucugggauc

SEQ ID NO: 1705020 - RNA, 19 nt, Artificial Sequence
  Description of Artificial Sequence: Synthetic oligonucleotide
  Antisense strand to SEQ ID NO: 1705019
gaucccagaggguuuaugg

SEQ ID NO: 1705021 - RNA, 19 nt, Artificial Sequence
  Description of Artificial Sequence: Synthetic oligonucleotide
  Sense strand starting at position 482 of SEQ ID NO: 1561877
ccgagaucuaacuauagug

SEQ ID NO: 1705022 - RNA, 19 nt, Artificial Sequence
  Description of Artificial Sequence: Synthetic oligonucleotide
  Antisense strand to SEQ ID NO: 1705021
cacuauaguuagaucucgg

SEQ ID NO: 1705023 - RNA, 19 nt, Artificial Sequence
  Description of Artificial Sequence: Synthetic oligonucleotide
  Sense strand starting at position 536 of SEQ ID NO: 1561877
cccaguuagcgccuaguuu

SEQ ID NO: 1705024 - RNA, 19 nt, Artificial Sequence
  Description of Artificial Sequence: Synthetic oligonucleotide
  Antisense strand to SEQ ID NO: 1705023
aaacuaggcgcuaacuggg

SEQ ID NO: 1705025 - RNA, 19 nt, Artificial Sequence
  Description of Artificial Sequence: Synthetic oligonucleotide
  Sense strand starting at position 574 of SEQ ID NO: 1561877
ucccucucgcaagggauaa

SEQ ID NO: 1705026 - RNA, 19 nt, Artificial Sequence
  Description of Artificial Sequence: Synthetic oligonucleotide
  Antisense strand to SEQ ID NO: 1705025
uuaucccuugcgagaggga

SEQ ID NO: 1705027 - RNA, 19 nt, Artificial Sequence
  Description of Artificial Sequence: Synthetic oligonucleotide
  Sense strand starting at position 792 of SEQ ID NO: 1561877
acugauacuccuugaggca

SEQ ID NO: 1705028 - RNA, 19 nt, Artificial Sequence
  Description of Artificial Sequence: Synthetic oligonucleotide
  Antisense strand to SEQ ID NO: 1705027
ugccucaaggaguaucagu

SEQ ID NO: 1705029 - RNA, 19 nt, Artificial Sequence
  Description of Artificial Sequence: Synthetic oligonucleotide
  Sense strand starting at position 804 of SEQ ID NO: 1561877
ugaggcacacuuugaagua

SEQ ID NO: 1705030 - RNA, 19 nt, Artificial Sequence
  Description of Artificial Sequence: Synthetic oligonucleotide
  Antisense strand to SEQ ID NO: 1705029
uacuucaaagugugccuca

SEQ ID NO: 1705031 - RNA, 19 nt, Artificial Sequence
  Description of Artificial Sequence: Synthetic oligonucleotide
  Sense strand starting at position 813 of SEQ ID NO: 1561877
cuuugaaguaugugucaca

SEQ ID NO: 1705032 - RNA, 19 nt, Artificial Sequence
  Description of Artificial Sequence: Synthetic oligonucleotide
  Antisense strand to SEQ ID NO: 1705031
ugugacacauacuucaaag

SEQ ID NO: 1705033 - RNA, 19 nt, Artificial Sequence
  Description of Artificial Sequence: Synthetic oligonucleotide
  Sense strand starting at position 1148 of SEQ ID NO: 1561877
gaagaaauccgacgacuuc

SEQ ID NO: 1705034 - RNA, 19 nt, Artificial Sequence
  Description of Artificial Sequence: Synthetic oligonucleotide
  Antisense strand to SEQ ID NO: 1705033
gaagucgucggauuucuuc

SEQ ID NO: 1705035 - RNA, 19 nt, Artificial Sequence
  Description of Artificial Sequence: Synthetic oligonucleotide
  Sense strand starting at position 1580 of SEQ ID NO: 1561877
ccgcgucccggcucuaaua

SEQ ID NO: 1705036 - RNA, 19 nt, Artificial Sequence
  Description of Artificial Sequence: Synthetic oligonucleotide
  Antisense strand to SEQ ID NO: 1705035
uauuagagccgggacgcgg

SEQ ID NO: 1705037 - RNA, 19 nt, Artificial Sequence
  Description of Artificial Sequence: Synthetic oligonucleotide
  Sense strand starting at position 1593 of SEQ ID NO: 1561877
cuaauauacuccgccgauu

SEQ ID NO: 1705038 - RNA, 19 nt, Artificial Sequence
  Description of Artificial Sequence: Synthetic oligonucleotide
  Antisense strand to SEQ ID NO: 1705037
aaucggcggaguauauuag

SEQ ID NO: 1705039 - RNA, 19 nt, Artificial Sequence
  Description of Artificial Sequence: Synthetic oligonucleotide
  Sense strand starting at position 1700 of SEQ ID NO: 1561877
uuauuauucugaucgcuuc

SEQ ID NO: 1705040 - RNA, 19 nt, Artificial Sequence
  Description of Artificial Sequence: Synthetic oligonucleotide
  Antisense strand to SEQ ID NO: 1705039
gaagcgaucagaauaauaa

SEQ ID NO: 1705041 - RNA, 19 nt, Artificial Sequence
  Description of Artificial Sequence: Synthetic oligonucleotide
  Sense strand starting at position 1707 of SEQ ID NO: 1561877
ucugaucgcuucuuugaga

SEQ ID NO: 1705042 - RNA, 19 nt, Artificial Sequence
  Description of Artificial Sequence: Synthetic oligonucleotide
  Antisense strand to SEQ ID NO: 1705041
ucucaaagaagcgaucaga

SEQ ID NO: 1705043 - RNA, 19 nt, Artificial Sequence
  Description of Artificial Sequence: Synthetic oligonucleotide
  Sense strand starting at position 2001 of SEQ ID NO: 1561877
ggcgcaugcgcgcuuauua

SEQ ID NO: 1705044 - RNA, 19 nt, Artificial Sequence
  Description of Artificial Sequence: Synthetic oligonucleotide
  Antisense strand to SEQ ID NO: 1705043
uaauaagcgcgcaugcgcc

SEQ ID NO: 1705045 - RNA, 19 nt, Artificial Sequence
  Description of Artificial Sequence: Synthetic oligonucleotide
  Sense strand starting at position 2002 of SEQ ID NO: 1561877
gcgcaugcgcgcuuauuaa

SEQ ID NO: 1705046 - RNA, 19 nt, Artificial Sequence
  Description of Artificial Sequence: Synthetic oligonucleotide
  Antisense strand to SEQ ID NO: 1705045
uuaauaagcgcgcaugcgc

SEQ ID NO: 1705047 - RNA, 19 nt, Artificial Sequence
  Description of Artificial Sequence: Synthetic oligonucleotide
  Sense strand starting at position 2941 of SEQ ID NO: 1561877
aguggaaaccgauacuguu

SEQ ID NO: 1705048 - RNA, 19 nt, Artificial Sequence
  Description of Artificial Sequence: Synthetic oligonucleotide
  Antisense strand to SEQ ID NO: 1705047
aacaguaucgguuuccacu

SEQ ID NO: 1705049 - RNA, 19 nt, Artificial Sequence
  Description of Artificial Sequence: Synthetic oligonucleotide
  Sense strand starting at position 2990 of SEQ ID NO: 1561877
agcuacacuccuggucaua

SEQ ID NO: 1705050 - RNA, 19 nt, Artificial Sequence
  Description of Artificial Sequence: Synthetic oligonucleotide
  Antisense strand to SEQ ID NO: 1705049
uaugaccaggaguguagcu

SEQ ID NO: 1705051 - RNA, 19 nt, Artificial Sequence
  Description of Artificial Sequence: Synthetic oligonucleotide
  Sense strand starting at position 3002 of SEQ ID NO: 1561877
ggucauaaucaaggucgaa

SEQ ID NO: 1705052 - RNA, 19 nt, Artificial Sequence
  Description of Artificial Sequence: Synthetic oligonucleotide
  Antisense strand to SEQ ID NO: 1705051
uucgaccuugauuaugacc

SEQ ID NO: 1705053 - RNA, 19 nt, Artificial Sequence
  Description of Artificial Sequence: Synthetic oligonucleotide
  Sense strand starting at position 3005 of SEQ ID NO: 1561877
cauaaucaaggucgaagaa

SEQ ID NO: 1705054 - RNA, 19 nt, Artificial Sequence
  Description of Artificial Sequence: Synthetic oligonucleotide
  Antisense strand to SEQ ID NO: 1705053
uucuucgaccuugauuaug

SEQ ID NO: 1705055 - RNA, 19 nt, Artificial Sequence
  Description of Artificial Sequence: Synthetic oligonucleotide
  Sense strand starting at position 3088 of SEQ ID NO: 1561877
ggaccuuuauauggaaaca

SEQ ID NO: 1705056 - RNA, 19 nt, Artificial Sequence
  Description of Artificial Sequence: Synthetic oligonucleotide
  Antisense strand to SEQ ID NO: 1705055
uguuuccauauaaaggucc

SEQ ID NO: 1705057 - RNA, 19 nt, Artificial Sequence
  Description of Artificial Sequence: Synthetic oligonucleotide
  Sense strand starting at position 3113 of SEQ ID NO: 1561877
uccuuugaaggguggacaa

SEQ ID NO: 1705058 - RNA, 19 nt, Artificial Sequence
  Description of Artificial Sequence: Synthetic oligonucleotide
  Antisense strand to SEQ ID NO: 1705057
uuguccacccuucaaagga

SEQ ID NO: 1705059 - RNA, 19 nt, Artificial Sequence
  Description of Artificial Sequence: Synthetic oligonucleotide
  Sense strand starting at position 3255 of SEQ ID NO: 1561877
uuccaacaugcugaguuau

SEQ ID NO: 1705060 - RNA, 19 nt, Artificial Sequence
  Description of Artificial Sequence: Synthetic oligonucleotide
  Antisense strand to SEQ ID NO: 1705059
auaacucagcauguuggaa

SEQ ID NO: 1705061 - RNA, 19 nt, Artificial Sequence
  Description of Artificial Sequence: Synthetic oligonucleotide
  Sense strand starting at position 3257 of SEQ ID NO: 1561877
ccaacaugcugaguuauga

SEQ ID NO: 1705062 - RNA, 19 nt, Artificial Sequence
  Description of Artificial Sequence: Synthetic oligonucleotide
  Antisense strand to SEQ ID NO: 1705061
ucauaacucagcauguugg

SEQ ID NO: 1705063 - RNA, 19 nt, Artificial Sequence
  Description of Artificial Sequence: Synthetic oligonucleotide
  Sense strand starting at position 3284 of SEQ ID NO: 1561877
ggguggguauuugugguua

SEQ ID NO: 1705064 - RNA, 19 nt, Artificial Sequence
  Description of Artificial Sequence: Synthetic oligonucleotide
  Antisense strand to SEQ ID NO: 1705063
uaaccacaaauacccaccc

SEQ ID NO: 1705065 - RNA, 19 nt, Artificial Sequence
  Description of Artificial Sequence: Synthetic oligonucleotide
  Sense strand starting at position 3288 of SEQ ID NO: 1561877
ggguauuugugguuaucua

SEQ ID NO: 1705066 - RNA, 19 nt, Artificial Sequence
  Description of Artificial Sequence: Synthetic oligonucleotide
  Antisense strand to SEQ ID NO: 1705065
uagauaaccacaaauaccc

SEQ ID NO: 1705067 - RNA, 19 nt, Artificial Sequence
  Description of Artificial Sequence: Synthetic oligonucleotide
  Sense strand starting at position 3299 of SEQ ID NO: 1561877
guuaucuacuuauugcauu

SEQ ID NO: 1705068 - RNA, 19 nt, Artificial Sequence
  Description of Artificial Sequence: Synthetic oligonucleotide
  Antisense strand to SEQ ID NO: 1705067
aaugcaauaaguagauaac

SEQ ID NO: 1705069 - RNA, 19 nt, Artificial Sequence
  Description of Artificial Sequence: Synthetic oligonucleotide
  Sense strand starting at position 3320 of SEQ ID NO: 1561877
augggaggcucaguaugaa

SEQ ID NO: 1705070 - RNA, 19 nt, Artificial Sequence
  Description of Artificial Sequence: Synthetic oligonucleotide
  Antisense strand to SEQ ID NO: 1705069
uucauacugagccucccau

SEQ ID NO: 1705071 - RNA, 19 nt, Artificial Sequence
  Description of Artificial Sequence: Synthetic oligonucleotide
  Sense strand starting at position 3358 of SEQ ID NO: 1561877
ucucaucauucugaggaau

SEQ ID NO: 1705072 - RNA, 19 nt, Artificial Sequence
  Description of Artificial Sequence: Synthetic oligonucleotide
  Antisense strand to SEQ ID NO: 1705071
auuccucagaaugaugaga

SEQ ID NO: 1705073 - RNA, 19 nt, Artificial Sequence
  Description of Artificial Sequence: Synthetic oligonucleotide
  Sense strand starting at position 3477 of SEQ ID NO: 1561877
agugcuuacuuagugguaa

SEQ ID NO: 1705074 - RNA, 19 nt, Artificial Sequence
  Description of Artificial Sequence: Synthetic oligonucleotide
  Antisense strand to SEQ ID NO: 1705073
uuaccacuaaguaagcacu

SEQ ID NO: 1705075 - RNA, 19 nt, Artificial Sequence
  Description of Artificial Sequence: Synthetic oligonucleotide
  Sense strand starting at position 3479 of SEQ ID NO: 1561877
ugcuuacuuagugguaaug

SEQ ID NO: 1705076 - RNA, 19 nt, Artificial Sequence
  Description of Artificial Sequence: Synthetic oligonucleotide
  Antisense strand to SEQ ID NO: 1705075
cauuaccacuaaguaagca

SEQ ID NO: 1705077 - RNA, 19 nt, Artificial Sequence
  Description of Artificial Sequence: Synthetic oligonucleotide
  Sense strand starting at position 3489 of SEQ ID NO: 1561877
gugguaaugugucccaucu

SEQ ID NO: 1705078 - RNA, 19 nt, Artificial Sequence
  Description of Artificial Sequence: Synthetic oligonucleotide
  Antisense strand to SEQ ID NO: 1705077
agaugggacacauuaccac

SEQ ID NO: 1705079 - RNA, 19 nt, Artificial Sequence
  Description of Artificial Sequence: Synthetic oligonucleotide
  Sense strand starting at position 3508 of SEQ ID NO: 1561877
ugagcacuggcgggagaau

SEQ ID NO: 1705080 - RNA, 19 nt, Artificial Sequence
  Description of Artificial Sequence: Synthetic oligonucleotide
  Antisense strand to SEQ ID NO: 1705079
auucucccgccagugcuca

SEQ ID NO: 1705081 - RNA, 19 nt, Artificial Sequence
  Description of Artificial Sequence: Synthetic oligonucleotide
  Sense strand starting at position 3538 of SEQ ID NO: 1561877
aagggagguuucuaagaac

SEQ ID NO: 1705082 - RNA, 19 nt, Artificial Sequence
  Description of Artificial Sequence: Synthetic oligonucleotide
  Antisense strand to SEQ ID NO: 1705081
guucuuagaaaccucccuu

SEQ ID NO: 1705083 - RNA, 19 nt, Artificial Sequence
  Description of Artificial Sequence: Synthetic oligonucleotide
  Sense strand starting at position 3541 of SEQ ID NO: 1561877
ggagguuucuaagaacaga

SEQ ID NO: 1705084 - RNA, 19 nt, Artificial Sequence
  Description of Artificial Sequence: Synthetic oligonucleotide
  Antisense strand to SEQ ID NO: 1705083
ucuguucuuagaaaccucc

SEQ ID NO: 1705085 - RNA, 19 nt, Artificial Sequence
  Description of Artificial Sequence: Synthetic oligonucleotide
  Sense strand starting at position 3565 of SEQ ID NO: 1561877
uuuacagcuggucauguua

SEQ ID NO: 1705086 - RNA, 19 nt, Artificial Sequence
  Description of Artificial Sequence: Synthetic oligonucleotide
  Antisense strand to SEQ ID NO: 1705085
uaacaugaccagcuguaaa

SEQ ID NO: 1705087 - RNA, 19 nt, Artificial Sequence
  Description of Artificial Sequence: Synthetic oligonucleotide
  Sense strand starting at position 3758 of SEQ ID NO: 1561877
ucccaaguaucccugaguu

SEQ ID NO: 1705088 - RNA, 19 nt, Artificial Sequence
  Description of Artificial Sequence: Synthetic oligonucleotide
  Antisense strand to SEQ ID NO: 1705087
aacucagggauacuuggga

SEQ ID NO: 1705089 - RNA, 19 nt, Artificial Sequence
  Description of Artificial Sequence: Synthetic oligonucleotide
  Sense strand starting at position 3768 of SEQ ID NO: 1561877
cccugaguuugggugcuaa

SEQ ID NO: 1705090 - RNA, 19 nt, Artificial Sequence
  Description of Artificial Sequence: Synthetic oligonucleotide
  Antisense strand to SEQ ID NO: 1705089
uuagcacccaaacucaggg

SEQ ID NO: 1705091 - RNA, 19 nt, Artificial Sequence
  Description of Artificial Sequence: Synthetic oligonucleotide
  Sense strand starting at position 3780 of SEQ ID NO: 1561877
gugcuaaauaacgguuuaa

SEQ ID NO: 1705092 - RNA, 19 nt, Artificial Sequence
  Description of Artificial Sequence: Synthetic oligonucleotide
  Antisense strand to SEQ ID NO: 1705091
uuaaaccguuauuuagcac

SEQ ID NO: 1705093 - RNA, 19 nt, Artificial Sequence
  Description of Artificial Sequence: Synthetic oligonucleotide
  Sense strand starting at position 42 of SEQ ID NO: 1561878
acgagaacuugucuuggaa

SEQ ID NO: 1705094 - RNA, 19 nt, Artificial Sequence
  Description of Artificial Sequence: Synthetic oligonucleotide
  Antisense strand to SEQ ID NO: 1705093
uuccaagacaaguucucgu

SEQ ID NO: 1705095 - RNA, 19 nt, Artificial Sequence
  Description of Artificial Sequence: Synthetic oligonucleotide
  Sense strand starting at position 276 of SEQ ID NO: 1561878
gguggauugguguguggau

SEQ ID NO: 1705096 - RNA, 19 nt, Artificial Sequence
  Description of Artificial Sequence: Synthetic oligonucleotide
  Antisense strand to SEQ ID NO: 1705095
auccacacaccaauccacc

SEQ ID NO: 1705097 - RNA, 19 nt, Artificial Sequence
  Description of Artificial Sequence: Synthetic oligonucleotide
  Sense strand starting at position 277 of SEQ ID NO: 1561878
guggauugguguguggaua

SEQ ID NO: 1705098 - RNA, 19 nt, Artificial Sequence
  Description of Artificial Sequence: Synthetic oligonucleotide
  Antisense strand to SEQ ID NO: 1705097
uauccacacaccaauccac

SEQ ID NO: 1705099 - RNA, 19 nt, Artificial Sequence
  Description of Artificial Sequence: Synthetic oligonucleotide
  Sense strand starting at position 340 of SEQ ID NO: 1561878
guggaugaauacuccucau

SEQ ID NO: 1705100 - RNA, 19 nt, Artificial Sequence
  Description of Artificial Sequence: Synthetic oligonucleotide
  Antisense strand to SEQ ID NO: 1705099
augaggaguauucauccac

SEQ ID NO: 1705101 - RNA, 19 nt, Artificial Sequence
  Description of Artificial Sequence: Synthetic oligonucleotide
  Sense strand starting at position 406 of SEQ ID NO: 1561878
cuaauucugcuagaguaua

SEQ ID NO: 1705102 - RNA, 19 nt, Artificial Sequence
  Description of Artificial Sequence: Synthetic oligonucleotide
  Antisense strand to SEQ ID NO: 1705101
uauacucuagcagaauuag

SEQ ID NO: 1705103 - RNA, 19 nt, Artificial Sequence
  Description of Artificial Sequence: Synthetic oligonucleotide
  Sense strand starting at position 418 of SEQ ID NO: 1561878
gaguauauuccauggcugu

SEQ ID NO: 1705104 - RNA, 19 nt, Artificial Sequence
  Description of Artificial Sequence: Synthetic oligonucleotide
  Antisense strand to SEQ ID NO: 1705103
acagccauggaauauacuc

SEQ ID NO: 1705105 - RNA, 19 nt, Artificial Sequence
  Description of Artificial Sequence: Synthetic oligonucleotide
  Sense strand starting at position 419 of SEQ ID NO: 1561878
aguauauuccauggcuguu

SEQ ID NO: 1705106 - RNA, 19 nt, Artificial Sequence
  Description of Artificial Sequence: Synthetic oligonucleotide
  Antisense strand to SEQ ID NO: 1705105
aacagccauggaauauacu

SEQ ID NO: 1705107 - RNA, 19 nt, Artificial Sequence
  Description of Artificial Sequence: Synthetic oligonucleotide
  Sense strand starting at position 644 of SEQ ID NO: 1561878
ccaucugauucugugccaa

SEQ ID NO: 1705108 - RNA, 19 nt, Artificial Sequence
  Description of Artificial Sequence: Synthetic oligonucleotide
  Antisense strand to SEQ ID NO: 1705107
uuggcacagaaucagaugg

SEQ ID NO: 1705109 - RNA, 19 nt, Artificial Sequence
  Description of Artificial Sequence: Synthetic oligonucleotide
  Sense strand starting at position 646 of SEQ ID NO: 1561878
aucugauucugugccaauu

SEQ ID NO: 1705110 - RNA, 19 nt, Artificial Sequence
  Description of Artificial Sequence: Synthetic oligonucleotide
  Antisense strand to SEQ ID NO: 1705109
aauuggcacagaaucagau

SEQ ID NO: 1705111 - RNA, 19 nt, Artificial Sequence
  Description of Artificial Sequence: Synthetic oligonucleotide
  Sense strand starting at position 769 of SEQ ID NO: 1561878
gugccauagccgucuugca

SEQ ID NO: 1705112 - RNA, 19 nt, Artificial Sequence
  Description of Artificial Sequence: Synthetic oligonucleotide
  Antisense strand to SEQ ID NO: 1705111
ugcaagacggcuauggcac

SEQ ID NO: 1705113 - RNA, 19 nt, Artificial Sequence
  Description of Artificial Sequence: Synthetic oligonucleotide
  Sense strand starting at position 825 of SEQ ID NO: 1561878
gcuugagcucugccggauu

SEQ ID NO: 1705114 - RNA, 19 nt, Artificial Sequence
  Description of Artificial Sequence: Synthetic oligonucleotide
  Antisense strand to SEQ ID NO: 1705113
aauccggcagagcucaagc

SEQ ID NO: 1705115 - RNA, 19 nt, Artificial Sequence
  Description of Artificial Sequence: Synthetic oligonucleotide
  Sense strand starting at position 935 of SEQ ID NO: 1561878
uccaguaucccucaaaggu

SEQ ID NO: 1705116 - RNA, 19 nt, Artificial Sequence
  Description of Artificial Sequence: Synthetic oligonucleotide
  Antisense strand to SEQ ID NO: 1705115
accuuugagggauacugga

SEQ ID NO: 1705117 - RNA, 19 nt, Artificial Sequence
  Description of Artificial Sequence: Synthetic oligonucleotide
  Sense strand starting at position 1182 of SEQ ID NO: 1561878
gggugaugccugcaacacu

SEQ ID NO: 1705118 - RNA, 19 nt, Artificial Sequence
  Description of Artificial Sequence: Synthetic oligonucleotide
  Antisense strand to SEQ ID NO: 1705117
aguguugcaggcaucaccc

SEQ ID NO: 1705119 - RNA, 19 nt, Artificial Sequence
  Description of Artificial Sequence: Synthetic oligonucleotide
  Sense strand starting at position 1453 of SEQ ID NO: 1561878
gugugaucucuuuaagaag

SEQ ID NO: 1705120 - RNA, 19 nt, Artificial Sequence
  Description of Artificial Sequence: Synthetic oligonucleotide
  Antisense strand to SEQ ID NO: 1705119
cuucuuaaagagaucacac

SEQ ID NO: 1705121 - RNA, 19 nt, Artificial Sequence
  Description of Artificial Sequence: Synthetic oligonucleotide
  Sense strand starting at position 2349 of SEQ ID NO: 1561878
cuccucucugccugagaca

SEQ ID NO: 1705122 - RNA, 19 nt, Artificial Sequence
  Description of Artificial Sequence: Synthetic oligonucleotide
  Antisense strand to SEQ ID NO: 1705121
ugucucaggcagagaggag

SEQ ID NO: 1705123 - RNA, 19 nt, Artificial Sequence
  Description of Artificial Sequence: Synthetic oligonucleotide
  Sense strand starting at position 2514 of SEQ ID NO: 1561878
agaaauucucaagggucau

SEQ ID NO: 1705124 - RNA, 19 nt, Artificial Sequence
  Description of Artificial Sequence: Synthetic oligonucleotide
  Antisense strand to SEQ ID NO: 1705123
augacccuugagaauuucu

SEQ ID NO: 1705125 - RNA, 19 nt, Artificial Sequence
  Description of Artificial Sequence: Synthetic oligonucleotide
  Sense strand starting at position 2693 of SEQ ID NO: 1561878
auaaaucuccauggcaaga

SEQ ID NO: 1705126 - RNA, 19 nt, Artificial Sequence
  Description of Artificial Sequence: Synthetic oligonucleotide
  Antisense strand to SEQ ID NO: 1705125
ucuugccauggagauuuau

SEQ ID NO: 1705127 - RNA, 19 nt, Artificial Sequence
  Description of Artificial Sequence: Synthetic oligonucleotide
  Sense strand starting at position 2719 of SEQ ID NO: 1561878
gccagagcuaaugauugua

SEQ ID NO: 1705128 - RNA, 19 nt, Artificial Sequence
  Description of Artificial Sequence: Synthetic oligonucleotide
  Antisense strand to SEQ ID NO: 1705127
uacaaucauuagcucuggc

SEQ ID NO: 1705129 - RNA, 19 nt, Artificial Sequence
  Description of Artificial Sequence: Synthetic oligonucleotide
  Sense strand starting at position 2721 of SEQ ID NO: 1561878
cagagcuaaugauuguaaa

SEQ ID NO: 1705130 - RNA, 19 nt, Artificial Sequence
  Description of Artificial Sequence: Synthetic oligonucleotide
  Antisense strand to SEQ ID NO: 1705129
uuuacaaucauuagcucug

SEQ ID NO: 1705131 - RNA, 19 nt, Artificial Sequence
  Description of Artificial Sequence: Synthetic oligonucleotide
  Sense strand starting at position 2722 of SEQ ID NO: 1561878
agagcuaaugauuguaaau

SEQ ID NO: 1705132 - RNA, 19 nt, Artificial Sequence
  Description of Artificial Sequence: Synthetic oligonucleotide
  Antisense strand to SEQ ID NO: 1705131
auuuacaaucauuagcucu

SEQ ID NO: 1705133 - RNA, 19 nt, Artificial Sequence
  Description of Artificial Sequence: Synthetic oligonucleotide
  Sense strand starting at position 2744 of SEQ ID NO: 1561878
agcuaagcccaagguuaau

SEQ ID NO: 1705134 - RNA, 19 nt, Artificial Sequence
  Description of Artificial Sequence: Synthetic oligonucleotide
  Antisense strand to SEQ ID NO: 1705133
auuaaccuugggcuuagcu

SEQ ID NO: 1705135 - RNA, 19 nt, Artificial Sequence
  Description of Artificial Sequence: Synthetic oligonucleotide
  Sense strand starting at position 2772 of SEQ ID NO: 1561878
gaggaauucugggaaaggu

SEQ ID NO: 1705136 - RNA, 19 nt, Artificial Sequence
  Description of Artificial Sequence: Synthetic oligonucleotide
  Antisense strand to SEQ ID NO: 1705135
accuuucccagaauuccuc

SEQ ID NO: 1705137 - RNA, 19 nt, Artificial Sequence
  Description of Artificial Sequence: Synthetic oligonucleotide
  Sense strand starting at position 2845 of SEQ ID NO: 1561878
gaacgugugucugugagag

SEQ ID NO: 1705138 - RNA, 19 nt, Artificial Sequence
  Description of Artificial Sequence: Synthetic oligonucleotide
  Antisense strand to SEQ ID NO: 1705137
cucucacagacacacguuc

SEQ ID NO: 1705139 - RNA, 19 nt, Artificial Sequence
  Description of Artificial Sequence: Synthetic oligonucleotide
  Sense strand starting at position 3100 of SEQ ID NO: 1561878
agacaauuaucugacuuug

SEQ ID NO: 1705140 - RNA, 19 nt, Artificial Sequence
  Description of Artificial Sequence: Synthetic oligonucleotide
  Antisense strand to SEQ ID NO: 1705139
caaagucagauaauugucu

SEQ ID NO: 1705141 - RNA, 19 nt, Artificial Sequence
  Description of Artificial Sequence: Synthetic oligonucleotide
  Sense strand starting at position 3161 of SEQ ID NO: 1561878
acgugaagucacugcggaa

SEQ ID NO: 1705142 - RNA, 19 nt, Artificial Sequence
  Description of Artificial Sequence: Synthetic oligonucleotide
  Antisense strand to SEQ ID NO: 1705141
uuccgcagugacuucacgu

SEQ ID NO: 1705143 - RNA, 19 nt, Artificial Sequence
  Description of Artificial Sequence: Synthetic oligonucleotide
  Sense strand starting at position 3221 of SEQ ID NO: 1561878
cuuuccuuccaguggguua

SEQ ID NO: 1705144 - RNA, 19 nt, Artificial Sequence
  Description of Artificial Sequence: Synthetic oligonucleotide
  Antisense strand to SEQ ID NO: 1705143
uaacccacuggaaggaaag

SEQ ID NO: 1705145 - RNA, 19 nt, Artificial Sequence
  Description of Artificial Sequence: Synthetic oligonucleotide
  Sense strand starting at position 3256 of SEQ ID NO: 1561878
gguuccauccuuggucaca

SEQ ID NO: 1705146 - RNA, 19 nt, Artificial Sequence
  Description of Artificial Sequence: Synthetic oligonucleotide
  Antisense strand to SEQ ID NO: 1705145
ugugaccaaggauggaacc

SEQ ID NO: 1705147 - RNA, 19 nt, Artificial Sequence
  Description of Artificial Sequence: Synthetic oligonucleotide
  Sense strand starting at position 3483 of SEQ ID NO: 1561878
gggcuacucccagggaguu

SEQ ID NO: 1705148 - RNA, 19 nt, Artificial Sequence
  Description of Artificial Sequence: Synthetic oligonucleotide
  Antisense strand to SEQ ID NO: 1705147
aacucccugggaguagccc

SEQ ID NO: 1705149 - RNA, 19 nt, Artificial Sequence
  Description of Artificial Sequence: Synthetic oligonucleotide
  Sense strand starting at position 3502 of SEQ ID NO: 1561878
cugcuuucgccacuucuca

SEQ ID NO: 1705150 - RNA, 19 nt, Artificial Sequence
  Description of Artificial Sequence: Synthetic oligonucleotide
  Antisense strand to SEQ ID NO: 1705149
ugagaaguggcgaaagcag

SEQ ID NO: 1705151 - RNA, 19 nt, Artificial Sequence
  Description of Artificial Sequence: Synthetic oligonucleotide
  Sense strand starting at position 3517 of SEQ ID NO: 1561878
cucacuaggucuuuggaga

SEQ ID NO: 1705152 - RNA, 19 nt, Artificial Sequence
  Description of Artificial Sequence: Synthetic oligonucleotide
  Antisense strand to SEQ ID NO: 1705151
ucuccaaagaccuagugag

SEQ ID NO: 1705153 - RNA, 19 nt, Artificial Sequence
  Description of Artificial Sequence: Synthetic oligonucleotide
  Sense strand starting at position 3518 of SEQ ID NO: 1561878
ucacuaggucuuuggagaa

SEQ ID NO: 1705154 - RNA, 19 nt, Artificial Sequence
  Description of Artificial Sequence: Synthetic oligonucleotide
  Antisense strand to SEQ ID NO: 1705153
uucuccaaagaccuaguga

SEQ ID NO: 1705155 - RNA, 19 nt, Artificial Sequence
  Description of Artificial Sequence: Synthetic oligonucleotide
  Sense strand starting at position 3555 of SEQ ID NO: 1561878
cucugcugucaagggaaga

SEQ ID NO: 1705156 - RNA, 19 nt, Artificial Sequence
  Description of Artificial Sequence: Synthetic oligonucleotide
  Antisense strand to SEQ ID NO: 1705155
ucuucccuugacagcagag

SEQ ID NO: 1705157 - RNA, 19 nt, Artificial Sequence
  Description of Artificial Sequence: Synthetic oligonucleotide
  Sense strand starting at position 3614 of SEQ ID NO: 1561878
ucaauaccguaaucauaug

SEQ ID NO: 1705158 - RNA, 19 nt, Artificial Sequence
  Description of Artificial Sequence: Synthetic oligonucleotide
  Antisense strand to SEQ ID NO: 1705157
cauaugauuacgguauuga

SEQ ID NO: 1705159 - RNA, 19 nt, Artificial Sequence
  Description of Artificial Sequence: Synthetic oligonucleotide
  Sense strand starting at position 3620 of SEQ ID NO: 1561878
ccguaaucauauguuuaug

SEQ ID NO: 1705160 - RNA, 19 nt, Artificial Sequence
  Description of Artificial Sequence: Synthetic oligonucleotide
  Antisense strand to SEQ ID NO: 1705159
cauaaacauaugauuacgg

SEQ ID NO: 1705161 - RNA, 19 nt, Artificial Sequence
  Description of Artificial Sequence: Synthetic oligonucleotide
  Sense strand starting at position 3666 of SEQ ID NO: 1561878
ggguguucuaccuauggga

SEQ ID NO: 1705162 - RNA, 19 nt, Artificial Sequence
  Description of Artificial Sequence: Synthetic oligonucleotide
  Antisense strand to SEQ ID NO: 1705161
ucccauagguagaacaccc

SEQ ID NO: 1705163 - RNA, 19 nt, Artificial Sequence
  Description of Artificial Sequence: Synthetic oligonucleotide
  Sense strand starting at position 3668 of SEQ ID NO: 1561878
guguucuaccuaugggaau

SEQ ID NO: 1705164 - RNA, 19 nt, Artificial Sequence
  Description of Artificial Sequence: Synthetic oligonucleotide
  Antisense strand to SEQ ID NO: 1705163
auucccauagguagaacac

SEQ ID NO: 1705165 - RNA, 19 nt, Artificial Sequence
  Description of Artificial Sequence: Synthetic oligonucleotide
  Sense strand starting at position 3671 of SEQ ID NO: 1561878
uucuaccuaugggaauuua

SEQ ID NO: 1705166 - RNA, 19 nt, Artificial Sequence
  Description of Artificial Sequence: Synthetic oligonucleotide
  Antisense strand to SEQ ID NO: 1705165
uaaauucccauagguagaa

SEQ ID NO: 1705167 - RNA, 19 nt, Artificial Sequence
  Description of Artificial Sequence: Synthetic oligonucleotide
  Sense strand starting at position 3809 of SEQ ID NO: 1561878
gaauuagauuguccuggga

SEQ ID NO: 1705168 - RNA, 19 nt, Artificial Sequence
  Description of Artificial Sequence: Synthetic oligonucleotide
  Antisense strand to SEQ ID NO: 1705167
ucccaggacaaucuaauuc

SEQ ID NO: 1705169 - RNA, 19 nt, Artificial Sequence
  Description of Artificial Sequence: Synthetic oligonucleotide
  Sense strand starting at position 3812 of SEQ ID NO: 1561878
uuagauuguccugggagaa

SEQ ID NO: 1705170 - RNA, 19 nt, Artificial Sequence
  Description of Artificial Sequence: Synthetic oligonucleotide
  Antisense strand to SEQ ID NO: 1705169
uucucccaggacaaucuaa

SEQ ID NO: 1705171 - RNA, 19 nt, Artificial Sequence
  Description of Artificial Sequence: Synthetic oligonucleotide
  Sense strand starting at position 3813 of SEQ ID NO: 1561878
uagauuguccugggagaag

SEQ ID NO: 1705172 - RNA, 19 nt, Artificial Sequence
  Description of Artificial Sequence: Synthetic oligonucleotide
  Antisense strand to SEQ ID NO: 1705171
cuucucccaggacaaucua

SEQ ID NO: 1705173 - RNA, 19 nt, Artificial Sequence
  Description of Artificial Sequence: Synthetic oligonucleotide
  Sense strand starting at position 31 of SEQ ID NO: 1561879
ggccuucagugagaacuga

SEQ ID NO: 1705174 - RNA, 19 nt, Artificial Sequence
  Description of Artificial Sequence: Synthetic oligonucleotide
  Antisense strand to SEQ ID NO: 1705173
ucaguucucacugaaggcc

SEQ ID NO: 1705175 - RNA, 19 nt, Artificial Sequence
  Description of Artificial Sequence: Synthetic oligonucleotide
  Sense strand starting at position 91 of SEQ ID NO: 1561879
agcccuagcuaguaagaua

SEQ ID NO: 1705176 - RNA, 19 nt, Artificial Sequence
  Description of Artificial Sequence: Synthetic oligonucleotide
  Antisense strand to SEQ ID NO: 1705175
uaucuuacuagcuagggcu

SEQ ID NO: 1705177 - RNA, 19 nt, Artificial Sequence
  Description of Artificial Sequence: Synthetic oligonucleotide
  Sense strand starting at position 102 of SEQ ID NO: 1561879
guaagauauggcuggauau

SEQ ID NO: 1705178 - RNA, 19 nt, Artificial Sequence
  Description of Artificial Sequence: Synthetic oligonucleotide
  Antisense strand to SEQ ID NO: 1705177
auauccagccauaucuuac

SEQ ID NO: 1705179 - RNA, 19 nt, Artificial Sequence
  Description of Artificial Sequence: Synthetic oligonucleotide
  Sense strand starting at position 103 of SEQ ID NO: 1561879
uaagauauggcuggauauu

SEQ ID NO: 1705180 - RNA, 19 nt, Artificial Sequence
  Description of Artificial Sequence: Synthetic oligonucleotide
  Antisense strand to SEQ ID NO: 1705179
aauauccagccauaucuua

SEQ ID NO: 1705181 - RNA, 19 nt, Artificial Sequence
  Description of Artificial Sequence: Synthetic oligonucleotide
  Sense strand starting at position 259 of SEQ ID NO: 1561879
cuggguucuccgugaaccu

SEQ ID NO: 1705182 - RNA, 19 nt, Artificial Sequence
  Description of Artificial Sequence: Synthetic oligonucleotide
  Antisense strand to SEQ ID NO: 1705181
agguucacggagaacccag

SEQ ID NO: 1705183 - RNA, 19 nt, Artificial Sequence
  Description of Artificial Sequence: Synthetic oligonucleotide
  Sense strand starting at position 399 of SEQ ID NO: 1561879
uagagaaguugcugaucaa

SEQ ID NO: 1705184 - RNA, 19 nt, Artificial Sequence
  Description of Artificial Sequence: Synthetic oligonucleotide
  Antisense strand to SEQ ID NO: 1705183
uugaucagcaacuucucua

SEQ ID NO: 1705185 - RNA, 19 nt, Artificial Sequence
  Description of Artificial Sequence: Synthetic oligonucleotide
  Sense strand starting at position 402 of SEQ ID NO: 1561879
agaaguugcugaucaacca

SEQ ID NO: 1705186 - RNA, 19 nt, Artificial Sequence
  Description of Artificial Sequence: Synthetic oligonucleotide
  Antisense strand to SEQ ID NO: 1705185
ugguugaucagcaacuucu

SEQ ID NO: 1705187 - RNA, 19 nt, Artificial Sequence
  Description of Artificial Sequence: Synthetic oligonucleotide
  Sense strand starting at position 614 of SEQ ID NO: 1561879
guuccaagagcugaaacau

SEQ ID NO: 1705188 - RNA, 19 nt, Artificial Sequence
  Description of Artificial Sequence: Synthetic oligonucleotide
  Antisense strand to SEQ ID NO: 1705187
auguuucagcucuuggaac

SEQ ID NO: 1705189 - RNA, 19 nt, Artificial Sequence
  Description of Artificial Sequence: Synthetic oligonucleotide
  Sense strand starting at position 623 of SEQ ID NO: 1561879
gcugaaacaucuuuacaag

SEQ ID NO: 1705190 - RNA, 19 nt, Artificial Sequence
  Description of Artificial Sequence: Synthetic oligonucleotide
  Antisense strand to SEQ ID NO: 1705189
cuuguaaagauguuucagc

SEQ ID NO: 1705191 - RNA, 19 nt, Artificial Sequence
  Description of Artificial Sequence: Synthetic oligonucleotide
  Sense strand starting at position 764 of SEQ ID NO: 1561879
gucccuucuuacuuauguu

SEQ ID NO: 1705192 - RNA, 19 nt, Artificial Sequence
  Description of Artificial Sequence: Synthetic oligonucleotide
  Antisense strand to SEQ ID NO: 1705191
aacauaaguaagaagggac

SEQ ID NO: 1705193 - RNA, 19 nt, Artificial Sequence
  Description of Artificial Sequence: Synthetic oligonucleotide
  Sense strand starting at position 779 of SEQ ID NO: 1561879
uguuuaaacuaucugacag

SEQ ID NO: 1705194 - RNA, 19 nt, Artificial Sequence
  Description of Artificial Sequence: Synthetic oligonucleotide
  Antisense strand to SEQ ID NO: 1705193
cugucagauaguuuaaaca

SEQ ID NO: 1705195 - RNA, 19 nt, Artificial Sequence
  Description of Artificial Sequence: Synthetic oligonucleotide
  Sense strand starting at position 797 of SEQ ID NO: 1561879
guaucucaauguccuguaa

SEQ ID NO: 1705196 - RNA, 19 nt, Artificial Sequence
  Description of Artificial Sequence: Synthetic oligonucleotide
  Antisense strand to SEQ ID NO: 1705195
uuacaggacauugagauac

SEQ ID NO: 1705197 - RNA, 19 nt, Artificial Sequence
  Description of Artificial Sequence: Synthetic oligonucleotide
  Sense strand starting at position 801 of SEQ ID NO: 1561879
cucaauguccuguaagcau

SEQ ID NO: 1705198 - RNA, 19 nt, Artificial Sequence
  Description of Artificial Sequence: Synthetic oligonucleotide
  Antisense strand to SEQ ID NO: 1705197
augcuuacaggacauugag

SEQ ID NO: 1705199 - RNA, 19 nt, Artificial Sequence
  Description of Artificial Sequence: Synthetic oligonucleotide
  Sense strand starting at position 812 of SEQ ID NO: 1561879
guaagcaugucuguaagcu

SEQ ID NO: 1705200 - RNA, 19 nt, Artificial Sequence
  Description of Artificial Sequence: Synthetic oligonucleotide
  Antisense strand to SEQ ID NO: 1705199
agcuuacagacaugcuuac

SEQ ID NO: 1705201 - RNA, 19 nt, Artificial Sequence
  Description of Artificial Sequence: Synthetic oligonucleotide
  Sense strand starting at position 859 of SEQ ID NO: 1561879
gguuauaaauauggagaua

SEQ ID NO: 1705202 - RNA, 19 nt, Artificial Sequence
  Description of Artificial Sequence: Synthetic oligonucleotide
  Antisense strand to SEQ ID NO: 1705201
uaucuccauauuuauaacc

SEQ ID NO: 1705203 - RNA, 19 nt, Artificial Sequence
  Description of Artificial Sequence: Synthetic oligonucleotide
  Sense strand starting at position 978 of SEQ ID NO: 1561879
cucucuuauucgucagugu

SEQ ID NO: 1705204 - RNA, 19 nt, Artificial Sequence
  Description of Artificial Sequence: Synthetic oligonucleotide
  Antisense strand to SEQ ID NO: 1705203
acacugacgaauaagagag

SEQ ID NO: 1705205 - RNA, 19 nt, Artificial Sequence
  Description of Artificial Sequence: Synthetic oligonucleotide
  Sense strand starting at position 981 of SEQ ID NO: 1561879
ucuuauucgucagugucca

SEQ ID NO: 1705206 - RNA, 19 nt, Artificial Sequence
  Description of Artificial Sequence: Synthetic oligonucleotide
  Antisense strand to SEQ ID NO: 1705205
uggacacugacgaauaaga

SEQ ID NO: 1705207 - RNA, 19 nt, Artificial Sequence
  Description of Artificial Sequence: Synthetic oligonucleotide
  Sense strand starting at position 982 of SEQ ID NO: 1561879
cuuauucgucaguguccau

SEQ ID NO: 1705208 - RNA, 19 nt, Artificial Sequence
  Description of Artificial Sequence: Synthetic oligonucleotide
  Antisense strand to SEQ ID NO: 1705207
auggacacugacgaauaag

SEQ ID NO: 1705209 - RNA, 19 nt, Artificial Sequence
  Description of Artificial Sequence: Synthetic oligonucleotide
  Sense strand starting at position 1054 of SEQ ID NO: 1561879
gguauaacgucuuggauaa

SEQ ID NO: 1705210 - RNA, 19 nt, Artificial Sequence
  Description of Artificial Sequence: Synthetic oligonucleotide
  Antisense strand to SEQ ID NO: 1705209
uuauccaagacguuauacc

SEQ ID NO: 1705211 - RNA, 19 nt, Artificial Sequence
  Description of Artificial Sequence: Synthetic oligonucleotide
  Sense strand starting at position 1055 of SEQ ID NO: 1561879
guauaacgucuuggauaau

SEQ ID NO: 1705212 - RNA, 19 nt, Artificial Sequence
  Description of Artificial Sequence: Synthetic oligonucleotide
  Antisense strand to SEQ ID NO: 1705211
auuauccaagacguuauac

SEQ ID NO: 1705213 - RNA, 19 nt, Artificial Sequence
  Description of Artificial Sequence: Synthetic oligonucleotide
  Sense strand starting at position 1056 of SEQ ID NO: 1561879
uauaacgucuuggauaaua

SEQ ID NO: 1705214 - RNA, 19 nt, Artificial Sequence
  Description of Artificial Sequence: Synthetic oligonucleotide
  Antisense strand to SEQ ID NO: 1705213
uauuauccaagacguuaua

SEQ ID NO: 1705215 - RNA, 19 nt, Artificial Sequence
  Description of Artificial Sequence: Synthetic oligonucleotide
  Sense strand starting at position 1187 of SEQ ID NO: 1561879
gccagaguccuccagcagu

SEQ ID NO: 1705216 - RNA, 19 nt, Artificial Sequence
  Description of Artificial Sequence: Synthetic oligonucleotide
  Antisense strand to SEQ ID NO: 1705215
acugcuggaggacucuggc

SEQ ID NO: 1705217 - RNA, 19 nt, Artificial Sequence
  Description of Artificial Sequence: Synthetic oligonucleotide
  Sense strand starting at position 1200 of SEQ ID NO: 1561879
agcagugguccucaauaug

SEQ ID NO: 1705218 - RNA, 19 nt, Artificial Sequence
  Description of Artificial Sequence: Synthetic oligonucleotide
  Antisense strand to SEQ ID NO: 1705217
cauauugaggaccacugcu

SEQ ID NO: 1705219 - RNA, 19 nt, Artificial Sequence
  Description of Artificial Sequence: Synthetic oligonucleotide
  Sense strand starting at position 1298 of SEQ ID NO: 1561879
uccaguaggucccagaguu

SEQ ID NO: 1705220 - RNA, 19 nt, Artificial Sequence
  Description of Artificial Sequence: Synthetic oligonucleotide
  Antisense strand to SEQ ID NO: 1705219
aacucugggaccuacugga

SEQ ID NO: 1705221 - RNA, 19 nt, Artificial Sequence
  Description of Artificial Sequence: Synthetic oligonucleotide
  Sense strand starting at position 1334 of SEQ ID NO: 1561879
cagcacguguuaucgaacu

SEQ ID NO: 1705222 - RNA, 19 nt, Artificial Sequence
  Description of Artificial Sequence: Synthetic oligonucleotide
  Antisense strand to SEQ ID NO: 1705221
aguucgauaacacgugcug

SEQ ID NO: 1705223 - RNA, 19 nt, Artificial Sequence
  Description of Artificial Sequence: Synthetic oligonucleotide
  Sense strand starting at position 1410 of SEQ ID NO: 1561879
gcucuuucuucugguggua

SEQ ID NO: 1705224 - RNA, 19 nt, Artificial Sequence
  Description of Artificial Sequence: Synthetic oligonucleotide
  Antisense strand to SEQ ID NO: 1705223
uaccaccagaagaaagagc

SEQ ID NO: 1705225 - RNA, 19 nt, Artificial Sequence
  Description of Artificial Sequence: Synthetic oligonucleotide
  Sense strand starting at position 1449 of SEQ ID NO: 1561879
ccagguagaucucgucgau

SEQ ID NO: 1705226 - RNA, 19 nt, Artificial Sequence
  Description of Artificial Sequence: Synthetic oligonucleotide
  Antisense strand to SEQ ID NO: 1705225
aucgacgagaucuaccugg

SEQ ID NO: 1705227 - RNA, 19 nt, Artificial Sequence
  Description of Artificial Sequence: Synthetic oligonucleotide
  Sense strand starting at position 1476 of SEQ ID NO: 1561879
agucgagcucuuggcugaa

SEQ ID NO: 1705228 - RNA, 19 nt, Artificial Sequence
  Description of Artificial Sequence: Synthetic oligonucleotide
  Antisense strand to SEQ ID NO: 1705227
uucagccaagagcucgacu

SEQ ID NO: 1705229 - RNA, 19 nt, Artificial Sequence
  Description of Artificial Sequence: Synthetic oligonucleotide
  Sense strand starting at position 2317 of SEQ ID NO: 1561879
cccuuagagugcugaaacu

SEQ ID NO: 1705230 - RNA, 19 nt, Artificial Sequence
  Description of Artificial Sequence: Synthetic oligonucleotide
  Antisense strand to SEQ ID NO: 1705229
aguuucagcacucuaaggg

SEQ ID NO: 1705231 - RNA, 19 nt, Artificial Sequence
  Description of Artificial Sequence: Synthetic oligonucleotide
  Sense strand starting at position 2468 of SEQ ID NO: 1561879
uuuaacgaguucucuucuu

SEQ ID NO: 1705232 - RNA, 19 nt, Artificial Sequence
  Description of Artificial Sequence: Synthetic oligonucleotide
  Antisense strand to SEQ ID NO: 1705231
aagaagagaacucguuaaa

SEQ ID NO: 1705233 - RNA, 19 nt, Artificial Sequence
  Description of Artificial Sequence: Synthetic oligonucleotide
  Sense strand starting at position 2670 of SEQ ID NO: 1561879
uggagcaucuccugagauu

SEQ ID NO: 1705234 - RNA, 19 nt, Artificial Sequence
  Description of Artificial Sequence: Synthetic oligonucleotide
  Antisense strand to SEQ ID NO: 1705233
aaucucaggagaugcucca

SEQ ID NO: 1705235 - RNA, 19 nt, Artificial Sequence
  Description of Artificial Sequence: Synthetic oligonucleotide
  Sense strand starting at position 2671 of SEQ ID NO: 1561879
ggagcaucuccugagauug

SEQ ID NO: 1705236 - RNA, 19 nt, Artificial Sequence
  Description of Artificial Sequence: Synthetic oligonucleotide
  Antisense strand to SEQ ID NO: 1705235
caaucucaggagaugcucc

SEQ ID NO: 1705237 - RNA, 19 nt, Artificial Sequence
  Description of Artificial Sequence: Synthetic oligonucleotide
  Sense strand starting at position 2681 of SEQ ID NO: 1561879
cugagauugcuccagcgac

SEQ ID NO: 1705238 - RNA, 19 nt, Artificial Sequence
  Description of Artificial Sequence: Synthetic oligonucleotide
  Antisense strand to SEQ ID NO: 1705237
gucgcuggagcaaucucag

SEQ ID NO: 1705239 - RNA, 19 nt, Artificial Sequence
  Description of Artificial Sequence: Synthetic oligonucleotide
  Sense strand starting at position 2772 of SEQ ID NO: 1561879
cgggcagaguccucgggau

SEQ ID NO: 1705240 - RNA, 19 nt, Artificial Sequence
  Description of Artificial Sequence: Synthetic oligonucleotide
  Antisense strand to SEQ ID NO: 1705239
aucccgaggacucugcccg

SEQ ID NO: 1705241 - RNA, 19 nt, Artificial Sequence
  Description of Artificial Sequence: Synthetic oligonucleotide
  Sense strand starting at position 3856 of SEQ ID NO: 1561879
gucaacaacguguguugaa

SEQ ID NO: 1705242 - RNA, 19 nt, Artificial Sequence
  Description of Artificial Sequence: Synthetic oligonucleotide
  Antisense strand to SEQ ID NO: 1705241
uucaacacacguuguugac

SEQ ID NO: 1705243 - RNA, 19 nt, Artificial Sequence
  Description of Artificial Sequence: Synthetic oligonucleotide
  Sense strand starting at position 3909 of SEQ ID NO: 1561879
gugacaggcgucugagaua

SEQ ID NO: 1705244 - RNA, 19 nt, Artificial Sequence
  Description of Artificial Sequence: Synthetic oligonucleotide
  Antisense strand to SEQ ID NO: 1705243
uaucucagacgccugucac

SEQ ID NO: 1705245 - RNA, 19 nt, Artificial Sequence
  Description of Artificial Sequence: Synthetic oligonucleotide
  Sense strand starting at position 3920 of SEQ ID NO: 1561879
cugagauacagcugugaau

SEQ ID NO: 1705246 - RNA, 19 nt, Artificial Sequence
  Description of Artificial Sequence: Synthetic oligonucleotide
  Antisense strand to SEQ ID NO: 1705245
auucacagcuguaucucag

SEQ ID NO: 1705247 - RNA, 19 nt, Artificial Sequence
  Description of Artificial Sequence: Synthetic oligonucleotide
  Sense strand starting at position 3922 of SEQ ID NO: 1561879
gagauacagcugugaauca

SEQ ID NO: 1705248 - RNA, 19 nt, Artificial Sequence
  Description of Artificial Sequence: Synthetic oligonucleotide
  Antisense strand to SEQ ID NO: 1705247
ugauucacagcuguaucuc

SEQ ID NO: 1705249 - RNA, 19 nt, Artificial Sequence
  Description of Artificial Sequence: Synthetic oligonucleotide
  Sense strand starting at position 3923 of SEQ ID NO: 1561879
agauacagcugugaaucaa

SEQ ID NO: 1705250 - RNA, 19 nt, Artificial Sequence
  Description of Artificial Sequence: Synthetic oligonucleotide
  Antisense strand to SEQ ID NO: 1705249
uugauucacagcuguaucu

SEQ ID NO: 1705251 - RNA, 19 nt, Artificial Sequence
  Description of Artificial Sequence: Synthetic oligonucleotide
  Sense strand starting at position 3973 of SEQ ID NO: 1561879
ggaaacagaucauaaacaa

SEQ ID NO: 1705252 - RNA, 19 nt, Artificial Sequence
  Description of Artificial Sequence: Synthetic oligonucleotide
  Antisense strand to SEQ ID NO: 1705251
uuguuuaugaucuguuucc

SEQ ID NO: 1705253 - RNA, 19 nt, Artificial Sequence
  Description of Artificial Sequence: Synthetic oligonucleotide
  Sense strand starting at position 27 of SEQ ID NO: 1561880
ugcaguucccugcagguua

SEQ ID NO: 1705254 - RNA, 19 nt, Artificial Sequence
  Description of Artificial Sequence: Synthetic oligonucleotide
  Antisense strand to SEQ ID NO: 1705253
uaaccugcagggaacugca

SEQ ID NO: 1705255 - RNA, 19 nt, Artificial Sequence
  Description of Artificial Sequence: Synthetic oligonucleotide
  Sense strand starting at position 47 of SEQ ID NO: 1561880
gagugugucccaggacaga

SEQ ID NO: 1705256 - RNA, 19 nt, Artificial Sequence
  Description of Artificial Sequence: Synthetic oligonucleotide
  Antisense strand to SEQ ID NO: 1705255
ucuguccugggacacacuc

SEQ ID NO: 1705257 - RNA, 19 nt, Artificial Sequence
  Description of Artificial Sequence: Synthetic oligonucleotide
  Sense strand starting at position 81 of SEQ ID NO: 1561880
acgggcuggcuucgagaau

SEQ ID NO: 1705258 - RNA, 19 nt, Artificial Sequence
  Description of Artificial Sequence: Synthetic oligonucleotide
  Antisense strand to SEQ ID NO: 1705257
auucucgaagccagcccgu

SEQ ID NO: 1705259 - RNA, 19 nt, Artificial Sequence
  Description of Artificial Sequence: Synthetic oligonucleotide
  Sense strand starting at position 87 of SEQ ID NO: 1561880
uggcuucgagaaugacuga

SEQ ID NO: 1705260 - RNA, 19 nt, Artificial Sequence
  Description of Artificial Sequence: Synthetic oligonucleotide
  Antisense strand to SEQ ID NO: 1705259
ucagucauucucgaagcca

SEQ ID NO: 1705261 - RNA, 19 nt, Artificial Sequence
  Description of Artificial Sequence: Synthetic oligonucleotide
  Sense strand starting at position 490 of SEQ ID NO: 1561880
uacuuaucucagggaguca

SEQ ID NO: 1705262 - RNA, 19 nt, Artificial Sequence
  Description of Artificial Sequence: Synthetic oligonucleotide
  Antisense strand to SEQ ID NO: 1705261
ugacucccugagauaagua

SEQ ID NO: 1705263 - RNA, 19 nt, Artificial Sequence
  Description of Artificial Sequence: Synthetic oligonucleotide
  Sense strand starting at position 545 of SEQ ID NO: 1561880
uucuaugugucugucauuu

SEQ ID NO: 1705264 - RNA, 19 nt, Artificial Sequence
  Description of Artificial Sequence: Synthetic oligonucleotide
  Antisense strand to SEQ ID NO: 1705263
aaaugacagacacauagaa

SEQ ID NO: 1705265 - RNA, 19 nt, Artificial Sequence
  Description of Artificial Sequence: Synthetic oligonucleotide
  Sense strand starting at position 603 of SEQ ID NO: 1561880
aauaacagcgagugcuuaa

SEQ ID NO: 1705266 - RNA, 19 nt, Artificial Sequence
  Description of Artificial Sequence: Synthetic oligonucleotide
  Antisense strand to SEQ ID NO: 1705265
uuaagcacucgcuguuauu

SEQ ID NO: 1705267 - RNA, 19 nt, Artificial Sequence
  Description of Artificial Sequence: Synthetic oligonucleotide
  Sense strand starting at position 606 of SEQ ID NO: 1561880
aacagcgagugcuuaagaa

SEQ ID NO: 1705268 - RNA, 19 nt, Artificial Sequence
  Description of Artificial Sequence: Synthetic oligonucleotide
  Antisense strand to SEQ ID NO: 1705267
uucuuaagcacucgcuguu

SEQ ID NO: 1705269 - RNA, 19 nt, Artificial Sequence
  Description of Artificial Sequence: Synthetic oligonucleotide
  Sense strand starting at position 674 of SEQ ID NO: 1561880
cugcauuccucaguaaugu

SEQ ID NO: 1705270 - RNA, 19 nt, Artificial Sequence
  Description of Artificial Sequence: Synthetic oligonucleotide
  Antisense strand to SEQ ID NO: 1705269
acauuacugaggaaugcag

SEQ ID NO: 1705271 - RNA, 19 nt, Artificial Sequence
  Description of Artificial Sequence: Synthetic oligonucleotide
  Sense strand starting at position 675 of SEQ ID NO: 1561880
ugcauuccucaguaauguc

SEQ ID NO: 1705272 - RNA, 19 nt, Artificial Sequence
  Description of Artificial Sequence: Synthetic oligonucleotide
  Antisense strand to SEQ ID NO: 1705271
gacauuacugaggaaugca

SEQ ID NO: 1705273 - RNA, 19 nt, Artificial Sequence
  Description of Artificial Sequence: Synthetic oligonucleotide
  Sense strand starting at position 692 of SEQ ID NO: 1561880
ucggaucaguguuucucaa

SEQ ID NO: 1705274 - RNA, 19 nt, Artificial Sequence
  Description of Artificial Sequence: Synthetic oligonucleotide
  Antisense strand to SEQ ID NO: 1705273
uugagaaacacugauccga

SEQ ID NO: 1705275 - RNA, 19 nt, Artificial Sequence
  Description of Artificial Sequence: Synthetic oligonucleotide
  Sense strand starting at position 694 of SEQ ID NO: 1561880
ggaucaguguuucucaacu

SEQ ID NO: 1705276 - RNA, 19 nt, Artificial Sequence
  Description of Artificial Sequence: Synthetic oligonucleotide
  Antisense strand to SEQ ID NO: 1705275
aguugagaaacacugaucc

SEQ ID NO: 1705277 - RNA, 19 nt, Artificial Sequence
  Description of Artificial Sequence: Synthetic oligonucleotide
  Sense strand starting at position 908 of SEQ ID NO: 1561880
gggucuuaauccuuacuuc

SEQ ID NO: 1705278 - RNA, 19 nt, Artificial Sequence
  Description of Artificial Sequence: Synthetic oligonucleotide
  Antisense strand to SEQ ID NO: 1705277
gaaguaaggauuaagaccc

SEQ ID NO: 1705279 - RNA, 19 nt, Artificial Sequence
  Description of Artificial Sequence: Synthetic oligonucleotide
  Sense strand starting at position 997 of SEQ ID NO: 1561880
auguuugugaacuggauga

SEQ ID NO: 1705280 - RNA, 19 nt, Artificial Sequence
  Description of Artificial Sequence: Synthetic oligonucleotide
  Antisense strand to SEQ ID NO: 1705279
ucauccaguucacaaacau

SEQ ID NO: 1705281 - RNA, 19 nt, Artificial Sequence
  Description of Artificial Sequence: Synthetic oligonucleotide
  Sense strand starting at position 999 of SEQ ID NO: 1561880
guuugugaacuggaugaau

SEQ ID NO: 1705282 - RNA, 19 nt, Artificial Sequence
  Description of Artificial Sequence: Synthetic oligonucleotide
  Antisense strand to SEQ ID NO: 1705281
auucauccaguucacaaac

SEQ ID NO: 1705283 - RNA, 19 nt, Artificial Sequence
  Description of Artificial Sequence: Synthetic oligonucleotide
  Sense strand starting at position 1019 of SEQ ID NO: 1561880
acuguugagcgcuugguau

SEQ ID NO: 1705284 - RNA, 19 nt, Artificial Sequence
  Description of Artificial Sequence: Synthetic oligonucleotide
  Antisense strand to SEQ ID NO: 1705283
auaccaagcgcucaacagu

SEQ ID NO: 1705285 - RNA, 19 nt, Artificial Sequence
  Description of Artificial Sequence: Synthetic oligonucleotide
  Sense strand starting at position 1037 of SEQ ID NO: 1561880
ugaugagcugcuuacaaua

SEQ ID NO: 1705286 - RNA, 19 nt, Artificial Sequence
  Description of Artificial Sequence: Synthetic oligonucleotide
  Antisense strand to SEQ ID NO: 1705285
uauuguaagcagcucauca

SEQ ID NO: 1705287 - RNA, 19 nt, Artificial Sequence
  Description of Artificial Sequence: Synthetic oligonucleotide
  Sense strand starting at position 1050 of SEQ ID NO: 1561880
acaauaggugcucaaccaa

SEQ ID NO: 1705288 - RNA, 19 nt, Artificial Sequence
  Description of Artificial Sequence: Synthetic oligonucleotide
  Antisense strand to SEQ ID NO: 1705287
uugguugagcaccuauugu

SEQ ID NO: 1705289 - RNA, 19 nt, Artificial Sequence
  Description of Artificial Sequence: Synthetic oligonucleotide
  Sense strand starting at position 1072 of SEQ ID NO: 1561880
uuguccaaucuaugaauga

SEQ ID NO: 1705290 - RNA, 19 nt, Artificial Sequence
  Description of Artificial Sequence: Synthetic oligonucleotide
  Antisense strand to SEQ ID NO: 1705289
ucauucauagauuggacaa

SEQ ID NO: 1705291 - RNA, 19 nt, Artificial Sequence
  Description of Artificial Sequence: Synthetic oligonucleotide
  Sense strand starting at position 1073 of SEQ ID NO: 1561880
uguccaaucuaugaaugaa

SEQ ID NO: 1705292 - RNA, 19 nt, Artificial Sequence
  Description of Artificial Sequence: Synthetic oligonucleotide
  Antisense strand to SEQ ID NO: 1705291
uucauucauagauuggaca

SEQ ID NO: 1705293 - RNA, 19 nt, Artificial Sequence
  Description of Artificial Sequence: Synthetic oligonucleotide
  Sense strand starting at position 1313 of SEQ ID NO: 1561880
ccauacugugccuaaggau

SEQ ID NO: 1705294 - RNA, 19 nt, Artificial Sequence
  Description of Artificial Sequence: Synthetic oligonucleotide
  Antisense strand to SEQ ID NO: 1705293
auccuuaggcacaguaugg

SEQ ID NO: 1705295 - RNA, 19 nt, Artificial Sequence
  Description of Artificial Sequence: Synthetic oligonucleotide
  Sense strand starting at position 1401 of SEQ ID NO: 1561880
ggagaaaccucggcccaca

SEQ ID NO: 1705296 - RNA, 19 nt, Artificial Sequence
  Description of Artificial Sequence: Synthetic oligonucleotide
  Antisense strand to SEQ ID NO: 1705295
ugugggccgagguuucucc

SEQ ID NO: 1705297 - RNA, 19 nt, Artificial Sequence
  Description of Artificial Sequence: Synthetic oligonucleotide
  Sense strand starting at position 2474 of SEQ ID NO: 1561880
agggucuacaugugcuaga

SEQ ID NO: 1705298 - RNA, 19 nt, Artificial Sequence
  Description of Artificial Sequence: Synthetic oligonucleotide
  Antisense strand to SEQ ID NO: 1705297
ucuagcacauguagacccu

SEQ ID NO: 1705299 - RNA, 19 nt, Artificial Sequence
  Description of Artificial Sequence: Synthetic oligonucleotide
  Sense strand starting at position 2475 of SEQ ID NO: 1561880
gggucuacaugugcuagau

SEQ ID NO: 1705300 - RNA, 19 nt, Artificial Sequence
  Description of Artificial Sequence: Synthetic oligonucleotide
  Antisense strand to SEQ ID NO: 1705299
aucuagcacauguagaccc

SEQ ID NO: 1705301 - RNA, 19 nt, Artificial Sequence
  Description of Artificial Sequence: Synthetic oligonucleotide
  Sense strand starting at position 3032 of SEQ ID NO: 1561880
guuggguuggagggaucua

SEQ ID NO: 1705302 - RNA, 19 nt, Artificial Sequence
  Description of Artificial Sequence: Synthetic oligonucleotide
  Antisense strand to SEQ ID NO: 1705301
uagaucccuccaacccaac

SEQ ID NO: 1705303 - RNA, 19 nt, Artificial Sequence
  Description of Artificial Sequence: Synthetic oligonucleotide
  Sense strand starting at position 3045 of SEQ ID NO: 1561880
gaucuauuggguuggagga

SEQ ID NO: 1705304 - RNA, 19 nt, Artificial Sequence
  Description of Artificial Sequence: Synthetic oligonucleotide
  Antisense strand to SEQ ID NO: 1705303
uccuccaacccaauagauc

SEQ ID NO: 1705305 - RNA, 19 nt, Artificial Sequence
  Description of Artificial Sequence: Synthetic oligonucleotide
  Sense strand starting at position 3046 of SEQ ID NO: 1561880
aucuauuggguuggaggaa

SEQ ID NO: 1705306 - RNA, 19 nt, Artificial Sequence
  Description of Artificial Sequence: Synthetic oligonucleotide
  Antisense strand to SEQ ID NO: 1705305
uuccuccaacccaauagau

SEQ ID NO: 1705307 - RNA, 19 nt, Artificial Sequence
  Description of Artificial Sequence: Synthetic oligonucleotide
  Sense strand starting at position 3244 of SEQ ID NO: 1561880
cuuugccuaucaucagaga

SEQ ID NO: 1705308 - RNA, 19 nt, Artificial Sequence
  Description of Artificial Sequence: Synthetic oligonucleotide
  Antisense strand to SEQ ID NO: 1705307
ucucugaugauaggcaaag

SEQ ID NO: 1705309 - RNA, 19 nt, Artificial Sequence
  Description of Artificial Sequence: Synthetic oligonucleotide
  Sense strand starting at position 3245 of SEQ ID NO: 1561880
uuugccuaucaucagagaa

SEQ ID NO: 1705310 - RNA, 19 nt, Artificial Sequence
  Description of Artificial Sequence: Synthetic oligonucleotide
  Antisense strand to SEQ ID NO: 1705309
uucucugaugauaggcaaa

SEQ ID NO: 1705311 - RNA, 19 nt, Artificial Sequence
  Description of Artificial Sequence: Synthetic oligonucleotide
  Sense strand starting at position 3346 of SEQ ID NO: 1561880
gugcucauuaaguggguua

SEQ ID NO: 1705312 - RNA, 19 nt, Artificial Sequence
  Description of Artificial Sequence: Synthetic oligonucleotide
  Antisense strand to SEQ ID NO: 1705311
uaacccacuuaaugagcac

SEQ ID NO: 1705313 - RNA, 19 nt, Artificial Sequence
  Description of Artificial Sequence: Synthetic oligonucleotide
  Sense strand starting at position 3366 of SEQ ID NO: 1561880
gguuaacccuaagaaauga

SEQ ID NO: 1705314 - RNA, 19 nt, Artificial Sequence
  Description of Artificial Sequence: Synthetic oligonucleotide
  Antisense strand to SEQ ID NO: 1705313
ucauuucuuaggguuaacc

SEQ ID NO: 1705315 - RNA, 19 nt, Artificial Sequence
  Description of Artificial Sequence: Synthetic oligonucleotide
  Sense strand starting at position 3579 of SEQ ID NO: 1561880
accuguuuccaagagcuca

SEQ ID NO: 1705316 - RNA, 19 nt, Artificial Sequence
  Description of Artificial Sequence: Synthetic oligonucleotide
  Antisense strand to SEQ ID NO: 1705315
ugagcucuuggaaacaggu

SEQ ID NO: 1705317 - RNA, 19 nt, Artificial Sequence
  Description of Artificial Sequence: Synthetic oligonucleotide
  Sense strand starting at position 3632 of SEQ ID NO: 1561880
gcugaaauacgugauugca

SEQ ID NO: 1705318 - RNA, 19 nt, Artificial Sequence
  Description of Artificial Sequence: Synthetic oligonucleotide
  Antisense strand to SEQ ID NO: 1705317
ugcaaucacguauuucagc

SEQ ID NO: 1705319 - RNA, 19 nt, Artificial Sequence
  Description of Artificial Sequence: Synthetic oligonucleotide
  Sense strand starting at position 3634 of SEQ ID NO: 1561880
ugaaauacgugauugcaga

SEQ ID NO: 1705320 - RNA, 19 nt, Artificial Sequence
  Description of Artificial Sequence: Synthetic oligonucleotide
  Antisense strand to SEQ ID NO: 1705319
ucugcaaucacguauuuca

SEQ ID NO: 1705321 - RNA, 19 nt, Artificial Sequence
  Description of Artificial Sequence: Synthetic oligonucleotide
  Sense strand starting at position 3635 of SEQ ID NO: 1561880
gaaauacgugauugcagaa

SEQ ID NO: 1705322 - RNA, 19 nt, Artificial Sequence
  Description of Artificial Sequence: Synthetic oligonucleotide
  Antisense strand to SEQ ID NO: 1705321
uucugcaaucacguauuuc

SEQ ID NO: 1705323 - RNA, 19 nt, Artificial Sequence
  Description of Artificial Sequence: Synthetic oligonucleotide
  Sense strand starting at position 3664 of SEQ ID NO: 1561880
gaggccacuuuagauagaa

SEQ ID NO: 1705324 - RNA, 19 nt, Artificial Sequence
  Description of Artificial Sequence: Synthetic oligonucleotide
  Antisense strand to SEQ ID NO: 1705323
uucuaucuaaaguggccuc

SEQ ID NO: 1705325 - RNA, 19 nt, Artificial Sequence
  Description of Artificial Sequence: Synthetic oligonucleotide
  Sense strand starting at position 3764 of SEQ ID NO: 1561880
agcuuucuagguggacaga

SEQ ID NO: 1705326 - RNA, 19 nt, Artificial Sequence
  Description of Artificial Sequence: Synthetic oligonucleotide
  Antisense strand to SEQ ID NO: 1705325
ucuguccaccuagaaagcu

SEQ ID NO: 1705327 - RNA, 19 nt, Artificial Sequence
  Description of Artificial Sequence: Synthetic oligonucleotide
  Sense strand starting at position 3898 of SEQ ID NO: 1561880
gucagagggucccuggauu

SEQ ID NO: 1705328 - RNA, 19 nt, Artificial Sequence
  Description of Artificial Sequence: Synthetic oligonucleotide
  Antisense strand to SEQ ID NO: 1705327
aauccagggacccucugac

SEQ ID NO: 1705329 - RNA, 19 nt, Artificial Sequence
  Description of Artificial Sequence: Synthetic oligonucleotide
  Sense strand starting at position 3911 of SEQ ID NO: 1561880
uggauuacauauugagaaa

SEQ ID NO: 1705330 - RNA, 19 nt, Artificial Sequence
  Description of Artificial Sequence: Synthetic oligonucleotide
  Antisense strand to SEQ ID NO: 1705329
uuucucaauauguaaucca

SEQ ID NO: 1705331 - RNA, 19 nt, Artificial Sequence
  Description of Artificial Sequence: Synthetic oligonucleotide
  Sense strand starting at position 3924 of SEQ ID NO: 1561880
gagaaacacuccucuugug

SEQ ID NO: 1705332 - RNA, 19 nt, Artificial Sequence
  Description of Artificial Sequence: Synthetic oligonucleotide
  Antisense strand to SEQ ID NO: 1705331
cacaagaggaguguuucuc

SEQ ID NO: 1705333 - RNA, 19 nt, Artificial Sequence
  Description of Artificial Sequence: Synthetic oligonucleotide
  Sense strand starting at position 190 of SEQ ID NO: 1561881
ccacuugagucucuuacau

SEQ ID NO: 1705334 - RNA, 19 nt, Artificial Sequence
  Description of Artificial Sequence: Synthetic oligonucleotide
  Antisense strand to SEQ ID NO: 1705333
auguaagagacucaagugg

SEQ ID NO: 1705335 - RNA, 19 nt, Artificial Sequence
  Description of Artificial Sequence: Synthetic oligonucleotide
  Sense strand starting at position 264 of SEQ ID NO: 1561881
auggcaagccuccaaagaa

SEQ ID NO: 1705336 - RNA, 19 nt, Artificial Sequence
  Description of Artificial Sequence: Synthetic oligonucleotide
  Antisense strand to SEQ ID NO: 1705335
uucuuuggaggcuugccau

SEQ ID NO: 1705337 - RNA, 19 nt, Artificial Sequence
  Description of Artificial Sequence: Synthetic oligonucleotide
  Sense strand starting at position 524 of SEQ ID NO: 1561881
gcagucacccagugaggua

SEQ ID NO: 1705338 - RNA, 19 nt, Artificial Sequence
  Description of Artificial Sequence: Synthetic oligonucleotide
  Antisense strand to SEQ ID NO: 1705337
uaccucacugggugacugc

SEQ ID NO: 1705339 - RNA, 19 nt, Artificial Sequence
  Description of Artificial Sequence: Synthetic oligonucleotide
  Sense strand starting at position 586 of SEQ ID NO: 1561881
gguggaaucaauugccaga

SEQ ID NO: 1705340 - RNA, 19 nt, Artificial Sequence
  Description of Artificial Sequence: Synthetic oligonucleotide
  Antisense strand to SEQ ID NO: 1705339
ucuggcaauugauuccacc

SEQ ID NO: 1705341 - RNA, 19 nt, Artificial Sequence
  Description of Artificial Sequence: Synthetic oligonucleotide
  Sense strand starting at position 588 of SEQ ID NO: 1561881
uggaaucaauugccagaga

SEQ ID NO: 1705342 - RNA, 19 nt, Artificial Sequence
  Description of Artificial Sequence: Synthetic oligonucleotide
  Antisense strand to SEQ ID NO: 1705341
ucucuggcaauugauucca

SEQ ID NO: 1705343 - RNA, 19 nt, Artificial Sequence
  Description of Artificial Sequence: Synthetic oligonucleotide
  Sense strand starting at position 589 of SEQ ID NO: 1561881
ggaaucaauugccagagaa

SEQ ID NO: 1705344 - RNA, 19 nt, Artificial Sequence
  Description of Artificial Sequence: Synthetic oligonucleotide
  Antisense strand to SEQ ID NO: 1705343
uucucuggcaauugauucc

SEQ ID NO: 1705345 - RNA, 19 nt, Artificial Sequence
  Description of Artificial Sequence: Synthetic oligonucleotide
  Sense strand starting at position 640 of SEQ ID NO: 1561881
cagucucugugauuccaga

SEQ ID NO: 1705346 - RNA, 19 nt, Artificial Sequence
  Description of Artificial Sequence: Synthetic oligonucleotide
  Antisense strand to SEQ ID NO: 1705345
ucuggaaucacagagacug

SEQ ID NO: 1705347 - RNA, 19 nt, Artificial Sequence
  Description of Artificial Sequence: Synthetic oligonucleotide
  Sense strand starting at position 741 of SEQ ID NO: 1561881
uggcuuucggacuggugau

SEQ ID NO: 1705348 - RNA, 19 nt, Artificial Sequence
  Description of Artificial Sequence: Synthetic oligonucleotide
  Antisense strand to SEQ ID NO: 1705347
aucaccaguccgaaagcca

SEQ ID NO: 1705349 - RNA, 19 nt, Artificial Sequence
  Description of Artificial Sequence: Synthetic oligonucleotide
  Sense strand starting at position 893 of SEQ ID NO: 1561881
gaugguagucauggcaaca

SEQ ID NO: 1705350 - RNA, 19 nt, Artificial Sequence
  Description of Artificial Sequence: Synthetic oligonucleotide
  Antisense strand to SEQ ID NO: 1705349
uguugccaugacuaccauc

SEQ ID NO: 1705351 - RNA, 19 nt, Artificial Sequence
  Description of Artificial Sequence: Synthetic oligonucleotide
  Sense strand starting at position 974 of SEQ ID NO: 1561881
gugguuaucagucauuccu

SEQ ID NO: 1705352 - RNA, 19 nt, Artificial Sequence
  Description of Artificial Sequence: Synthetic oligonucleotide
  Antisense strand to SEQ ID NO: 1705351
aggaaugacugauaaccac

SEQ ID NO: 1705353 - RNA, 19 nt, Artificial Sequence
  Description of Artificial Sequence: Synthetic oligonucleotide
  Sense strand starting at position 976 of SEQ ID NO: 1561881
gguuaucagucauuccuuu

SEQ ID NO: 1705354 - RNA, 19 nt, Artificial Sequence
  Description of Artificial Sequence: Synthetic oligonucleotide
  Antisense strand to SEQ ID NO: 1705353
aaaggaaugacugauaacc

SEQ ID NO: 1705355 - RNA, 19 nt, Artificial Sequence
  Description of Artificial Sequence: Synthetic oligonucleotide
  Sense strand starting at position 1196 of SEQ ID NO: 1561881
ucaccacagcccugagaua

SEQ ID NO: 1705356 - RNA, 19 nt, Artificial Sequence
  Description of Artificial Sequence: Synthetic oligonucleotide
  Antisense strand to SEQ ID NO: 1705355
uaucucagggcugugguga

SEQ ID NO: 1705357 - RNA, 19 nt, Artificial Sequence
  Description of Artificial Sequence: Synthetic oligonucleotide
  Sense strand starting at position 1217 of SEQ ID NO: 1561881
gccgauuagcgacacuauu

SEQ ID NO: 1705358 - RNA, 19 nt, Artificial Sequence
  Description of Artificial Sequence: Synthetic oligonucleotide
  Antisense strand to SEQ ID NO: 1705357
aauagugucgcuaaucggc

SEQ ID NO: 1705359 - RNA, 19 nt, Artificial Sequence
  Description of Artificial Sequence: Synthetic oligonucleotide
  Sense strand starting at position 1265 of SEQ ID NO: 1561881
gguugagcaacucgucuaa

SEQ ID NO: 1705360 - RNA, 19 nt, Artificial Sequence
  Description of Artificial Sequence: Synthetic oligonucleotide
  Antisense strand to SEQ ID NO: 1705359
uuagacgaguugcucaacc

SEQ ID NO: 1705361 - RNA, 19 nt, Artificial Sequence
  Description of Artificial Sequence: Synthetic oligonucleotide
  Sense strand starting at position 1269 of SEQ ID NO: 1561881
gagcaacucgucuaagguc

SEQ ID NO: 1705362 - RNA, 19 nt, Artificial Sequence
  Description of Artificial Sequence: Synthetic oligonucleotide
  Antisense strand to SEQ ID NO: 1705361
gaccuuagacgaguugcuc

SEQ ID NO: 1705363 - RNA, 19 nt, Artificial Sequence
  Description of Artificial Sequence: Synthetic oligonucleotide
  Sense strand starting at position 1534 of SEQ ID NO: 1561881
gccgaaaugacccguccaa

SEQ ID NO: 1705364 - RNA, 19 nt, Artificial Sequence
  Description of Artificial Sequence: Synthetic oligonucleotide
  Antisense strand to SEQ ID NO: 1705363
uuggacgggucauuucggc

SEQ ID NO: 1705365 - RNA, 19 nt, Artificial Sequence
  Description of Artificial Sequence: Synthetic oligonucleotide
  Sense strand starting at position 1538 of SEQ ID NO: 1561881
aaaugacccguccaaagua

SEQ ID NO: 1705366 - RNA, 19 nt, Artificial Sequence
  Description of Artificial Sequence: Synthetic oligonucleotide
  Antisense strand to SEQ ID NO: 1705365
uacuuuggacgggucauuu

SEQ ID NO: 1705367 - RNA, 19 nt, Artificial Sequence
  Description of Artificial Sequence: Synthetic oligonucleotide
  Sense strand starting at position 2140 of SEQ ID NO: 1561881
ggguucaugugucugugaa

SEQ ID NO: 1705368 - RNA, 19 nt, Artificial Sequence
  Description of Artificial Sequence: Synthetic oligonucleotide
  Antisense strand to SEQ ID NO: 1705367
uucacagacacaugaaccc

SEQ ID NO: 1705369 - RNA, 19 nt, Artificial Sequence
  Description of Artificial Sequence: Synthetic oligonucleotide
  Sense strand starting at position 2141 of SEQ ID NO: 1561881
gguucaugugucugugaau

SEQ ID NO: 1705370 - RNA, 19 nt, Artificial Sequence
  Description of Artificial Sequence: Synthetic oligonucleotide
  Antisense strand to SEQ ID NO: 1705369
auucacagacacaugaacc

SEQ ID NO: 1705371 - RNA, 19 nt, Artificial Sequence
  Description of Artificial Sequence: Synthetic oligonucleotide
  Sense strand starting at position 2142 of SEQ ID NO: 1561881
guucaugugucugugaaua

SEQ ID NO: 1705372 - RNA, 19 nt, Artificial Sequence
  Description of Artificial Sequence: Synthetic oligonucleotide
  Antisense strand to SEQ ID NO: 1705371
uauucacagacacaugaac

SEQ ID NO: 1705373 - RNA, 19 nt, Artificial Sequence
  Description of Artificial Sequence: Synthetic oligonucleotide
  Sense strand starting at position 2516 of SEQ ID NO: 1561881
gucagucaauccucugaca

SEQ ID NO: 1705374 - RNA, 19 nt, Artificial Sequence
  Description of Artificial Sequence: Synthetic oligonucleotide
  Antisense strand to SEQ ID NO: 1705373
ugucagaggauugacugac

SEQ ID NO: 1705375 - RNA, 19 nt, Artificial Sequence
  Description of Artificial Sequence: Synthetic oligonucleotide
  Sense strand starting at position 2724 of SEQ ID NO: 1561881
ugacuuggcagccagaaua

SEQ ID NO: 1705376 - RNA, 19 nt, Artificial Sequence
  Description of Artificial Sequence: Synthetic oligonucleotide
  Antisense strand to SEQ ID NO: 1705375
uauucuggcugccaaguca

SEQ ID NO: 1705377 - RNA, 19 nt, Artificial Sequence
  Description of Artificial Sequence: Synthetic oligonucleotide
  Sense strand starting at position 3006 of SEQ ID NO: 1561881
aggcuaguguaguccaaau

SEQ ID NO: 1705378 - RNA, 19 nt, Artificial Sequence
  Description of Artificial Sequence: Synthetic oligonucleotide
  Antisense strand to SEQ ID NO: 1705377
auuuggacuacacuagccu

SEQ ID NO: 1705379 - RNA, 19 nt, Artificial Sequence
  Description of Artificial Sequence: Synthetic oligonucleotide
  Sense strand starting at position 3008 of SEQ ID NO: 1561881
gcuaguguaguccaaaugu

SEQ ID NO: 1705380 - RNA, 19 nt, Artificial Sequence
  Description of Artificial Sequence: Synthetic oligonucleotide
  Antisense strand to SEQ ID NO: 1705379
acauuuggacuacacuagc

SEQ ID NO: 1705381 - RNA, 19 nt, Artificial Sequence
  Description of Artificial Sequence: Synthetic oligonucleotide
  Sense strand starting at position 3016 of SEQ ID NO: 1561881
aguccaaaugugugaagau

SEQ ID NO: 1705382 - RNA, 19 nt, Artificial Sequence
  Description of Artificial Sequence: Synthetic oligonucleotide
  Antisense strand to SEQ ID NO: 1705381
aucuucacacauuuggacu

SEQ ID NO: 1705383 - RNA, 19 nt, Artificial Sequence
  Description of Artificial Sequence: Synthetic oligonucleotide
  Sense strand starting at position 3025 of SEQ ID NO: 1561881
gugugaagauggagagaaa

SEQ ID NO: 1705384 - RNA, 19 nt, Artificial Sequence
  Description of Artificial Sequence: Synthetic oligonucleotide
  Antisense strand to SEQ ID NO: 1705383
uuucucuccaucuucacac

SEQ ID NO: 1705385 - RNA, 19 nt, Artificial Sequence
  Description of Artificial Sequence: Synthetic oligonucleotide
  Sense strand starting at position 3125 of SEQ ID NO: 1561881
ggucuaugugaccaagcuu

SEQ ID NO: 1705386 - RNA, 19 nt, Artificial Sequence
  Description of Artificial Sequence: Synthetic oligonucleotide
  Antisense strand to SEQ ID NO: 1705385
aagcuuggucacauagacc

SEQ ID NO: 1705387 - RNA, 19 nt, Artificial Sequence
  Description of Artificial Sequence: Synthetic oligonucleotide
  Sense strand starting at position 3140 of SEQ ID NO: 1561881
gcuuuagcucauggaacau

SEQ ID NO: 1705388 - RNA, 19 nt, Artificial Sequence
  Description of Artificial Sequence: Synthetic oligonucleotide
  Antisense strand to SEQ ID NO: 1705387
auguuccaugagcuaaagc

SEQ ID NO: 1705389 - RNA, 19 nt, Artificial Sequence
  Description of Artificial Sequence: Synthetic oligonucleotide
  Sense strand starting at position 3161 of SEQ ID NO: 1561881
gcagaagugacauaugcca

SEQ ID NO: 1705390 - RNA, 19 nt, Artificial Sequence
  Description of Artificial Sequence: Synthetic oligonucleotide
  Antisense strand to SEQ ID NO: 1705389
uggcauaugucacuucugc

SEQ ID NO: 1705391 - RNA, 19 nt, Artificial Sequence
  Description of Artificial Sequence: Synthetic oligonucleotide
  Sense strand starting at position 3305 of SEQ ID NO: 1561881
ggcugaaugacacauugca

SEQ ID NO: 1705392 - RNA, 19 nt, Artificial Sequence
  Description of Artificial Sequence: Synthetic oligonucleotide
  Antisense strand to SEQ ID NO: 1705391
ugcaaugugucauucagcc

SEQ ID NO: 1705393 - RNA, 19 nt, Artificial Sequence
  Description of Artificial Sequence: Synthetic oligonucleotide
  Sense strand starting at position 3374 of SEQ ID NO: 1561881
uauuaagucgcugacguau

SEQ ID NO: 1705394 - RNA, 19 nt, Artificial Sequence
  Description of Artificial Sequence: Synthetic oligonucleotide
  Antisense strand to SEQ ID NO: 1705393
auacgucagcgacuuaaua

SEQ ID NO: 1705395 - RNA, 19 nt, Artificial Sequence
  Description of Artificial Sequence: Synthetic oligonucleotide
  Sense strand starting at position 3586 of SEQ ID NO: 1561881
aacuuauugcaguggcaac

SEQ ID NO: 1705396 - RNA, 19 nt, Artificial Sequence
  Description of Artificial Sequence: Synthetic oligonucleotide
  Antisense strand to SEQ ID NO: 1705395
guugccacugcaauaaguu

SEQ ID NO: 1705397 - RNA, 19 nt, Artificial Sequence
  Description of Artificial Sequence: Synthetic oligonucleotide
  Sense strand starting at position 3665 of SEQ ID NO: 1561881
ugagcuuggcccugaggau

SEQ ID NO: 1705398 - RNA, 19 nt, Artificial Sequence
  Description of Artificial Sequence: Synthetic oligonucleotide
  Antisense strand to SEQ ID NO: 1705397
auccucagggccaagcuca

SEQ ID NO: 1705399 - RNA, 19 nt, Artificial Sequence
  Description of Artificial Sequence: Synthetic oligonucleotide
  Sense strand starting at position 3666 of SEQ ID NO: 1561881
gagcuuggcccugaggauu

SEQ ID NO: 1705400 - RNA, 19 nt, Artificial Sequence
  Description of Artificial Sequence: Synthetic oligonucleotide
  Antisense strand to SEQ ID NO: 1705399
aauccucagggccaagcuc

SEQ ID NO: 1705401 - RNA, 19 nt, Artificial Sequence
  Description of Artificial Sequence: Synthetic oligonucleotide
  Sense strand starting at position 3679 of SEQ ID NO: 1561881
aggauuuguuuagaagugu

SEQ ID NO: 1705402 - RNA, 19 nt, Artificial Sequence
  Description of Artificial Sequence: Synthetic oligonucleotide
  Antisense strand to SEQ ID NO: 1705401
acacuucuaaacaaauccu

SEQ ID NO: 1705403 - RNA, 19 nt, Artificial Sequence
  Description of Artificial Sequence: Synthetic oligonucleotide
  Sense strand starting at position 3685 of SEQ ID NO: 1561881
uguuuagaagugugagcca

SEQ ID NO: 1705404 - RNA, 19 nt, Artificial Sequence
  Description of Artificial Sequence: Synthetic oligonucleotide
  Antisense strand to SEQ ID NO: 1705403
uggcucacacuucuaaaca

SEQ ID NO: 1705405 - RNA, 19 nt, Artificial Sequence
  Description of Artificial Sequence: Synthetic oligonucleotide
  Sense strand starting at position 3905 of SEQ ID NO: 1561881
gcaacagcaucaguaaguu

SEQ ID NO: 1705406 - RNA, 19 nt, Artificial Sequence
  Description of Artificial Sequence: Synthetic oligonucleotide
  Antisense strand to SEQ ID NO: 1705405
aacuuacugaugcuguugc

SEQ ID NO: 1705407 - RNA, 19 nt, Artificial Sequence
  Description of Artificial Sequence: Synthetic oligonucleotide
  Sense strand starting at position 3921 of SEQ ID NO: 1561881
guuuaauauuccgauuucu

SEQ ID NO: 1705408 - RNA, 19 nt, Artificial Sequence
  Description of Artificial Sequence: Synthetic oligonucleotide
  Antisense strand to SEQ ID NO: 1705407
agaaaucggaauauuaaac

SEQ ID NO: 1705409 - RNA, 19 nt, Artificial Sequence
  Description of Artificial Sequence: Synthetic oligonucleotide
  Sense strand starting at position 3930 of SEQ ID NO: 1561881
uccgauuucugcucagacu

SEQ ID NO: 1705410 - RNA, 19 nt, Artificial Sequence
  Description of Artificial Sequence: Synthetic oligonucleotide
  Antisense strand to SEQ ID NO: 1705409
agucugagcagaaaucgga

SEQ ID NO: 1705411 - RNA, 19 nt, Artificial Sequence
  Description of Artificial Sequence: Synthetic oligonucleotide
  Sense strand starting at position 3956 of SEQ ID NO: 1561881
agcagaaaccugggcugaa

SEQ ID NO: 1705412 - RNA, 19 nt, Artificial Sequence
  Description of Artificial Sequence: Synthetic oligonucleotide
  Antisense strand to SEQ ID NO: 1705411
uucagcccagguuucugcu

SEQ ID NO: 1705413 - RNA, 19 nt, Artificial Sequence
  Description of Artificial Sequence: Synthetic oligonucleotide
  Sense strand starting at position 149 of SEQ ID NO: 1561882
ggaggccauuccugagaac

SEQ ID NO: 1705414 - RNA, 19 nt, Artificial Sequence
  Description of Artificial Sequence: Synthetic oligonucleotide
  Antisense strand to SEQ ID NO: 1705413
guucucaggaauggccucc

SEQ ID NO: 1705415 - RNA, 19 nt, Artificial Sequence
  Description of Artificial Sequence: Synthetic oligonucleotide
  Sense strand starting at position 152 of SEQ ID NO: 1561882
ggccauuccugagaacaca

SEQ ID NO: 1705416 - RNA, 19 nt, Artificial Sequence
  Description of Artificial Sequence: Synthetic oligonucleotide
  Antisense strand to SEQ ID NO: 1705415
uguguucucaggaauggcc

SEQ ID NO: 1705417 - RNA, 19 nt, Artificial Sequence
  Description of Artificial Sequence: Synthetic oligonucleotide
  Sense strand starting at position 656 of SEQ ID NO: 1561882
cgugcaauuccacaugcga

SEQ ID NO: 1705418 - RNA, 19 nt, Artificial Sequence
  Description of Artificial Sequence: Synthetic oligonucleotide
  Antisense strand to SEQ ID NO: 1705417
ucgcauguggaauugcacg

SEQ ID NO: 1705419 - RNA, 19 nt, Artificial Sequence
  Description of Artificial Sequence: Synthetic oligonucleotide
  Sense strand starting at position 1207 of SEQ ID NO: 1561882
gcccuuuguucggcgcaga

SEQ ID NO: 1705420 - RNA, 19 nt, Artificial Sequence
  Description of Artificial Sequence: Synthetic oligonucleotide
  Antisense strand to SEQ ID NO: 1705419
ucugcgccgaacaaagggc

SEQ ID NO: 1705421 - RNA, 19 nt, Artificial Sequence
  Description of Artificial Sequence: Synthetic oligonucleotide
  Sense strand starting at position 1526 of SEQ ID NO: 1561882
acacguaggcgugguagau

SEQ ID NO: 1705422 - RNA, 19 nt, Artificial Sequence
  Description of Artificial Sequence: Synthetic oligonucleotide
  Antisense strand to SEQ ID NO: 1705421
aucuaccacgccuacgugu

SEQ ID NO: 1705423 - RNA, 19 nt, Artificial Sequence
  Description of Artificial Sequence: Synthetic oligonucleotide
  Sense strand starting at position 1571 of SEQ ID NO: 1561882
gcacguuguagaggaaauu

SEQ ID NO: 1705424 - RNA, 19 nt, Artificial Sequence
  Description of Artificial Sequence: Synthetic oligonucleotide
  Antisense strand to SEQ ID NO: 1705423
aauuuccucuacaacgugc

SEQ ID NO: 1705425 - RNA, 19 nt, Artificial Sequence
  Description of Artificial Sequence: Synthetic oligonucleotide
  Sense strand starting at position 1580 of SEQ ID NO: 1561882
agaggaaauucugcagcuu

SEQ ID NO: 1705426 - RNA, 19 nt, Artificial Sequence
  Description of Artificial Sequence: Synthetic oligonucleotide
  Antisense strand to SEQ ID NO: 1705425
aagcugcagaauuuccucu

SEQ ID NO: 1705427 - RNA, 19 nt, Artificial Sequence
  Description of Artificial Sequence: Synthetic oligonucleotide
  Sense strand starting at position 1581 of SEQ ID NO: 1561882
gaggaaauucugcagcuug

SEQ ID NO: 1705428 - RNA, 19 nt, Artificial Sequence
  Description of Artificial Sequence: Synthetic oligonucleotide
  Antisense strand to SEQ ID NO: 1705427
caagcugcagaauuuccuc

SEQ ID NO: 1705429 - RNA, 19 nt, Artificial Sequence
  Description of Artificial Sequence: Synthetic oligonucleotide
  Sense strand starting at position 1649 of SEQ ID NO: 1561882
cgcgagguuugcugaggau

SEQ ID NO: 1705430 - RNA, 19 nt, Artificial Sequence
  Description of Artificial Sequence: Synthetic oligonucleotide
  Antisense strand to SEQ ID NO: 1705429
auccucagcaaaccucgcg

SEQ ID NO: 1705431 - RNA, 19 nt, Artificial Sequence
  Description of Artificial Sequence: Synthetic oligonucleotide
  Sense strand starting at position 1650 of SEQ ID NO: 1561882
gcgagguuugcugaggaug

SEQ ID NO: 1705432 - RNA, 19 nt, Artificial Sequence
  Description of Artificial Sequence: Synthetic oligonucleotide
  Antisense strand to SEQ ID NO: 1705431
cauccucagcaaaccucgc

SEQ ID NO: 1705433 - RNA, 19 nt, Artificial Sequence
  Description of Artificial Sequence: Synthetic oligonucleotide
  Sense strand starting at position 2488 of SEQ ID NO: 1561882
accuuugaguccgguagua

SEQ ID NO: 1705434 - RNA, 19 nt, Artificial Sequence
  Description of Artificial Sequence: Synthetic oligonucleotide
  Antisense strand to SEQ ID NO: 1705433
uacuaccggacucaaaggu

SEQ ID NO: 1705435 - RNA, 19 nt, Artificial Sequence
  Description of Artificial Sequence: Synthetic oligonucleotide
  Sense strand starting at position 2490 of SEQ ID NO: 1561882
cuuugaguccgguaguacu

SEQ ID NO: 1705436 - RNA, 19 nt, Artificial Sequence
  Description of Artificial Sequence: Synthetic oligonucleotide
  Antisense strand to SEQ ID NO: 1705435
aguacuaccggacucaaag

SEQ ID NO: 1705437 - RNA, 19 nt, Artificial Sequence
  Description of Artificial Sequence: Synthetic oligonucleotide
  Sense strand starting at position 3227 of SEQ ID NO: 1561882
gugucaucuucgagugcgu

SEQ ID NO: 1705438 - RNA, 19 nt, Artificial Sequence
  Description of Artificial Sequence: Synthetic oligonucleotide
  Antisense strand to SEQ ID NO: 1705437
acgcacucgaagaugacac

SEQ ID NO: 1705439 - RNA, 19 nt, Artificial Sequence
  Description of Artificial Sequence: Synthetic oligonucleotide
  Sense strand starting at position 3236 of SEQ ID NO: 1561882
ucgagugcgucucugacua

SEQ ID NO: 1705440 - RNA, 19 nt, Artificial Sequence
  Description of Artificial Sequence: Synthetic oligonucleotide
  Antisense strand to SEQ ID NO: 1705439
uagucagagacgcacucga

SEQ ID NO: 1705441 - RNA, 19 nt, Artificial Sequence
  Description of Artificial Sequence: Synthetic oligonucleotide
  Sense strand starting at position 3238 of SEQ ID NO: 1561882
gagugcgucucugacuaca

SEQ ID NO: 1705442 - RNA, 19 nt, Artificial Sequence
  Description of Artificial Sequence: Synthetic oligonucleotide
  Antisense strand to SEQ ID NO: 1705441
uguagucagagacgcacuc

SEQ ID NO: 1705443 - RNA, 19 nt, Artificial Sequence
  Description of Artificial Sequence: Synthetic oligonucleotide
  Sense strand starting at position 3378 of SEQ ID NO: 1561882
gagugagcucuugaguugu

SEQ ID NO: 1705444 - RNA, 19 nt, Artificial Sequence
  Description of Artificial Sequence: Synthetic oligonucleotide
  Antisense strand to SEQ ID NO: 1705443
acaacucaagagcucacuc

SEQ ID NO: 1705445 - RNA, 19 nt, Artificial Sequence
  Description of Artificial Sequence: Synthetic oligonucleotide
  Sense strand starting at position 3380 of SEQ ID NO: 1561882
gugagcucuugaguugugu

SEQ ID NO: 1705446 - RNA, 19 nt, Artificial Sequence
  Description of Artificial Sequence: Synthetic oligonucleotide
  Antisense strand to SEQ ID NO: 1705445
acacaacucaagagcucac

SEQ ID NO: 1705447 - RNA, 19 nt, Artificial Sequence
  Description of Artificial Sequence: Synthetic oligonucleotide
  Sense strand starting at position 3382 of SEQ ID NO: 1561882
gagcucuugaguuguguuu

SEQ ID NO: 1705448 - RNA, 19 nt, Artificial Sequence
  Description of Artificial Sequence: Synthetic oligonucleotide
  Antisense strand to SEQ ID NO: 1705447
aaacacaacucaagagcuc

SEQ ID NO: 1705449 - RNA, 19 nt, Artificial Sequence
  Description of Artificial Sequence: Synthetic oligonucleotide
  Sense strand starting at position 3388 of SEQ ID NO: 1561882
uugaguuguguuugcccuu

SEQ ID NO: 1705450 - RNA, 19 nt, Artificial Sequence
  Description of Artificial Sequence: Synthetic oligonucleotide
  Antisense strand to SEQ ID NO: 1705449
aagggcaaacacaacucaa

SEQ ID NO: 1705451 - RNA, 19 nt, Artificial Sequence
  Description of Artificial Sequence: Synthetic oligonucleotide
  Sense strand starting at position 3389 of SEQ ID NO: 1561882
ugaguuguguuugcccuuu

SEQ ID NO: 1705452 - RNA, 19 nt, Artificial Sequence
  Description of Artificial Sequence: Synthetic oligonucleotide
  Antisense strand to SEQ ID NO: 1705451
aaagggcaaacacaacuca

SEQ ID NO: 1705453 - RNA, 19 nt, Artificial Sequence
  Description of Artificial Sequence: Synthetic oligonucleotide
  Sense strand starting at position 3393 of SEQ ID NO: 1561882
uuguguuugcccuuugguu

SEQ ID NO: 1705454 - RNA, 19 nt, Artificial Sequence
  Description of Artificial Sequence: Synthetic oligonucleotide
  Antisense strand to SEQ ID NO: 1705453
aaccaaagggcaaacacaa

SEQ ID NO: 1705455 - RNA, 19 nt, Artificial Sequence
  Description of Artificial Sequence: Synthetic oligonucleotide
  Sense strand starting at position 3498 of SEQ ID NO: 1561882
aaugcuaaccuguacguua

SEQ ID NO: 1705456 - RNA, 19 nt, Artificial Sequence
  Description of Artificial Sequence: Synthetic oligonucleotide
  Antisense strand to SEQ ID NO: 1705455
uaacguacagguuagcauu

SEQ ID NO: 1705457 - RNA, 19 nt, Artificial Sequence
  Description of Artificial Sequence: Synthetic oligonucleotide
  Sense strand starting at position 3509 of SEQ ID NO: 1561882
guacguuauccaggacguu

SEQ ID NO: 1705458 - RNA, 19 nt, Artificial Sequence
  Description of Artificial Sequence: Synthetic oligonucleotide
  Antisense strand to SEQ ID NO: 1705457
aacguccuggauaacguac

SEQ ID NO: 1705459 - RNA, 19 nt, Artificial Sequence
  Description of Artificial Sequence: Synthetic oligonucleotide
  Sense strand starting at position 3605 of SEQ ID NO: 1561882
ccacgcauuggcugugauu

SEQ ID NO: 1705460 - RNA, 19 nt, Artificial Sequence
  Description of Artificial Sequence: Synthetic oligonucleotide
  Antisense strand to SEQ ID NO: 1705459
aaucacagccaaugcgugg

SEQ ID NO: 1705461 - RNA, 19 nt, Artificial Sequence
  Description of Artificial Sequence: Synthetic oligonucleotide
  Sense strand starting at position 3607 of SEQ ID NO: 1561882
acgcauuggcugugauuac

SEQ ID NO: 1705462 - RNA, 19 nt, Artificial Sequence
  Description of Artificial Sequence: Synthetic oligonucleotide
  Antisense strand to SEQ ID NO: 1705461
guaaucacagccaaugcgu

SEQ ID NO: 1705463 - RNA, 19 nt, Artificial Sequence
  Description of Artificial Sequence: Synthetic oligonucleotide
  Sense strand starting at position 3617 of SEQ ID NO: 1561882
ugugauuaccagcaugaag

SEQ ID NO: 1705464 - RNA, 19 nt, Artificial Sequence
  Description of Artificial Sequence: Synthetic oligonucleotide
  Antisense strand to SEQ ID NO: 1705463
cuucaugcugguaaucaca

SEQ ID NO: 1705465 - RNA, 19 nt, Artificial Sequence
  Description of Artificial Sequence: Synthetic oligonucleotide
  Sense strand starting at position 3655 of SEQ ID NO: 1561882
ugcgguuucucucgauugu

SEQ ID NO: 1705466 - RNA, 19 nt, Artificial Sequence
  Description of Artificial Sequence: Synthetic oligonucleotide
  Antisense strand to SEQ ID NO: 1705465
acaaucgagagaaaccgca

SEQ ID NO: 1705467 - RNA, 19 nt, Artificial Sequence
  Description of Artificial Sequence: Synthetic oligonucleotide
  Sense strand starting at position 3656 of SEQ ID NO: 1561882
gcgguuucucucgauuguu

SEQ ID NO: 1705468 - RNA, 19 nt, Artificial Sequence
  Description of Artificial Sequence: Synthetic oligonucleotide
  Antisense strand to SEQ ID NO: 1705467
aacaaucgagagaaaccgc

SEQ ID NO: 1705469 - RNA, 19 nt, Artificial Sequence
  Description of Artificial Sequence: Synthetic oligonucleotide
  Sense strand starting at position 3659 of SEQ ID NO: 1561882
guuucucucgauuguuaag

SEQ ID NO: 1705470 - RNA, 19 nt, Artificial Sequence
  Description of Artificial Sequence: Synthetic oligonucleotide
  Antisense strand to SEQ ID NO: 1705469
cuuaacaaucgagagaaac

SEQ ID NO: 1705471 - RNA, 19 nt, Artificial Sequence
  Description of Artificial Sequence: Synthetic oligonucleotide
  Sense strand starting at position 3662 of SEQ ID NO: 1561882
ucucucgauuguuaaggga

SEQ ID NO: 1705472 - RNA, 19 nt, Artificial Sequence
  Description of Artificial Sequence: Synthetic oligonucleotide
  Antisense strand to SEQ ID NO: 1705471
ucccuuaacaaucgagaga

SEQ ID NO: 1705473 - RNA, 19 nt, Artificial Sequence
  Description of Artificial Sequence: Synthetic oligonucleotide
  Sense strand starting at position 3935 of SEQ ID NO: 1561882
gcagucaucucagguuuga

SEQ ID NO: 1705474 - RNA, 19 nt, Artificial Sequence
  Description of Artificial Sequence: Synthetic oligonucleotide
  Antisense strand to SEQ ID NO: 1705473
ucaaaccugagaugacugc

SEQ ID NO: 1705475 - RNA, 19 nt, Artificial Sequence
  Description of Artificial Sequence: Synthetic oligonucleotide
  Sense strand starting at position 82 of SEQ ID NO: 1561883
ggagguucucauagugugu

SEQ ID NO: 1705476 - RNA, 19 nt, Artificial Sequence
  Description of Artificial Sequence: Synthetic oligonucleotide
  Antisense strand to SEQ ID NO: 1705475
acacacuaugagaaccucc

SEQ ID NO: 1705477 - RNA, 19 nt, Artificial Sequence
  Description of Artificial Sequence: Synthetic oligonucleotide
  Sense strand starting at position 128 of SEQ ID NO: 1561883
cugggaauuugucaaagau

SEQ ID NO: 1705478 - RNA, 19 nt, Artificial Sequence
  Description of Artificial Sequence: Synthetic oligonucleotide
  Antisense strand to SEQ ID NO: 1705477
aucuuugacaaauucccag

SEQ ID NO: 1705479 - RNA, 19 nt, Artificial Sequence
  Description of Artificial Sequence: Synthetic oligonucleotide
  Sense strand starting at position 155 of SEQ ID NO: 1561883
ucagccugccaucgauuua

SEQ ID NO: 1705480 - RNA, 19 nt, Artificial Sequence
  Description of Artificial Sequence: Synthetic oligonucleotide
  Antisense strand to SEQ ID NO: 1705479
uaaaucgauggcaggcuga

SEQ ID NO: 1705481 - RNA, 19 nt, Artificial Sequence
  Description of Artificial Sequence: Synthetic oligonucleotide
  Sense strand starting at position 228 of SEQ ID NO: 1561883
gaaagugauucggcuacau

SEQ ID NO: 1705482 - RNA, 19 nt, Artificial Sequence
  Description of Artificial Sequence: Synthetic oligonucleotide
  Antisense strand to SEQ ID NO: 1705481
auguagccgaaucacuuuc

SEQ ID NO: 1705483 - RNA, 19 nt, Artificial Sequence
  Description of Artificial Sequence: Synthetic oligonucleotide
  Sense strand starting at position 230 of SEQ ID NO: 1561883
aagugauucggcuacauag

SEQ ID NO: 1705484 - RNA, 19 nt, Artificial Sequence
  Description of Artificial Sequence: Synthetic oligonucleotide
  Antisense strand to SEQ ID NO: 1705483
cuauguagccgaaucacuu

SEQ ID NO: 1705485 - RNA, 19 nt, Artificial Sequence
  Description of Artificial Sequence: Synthetic oligonucleotide
  Sense strand starting at position 259 of SEQ ID NO: 1561883
gagcuccugcuuuagauua

SEQ ID NO: 1705486 - RNA, 19 nt, Artificial Sequence
  Description of Artificial Sequence: Synthetic oligonucleotide
  Antisense strand to SEQ ID NO: 1705485
uaaucuaaagcaggagcuc

SEQ ID NO: 1705487 - RNA, 19 nt, Artificial Sequence
  Description of Artificial Sequence: Synthetic oligonucleotide
  Sense strand starting at position 264 of SEQ ID NO: 1561883
ccugcuuuagauuauguaa

SEQ ID NO: 1705488 - RNA, 19 nt, Artificial Sequence
  Description of Artificial Sequence: Synthetic oligonucleotide
  Antisense strand to SEQ ID NO: 1705487
uuacauaaucuaaagcagg

SEQ ID NO: 1705489 - RNA, 19 nt, Artificial Sequence
  Description of Artificial Sequence: Synthetic oligonucleotide
  Sense strand starting at position 277 of SEQ ID NO: 1561883
auguaaagcaucuguagag

SEQ ID NO: 1705490 - RNA, 19 nt, Artificial Sequence
  Description of Artificial Sequence: Synthetic oligonucleotide
  Antisense strand to SEQ ID NO: 1705489
cucuacagaugcuuuacau

SEQ ID NO: 1705491 - RNA, 19 nt, Artificial Sequence
  Description of Artificial Sequence: Synthetic oligonucleotide
  Sense strand starting at position 358 of SEQ ID NO: 1561883
cucugagccucugugaaau

SEQ ID NO: 1705492 - RNA, 19 nt, Artificial Sequence
  Description of Artificial Sequence: Synthetic oligonucleotide
  Antisense strand to SEQ ID NO: 1705491
auuucacagaggcucagag

SEQ ID NO: 1705493 - RNA, 19 nt, Artificial Sequence
  Description of Artificial Sequence: Synthetic oligonucleotide
  Sense strand starting at position 364 of SEQ ID NO: 1561883
gccucugugaaauggaaau

SEQ ID NO: 1705494 - RNA, 19 nt, Artificial Sequence
  Description of Artificial Sequence: Synthetic oligonucleotide
  Antisense strand to SEQ ID NO: 1705493
auuuccauuucacagaggc

SEQ ID NO: 1705495 - RNA, 19 nt, Artificial Sequence
  Description of Artificial Sequence: Synthetic oligonucleotide
  Sense strand starting at position 395 of SEQ ID NO: 1561883
cucaaagugugguuaugaa

SEQ ID NO: 1705496 - RNA, 19 nt, Artificial Sequence
  Description of Artificial Sequence: Synthetic oligonucleotide
  Antisense strand to SEQ ID NO: 1705495
uucauaaccacacuuugag

SEQ ID NO: 1705497 - RNA, 19 nt, Artificial Sequence
  Description of Artificial Sequence: Synthetic oligonucleotide
  Sense strand starting at position 499 of SEQ ID NO: 1561883
caggcaaaccuggguuuau

SEQ ID NO: 1705498 - RNA, 19 nt, Artificial Sequence
  Description of Artificial Sequence: Synthetic oligonucleotide
  Antisense strand to SEQ ID NO: 1705497
auaaacccagguuugccug

SEQ ID NO: 1705499 - RNA, 19 nt, Artificial Sequence
  Description of Artificial Sequence: Synthetic oligonucleotide
  Sense strand starting at position 500 of SEQ ID NO: 1561883
aggcaaaccuggguuuauc

SEQ ID NO: 1705500 - RNA, 19 nt, Artificial Sequence
  Description of Artificial Sequence: Synthetic oligonucleotide
  Antisense strand to SEQ ID NO: 1705499
gauaaacccagguuugccu

SEQ ID NO: 1705501 - RNA, 19 nt, Artificial Sequence
  Description of Artificial Sequence: Synthetic oligonucleotide
  Sense strand starting at position 550 of SEQ ID NO: 1561883
agcuauuuguccuccaggu

SEQ ID NO: 1705502 - RNA, 19 nt, Artificial Sequence
  Description of Artificial Sequence: Synthetic oligonucleotide
  Antisense strand to SEQ ID NO: 1705501
accuggaggacaaauagcu

SEQ ID NO: 1705503 - RNA, 19 nt, Artificial Sequence
  Description of Artificial Sequence: Synthetic oligonucleotide
  Sense strand starting at position 578 of SEQ ID NO: 1561883
cugcacaacguagauaaua

SEQ ID NO: 1705504 - RNA, 19 nt, Artificial Sequence
  Description of Artificial Sequence: Synthetic oligonucleotide
  Antisense strand to SEQ ID NO: 1705503
uauuaucuacguugugcag

SEQ ID NO: 1705505 - RNA, 19 nt, Artificial Sequence
  Description of Artificial Sequence: Synthetic oligonucleotide
  Sense strand starting at position 637 of SEQ ID NO: 1561883
auagaaagugcucagccuu

SEQ ID NO: 1705506 - RNA, 19 nt, Artificial Sequence
  Description of Artificial Sequence: Synthetic oligonucleotide
  Antisense strand to SEQ ID NO: 1705505
aaggcugagcacuuucuau

SEQ ID NO: 1705507 - RNA, 19 nt, Artificial Sequence
  Description of Artificial Sequence: Synthetic oligonucleotide
  Sense strand starting at position 777 of SEQ ID NO: 1561883
augccuagacuagggauua

SEQ ID NO: 1705508 - RNA, 19 nt, Artificial Sequence
  Description of Artificial Sequence: Synthetic oligonucleotide
  Antisense strand to SEQ ID NO: 1705507
uaaucccuagucuaggcau

SEQ ID NO: 1705509 - RNA, 19 nt, Artificial Sequence
  Description of Artificial Sequence: Synthetic oligonucleotide
  Sense strand starting at position 923 of SEQ ID NO: 1561883
gggauaauguugcuuugga

SEQ ID NO: 1705510 - RNA, 19 nt, Artificial Sequence
  Description of Artificial Sequence: Synthetic oligonucleotide
  Antisense strand to SEQ ID NO: 1705509
uccaaagcaacauuauccc

SEQ ID NO: 1705511 - RNA, 19 nt, Artificial Sequence
  Description of Artificial Sequence: Synthetic oligonucleotide
  Sense strand starting at position 924 of SEQ ID NO: 1561883
ggauaauguugcuuuggau

SEQ ID NO: 1705512 - RNA, 19 nt, Artificial Sequence
  Description of Artificial Sequence: Synthetic oligonucleotide
  Antisense strand to SEQ ID NO: 1705511
auccaaagcaacauuaucc

SEQ ID NO: 1705513 - RNA, 19 nt, Artificial Sequence
  Description of Artificial Sequence: Synthetic oligonucleotide
  Sense strand starting at position 948 of SEQ ID NO: 1561883
auuauugugguauauguca

SEQ ID NO: 1705514 - RNA, 19 nt, Artificial Sequence
  Description of Artificial Sequence: Synthetic oligonucleotide
  Antisense strand to SEQ ID NO: 1705513
ugacauauaccacaauaau

SEQ ID NO: 1705515 - RNA, 19 nt, Artificial Sequence
  Description of Artificial Sequence: Synthetic oligonucleotide
  Sense strand starting at position 961 of SEQ ID NO: 1561883
augucaaagcccugggaaa

SEQ ID NO: 1705516 - RNA, 19 nt, Artificial Sequence
  Description of Artificial Sequence: Synthetic oligonucleotide
  Antisense strand to SEQ ID NO: 1705515
uuucccagggcuuugacau

SEQ ID NO: 1705517 - RNA, 19 nt, Artificial Sequence
  Description of Artificial Sequence: Synthetic oligonucleotide
  Sense strand starting at position 1021 of SEQ ID NO: 1561883
guggucagaccugagucua

SEQ ID NO: 1705518 - RNA, 19 nt, Artificial Sequence
  Description of Artificial Sequence: Synthetic oligonucleotide
  Antisense strand to SEQ ID NO: 1705517
uagacucaggucugaccac

SEQ ID NO: 1705519 - RNA, 19 nt, Artificial Sequence
  Description of Artificial Sequence: Synthetic oligonucleotide
  Sense strand starting at position 1200 of SEQ ID NO: 1561883
acaauaaacgugugaugua

SEQ ID NO: 1705520 - RNA, 19 nt, Artificial Sequence
  Description of Artificial Sequence: Synthetic oligonucleotide
  Antisense strand to SEQ ID NO: 1705519
uacaucacacguuuauugu

SEQ ID NO: 1705521 - RNA, 19 nt, Artificial Sequence
  Description of Artificial Sequence: Synthetic oligonucleotide
  Sense strand starting at position 1305 of SEQ ID NO: 1561883
gcauaauauugggcaaauc

SEQ ID NO: 1705522 - RNA, 19 nt, Artificial Sequence
  Description of Artificial Sequence: Synthetic oligonucleotide
  Antisense strand to SEQ ID NO: 1705521
gauuugcccaauauuaugc

SEQ ID NO: 1705523 - RNA, 19 nt, Artificial Sequence
  Description of Artificial Sequence: Synthetic oligonucleotide
  Sense strand starting at position 1559 of SEQ ID NO: 1561883
acaccucacucgguuuaau

SEQ ID NO: 1705524 - RNA, 19 nt, Artificial Sequence
  Description of Artificial Sequence: Synthetic oligonucleotide
  Antisense strand to SEQ ID NO: 1705523
auuaaaccgagugaggugu

SEQ ID NO: 1705525 - RNA, 19 nt, Artificial Sequence
  Description of Artificial Sequence: Synthetic oligonucleotide
  Sense strand starting at position 1569 of SEQ ID NO: 1561883
cgguuuaaucccuacacca

SEQ ID NO: 1705526 - RNA, 19 nt, Artificial Sequence
  Description of Artificial Sequence: Synthetic oligonucleotide
  Antisense strand to SEQ ID NO: 1705525
ugguguagggauuaaaccg

SEQ ID NO: 1705527 - RNA, 19 nt, Artificial Sequence
  Description of Artificial Sequence: Synthetic oligonucleotide
  Sense strand starting at position 2215 of SEQ ID NO: 1561883
uacuuaauugaguguuuag

SEQ ID NO: 1705528 - RNA, 19 nt, Artificial Sequence
  Description of Artificial Sequence: Synthetic oligonucleotide
  Antisense strand to SEQ ID NO: 1705527
cuaaacacucaauuaagua

SEQ ID NO: 1705529 - RNA, 19 nt, Artificial Sequence
  Description of Artificial Sequence: Synthetic oligonucleotide
  Sense strand starting at position 2309 of SEQ ID NO: 1561883
gaucuuaugucgcccauuu

SEQ ID NO: 1705530 - RNA, 19 nt, Artificial Sequence
  Description of Artificial Sequence: Synthetic oligonucleotide
  Antisense strand to SEQ ID NO: 1705529
aaaugggcgacauaagauc

SEQ ID NO: 1705531 - RNA, 19 nt, Artificial Sequence
  Description of Artificial Sequence: Synthetic oligonucleotide
  Sense strand starting at position 2369 of SEQ ID NO: 1561883
gaguuagggagcuguagaa

SEQ ID NO: 1705532 - RNA, 19 nt, Artificial Sequence
  Description of Artificial Sequence: Synthetic oligonucleotide
  Antisense strand to SEQ ID NO: 1705531
uucuacagcucccuaacuc

SEQ ID NO: 1705533 - RNA, 19 nt, Artificial Sequence
  Description of Artificial Sequence: Synthetic oligonucleotide
  Sense strand starting at position 2539 of SEQ ID NO: 1561883
gccaaagagcuuuguagag

SEQ ID NO: 1705534 - RNA, 19 nt, Artificial Sequence
  Description of Artificial Sequence: Synthetic oligonucleotide
  Antisense strand to SEQ ID NO: 1705533
cucuacaaagcucuuuggc

SEQ ID NO: 1705535 - RNA, 19 nt, Artificial Sequence
  Description of Artificial Sequence: Synthetic oligonucleotide
  Sense strand starting at position 2548 of SEQ ID NO: 1561883
cuuuguagagguugugaaa

SEQ ID NO: 1705536 - RNA, 19 nt, Artificial Sequence
  Description of Artificial Sequence: Synthetic oligonucleotide
  Antisense strand to SEQ ID NO: 1705535
uuucacaaccucuacaaag

SEQ ID NO: 1705537 - RNA, 19 nt, Artificial Sequence
  Description of Artificial Sequence: Synthetic oligonucleotide
  Sense strand starting at position 2625 of SEQ ID NO: 1561883
gagacuagggccuggauau

SEQ ID NO: 1705538 - RNA, 19 nt, Artificial Sequence
  Description of Artificial Sequence: Synthetic oligonucleotide
  Antisense strand to SEQ ID NO: 1705537
auauccaggcccuagucuc

SEQ ID NO: 1705539 - RNA, 19 nt, Artificial Sequence
  Description of Artificial Sequence: Synthetic oligonucleotide
  Sense strand starting at position 2640 of SEQ ID NO: 1561883
auaugagccuuugcacaua

SEQ ID NO: 1705540 - RNA, 19 nt, Artificial Sequence
  Description of Artificial Sequence: Synthetic oligonucleotide
  Antisense strand to SEQ ID NO: 1705539
uaugugcaaaggcucauau

SEQ ID NO: 1705541 - RNA, 19 nt, Artificial Sequence
  Description of Artificial Sequence: Synthetic oligonucleotide
  Sense strand starting at position 2682 of SEQ ID NO: 1561883
uaccaacguuuauugagua

SEQ ID NO: 1705542 - RNA, 19 nt, Artificial Sequence
  Description of Artificial Sequence: Synthetic oligonucleotide
  Antisense strand to SEQ ID NO: 1705541
uacucaauaaacguuggua

SEQ ID NO: 1705543 - RNA, 19 nt, Artificial Sequence
  Description of Artificial Sequence: Synthetic oligonucleotide
  Sense strand starting at position 2696 of SEQ ID NO: 1561883
gaguacuuaccuuggguca

SEQ ID NO: 1705544 - RNA, 19 nt, Artificial Sequence
  Description of Artificial Sequence: Synthetic oligonucleotide
  Antisense strand to SEQ ID NO: 1705543
ugacccaagguaaguacuc

SEQ ID NO: 1705545 - RNA, 19 nt, Artificial Sequence
  Description of Artificial Sequence: Synthetic oligonucleotide
  Sense strand starting at position 2697 of SEQ ID NO: 1561883
aguacuuaccuugggucaa

SEQ ID NO: 1705546 - RNA, 19 nt, Artificial Sequence
  Description of Artificial Sequence: Synthetic oligonucleotide
  Antisense strand to SEQ ID NO: 1705545
uugacccaagguaaguacu

SEQ ID NO: 1705547 - RNA, 19 nt, Artificial Sequence
  Description of Artificial Sequence: Synthetic oligonucleotide
  Sense strand starting at position 2841 of SEQ ID NO: 1561883
uucugaguccucuaggcca

SEQ ID NO: 1705548 - RNA, 19 nt, Artificial Sequence
  Description of Artificial Sequence: Synthetic oligonucleotide
  Antisense strand to SEQ ID NO: 1705547
uggccuagaggacucagaa

SEQ ID NO: 1705549 - RNA, 19 nt, Artificial Sequence
  Description of Artificial Sequence: Synthetic oligonucleotide
  Sense strand starting at position 3372 of SEQ ID NO: 1561883
cuuacuguucgccagaaac

SEQ ID NO: 1705550 - RNA, 19 nt, Artificial Sequence
  Description of Artificial Sequence: Synthetic oligonucleotide
  Antisense strand to SEQ ID NO: 1705549
guuucuggcgaacaguaag

SEQ ID NO: 1705551 - RNA, 19 nt, Artificial Sequence
  Description of Artificial Sequence: Synthetic oligonucleotide
  Sense strand starting at position 3374 of SEQ ID NO: 1561883
uacuguucgccagaaaccu

SEQ ID NO: 1705552 - RNA, 19 nt, Artificial Sequence
  Description of Artificial Sequence: Synthetic oligonucleotide
  Antisense strand to SEQ ID NO: 1705551
agguuucuggcgaacagua

SEQ ID NO: 1705553 - RNA, 19 nt, Artificial Sequence
  Description of Artificial Sequence: Synthetic oligonucleotide
  Sense strand starting at position 3948 of SEQ ID NO: 1561883
cacagauuguuggcagaau

SEQ ID NO: 1705554 - RNA, 19 nt, Artificial Sequence
  Description of Artificial Sequence: Synthetic oligonucleotide
  Antisense strand to SEQ ID NO: 1705553
auucugccaacaaucugug

SEQ ID NO: 1705555 - RNA, 19 nt, Artificial Sequence
  Description of Artificial Sequence: Synthetic oligonucleotide
  Sense strand starting at position 42 of SEQ ID NO: 1561884
aggaaaucugcacauuguu

SEQ ID NO: 1705556 - RNA, 19 nt, Artificial Sequence
  Description of Artificial Sequence: Synthetic oligonucleotide
  Antisense strand to SEQ ID NO: 1705555
aacaaugugcagauuuccu

SEQ ID NO: 1705557 - RNA, 19 nt, Artificial Sequence
  Description of Artificial Sequence: Synthetic oligonucleotide
  Sense strand starting at position 70 of SEQ ID NO: 1561884
gaaagaguugcucacccuu

SEQ ID NO: 1705558 - RNA, 19 nt, Artificial Sequence
  Description of Artificial Sequence: Synthetic oligonucleotide
  Antisense strand to SEQ ID NO: 1705557
aagggugagcaacucuuuc

SEQ ID NO: 1705559 - RNA, 19 nt, Artificial Sequence
  Description of Artificial Sequence: Synthetic oligonucleotide
  Sense strand starting at position 111 of SEQ ID NO: 1561884
ugacccuugaucugaggau

SEQ ID NO: 1705560 - RNA, 19 nt, Artificial Sequence
  Description of Artificial Sequence: Synthetic oligonucleotide
  Antisense strand to SEQ ID NO: 1705559
auccucagaucaaggguca

SEQ ID NO: 1705561 - RNA, 19 nt, Artificial Sequence
  Description of Artificial Sequence: Synthetic oligonucleotide
  Sense strand starting at position 146 of SEQ ID NO: 1561884
gguuucuaaugacuagguu

SEQ ID NO: 1705562 - RNA, 19 nt, Artificial Sequence
  Description of Artificial Sequence: Synthetic oligonucleotide
  Antisense strand to SEQ ID NO: 1705561
aaccuagucauuagaaacc

SEQ ID NO: 1705563 - RNA, 19 nt, Artificial Sequence
  Description of Artificial Sequence: Synthetic oligonucleotide
  Sense strand starting at position 147 of SEQ ID NO: 1561884
guuucuaaugacuagguua

SEQ ID NO: 1705564 - RNA, 19 nt, Artificial Sequence
  Description of Artificial Sequence: Synthetic oligonucleotide
  Antisense strand to SEQ ID NO: 1705563
uaaccuagucauuagaaac

SEQ ID NO: 1705565 - RNA, 19 nt, Artificial Sequence
  Description of Artificial Sequence: Synthetic oligonucleotide
  Sense strand starting at position 155 of SEQ ID NO: 1561884
ugacuagguuaggugugaa

SEQ ID NO: 1705566 - RNA, 19 nt, Artificial Sequence
  Description of Artificial Sequence: Synthetic oligonucleotide
  Antisense strand to SEQ ID NO: 1705565
uucacaccuaaccuaguca

SEQ ID NO: 1705567 - RNA, 19 nt, Artificial Sequence
  Description of Artificial Sequence: Synthetic oligonucleotide
  Sense strand starting at position 175 of SEQ ID NO: 1561884
gcaggagaggcuuggcaaa

SEQ ID NO: 1705568 - RNA, 19 nt, Artificial Sequence
  Description of Artificial Sequence: Synthetic oligonucleotide
  Antisense strand to SEQ ID NO: 1705567
uuugccaagccucuccugc

SEQ ID NO: 1705569 - RNA, 19 nt, Artificial Sequence
  Description of Artificial Sequence: Synthetic oligonucleotide
  Sense strand starting at position 354 of SEQ ID NO: 1561884
aaucuuagaguugguauga

SEQ ID NO: 1705570 - RNA, 19 nt, Artificial Sequence
  Description of Artificial Sequence: Synthetic oligonucleotide
  Antisense strand to SEQ ID NO: 1705569
ucauaccaacucuaagauu

SEQ ID NO: 1705571 - RNA, 19 nt, Artificial Sequence
  Description of Artificial Sequence: Synthetic oligonucleotide
  Sense strand starting at position 377 of SEQ ID NO: 1561884
cugacuccuggauguaaau

SEQ ID NO: 1705572 - RNA, 19 nt, Artificial Sequence
  Description of Artificial Sequence: Synthetic oligonucleotide
  Antisense strand to SEQ ID NO: 1705571
auuuacauccaggagucag

SEQ ID NO: 1705573 - RNA, 19 nt, Artificial Sequence
  Description of Artificial Sequence: Synthetic oligonucleotide
  Sense strand starting at position 386 of SEQ ID NO: 1561884
ggauguaaaucaccuagca

SEQ ID NO: 1705574 - RNA, 19 nt, Artificial Sequence
  Description of Artificial Sequence: Synthetic oligonucleotide
  Antisense strand to SEQ ID NO: 1705573
ugcuaggugauuuacaucc

SEQ ID NO: 1705575 - RNA, 19 nt, Artificial Sequence
  Description of Artificial Sequence: Synthetic oligonucleotide
  Sense strand starting at position 415 of SEQ ID NO: 1561884
ccuguagggagaggugaau

SEQ ID NO: 1705576 - RNA, 19 nt, Artificial Sequence
  Description of Artificial Sequence: Synthetic oligonucleotide
  Antisense strand to SEQ ID NO: 1705575
auucaccucucccuacagg

SEQ ID NO: 1705577 - RNA, 19 nt, Artificial Sequence
  Description of Artificial Sequence: Synthetic oligonucleotide
  Sense strand starting at position 428 of SEQ ID NO: 1561884
gugaauaaccacuggcuua

SEQ ID NO: 1705578 - RNA, 19 nt, Artificial Sequence
  Description of Artificial Sequence: Synthetic oligonucleotide
  Antisense strand to SEQ ID NO: 1705577
uaagccagugguuauucac

SEQ ID NO: 1705579 - RNA, 19 nt, Artificial Sequence
  Description of Artificial Sequence: Synthetic oligonucleotide
  Sense strand starting at position 595 of SEQ ID NO: 1561884
aaggcauggguguaugaga

SEQ ID NO: 1705580 - RNA, 19 nt, Artificial Sequence
  Description of Artificial Sequence: Synthetic oligonucleotide
  Antisense strand to SEQ ID NO: 1705579
ucucauacacccaugccuu

SEQ ID NO: 1705581 - RNA, 19 nt, Artificial Sequence
  Description of Artificial Sequence: Synthetic oligonucleotide
  Sense strand starting at position 850 of SEQ ID NO: 1561884
caacaugguuggucacagu

SEQ ID NO: 1705582 - RNA, 19 nt, Artificial Sequence
  Description of Artificial Sequence: Synthetic oligonucleotide
  Antisense strand to SEQ ID NO: 1705581
acugugaccaaccauguug

SEQ ID NO: 1705583 - RNA, 19 nt, Artificial Sequence
  Description of Artificial Sequence: Synthetic oligonucleotide
  Sense strand starting at position 861 of SEQ ID NO: 1561884
gucacagucacaggguuaa

SEQ ID NO: 1705584 - RNA, 19 nt, Artificial Sequence
  Description of Artificial Sequence: Synthetic oligonucleotide
  Antisense strand to SEQ ID NO: 1705583
uuaacccugugacugugac

SEQ ID NO: 1705585 - RNA, 19 nt, Artificial Sequence
  Description of Artificial Sequence: Synthetic oligonucleotide
  Sense strand starting at position 1185 of SEQ ID NO: 1561884
guguauaucugacuuucca

SEQ ID NO: 1705586 - RNA, 19 nt, Artificial Sequence
  Description of Artificial Sequence: Synthetic oligonucleotide
  Antisense strand to SEQ ID NO: 1705585
uggaaagucagauauacac

SEQ ID NO: 1705587 - RNA, 19 nt, Artificial Sequence
  Description of Artificial Sequence: Synthetic oligonucleotide
  Sense strand starting at position 1192 of SEQ ID NO: 1561884
ucugacuuuccauagcuga

SEQ ID NO: 1705588 - RNA, 19 nt, Artificial Sequence
  Description of Artificial Sequence: Synthetic oligonucleotide
  Antisense strand to SEQ ID NO: 1705587
ucagcuauggaaagucaga

SEQ ID NO: 1705589 - RNA, 19 nt, Artificial Sequence
  Description of Artificial Sequence: Synthetic oligonucleotide
  Sense strand starting at position 1199 of SEQ ID NO: 1561884
uuccauagcugagucuaaa

SEQ ID NO: 1705590 - RNA, 19 nt, Artificial Sequence
  Description of Artificial Sequence: Synthetic oligonucleotide
  Antisense strand to SEQ ID NO: 1705589
uuuagacucagcuauggaa

SEQ ID NO: 1705591 - RNA, 19 nt, Artificial Sequence
  Description of Artificial Sequence: Synthetic oligonucleotide
  Sense strand starting at position 1362 of SEQ ID NO: 1561884
ggacaaugugcauaucaca

SEQ ID NO: 1705592 - RNA, 19 nt, Artificial Sequence
  Description of Artificial Sequence: Synthetic oligonucleotide
  Antisense strand to SEQ ID NO: 1705591
ugugauaugcacauugucc

SEQ ID NO: 1705593 - RNA, 19 nt, Artificial Sequence
  Description of Artificial Sequence: Synthetic oligonucleotide
  Sense strand starting at position 2432 of SEQ ID NO: 1561884
gugccugcugcuuagauuu

SEQ ID NO: 1705594 - RNA, 19 nt, Artificial Sequence
  Description of Artificial Sequence: Synthetic oligonucleotide
  Antisense strand to SEQ ID NO: 1705593
aaaucuaagcagcaggcac

SEQ ID NO: 1705595 - RNA, 19 nt, Artificial Sequence
  Description of Artificial Sequence: Synthetic oligonucleotide
  Sense strand starting at position 2438 of SEQ ID NO: 1561884
gcugcuuagauuuggugau

SEQ ID NO: 1705596 - RNA, 19 nt, Artificial Sequence
  Description of Artificial Sequence: Synthetic oligonucleotide
  Antisense strand to SEQ ID NO: 1705595
aucaccaaaucuaagcagc

SEQ ID NO: 1705597 - RNA, 19 nt, Artificial Sequence
  Description of Artificial Sequence: Synthetic oligonucleotide
  Sense strand starting at position 2451 of SEQ ID NO: 1561884
ggugaugaggaguaagcau

SEQ ID NO: 1705598 - RNA, 19 nt, Artificial Sequence
  Description of Artificial Sequence: Synthetic oligonucleotide
  Antisense strand to SEQ ID NO: 1705597
augcuuacuccucaucacc

SEQ ID NO: 1705599 - RNA, 19 nt, Artificial Sequence
  Description of Artificial Sequence: Synthetic oligonucleotide
  Sense strand starting at position 2472 of SEQ ID NO: 1561884
gucccagcgcccuugaauu

SEQ ID NO: 1705600 - RNA, 19 nt, Artificial Sequence
  Description of Artificial Sequence: Synthetic oligonucleotide
  Antisense strand to SEQ ID NO: 1705599
aauucaagggcgcugggac

SEQ ID NO: 1705601 - RNA, 19 nt, Artificial Sequence
  Description of Artificial Sequence: Synthetic oligonucleotide
  Sense strand starting at position 2526 of SEQ ID NO: 1561884
aaggcuuugaggugaugau

SEQ ID NO: 1705602 - RNA, 19 nt, Artificial Sequence
  Description of Artificial Sequence: Synthetic oligonucleotide
  Antisense strand to SEQ ID NO: 1705601
aucaucaccucaaagccuu

SEQ ID NO: 1705603 - RNA, 19 nt, Artificial Sequence
  Description of Artificial Sequence: Synthetic oligonucleotide
  Sense strand starting at position 2545 of SEQ ID NO: 1561884
ggcugugugcgaguucugu

SEQ ID NO: 1705604 - RNA, 19 nt, Artificial Sequence
  Description of Artificial Sequence: Synthetic oligonucleotide
  Antisense strand to SEQ ID NO: 1705603
acagaacucgcacacagcc

SEQ ID NO: 1705605 - RNA, 19 nt, Artificial Sequence
  Description of Artificial Sequence: Synthetic oligonucleotide
  Sense strand starting at position 2551 of SEQ ID NO: 1561884
gugcgaguucuguucuuga

SEQ ID NO: 1705606 - RNA, 19 nt, Artificial Sequence
  Description of Artificial Sequence: Synthetic oligonucleotide
  Antisense strand to SEQ ID NO: 1705605
ucaagaacagaacucgcac

SEQ ID NO: 1705607 - RNA, 19 nt, Artificial Sequence
  Description of Artificial Sequence: Synthetic oligonucleotide
  Sense strand starting at position 2575 of SEQ ID NO: 1561884
agauaaugaccuuggccaa

SEQ ID NO: 1705608 - RNA, 19 nt, Artificial Sequence
  Description of Artificial Sequence: Synthetic oligonucleotide
  Antisense strand to SEQ ID NO: 1705607
uuggccaaggucauuaucu

SEQ ID NO: 1705609 - RNA, 19 nt, Artificial Sequence
  Description of Artificial Sequence: Synthetic oligonucleotide
  Sense strand starting at position 2615 of SEQ ID NO: 1561884
ucagcuuuggagugagacu

SEQ ID NO: 1705610 - RNA, 19 nt, Artificial Sequence
  Description of Artificial Sequence: Synthetic oligonucleotide
  Antisense strand to SEQ ID NO: 1705609
agucucacuccaaagcuga

SEQ ID NO: 1705611 - RNA, 19 nt, Artificial Sequence
  Description of Artificial Sequence: Synthetic oligonucleotide
  Sense strand starting at position 2678 of SEQ ID NO: 1561884
ccaaauucguauguccaga

SEQ ID NO: 1705612 - RNA, 19 nt, Artificial Sequence
  Description of Artificial Sequence: Synthetic oligonucleotide
  Antisense strand to SEQ ID NO: 1705611
ucuggacauacgaauuugg

SEQ ID NO: 1705613 - RNA, 19 nt, Artificial Sequence
  Description of Artificial Sequence: Synthetic oligonucleotide
  Sense strand starting at position 2683 of SEQ ID NO: 1561884
uucguauguccagaccuaa

SEQ ID NO: 1705614 - RNA, 19 nt, Artificial Sequence
  Description of Artificial Sequence: Synthetic oligonucleotide
  Antisense strand to SEQ ID NO: 1705613
uuaggucuggacauacgaa

SEQ ID NO: 1705615 - RNA, 19 nt, Artificial Sequence
  Description of Artificial Sequence: Synthetic oligonucleotide
  Sense strand starting at position 2697 of SEQ ID NO: 1561884
ccuaauccucaguaugaug

SEQ ID NO: 1705616 - RNA, 19 nt, Artificial Sequence
  Description of Artificial Sequence: Synthetic oligonucleotide
  Antisense strand to SEQ ID NO: 1705615
caucauacugaggauuagg

SEQ ID NO: 1705617 - RNA, 19 nt, Artificial Sequence
  Description of Artificial Sequence: Synthetic oligonucleotide
  Sense strand starting at position 2738 of SEQ ID NO: 1561884
gaaagugauugggucauga

SEQ ID NO: 1705618 - RNA, 19 nt, Artificial Sequence
  Description of Artificial Sequence: Synthetic oligonucleotide
  Antisense strand to SEQ ID NO: 1705617
ucaugacccaaucacuuuc

SEQ ID NO: 1705619 - RNA, 19 nt, Artificial Sequence
  Description of Artificial Sequence: Synthetic oligonucleotide
  Sense strand starting at position 3542 of SEQ ID NO: 1561884
aaaguuauuccugguuaga

SEQ ID NO: 1705620 - RNA, 19 nt, Artificial Sequence
  Description of Artificial Sequence: Synthetic oligonucleotide
  Antisense strand to SEQ ID NO: 1705619
ucuaaccaggaauaacuuu

SEQ ID NO: 1705621 - RNA, 19 nt, Artificial Sequence
  Description of Artificial Sequence: Synthetic oligonucleotide
  Sense strand starting at position 3544 of SEQ ID NO: 1561884
aguuauuccugguuagaug

SEQ ID NO: 1705622 - RNA, 19 nt, Artificial Sequence
  Description of Artificial Sequence: Synthetic oligonucleotide
  Antisense strand to SEQ ID NO: 1705621
caucuaaccaggaauaacu

SEQ ID NO: 1705623 - RNA, 19 nt, Artificial Sequence
  Description of Artificial Sequence: Synthetic oligonucleotide
  Sense strand starting at position 3656 of SEQ ID NO: 1561884
ucaaguaauguacagucua

SEQ ID NO: 1705624 - RNA, 19 nt, Artificial Sequence
  Description of Artificial Sequence: Synthetic oligonucleotide
  Antisense strand to SEQ ID NO: 1705623
uagacuguacauuacuuga

SEQ ID NO: 1705625 - RNA, 19 nt, Artificial Sequence
  Description of Artificial Sequence: Synthetic oligonucleotide
  Sense strand starting at position 3895 of SEQ ID NO: 1561884
gagagaaccgcauaugcaa

SEQ ID NO: 1705626 - RNA, 19 nt, Artificial Sequence
  Description of Artificial Sequence: Synthetic oligonucleotide
  Antisense strand to SEQ ID NO: 1705625
uugcauaugcgguucucuc

SEQ ID NO: 1705627 - RNA, 19 nt, Artificial Sequence
  Description of Artificial Sequence: Synthetic oligonucleotide
  Sense strand starting at position 3922 of SEQ ID NO: 1561884
aggcaauauuaagcuuaaa

SEQ ID NO: 1705628 - RNA, 19 nt, Artificial Sequence
  Description of Artificial Sequence: Synthetic oligonucleotide
  Antisense strand to SEQ ID NO: 1705627
uuuaagcuuaauauugccu

SEQ ID NO: 1705629 - RNA, 19 nt, Artificial Sequence
  Description of Artificial Sequence: Synthetic oligonucleotide
  Sense strand starting at position 3976 of SEQ ID NO: 1561884
aguguaguuguaaggguua

SEQ ID NO: 1705630 - RNA, 19 nt, Artificial Sequence
  Description of Artificial Sequence: Synthetic oligonucleotide
  Antisense strand to SEQ ID NO: 1705629
uaacccuuacaacuacacu

SEQ ID NO: 1705631 - RNA, 19 nt, Artificial Sequence
  Description of Artificial Sequence: Synthetic oligonucleotide
  Sense strand starting at position 3978 of SEQ ID NO: 1561884
uguaguuguaaggguuaga

SEQ ID NO: 1705632 - RNA, 19 nt, Artificial Sequence
  Description of Artificial Sequence: Synthetic oligonucleotide
  Antisense strand to SEQ ID NO: 1705631
ucuaacccuuacaacuaca

SEQ ID NO: 1705633 - RNA, 19 nt, Artificial Sequence
  Description of Artificial Sequence: Synthetic oligonucleotide
  Sense strand starting at position 3981 of SEQ ID NO: 1561884
aguuguaaggguuagaguu

SEQ ID NO: 1705634 - RNA, 19 nt, Artificial Sequence
  Description of Artificial Sequence: Synthetic oligonucleotide
  Antisense strand to SEQ ID NO: 1705633
aacucuaacccuuacaacu

SEQ ID NO: 1705635 - RNA, 19 nt, Artificial Sequence
  Description of Artificial Sequence: Synthetic oligonucleotide
  Sense strand starting at position 137 of SEQ ID NO: 1561885
ccuuguaucccagacagca

SEQ ID NO: 1705636 - RNA, 19 nt, Artificial Sequence
  Description of Artificial Sequence: Synthetic oligonucleotide
  Antisense strand to SEQ ID NO: 1705635
ugcugucugggauacaagg

SEQ ID NO: 1705637 - RNA, 19 nt, Artificial Sequence
  Description of Artificial Sequence: Synthetic oligonucleotide
  Sense strand starting at position 160 of SEQ ID NO: 1561885
gaggaaugcuauguguuug

SEQ ID NO: 1705638 - RNA, 19 nt, Artificial Sequence
  Description of Artificial Sequence: Synthetic oligonucleotide
  Antisense strand to SEQ ID NO: 1705637
caaacacauagcauuccuc

SEQ ID NO: 1705639 - RNA, 19 nt, Artificial Sequence
  Description of Artificial Sequence: Synthetic oligonucleotide
  Sense strand starting at position 175 of SEQ ID NO: 1561885
uuugguaggugcuuaacaa

SEQ ID NO: 1705640 - RNA, 19 nt, Artificial Sequence
  Description of Artificial Sequence: Synthetic oligonucleotide
  Antisense strand to SEQ ID NO: 1705639
uuguuaagcaccuaccaaa

SEQ ID NO: 1705641 - RNA, 19 nt, Artificial Sequence
  Description of Artificial Sequence: Synthetic oligonucleotide
  Sense strand starting at position 176 of SEQ ID NO: 1561885
uugguaggugcuuaacaaa

SEQ ID NO: 1705642 - RNA, 19 nt, Artificial Sequence
  Description of Artificial Sequence: Synthetic oligonucleotide
  Antisense strand to SEQ ID NO: 1705641
uuuguuaagcaccuaccaa

SEQ ID NO: 1705643 - RNA, 19 nt, Artificial Sequence
  Description of Artificial Sequence: Synthetic oligonucleotide
  Sense strand starting at position 610 of SEQ ID NO: 1561885
guuuaucuucuaugaugga

SEQ ID NO: 1705644 - RNA, 19 nt, Artificial Sequence
  Description of Artificial Sequence: Synthetic oligonucleotide
  Antisense strand to SEQ ID NO: 1705643
uccaucauagaagauaaac

SEQ ID NO: 1705645 - RNA, 19 nt, Artificial Sequence
  Description of Artificial Sequence: Synthetic oligonucleotide
  Sense strand starting at position 788 of SEQ ID NO: 1561885
gaaacagauuuagaugagu

SEQ ID NO: 1705646 - RNA, 19 nt, Artificial Sequence
  Description of Artificial Sequence: Synthetic oligonucleotide
  Antisense strand to SEQ ID NO: 1705645
acucaucuaaaucuguuuc

SEQ ID NO: 1705647 - RNA, 19 nt, Artificial Sequence
  Description of Artificial Sequence: Synthetic oligonucleotide
  Sense strand starting at position 916 of SEQ ID NO: 1561885
gcccuaugguaagucaaau

SEQ ID NO: 1705648 - RNA, 19 nt, Artificial Sequence
  Description of Artificial Sequence: Synthetic oligonucleotide
  Antisense strand to SEQ ID NO: 1705647
auuugacuuaccauagggc

SEQ ID NO: 1705649 - RNA, 19 nt, Artificial Sequence
  Description of Artificial Sequence: Synthetic oligonucleotide
  Sense strand starting at position 966 of SEQ ID NO: 1561885
ucaaauggcucugugugaa

SEQ ID NO: 1705650 - RNA, 19 nt, Artificial Sequence
  Description of Artificial Sequence: Synthetic oligonucleotide
  Antisense strand to SEQ ID NO: 1705649
uucacacagagccauuuga

SEQ ID NO: 1705651 - RNA, 19 nt, Artificial Sequence
  Description of Artificial Sequence: Synthetic oligonucleotide
  Sense strand starting at position 1151 of SEQ ID NO: 1561885
aaagcauuacuucguagaa

SEQ ID NO: 1705652 - RNA, 19 nt, Artificial Sequence
  Description of Artificial Sequence: Synthetic oligonucleotide
  Antisense strand to SEQ ID NO: 1705651
uucuacgaaguaaugcuuu

SEQ ID NO: 1705653 - RNA, 19 nt, Artificial Sequence
  Description of Artificial Sequence: Synthetic oligonucleotide
  Sense strand starting at position 1152 of SEQ ID NO: 1561885
aagcauuacuucguagaaa

SEQ ID NO: 1705654 - RNA, 19 nt, Artificial Sequence
  Description of Artificial Sequence: Synthetic oligonucleotide
  Antisense strand to SEQ ID NO: 1705653
uuucuacgaaguaaugcuu

SEQ ID NO: 1705655 - RNA, 19 nt, Artificial Sequence
  Description of Artificial Sequence: Synthetic oligonucleotide
  Sense strand starting at position 1267 of SEQ ID NO: 1561885
gagucaggacuuugucaaa

SEQ ID NO: 1705656 - RNA, 19 nt, Artificial Sequence
  Description of Artificial Sequence: Synthetic oligonucleotide
  Antisense strand to SEQ ID NO: 1705655
uuugacaaaguccugacuc

SEQ ID NO: 1705657 - RNA, 19 nt, Artificial Sequence
  Description of Artificial Sequence: Synthetic oligonucleotide
  Sense strand starting at position 1322 of SEQ ID NO: 1561885
ugcuaaguuaucgauuaga

SEQ ID NO: 1705658 - RNA, 19 nt, Artificial Sequence
  Description of Artificial Sequence: Synthetic oligonucleotide
  Antisense strand to SEQ ID NO: 1705657
ucuaaucgauaacuuagca

SEQ ID NO: 1705659 - RNA, 19 nt, Artificial Sequence
  Description of Artificial Sequence: Synthetic oligonucleotide
  Sense strand starting at position 1325 of SEQ ID NO: 1561885
uaaguuaucgauuagacau

SEQ ID NO: 1705660 - RNA, 19 nt, Artificial Sequence
  Description of Artificial Sequence: Synthetic oligonucleotide
  Antisense strand to SEQ ID NO: 1705659
augucuaaucgauaacuua

SEQ ID NO: 1705661 - RNA, 19 nt, Artificial Sequence
  Description of Artificial Sequence: Synthetic oligonucleotide
  Sense strand starting at position 1384 of SEQ ID NO: 1561885
uagcaugguuaauuguuaa

SEQ ID NO: 1705662 - RNA, 19 nt, Artificial Sequence
  Description of Artificial Sequence: Synthetic oligonucleotide
  Antisense strand to SEQ ID NO: 1705661
uuaacaauuaaccaugcua

SEQ ID NO: 1705663 - RNA, 19 nt, Artificial Sequence
  Description of Artificial Sequence: Synthetic oligonucleotide
  Sense strand starting at position 1387 of SEQ ID NO: 1561885
caugguuaauuguuaagag

SEQ ID NO: 1705664 - RNA, 19 nt, Artificial Sequence
  Description of Artificial Sequence: Synthetic oligonucleotide
  Antisense strand to SEQ ID NO: 1705663
cucuuaacaauuaaccaug

SEQ ID NO: 1705665 - RNA, 19 nt, Artificial Sequence
  Description of Artificial Sequence: Synthetic oligonucleotide
  Sense strand starting at position 1403 of SEQ ID NO: 1561885
gagaacuucugaguuggua

SEQ ID NO: 1705666 - RNA, 19 nt, Artificial Sequence
  Description of Artificial Sequence: Synthetic oligonucleotide
  Antisense strand to SEQ ID NO: 1705665
uaccaacucagaaguucuc

SEQ ID NO: 1705667 - RNA, 19 nt, Artificial Sequence
  Description of Artificial Sequence: Synthetic oligonucleotide
  Sense strand starting at position 1405 of SEQ ID NO: 1561885
gaacuucugaguugguaga

SEQ ID NO: 1705668 - RNA, 19 nt, Artificial Sequence
  Description of Artificial Sequence: Synthetic oligonucleotide
  Antisense strand to SEQ ID NO: 1705667
ucuaccaacucagaaguuc

SEQ ID NO: 1705669 - RNA, 19 nt, Artificial Sequence
  Description of Artificial Sequence: Synthetic oligonucleotide
  Sense strand starting at position 1406 of SEQ ID NO: 1561885
aacuucugaguugguagaa

SEQ ID NO: 1705670 - RNA, 19 nt, Artificial Sequence
  Description of Artificial Sequence: Synthetic oligonucleotide
  Antisense strand to SEQ ID NO: 1705669
uucuaccaacucagaaguu

SEQ ID NO: 1705671 - RNA, 19 nt, Artificial Sequence
  Description of Artificial Sequence: Synthetic oligonucleotide
  Sense strand starting at position 1407 of SEQ ID NO: 1561885
acuucugaguugguagaaa

SEQ ID NO: 1705672 - RNA, 19 nt, Artificial Sequence
  Description of Artificial Sequence: Synthetic oligonucleotide
  Antisense strand to SEQ ID NO: 1705671
uuucuaccaacucagaagu

SEQ ID NO: 1705673 - RNA, 19 nt, Artificial Sequence
  Description of Artificial Sequence: Synthetic oligonucleotide
  Sense strand starting at position 1597 of SEQ ID NO: 1561885
ggguccucuccagggcaau

SEQ ID NO: 1705674 - RNA, 19 nt, Artificial Sequence
  Description of Artificial Sequence: Synthetic oligonucleotide
  Antisense strand to SEQ ID NO: 1705673
auugcccuggagaggaccc

SEQ ID NO: 1705675 - RNA, 19 nt, Artificial Sequence
  Description of Artificial Sequence: Synthetic oligonucleotide
  Sense strand starting at position 2207 of SEQ ID NO: 1561885
acccucauggccugaacaa

SEQ ID NO: 1705676 - RNA, 19 nt, Artificial Sequence
  Description of Artificial Sequence: Synthetic oligonucleotide
  Antisense strand to SEQ ID NO: 1705675
uuguucaggccaugagggu

SEQ ID NO: 1705677 - RNA, 19 nt, Artificial Sequence
  Description of Artificial Sequence: Synthetic oligonucleotide
  Sense strand starting at position 2478 of SEQ ID NO: 1561885
ucgggauaccgauaaacga

SEQ ID NO: 1705678 - RNA, 19 nt, Artificial Sequence
  Description of Artificial Sequence: Synthetic oligonucleotide
  Antisense strand to SEQ ID NO: 1705677
ucguuuaucgguaucccga

SEQ ID NO: 1705679 - RNA, 19 nt, Artificial Sequence
  Description of Artificial Sequence: Synthetic oligonucleotide
  Sense strand starting at position 2497 of SEQ ID NO: 1561885
aaauuaauaggguguugga

SEQ ID NO: 1705680 - RNA, 19 nt, Artificial Sequence
  Description of Artificial Sequence: Synthetic oligonucleotide
  Antisense strand to SEQ ID NO: 1705679
uccaacacccuauuaauuu

SEQ ID NO: 1705681 - RNA, 19 nt, Artificial Sequence
  Description of Artificial Sequence: Synthetic oligonucleotide
  Sense strand starting at position 2531 of SEQ ID NO: 1561885
cgggaaugucauuauauug

SEQ ID NO: 1705682 - RNA, 19 nt, Artificial Sequence
  Description of Artificial Sequence: Synthetic oligonucleotide
  Antisense strand to SEQ ID NO: 1705681
caauauaaugacauucccg

SEQ ID NO: 1705683 - RNA, 19 nt, Artificial Sequence
  Description of Artificial Sequence: Synthetic oligonucleotide
  Sense strand starting at position 2538 of SEQ ID NO: 1561885
gucauuauauuggcuagaa

SEQ ID NO: 1705684 - RNA, 19 nt, Artificial Sequence
  Description of Artificial Sequence: Synthetic oligonucleotide
  Antisense strand to SEQ ID NO: 1705683
uucuagccaauauaaugac

SEQ ID NO: 1705685 - RNA, 19 nt, Artificial Sequence
  Description of Artificial Sequence: Synthetic oligonucleotide
  Sense strand starting at position 2539 of SEQ ID NO: 1561885
ucauuauauuggcuagaau

SEQ ID NO: 1705686 - RNA, 19 nt, Artificial Sequence
  Description of Artificial Sequence: Synthetic oligonucleotide
  Antisense strand to SEQ ID NO: 1705685
auucuagccaauauaauga

SEQ ID NO: 1705687 - RNA, 19 nt, Artificial Sequence
  Description of Artificial Sequence: Synthetic oligonucleotide
  Sense strand starting at position 2632 of SEQ ID NO: 1561885
ggcgaacacaacugguauu

SEQ ID NO: 1705688 - RNA, 19 nt, Artificial Sequence
  Description of Artificial Sequence: Synthetic oligonucleotide
  Antisense strand to SEQ ID NO: 1705687
aauaccaguuguguucgcc

SEQ ID NO: 1705689 - RNA, 19 nt, Artificial Sequence
  Description of Artificial Sequence: Synthetic oligonucleotide
  Sense strand starting at position 3001 of SEQ ID NO: 1561885
uccuguguagaagguaaau

SEQ ID NO: 1705690 - RNA, 19 nt, Artificial Sequence
  Description of Artificial Sequence: Synthetic oligonucleotide
  Antisense strand to SEQ ID NO: 1705689
auuuaccuucuacacagga

SEQ ID NO: 1705691 - RNA, 19 nt, Artificial Sequence
  Description of Artificial Sequence: Synthetic oligonucleotide
  Sense strand starting at position 3033 of SEQ ID NO: 1561885
cagugaaucgagcaugcau

SEQ ID NO: 1705692 - RNA, 19 nt, Artificial Sequence
  Description of Artificial Sequence: Synthetic oligonucleotide
  Antisense strand to SEQ ID NO: 1705691
augcaugcucgauucacug

SEQ ID NO: 1705693 - RNA, 19 nt, Artificial Sequence
  Description of Artificial Sequence: Synthetic oligonucleotide
  Sense strand starting at position 3048 of SEQ ID NO: 1561885
gcaugaaaucguuugcgca

SEQ ID NO: 1705694 - RNA, 19 nt, Artificial Sequence
  Description of Artificial Sequence: Synthetic oligonucleotide
  Antisense strand to SEQ ID NO: 1705693
ugcgcaaacgauuucaugc

SEQ ID NO: 1705695 - RNA, 19 nt, Artificial Sequence
  Description of Artificial Sequence: Synthetic oligonucleotide
  Sense strand starting at position 3118 of SEQ ID NO: 1561885
gcuauaaugggagacgcaa

SEQ ID NO: 1705696 - RNA, 19 nt, Artificial Sequence
  Description of Artificial Sequence: Synthetic oligonucleotide
  Antisense strand to SEQ ID NO: 1705695
uugcgucucccauuauagc

SEQ ID NO: 1705697 - RNA, 19 nt, Artificial Sequence
  Description of Artificial Sequence: Synthetic oligonucleotide
  Sense strand starting at position 3255 of SEQ ID NO: 1561885
acggcauagaguggugaau

SEQ ID NO: 1705698 - RNA, 19 nt, Artificial Sequence
  Description of Artificial Sequence: Synthetic oligonucleotide
  Antisense strand to SEQ ID NO: 1705697
auucaccacucuaugccgu

SEQ ID NO: 1705699 - RNA, 19 nt, Artificial Sequence
  Description of Artificial Sequence: Synthetic oligonucleotide
  Sense strand starting at position 3261 of SEQ ID NO: 1561885
uagaguggugaaugcauca

SEQ ID NO: 1705700 - RNA, 19 nt, Artificial Sequence
  Description of Artificial Sequence: Synthetic oligonucleotide
  Antisense strand to SEQ ID NO: 1705699
ugaugcauucaccacucua

SEQ ID NO: 1705701 - RNA, 19 nt, Artificial Sequence
  Description of Artificial Sequence: Synthetic oligonucleotide
  Sense strand starting at position 3281 of SEQ ID NO: 1561885
gugggaugaugucugcaag

SEQ ID NO: 1705702 - RNA, 19 nt, Artificial Sequence
  Description of Artificial Sequence: Synthetic oligonucleotide
  Antisense strand to SEQ ID NO: 1705701
cuugcagacaucaucccac

SEQ ID NO: 1705703 - RNA, 19 nt, Artificial Sequence
  Description of Artificial Sequence: Synthetic oligonucleotide
  Sense strand starting at position 3282 of SEQ ID NO: 1561885
ugggaugaugucugcaagu

SEQ ID NO: 1705704 - RNA, 19 nt, Artificial Sequence
  Description of Artificial Sequence: Synthetic oligonucleotide
  Antisense strand to SEQ ID NO: 1705703
acuugcagacaucauccca

SEQ ID NO: 1705705 - RNA, 19 nt, Artificial Sequence
  Description of Artificial Sequence: Synthetic oligonucleotide
  Sense strand starting at position 3284 of SEQ ID NO: 1561885
ggaugaugucugcaaguac

SEQ ID NO: 1705706 - RNA, 19 nt, Artificial Sequence
  Description of Artificial Sequence: Synthetic oligonucleotide
  Antisense strand to SEQ ID NO: 1705705
guacuugcagacaucaucc

SEQ ID NO: 1705707 - RNA, 19 nt, Artificial Sequence
  Description of Artificial Sequence: Synthetic oligonucleotide
  Sense strand starting at position 3394 of SEQ ID NO: 1561885
cccggaaaucacuggguuu

SEQ ID NO: 1705708 - RNA, 19 nt, Artificial Sequence
  Description of Artificial Sequence: Synthetic oligonucleotide
  Antisense strand to SEQ ID NO: 1705707
aaacccagugauuuccggg

SEQ ID NO: 1705709 - RNA, 19 nt, Artificial Sequence
  Description of Artificial Sequence: Synthetic oligonucleotide
  Sense strand starting at position 3737 of SEQ ID NO: 1561885
agugcuaacuuacucauga

SEQ ID NO: 1705710 - RNA, 19 nt, Artificial Sequence
  Description of Artificial Sequence: Synthetic oligonucleotide
  Antisense strand to SEQ ID NO: 1705709
ucaugaguaaguuagcacu

SEQ ID NO: 1705711 - RNA, 19 nt, Artificial Sequence
  Description of Artificial Sequence: Synthetic oligonucleotide
  Sense strand starting at position 3738 of SEQ ID NO: 1561885
gugcuaacuuacucaugac

SEQ ID NO: 1705712 - RNA, 19 nt, Artificial Sequence
  Description of Artificial Sequence: Synthetic oligonucleotide
  Antisense strand to SEQ ID NO: 1705711
gucaugaguaaguuagcac

SEQ ID NO: 1705713 - RNA, 19 nt, Artificial Sequence
  Description of Artificial Sequence: Synthetic oligonucleotide
  Sense strand starting at position 3959 of SEQ ID NO: 1561885
gcaguaaggcuugaucauc

SEQ ID NO: 1705714 - RNA, 19 nt, Artificial Sequence
  Description of Artificial Sequence: Synthetic oligonucleotide
  Antisense strand to SEQ ID NO: 1705713
gaugaucaagccuuacugc

SEQ ID NO: 1705715 - RNA, 19 nt, Artificial Sequence
  Description of Artificial Sequence: Synthetic oligonucleotide
  Sense strand starting at position 245 of SEQ ID NO: 1561886
cugagaucuuguuuccuug

SEQ ID NO: 1705716 - RNA, 19 nt, Artificial Sequence
  Description of Artificial Sequence: Synthetic oligonucleotide
  Antisense strand to SEQ ID NO: 1705715
caaggaaacaagaucucag

SEQ ID NO: 1705717 - RNA, 19 nt, Artificial Sequence
  Description of Artificial Sequence: Synthetic oligonucleotide
  Sense strand starting at position 812 of SEQ ID NO: 1561886
ccuggcaaagucuacauaa

SEQ ID NO: 1705718 - RNA, 19 nt, Artificial Sequence
  Description of Artificial Sequence: Synthetic oligonucleotide
  Antisense strand to SEQ ID NO: 1705717
uuauguagacuuugccagg

SEQ ID NO: 1705719 - RNA, 19 nt, Artificial Sequence
  Description of Artificial Sequence: Synthetic oligonucleotide
  Sense strand starting at position 852 of SEQ ID NO: 1561886
cugguaaagugcuucuuaa

SEQ ID NO: 1705720 - RNA, 19 nt, Artificial Sequence
  Description of Artificial Sequence: Synthetic oligonucleotide
  Antisense strand to SEQ ID NO: 1705719
uuaagaagcacuuuaccag

SEQ ID NO: 1705721 - RNA, 19 nt, Artificial Sequence
  Description of Artificial Sequence: Synthetic oligonucleotide
  Sense strand starting at position 859 of SEQ ID NO: 1561886
agugcuucuuaaucauaug

SEQ ID NO: 1705722 - RNA, 19 nt, Artificial Sequence
  Description of Artificial Sequence: Synthetic oligonucleotide
  Antisense strand to SEQ ID NO: 1705721
cauaugauuaagaagcacu

SEQ ID NO: 1705723 - RNA, 19 nt, Artificial Sequence
  Description of Artificial Sequence: Synthetic oligonucleotide
  Sense strand starting at position 877 of SEQ ID NO: 1561886
gcuuguaaauaguuauuac

SEQ ID NO: 1705724 - RNA, 19 nt, Artificial Sequence
  Description of Artificial Sequence: Synthetic oligonucleotide
  Antisense strand to SEQ ID NO: 1705723
guaauaacuauuuacaagc

SEQ ID NO: 1705725 - RNA, 19 nt, Artificial Sequence
  Description of Artificial Sequence: Synthetic oligonucleotide
  Sense strand starting at position 1011 of SEQ ID NO: 1561886
aagaguuucccaggacuac

SEQ ID NO: 1705726 - RNA, 19 nt, Artificial Sequence
  Description of Artificial Sequence: Synthetic oligonucleotide
  Antisense strand to SEQ ID NO: 1705725
guaguccugggaaacucuu

SEQ ID NO: 1705727 - RNA, 19 nt, Artificial Sequence
  Description of Artificial Sequence: Synthetic oligonucleotide
  Sense strand starting at position 1198 of SEQ ID NO: 1561886
cauaauagcugguugagca

SEQ ID NO: 1705728 - RNA, 19 nt, Artificial Sequence
  Description of Artificial Sequence: Synthetic oligonucleotide
  Antisense strand to SEQ ID NO: 1705727
ugcucaaccagcuauuaug

SEQ ID NO: 1705729 - RNA, 19 nt, Artificial Sequence
  Description of Artificial Sequence: Synthetic oligonucleotide
  Sense strand starting at position 1225 of SEQ ID NO: 1561886
gugccaagcuacuugacau

SEQ ID NO: 1705730 - RNA, 19 nt, Artificial Sequence
  Description of Artificial Sequence: Synthetic oligonucleotide
  Antisense strand to SEQ ID NO: 1705729
augucaaguagcuuggcac

SEQ ID NO: 1705731 - RNA, 19 nt, Artificial Sequence
  Description of Artificial Sequence: Synthetic oligonucleotide
  Sense strand starting at position 1251 of SEQ ID NO: 1561886
cucacugauuuccacagua

SEQ ID NO: 1705732 - RNA, 19 nt, Artificial Sequence
  Description of Artificial Sequence: Synthetic oligonucleotide
  Antisense strand to SEQ ID NO: 1705731
uacuguggaaaucagugag

SEQ ID NO: 1705733 - RNA, 19 nt, Artificial Sequence
  Description of Artificial Sequence: Synthetic oligonucleotide
  Sense strand starting at position 1259 of SEQ ID NO: 1561886
uuuccacaguagucuauua

SEQ ID NO: 1705734 - RNA, 19 nt, Artificial Sequence
  Description of Artificial Sequence: Synthetic oligonucleotide
  Antisense strand to SEQ ID NO: 1705733
uaauagacuacuguggaaa

SEQ ID NO: 1705735 - RNA, 19 nt, Artificial Sequence
  Description of Artificial Sequence: Synthetic oligonucleotide
  Sense strand starting at position 1266 of SEQ ID NO: 1561886
aguagucuauuaccucauu

SEQ ID NO: 1705736 - RNA, 19 nt, Artificial Sequence
  Description of Artificial Sequence: Synthetic oligonucleotide
  Antisense strand to SEQ ID NO: 1705735
aaugagguaauagacuacu

SEQ ID NO: 1705737 - RNA, 19 nt, Artificial Sequence
  Description of Artificial Sequence: Synthetic oligonucleotide
  Sense strand starting at position 1334 of SEQ ID NO: 1561886
cacaguuacuaaguggaaa

SEQ ID NO: 1705738 - RNA, 19 nt, Artificial Sequence
  Description of Artificial Sequence: Synthetic oligonucleotide
  Antisense strand to SEQ ID NO: 1705737
uuuccacuuaguaacugug

SEQ ID NO: 1705739 - RNA, 19 nt, Artificial Sequence
  Description of Artificial Sequence: Synthetic oligonucleotide
  Sense strand starting at position 1361 of SEQ ID NO: 1561886
cucuaacucgcucagacuu

SEQ ID NO: 1705740 - RNA, 19 nt, Artificial Sequence
  Description of Artificial Sequence: Synthetic oligonucleotide
  Antisense strand to SEQ ID NO: 1705739
aagucugagcgaguuagag

SEQ ID NO: 1705741 - RNA, 19 nt, Artificial Sequence
  Description of Artificial Sequence: Synthetic oligonucleotide
  Sense strand starting at position 2231 of SEQ ID NO: 1561886
guaucucgugccucaguuu

SEQ ID NO: 1705742 - RNA, 19 nt, Artificial Sequence
  Description of Artificial Sequence: Synthetic oligonucleotide
  Antisense strand to SEQ ID NO: 1705741
aaacugaggcacgagauac

SEQ ID NO: 1705743 - RNA, 19 nt, Artificial Sequence
  Description of Artificial Sequence: Synthetic oligonucleotide
  Sense strand starting at position 2313 of SEQ ID NO: 1561886
uccauuaucugacuggugu

SEQ ID NO: 1705744 - RNA, 19 nt, Artificial Sequence
  Description of Artificial Sequence: Synthetic oligonucleotide
  Antisense strand to SEQ ID NO: 1705743
acaccagucagauaaugga

SEQ ID NO: 1705745 - RNA, 19 nt, Artificial Sequence
  Description of Artificial Sequence: Synthetic oligonucleotide
  Sense strand starting at position 2345 of SEQ ID NO: 1561886
ugagguaacucccauuuag

SEQ ID NO: 1705746 - RNA, 19 nt, Artificial Sequence
  Description of Artificial Sequence: Synthetic oligonucleotide
  Antisense strand to SEQ ID NO: 1705745
cuaaaugggaguuaccuca

SEQ ID NO: 1705747 - RNA, 19 nt, Artificial Sequence
  Description of Artificial Sequence: Synthetic oligonucleotide
  Sense strand starting at position 2477 of SEQ ID NO: 1561886
ucucuagccugccugaaau

SEQ ID NO: 1705748 - RNA, 19 nt, Artificial Sequence
  Description of Artificial Sequence: Synthetic oligonucleotide
  Antisense strand to SEQ ID NO: 1705747
auuucaggcaggcuagaga

SEQ ID NO: 1705749 - RNA, 19 nt, Artificial Sequence
  Description of Artificial Sequence: Synthetic oligonucleotide
  Sense strand starting at position 2479 of SEQ ID NO: 1561886
ucuagccugccugaaauau

SEQ ID NO: 1705750 - RNA, 19 nt, Artificial Sequence
  Description of Artificial Sequence: Synthetic oligonucleotide
  Antisense strand to SEQ ID NO: 1705749
auauuucaggcaggcuaga

SEQ ID NO: 1705751 - RNA, 19 nt, Artificial Sequence
  Description of Artificial Sequence: Synthetic oligonucleotide
  Sense strand starting at position 2487 of SEQ ID NO: 1561886
gccugaaauaucuggucug

SEQ ID NO: 1705752 - RNA, 19 nt, Artificial Sequence
  Description of Artificial Sequence: Synthetic oligonucleotide
  Antisense strand to SEQ ID NO: 1705751
cagaccagauauuucaggc

SEQ ID NO: 1705753 - RNA, 19 nt, Artificial Sequence
  Description of Artificial Sequence: Synthetic oligonucleotide
  Sense strand starting at position 2490 of SEQ ID NO: 1561886
ugaaauaucuggucuguuu

SEQ ID NO: 1705754 - RNA, 19 nt, Artificial Sequence
  Description of Artificial Sequence: Synthetic oligonucleotide
  Antisense strand to SEQ ID NO: 1705753
aaacagaccagauauuuca

SEQ ID NO: 1705755 - RNA, 19 nt, Artificial Sequence
  Description of Artificial Sequence: Synthetic oligonucleotide
  Sense strand starting at position 2520 of SEQ ID NO: 1561886
uccagcucuguccgaacaa

SEQ ID NO: 1705756 - RNA, 19 nt, Artificial Sequence
  Description of Artificial Sequence: Synthetic oligonucleotide
  Antisense strand to SEQ ID NO: 1705755
uuguucggacagagcugga

SEQ ID NO: 1705757 - RNA, 19 nt, Artificial Sequence
  Description of Artificial Sequence: Synthetic oligonucleotide
  Sense strand starting at position 2953 of SEQ ID NO: 1561886
gagucucauugcucuuaga

SEQ ID NO: 1705758 - RNA, 19 nt, Artificial Sequence
  Description of Artificial Sequence: Synthetic oligonucleotide
  Antisense strand to SEQ ID NO: 1705757
ucuaagagcaaugagacuc

SEQ ID NO: 1705759 - RNA, 19 nt, Artificial Sequence
  Description of Artificial Sequence: Synthetic oligonucleotide
  Sense strand starting at position 3153 of SEQ ID NO: 1561886
aagcuuagucaauaguagu

SEQ ID NO: 1705760 - RNA, 19 nt, Artificial Sequence
  Description of Artificial Sequence: Synthetic oligonucleotide
  Antisense strand to SEQ ID NO: 1705759
acuacuauugacuaagcuu

SEQ ID NO: 1705761 - RNA, 19 nt, Artificial Sequence
  Description of Artificial Sequence: Synthetic oligonucleotide
  Sense strand starting at position 3159 of SEQ ID NO: 1561886
agucaauaguaguugcuga

SEQ ID NO: 1705762 - RNA, 19 nt, Artificial Sequence
  Description of Artificial Sequence: Synthetic oligonucleotide
  Antisense strand to SEQ ID NO: 1705761
ucagcaacuacuauugacu

SEQ ID NO: 1705763 - RNA, 19 nt, Artificial Sequence
  Description of Artificial Sequence: Synthetic oligonucleotide
  Sense strand starting at position 3167 of SEQ ID NO: 1561886
guaguugcugaacaaauau

SEQ ID NO: 1705764 - RNA, 19 nt, Artificial Sequence
  Description of Artificial Sequence: Synthetic oligonucleotide
  Antisense strand to SEQ ID NO: 1705763
auauuuguucagcaacuac

SEQ ID NO: 1705765 - RNA, 19 nt, Artificial Sequence
  Description of Artificial Sequence: Synthetic oligonucleotide
  Sense strand starting at position 3189 of SEQ ID NO: 1561886
uugcuccuugaauaaauga

SEQ ID NO: 1705766 - RNA, 19 nt, Artificial Sequence
  Description of Artificial Sequence: Synthetic oligonucleotide
  Antisense strand to SEQ ID NO: 1705765
ucauuuauucaaggagcaa

SEQ ID NO: 1705767 - RNA, 19 nt, Artificial Sequence
  Description of Artificial Sequence: Synthetic oligonucleotide
  Sense strand starting at position 3353 of SEQ ID NO: 1561886
ccaaguucuggccaauuaa

SEQ ID NO: 1705768 - RNA, 19 nt, Artificial Sequence
  Description of Artificial Sequence: Synthetic oligonucleotide
  Antisense strand to SEQ ID NO: 1705767
uuaauuggccagaacuugg

SEQ ID NO: 1705769 - RNA, 19 nt, Artificial Sequence
  Description of Artificial Sequence: Synthetic oligonucleotide
  Sense strand starting at position 3363 of SEQ ID NO: 1561886
gccaauuaaaugugaugug

SEQ ID NO: 1705770 - RNA, 19 nt, Artificial Sequence
  Description of Artificial Sequence: Synthetic oligonucleotide
  Antisense strand to SEQ ID NO: 1705769
cacaucacauuuaauuggc

SEQ ID NO: 1705771 - RNA, 19 nt, Artificial Sequence
  Description of Artificial Sequence: Synthetic oligonucleotide
  Sense strand starting at position 3368 of SEQ ID NO: 1561886
uuaaaugugaugugugcua

SEQ ID NO: 1705772 - RNA, 19 nt, Artificial Sequence
  Description of Artificial Sequence: Synthetic oligonucleotide
  Antisense strand to SEQ ID NO: 1705771
uagcacacaucacauuuaa

SEQ ID NO: 1705773 - RNA, 19 nt, Artificial Sequence
  Description of Artificial Sequence: Synthetic oligonucleotide
  Sense strand starting at position 3370 of SEQ ID NO: 1561886
aaaugugaugugugcuauu

SEQ ID NO: 1705774 - RNA, 19 nt, Artificial Sequence
  Description of Artificial Sequence: Synthetic oligonucleotide
  Antisense strand to SEQ ID NO: 1705773
aauagcacacaucacauuu

SEQ ID NO: 1705775 - RNA, 19 nt, Artificial Sequence
  Description of Artificial Sequence: Synthetic oligonucleotide
  Sense strand starting at position 3432 of SEQ ID NO: 1561886
cuuucucuacagugaagaa

SEQ ID NO: 1705776 - RNA, 19 nt, Artificial Sequence
  Description of Artificial Sequence: Synthetic oligonucleotide
  Antisense strand to SEQ ID NO: 1705775
uucuucacuguagagaaag

SEQ ID NO: 1705777 - RNA, 19 nt, Artificial Sequence
  Description of Artificial Sequence: Synthetic oligonucleotide
  Sense strand starting at position 3556 of SEQ ID NO: 1561886
auuagcuuucuuugcagau

SEQ ID NO: 1705778 - RNA, 19 nt, Artificial Sequence
  Description of Artificial Sequence: Synthetic oligonucleotide
  Antisense strand to SEQ ID NO: 1705777
aucugcaaagaaagcuaau

SEQ ID NO: 1705779 - RNA, 19 nt, Artificial Sequence
  Description of Artificial Sequence: Synthetic oligonucleotide
  Sense strand starting at position 3557 of SEQ ID NO: 1561886
uuagcuuucuuugcagaua

SEQ ID NO: 1705780 - RNA, 19 nt, Artificial Sequence
  Description of Artificial Sequence: Synthetic oligonucleotide
  Antisense strand to SEQ ID NO: 1705779
uaucugcaaagaaagcuaa

SEQ ID NO: 1705781 - RNA, 19 nt, Artificial Sequence
  Description of Artificial Sequence: Synthetic oligonucleotide
  Sense strand starting at position 3560 of SEQ ID NO: 1561886
gcuuucuuugcagauauug

SEQ ID NO: 1705782 - RNA, 19 nt, Artificial Sequence
  Description of Artificial Sequence: Synthetic oligonucleotide
  Antisense strand to SEQ ID NO: 1705781
caauaucugcaaagaaagc

SEQ ID NO: 1705783 - RNA, 19 nt, Artificial Sequence
  Description of Artificial Sequence: Synthetic oligonucleotide
  Sense strand starting at position 3586 of SEQ ID NO: 1561886
uuuccuaugugguuaauaa

SEQ ID NO: 1705784 - RNA, 19 nt, Artificial Sequence
  Description of Artificial Sequence: Synthetic oligonucleotide
  Antisense strand to SEQ ID NO: 1705783
uuauuaaccacauaggaaa

SEQ ID NO: 1705785 - RNA, 19 nt, Artificial Sequence
  Description of Artificial Sequence: Synthetic oligonucleotide
  Sense strand starting at position 3587 of SEQ ID NO: 1561886
uuccuaugugguuaauaaa

SEQ ID NO: 1705786 - RNA, 19 nt, Artificial Sequence
  Description of Artificial Sequence: Synthetic oligonucleotide
  Antisense strand to SEQ ID NO: 1705785
uuuauuaaccacauaggaa

SEQ ID NO: 1705787 - RNA, 19 nt, Artificial Sequence
  Description of Artificial Sequence: Synthetic oligonucleotide
  Sense strand starting at position 3631 of SEQ ID NO: 1561886
uuuccagauguguaacaua

SEQ ID NO: 1705788 - RNA, 19 nt, Artificial Sequence
  Description of Artificial Sequence: Synthetic oligonucleotide
  Antisense strand to SEQ ID NO: 1705787
uauguuacacaucuggaaa

SEQ ID NO: 1705789 - RNA, 19 nt, Artificial Sequence
  Description of Artificial Sequence: Synthetic oligonucleotide
  Sense strand starting at position 3648 of SEQ ID NO: 1561886
uaacaauucggcuaggcau

SEQ ID NO: 1705790 - RNA, 19 nt, Artificial Sequence
  Description of Artificial Sequence: Synthetic oligonucleotide
  Antisense strand to SEQ ID NO: 1705789
augccuagccgaauuguua

SEQ ID NO: 1705791 - RNA, 19 nt, Artificial Sequence
  Description of Artificial Sequence: Synthetic oligonucleotide
  Sense strand starting at position 3876 of SEQ ID NO: 1561886
guugcagugacccgaaaua

SEQ ID NO: 1705792 - RNA, 19 nt, Artificial Sequence
  Description of Artificial Sequence: Synthetic oligonucleotide
  Antisense strand to SEQ ID NO: 1705791
uauuucgggucacugcaac

SEQ ID NO: 1705793 - RNA, 19 nt, Artificial Sequence
  Description of Artificial Sequence: Synthetic oligonucleotide
  Sense strand starting at position 3887 of SEQ ID NO: 1561886
ccgaaauaacccuauugca

SEQ ID NO: 1705794 - RNA, 19 nt, Artificial Sequence
  Description of Artificial Sequence: Synthetic oligonucleotide
  Antisense strand to SEQ ID NO: 1705793
ugcaauaggguuauuucgg

SEQ ID NO: 1705795 - RNA, 19 nt, Artificial Sequence
  Description of Artificial Sequence: Synthetic oligonucleotide
  Sense strand starting at position 121 of SEQ ID NO: 1561887
ccuuacuuugcauauuagu

SEQ ID NO: 1705796 - RNA, 19 nt, Artificial Sequence
  Description of Artificial Sequence: Synthetic oligonucleotide
  Antisense strand to SEQ ID NO: 1705795
acuaauaugcaaaguaagg

SEQ ID NO: 1705797 - RNA, 19 nt, Artificial Sequence
  Description of Artificial Sequence: Synthetic oligonucleotide
  Sense strand starting at position 203 of SEQ ID NO: 1561887
acacaauuguucguggacu

SEQ ID NO: 1705798 - RNA, 19 nt, Artificial Sequence
  Description of Artificial Sequence: Synthetic oligonucleotide
  Antisense strand to SEQ ID NO: 1705797
aguccacgaacaauugugu

SEQ ID NO: 1705799 - RNA, 19 nt, Artificial Sequence
  Description of Artificial Sequence: Synthetic oligonucleotide
  Sense strand starting at position 205 of SEQ ID NO: 1561887
acaauuguucguggacuag

SEQ ID NO: 1705800 - RNA, 19 nt, Artificial Sequence
  Description of Artificial Sequence: Synthetic oligonucleotide
  Antisense strand to SEQ ID NO: 1705799
cuaguccacgaacaauugu

SEQ ID NO: 1705801 - RNA, 19 nt, Artificial Sequence
  Description of Artificial Sequence: Synthetic oligonucleotide
  Sense strand starting at position 299 of SEQ ID NO: 1561887
gcauuaauuugaguuaguu

SEQ ID NO: 1705802 - RNA, 19 nt, Artificial Sequence
  Description of Artificial Sequence: Synthetic oligonucleotide
  Antisense strand to SEQ ID NO: 1705801
aacuaacucaaauuaaugc

SEQ ID NO: 1705803 - RNA, 19 nt, Artificial Sequence
  Description of Artificial Sequence: Synthetic oligonucleotide
  Sense strand starting at position 354 of SEQ ID NO: 1561887
acagauuuguacugacuua

SEQ ID NO: 1705804 - RNA, 19 nt, Artificial Sequence
  Description of Artificial Sequence: Synthetic oligonucleotide
  Antisense strand to SEQ ID NO: 1705803
uaagucaguacaaaucugu

SEQ ID NO: 1705805 - RNA, 19 nt, Artificial Sequence
  Description of Artificial Sequence: Synthetic oligonucleotide
  Sense strand starting at position 510 of SEQ ID NO: 1561887
guuauugugccauaaggac

SEQ ID NO: 1705806 - RNA, 19 nt, Artificial Sequence
  Description of Artificial Sequence: Synthetic oligonucleotide
  Antisense strand to SEQ ID NO: 1705805
guccuuauggcacaauaac

SEQ ID NO: 1705807 - RNA, 19 nt, Artificial Sequence
  Description of Artificial Sequence: Synthetic oligonucleotide
  Sense strand starting at position 596 of SEQ ID NO: 1561887
gccauuuaugagugcugua

SEQ ID NO: 1705808 - RNA, 19 nt, Artificial Sequence
  Description of Artificial Sequence: Synthetic oligonucleotide
  Antisense strand to SEQ ID NO: 1705807
uacagcacucauaaauggc

SEQ ID NO: 1705809 - RNA, 19 nt, Artificial Sequence
  Description of Artificial Sequence: Synthetic oligonucleotide
  Sense strand starting at position 601 of SEQ ID NO: 1561887
uuaugagugcuguaagaau

SEQ ID NO: 1705810 - RNA, 19 nt, Artificial Sequence
  Description of Artificial Sequence: Synthetic oligonucleotide
  Antisense strand to SEQ ID NO: 1705809
auucuuacagcacucauaa

SEQ ID NO: 1705811 - RNA, 19 nt, Artificial Sequence
  Description of Artificial Sequence: Synthetic oligonucleotide
  Sense strand starting at position 699 of SEQ ID NO: 1561887
uuaagaggucacugauaug

SEQ ID NO: 1705812 - RNA, 19 nt, Artificial Sequence
  Description of Artificial Sequence: Synthetic oligonucleotide
  Antisense strand to SEQ ID NO: 1705811
cauaucagugaccucuuaa

SEQ ID NO: 1705813 - RNA, 19 nt, Artificial Sequence
  Description of Artificial Sequence: Synthetic oligonucleotide
  Sense strand starting at position 803 of SEQ ID NO: 1561887
uguuguagaugcucuauaa

SEQ ID NO: 1705814 - RNA, 19 nt, Artificial Sequence
  Description of Artificial Sequence: Synthetic oligonucleotide
  Antisense strand to SEQ ID NO: 1705813
uuauagagcaucuacaaca

SEQ ID NO: 1705815 - RNA, 19 nt, Artificial Sequence
  Description of Artificial Sequence: Synthetic oligonucleotide
  Sense strand starting at position 836 of SEQ ID NO: 1561887
uuaaaucuagcguaagaua

SEQ ID NO: 1705816 - RNA, 19 nt, Artificial Sequence
  Description of Artificial Sequence: Synthetic oligonucleotide
  Antisense strand to SEQ ID NO: 1705815
uaucuuacgcuagauuuaa

SEQ ID NO: 1705817 - RNA, 19 nt, Artificial Sequence
  Description of Artificial Sequence: Synthetic oligonucleotide
  Sense strand starting at position 845 of SEQ ID NO: 1561887
gcguaagauaaauguaauu

SEQ ID NO: 1705818 - RNA, 19 nt, Artificial Sequence
  Description of Artificial Sequence: Synthetic oligonucleotide
  Antisense strand to SEQ ID NO: 1705817
aauuacauuuaucuuacgc

SEQ ID NO: 1705819 - RNA, 19 nt, Artificial Sequence
  Description of Artificial Sequence: Synthetic oligonucleotide
  Sense strand starting at position 876 of SEQ ID NO: 1561887
cgcucacuucugccuuuau

SEQ ID NO: 1705820 - RNA, 19 nt, Artificial Sequence
  Description of Artificial Sequence: Synthetic oligonucleotide
  Antisense strand to SEQ ID NO: 1705819
auaaaggcagaagugagcg

SEQ ID NO: 1705821 - RNA, 19 nt, Artificial Sequence
  Description of Artificial Sequence: Synthetic oligonucleotide
  Sense strand starting at position 1016 of SEQ ID NO: 1561887
guauuuccuuucuugucaa

SEQ ID NO: 1705822 - RNA, 19 nt, Artificial Sequence
  Description of Artificial Sequence: Synthetic oligonucleotide
  Antisense strand to SEQ ID NO: 1705821
uugacaagaaaggaaauac

SEQ ID NO: 1705823 - RNA, 19 nt, Artificial Sequence
  Description of Artificial Sequence: Synthetic oligonucleotide
  Sense strand starting at position 1113 of SEQ ID NO: 1561887
aguacauugcgguauaauu

SEQ ID NO: 1705824 - RNA, 19 nt, Artificial Sequence
  Description of Artificial Sequence: Synthetic oligonucleotide
  Antisense strand to SEQ ID NO: 1705823
aauuauaccgcaauguacu

SEQ ID NO: 1705825 - RNA, 19 nt, Artificial Sequence
  Description of Artificial Sequence: Synthetic oligonucleotide
  Sense strand starting at position 1223 of SEQ ID NO: 1561887
ggacuucucuagcuggaaa

SEQ ID NO: 1705826 - RNA, 19 nt, Artificial Sequence
  Description of Artificial Sequence: Synthetic oligonucleotide
  Antisense strand to SEQ ID NO: 1705825
uuuccagcuagagaagucc

SEQ ID NO: 1705827 - RNA, 19 nt, Artificial Sequence
  Description of Artificial Sequence: Synthetic oligonucleotide
  Sense strand starting at position 1225 of SEQ ID NO: 1561887
acuucucuagcuggaaauu

SEQ ID NO: 1705828 - RNA, 19 nt, Artificial Sequence
  Description of Artificial Sequence: Synthetic oligonucleotide
  Antisense strand to SEQ ID NO: 1705827
aauuuccagcuagagaagu

SEQ ID NO: 1705829 - RNA, 19 nt, Artificial Sequence
  Description of Artificial Sequence: Synthetic oligonucleotide
  Sense strand starting at position 1244 of SEQ ID NO: 1561887
ucaucccuucgcuggaaau

SEQ ID NO: 1705830 - RNA, 19 nt, Artificial Sequence
  Description of Artificial Sequence: Synthetic oligonucleotide
  Antisense strand to SEQ ID NO: 1705829
auuuccagcgaagggauga

SEQ ID NO: 1705831 - RNA, 19 nt, Artificial Sequence
  Description of Artificial Sequence: Synthetic oligonucleotide
  Sense strand starting at position 1349 of SEQ ID NO: 1561887
caggacuugucaucauuga

SEQ ID NO: 1705832 - RNA, 19 nt, Artificial Sequence
  Description of Artificial Sequence: Synthetic oligonucleotide
  Antisense strand to SEQ ID NO: 1705831
ucaaugaugacaaguccug

SEQ ID NO: 1705833 - RNA, 19 nt, Artificial Sequence
  Description of Artificial Sequence: Synthetic oligonucleotide
  Sense strand starting at position 1353 of SEQ ID NO: 1561887
acuugucaucauugaugca

SEQ ID NO: 1705834 - RNA, 19 nt, Artificial Sequence
  Description of Artificial Sequence: Synthetic oligonucleotide
  Antisense strand to SEQ ID NO: 1705833
ugcaucaaugaugacaagu

SEQ ID NO: 1705835 - RNA, 19 nt, Artificial Sequence
  Description of Artificial Sequence: Synthetic oligonucleotide
  Sense strand starting at position 2196 of SEQ ID NO: 1561887
ccaggauucgcacaagcua

SEQ ID NO: 1705836 - RNA, 19 nt, Artificial Sequence
  Description of Artificial Sequence: Synthetic oligonucleotide
  Antisense strand to SEQ ID NO: 1705835
uagcuugugcgaauccugg

SEQ ID NO: 1705837 - RNA, 19 nt, Artificial Sequence
  Description of Artificial Sequence: Synthetic oligonucleotide
  Sense strand starting at position 2278 of SEQ ID NO: 1561887
ucuccuuucuugccaggau

SEQ ID NO: 1705838 - RNA, 19 nt, Artificial Sequence
  Description of Artificial Sequence: Synthetic oligonucleotide
  Antisense strand to SEQ ID NO: 1705837
auccuggcaagaaaggaga

SEQ ID NO: 1705839 - RNA, 19 nt, Artificial Sequence
  Description of Artificial Sequence: Synthetic oligonucleotide
  Sense strand starting at position 2444 of SEQ ID NO: 1561887
ccgugcugaaucuaaggau

SEQ ID NO: 1705840 - RNA, 19 nt, Artificial Sequence
  Description of Artificial Sequence: Synthetic oligonucleotide
  Antisense strand to SEQ ID NO: 1705839
auccuuagauucagcacgg

SEQ ID NO: 1705841 - RNA, 19 nt, Artificial Sequence
  Description of Artificial Sequence: Synthetic oligonucleotide
  Sense strand starting at position 2448 of SEQ ID NO: 1561887
gcugaaucuaaggauuguu

SEQ ID NO: 1705842 - RNA, 19 nt, Artificial Sequence
  Description of Artificial Sequence: Synthetic oligonucleotide
  Antisense strand to SEQ ID NO: 1705841
aacaauccuuagauucagc

SEQ ID NO: 1705843 - RNA, 19 nt, Artificial Sequence
  Description of Artificial Sequence: Synthetic oligonucleotide
  Sense strand starting at position 2451 of SEQ ID NO: 1561887
gaaucuaaggauuguucca

SEQ ID NO: 1705844 - RNA, 19 nt, Artificial Sequence
  Description of Artificial Sequence: Synthetic oligonucleotide
  Antisense strand to SEQ ID NO: 1705843
uggaacaauccuuagauuc

SEQ ID NO: 1705845 - RNA, 19 nt, Artificial Sequence
  Description of Artificial Sequence: Synthetic oligonucleotide
  Sense strand starting at position 2458 of SEQ ID NO: 1561887
aggauuguuccaggugcca

SEQ ID NO: 1705846 - RNA, 19 nt, Artificial Sequence
  Description of Artificial Sequence: Synthetic oligonucleotide
  Antisense strand to SEQ ID NO: 1705845
uggcaccuggaacaauccu

SEQ ID NO: 1705847 - RNA, 19 nt, Artificial Sequence
  Description of Artificial Sequence: Synthetic oligonucleotide
  Sense strand starting at position 2478 of SEQ ID NO: 1561887
uaucguuggcgagagggaa

SEQ ID NO: 1705848 - RNA, 19 nt, Artificial Sequence
  Description of Artificial Sequence: Synthetic oligonucleotide
  Antisense strand to SEQ ID NO: 1705847
uucccucucgccaacgaua

SEQ ID NO: 1705849 - RNA, 19 nt, Artificial Sequence
  Description of Artificial Sequence: Synthetic oligonucleotide
  Sense strand starting at position 2503 of SEQ ID NO: 1561887
auaacuaguugcuugggaa

SEQ ID NO: 1705850 - RNA, 19 nt, Artificial Sequence
  Description of Artificial Sequence: Synthetic oligonucleotide
  Antisense strand to SEQ ID NO: 1705849
uucccaagcaacuaguuau

SEQ ID NO: 1705851 - RNA, 19 nt, Artificial Sequence
  Description of Artificial Sequence: Synthetic oligonucleotide
  Sense strand starting at position 2504 of SEQ ID NO: 1561887
uaacuaguugcuugggaag

SEQ ID NO: 1705852 - RNA, 19 nt, Artificial Sequence
  Description of Artificial Sequence: Synthetic oligonucleotide
  Antisense strand to SEQ ID NO: 1705851
cuucccaagcaacuaguua

SEQ ID NO: 1705853 - RNA, 19 nt, Artificial Sequence
  Description of Artificial Sequence: Synthetic oligonucleotide
  Sense strand starting at position 2559 of SEQ ID NO: 1561887
ccuaauguccuguaggauc

SEQ ID NO: 1705854 - RNA, 19 nt, Artificial Sequence
  Description of Artificial Sequence: Synthetic oligonucleotide
  Antisense strand to SEQ ID NO: 1705853
gauccuacaggacauuagg

SEQ ID NO: 1705855 - RNA, 19 nt, Artificial Sequence
  Description of Artificial Sequence: Synthetic oligonucleotide
  Sense strand starting at position 2610 of SEQ ID NO: 1561887
gguguacauucccuaucca

SEQ ID NO: 1705856 - RNA, 19 nt, Artificial Sequence
  Description of Artificial Sequence: Synthetic oligonucleotide
  Antisense strand to SEQ ID NO: 1705855
uggauagggaauguacacc

SEQ ID NO: 1705857 - RNA, 19 nt, Artificial Sequence
  Description of Artificial Sequence: Synthetic oligonucleotide
  Sense strand starting at position 2689 of SEQ ID NO: 1561887
gcuguuaacacaggauuag

SEQ ID NO: 1705858 - RNA, 19 nt, Artificial Sequence
  Description of Artificial Sequence: Synthetic oligonucleotide
  Antisense strand to SEQ ID NO: 1705857
cuaauccuguguuaacagc

SEQ ID NO: 1705859 - RNA, 19 nt, Artificial Sequence
  Description of Artificial Sequence: Synthetic oligonucleotide
  Sense strand starting at position 2690 of SEQ ID NO: 1561887
cuguuaacacaggauuagu

SEQ ID NO: 1705860 - RNA, 19 nt, Artificial Sequence
  Description of Artificial Sequence: Synthetic oligonucleotide
  Antisense strand to SEQ ID NO: 1705859
acuaauccuguguuaacag

SEQ ID NO: 1705861 - RNA, 19 nt, Artificial Sequence
  Description of Artificial Sequence: Synthetic oligonucleotide
  Sense strand starting at position 2709 of SEQ ID NO: 1561887
uuaggauucgauuguuaau

SEQ ID NO: 1705862 - RNA, 19 nt, Artificial Sequence
  Description of Artificial Sequence: Synthetic oligonucleotide
  Antisense strand to SEQ ID NO: 1705861
auuaacaaucgaauccuaa

SEQ ID NO: 1705863 - RNA, 19 nt, Artificial Sequence
  Description of Artificial Sequence: Synthetic oligonucleotide
  Sense strand starting at position 2711 of SEQ ID NO: 1561887
aggauucgauuguuaauau

SEQ ID NO: 1705864 - RNA, 19 nt, Artificial Sequence
  Description of Artificial Sequence: Synthetic oligonucleotide
  Antisense strand to SEQ ID NO: 1705863
auauuaacaaucgaauccu

SEQ ID NO: 1705865 - RNA, 19 nt, Artificial Sequence
  Description of Artificial Sequence: Synthetic oligonucleotide
  Sense strand starting at position 2758 of SEQ ID NO: 1561887
cauagaaagcaucagguuu

SEQ ID NO: 1705866 - RNA, 19 nt, Artificial Sequence
  Description of Artificial Sequence: Synthetic oligonucleotide
  Antisense strand to SEQ ID NO: 1705865
aaaccugaugcuuucuaug

SEQ ID NO: 1705867 - RNA, 19 nt, Artificial Sequence
  Description of Artificial Sequence: Synthetic oligonucleotide
  Sense strand starting at position 3285 of SEQ ID NO: 1561887
aggugcaaggugugacaaa

SEQ ID NO: 1705868 - RNA, 19 nt, Artificial Sequence
  Description of Artificial Sequence: Synthetic oligonucleotide
  Antisense strand to SEQ ID NO: 1705867
uuugucacaccuugcaccu

SEQ ID NO: 1705869 - RNA, 19 nt, Artificial Sequence
  Description of Artificial Sequence: Synthetic oligonucleotide
  Sense strand starting at position 3530 of SEQ ID NO: 1561887
gguggaauuuaguuugccu

SEQ ID NO: 1705870 - RNA, 19 nt, Artificial Sequence
  Description of Artificial Sequence: Synthetic oligonucleotide
  Antisense strand to SEQ ID NO: 1705869
aggcaaacuaaauuccacc

SEQ ID NO: 1705871 - RNA, 19 nt, Artificial Sequence
  Description of Artificial Sequence: Synthetic oligonucleotide
  Sense strand starting at position 3823 of SEQ ID NO: 1561887
gguguuggguacuuagaac

SEQ ID NO: 1705872 - RNA, 19 nt, Artificial Sequence
  Description of Artificial Sequence: Synthetic oligonucleotide
  Antisense strand to SEQ ID NO: 1705871
guucuaaguacccaacacc

SEQ ID NO: 1705873 - RNA, 19 nt, Artificial Sequence
  Description of Artificial Sequence: Synthetic oligonucleotide
  Sense strand starting at position 3834 of SEQ ID NO: 1561887
cuuagaacguguucuagaa

SEQ ID NO: 1705874 - RNA, 19 nt, Artificial Sequence
  Description of Artificial Sequence: Synthetic oligonucleotide
  Antisense strand to SEQ ID NO: 1705873
uucuagaacacguucuaag

SEQ ID NO: 1705875 - RNA, 19 nt, Artificial Sequence
  Description of Artificial Sequence: Synthetic oligonucleotide
  Sense strand starting at position 14 of SEQ ID NO: 1561888
gggccuagucaugacugga

SEQ ID NO: 1705876 - RNA, 19 nt, Artificial Sequence
  Description of Artificial Sequence: Synthetic oligonucleotide
  Antisense strand to SEQ ID NO: 1705875
uccagucaugacuaggccc

SEQ ID NO: 1705877 - RNA, 19 nt, Artificial Sequence
  Description of Artificial Sequence: Synthetic oligonucleotide
  Sense strand starting at position 17 of SEQ ID NO: 1561888
ccuagucaugacuggauaa

SEQ ID NO: 1705878 - RNA, 19 nt, Artificial Sequence
  Description of Artificial Sequence: Synthetic oligonucleotide
  Antisense strand to SEQ ID NO: 1705877
uuauccagucaugacuagg

SEQ ID NO: 1705879 - RNA, 19 nt, Artificial Sequence
  Description of Artificial Sequence: Synthetic oligonucleotide
  Sense strand starting at position 143 of SEQ ID NO: 1561888
augcucauuuaugcaugua

SEQ ID NO: 1705880 - RNA, 19 nt, Artificial Sequence
  Description of Artificial Sequence: Synthetic oligonucleotide
  Antisense strand to SEQ ID NO: 1705879
uacaugcauaaaugagcau

SEQ ID NO: 1705881 - RNA, 19 nt, Artificial Sequence
  Description of Artificial Sequence: Synthetic oligonucleotide
  Sense strand starting at position 377 of SEQ ID NO: 1561888
uccucaugguuugggauga

SEQ ID NO: 1705882 - RNA, 19 nt, Artificial Sequence
  Description of Artificial Sequence: Synthetic oligonucleotide
  Antisense strand to SEQ ID NO: 1705881
ucaucccaaaccaugagga

SEQ ID NO: 1705883 - RNA, 19 nt, Artificial Sequence
  Description of Artificial Sequence: Synthetic oligonucleotide
  Sense strand starting at position 378 of SEQ ID NO: 1561888
ccucaugguuugggaugaa

SEQ ID NO: 1705884 - RNA, 19 nt, Artificial Sequence
  Description of Artificial Sequence: Synthetic oligonucleotide
  Antisense strand to SEQ ID NO: 1705883
uucaucccaaaccaugagg

SEQ ID NO: 1705885 - RNA, 19 nt, Artificial Sequence
  Description of Artificial Sequence: Synthetic oligonucleotide
  Sense strand starting at position 577 of SEQ ID NO: 1561888
uccuuauuaucugguagag

SEQ ID NO: 1705886 - RNA, 19 nt, Artificial Sequence
  Description of Artificial Sequence: Synthetic oligonucleotide
  Antisense strand to SEQ ID NO: 1705885
cucuaccagauaauaagga

SEQ ID NO: 1705887 - RNA, 19 nt, Artificial Sequence
  Description of Artificial Sequence: Synthetic oligonucleotide
  Sense strand starting at position 579 of SEQ ID NO: 1561888
cuuauuaucugguagagaa

SEQ ID NO: 1705888 - RNA, 19 nt, Artificial Sequence
  Description of Artificial Sequence: Synthetic oligonucleotide
  Antisense strand to SEQ ID NO: 1705887
uucucuaccagauaauaag

SEQ ID NO: 1705889 - RNA, 19 nt, Artificial Sequence
  Description of Artificial Sequence: Synthetic oligonucleotide
  Sense strand starting at position 631 of SEQ ID NO: 1561888
uuacacgcccaguagaauu

SEQ ID NO: 1705890 - RNA, 19 nt, Artificial Sequence
  Description of Artificial Sequence: Synthetic oligonucleotide
  Antisense strand to SEQ ID NO: 1705889
aauucuacugggcguguaa

SEQ ID NO: 1705891 - RNA, 19 nt, Artificial Sequence
  Description of Artificial Sequence: Synthetic oligonucleotide
  Sense strand starting at position 715 of SEQ ID NO: 1561888
acuggacuccagugaugga

SEQ ID NO: 1705892 - RNA, 19 nt, Artificial Sequence
  Description of Artificial Sequence: Synthetic oligonucleotide
  Antisense strand to SEQ ID NO: 1705891
uccaucacuggaguccagu

SEQ ID NO: 1705893 - RNA, 19 nt, Artificial Sequence
  Description of Artificial Sequence: Synthetic oligonucleotide
  Sense strand starting at position 718 of SEQ ID NO: 1561888
ggacuccagugauggaguu

SEQ ID NO: 1705894 - RNA, 19 nt, Artificial Sequence
  Description of Artificial Sequence: Synthetic oligonucleotide
  Antisense strand to SEQ ID NO: 1705893
aacuccaucacuggagucc

SEQ ID NO: 1705895 - RNA, 19 nt, Artificial Sequence
  Description of Artificial Sequence: Synthetic oligonucleotide
  Sense strand starting at position 719 of SEQ ID NO: 1561888
gacuccagugauggaguuu

SEQ ID NO: 1705896 - RNA, 19 nt, Artificial Sequence
  Description of Artificial Sequence: Synthetic oligonucleotide
  Antisense strand to SEQ ID NO: 1705895
aaacuccaucacuggaguc

SEQ ID NO: 1705897 - RNA, 19 nt, Artificial Sequence
  Description of Artificial Sequence: Synthetic oligonucleotide
  Sense strand starting at position 826 of SEQ ID NO: 1561888
ucaagagagugauuaauuc

SEQ ID NO: 1705898 - RNA, 19 nt, Artificial Sequence
  Description of Artificial Sequence: Synthetic oligonucleotide
  Antisense strand to SEQ ID NO: 1705897
gaauuaaucacucucuuga

SEQ ID NO: 1705899 - RNA, 19 nt, Artificial Sequence
  Description of Artificial Sequence: Synthetic oligonucleotide
  Sense strand starting at position 891 of SEQ ID NO: 1561888
aaauaugaugagugaguca

SEQ ID NO: 1705900 - RNA, 19 nt, Artificial Sequence
  Description of Artificial Sequence: Synthetic oligonucleotide
  Antisense strand to SEQ ID NO: 1705899
ugacucacucaucauauuu

SEQ ID NO: 1705901 - RNA, 19 nt, Artificial Sequence
  Description of Artificial Sequence: Synthetic oligonucleotide
  Sense strand starting at position 894 of SEQ ID NO: 1561888
uaugaugagugagucauua

SEQ ID NO: 1705902 - RNA, 19 nt, Artificial Sequence
  Description of Artificial Sequence: Synthetic oligonucleotide
  Antisense strand to SEQ ID NO: 1705901
uaaugacucacucaucaua

SEQ ID NO: 1705903 - RNA, 19 nt, Artificial Sequence
  Description of Artificial Sequence: Synthetic oligonucleotide
  Sense strand starting at position 896 of SEQ ID NO: 1561888
ugaugagugagucauuaug

SEQ ID NO: 1705904 - RNA, 19 nt, Artificial Sequence
  Description of Artificial Sequence: Synthetic oligonucleotide
  Antisense strand to SEQ ID NO: 1705903
cauaaugacucacucauca

SEQ ID NO: 1705905 - RNA, 19 nt, Artificial Sequence
  Description of Artificial Sequence: Synthetic oligonucleotide
  Sense strand starting at position 903 of SEQ ID NO: 1561888
ugagucauuaugcgugucu

SEQ ID NO: 1705906 - RNA, 19 nt, Artificial Sequence
  Description of Artificial Sequence: Synthetic oligonucleotide
  Antisense strand to SEQ ID NO: 1705905
agacacgcauaaugacuca

SEQ ID NO: 1705907 - RNA, 19 nt, Artificial Sequence
  Description of Artificial Sequence: Synthetic oligonucleotide
  Sense strand starting at position 904 of SEQ ID NO: 1561888
gagucauuaugcgugucuu

SEQ ID NO: 1705908 - RNA, 19 nt, Artificial Sequence
  Description of Artificial Sequence: Synthetic oligonucleotide
  Antisense strand to SEQ ID NO: 1705907
aagacacgcauaaugacuc

SEQ ID NO: 1705909 - RNA, 19 nt, Artificial Sequence
  Description of Artificial Sequence: Synthetic oligonucleotide
  Sense strand starting at position 905 of SEQ ID NO: 1561888
agucauuaugcgugucuuc

SEQ ID NO: 1705910 - RNA, 19 nt, Artificial Sequence
  Description of Artificial Sequence: Synthetic oligonucleotide
  Antisense strand to SEQ ID NO: 1705909
gaagacacgcauaaugacu

SEQ ID NO: 1705911 - RNA, 19 nt, Artificial Sequence
  Description of Artificial Sequence: Synthetic oligonucleotide
  Sense strand starting at position 906 of SEQ ID NO: 1561888
gucauuaugcgugucuucu

SEQ ID NO: 1705912 - RNA, 19 nt, Artificial Sequence
  Description of Artificial Sequence: Synthetic oligonucleotide
  Antisense strand to SEQ ID NO: 1705911
agaagacacgcauaaugac

SEQ ID NO: 1705913 - RNA, 19 nt, Artificial Sequence
  Description of Artificial Sequence: Synthetic oligonucleotide
  Sense strand starting at position 933 of SEQ ID NO: 1561888
gcuccauaaucuggauuga

SEQ ID NO: 1705914 - RNA, 19 nt, Artificial Sequence
  Description of Artificial Sequence: Synthetic oligonucleotide
  Antisense strand to SEQ ID NO: 1705913
ucaauccagauuauggagc

SEQ ID NO: 1705915 - RNA, 19 nt, Artificial Sequence
  Description of Artificial Sequence: Synthetic oligonucleotide
  Sense strand starting at position 966 of SEQ ID NO: 1561888
ggaauugaggcauaggcua

SEQ ID NO: 1705916 - RNA, 19 nt, Artificial Sequence
  Description of Artificial Sequence: Synthetic oligonucleotide
  Antisense strand to SEQ ID NO: 1705915
uagccuaugccucaauucc

SEQ ID NO: 1705917 - RNA, 19 nt, Artificial Sequence
  Description of Artificial Sequence: Synthetic oligonucleotide
  Sense strand starting at position 2228 of SEQ ID NO: 1561888
ccgagagucccucacucaa

SEQ ID NO: 1705918 - RNA, 19 nt, Artificial Sequence
  Description of Artificial Sequence: Synthetic oligonucleotide
  Antisense strand to SEQ ID NO: 1705917
uugagugagggacucucgg

SEQ ID NO: 1705919 - RNA, 19 nt, Artificial Sequence
  Description of Artificial Sequence: Synthetic oligonucleotide
  Sense strand starting at position 2230 of SEQ ID NO: 1561888
gagagucccucacucaaag

SEQ ID NO: 1705920 - RNA, 19 nt, Artificial Sequence
  Description of Artificial Sequence: Synthetic oligonucleotide
  Antisense strand to SEQ ID NO: 1705919
cuuugagugagggacucuc

SEQ ID NO: 1705921 - RNA, 19 nt, Artificial Sequence
  Description of Artificial Sequence: Synthetic oligonucleotide
  Sense strand starting at position 2669 of SEQ ID NO: 1561888
uguguaggcaugugaagga

SEQ ID NO: 1705922 - RNA, 19 nt, Artificial Sequence
  Description of Artificial Sequence: Synthetic oligonucleotide
  Antisense strand to SEQ ID NO: 1705921
uccuucacaugccuacaca

SEQ ID NO: 1705923 - RNA, 19 nt, Artificial Sequence
  Description of Artificial Sequence: Synthetic oligonucleotide
  Sense strand starting at position 2787 of SEQ ID NO: 1561888
gcuugacucaccuggaaug

SEQ ID NO: 1705924 - RNA, 19 nt, Artificial Sequence
  Description of Artificial Sequence: Synthetic oligonucleotide
  Antisense strand to SEQ ID NO: 1705923
cauuccaggugagucaagc

SEQ ID NO: 1705925 - RNA, 19 nt, Artificial Sequence
  Description of Artificial Sequence: Synthetic oligonucleotide
  Sense strand starting at position 3038 of SEQ ID NO: 1561888
gggcuucuuugagaagcua

SEQ ID NO: 1705926 - RNA, 19 nt, Artificial Sequence
  Description of Artificial Sequence: Synthetic oligonucleotide
  Antisense strand to SEQ ID NO: 1705925
uagcuucucaaagaagccc

SEQ ID NO: 1705927 - RNA, 19 nt, Artificial Sequence
  Description of Artificial Sequence: Synthetic oligonucleotide
  Sense strand starting at position 3104 of SEQ ID NO: 1561888
ggaguagggugucuucaga

SEQ ID NO: 1705928 - RNA, 19 nt, Artificial Sequence
  Description of Artificial Sequence: Synthetic oligonucleotide
  Antisense strand to SEQ ID NO: 1705927
ucugaagacacccuacucc

SEQ ID NO: 1705929 - RNA, 19 nt, Artificial Sequence
  Description of Artificial Sequence: Synthetic oligonucleotide
  Sense strand starting at position 3210 of SEQ ID NO: 1561888
gugugaggguacuuuguaa

SEQ ID NO: 1705930 - RNA, 19 nt, Artificial Sequence
  Description of Artificial Sequence: Synthetic oligonucleotide
  Antisense strand to SEQ ID NO: 1705929
uuacaaaguacccucacac

SEQ ID NO: 1705931 - RNA, 19 nt, Artificial Sequence
  Description of Artificial Sequence: Synthetic oligonucleotide
  Sense strand starting at position 3214 of SEQ ID NO: 1561888
gaggguacuuuguaaacug

SEQ ID NO: 1705932 - RNA, 19 nt, Artificial Sequence
  Description of Artificial Sequence: Synthetic oligonucleotide
  Antisense strand to SEQ ID NO: 1705931
caguuuacaaaguacccuc

SEQ ID NO: 1705933 - RNA, 19 nt, Artificial Sequence
  Description of Artificial Sequence: Synthetic oligonucleotide
  Sense strand starting at position 3221 of SEQ ID NO: 1561888
cuuuguaaacugugaugua

SEQ ID NO: 1705934 - RNA, 19 nt, Artificial Sequence
  Description of Artificial Sequence: Synthetic oligonucleotide
  Antisense strand to SEQ ID NO: 1705933
uacaucacaguuuacaaag

SEQ ID NO: 1705935 - RNA, 19 nt, Artificial Sequence
  Description of Artificial Sequence: Synthetic oligonucleotide
  Sense strand starting at position 3256 of SEQ ID NO: 1561888
gagcaugacucaggucaag

SEQ ID NO: 1705936 - RNA, 19 nt, Artificial Sequence
  Description of Artificial Sequence: Synthetic oligonucleotide
  Antisense strand to SEQ ID NO: 1705935
cuugaccugagucaugcuc

SEQ ID NO: 1705937 - RNA, 19 nt, Artificial Sequence
  Description of Artificial Sequence: Synthetic oligonucleotide
  Sense strand starting at position 3285 of SEQ ID NO: 1561888
gccaguugucuccaggaca

SEQ ID NO: 1705938 - RNA, 19 nt, Artificial Sequence
  Description of Artificial Sequence: Synthetic oligonucleotide
  Antisense strand to SEQ ID NO: 1705937
uguccuggagacaacuggc

SEQ ID NO: 1705939 - RNA, 19 nt, Artificial Sequence
  Description of Artificial Sequence: Synthetic oligonucleotide
  Sense strand starting at position 3288 of SEQ ID NO: 1561888
aguugucuccaggacauag

SEQ ID NO: 1705940 - RNA, 19 nt, Artificial Sequence
  Description of Artificial Sequence: Synthetic oligonucleotide
  Antisense strand to SEQ ID NO: 1705939
cuauguccuggagacaacu

SEQ ID NO: 1705941 - RNA, 19 nt, Artificial Sequence
  Description of Artificial Sequence: Synthetic oligonucleotide
  Sense strand starting at position 3445 of SEQ ID NO: 1561888
gugggaucuuuccugauca

SEQ ID NO: 1705942 - RNA, 19 nt, Artificial Sequence
  Description of Artificial Sequence: Synthetic oligonucleotide
  Antisense strand to SEQ ID NO: 1705941
ugaucaggaaagaucccac

SEQ ID NO: 1705943 - RNA, 19 nt, Artificial Sequence
  Description of Artificial Sequence: Synthetic oligonucleotide
  Sense strand starting at position 3446 of SEQ ID NO: 1561888
ugggaucuuuccugaucau

SEQ ID NO: 1705944 - RNA, 19 nt, Artificial Sequence
  Description of Artificial Sequence: Synthetic oligonucleotide
  Antisense strand to SEQ ID NO: 1705943
augaucaggaaagauccca

SEQ ID NO: 1705945 - RNA, 19 nt, Artificial Sequence
  Description of Artificial Sequence: Synthetic oligonucleotide
  Sense strand starting at position 3580 of SEQ ID NO: 1561888
cagucaagucaguacguga

SEQ ID NO: 1705946 - RNA, 19 nt, Artificial Sequence
  Description of Artificial Sequence: Synthetic oligonucleotide
  Antisense strand to SEQ ID NO: 1705945
ucacguacugacuugacug

SEQ ID NO: 1705947 - RNA, 19 nt, Artificial Sequence
  Description of Artificial Sequence: Synthetic oligonucleotide
  Sense strand starting at position 3583 of SEQ ID NO: 1561888
ucaagucaguacgugauuu

SEQ ID NO: 1705948 - RNA, 19 nt, Artificial Sequence
  Description of Artificial Sequence: Synthetic oligonucleotide
  Antisense strand to SEQ ID NO: 1705947
aaaucacguacugacuuga

SEQ ID NO: 1705949 - RNA, 19 nt, Artificial Sequence
  Description of Artificial Sequence: Synthetic oligonucleotide
  Sense strand starting at position 3776 of SEQ ID NO: 1561888
cugugauaaugagaauguc

SEQ ID NO: 1705950 - RNA, 19 nt, Artificial Sequence
  Description of Artificial Sequence: Synthetic oligonucleotide
  Antisense strand to SEQ ID NO: 1705949
gacauucucauuaucacag

SEQ ID NO: 1705951 - RNA, 19 nt, Artificial Sequence
  Description of Artificial Sequence: Synthetic oligonucleotide
  Sense strand starting at position 3954 of SEQ ID NO: 1561888
gucccaaguucucuggaga

SEQ ID NO: 1705952 - RNA, 19 nt, Artificial Sequence
  Description of Artificial Sequence: Synthetic oligonucleotide
  Antisense strand to SEQ ID NO: 1705951
ucuccagagaacuugggac

SEQ ID NO: 1705953 - RNA, 19 nt, Artificial Sequence
  Description of Artificial Sequence: Synthetic oligonucleotide
  Sense strand starting at position 3955 of SEQ ID NO: 1561888
ucccaaguucucuggagac

SEQ ID NO: 1705954 - RNA, 19 nt, Artificial Sequence
  Description of Artificial Sequence: Synthetic oligonucleotide
  Antisense strand to SEQ ID NO: 1705953
gucuccagagaacuuggga

SEQ ID NO: 1705955 - RNA, 19 nt, Artificial Sequence
  Description of Artificial Sequence: Synthetic oligonucleotide
  Sense strand starting at position 603 of SEQ ID NO: 1561889
aggagucugccaugaagug

SEQ ID NO: 1705956 - RNA, 19 nt, Artificial Sequence
  Description of Artificial Sequence: Synthetic oligonucleotide
  Antisense strand to SEQ ID NO: 1705955
cacuucauggcagacuccu

SEQ ID NO: 1705957 - RNA, 19 nt, Artificial Sequence
  Description of Artificial Sequence: Synthetic oligonucleotide
  Sense strand starting at position 604 of SEQ ID NO: 1561889
ggagucugccaugaaguga

SEQ ID NO: 1705958 - RNA, 19 nt, Artificial Sequence
  Description of Artificial Sequence: Synthetic oligonucleotide
  Antisense strand to SEQ ID NO: 1705957
ucacuucauggcagacucc

SEQ ID NO: 1705959 - RNA, 19 nt, Artificial Sequence
  Description of Artificial Sequence: Synthetic oligonucleotide
  Sense strand starting at position 633 of SEQ ID NO: 1561889
agaagagucuggguuucug

SEQ ID NO: 1705960 - RNA, 19 nt, Artificial Sequence
  Description of Artificial Sequence: Synthetic oligonucleotide
  Antisense strand to SEQ ID NO: 1705959
cagaaacccagacucuucu

SEQ ID NO: 1705961 - RNA, 19 nt, Artificial Sequence
  Description of Artificial Sequence: Synthetic oligonucleotide
  Sense strand starting at position 717 of SEQ ID NO: 1561889
ggagcuaccucacuugaag

SEQ ID NO: 1705962 - RNA, 19 nt, Artificial Sequence
  Description of Artificial Sequence: Synthetic oligonucleotide
  Antisense strand to SEQ ID NO: 1705961
cuucaagugagguagcucc

SEQ ID NO: 1705963 - RNA, 19 nt, Artificial Sequence
  Description of Artificial Sequence: Synthetic oligonucleotide
  Sense strand starting at position 729 of SEQ ID NO: 1561889
cuugaaggcucuccuagaa

SEQ ID NO: 1705964 - RNA, 19 nt, Artificial Sequence
  Description of Artificial Sequence: Synthetic oligonucleotide
  Antisense strand to SEQ ID NO: 1705963
uucuaggagagccuucaag

SEQ ID NO: 1705965 - RNA, 19 nt, Artificial Sequence
  Description of Artificial Sequence: Synthetic oligonucleotide
  Sense strand starting at position 837 of SEQ ID NO: 1561889
cagagcuuccauuagguca

SEQ ID NO: 1705966 - RNA, 19 nt, Artificial Sequence
  Description of Artificial Sequence: Synthetic oligonucleotide
  Antisense strand to SEQ ID NO: 1705965
ugaccuaauggaagcucug

SEQ ID NO: 1705967 - RNA, 19 nt, Artificial Sequence
  Description of Artificial Sequence: Synthetic oligonucleotide
  Sense strand starting at position 860 of SEQ ID NO: 1561889
gaggccucuguugagacua

SEQ ID NO: 1705968 - RNA, 19 nt, Artificial Sequence
  Description of Artificial Sequence: Synthetic oligonucleotide
  Antisense strand to SEQ ID NO: 1705967
uagucucaacagaggccuc

SEQ ID NO: 1705969 - RNA, 19 nt, Artificial Sequence
  Description of Artificial Sequence: Synthetic oligonucleotide
  Sense strand starting at position 865 of SEQ ID NO: 1561889
cucuguugagacuacauca

SEQ ID NO: 1705970 - RNA, 19 nt, Artificial Sequence
  Description of Artificial Sequence: Synthetic oligonucleotide
  Antisense strand to SEQ ID NO: 1705969
ugauguagucucaacagag

SEQ ID NO: 1705971 - RNA, 19 nt, Artificial Sequence
  Description of Artificial Sequence: Synthetic oligonucleotide
  Sense strand starting at position 924 of SEQ ID NO: 1561889
acuggugauauucgcaaga

SEQ ID NO: 1705972 - RNA, 19 nt, Artificial Sequence
  Description of Artificial Sequence: Synthetic oligonucleotide
  Antisense strand to SEQ ID NO: 1705971
ucuugcgaauaucaccagu

SEQ ID NO: 1705973 - RNA, 19 nt, Artificial Sequence
  Description of Artificial Sequence: Synthetic oligonucleotide
  Sense strand starting at position 929 of SEQ ID NO: 1561889
ugauauucgcaagagcacu

SEQ ID NO: 1705974 - RNA, 19 nt, Artificial Sequence
  Description of Artificial Sequence: Synthetic oligonucleotide
  Antisense strand to SEQ ID NO: 1705973
agugcucuugcgaauauca

SEQ ID NO: 1705975 - RNA, 19 nt, Artificial Sequence
  Description of Artificial Sequence: Synthetic oligonucleotide
  Sense strand starting at position 937 of SEQ ID NO: 1561889
gcaagagcacuccgauaaa

SEQ ID NO: 1705976 - RNA, 19 nt, Artificial Sequence
  Description of Artificial Sequence: Synthetic oligonucleotide
  Antisense strand to SEQ ID NO: 1705975
uuuaucggagugcucuugc

SEQ ID NO: 1705977 - RNA, 19 nt, Artificial Sequence
  Description of Artificial Sequence: Synthetic oligonucleotide
  Sense strand starting at position 940 of SEQ ID NO: 1561889
agagcacuccgauaaaccu

SEQ ID NO: 1705978 - RNA, 19 nt, Artificial Sequence
  Description of Artificial Sequence: Synthetic oligonucleotide
  Antisense strand to SEQ ID NO: 1705977
agguuuaucggagugcucu

SEQ ID NO: 1705979 - RNA, 19 nt, Artificial Sequence
  Description of Artificial Sequence: Synthetic oligonucleotide
  Sense strand starting at position 1056 of SEQ ID NO: 1561889
uaaauaucuguuggcugaa

SEQ ID NO: 1705980 - RNA, 19 nt, Artificial Sequence
  Description of Artificial Sequence: Synthetic oligonucleotide
  Antisense strand to SEQ ID NO: 1705979
uucagccaacagauauuua

SEQ ID NO: 1705981 - RNA, 19 nt, Artificial Sequence
  Description of Artificial Sequence: Synthetic oligonucleotide
  Sense strand starting at position 1057 of SEQ ID NO: 1561889
aaauaucuguuggcugaau

SEQ ID NO: 1705982 - RNA, 19 nt, Artificial Sequence
  Description of Artificial Sequence: Synthetic oligonucleotide
  Antisense strand to SEQ ID NO: 1705981
auucagccaacagauauuu

SEQ ID NO: 1705983 - RNA, 19 nt, Artificial Sequence
  Description of Artificial Sequence: Synthetic oligonucleotide
  Sense strand starting at position 1091 of SEQ ID NO: 1561889
uucucuugaugucugacaa

SEQ ID NO: 1705984 - RNA, 19 nt, Artificial Sequence
  Description of Artificial Sequence: Synthetic oligonucleotide
  Antisense strand to SEQ ID NO: 1705983
uugucagacaucaagagaa

SEQ ID NO: 1705985 - RNA, 19 nt, Artificial Sequence
  Description of Artificial Sequence: Synthetic oligonucleotide
  Sense strand starting at position 1092 of SEQ ID NO: 1561889
ucucuugaugucugacaag

SEQ ID NO: 1705986 - RNA, 19 nt, Artificial Sequence
  Description of Artificial Sequence: Synthetic oligonucleotide
  Antisense strand to SEQ ID NO: 1705985
cuugucagacaucaagaga

SEQ ID NO: 1705987 - RNA, 19 nt, Artificial Sequence
  Description of Artificial Sequence: Synthetic oligonucleotide
  Sense strand starting at position 1540 of SEQ ID NO: 1561889
guaggaaaguuugccaaau

SEQ ID NO: 1705988 - RNA, 19 nt, Artificial Sequence
  Description of Artificial Sequence: Synthetic oligonucleotide
  Antisense strand to SEQ ID NO: 1705987
auuuggcaaacuuuccuac

SEQ ID NO: 1705989 - RNA, 19 nt, Artificial Sequence
  Description of Artificial Sequence: Synthetic oligonucleotide
  Sense strand starting at position 1541 of SEQ ID NO: 1561889
uaggaaaguuugccaaaug

SEQ ID NO: 1705990 - RNA, 19 nt, Artificial Sequence
  Description of Artificial Sequence: Synthetic oligonucleotide
  Antisense strand to SEQ ID NO: 1705989
cauuuggcaaacuuuccua

SEQ ID NO: 1705991 - RNA, 19 nt, Artificial Sequence
  Description of Artificial Sequence: Synthetic oligonucleotide
  Sense strand starting at position 1631 of SEQ ID NO: 1561889
gauugcguaucuccaaaca

SEQ ID NO: 1705992 - RNA, 19 nt, Artificial Sequence
  Description of Artificial Sequence: Synthetic oligonucleotide
  Antisense strand to SEQ ID NO: 1705991
uguuuggagauacgcaauc

SEQ ID NO: 1705993 - RNA, 19 nt, Artificial Sequence
  Description of Artificial Sequence: Synthetic oligonucleotide
  Sense strand starting at position 2516 of SEQ ID NO: 1561889
gcauuagccgcgucuacuu

SEQ ID NO: 1705994 - RNA, 19 nt, Artificial Sequence
  Description of Artificial Sequence: Synthetic oligonucleotide
  Antisense strand to SEQ ID NO: 1705993
aaguagacgcggcuaaugc

SEQ ID NO: 1705995 - RNA, 19 nt, Artificial Sequence
  Description of Artificial Sequence: Synthetic oligonucleotide
  Sense strand starting at position 2803 of SEQ ID NO: 1561889
ucacauagauuugaguaau

SEQ ID NO: 1705996 - RNA, 19 nt, Artificial Sequence
  Description of Artificial Sequence: Synthetic oligonucleotide
  Antisense strand to SEQ ID NO: 1705995
auuacucaaaucuauguga

SEQ ID NO: 1705997 - RNA, 19 nt, Artificial Sequence
  Description of Artificial Sequence: Synthetic oligonucleotide
  Sense strand starting at position 2814 of SEQ ID NO: 1561889
ugaguaauuccagaggcua

SEQ ID NO: 1705998 - RNA, 19 nt, Artificial Sequence
  Description of Artificial Sequence: Synthetic oligonucleotide
  Antisense strand to SEQ ID NO: 1705997
uagccucuggaauuacuca

SEQ ID NO: 1705999 - RNA, 19 nt, Artificial Sequence
  Description of Artificial Sequence: Synthetic oligonucleotide
  Sense strand starting at position 2816 of SEQ ID NO: 1561889
aguaauuccagaggcuaag

SEQ ID NO: 1706000 - RNA, 19 nt, Artificial Sequence
  Description of Artificial Sequence: Synthetic oligonucleotide
  Antisense strand to SEQ ID NO: 1705999
cuuagccucuggaauuacu

SEQ ID NO: 1706001 - RNA, 19 nt, Artificial Sequence
  Description of Artificial Sequence: Synthetic oligonucleotide
  Sense strand starting at position 2847 of SEQ ID NO: 1561889
ccaagaggguaggaaauau

SEQ ID NO: 1706002 - RNA, 19 nt, Artificial Sequence
  Description of Artificial Sequence: Synthetic oligonucleotide
  Antisense strand to SEQ ID NO: 1706001
auauuuccuacccucuugg

SEQ ID NO: 1706003 - RNA, 19 nt, Artificial Sequence
  Description of Artificial Sequence: Synthetic oligonucleotide
  Sense strand starting at position 2921 of SEQ ID NO: 1561889
uaaauaucuguugagugac

SEQ ID NO: 1706004 - RNA, 19 nt, Artificial Sequence
  Description of Artificial Sequence: Synthetic oligonucleotide
  Antisense strand to SEQ ID NO: 1706003
gucacucaacagauauuua

SEQ ID NO: 1706005 - RNA, 19 nt, Artificial Sequence
  Description of Artificial Sequence: Synthetic oligonucleotide
  Sense strand starting at position 3039 of SEQ ID NO: 1561889
uuuacuuggccuuaaguca

SEQ ID NO: 1706006 - RNA, 19 nt, Artificial Sequence
  Description of Artificial Sequence: Synthetic oligonucleotide
  Antisense strand to SEQ ID NO: 1706005
ugacuuaaggccaaguaaa

SEQ ID NO: 1706007 - RNA, 19 nt, Artificial Sequence
  Description of Artificial Sequence: Synthetic oligonucleotide
  Sense strand starting at position 3052 of SEQ ID NO: 1561889
aagucauggccacauguca

SEQ ID NO: 1706008 - RNA, 19 nt, Artificial Sequence
  Description of Artificial Sequence: Synthetic oligonucleotide
  Antisense strand to SEQ ID NO: 1706007
ugacauguggccaugacuu

SEQ ID NO: 1706009 - RNA, 19 nt, Artificial Sequence
  Description of Artificial Sequence: Synthetic oligonucleotide
  Sense strand starting at position 3129 of SEQ ID NO: 1561889
guaggcaaauucuccaaau

SEQ ID NO: 1706010 - RNA, 19 nt, Artificial Sequence
  Description of Artificial Sequence: Synthetic oligonucleotide
  Antisense strand to SEQ ID NO: 1706009
auuuggagaauuugccuac

SEQ ID NO: 1706011 - RNA, 19 nt, Artificial Sequence
  Description of Artificial Sequence: Synthetic oligonucleotide
  Sense strand starting at position 3150 of SEQ ID NO: 1561889
cugugaucgacagguuuaa

SEQ ID NO: 1706012 - RNA, 19 nt, Artificial Sequence
  Description of Artificial Sequence: Synthetic oligonucleotide
  Antisense strand to SEQ ID NO: 1706011
uuaaaccugucgaucacag

SEQ ID NO: 1706013 - RNA, 19 nt, Artificial Sequence
  Description of Artificial Sequence: Synthetic oligonucleotide
  Sense strand starting at position 3270 of SEQ ID NO: 1561889
acaggauugcaucaguuaa

SEQ ID NO: 1706014 - RNA, 19 nt, Artificial Sequence
  Description of Artificial Sequence: Synthetic oligonucleotide
  Antisense strand to SEQ ID NO: 1706013
uuaacugaugcaauccugu

SEQ ID NO: 1706015 - RNA, 19 nt, Artificial Sequence
  Description of Artificial Sequence: Synthetic oligonucleotide
  Sense strand starting at position 3379 of SEQ ID NO: 1561889
cugugcgugaucuagauuu

SEQ ID NO: 1706016 - RNA, 19 nt, Artificial Sequence
  Description of Artificial Sequence: Synthetic oligonucleotide
  Antisense strand to SEQ ID NO: 1706015
aaaucuagaucacgcacag

SEQ ID NO: 1706017 - RNA, 19 nt, Artificial Sequence
  Description of Artificial Sequence: Synthetic oligonucleotide
  Sense strand starting at position 3381 of SEQ ID NO: 1561889
gugcgugaucuagauuuca

SEQ ID NO: 1706018 - RNA, 19 nt, Artificial Sequence
  Description of Artificial Sequence: Synthetic oligonucleotide
  Antisense strand to SEQ ID NO: 1706017
ugaaaucuagaucacgcac

SEQ ID NO: 1706019 - RNA, 19 nt, Artificial Sequence
  Description of Artificial Sequence: Synthetic oligonucleotide
  Sense strand starting at position 3483 of SEQ ID NO: 1561889
uuuagauggugauuaagac

SEQ ID NO: 1706020 - RNA, 19 nt, Artificial Sequence
  Description of Artificial Sequence: Synthetic oligonucleotide
  Antisense strand to SEQ ID NO: 1706019
gucuuaaucaccaucuaaa

SEQ ID NO: 1706021 - RNA, 19 nt, Artificial Sequence
  Description of Artificial Sequence: Synthetic oligonucleotide
  Sense strand starting at position 3489 of SEQ ID NO: 1561889
uggugauuaagacggauaa

SEQ ID NO: 1706022 - RNA, 19 nt, Artificial Sequence
  Description of Artificial Sequence: Synthetic oligonucleotide
  Antisense strand to SEQ ID NO: 1706021
uuauccgucuuaaucacca

SEQ ID NO: 1706023 - RNA, 19 nt, Artificial Sequence
  Description of Artificial Sequence: Synthetic oligonucleotide
  Sense strand starting at position 3490 of SEQ ID NO: 1561889
ggugauuaagacggauaag

SEQ ID NO: 1706024 - RNA, 19 nt, Artificial Sequence
  Description of Artificial Sequence: Synthetic oligonucleotide
  Antisense strand to SEQ ID NO: 1706023
cuuauccgucuuaaucacc

SEQ ID NO: 1706025 - RNA, 19 nt, Artificial Sequence
  Description of Artificial Sequence: Synthetic oligonucleotide
  Sense strand starting at position 3491 of SEQ ID NO: 1561889
gugauuaagacggauaagu

SEQ ID NO: 1706026 - RNA, 19 nt, Artificial Sequence
  Description of Artificial Sequence: Synthetic oligonucleotide
  Antisense strand to SEQ ID NO: 1706025
acuuauccgucuuaaucac

SEQ ID NO: 1706027 - RNA, 19 nt, Artificial Sequence
  Description of Artificial Sequence: Synthetic oligonucleotide
  Sense strand starting at position 3542 of SEQ ID NO: 1561889
aacuaacauggaugugagu

SEQ ID NO: 1706028 - RNA, 19 nt, Artificial Sequence
  Description of Artificial Sequence: Synthetic oligonucleotide
  Antisense strand to SEQ ID NO: 1706027
acucacauccauguuaguu

SEQ ID NO: 1706029 - RNA, 19 nt, Artificial Sequence
  Description of Artificial Sequence: Synthetic oligonucleotide
  Sense strand starting at position 3551 of SEQ ID NO: 1561889
ggaugugaguugcuaagac

SEQ ID NO: 1706030 - RNA, 19 nt, Artificial Sequence
  Description of Artificial Sequence: Synthetic oligonucleotide
  Antisense strand to SEQ ID NO: 1706029
gucuuagcaacucacaucc

SEQ ID NO: 1706031 - RNA, 19 nt, Artificial Sequence
  Description of Artificial Sequence: Synthetic oligonucleotide
  Sense strand starting at position 3578 of SEQ ID NO: 1561889
ucuggcuaucgacaguauu

SEQ ID NO: 1706032 - RNA, 19 nt, Artificial Sequence
  Description of Artificial Sequence: Synthetic oligonucleotide
  Antisense strand to SEQ ID NO: 1706031
aauacugucgauagccaga

SEQ ID NO: 1706033 - RNA, 19 nt, Artificial Sequence
  Description of Artificial Sequence: Synthetic oligonucleotide
  Sense strand starting at position 3818 of SEQ ID NO: 1561889
ugaagugggccaugaguga

SEQ ID NO: 1706034 - RNA, 19 nt, Artificial Sequence
  Description of Artificial Sequence: Synthetic oligonucleotide
  Antisense strand to SEQ ID NO: 1706033
ucacucauggcccacuuca

SEQ ID NO: 1706035 - RNA, 19 nt, Artificial Sequence
  Description of Artificial Sequence: Synthetic oligonucleotide
  Sense strand starting at position 94 of SEQ ID NO: 1561890
uggcccuuuacucacgaga

SEQ ID NO: 1706036 - RNA, 19 nt, Artificial Sequence
  Description of Artificial Sequence: Synthetic oligonucleotide
  Antisense strand to SEQ ID NO: 1706035
ucucgugaguaaagggcca

SEQ ID NO: 1706037 - RNA, 19 nt, Artificial Sequence
  Description of Artificial Sequence: Synthetic oligonucleotide
  Sense strand starting at position 493 of SEQ ID NO: 1561890
ccuccuaucucagaggacu

SEQ ID NO: 1706038 - RNA, 19 nt, Artificial Sequence
  Description of Artificial Sequence: Synthetic oligonucleotide
  Antisense strand to SEQ ID NO: 1706037
aguccucugagauaggagg

SEQ ID NO: 1706039 - RNA, 19 nt, Artificial Sequence
  Description of Artificial Sequence: Synthetic oligonucleotide
  Sense strand starting at position 738 of SEQ ID NO: 1561890
ggagacagcucagguuaca

SEQ ID NO: 1706040 - RNA, 19 nt, Artificial Sequence
  Description of Artificial Sequence: Synthetic oligonucleotide
  Antisense strand to SEQ ID NO: 1706039
uguaaccugagcugucucc

SEQ ID NO: 1706041 - RNA, 19 nt, Artificial Sequence
  Description of Artificial Sequence: Synthetic oligonucleotide
  Sense strand starting at position 919 of SEQ ID NO: 1561890
aggugagguguccaugcau

SEQ ID NO: 1706042 - RNA, 19 nt, Artificial Sequence
  Description of Artificial Sequence: Synthetic oligonucleotide
  Antisense strand to SEQ ID NO: 1706041
augcauggacaccucaccu

SEQ ID NO: 1706043 - RNA, 19 nt, Artificial Sequence
  Description of Artificial Sequence: Synthetic oligonucleotide
  Sense strand starting at position 1162 of SEQ ID NO: 1561890
ucccuagacuccuccgaga

SEQ ID NO: 1706044 - RNA, 19 nt, Artificial Sequence
  Description of Artificial Sequence: Synthetic oligonucleotide
  Antisense strand to SEQ ID NO: 1706043
ucucggaggagucuaggga

SEQ ID NO: 1706045 - RNA, 19 nt, Artificial Sequence
  Description of Artificial Sequence: Synthetic oligonucleotide
  Sense strand starting at position 2563 of SEQ ID NO: 1561890
acucucagauagggaaaua

SEQ ID NO: 1706046 - RNA, 19 nt, Artificial Sequence
  Description of Artificial Sequence: Synthetic oligonucleotide
  Antisense strand to SEQ ID NO: 1706045
uauuucccuaucugagagu

SEQ ID NO: 1706047 - RNA, 19 nt, Artificial Sequence
  Description of Artificial Sequence: Synthetic oligonucleotide
  Sense strand starting at position 2652 of SEQ ID NO: 1561890
ccgccaaauuggcucuuaa

SEQ ID NO: 1706048 - RNA, 19 nt, Artificial Sequence
  Description of Artificial Sequence: Synthetic oligonucleotide
  Antisense strand to SEQ ID NO: 1706047
uuaagagccaauuuggcgg

SEQ ID NO: 1706049 - RNA, 19 nt, Artificial Sequence
  Description of Artificial Sequence: Synthetic oligonucleotide
  Sense strand starting at position 2656 of SEQ ID NO: 1561890
caaauuggcucuuaaggag

SEQ ID NO: 1706050 - RNA, 19 nt, Artificial Sequence
  Description of Artificial Sequence: Synthetic oligonucleotide
  Antisense strand to SEQ ID NO: 1706049
cuccuuaagagccaauuug

SEQ ID NO: 1706051 - RNA, 19 nt, Artificial Sequence
  Description of Artificial Sequence: Synthetic oligonucleotide
  Sense strand starting at position 3298 of SEQ ID NO: 1561890
cccggcaauucuuccauaa

SEQ ID NO: 1706052 - RNA, 19 nt, Artificial Sequence
  Description of Artificial Sequence: Synthetic oligonucleotide
  Antisense strand to SEQ ID NO: 1706051
uuauggaagaauugccggg

SEQ ID NO: 1706053 - RNA, 19 nt, Artificial Sequence
  Description of Artificial Sequence: Synthetic oligonucleotide
  Sense strand starting at position 3300 of SEQ ID NO: 1561890
cggcaauucuuccauaacu

SEQ ID NO: 1706054 - RNA, 19 nt, Artificial Sequence
  Description of Artificial Sequence: Synthetic oligonucleotide
  Antisense strand to SEQ ID NO: 1706053
aguuauggaagaauugccg

SEQ ID NO: 1706055 - RNA, 19 nt, Artificial Sequence
  Description of Artificial Sequence: Synthetic oligonucleotide
  Sense strand starting at position 3465 of SEQ ID NO: 1561890
ugcuuuagaucccguguga

SEQ ID NO: 1706056 - RNA, 19 nt, Artificial Sequence
  Description of Artificial Sequence: Synthetic oligonucleotide
  Antisense strand to SEQ ID NO: 1706055
ucacacgggaucuaaagca

SEQ ID NO: 1706057 - RNA, 19 nt, Artificial Sequence
  Description of Artificial Sequence: Synthetic oligonucleotide
  Sense strand starting at position 3805 of SEQ ID NO: 1561890
cugagaaugcgcuguguca

SEQ ID NO: 1706058 - RNA, 19 nt, Artificial Sequence
  Description of Artificial Sequence: Synthetic oligonucleotide
  Antisense strand to SEQ ID NO: 1706057
ugacacagcgcauucucag

SEQ ID NO: 1706059 - RNA, 19 nt, Artificial Sequence
  Description of Artificial Sequence: Synthetic oligonucleotide
  Sense strand starting at position 3846 of SEQ ID NO: 1561890
ggguuaaucaccgggcuca

SEQ ID NO: 1706060 - RNA, 19 nt, Artificial Sequence
  Description of Artificial Sequence: Synthetic oligonucleotide
  Antisense strand to SEQ ID NO: 1706059
ugagcccggugauuaaccc

SEQ ID NO: 1706061 - RNA, 19 nt, Artificial Sequence
  Description of Artificial Sequence: Synthetic oligonucleotide
  Sense strand starting at position 219 of SEQ ID NO: 1561891
cggaguuaccuuuacaaag

SEQ ID NO: 1706062 - RNA, 19 nt, Artificial Sequence
  Description of Artificial Sequence: Synthetic oligonucleotide
  Antisense strand to SEQ ID NO: 1706061
cuuuguaaagguaacuccg

SEQ ID NO: 1706063 - RNA, 19 nt, Artificial Sequence
  Description of Artificial Sequence: Synthetic oligonucleotide
  Sense strand starting at position 350 of SEQ ID NO: 1561891
cugugaucagcugggaaca

SEQ ID NO: 1706064 - RNA, 19 nt, Artificial Sequence
  Description of Artificial Sequence: Synthetic oligonucleotide
  Antisense strand to SEQ ID NO: 1706063
uguucccagcugaucacag

SEQ ID NO: 1706065 - RNA, 19 nt, Artificial Sequence
  Description of Artificial Sequence: Synthetic oligonucleotide
  Sense strand starting at position 657 of SEQ ID NO: 1561891
uucgaagagccuugaggaa

SEQ ID NO: 1706066 - RNA, 19 nt, Artificial Sequence
  Description of Artificial Sequence: Synthetic oligonucleotide
  Antisense strand to SEQ ID NO: 1706065
uuccucaaggcucuucgaa

SEQ ID NO: 1706067 - RNA, 19 nt, Artificial Sequence
  Description of Artificial Sequence: Synthetic oligonucleotide
  Sense strand starting at position 900 of SEQ ID NO: 1561891
auuguaucugcggaacaaa

SEQ ID NO: 1706068 - RNA, 19 nt, Artificial Sequence
  Description of Artificial Sequence: Synthetic oligonucleotide
  Antisense strand to SEQ ID NO: 1706067
uuuguuccgcagauacaau

SEQ ID NO: 1706069 - RNA, 19 nt, Artificial Sequence
  Description of Artificial Sequence: Synthetic oligonucleotide
  Sense strand starting at position 989 of SEQ ID NO: 1561891
caggcuuuggagugacaaa

SEQ ID NO: 1706070 - RNA, 19 nt, Artificial Sequence
  Description of Artificial Sequence: Synthetic oligonucleotide
  Antisense strand to SEQ ID NO: 1706069
uuugucacuccaaagccug

SEQ ID NO: 1706071 - RNA, 19 nt, Artificial Sequence
  Description of Artificial Sequence: Synthetic oligonucleotide
  Sense strand starting at position 1074 of SEQ ID NO: 1561891
cuucgcuguuaauuuauaa

SEQ ID NO: 1706072 - RNA, 19 nt, Artificial Sequence
  Description of Artificial Sequence: Synthetic oligonucleotide
  Antisense strand to SEQ ID NO: 1706071
uuauaaauuaacagcgaag

SEQ ID NO: 1706073 - RNA, 19 nt, Artificial Sequence
  Description of Artificial Sequence: Synthetic oligonucleotide
  Sense strand starting at position 1121 of SEQ ID NO: 1561891
ccugacuuuguuuguaaua

SEQ ID NO: 1706074 - RNA, 19 nt, Artificial Sequence
  Description of Artificial Sequence: Synthetic oligonucleotide
  Antisense strand to SEQ ID NO: 1706073
uauuacaaacaaagucagg

SEQ ID NO: 1706075 - RNA, 19 nt, Artificial Sequence
  Description of Artificial Sequence: Synthetic oligonucleotide
  Sense strand starting at position 1122 of SEQ ID NO: 1561891
cugacuuuguuuguaauau

SEQ ID NO: 1706076 - RNA, 19 nt, Artificial Sequence
  Description of Artificial Sequence: Synthetic oligonucleotide
  Antisense strand to SEQ ID NO: 1706075
auauuacaaacaaagucag

SEQ ID NO: 1706077 - RNA, 19 nt, Artificial Sequence
  Description of Artificial Sequence: Synthetic oligonucleotide
  Sense strand starting at position 1219 of SEQ ID NO: 1561891
cuaggcucugucuggaaua

SEQ ID NO: 1706078 - RNA, 19 nt, Artificial Sequence
  Description of Artificial Sequence: Synthetic oligonucleotide
  Antisense strand to SEQ ID NO: 1706077
uauuccagacagagccuag

SEQ ID NO: 1706079 - RNA, 19 nt, Artificial Sequence
  Description of Artificial Sequence: Synthetic oligonucleotide
  Sense strand starting at position 1386 of SEQ ID NO: 1561891
cucuguucucugcaaagag

SEQ ID NO: 1706080 - RNA, 19 nt, Artificial Sequence
  Description of Artificial Sequence: Synthetic oligonucleotide
  Antisense strand to SEQ ID NO: 1706079
cucuuugcagagaacagag

SEQ ID NO: 1706081 - RNA, 19 nt, Artificial Sequence
  Description of Artificial Sequence: Synthetic oligonucleotide
  Sense strand starting at position 2087 of SEQ ID NO: 1561891
uggcaacaguuuccugaau

SEQ ID NO: 1706082 - RNA, 19 nt, Artificial Sequence
  Description of Artificial Sequence: Synthetic oligonucleotide
  Antisense strand to SEQ ID NO: 1706081
auucaggaaacuguugcca

SEQ ID NO: 1706083 - RNA, 19 nt, Artificial Sequence
  Description of Artificial Sequence: Synthetic oligonucleotide
  Sense strand starting at position 2088 of SEQ ID NO: 1561891
ggcaacaguuuccugaauu

SEQ ID NO: 1706084 - RNA, 19 nt, Artificial Sequence
  Description of Artificial Sequence: Synthetic oligonucleotide
  Antisense strand to SEQ ID NO: 1706083
aauucaggaaacuguugcc

SEQ ID NO: 1706085 - RNA, 19 nt, Artificial Sequence
  Description of Artificial Sequence: Synthetic oligonucleotide
  Sense strand starting at position 2136 of SEQ ID NO: 1561891
caaugagcucauggguuua

SEQ ID NO: 1706086 - RNA, 19 nt, Artificial Sequence
  Description of Artificial Sequence: Synthetic oligonucleotide
  Antisense strand to SEQ ID NO: 1706085
uaaacccaugagcucauug

SEQ ID NO: 1706087 - RNA, 19 nt, Artificial Sequence
  Description of Artificial Sequence: Synthetic oligonucleotide
  Sense strand starting at position 2141 of SEQ ID NO: 1561891
agcucauggguuuaaaguu

SEQ ID NO: 1706088 - RNA, 19 nt, Artificial Sequence
  Description of Artificial Sequence: Synthetic oligonucleotide
  Antisense strand to SEQ ID NO: 1706087
aacuuuaaacccaugagcu

SEQ ID NO: 1706089 - RNA, 19 nt, Artificial Sequence
  Description of Artificial Sequence: Synthetic oligonucleotide
  Sense strand starting at position 2244 of SEQ ID NO: 1561891
gcaugaggacucugaacuc

SEQ ID NO: 1706090 - RNA, 19 nt, Artificial Sequence
  Description of Artificial Sequence: Synthetic oligonucleotide
  Antisense strand to SEQ ID NO: 1706089
gaguucagaguccucaugc

SEQ ID NO: 1706091 - RNA, 19 nt, Artificial Sequence
  Description of Artificial Sequence: Synthetic oligonucleotide
  Sense strand starting at position 2290 of SEQ ID NO: 1561891
cugugaccacucugccaaa

SEQ ID NO: 1706092 - RNA, 19 nt, Artificial Sequence
  Description of Artificial Sequence: Synthetic oligonucleotide
  Antisense strand to SEQ ID NO: 1706091
uuuggcagaguggucacag

SEQ ID NO: 1706093 - RNA, 19 nt, Artificial Sequence
  Description of Artificial Sequence: Synthetic oligonucleotide
  Sense strand starting at position 2335 of SEQ ID NO: 1561891
uugagaguuaucuaguguc

SEQ ID NO: 1706094 - RNA, 19 nt, Artificial Sequence
  Description of Artificial Sequence: Synthetic oligonucleotide
  Antisense strand to SEQ ID NO: 1706093
gacacuagauaacucucaa

SEQ ID NO: 1706095 - RNA, 19 nt, Artificial Sequence
  Description of Artificial Sequence: Synthetic oligonucleotide
  Sense strand starting at position 2343 of SEQ ID NO: 1561891
uaucuagugucuccuagga

SEQ ID NO: 1706096 - RNA, 19 nt, Artificial Sequence
  Description of Artificial Sequence: Synthetic oligonucleotide
  Antisense strand to SEQ ID NO: 1706095
uccuaggagacacuagaua

SEQ ID NO: 1706097 - RNA, 19 nt, Artificial Sequence
  Description of Artificial Sequence: Synthetic oligonucleotide
  Sense strand starting at position 2347 of SEQ ID NO: 1561891
uagugucuccuaggacaga

SEQ ID NO: 1706098 - RNA, 19 nt, Artificial Sequence
  Description of Artificial Sequence: Synthetic oligonucleotide
  Antisense strand to SEQ ID NO: 1706097
ucuguccuaggagacacua

SEQ ID NO: 1706099 - RNA, 19 nt, Artificial Sequence
  Description of Artificial Sequence: Synthetic oligonucleotide
  Sense strand starting at position 2370 of SEQ ID NO: 1561891
uuagaauuaugcccuaagu

SEQ ID NO: 1706100 - RNA, 19 nt, Artificial Sequence
  Description of Artificial Sequence: Synthetic oligonucleotide
  Antisense strand to SEQ ID NO: 1706099
acuuagggcauaauucuaa

SEQ ID NO: 1706101 - RNA, 19 nt, Artificial Sequence
  Description of Artificial Sequence: Synthetic oligonucleotide
  Sense strand starting at position 2372 of SEQ ID NO: 1561891
agaauuaugcccuaaguaa

SEQ ID NO: 1706102 - RNA, 19 nt, Artificial Sequence
  Description of Artificial Sequence: Synthetic oligonucleotide
  Antisense strand to SEQ ID NO: 1706101
uuacuuagggcauaauucu

SEQ ID NO: 1706103 - RNA, 19 nt, Artificial Sequence
  Description of Artificial Sequence: Synthetic oligonucleotide
  Sense strand starting at position 2393 of SEQ ID NO: 1561891
ucacauaguuauguaagaa

SEQ ID NO: 1706104 - RNA, 19 nt, Artificial Sequence
  Description of Artificial Sequence: Synthetic oligonucleotide
  Antisense strand to SEQ ID NO: 1706103
uucuuacauaacuauguga

SEQ ID NO: 1706105 - RNA, 19 nt, Artificial Sequence
  Description of Artificial Sequence: Synthetic oligonucleotide
  Sense strand starting at position 2492 of SEQ ID NO: 1561891
uuugguagcuugcuuauuu

SEQ ID NO: 1706106 - RNA, 19 nt, Artificial Sequence
  Description of Artificial Sequence: Synthetic oligonucleotide
  Antisense strand to SEQ ID NO: 1706105
aaauaagcaagcuaccaaa

SEQ ID NO: 1706107 - RNA, 19 nt, Artificial Sequence
  Description of Artificial Sequence: Synthetic oligonucleotide
  Sense strand starting at position 2573 of SEQ ID NO: 1561891
uguagugauguccaaauau

SEQ ID NO: 1706108 - RNA, 19 nt, Artificial Sequence
  Description of Artificial Sequence: Synthetic oligonucleotide
  Antisense strand to SEQ ID NO: 1706107
auauuuggacaucacuaca

SEQ ID NO: 1706109 - RNA, 19 nt, Artificial Sequence
  Description of Artificial Sequence: Synthetic oligonucleotide
  Sense strand starting at position 2811 of SEQ ID NO: 1561891
aaugucacauggucaguua

SEQ ID NO: 1706110 - RNA, 19 nt, Artificial Sequence
  Description of Artificial Sequence: Synthetic oligonucleotide
  Antisense strand to SEQ ID NO: 1706109
uaacugaccaugugacauu

SEQ ID NO: 1706111 - RNA, 19 nt, Artificial Sequence
  Description of Artificial Sequence: Synthetic oligonucleotide
  Sense strand starting at position 2814 of SEQ ID NO: 1561891
gucacauggucaguuagaa

SEQ ID NO: 1706112 - RNA, 19 nt, Artificial Sequence
  Description of Artificial Sequence: Synthetic oligonucleotide
  Antisense strand to SEQ ID NO: 1706111
uucuaacugaccaugugac

SEQ ID NO: 1706113 - RNA, 19 nt, Artificial Sequence
  Description of Artificial Sequence: Synthetic oligonucleotide
  Sense strand starting at position 3291 of SEQ ID NO: 1561891
gucaguucucaucaguuga

SEQ ID NO: 1706114 - RNA, 19 nt, Artificial Sequence
  Description of Artificial Sequence: Synthetic oligonucleotide
  Antisense strand to SEQ ID NO: 1706113
ucaacugaugagaacugac

SEQ ID NO: 1706115 - RNA, 19 nt, Artificial Sequence
  Description of Artificial Sequence: Synthetic oligonucleotide
  Sense strand starting at position 3324 of SEQ ID NO: 1561891
acauuuguauguguuacau

SEQ ID NO: 1706116 - RNA, 19 nt, Artificial Sequence
  Description of Artificial Sequence: Synthetic oligonucleotide
  Antisense strand to SEQ ID NO: 1706115
auguaacacauacaaaugu

SEQ ID NO: 1706117 - RNA, 19 nt, Artificial Sequence
  Description of Artificial Sequence: Synthetic oligonucleotide
  Sense strand starting at position 3849 of SEQ ID NO: 1561891
aguagcauuggucauugau

SEQ ID NO: 1706118 - RNA, 19 nt, Artificial Sequence
  Description of Artificial Sequence: Synthetic oligonucleotide
  Antisense strand to SEQ ID NO: 1706117
aucaaugaccaaugcuacu

SEQ ID NO: 1706119 - RNA, 19 nt, Artificial Sequence
  Description of Artificial Sequence: Synthetic oligonucleotide
  Sense strand starting at position 3851 of SEQ ID NO: 1561891
uagcauuggucauugaucu

SEQ ID NO: 1706120 - RNA, 19 nt, Artificial Sequence
  Description of Artificial Sequence: Synthetic oligonucleotide
  Antisense strand to SEQ ID NO: 1706119
agaucaaugaccaaugcua

SEQ ID NO: 1706121 - RNA, 19 nt, Artificial Sequence
  Description of Artificial Sequence: Synthetic oligonucleotide
  Sense strand starting at position 3855 of SEQ ID NO: 1561891
auuggucauugaucuuaaa

SEQ ID NO: 1706122 - RNA, 19 nt, Artificial Sequence
  Description of Artificial Sequence: Synthetic oligonucleotide
  Antisense strand to SEQ ID NO: 1706121
uuuaagaucaaugaccaau

SEQ ID NO: 1706123 - RNA, 19 nt, Artificial Sequence
  Description of Artificial Sequence: Synthetic oligonucleotide
  Sense strand starting at position 3879 of SEQ ID NO: 1561891
guaguugauuuacaaauga

SEQ ID NO: 1706124 - RNA, 19 nt, Artificial Sequence
  Description of Artificial Sequence: Synthetic oligonucleotide
  Antisense strand to SEQ ID NO: 1706123
ucauuuguaaaucaacuac

SEQ ID NO: 1706125 - RNA, 19 nt, Artificial Sequence
  Description of Artificial Sequence: Synthetic oligonucleotide
  Sense strand starting at position 3888 of SEQ ID NO: 1561891
uuacaaaugagaugguugu

SEQ ID NO: 1706126 - RNA, 19 nt, Artificial Sequence
  Description of Artificial Sequence: Synthetic oligonucleotide
  Antisense strand to SEQ ID NO: 1706125
acaaccaucucauuuguaa

SEQ ID NO: 1706127 - RNA, 19 nt, Artificial Sequence
  Description of Artificial Sequence: Synthetic oligonucleotide
  Sense strand starting at position 3892 of SEQ ID NO: 1561891
aaaugagaugguuguuccu

SEQ ID NO: 1706128 - RNA, 19 nt, Artificial Sequence
  Description of Artificial Sequence: Synthetic oligonucleotide
  Antisense strand to SEQ ID NO: 1706127
aggaacaaccaucucauuu

SEQ ID NO: 1706129 - RNA, 19 nt, Artificial Sequence
  Description of Artificial Sequence: Synthetic oligonucleotide
  Sense strand starting at position 3894 of SEQ ID NO: 1561891
augagaugguuguuccuuu

SEQ ID NO: 1706130 - RNA, 19 nt, Artificial Sequence
  Description of Artificial Sequence: Synthetic oligonucleotide
  Antisense strand to SEQ ID NO: 1706129
aaaggaacaaccaucucau

SEQ ID NO: 1706131 - RNA, 19 nt, Artificial Sequence
  Description of Artificial Sequence: Synthetic oligonucleotide
  Sense strand starting at position 3898 of SEQ ID NO: 1561891
gaugguuguuccuuugaaa

SEQ ID NO: 1706132 - RNA, 19 nt, Artificial Sequence
  Description of Artificial Sequence: Synthetic oligonucleotide
  Antisense strand to SEQ ID NO: 1706131
uuucaaaggaacaaccauc

SEQ ID NO: 1706133 - RNA, 19 nt, Artificial Sequence
  Description of Artificial Sequence: Synthetic oligonucleotide
  Sense strand starting at position 3954 of SEQ ID NO: 1561891
gagaguguacccuagagua

SEQ ID NO: 1706134 - RNA, 19 nt, Artificial Sequence
  Description of Artificial Sequence: Synthetic oligonucleotide
  Antisense strand to SEQ ID NO: 1706133
uacucuaggguacacucuc

SEQ ID NO: 1706135 - RNA, 19 nt, Artificial Sequence
  Description of Artificial Sequence: Synthetic oligonucleotide
  Sense strand starting at position 3956 of SEQ ID NO: 1561891
gaguguacccuagaguacu

SEQ ID NO: 1706136 - RNA, 19 nt, Artificial Sequence
  Description of Artificial Sequence: Synthetic oligonucleotide
  Antisense strand to SEQ ID NO: 1706135
aguacucuaggguacacuc

SEQ ID NO: 1706137 - RNA, 19 nt, Artificial Sequence
  Description of Artificial Sequence: Synthetic oligonucleotide
  Sense strand starting at position 3962 of SEQ ID NO: 1561891
acccuagaguacucaaaug

SEQ ID NO: 1706138 - RNA, 19 nt, Artificial Sequence
  Description of Artificial Sequence: Synthetic oligonucleotide
  Antisense strand to SEQ ID NO: 1706137
cauuugaguacucuagggu

SEQ ID NO: 1706139 - RNA, 19 nt, Artificial Sequence
  Description of Artificial Sequence: Synthetic oligonucleotide
  Sense strand starting at position 3970 of SEQ ID NO: 1561891
guacucaaauggguugaaa

SEQ ID NO: 1706140 - RNA, 19 nt, Artificial Sequence
  Description of Artificial Sequence: Synthetic oligonucleotide
  Antisense strand to SEQ ID NO: 1706139
uuucaacccauuugaguac

SEQ ID NO: 1706141 - RNA, 19 nt, Artificial Sequence
  Description of Artificial Sequence: Synthetic oligonucleotide
  Sense strand starting at position 425 of SEQ ID NO: 1561892
cuggaauccuucccugauu

SEQ ID NO: 1706142 - RNA, 19 nt, Artificial Sequence
  Description of Artificial Sequence: Synthetic oligonucleotide
  Antisense strand to SEQ ID NO: 1706141
aaucagggaaggauuccag

SEQ ID NO: 1706143 - RNA, 19 nt, Artificial Sequence
  Description of Artificial Sequence: Synthetic oligonucleotide
  Sense strand starting at position 486 of SEQ ID NO: 1561892
uaucuaagggaauguuguu

SEQ ID NO: 1706144 - RNA, 19 nt, Artificial Sequence
  Description of Artificial Sequence: Synthetic oligonucleotide
  Antisense strand to SEQ ID NO: 1706143
aacaacauucccuuagaua

SEQ ID NO: 1706145 - RNA, 19 nt, Artificial Sequence
  Description of Artificial Sequence: Synthetic oligonucleotide
  Sense strand starting at position 491 of SEQ ID NO: 1561892
aagggaauguuguuaucuc

SEQ ID NO: 1706146 - RNA, 19 nt, Artificial Sequence
  Description of Artificial Sequence: Synthetic oligonucleotide
  Antisense strand to SEQ ID NO: 1706145
gagauaacaacauucccuu

SEQ ID NO: 1706147 - RNA, 19 nt, Artificial Sequence
  Description of Artificial Sequence: Synthetic oligonucleotide
  Sense strand starting at position 531 of SEQ ID NO: 1561892
aggcucuagggaugugaga

SEQ ID NO: 1706148 - RNA, 19 nt, Artificial Sequence
  Description of Artificial Sequence: Synthetic oligonucleotide
  Antisense strand to SEQ ID NO: 1706147
ucucacaucccuagagccu

SEQ ID NO: 1706149 - RNA, 19 nt, Artificial Sequence
  Description of Artificial Sequence: Synthetic oligonucleotide
  Sense strand starting at position 533 of SEQ ID NO: 1561892
gcucuagggaugugagaag

SEQ ID NO: 1706150 - RNA, 19 nt, Artificial Sequence
  Description of Artificial Sequence: Synthetic oligonucleotide
  Antisense strand to SEQ ID NO: 1706149
cuucucacaucccuagagc

SEQ ID NO: 1706151 - RNA, 19 nt, Artificial Sequence
  Description of Artificial Sequence: Synthetic oligonucleotide
  Sense strand starting at position 569 of SEQ ID NO: 1561892
guccauauccuugagucuu

SEQ ID NO: 1706152 - RNA, 19 nt, Artificial Sequence
  Description of Artificial Sequence: Synthetic oligonucleotide
  Antisense strand to SEQ ID NO: 1706151
aagacucaaggauauggac

SEQ ID NO: 1706153 - RNA, 19 nt, Artificial Sequence
  Description of Artificial Sequence: Synthetic oligonucleotide
  Sense strand starting at position 745 of SEQ ID NO: 1561892
aucacugugguguauaaau

SEQ ID NO: 1706154 - RNA, 19 nt, Artificial Sequence
  Description of Artificial Sequence: Synthetic oligonucleotide
  Antisense strand to SEQ ID NO: 1706153
auuuauacaccacagugau

SEQ ID NO: 1706155 - RNA, 19 nt, Artificial Sequence
  Description of Artificial Sequence: Synthetic oligonucleotide
  Sense strand starting at position 747 of SEQ ID NO: 1561892
cacugugguguauaaauau

SEQ ID NO: 1706156 - RNA, 19 nt, Artificial Sequence
  Description of Artificial Sequence: Synthetic oligonucleotide
  Antisense strand to SEQ ID NO: 1706155
auauuuauacaccacagug

SEQ ID NO: 1706157 - RNA, 19 nt, Artificial Sequence
  Description of Artificial Sequence: Synthetic oligonucleotide
  Sense strand starting at position 1378 of SEQ ID NO: 1561892
uccaaacuuuacgcagaau

SEQ ID NO: 1706158 - RNA, 19 nt, Artificial Sequence
  Description of Artificial Sequence: Synthetic oligonucleotide
  Antisense strand to SEQ ID NO: 1706157
auucugcguaaaguuugga

SEQ ID NO: 1706159 - RNA, 19 nt, Artificial Sequence
  Description of Artificial Sequence: Synthetic oligonucleotide
  Sense strand starting at position 1473 of SEQ ID NO: 1561892
uccucaucucaguaccgau

SEQ ID NO: 1706160 - RNA, 19 nt, Artificial Sequence
  Description of Artificial Sequence: Synthetic oligonucleotide
  Antisense strand to SEQ ID NO: 1706159
aucgguacugagaugagga

SEQ ID NO: 1706161 - RNA, 19 nt, Artificial Sequence
  Description of Artificial Sequence: Synthetic oligonucleotide
  Sense strand starting at position 1494 of SEQ ID NO: 1561892
ccuacaguguuuccuggaa

SEQ ID NO: 1706162 - RNA, 19 nt, Artificial Sequence
  Description of Artificial Sequence: Synthetic oligonucleotide
  Antisense strand to SEQ ID NO: 1706161
uuccaggaaacacuguagg

SEQ ID NO: 1706163 - RNA, 19 nt, Artificial Sequence
  Description of Artificial Sequence: Synthetic oligonucleotide
  Sense strand starting at position 1498 of SEQ ID NO: 1561892
caguguuuccuggaaucau

SEQ ID NO: 1706164 - RNA, 19 nt, Artificial Sequence
  Description of Artificial Sequence: Synthetic oligonucleotide
  Antisense strand to SEQ ID NO: 1706163
augauuccaggaaacacug

SEQ ID NO: 1706165 - RNA, 19 nt, Artificial Sequence
  Description of Artificial Sequence: Synthetic oligonucleotide
  Sense strand starting at position 2048 of SEQ ID NO: 1561892
ugcgacaucacugaaguca

SEQ ID NO: 1706166 - RNA, 19 nt, Artificial Sequence
  Description of Artificial Sequence: Synthetic oligonucleotide
  Antisense strand to SEQ ID NO: 1706165
ugacuucagugaugucgca

SEQ ID NO: 1706167 - RNA, 19 nt, Artificial Sequence
  Description of Artificial Sequence: Synthetic oligonucleotide
  Sense strand starting at position 2096 of SEQ ID NO: 1561892
ugcccagaucaguggauga

SEQ ID NO: 1706168 - RNA, 19 nt, Artificial Sequence
  Description of Artificial Sequence: Synthetic oligonucleotide
  Antisense strand to SEQ ID NO: 1706167
ucauccacugaucugggca

SEQ ID NO: 1706169 - RNA, 19 nt, Artificial Sequence
  Description of Artificial Sequence: Synthetic oligonucleotide
  Sense strand starting at position 2113 of SEQ ID NO: 1561892
gaggaagccugacuccuau

SEQ ID NO: 1706170 - RNA, 19 nt, Artificial Sequence
  Description of Artificial Sequence: Synthetic oligonucleotide
  Antisense strand to SEQ ID NO: 1706169
auaggagucaggcuuccuc

SEQ ID NO: 1706171 - RNA, 19 nt, Artificial Sequence
  Description of Artificial Sequence: Synthetic oligonucleotide
  Sense strand starting at position 2119 of SEQ ID NO: 1561892
gccugacuccuaugaucau

SEQ ID NO: 1706172 - RNA, 19 nt, Artificial Sequence
  Description of Artificial Sequence: Synthetic oligonucleotide
  Antisense strand to SEQ ID NO: 1706171
augaucauaggagucaggc

SEQ ID NO: 1706173 - RNA, 19 nt, Artificial Sequence
  Description of Artificial Sequence: Synthetic oligonucleotide
  Sense strand starting at position 2232 of SEQ ID NO: 1561892
ugguuuagcagaugaggaa

SEQ ID NO: 1706174 - RNA, 19 nt, Artificial Sequence
  Description of Artificial Sequence: Synthetic oligonucleotide
  Antisense strand to SEQ ID NO: 1706173
uuccucaucugcuaaacca

SEQ ID NO: 1706175 - RNA, 19 nt, Artificial Sequence
  Description of Artificial Sequence: Synthetic oligonucleotide
  Sense strand starting at position 2268 of SEQ ID NO: 1561892
ccacauagcucccuugaga

SEQ ID NO: 1706176 - RNA, 19 nt, Artificial Sequence
  Description of Artificial Sequence: Synthetic oligonucleotide
  Antisense strand to SEQ ID NO: 1706175
ucucaagggagcuaugugg

SEQ ID NO: 1706177 - RNA, 19 nt, Artificial Sequence
  Description of Artificial Sequence: Synthetic oligonucleotide
  Sense strand starting at position 2359 of SEQ ID NO: 1561892
uauauuggcucguuuauuu

SEQ ID NO: 1706178 - RNA, 19 nt, Artificial Sequence
  Description of Artificial Sequence: Synthetic oligonucleotide
  Antisense strand to SEQ ID NO: 1706177
aaauaaacgagccaauaua

SEQ ID NO: 1706179 - RNA, 19 nt, Artificial Sequence
  Description of Artificial Sequence: Synthetic oligonucleotide
  Sense strand starting at position 2453 of SEQ ID NO: 1561892
auuggcaaauguuuaaaca

SEQ ID NO: 1706180 - RNA, 19 nt, Artificial Sequence
  Description of Artificial Sequence: Synthetic oligonucleotide
  Antisense strand to SEQ ID NO: 1706179
uguuuaaacauuugccaau

SEQ ID NO: 1706181 - RNA, 19 nt, Artificial Sequence
  Description of Artificial Sequence: Synthetic oligonucleotide
  Sense strand starting at position 2478 of SEQ ID NO: 1561892
ugcccugugacccaggaau

SEQ ID NO: 1706182 - RNA, 19 nt, Artificial Sequence
  Description of Artificial Sequence: Synthetic oligonucleotide
  Antisense strand to SEQ ID NO: 1706181
auuccugggucacagggca

SEQ ID NO: 1706183 - RNA, 19 nt, Artificial Sequence
  Description of Artificial Sequence: Synthetic oligonucleotide
  Sense strand starting at position 2506 of SEQ ID NO: 1561892
gggacuugcccuuaaauac

SEQ ID NO: 1706184 - RNA, 19 nt, Artificial Sequence
  Description of Artificial Sequence: Synthetic oligonucleotide
  Antisense strand to SEQ ID NO: 1706183
guauuuaagggcaaguccc

SEQ ID NO: 1706185 - RNA, 19 nt, Artificial Sequence
  Description of Artificial Sequence: Synthetic oligonucleotide
  Sense strand starting at position 2545 of SEQ ID NO: 1561892
guaaaucacugcuccaaga

SEQ ID NO: 1706186 - RNA, 19 nt, Artificial Sequence
  Description of Artificial Sequence: Synthetic oligonucleotide
  Antisense strand to SEQ ID NO: 1706185
ucuuggagcagugauuuac

SEQ ID NO: 1706187 - RNA, 19 nt, Artificial Sequence
  Description of Artificial Sequence: Synthetic oligonucleotide
  Sense strand starting at position 2558 of SEQ ID NO: 1561892
ccaagauaccacugcuaug

SEQ ID NO: 1706188 - RNA, 19 nt, Artificial Sequence
  Description of Artificial Sequence: Synthetic oligonucleotide
  Antisense strand to SEQ ID NO: 1706187
cauagcagugguaucuugg

SEQ ID NO: 1706189 - RNA, 19 nt, Artificial Sequence
  Description of Artificial Sequence: Synthetic oligonucleotide
  Sense strand starting at position 2624 of SEQ ID NO: 1561892
ccagaagggcauugguuaa

SEQ ID NO: 1706190 - RNA, 19 nt, Artificial Sequence
  Description of Artificial Sequence: Synthetic oligonucleotide
  Antisense strand to SEQ ID NO: 1706189
uuaaccaaugcccuucugg

SEQ ID NO: 1706191 - RNA, 19 nt, Artificial Sequence
  Description of Artificial Sequence: Synthetic oligonucleotide
  Sense strand starting at position 3220 of SEQ ID NO: 1561892
uauggucccgggcauauau

SEQ ID NO: 1706192 - RNA, 19 nt, Artificial Sequence
  Description of Artificial Sequence: Synthetic oligonucleotide
  Antisense strand to SEQ ID NO: 1706191
auauaugcccgggaccaua

SEQ ID NO: 1706193 - RNA, 19 nt, Artificial Sequence
  Description of Artificial Sequence: Synthetic oligonucleotide
  Sense strand starting at position 3233 of SEQ ID NO: 1561892
auauauucgcaguaaguaa

SEQ ID NO: 1706194 - RNA, 19 nt, Artificial Sequence
  Description of Artificial Sequence: Synthetic oligonucleotide
  Antisense strand to SEQ ID NO: 1706193
uuacuuacugcgaauauau

SEQ ID NO: 1706195 - RNA, 19 nt, Artificial Sequence
  Description of Artificial Sequence: Synthetic oligonucleotide
  Sense strand starting at position 3237 of SEQ ID NO: 1561892
auucgcaguaaguaaagau

SEQ ID NO: 1706196 - RNA, 19 nt, Artificial Sequence
  Description of Artificial Sequence: Synthetic oligonucleotide
  Antisense strand to SEQ ID NO: 1706195
aucuuuacuuacugcgaau

SEQ ID NO: 1706197 - RNA, 19 nt, Artificial Sequence
  Description of Artificial Sequence: Synthetic oligonucleotide
  Sense strand starting at position 3241 of SEQ ID NO: 1561892
gcaguaaguaaagauagua

SEQ ID NO: 1706198 - RNA, 19 nt, Artificial Sequence
  Description of Artificial Sequence: Synthetic oligonucleotide
  Antisense strand to SEQ ID NO: 1706197
uacuaucuuuacuuacugc

SEQ ID NO: 1706199 - RNA, 19 nt, Artificial Sequence
  Description of Artificial Sequence: Synthetic oligonucleotide
  Sense strand starting at position 3288 of SEQ ID NO: 1561892
aguacagacuguguuuaau

SEQ ID NO: 1706200 - RNA, 19 nt, Artificial Sequence
  Description of Artificial Sequence: Synthetic oligonucleotide
  Antisense strand to SEQ ID NO: 1706199
auuaaacacagucuguacu

SEQ ID NO: 1706201 - RNA, 19 nt, Artificial Sequence
  Description of Artificial Sequence: Synthetic oligonucleotide
  Sense strand starting at position 3328 of SEQ ID NO: 1561892
cugcuuacauuugugaguu

SEQ ID NO: 1706202 - RNA, 19 nt, Artificial Sequence
  Description of Artificial Sequence: Synthetic oligonucleotide
  Antisense strand to SEQ ID NO: 1706201
aacucacaaauguaagcag

SEQ ID NO: 1706203 - RNA, 19 nt, Artificial Sequence
  Description of Artificial Sequence: Synthetic oligonucleotide
  Sense strand starting at position 3340 of SEQ ID NO: 1561892
gugaguucugcuuugcccu

SEQ ID NO: 1706204 - RNA, 19 nt, Artificial Sequence
  Description of Artificial Sequence: Synthetic oligonucleotide
  Antisense strand to SEQ ID NO: 1706203
agggcaaagcagaacucac

SEQ ID NO: 1706205 - RNA, 19 nt, Artificial Sequence
  Description of Artificial Sequence: Synthetic oligonucleotide
  Sense strand starting at position 3478 of SEQ ID NO: 1561892
ugauaauugugguccuuua

SEQ ID NO: 1706206 - RNA, 19 nt, Artificial Sequence
  Description of Artificial Sequence: Synthetic oligonucleotide
  Antisense strand to SEQ ID NO: 1706205
uaaaggaccacaauuauca

SEQ ID NO: 1706207 - RNA, 19 nt, Artificial Sequence
  Description of Artificial Sequence: Synthetic oligonucleotide
  Sense strand starting at position 3559 of SEQ ID NO: 1561892
ccuugaaauugggcagguu

SEQ ID NO: 1706208 - RNA, 19 nt, Artificial Sequence
  Description of Artificial Sequence: Synthetic oligonucleotide
  Antisense strand to SEQ ID NO: 1706207
aaccugcccaauuucaagg

SEQ ID NO: 1706209 - RNA, 19 nt, Artificial Sequence
  Description of Artificial Sequence: Synthetic oligonucleotide
  Sense strand starting at position 3560 of SEQ ID NO: 1561892
cuugaaauugggcagguuu

SEQ ID NO: 1706210 - RNA, 19 nt, Artificial Sequence
  Description of Artificial Sequence: Synthetic oligonucleotide
  Antisense strand to SEQ ID NO: 1706209
aaaccugcccaauuucaag

SEQ ID NO: 1706211 - RNA, 19 nt, Artificial Sequence
  Description of Artificial Sequence: Synthetic oligonucleotide
  Sense strand starting at position 3579 of SEQ ID NO: 1561892
ucaugauggccucaaccaa

SEQ ID NO: 1706212 - RNA, 19 nt, Artificial Sequence
  Description of Artificial Sequence: Synthetic oligonucleotide
  Antisense strand to SEQ ID NO: 1706211
uugguugaggccaucauga

SEQ ID NO: 1706213 - RNA, 19 nt, Artificial Sequence
  Description of Artificial Sequence: Synthetic oligonucleotide
  Sense strand starting at position 3597 of SEQ ID NO: 1561892
acugaauguggugggauua

SEQ ID NO: 1706214 - RNA, 19 nt, Artificial Sequence
  Description of Artificial Sequence: Synthetic oligonucleotide
  Antisense strand to SEQ ID NO: 1706213
uaaucccaccacauucagu

SEQ ID NO: 1706215 - RNA, 19 nt, Artificial Sequence
  Description of Artificial Sequence: Synthetic oligonucleotide
  Sense strand starting at position 3598 of SEQ ID NO: 1561892
cugaauguggugggauuaa

SEQ ID NO: 1706216 - RNA, 19 nt, Artificial Sequence
  Description of Artificial Sequence: Synthetic oligonucleotide
  Antisense strand to SEQ ID NO: 1706215
uuaaucccaccacauucag

SEQ ID NO: 1706217 - RNA, 19 nt, Artificial Sequence
  Description of Artificial Sequence: Synthetic oligonucleotide
  Sense strand starting at position 3620 of SEQ ID NO: 1561892
ggugacucccaauagguca

SEQ ID NO: 1706218 - RNA, 19 nt, Artificial Sequence
  Description of Artificial Sequence: Synthetic oligonucleotide
  Antisense strand to SEQ ID NO: 1706217
ugaccuauugggagucacc

SEQ ID NO: 1706219 - RNA, 19 nt, Artificial Sequence
  Description of Artificial Sequence: Synthetic oligonucleotide
  Sense strand starting at position 3983 of SEQ ID NO: 1561892
uagucuugucuugagauga

SEQ ID NO: 1706220 - RNA, 19 nt, Artificial Sequence
  Description of Artificial Sequence: Synthetic oligonucleotide
  Antisense strand to SEQ ID NO: 1706219
ucaucucaagacaagacua

SEQ ID NO: 1706221 - RNA, 19 nt, Artificial Sequence
  Description of Artificial Sequence: Synthetic oligonucleotide
  Sense strand starting at position 1668 of SEQ ID NO: 1561893
gugucucugccagagagga

SEQ ID NO: 1706222 - RNA, 19 nt, Artificial Sequence
  Description of Artificial Sequence: Synthetic oligonucleotide
  Antisense strand to SEQ ID NO: 1706221
uccucucuggcagagacac

SEQ ID NO: 1706223 - RNA, 19 nt, Artificial Sequence
  Description of Artificial Sequence: Synthetic oligonucleotide
  Sense strand starting at position 2091 of SEQ ID NO: 1561893
gcccgaagccuagaugaaa

SEQ ID NO: 1706224 - RNA, 19 nt, Artificial Sequence
  Description of Artificial Sequence: Synthetic oligonucleotide
  Antisense strand to SEQ ID NO: 1706223
uuucaucuaggcuucgggc

SEQ ID NO: 1706225 - RNA, 19 nt, Artificial Sequence
  Description of Artificial Sequence: Synthetic oligonucleotide
  Sense strand starting at position 2345 of SEQ ID NO: 1561893
ccgaucugccuuggucaga

SEQ ID NO: 1706226 - RNA, 19 nt, Artificial Sequence
  Description of Artificial Sequence: Synthetic oligonucleotide
  Antisense strand to SEQ ID NO: 1706225
ucugaccaaggcagaucgg

SEQ ID NO: 1706227 - RNA, 19 nt, Artificial Sequence
  Description of Artificial Sequence: Synthetic oligonucleotide
  Sense strand starting at position 2466 of SEQ ID NO: 1561893
ccagcugaucuccacugaa

SEQ ID NO: 1706228 - RNA, 19 nt, Artificial Sequence
  Description of Artificial Sequence: Synthetic oligonucleotide
  Antisense strand to SEQ ID NO: 1706227
uucaguggagaucagcugg

SEQ ID NO: 1706229 - RNA, 19 nt, Artificial Sequence
  Description of Artificial Sequence: Synthetic oligonucleotide
  Sense strand starting at position 2469 of SEQ ID NO: 1561893
gcugaucuccacugaauga

SEQ ID NO: 1706230 - RNA, 19 nt, Artificial Sequence
  Description of Artificial Sequence: Synthetic oligonucleotide
  Antisense strand to SEQ ID NO: 1706229
ucauucaguggagaucagc

SEQ ID NO: 1706231 - RNA, 19 nt, Artificial Sequence
  Description of Artificial Sequence: Synthetic oligonucleotide
  Sense strand starting at position 2479 of SEQ ID NO: 1561893
acugaaugacacugugaug

SEQ ID NO: 1706232 - RNA, 19 nt, Artificial Sequence
  Description of Artificial Sequence: Synthetic oligonucleotide
  Antisense strand to SEQ ID NO: 1706231
caucacagugucauucagu

SEQ ID NO: 1706233 - RNA, 19 nt, Artificial Sequence
  Description of Artificial Sequence: Synthetic oligonucleotide
  Sense strand starting at position 2482 of SEQ ID NO: 1561893
gaaugacacugugaugaaa

SEQ ID NO: 1706234 - RNA, 19 nt, Artificial Sequence
  Description of Artificial Sequence: Synthetic oligonucleotide
  Antisense strand to SEQ ID NO: 1706233
uuucaucacagugucauuc

SEQ ID NO: 1706235 - RNA, 19 nt, Artificial Sequence
  Description of Artificial Sequence: Synthetic oligonucleotide
  Sense strand starting at position 2962 of SEQ ID NO: 1561893
gacucagcccgcuaugcuu

SEQ ID NO: 1706236 - RNA, 19 nt, Artificial Sequence
  Description of Artificial Sequence: Synthetic oligonucleotide
  Antisense strand to SEQ ID NO: 1706235
aagcauagcgggcugaguc

SEQ ID NO: 1706237 - RNA, 19 nt, Artificial Sequence
  Description of Artificial Sequence: Synthetic oligonucleotide
  Sense strand starting at position 2987 of SEQ ID NO: 1561893
ggugaccuccagcauguau

SEQ ID NO: 1706238 - RNA, 19 nt, Artificial Sequence
  Description of Artificial Sequence: Synthetic oligonucleotide
  Antisense strand to SEQ ID NO: 1706237
auacaugcuggaggucacc

SEQ ID NO: 1706239 - RNA, 19 nt, Artificial Sequence
  Description of Artificial Sequence: Synthetic oligonucleotide
  Sense strand starting at position 3595 of SEQ ID NO: 1561893
gccguaggacccugggaau

SEQ ID NO: 1706240 - RNA, 19 nt, Artificial Sequence
  Description of Artificial Sequence: Synthetic oligonucleotide
  Antisense strand to SEQ ID NO: 1706239
auucccaggguccuacggc

SEQ ID NO: 1706241 - RNA, 19 nt, Artificial Sequence
  Description of Artificial Sequence: Synthetic oligonucleotide
  Sense strand starting at position 105 of SEQ ID NO: 1561894
ggaagacugugcucaagga

SEQ ID NO: 1706242 - RNA, 19 nt, Artificial Sequence
  Description of Artificial Sequence: Synthetic oligonucleotide
  Antisense strand to SEQ ID NO: 1706241
uccuugagcacagucuucc

SEQ ID NO: 1706243 - RNA, 19 nt, Artificial Sequence
  Description of Artificial Sequence: Synthetic oligonucleotide
  Sense strand starting at position 266 of SEQ ID NO: 1561894
cccacaucucuuuggagca

SEQ ID NO: 1706244 - RNA, 19 nt, Artificial Sequence
  Description of Artificial Sequence: Synthetic oligonucleotide
  Antisense strand to SEQ ID NO: 1706243
ugcuccaaagagauguggg

SEQ ID NO: 1706245 - RNA, 19 nt, Artificial Sequence
  Description of Artificial Sequence: Synthetic oligonucleotide
  Sense strand starting at position 300 of SEQ ID NO: 1561894
cccuaauuggccugaguca

SEQ ID NO: 1706246 - RNA, 19 nt, Artificial Sequence
  Description of Artificial Sequence: Synthetic oligonucleotide
  Antisense strand to SEQ ID NO: 1706245
ugacucaggccaauuaggg

SEQ ID NO: 1706247 - RNA, 19 nt, Artificial Sequence
  Description of Artificial Sequence: Synthetic oligonucleotide
  Sense strand starting at position 311 of SEQ ID NO: 1561894
cugagucagccacgggaau

SEQ ID NO: 1706248 - RNA, 19 nt, Artificial Sequence
  Description of Artificial Sequence: Synthetic oligonucleotide
  Antisense strand to SEQ ID NO: 1706247
auucccguggcugacucag

SEQ ID NO: 1706249 - RNA, 19 nt, Artificial Sequence
  Description of Artificial Sequence: Synthetic oligonucleotide
  Sense strand starting at position 312 of SEQ ID NO: 1561894
ugagucagccacgggaauu

SEQ ID NO: 1706250 - RNA, 19 nt, Artificial Sequence
  Description of Artificial Sequence: Synthetic oligonucleotide
  Antisense strand to SEQ ID NO: 1706249
aauucccguggcugacuca

SEQ ID NO: 1706251 - RNA, 19 nt, Artificial Sequence
  Description of Artificial Sequence: Synthetic oligonucleotide
  Sense strand starting at position 338 of SEQ ID NO: 1561894
gguucaaauguggacaugu

SEQ ID NO: 1706252 - RNA, 19 nt, Artificial Sequence
  Description of Artificial Sequence: Synthetic oligonucleotide
  Antisense strand to SEQ ID NO: 1706251
acauguccacauuugaacc

SEQ ID NO: 1706253 - RNA, 19 nt, Artificial Sequence
  Description of Artificial Sequence: Synthetic oligonucleotide
  Sense strand starting at position 358 of SEQ ID NO: 1561894
agcccaucauuccaugaga

SEQ ID NO: 1706254 - RNA, 19 nt, Artificial Sequence
  Description of Artificial Sequence: Synthetic oligonucleotide
  Antisense strand to SEQ ID NO: 1706253
ucucauggaaugaugggcu

SEQ ID NO: 1706255 - RNA, 19 nt, Artificial Sequence
  Description of Artificial Sequence: Synthetic oligonucleotide
  Sense strand starting at position 389 of SEQ ID NO: 1561894
uccacugggacauguaaga

SEQ ID NO: 1706256 - RNA, 19 nt, Artificial Sequence
  Description of Artificial Sequence: Synthetic oligonucleotide
  Antisense strand to SEQ ID NO: 1706255
ucuuacaugucccagugga

SEQ ID NO: 1706257 - RNA, 19 nt, Artificial Sequence
  Description of Artificial Sequence: Synthetic oligonucleotide
  Sense strand starting at position 723 of SEQ ID NO: 1561894
gugagauccuggaggagaa

SEQ ID NO: 1706258 - RNA, 19 nt, Artificial Sequence
  Description of Artificial Sequence: Synthetic oligonucleotide
  Antisense strand to SEQ ID NO: 1706257
uucuccuccaggaucucac

SEQ ID NO: 1706259 - RNA, 19 nt, Artificial Sequence
  Description of Artificial Sequence: Synthetic oligonucleotide
  Sense strand starting at position 759 of SEQ ID NO: 1561894
aucucuuccuaguuaggau

SEQ ID NO: 1706260 - RNA, 19 nt, Artificial Sequence
  Description of Artificial Sequence: Synthetic oligonucleotide
  Antisense strand to SEQ ID NO: 1706259
auccuaacuaggaagagau

SEQ ID NO: 1706261 - RNA, 19 nt, Artificial Sequence
  Description of Artificial Sequence: Synthetic oligonucleotide
  Sense strand starting at position 767 of SEQ ID NO: 1561894
cuaguuaggaugugaucau

SEQ ID NO: 1706262 - RNA, 19 nt, Artificial Sequence
  Description of Artificial Sequence: Synthetic oligonucleotide
  Antisense strand to SEQ ID NO: 1706261
augaucacauccuaacuag

SEQ ID NO: 1706263 - RNA, 19 nt, Artificial Sequence
  Description of Artificial Sequence: Synthetic oligonucleotide
  Sense strand starting at position 975 of SEQ ID NO: 1561894
gaggaaacauaggaaugaa

SEQ ID NO: 1706264 - RNA, 19 nt, Artificial Sequence
  Description of Artificial Sequence: Synthetic oligonucleotide
  Antisense strand to SEQ ID NO: 1706263
uucauuccuauguuuccuc

SEQ ID NO: 1706265 - RNA, 19 nt, Artificial Sequence
  Description of Artificial Sequence: Synthetic oligonucleotide
  Sense strand starting at position 1098 of SEQ ID NO: 1561894
guugcuguuucugcaaaca

SEQ ID NO: 1706266 - RNA, 19 nt, Artificial Sequence
  Description of Artificial Sequence: Synthetic oligonucleotide
  Antisense strand to SEQ ID NO: 1706265
uguuugcagaaacagcaac

SEQ ID NO: 1706267 - RNA, 19 nt, Artificial Sequence
  Description of Artificial Sequence: Synthetic oligonucleotide
  Sense strand starting at position 1116 of SEQ ID NO: 1561894
aggaguuguucccugagca

SEQ ID NO: 1706268 - RNA, 19 nt, Artificial Sequence
  Description of Artificial Sequence: Synthetic oligonucleotide
  Antisense strand to SEQ ID NO: 1706267
ugcucagggaacaacuccu

SEQ ID NO: 1706269 - RNA, 19 nt, Artificial Sequence
  Description of Artificial Sequence: Synthetic oligonucleotide
  Sense strand starting at position 1117 of SEQ ID NO: 1561894
ggaguuguucccugagcac

SEQ ID NO: 1706270 - RNA, 19 nt, Artificial Sequence
  Description of Artificial Sequence: Synthetic oligonucleotide
  Antisense strand to SEQ ID NO: 1706269
gugcucagggaacaacucc

SEQ ID NO: 1706271 - RNA, 19 nt, Artificial Sequence
  Description of Artificial Sequence: Synthetic oligonucleotide
  Sense strand starting at position 1500 of SEQ ID NO: 1561894
cuccuaggcugauugugau

SEQ ID NO: 1706272 - RNA, 19 nt, Artificial Sequence
  Description of Artificial Sequence: Synthetic oligonucleotide
  Antisense strand to SEQ ID NO: 1706271
aucacaaucagccuaggag

SEQ ID NO: 1706273 - RNA, 19 nt, Artificial Sequence
  Description of Artificial Sequence: Synthetic oligonucleotide
  Sense strand starting at position 1541 of SEQ ID NO: 1561894
cagugucuggccuguagua

SEQ ID NO: 1706274 - RNA, 19 nt, Artificial Sequence
  Description of Artificial Sequence: Synthetic oligonucleotide
  Antisense strand to SEQ ID NO: 1706273
uacuacaggccagacacug

SEQ ID NO: 1706275 - RNA, 19 nt, Artificial Sequence
  Description of Artificial Sequence: Synthetic oligonucleotide
  Sense strand starting at position 1560 of SEQ ID NO: 1561894
gggcucgguaagcgugaaa

SEQ ID NO: 1706276 - RNA, 19 nt, Artificial Sequence
  Description of Artificial Sequence: Synthetic oligonucleotide
  Antisense strand to SEQ ID NO: 1706275
uuucacgcuuaccgagccc

SEQ ID NO: 1706277 - RNA, 19 nt, Artificial Sequence
  Description of Artificial Sequence: Synthetic oligonucleotide
  Sense strand starting at position 1563 of SEQ ID NO: 1561894
cucgguaagcgugaaaucu

SEQ ID NO: 1706278 - RNA, 19 nt, Artificial Sequence
  Description of Artificial Sequence: Synthetic oligonucleotide
  Antisense strand to SEQ ID NO: 1706277
agauuucacgcuuaccgag

SEQ ID NO: 1706279 - RNA, 19 nt, Artificial Sequence
  Description of Artificial Sequence: Synthetic oligonucleotide
  Sense strand starting at position 1565 of SEQ ID NO: 1561894
cgguaagcgugaaaucuga

SEQ ID NO: 1706280 - RNA, 19 nt, Artificial Sequence
  Description of Artificial Sequence: Synthetic oligonucleotide
  Antisense strand to SEQ ID NO: 1706279
ucagauuucacgcuuaccg

SEQ ID NO: 1706281 - RNA, 19 nt, Artificial Sequence
  Description of Artificial Sequence: Synthetic oligonucleotide
  Sense strand starting at position 1572 of SEQ ID NO: 1561894
cgugaaaucugauuauugc

SEQ ID NO: 1706282 - RNA, 19 nt, Artificial Sequence
  Description of Artificial Sequence: Synthetic oligonucleotide
  Antisense strand to SEQ ID NO: 1706281
gcaauaaucagauuucacg

SEQ ID NO: 1706283 - RNA, 19 nt, Artificial Sequence
  Description of Artificial Sequence: Synthetic oligonucleotide
  Sense strand starting at position 1791 of SEQ ID NO: 1561894
ccaccuuggucucugagaa

SEQ ID NO: 1706284 - RNA, 19 nt, Artificial Sequence
  Description of Artificial Sequence: Synthetic oligonucleotide
  Antisense strand to SEQ ID NO: 1706283
uucucagagaccaaggugg

SEQ ID NO: 1706285 - RNA, 19 nt, Artificial Sequence
  Description of Artificial Sequence: Synthetic oligonucleotide
  Sense strand starting at position 1792 of SEQ ID NO: 1561894
caccuuggucucugagaac

SEQ ID NO: 1706286 - RNA, 19 nt, Artificial Sequence
  Description of Artificial Sequence: Synthetic oligonucleotide
  Antisense strand to SEQ ID NO: 1706285
guucucagagaccaaggug

SEQ ID NO: 1706287 - RNA, 19 nt, Artificial Sequence
  Description of Artificial Sequence: Synthetic oligonucleotide
  Sense strand starting at position 1803 of SEQ ID NO: 1561894
cugagaacccauuguuccu

SEQ ID NO: 1706288 - RNA, 19 nt, Artificial Sequence
  Description of Artificial Sequence: Synthetic oligonucleotide
  Antisense strand to SEQ ID NO: 1706287
aggaacaauggguucucag

SEQ ID NO: 1706289 - RNA, 19 nt, Artificial Sequence
  Description of Artificial Sequence: Synthetic oligonucleotide
  Sense strand starting at position 2018 of SEQ ID NO: 1561894
ucagcuuccuuguugguua

SEQ ID NO: 1706290 - RNA, 19 nt, Artificial Sequence
  Description of Artificial Sequence: Synthetic oligonucleotide
  Antisense strand to SEQ ID NO: 1706289
uaaccaacaaggaagcuga

SEQ ID NO: 1706291 - RNA, 19 nt, Artificial Sequence
  Description of Artificial Sequence: Synthetic oligonucleotide
  Sense strand starting at position 2020 of SEQ ID NO: 1561894
agcuuccuuguugguuaaa

SEQ ID NO: 1706292 - RNA, 19 nt, Artificial Sequence
  Description of Artificial Sequence: Synthetic oligonucleotide
  Antisense strand to SEQ ID NO: 1706291
uuuaaccaacaaggaagcu

SEQ ID NO: 1706293 - RNA, 19 nt, Artificial Sequence
  Description of Artificial Sequence: Synthetic oligonucleotide
  Sense strand starting at position 2021 of SEQ ID NO: 1561894
gcuuccuuguugguuaaau

SEQ ID NO: 1706294 - RNA, 19 nt, Artificial Sequence
  Description of Artificial Sequence: Synthetic oligonucleotide
  Antisense strand to SEQ ID NO: 1706293
auuuaaccaacaaggaagc

SEQ ID NO: 1706295 - RNA, 19 nt, Artificial Sequence
  Description of Artificial Sequence: Synthetic oligonucleotide
  Sense strand starting at position 2422 of SEQ ID NO: 1561894
agagaauccgauugugaag

SEQ ID NO: 1706296 - RNA, 19 nt, Artificial Sequence
  Description of Artificial Sequence: Synthetic oligonucleotide
  Antisense strand to SEQ ID NO: 1706295
cuucacaaucggauucucu

SEQ ID NO: 1706297 - RNA, 19 nt, Artificial Sequence
  Description of Artificial Sequence: Synthetic oligonucleotide
  Sense strand starting at position 2633 of SEQ ID NO: 1561894
caguuucuguguccagaca

SEQ ID NO: 1706298 - RNA, 19 nt, Artificial Sequence
  Description of Artificial Sequence: Synthetic oligonucleotide
  Antisense strand to SEQ ID NO: 1706297
ugucuggacacagaaacug

SEQ ID NO: 1706299 - RNA, 19 nt, Artificial Sequence
  Description of Artificial Sequence: Synthetic oligonucleotide
  Sense strand starting at position 2634 of SEQ ID NO: 1561894
aguuucuguguccagacau

SEQ ID NO: 1706300 - RNA, 19 nt, Artificial Sequence
  Description of Artificial Sequence: Synthetic oligonucleotide
  Antisense strand to SEQ ID NO: 1706299
augucuggacacagaaacu

SEQ ID NO: 1706301 - RNA, 19 nt, Artificial Sequence
  Description of Artificial Sequence: Synthetic oligonucleotide
  Sense strand starting at position 2809 of SEQ ID NO: 1561894
aacugugugaccuggagua

SEQ ID NO: 1706302 - RNA, 19 nt, Artificial Sequence
  Description of Artificial Sequence: Synthetic oligonucleotide
  Antisense strand to SEQ ID NO: 1706301
uacuccaggucacacaguu

SEQ ID NO: 1706303 - RNA, 19 nt, Artificial Sequence
  Description of Artificial Sequence: Synthetic oligonucleotide
  Sense strand starting at position 2952 of SEQ ID NO: 1561894
ugauuauuguugucuuucu

SEQ ID NO: 1706304 - RNA, 19 nt, Artificial Sequence
  Description of Artificial Sequence: Synthetic oligonucleotide
  Antisense strand to SEQ ID NO: 1706303
agaaagacaacaauaauca

SEQ ID NO: 1706305 - RNA, 19 nt, Artificial Sequence
  Description of Artificial Sequence: Synthetic oligonucleotide
  Sense strand starting at position 3090 of SEQ ID NO: 1561894
ccgagaagcuaggacuaua

SEQ ID NO: 1706306 - RNA, 19 nt, Artificial Sequence
  Description of Artificial Sequence: Synthetic oligonucleotide
  Antisense strand to SEQ ID NO: 1706305
uauaguccuagcuucucgg

SEQ ID NO: 1706307 - RNA, 19 nt, Artificial Sequence
  Description of Artificial Sequence: Synthetic oligonucleotide
  Sense strand starting at position 3280 of SEQ ID NO: 1561894
auuauuaucccaggagcuc

SEQ ID NO: 1706308 - RNA, 19 nt, Artificial Sequence
  Description of Artificial Sequence: Synthetic oligonucleotide
  Antisense strand to SEQ ID NO: 1706307
gagcuccugggauaauaau

SEQ ID NO: 1706309 - RNA, 19 nt, Artificial Sequence
  Description of Artificial Sequence: Synthetic oligonucleotide
  Sense strand starting at position 3367 of SEQ ID NO: 1561894
ucacauauuucuugagcag

SEQ ID NO: 1706310 - RNA, 19 nt, Artificial Sequence
  Description of Artificial Sequence: Synthetic oligonucleotide
  Antisense strand to SEQ ID NO: 1706309
cugcucaagaaauauguga

SEQ ID NO: 1706311 - RNA, 19 nt, Artificial Sequence
  Description of Artificial Sequence: Synthetic oligonucleotide
  Sense strand starting at position 3413 of SEQ ID NO: 1561894
gguucuaucuaggagaaga

SEQ ID NO: 1706312 - RNA, 19 nt, Artificial Sequence
  Description of Artificial Sequence: Synthetic oligonucleotide
  Antisense strand to SEQ ID NO: 1706311
ucuucuccuagauagaacc

SEQ ID NO: 1706313 - RNA, 19 nt, Artificial Sequence
  Description of Artificial Sequence: Synthetic oligonucleotide
  Sense strand starting at position 3636 of SEQ ID NO: 1561894
uggcaaggucugugaugga

SEQ ID NO: 1706314 - RNA, 19 nt, Artificial Sequence
  Description of Artificial Sequence: Synthetic oligonucleotide
  Antisense strand to SEQ ID NO: 1706313
uccaucacagaccuugcca

SEQ ID NO: 1706315 - RNA, 19 nt, Artificial Sequence
  Description of Artificial Sequence: Synthetic oligonucleotide
  Sense strand starting at position 3640 of SEQ ID NO: 1561894
aaggucugugauggaggaa

SEQ ID NO: 1706316 - RNA, 19 nt, Artificial Sequence
  Description of Artificial Sequence: Synthetic oligonucleotide
  Antisense strand to SEQ ID NO: 1706315
uuccuccaucacagaccuu

SEQ ID NO: 1706317 - RNA, 19 nt, Artificial Sequence
  Description of Artificial Sequence: Synthetic oligonucleotide
  Sense strand starting at position 3652 of SEQ ID NO: 1561894
ggaggaaguccaggugacu

SEQ ID NO: 1706318 - RNA, 19 nt, Artificial Sequence
  Description of Artificial Sequence: Synthetic oligonucleotide
  Antisense strand to SEQ ID NO: 1706317
agucaccuggacuuccucc

SEQ ID NO: 1706319 - RNA, 19 nt, Artificial Sequence
  Description of Artificial Sequence: Synthetic oligonucleotide
  Sense strand starting at position 3704 of SEQ ID NO: 1561894
ggaagugguuaggaaugaa

SEQ ID NO: 1706320 - RNA, 19 nt, Artificial Sequence
  Description of Artificial Sequence: Synthetic oligonucleotide
  Antisense strand to SEQ ID NO: 1706319
uucauuccuaaccacuucc

SEQ ID NO: 1706321 - RNA, 19 nt, Artificial Sequence
  Description of Artificial Sequence: Synthetic oligonucleotide
  Sense strand starting at position 20 of SEQ ID NO: 1561895
gaguaaagugcucggugca

SEQ ID NO: 1706322 - RNA, 19 nt, Artificial Sequence
  Description of Artificial Sequence: Synthetic oligonucleotide
  Antisense strand to SEQ ID NO: 1706321
ugcaccgagcacuuuacuc

SEQ ID NO: 1706323 - RNA, 19 nt, Artificial Sequence
  Description of Artificial Sequence: Synthetic oligonucleotide
  Sense strand starting at position 190 of SEQ ID NO: 1561895
ggaggagcgguuugucuga

SEQ ID NO: 1706324 - RNA, 19 nt, Artificial Sequence
  Description of Artificial Sequence: Synthetic oligonucleotide
  Antisense strand to SEQ ID NO: 1706323
ucagacaaaccgcuccucc

SEQ ID NO: 1706325 - RNA, 19 nt, Artificial Sequence
  Description of Artificial Sequence: Synthetic oligonucleotide
  Sense strand starting at position 192 of SEQ ID NO: 1561895
aggagcgguuugucugagu

SEQ ID NO: 1706326 - RNA, 19 nt, Artificial Sequence
  Description of Artificial Sequence: Synthetic oligonucleotide
  Antisense strand to SEQ ID NO: 1706325
acucagacaaaccgcuccu

SEQ ID NO: 1706327 - RNA, 19 nt, Artificial Sequence
  Description of Artificial Sequence: Synthetic oligonucleotide
  Sense strand starting at position 193 of SEQ ID NO: 1561895
ggagcgguuugucugaguu

SEQ ID NO: 1706328 - RNA, 19 nt, Artificial Sequence
  Description of Artificial Sequence: Synthetic oligonucleotide
  Antisense strand to SEQ ID NO: 1706327
aacucagacaaaccgcucc

SEQ ID NO: 1706329 - RNA, 19 nt, Artificial Sequence
  Description of Artificial Sequence: Synthetic oligonucleotide
  Sense strand starting at position 322 of SEQ ID NO: 1561895
aaaguaaggucugcccaga

SEQ ID NO: 1706330 - RNA, 19 nt, Artificial Sequence
  Description of Artificial Sequence: Synthetic oligonucleotide
  Antisense strand to SEQ ID NO: 1706329
ucugggcagaccuuacuuu

SEQ ID NO: 1706331 - RNA, 19 nt, Artificial Sequence
  Description of Artificial Sequence: Synthetic oligonucleotide
  Sense strand starting at position 381 of SEQ ID NO: 1561895
ugggccuguuugucagaau

SEQ ID NO: 1706332 - RNA, 19 nt, Artificial Sequence
  Description of Artificial Sequence: Synthetic oligonucleotide
  Antisense strand to SEQ ID NO: 1706331
auucugacaaacaggccca

SEQ ID NO: 1706333 - RNA, 19 nt, Artificial Sequence
  Description of Artificial Sequence: Synthetic oligonucleotide
  Sense strand starting at position 507 of SEQ ID NO: 1561895
ggaggcuauucaggaugga

SEQ ID NO: 1706334 - RNA, 19 nt, Artificial Sequence
  Description of Artificial Sequence: Synthetic oligonucleotide
  Antisense strand to SEQ ID NO: 1706333
uccauccugaauagccucc

SEQ ID NO: 1706335 - RNA, 19 nt, Artificial Sequence
  Description of Artificial Sequence: Synthetic oligonucleotide
  Sense strand starting at position 510 of SEQ ID NO: 1561895
ggcuauucaggauggaaag

SEQ ID NO: 1706336 - RNA, 19 nt, Artificial Sequence
  Description of Artificial Sequence: Synthetic oligonucleotide
  Antisense strand to SEQ ID NO: 1706335
cuuuccauccugaauagcc

SEQ ID NO: 1706337 - RNA, 19 nt, Artificial Sequence
  Description of Artificial Sequence: Synthetic oligonucleotide
  Sense strand starting at position 923 of SEQ ID NO: 1561895
cccugaugucugugaggug

SEQ ID NO: 1706338 - RNA, 19 nt, Artificial Sequence
  Description of Artificial Sequence: Synthetic oligonucleotide
  Antisense strand to SEQ ID NO: 1706337
caccucacagacaucaggg

SEQ ID NO: 1706339 - RNA, 19 nt, Artificial Sequence
  Description of Artificial Sequence: Synthetic oligonucleotide
  Sense strand starting at position 1011 of SEQ ID NO: 1561895
cgagccuucggagaauuau

SEQ ID NO: 1706340 - RNA, 19 nt, Artificial Sequence
  Description of Artificial Sequence: Synthetic oligonucleotide
  Antisense strand to SEQ ID NO: 1706339
auaauucuccgaaggcucg

SEQ ID NO: 1706341 - RNA, 19 nt, Artificial Sequence
  Description of Artificial Sequence: Synthetic oligonucleotide
  Sense strand starting at position 1017 of SEQ ID NO: 1561895
uucggagaauuauaacuuu

SEQ ID NO: 1706342 - RNA, 19 nt, Artificial Sequence
  Description of Artificial Sequence: Synthetic oligonucleotide
  Antisense strand to SEQ ID NO: 1706341
aaaguuauaauucuccgaa

SEQ ID NO: 1706343 - RNA, 19 nt, Artificial Sequence
  Description of Artificial Sequence: Synthetic oligonucleotide
  Sense strand starting at position 1309 of SEQ ID NO: 1561895
gacuucugccgcuggauga

SEQ ID NO: 1706344 - RNA, 19 nt, Artificial Sequence
  Description of Artificial Sequence: Synthetic oligonucleotide
  Antisense strand to SEQ ID NO: 1706343
ucauccagcggcagaaguc

SEQ ID NO: 1706345 - RNA, 19 nt, Artificial Sequence
  Description of Artificial Sequence: Synthetic oligonucleotide
  Sense strand starting at position 2079 of SEQ ID NO: 1561895
ugcucaguccugcagucaa

SEQ ID NO: 1706346 - RNA, 19 nt, Artificial Sequence
  Description of Artificial Sequence: Synthetic oligonucleotide
  Antisense strand to SEQ ID NO: 1706345
uugacugcaggacugagca

SEQ ID NO: 1706347 - RNA, 19 nt, Artificial Sequence
  Description of Artificial Sequence: Synthetic oligonucleotide
  Sense strand starting at position 2098 of SEQ ID NO: 1561895
cuaggacuuucugaucaac

SEQ ID NO: 1706348 - RNA, 19 nt, Artificial Sequence
  Description of Artificial Sequence: Synthetic oligonucleotide
  Antisense strand to SEQ ID NO: 1706347
guugaucagaaaguccuag

SEQ ID NO: 1706349 - RNA, 19 nt, Artificial Sequence
  Description of Artificial Sequence: Synthetic oligonucleotide
  Sense strand starting at position 2100 of SEQ ID NO: 1561895
aggacuuucugaucaacuc

SEQ ID NO: 1706350 - RNA, 19 nt, Artificial Sequence
  Description of Artificial Sequence: Synthetic oligonucleotide
  Antisense strand to SEQ ID NO: 1706349
gaguugaucagaaaguccu

SEQ ID NO: 1706351 - RNA, 19 nt, Artificial Sequence
  Description of Artificial Sequence: Synthetic oligonucleotide
  Sense strand starting at position 2112 of SEQ ID NO: 1561895
ucaacucaguuguaggaaa

SEQ ID NO: 1706352 - RNA, 19 nt, Artificial Sequence
  Description of Artificial Sequence: Synthetic oligonucleotide
  Antisense strand to SEQ ID NO: 1706351
uuuccuacaacugaguuga

SEQ ID NO: 1706353 - RNA, 19 nt, Artificial Sequence
  Description of Artificial Sequence: Synthetic oligonucleotide
  Sense strand starting at position 2114 of SEQ ID NO: 1561895
aacucaguuguaggaaaua

SEQ ID NO: 1706354 - RNA, 19 nt, Artificial Sequence
  Description of Artificial Sequence: Synthetic oligonucleotide
  Antisense strand to SEQ ID NO: 1706353
uauuuccuacaacugaguu

SEQ ID NO: 1706355 - RNA, 19 nt, Artificial Sequence
  Description of Artificial Sequence: Synthetic oligonucleotide
  Sense strand starting at position 2146 of SEQ ID NO: 1561895
auggacuguucuguuugaa

SEQ ID NO: 1706356 - RNA, 19 nt, Artificial Sequence
  Description of Artificial Sequence: Synthetic oligonucleotide
  Antisense strand to SEQ ID NO: 1706355
uucaaacagaacaguccau

SEQ ID NO: 1706357 - RNA, 19 nt, Artificial Sequence
  Description of Artificial Sequence: Synthetic oligonucleotide
  Sense strand starting at position 2149 of SEQ ID NO: 1561895
gacuguucuguuugaauug

SEQ ID NO: 1706358 - RNA, 19 nt, Artificial Sequence
  Description of Artificial Sequence: Synthetic oligonucleotide
  Antisense strand to SEQ ID NO: 1706357
caauucaaacagaacaguc

SEQ ID NO: 1706359 - RNA, 19 nt, Artificial Sequence
  Description of Artificial Sequence: Synthetic oligonucleotide
  Sense strand starting at position 2211 of SEQ ID NO: 1561895
cauggagagcucuagguga

SEQ ID NO: 1706360 - RNA, 19 nt, Artificial Sequence
  Description of Artificial Sequence: Synthetic oligonucleotide
  Antisense strand to SEQ ID NO: 1706359
ucaccuagagcucuccaug

SEQ ID NO: 1706361 - RNA, 19 nt, Artificial Sequence
  Description of Artificial Sequence: Synthetic oligonucleotide
  Sense strand starting at position 2565 of SEQ ID NO: 1561895
gccuucucuggucggaaga

SEQ ID NO: 1706362 - RNA, 19 nt, Artificial Sequence
  Description of Artificial Sequence: Synthetic oligonucleotide
  Antisense strand to SEQ ID NO: 1706361
ucuuccgaccagagaaggc

SEQ ID NO: 1706363 - RNA, 19 nt, Artificial Sequence
  Description of Artificial Sequence: Synthetic oligonucleotide
  Sense strand starting at position 2566 of SEQ ID NO: 1561895
ccuucucuggucggaagaa

SEQ ID NO: 1706364 - RNA, 19 nt, Artificial Sequence
  Description of Artificial Sequence: Synthetic oligonucleotide
  Antisense strand to SEQ ID NO: 1706363
uucuuccgaccagagaagg

SEQ ID NO: 1706365 - RNA, 19 nt, Artificial Sequence
  Description of Artificial Sequence: Synthetic oligonucleotide
  Sense strand starting at position 2900 of SEQ ID NO: 1561895
ugaggagaccuuugugguu

SEQ ID NO: 1706366 - RNA, 19 nt, Artificial Sequence
  Description of Artificial Sequence: Synthetic oligonucleotide
  Antisense strand to SEQ ID NO: 1706365
aaccacaaaggucuccuca

SEQ ID NO: 1706367 - RNA, 19 nt, Artificial Sequence
  Description of Artificial Sequence: Synthetic oligonucleotide
  Sense strand starting at position 3094 of SEQ ID NO: 1561895
gaucuuggguccuagauac

SEQ ID NO: 1706368 - RNA, 19 nt, Artificial Sequence
  Description of Artificial Sequence: Synthetic oligonucleotide
  Antisense strand to SEQ ID NO: 1706367
guaucuaggacccaagauc

SEQ ID NO: 1706369 - RNA, 19 nt, Artificial Sequence
  Description of Artificial Sequence: Synthetic oligonucleotide
  Sense strand starting at position 3101 of SEQ ID NO: 1561895
gguccuagauacuagauuu

SEQ ID NO: 1706370 - RNA, 19 nt, Artificial Sequence
  Description of Artificial Sequence: Synthetic oligonucleotide
  Antisense strand to SEQ ID NO: 1706369
aaaucuaguaucuaggacc

SEQ ID NO: 1706371 - RNA, 19 nt, Artificial Sequence
  Description of Artificial Sequence: Synthetic oligonucleotide
  Sense strand starting at position 3201 of SEQ ID NO: 1561895
ucauaaguguguucuagaa

SEQ ID NO: 1706372 - RNA, 19 nt, Artificial Sequence
  Description of Artificial Sequence: Synthetic oligonucleotide
  Antisense strand to SEQ ID NO: 1706371
uucuagaacacacuuauga

SEQ ID NO: 1706373 - RNA, 19 nt, Artificial Sequence
  Description of Artificial Sequence: Synthetic oligonucleotide
  Sense strand starting at position 3233 of SEQ ID NO: 1561895
gugcuuauuccacaguuua

SEQ ID NO: 1706374 - RNA, 19 nt, Artificial Sequence
  Description of Artificial Sequence: Synthetic oligonucleotide
  Antisense strand to SEQ ID NO: 1706373
uaaacuguggaauaagcac

SEQ ID NO: 1706375 - RNA, 19 nt, Artificial Sequence
  Description of Artificial Sequence: Synthetic oligonucleotide
  Sense strand starting at position 3279 of SEQ ID NO: 1561895
ccaaucuguuacguaucua

SEQ ID NO: 1706376 - RNA, 19 nt, Artificial Sequence
  Description of Artificial Sequence: Synthetic oligonucleotide
  Antisense strand to SEQ ID NO: 1706375
uagauacguaacagauugg

SEQ ID NO: 1706377 - RNA, 19 nt, Artificial Sequence
  Description of Artificial Sequence: Synthetic oligonucleotide
  Sense strand starting at position 3293 of SEQ ID NO: 1561895
aucuauuacuuccacgaga

SEQ ID NO: 1706378 - RNA, 19 nt, Artificial Sequence
  Description of Artificial Sequence: Synthetic oligonucleotide
  Antisense strand to SEQ ID NO: 1706377
ucucguggaaguaauagau

SEQ ID NO: 1706379 - RNA, 19 nt, Artificial Sequence
  Description of Artificial Sequence: Synthetic oligonucleotide
  Sense strand starting at position 3295 of SEQ ID NO: 1561895
cuauuacuuccacgagaug

SEQ ID NO: 1706380 - RNA, 19 nt, Artificial Sequence
  Description of Artificial Sequence: Synthetic oligonucleotide
  Antisense strand to SEQ ID NO: 1706379
caucucguggaaguaauag

SEQ ID NO: 1706381 - RNA, 19 nt, Artificial Sequence
  Description of Artificial Sequence: Synthetic oligonucleotide
  Sense strand starting at position 3296 of SEQ ID NO: 1561895
uauuacuuccacgagaugu

SEQ ID NO: 1706382 - RNA, 19 nt, Artificial Sequence
  Description of Artificial Sequence: Synthetic oligonucleotide
  Antisense strand to SEQ ID NO: 1706381
acaucucguggaaguaaua

SEQ ID NO: 1706383 - RNA, 19 nt, Artificial Sequence
  Description of Artificial Sequence: Synthetic oligonucleotide
  Sense strand starting at position 3304 of SEQ ID NO: 1561895
ccacgagaugucuguacuc

SEQ ID NO: 1706384 - RNA, 19 nt, Artificial Sequence
  Description of Artificial Sequence: Synthetic oligonucleotide
  Antisense strand to SEQ ID NO: 1706383
gaguacagacaucucgugg

SEQ ID NO: 1706385 - RNA, 19 nt, Artificial Sequence
  Description of Artificial Sequence: Synthetic oligonucleotide
  Sense strand starting at position 3306 of SEQ ID NO: 1561895
acgagaugucuguacucuc

SEQ ID NO: 1706386 - RNA, 19 nt, Artificial Sequence
  Description of Artificial Sequence: Synthetic oligonucleotide
  Antisense strand to SEQ ID NO: 1706385
gagaguacagacaucucgu

SEQ ID NO: 1706387 - RNA, 19 nt, Artificial Sequence
  Description of Artificial Sequence: Synthetic oligonucleotide
  Sense strand starting at position 3363 of SEQ ID NO: 1561895
gaguuuggaaccugugagu

SEQ ID NO: 1706388 - RNA, 19 nt, Artificial Sequence
  Description of Artificial Sequence: Synthetic oligonucleotide
  Antisense strand to SEQ ID NO: 1706387
acucacagguuccaaacuc

SEQ ID NO: 1706389 - RNA, 19 nt, Artificial Sequence
  Description of Artificial Sequence: Synthetic oligonucleotide
  Sense strand starting at position 3489 of SEQ ID NO: 1561895
cucucaguaagaggguaaa

SEQ ID NO: 1706390 - RNA, 19 nt, Artificial Sequence
  Description of Artificial Sequence: Synthetic oligonucleotide
  Antisense strand to SEQ ID NO: 1706389
uuuacccucuuacugagag

SEQ ID NO: 1706391 - RNA, 19 nt, Artificial Sequence
  Description of Artificial Sequence: Synthetic oligonucleotide
  Sense strand starting at position 3666 of SEQ ID NO: 1561895
accagcuuggcuugaggaa

SEQ ID NO: 1706392 - RNA, 19 nt, Artificial Sequence
  Description of Artificial Sequence: Synthetic oligonucleotide
  Antisense strand to SEQ ID NO: 1706391
uuccucaagccaagcuggu

SEQ ID NO: 1706393 - RNA, 19 nt, Artificial Sequence
  Description of Artificial Sequence: Synthetic oligonucleotide
  Sense strand starting at position 3705 of SEQ ID NO: 1561895
agcagugacugcuuaggga

SEQ ID NO: 1706394 - RNA, 19 nt, Artificial Sequence
  Description of Artificial Sequence: Synthetic oligonucleotide
  Antisense strand to SEQ ID NO: 1706393
ucccuaagcagucacugcu

SEQ ID NO: 1706395 - RNA, 19 nt, Artificial Sequence
  Description of Artificial Sequence: Synthetic oligonucleotide
  Sense strand starting at position 3772 of SEQ ID NO: 1561895
gggugaguccuuugagaca

SEQ ID NO: 1706396 - RNA, 19 nt, Artificial Sequence
  Description of Artificial Sequence: Synthetic oligonucleotide
  Antisense strand to SEQ ID NO: 1706395
ugucucaaaggacucaccc

SEQ ID NO: 1706397 - RNA, 19 nt, Artificial Sequence
  Description of Artificial Sequence: Synthetic oligonucleotide
  Sense strand starting at position 3904 of SEQ ID NO: 1561895
uucuucuguucugcaagaa

SEQ ID NO: 1706398 - RNA, 19 nt, Artificial Sequence
  Description of Artificial Sequence: Synthetic oligonucleotide
  Antisense strand to SEQ ID NO: 1706397
uucuugcagaacagaagaa

SEQ ID NO: 1706399 - RNA, 19 nt, Artificial Sequence
  Description of Artificial Sequence: Synthetic oligonucleotide
  Sense strand starting at position 3905 of SEQ ID NO: 1561895
ucuucuguucugcaagaag

SEQ ID NO: 1706400 - RNA, 19 nt, Artificial Sequence
  Description of Artificial Sequence: Synthetic oligonucleotide
  Antisense strand to SEQ ID NO: 1706399
cuucuugcagaacagaaga

SEQ ID NO: 1706401 - RNA, 19 nt, Artificial Sequence
  Description of Artificial Sequence: Synthetic oligonucleotide
  Sense strand starting at position 74 of SEQ ID NO: 1561896
aggcaaauguuucuguaau

SEQ ID NO: 1706402 - RNA, 19 nt, Artificial Sequence
  Description of Artificial Sequence: Synthetic oligonucleotide
  Antisense strand to SEQ ID NO: 1706401
auuacagaaacauuugccu

SEQ ID NO: 1706403 - RNA, 19 nt, Artificial Sequence
  Description of Artificial Sequence: Synthetic oligonucleotide
  Sense strand starting at position 88 of SEQ ID NO: 1561896
guaauccagccagagacua

SEQ ID NO: 1706404 - RNA, 19 nt, Artificial Sequence
  Description of Artificial Sequence: Synthetic oligonucleotide
  Antisense strand to SEQ ID NO: 1706403
uagucucuggcuggauuac

SEQ ID NO: 1706405 - RNA, 19 nt, Artificial Sequence
  Description of Artificial Sequence: Synthetic oligonucleotide
  Sense strand starting at position 102 of SEQ ID NO: 1561896
gacuaagaguccuuguagc

SEQ ID NO: 1706406 - RNA, 19 nt, Artificial Sequence
  Description of Artificial Sequence: Synthetic oligonucleotide
  Antisense strand to SEQ ID NO: 1706405
gcuacaaggacucuuaguc

SEQ ID NO: 1706407 - RNA, 19 nt, Artificial Sequence
  Description of Artificial Sequence: Synthetic oligonucleotide
  Sense strand starting at position 153 of SEQ ID NO: 1561896
gcaaacagacgauaauagu

SEQ ID NO: 1706408 - RNA, 19 nt, Artificial Sequence
  Description of Artificial Sequence: Synthetic oligonucleotide
  Antisense strand to SEQ ID NO: 1706407
acuauuaucgucuguuugc

SEQ ID NO: 1706409 - RNA, 19 nt, Artificial Sequence
  Description of Artificial Sequence: Synthetic oligonucleotide
  Sense strand starting at position 159 of SEQ ID NO: 1561896
agacgauaauaguugucaa

SEQ ID NO: 1706410 - RNA, 19 nt, Artificial Sequence
  Description of Artificial Sequence: Synthetic oligonucleotide
  Antisense strand to SEQ ID NO: 1706409
uugacaacuauuaucgucu

SEQ ID NO: 1706411 - RNA, 19 nt, Artificial Sequence
  Description of Artificial Sequence: Synthetic oligonucleotide
  Sense strand starting at position 242 of SEQ ID NO: 1561896
agccgaugccucguucuau

SEQ ID NO: 1706412 - RNA, 19 nt, Artificial Sequence
  Description of Artificial Sequence: Synthetic oligonucleotide
  Antisense strand to SEQ ID NO: 1706411
auagaacgaggcaucggcu

SEQ ID NO: 1706413 - RNA, 19 nt, Artificial Sequence
  Description of Artificial Sequence: Synthetic oligonucleotide
  Sense strand starting at position 265 of SEQ ID NO: 1561896
cagaaugagugcucugaug

SEQ ID NO: 1706414 - RNA, 19 nt, Artificial Sequence
  Description of Artificial Sequence: Synthetic oligonucleotide
  Antisense strand to SEQ ID NO: 1706413
caucagagcacucauucug

SEQ ID NO: 1706415 - RNA, 19 nt, Artificial Sequence
  Description of Artificial Sequence: Synthetic oligonucleotide
  Sense strand starting at position 292 of SEQ ID NO: 1561896
ugaggaggcuggcuuuaua

SEQ ID NO: 1706416 - RNA, 19 nt, Artificial Sequence
  Description of Artificial Sequence: Synthetic oligonucleotide
  Antisense strand to SEQ ID NO: 1706415
uauaaagccagccuccuca

SEQ ID NO: 1706417 - RNA, 19 nt, Artificial Sequence
  Description of Artificial Sequence: Synthetic oligonucleotide
  Sense strand starting at position 353 of SEQ ID NO: 1561896
cgaauugguuguuucaaag

SEQ ID NO: 1706418 - RNA, 19 nt, Artificial Sequence
  Description of Artificial Sequence: Synthetic oligonucleotide
  Antisense strand to SEQ ID NO: 1706417
cuuugaaacaaccaauucg

SEQ ID NO: 1706419 - RNA, 19 nt, Artificial Sequence
  Description of Artificial Sequence: Synthetic oligonucleotide
  Sense strand starting at position 437 of SEQ ID NO: 1561896
uugggcauuuggcuauauu

SEQ ID NO: 1706420 - RNA, 19 nt, Artificial Sequence
  Description of Artificial Sequence: Synthetic oligonucleotide
  Antisense strand to SEQ ID NO: 1706419
aauauagccaaaugcccaa

SEQ ID NO: 1706421 - RNA, 19 nt, Artificial Sequence
  Description of Artificial Sequence: Synthetic oligonucleotide
  Sense strand starting at position 470 of SEQ ID NO: 1561896
ccuaauuucuaggaaaguc

SEQ ID NO: 1706422 - RNA, 19 nt, Artificial Sequence
  Description of Artificial Sequence: Synthetic oligonucleotide
  Antisense strand to SEQ ID NO: 1706421
gacuuuccuagaaauuagg

SEQ ID NO: 1706423 - RNA, 19 nt, Artificial Sequence
  Description of Artificial Sequence: Synthetic oligonucleotide
  Sense strand starting at position 712 of SEQ ID NO: 1561896
uccuaaguucuugaaggca

SEQ ID NO: 1706424 - RNA, 19 nt, Artificial Sequence
  Description of Artificial Sequence: Synthetic oligonucleotide
  Antisense strand to SEQ ID NO: 1706423
ugccuucaagaacuuagga

SEQ ID NO: 1706425 - RNA, 19 nt, Artificial Sequence
  Description of Artificial Sequence: Synthetic oligonucleotide
  Sense strand starting at position 770 of SEQ ID NO: 1561896
gguauuaaguggguacuau

SEQ ID NO: 1706426 - RNA, 19 nt, Artificial Sequence
  Description of Artificial Sequence: Synthetic oligonucleotide
  Antisense strand to SEQ ID NO: 1706425
auaguacccacuuaauacc

SEQ ID NO: 1706427 - RNA, 19 nt, Artificial Sequence
  Description of Artificial Sequence: Synthetic oligonucleotide
  Sense strand starting at position 771 of SEQ ID NO: 1561896
guauuaaguggguacuauu

SEQ ID NO: 1706428 - RNA, 19 nt, Artificial Sequence
  Description of Artificial Sequence: Synthetic oligonucleotide
  Antisense strand to SEQ ID NO: 1706427
aauaguacccacuuaauac

SEQ ID NO: 1706429 - RNA, 19 nt, Artificial Sequence
  Description of Artificial Sequence: Synthetic oligonucleotide
  Sense strand starting at position 869 of SEQ ID NO: 1561896
gcuagaaacuaaguccaga

SEQ ID NO: 1706430 - RNA, 19 nt, Artificial Sequence
  Description of Artificial Sequence: Synthetic oligonucleotide
  Antisense strand to SEQ ID NO: 1706429
ucuggacuuaguuucuagc

SEQ ID NO: 1706431 - RNA, 19 nt, Artificial Sequence
  Description of Artificial Sequence: Synthetic oligonucleotide
  Sense strand starting at position 890 of SEQ ID NO: 1561896
uuguacuaaguacgauuaa

SEQ ID NO: 1706432 - RNA, 19 nt, Artificial Sequence
  Description of Artificial Sequence: Synthetic oligonucleotide
  Antisense strand to SEQ ID NO: 1706431
uuaaucguacuuaguacaa

SEQ ID NO: 1706433 - RNA, 19 nt, Artificial Sequence
  Description of Artificial Sequence: Synthetic oligonucleotide
  Sense strand starting at position 901 of SEQ ID NO: 1561896
acgauuaacucguuuaaua

SEQ ID NO: 1706434 - RNA, 19 nt, Artificial Sequence
  Description of Artificial Sequence: Synthetic oligonucleotide
  Antisense strand to SEQ ID NO: 1706433
uauuaaacgaguuaaucgu

SEQ ID NO: 1706435 - RNA, 19 nt, Artificial Sequence
  Description of Artificial Sequence: Synthetic oligonucleotide
  Sense strand starting at position 1086 of SEQ ID NO: 1561896
agaucuguucgcucgaguc

SEQ ID NO: 1706436 - RNA, 19 nt, Artificial Sequence
  Description of Artificial Sequence: Synthetic oligonucleotide
  Antisense strand to SEQ ID NO: 1706435
gacucgagcgaacagaucu

SEQ ID NO: 1706437 - RNA, 19 nt, Artificial Sequence
  Description of Artificial Sequence: Synthetic oligonucleotide
  Sense strand starting at position 1259 of SEQ ID NO: 1561896
agagcuugcccggagcaga

SEQ ID NO: 1706438 - RNA, 19 nt, Artificial Sequence
  Description of Artificial Sequence: Synthetic oligonucleotide
  Antisense strand to SEQ ID NO: 1706437
ucugcuccgggcaagcucu

SEQ ID NO: 1706439 - RNA, 19 nt, Artificial Sequence
  Description of Artificial Sequence: Synthetic oligonucleotide
  Sense strand starting at position 2161 of SEQ ID NO: 1561896
acuagaguggagugguaau

SEQ ID NO: 1706440 - RNA, 19 nt, Artificial Sequence
  Description of Artificial Sequence: Synthetic oligonucleotide
  Antisense strand to SEQ ID NO: 1706439
auuaccacuccacucuagu

SEQ ID NO: 1706441 - RNA, 19 nt, Artificial Sequence
  Description of Artificial Sequence: Synthetic oligonucleotide
  Sense strand starting at position 2172 of SEQ ID NO: 1561896
gugguaauauccuuguaug

SEQ ID NO: 1706442 - RNA, 19 nt, Artificial Sequence
  Description of Artificial Sequence: Synthetic oligonucleotide
  Antisense strand to SEQ ID NO: 1706441
cauacaaggauauuaccac

SEQ ID NO: 1706443 - RNA, 19 nt, Artificial Sequence
  Description of Artificial Sequence: Synthetic oligonucleotide
  Sense strand starting at position 2352 of SEQ ID NO: 1561896
ggauuauaucaacagcgau

SEQ ID NO: 1706444 - RNA, 19 nt, Artificial Sequence
  Description of Artificial Sequence: Synthetic oligonucleotide
  Antisense strand to SEQ ID NO: 1706443
aucgcuguugauauaaucc

SEQ ID NO: 1706445 - RNA, 19 nt, Artificial Sequence
  Description of Artificial Sequence: Synthetic oligonucleotide
  Sense strand starting at position 2355 of SEQ ID NO: 1561896
uuauaucaacagcgaugaa

SEQ ID NO: 1706446 - RNA, 19 nt, Artificial Sequence
  Description of Artificial Sequence: Synthetic oligonucleotide
  Antisense strand to SEQ ID NO: 1706445
uucaucgcuguugauauaa

SEQ ID NO: 1706447 - RNA, 19 nt, Artificial Sequence
  Description of Artificial Sequence: Synthetic oligonucleotide
  Sense strand starting at position 2447 of SEQ ID NO: 1561896
guuaaauaguauccauauc

SEQ ID NO: 1706448 - RNA, 19 nt, Artificial Sequence
  Description of Artificial Sequence: Synthetic oligonucleotide
  Antisense strand to SEQ ID NO: 1706447
gauauggauacuauuuaac

SEQ ID NO: 1706449 - RNA, 19 nt, Artificial Sequence
  Description of Artificial Sequence: Synthetic oligonucleotide
  Sense strand starting at position 2479 of SEQ ID NO: 1561896
uggaaauugucuuuacuga

SEQ ID NO: 1706450 - RNA, 19 nt, Artificial Sequence
  Description of Artificial Sequence: Synthetic oligonucleotide
  Antisense strand to SEQ ID NO: 1706449
ucaguaaagacaauuucca

SEQ ID NO: 1706451 - RNA, 19 nt, Artificial Sequence
  Description of Artificial Sequence: Synthetic oligonucleotide
  Sense strand starting at position 2486 of SEQ ID NO: 1561896
ugucuuuacugagugauuc

SEQ ID NO: 1706452 - RNA, 19 nt, Artificial Sequence
  Description of Artificial Sequence: Synthetic oligonucleotide
  Antisense strand to SEQ ID NO: 1706451
gaaucacucaguaaagaca

SEQ ID NO: 1706453 - RNA, 19 nt, Artificial Sequence
  Description of Artificial Sequence: Synthetic oligonucleotide
  Sense strand starting at position 2487 of SEQ ID NO: 1561896
gucuuuacugagugauucu

SEQ ID NO: 1706454 - RNA, 19 nt, Artificial Sequence
  Description of Artificial Sequence: Synthetic oligonucleotide
  Antisense strand to SEQ ID NO: 1706453
agaaucacucaguaaagac

SEQ ID NO: 1706455 - RNA, 19 nt, Artificial Sequence
  Description of Artificial Sequence: Synthetic oligonucleotide
  Sense strand starting at position 2563 of SEQ ID NO: 1561896
uuacuuugguuuccaucau

SEQ ID NO: 1706456 - RNA, 19 nt, Artificial Sequence
  Description of Artificial Sequence: Synthetic oligonucleotide
  Antisense strand to SEQ ID NO: 1706455
augauggaaaccaaaguaa

SEQ ID NO: 1706457 - RNA, 19 nt, Artificial Sequence
  Description of Artificial Sequence: Synthetic oligonucleotide
  Sense strand starting at position 2569 of SEQ ID NO: 1561896
ugguuuccaucauugugau

SEQ ID NO: 1706458 - RNA, 19 nt, Artificial Sequence
  Description of Artificial Sequence: Synthetic oligonucleotide
  Antisense strand to SEQ ID NO: 1706457
aucacaaugauggaaacca

SEQ ID NO: 1706459 - RNA, 19 nt, Artificial Sequence
  Description of Artificial Sequence: Synthetic oligonucleotide
  Sense strand starting at position 2570 of SEQ ID NO: 1561896
gguuuccaucauugugaua

SEQ ID NO: 1706460 - RNA, 19 nt, Artificial Sequence
  Description of Artificial Sequence: Synthetic oligonucleotide
  Antisense strand to SEQ ID NO: 1706459
uaucacaaugauggaaacc

SEQ ID NO: 1706461 - RNA, 19 nt, Artificial Sequence
  Description of Artificial Sequence: Synthetic oligonucleotide
  Sense strand starting at position 2690 of SEQ ID NO: 1561896
uuguacguagcgucacaaa

SEQ ID NO: 1706462 - RNA, 19 nt, Artificial Sequence
  Description of Artificial Sequence: Synthetic oligonucleotide
  Antisense strand to SEQ ID NO: 1706461
uuugugacgcuacguacaa

SEQ ID NO: 1706463 - RNA, 19 nt, Artificial Sequence
  Description of Artificial Sequence: Synthetic oligonucleotide
  Sense strand starting at position 3218 of SEQ ID NO: 1561896
guuugccuucucuauagau

SEQ ID NO: 1706464 - RNA, 19 nt, Artificial Sequence
  Description of Artificial Sequence: Synthetic oligonucleotide
  Antisense strand to SEQ ID NO: 1706463
aucuauagagaaggcaaac

SEQ ID NO: 1706465 - RNA, 19 nt, Artificial Sequence
  Description of Artificial Sequence: Synthetic oligonucleotide
  Sense strand starting at position 3343 of SEQ ID NO: 1561896
gcucaaauccaguaauagg

SEQ ID NO: 1706466 - RNA, 19 nt, Artificial Sequence
  Description of Artificial Sequence: Synthetic oligonucleotide
  Antisense strand to SEQ ID NO: 1706465
ccuauuacuggauuugagc

SEQ ID NO: 1706467 - RNA, 19 nt, Artificial Sequence
  Description of Artificial Sequence: Synthetic oligonucleotide
  Sense strand starting at position 3354 of SEQ ID NO: 1561896
guaauagguucuuuauaac

SEQ ID NO: 1706468 - RNA, 19 nt, Artificial Sequence
  Description of Artificial Sequence: Synthetic oligonucleotide
  Antisense strand to SEQ ID NO: 1706467
guuauaaagaaccuauuac

SEQ ID NO: 1706469 - RNA, 19 nt, Artificial Sequence
  Description of Artificial Sequence: Synthetic oligonucleotide
  Sense strand starting at position 3846 of SEQ ID NO: 1561896
auggcaguccucuacaaau

SEQ ID NO: 1706470 - RNA, 19 nt, Artificial Sequence
  Description of Artificial Sequence: Synthetic oligonucleotide
  Antisense strand to SEQ ID NO: 1706469
auuuguagaggacugccau

SEQ ID NO: 1706471 - RNA, 19 nt, Artificial Sequence
  Description of Artificial Sequence: Synthetic oligonucleotide
  Sense strand starting at position 3848 of SEQ ID NO: 1561896
ggcaguccucuacaaaugu

SEQ ID NO: 1706472 - RNA, 19 nt, Artificial Sequence
  Description of Artificial Sequence: Synthetic oligonucleotide
  Antisense strand to SEQ ID NO: 1706471
acauuuguagaggacugcc

SEQ ID NO: 1706473 - RNA, 19 nt, Artificial Sequence
  Description of Artificial Sequence: Synthetic oligonucleotide
  Sense strand starting at position 3858 of SEQ ID NO: 1561896
uacaaauguuuaguaagga

SEQ ID NO: 1706474 - RNA, 19 nt, Artificial Sequence
  Description of Artificial Sequence: Synthetic oligonucleotide
  Antisense strand to SEQ ID NO: 1706473
uccuuacuaaacauuugua

SEQ ID NO: 1706475 - RNA, 19 nt, Artificial Sequence
  Description of Artificial Sequence: Synthetic oligonucleotide
  Sense strand starting at position 3863 of SEQ ID NO: 1561896
auguuuaguaaggagcaaa

SEQ ID NO: 1706476 - RNA, 19 nt, Artificial Sequence
  Description of Artificial Sequence: Synthetic oligonucleotide
  Antisense strand to SEQ ID NO: 1706475
uuugcuccuuacuaaacau

SEQ ID NO: 1706477 - RNA, 19 nt, Artificial Sequence
  Description of Artificial Sequence: Synthetic oligonucleotide
  Sense strand starting at position 3958 of SEQ ID NO: 1561896
caguguuaccuuuaagaug

SEQ ID NO: 1706478 - RNA, 19 nt, Artificial Sequence
  Description of Artificial Sequence: Synthetic oligonucleotide
  Antisense strand to SEQ ID NO: 1706477
caucuuaaagguaacacug

SEQ ID NO: 1706479 - RNA, 19 nt, Artificial Sequence
  Description of Artificial Sequence: Synthetic oligonucleotide
  Sense strand starting at position 3972 of SEQ ID NO: 1561896
agaugugagucuucugagu

SEQ ID NO: 1706480 - RNA, 19 nt, Artificial Sequence
  Description of Artificial Sequence: Synthetic oligonucleotide
  Antisense strand to SEQ ID NO: 1706479
acucagaagacucacaucu

SEQ ID NO: 1706481 - RNA, 19 nt, Artificial Sequence
  Description of Artificial Sequence: Synthetic oligonucleotide
  Sense strand starting at position 495 of SEQ ID NO: 1561897
ccagcuguccuagguuaag

SEQ ID NO: 1706482 - RNA, 19 nt, Artificial Sequence
  Description of Artificial Sequence: Synthetic oligonucleotide
  Antisense strand to SEQ ID NO: 1706481
cuuaaccuaggacagcugg

SEQ ID NO: 1706483 - RNA, 19 nt, Artificial Sequence
  Description of Artificial Sequence: Synthetic oligonucleotide
  Sense strand starting at position 572 of SEQ ID NO: 1561897
cagauuaucugggugcuga

SEQ ID NO: 1706484 - RNA, 19 nt, Artificial Sequence
  Description of Artificial Sequence: Synthetic oligonucleotide
  Antisense strand to SEQ ID NO: 1706483
ucagcacccagauaaucug

SEQ ID NO: 1706485 - RNA, 19 nt, Artificial Sequence
  Description of Artificial Sequence: Synthetic oligonucleotide
  Sense strand starting at position 573 of SEQ ID NO: 1561897
agauuaucugggugcugau

SEQ ID NO: 1706486 - RNA, 19 nt, Artificial Sequence
  Description of Artificial Sequence: Synthetic oligonucleotide
  Antisense strand to SEQ ID NO: 1706485
aucagcacccagauaaucu

SEQ ID NO: 1706487 - RNA, 19 nt, Artificial Sequence
  Description of Artificial Sequence: Synthetic oligonucleotide
  Sense strand starting at position 604 of SEQ ID NO: 1561897
auuugcuagcugugaccau

SEQ ID NO: 1706488 - RNA, 19 nt, Artificial Sequence
  Description of Artificial Sequence: Synthetic oligonucleotide
  Antisense strand to SEQ ID NO: 1706487
auggucacagcuagcaaau

SEQ ID NO: 1706489 - RNA, 19 nt, Artificial Sequence
  Description of Artificial Sequence: Synthetic oligonucleotide
  Sense strand starting at position 686 of SEQ ID NO: 1561897
acgugugaguaacuaauga

SEQ ID NO: 1706490 - RNA, 19 nt, Artificial Sequence
  Description of Artificial Sequence: Synthetic oligonucleotide
  Antisense strand to SEQ ID NO: 1706489
ucauuaguuacucacacgu

SEQ ID NO: 1706491 - RNA, 19 nt, Artificial Sequence
  Description of Artificial Sequence: Synthetic oligonucleotide
  Sense strand starting at position 697 of SEQ ID NO: 1561897
acuaaugacuuuguguaaa

SEQ ID NO: 1706492 - RNA, 19 nt, Artificial Sequence
  Description of Artificial Sequence: Synthetic oligonucleotide
  Antisense strand to SEQ ID NO: 1706491
uuuacacaaagucauuagu

SEQ ID NO: 1706493 - RNA, 19 nt, Artificial Sequence
  Description of Artificial Sequence: Synthetic oligonucleotide
  Sense strand starting at position 708 of SEQ ID NO: 1561897
uguguaaagcccuggaaug

SEQ ID NO: 1706494 - RNA, 19 nt, Artificial Sequence
  Description of Artificial Sequence: Synthetic oligonucleotide
  Antisense strand to SEQ ID NO: 1706493
cauuccagggcuuuacaca

SEQ ID NO: 1706495 - RNA, 19 nt, Artificial Sequence
  Description of Artificial Sequence: Synthetic oligonucleotide
  Sense strand starting at position 806 of SEQ ID NO: 1561897
caggucauacucugaugaa

SEQ ID NO: 1706496 - RNA, 19 nt, Artificial Sequence
  Description of Artificial Sequence: Synthetic oligonucleotide
  Antisense strand to SEQ ID NO: 1706495
uucaucagaguaugaccug

SEQ ID NO: 1706497 - RNA, 19 nt, Artificial Sequence
  Description of Artificial Sequence: Synthetic oligonucleotide
  Sense strand starting at position 807 of SEQ ID NO: 1561897
aggucauacucugaugaac

SEQ ID NO: 1706498 - RNA, 19 nt, Artificial Sequence
  Description of Artificial Sequence: Synthetic oligonucleotide
  Antisense strand to SEQ ID NO: 1706497
guucaucagaguaugaccu

SEQ ID NO: 1706499 - RNA, 19 nt, Artificial Sequence
  Description of Artificial Sequence: Synthetic oligonucleotide
  Sense strand starting at position 1353 of SEQ ID NO: 1561897
ccagguuuggguggaugaa

SEQ ID NO: 1706500 - RNA, 19 nt, Artificial Sequence
  Description of Artificial Sequence: Synthetic oligonucleotide
  Antisense strand to SEQ ID NO: 1706499
uucauccacccaaaccugg

SEQ ID NO: 1706501 - RNA, 19 nt, Artificial Sequence
  Description of Artificial Sequence: Synthetic oligonucleotide
  Sense strand starting at position 1952 of SEQ ID NO: 1561897
gcuuccggguccucuaaga

SEQ ID NO: 1706502 - RNA, 19 nt, Artificial Sequence
  Description of Artificial Sequence: Synthetic oligonucleotide
  Antisense strand to SEQ ID NO: 1706501
ucuuagaggacccggaagc

SEQ ID NO: 1706503 - RNA, 19 nt, Artificial Sequence
  Description of Artificial Sequence: Synthetic oligonucleotide
  Sense strand starting at position 2040 of SEQ ID NO: 1561897
gcuccacucccuggaaaga

SEQ ID NO: 1706504 - RNA, 19 nt, Artificial Sequence
  Description of Artificial Sequence: Synthetic oligonucleotide
  Antisense strand to SEQ ID NO: 1706503
ucuuuccagggaguggagc

SEQ ID NO: 1706505 - RNA, 19 nt, Artificial Sequence
  Description of Artificial Sequence: Synthetic oligonucleotide
  Sense strand starting at position 2239 of SEQ ID NO: 1561897
cagcuugcugugugaucuu

SEQ ID NO: 1706506 - RNA, 19 nt, Artificial Sequence
  Description of Artificial Sequence: Synthetic oligonucleotide
  Antisense strand to SEQ ID NO: 1706505
aagaucacacagcaagcug

SEQ ID NO: 1706507 - RNA, 19 nt, Artificial Sequence
  Description of Artificial Sequence: Synthetic oligonucleotide
  Sense strand starting at position 2434 of SEQ ID NO: 1561897
ucgcgucaucuguucgcau

SEQ ID NO: 1706508 - RNA, 19 nt, Artificial Sequence
  Description of Artificial Sequence: Synthetic oligonucleotide
  Antisense strand to SEQ ID NO: 1706507
augcgaacagaugacgcga

SEQ ID NO: 1706509 - RNA, 19 nt, Artificial Sequence
  Description of Artificial Sequence: Synthetic oligonucleotide
  Sense strand starting at position 2484 of SEQ ID NO: 1561897
augacuacuugauuaaugu

SEQ ID NO: 1706510 - RNA, 19 nt, Artificial Sequence
  Description of Artificial Sequence: Synthetic oligonucleotide
  Antisense strand to SEQ ID NO: 1706509
acauuaaucaaguagucau

SEQ ID NO: 1706511 - RNA, 19 nt, Artificial Sequence
  Description of Artificial Sequence: Synthetic oligonucleotide
  Sense strand starting at position 2569 of SEQ ID NO: 1561897
caguaccucgccugacaaa

SEQ ID NO: 1706512 - RNA, 19 nt, Artificial Sequence
  Description of Artificial Sequence: Synthetic oligonucleotide
  Antisense strand to SEQ ID NO: 1706511
uuugucaggcgagguacug

SEQ ID NO: 1706513 - RNA, 19 nt, Artificial Sequence
  Description of Artificial Sequence: Synthetic oligonucleotide
  Sense strand starting at position 2854 of SEQ ID NO: 1561897
cgcggcuuuccuggaccaa

SEQ ID NO: 1706514 - RNA, 19 nt, Artificial Sequence
  Description of Artificial Sequence: Synthetic oligonucleotide
  Antisense strand to SEQ ID NO: 1706513
uugguccaggaaagccgcg

SEQ ID NO: 1706515 - RNA, 19 nt, Artificial Sequence
  Description of Artificial Sequence: Synthetic oligonucleotide
  Sense strand starting at position 2855 of SEQ ID NO: 1561897
gcggcuuuccuggaccaaa

SEQ ID NO: 1706516 - RNA, 19 nt, Artificial Sequence
  Description of Artificial Sequence: Synthetic oligonucleotide
  Antisense strand to SEQ ID NO: 1706515
uuugguccaggaaagccgc

SEQ ID NO: 1706517 - RNA, 19 nt, Artificial Sequence
  Description of Artificial Sequence: Synthetic oligonucleotide
  Sense strand starting at position 2914 of SEQ ID NO: 1561897
cugagaagggccuggagau

SEQ ID NO: 1706518 - RNA, 19 nt, Artificial Sequence
  Description of Artificial Sequence: Synthetic oligonucleotide
  Antisense strand to SEQ ID NO: 1706517
aucuccaggcccuucucag

SEQ ID NO: 1706519 - RNA, 19 nt, Artificial Sequence
  Description of Artificial Sequence: Synthetic oligonucleotide
  Sense strand starting at position 3029 of SEQ ID NO: 1561897
aggagagguagcugccauu

SEQ ID NO: 1706520 - RNA, 19 nt, Artificial Sequence
  Description of Artificial Sequence: Synthetic oligonucleotide
  Antisense strand to SEQ ID NO: 1706519
aauggcagcuaccucuccu

SEQ ID NO: 1706521 - RNA, 19 nt, Artificial Sequence
  Description of Artificial Sequence: Synthetic oligonucleotide
  Sense strand starting at position 3087 of SEQ ID NO: 1561897
ggccucaguuguccucauu

SEQ ID NO: 1706522 - RNA, 19 nt, Artificial Sequence
  Description of Artificial Sequence: Synthetic oligonucleotide
  Antisense strand to SEQ ID NO: 1706521
aaugaggacaacugaggcc

SEQ ID NO: 1706523 - RNA, 19 nt, Artificial Sequence
  Description of Artificial Sequence: Synthetic oligonucleotide
  Sense strand starting at position 3112 of SEQ ID NO: 1561897
gaagucauuuaguaucagu

SEQ ID NO: 1706524 - RNA, 19 nt, Artificial Sequence
  Description of Artificial Sequence: Synthetic oligonucleotide
  Antisense strand to SEQ ID NO: 1706523
acugauacuaaaugacuuc

SEQ ID NO: 1706525 - RNA, 19 nt, Artificial Sequence
  Description of Artificial Sequence: Synthetic oligonucleotide
  Sense strand starting at position 3178 of SEQ ID NO: 1561897
ggagcagagcuaugucaag

SEQ ID NO: 1706526 - RNA, 19 nt, Artificial Sequence
  Description of Artificial Sequence: Synthetic oligonucleotide
  Antisense strand to SEQ ID NO: 1706525
cuugacauagcucugcucc

SEQ ID NO: 1706527 - RNA, 19 nt, Artificial Sequence
  Description of Artificial Sequence: Synthetic oligonucleotide
  Sense strand starting at position 3295 of SEQ ID NO: 1561897
gcuacagaugccgaaauca

SEQ ID NO: 1706528 - RNA, 19 nt, Artificial Sequence
  Description of Artificial Sequence: Synthetic oligonucleotide
  Antisense strand to SEQ ID NO: 1706527
ugauuucggcaucuguagc

SEQ ID NO: 1706529 - RNA, 19 nt, Artificial Sequence
  Description of Artificial Sequence: Synthetic oligonucleotide
  Sense strand starting at position 3371 of SEQ ID NO: 1561897
aggauucuauugugaggau

SEQ ID NO: 1706530 - RNA, 19 nt, Artificial Sequence
  Description of Artificial Sequence: Synthetic oligonucleotide
  Antisense strand to SEQ ID NO: 1706529
auccucacaauagaauccu

SEQ ID NO: 1706531 - RNA, 19 nt, Artificial Sequence
  Description of Artificial Sequence: Synthetic oligonucleotide
  Sense strand starting at position 3372 of SEQ ID NO: 1561897
ggauucuauugugaggauu

SEQ ID NO: 1706532 - RNA, 19 nt, Artificial Sequence
  Description of Artificial Sequence: Synthetic oligonucleotide
  Antisense strand to SEQ ID NO: 1706531
aauccucacaauagaaucc

SEQ ID NO: 1706533 - RNA, 19 nt, Artificial Sequence
  Description of Artificial Sequence: Synthetic oligonucleotide
  Sense strand starting at position 3402 of SEQ ID NO: 1561897
uuaaauaagugguucucaa

SEQ ID NO: 1706534 - RNA, 19 nt, Artificial Sequence
  Description of Artificial Sequence: Synthetic oligonucleotide
  Antisense strand to SEQ ID NO: 1706533
uugagaaccacuuauuuaa

SEQ ID NO: 1706535 - RNA, 19 nt, Artificial Sequence
  Description of Artificial Sequence: Synthetic oligonucleotide
  Sense strand starting at position 3418 of SEQ ID NO: 1561897
caaccuugacuguguguua

SEQ ID NO: 1706536 - RNA, 19 nt, Artificial Sequence
  Description of Artificial Sequence: Synthetic oligonucleotide
  Antisense strand to SEQ ID NO: 1706535
uaacacacagucaagguug

SEQ ID NO: 1706537 - RNA, 19 nt, Artificial Sequence
  Description of Artificial Sequence: Synthetic oligonucleotide
  Sense strand starting at position 3421 of SEQ ID NO: 1561897
ccuugacuguguguuagaa

SEQ ID NO: 1706538 - RNA, 19 nt, Artificial Sequence
  Description of Artificial Sequence: Synthetic oligonucleotide
  Antisense strand to SEQ ID NO: 1706537
uucuaacacacagucaagg

SEQ ID NO: 1706539 - RNA, 19 nt, Artificial Sequence
  Description of Artificial Sequence: Synthetic oligonucleotide
  Sense strand starting at position 3434 of SEQ ID NO: 1561897
uuagaaucacugugcccua

SEQ ID NO: 1706540 - RNA, 19 nt, Artificial Sequence
  Description of Artificial Sequence: Synthetic oligonucleotide
  Antisense strand to SEQ ID NO: 1706539
uagggcacagugauucuaa

SEQ ID NO: 1706541 - RNA, 19 nt, Artificial Sequence
  Description of Artificial Sequence: Synthetic oligonucleotide
  Sense strand starting at position 3441 of SEQ ID NO: 1561897
cacugugcccuagacgaau

SEQ ID NO: 1706542 - RNA, 19 nt, Artificial Sequence
  Description of Artificial Sequence: Synthetic oligonucleotide
  Antisense strand to SEQ ID NO: 1706541
auucgucuagggcacagug

SEQ ID NO: 1706543 - RNA, 19 nt, Artificial Sequence
  Description of Artificial Sequence: Synthetic oligonucleotide
  Sense strand starting at position 3447 of SEQ ID NO: 1561897
gcccuagacgaauacugau

SEQ ID NO: 1706544 - RNA, 19 nt, Artificial Sequence
  Description of Artificial Sequence: Synthetic oligonucleotide
  Antisense strand to SEQ ID NO: 1706543
aucaguauucgucuagggc

SEQ ID NO: 1706545 - RNA, 19 nt, Artificial Sequence
  Description of Artificial Sequence: Synthetic oligonucleotide
  Sense strand starting at position 3492 of SEQ ID NO: 1561897
cucuccaguugguuguaau

SEQ ID NO: 1706546 - RNA, 19 nt, Artificial Sequence
  Description of Artificial Sequence: Synthetic oligonucleotide
  Antisense strand to SEQ ID NO: 1706545
auuacaaccaacuggagag

SEQ ID NO: 1706547 - RNA, 19 nt, Artificial Sequence
  Description of Artificial Sequence: Synthetic oligonucleotide
  Sense strand starting at position 3493 of SEQ ID NO: 1561897
ucuccaguugguuguaaug

SEQ ID NO: 1706548 - RNA, 19 nt, Artificial Sequence
  Description of Artificial Sequence: Synthetic oligonucleotide
  Antisense strand to SEQ ID NO: 1706547
cauuacaaccaacuggaga

SEQ ID NO: 1706549 - RNA, 19 nt, Artificial Sequence
  Description of Artificial Sequence: Synthetic oligonucleotide
  Sense strand starting at position 3502 of SEQ ID NO: 1561897
gguuguaauguacaaacaa

SEQ ID NO: 1706550 - RNA, 19 nt, Artificial Sequence
  Description of Artificial Sequence: Synthetic oligonucleotide
  Antisense strand to SEQ ID NO: 1706549
uuguuuguacauuacaacc

SEQ ID NO: 1706551 - RNA, 19 nt, Artificial Sequence
  Description of Artificial Sequence: Synthetic oligonucleotide
  Sense strand starting at position 3584 of SEQ ID NO: 1561897
aggaauguuuaucacauau

SEQ ID NO: 1706552 - RNA, 19 nt, Artificial Sequence
  Description of Artificial Sequence: Synthetic oligonucleotide
  Antisense strand to SEQ ID NO: 1706551
auaugugauaaacauuccu

SEQ ID NO: 1706553 - RNA, 19 nt, Artificial Sequence
  Description of Artificial Sequence: Synthetic oligonucleotide
  Sense strand starting at position 3689 of SEQ ID NO: 1561897
aguugauauaaagguuguu

SEQ ID NO: 1706554 - RNA, 19 nt, Artificial Sequence
  Description of Artificial Sequence: Synthetic oligonucleotide
  Antisense strand to SEQ ID NO: 1706553
aacaaccuuuauaucaacu

SEQ ID NO: 1706555 - RNA, 19 nt, Artificial Sequence
  Description of Artificial Sequence: Synthetic oligonucleotide
  Sense strand starting at position 3692 of SEQ ID NO: 1561897
ugauauaaagguuguugca

SEQ ID NO: 1706556 - RNA, 19 nt, Artificial Sequence
  Description of Artificial Sequence: Synthetic oligonucleotide
  Antisense strand to SEQ ID NO: 1706555
ugcaacaaccuuuauauca

SEQ ID NO: 1706557 - RNA, 19 nt, Artificial Sequence
  Description of Artificial Sequence: Synthetic oligonucleotide
  Sense strand starting at position 3694 of SEQ ID NO: 1561897
auauaaagguuguugcaga

SEQ ID NO: 1706558 - RNA, 19 nt, Artificial Sequence
  Description of Artificial Sequence: Synthetic oligonucleotide
  Antisense strand to SEQ ID NO: 1706557
ucugcaacaaccuuuauau

SEQ ID NO: 1706559 - RNA, 19 nt, Artificial Sequence
  Description of Artificial Sequence: Synthetic oligonucleotide
  Sense strand starting at position 3699 of SEQ ID NO: 1561897
aagguuguugcagaaauug

SEQ ID NO: 1706560 - RNA, 19 nt, Artificial Sequence
  Description of Artificial Sequence: Synthetic oligonucleotide
  Antisense strand to SEQ ID NO: 1706559
caauuucugcaacaaccuu

SEQ ID NO: 1706561 - RNA, 19 nt, Artificial Sequence
  Description of Artificial Sequence: Synthetic oligonucleotide
  Sense strand starting at position 1017 of SEQ ID NO: 1561898
gggccugaaucucucaaua

SEQ ID NO: 1706562 - RNA, 19 nt, Artificial Sequence
  Description of Artificial Sequence: Synthetic oligonucleotide
  Antisense strand to SEQ ID NO: 1706561
uauugagagauucaggccc

SEQ ID NO: 1706563 - RNA, 19 nt, Artificial Sequence
  Description of Artificial Sequence: Synthetic oligonucleotide
  Sense strand starting at position 1124 of SEQ ID NO: 1561898
gucacugcuccauaaacgu

SEQ ID NO: 1706564 - RNA, 19 nt, Artificial Sequence
  Description of Artificial Sequence: Synthetic oligonucleotide
  Antisense strand to SEQ ID NO: 1706563
acguuuauggagcagugac

SEQ ID NO: 1706565 - RNA, 19 nt, Artificial Sequence
  Description of Artificial Sequence: Synthetic oligonucleotide
  Sense strand starting at position 1159 of SEQ ID NO: 1561898
cuagaaacaugaggaagau

SEQ ID NO: 1706566 - RNA, 19 nt, Artificial Sequence
  Description of Artificial Sequence: Synthetic oligonucleotide
  Antisense strand to SEQ ID NO: 1706565
aucuuccucauguuucuag

SEQ ID NO: 1706567 - RNA, 19 nt, Artificial Sequence
  Description of Artificial Sequence: Synthetic oligonucleotide
  Sense strand starting at position 1240 of SEQ ID NO: 1561898
ggaauccuaguuugccuaa

SEQ ID NO: 1706568 - RNA, 19 nt, Artificial Sequence
  Description of Artificial Sequence: Synthetic oligonucleotide
  Antisense strand to SEQ ID NO: 1706567
uuaggcaaacuaggauucc

SEQ ID NO: 1706569 - RNA, 19 nt, Artificial Sequence
  Description of Artificial Sequence: Synthetic oligonucleotide
  Sense strand starting at position 1297 of SEQ ID NO: 1561898
gguugccuucagcagaaga

SEQ ID NO: 1706570 - RNA, 19 nt, Artificial Sequence
  Description of Artificial Sequence: Synthetic oligonucleotide
  Antisense strand to SEQ ID NO: 1706569
ucuucugcugaaggcaacc

SEQ ID NO: 1706571 - RNA, 19 nt, Artificial Sequence
  Description of Artificial Sequence: Synthetic oligonucleotide
  Sense strand starting at position 1324 of SEQ ID NO: 1561898
cugugaacccuggagucaa

SEQ ID NO: 1706572 - RNA, 19 nt, Artificial Sequence
  Description of Artificial Sequence: Synthetic oligonucleotide
  Antisense strand to SEQ ID NO: 1706571
uugacuccaggguucacag

SEQ ID NO: 1706573 - RNA, 19 nt, Artificial Sequence
  Description of Artificial Sequence: Synthetic oligonucleotide
  Sense strand starting at position 1418 of SEQ ID NO: 1561898
agagcugcuaguuguggaa

SEQ ID NO: 1706574 - RNA, 19 nt, Artificial Sequence
  Description of Artificial Sequence: Synthetic oligonucleotide
  Antisense strand to SEQ ID NO: 1706573
uuccacaacuagcagcucu

SEQ ID NO: 1706575 - RNA, 19 nt, Artificial Sequence
  Description of Artificial Sequence: Synthetic oligonucleotide
  Sense strand starting at position 1430 of SEQ ID NO: 1561898
uguggaauuucuggacuac

SEQ ID NO: 1706576 - RNA, 19 nt, Artificial Sequence
  Description of Artificial Sequence: Synthetic oligonucleotide
  Antisense strand to SEQ ID NO: 1706575
guaguccagaaauuccaca

SEQ ID NO: 1706577 - RNA, 19 nt, Artificial Sequence
  Description of Artificial Sequence: Synthetic oligonucleotide
  Sense strand starting at position 1550 of SEQ ID NO: 1561898
ugaggucacugcuccauau

SEQ ID NO: 1706578 - RNA, 19 nt, Artificial Sequence
  Description of Artificial Sequence: Synthetic oligonucleotide
  Antisense strand to SEQ ID NO: 1706577
auauggagcagugaccuca

SEQ ID NO: 1706579 - RNA, 19 nt, Artificial Sequence
  Description of Artificial Sequence: Synthetic oligonucleotide
  Sense strand starting at position 1608 of SEQ ID NO: 1561898
ugugcugaccaguagaucu

SEQ ID NO: 1706580 - RNA, 19 nt, Artificial Sequence
  Description of Artificial Sequence: Synthetic oligonucleotide
  Antisense strand to SEQ ID NO: 1706579
agaucuacuggucagcaca

SEQ ID NO: 1706581 - RNA, 19 nt, Artificial Sequence
  Description of Artificial Sequence: Synthetic oligonucleotide
  Sense strand starting at position 1616 of SEQ ID NO: 1561898
ccaguagaucuccgaguca

SEQ ID NO: 1706582 - RNA, 19 nt, Artificial Sequence
  Description of Artificial Sequence: Synthetic oligonucleotide
  Antisense strand to SEQ ID NO: 1706581
ugacucggagaucuacugg

SEQ ID NO: 1706583 - RNA, 19 nt, Artificial Sequence
  Description of Artificial Sequence: Synthetic oligonucleotide
  Sense strand starting at position 1737 of SEQ ID NO: 1561898
gugucaugcuuaccuggaa

SEQ ID NO: 1706584 - RNA, 19 nt, Artificial Sequence
  Description of Artificial Sequence: Synthetic oligonucleotide
  Antisense strand to SEQ ID NO: 1706583
uuccagguaagcaugacac

SEQ ID NO: 1706585 - RNA, 19 nt, Artificial Sequence
  Description of Artificial Sequence: Synthetic oligonucleotide
  Sense strand starting at position 1768 of SEQ ID NO: 1561898
gaguguggcuucucuggau

SEQ ID NO: 1706586 - RNA, 19 nt, Artificial Sequence
  Description of Artificial Sequence: Synthetic oligonucleotide
  Antisense strand to SEQ ID NO: 1706585
auccagagaagccacacuc

SEQ ID NO: 1706587 - RNA, 19 nt, Artificial Sequence
  Description of Artificial Sequence: Synthetic oligonucleotide
  Sense strand starting at position 2305 of SEQ ID NO: 1561898
agaggauccucagaagggu

SEQ ID NO: 1706588 - RNA, 19 nt, Artificial Sequence
  Description of Artificial Sequence: Synthetic oligonucleotide
  Antisense strand to SEQ ID NO: 1706587
acccuucugaggauccucu

SEQ ID NO: 1706589 - RNA, 19 nt, Artificial Sequence
  Description of Artificial Sequence: Synthetic oligonucleotide
  Sense strand starting at position 2421 of SEQ ID NO: 1561898
ucucguaaggagugagaau

SEQ ID NO: 1706590 - RNA, 19 nt, Artificial Sequence
  Description of Artificial Sequence: Synthetic oligonucleotide
  Antisense strand to SEQ ID NO: 1706589
auucucacuccuuacgaga

SEQ ID NO: 1706591 - RNA, 19 nt, Artificial Sequence
  Description of Artificial Sequence: Synthetic oligonucleotide
  Sense strand starting at position 2422 of SEQ ID NO: 1561898
cucguaaggagugagaaua

SEQ ID NO: 1706592 - RNA, 19 nt, Artificial Sequence
  Description of Artificial Sequence: Synthetic oligonucleotide
  Antisense strand to SEQ ID NO: 1706591
uauucucacuccuuacgag

SEQ ID NO: 1706593 - RNA, 19 nt, Artificial Sequence
  Description of Artificial Sequence: Synthetic oligonucleotide
  Sense strand starting at position 2474 of SEQ ID NO: 1561898
gcugcaugccugggaggau

SEQ ID NO: 1706594 - RNA, 19 nt, Artificial Sequence
  Description of Artificial Sequence: Synthetic oligonucleotide
  Antisense strand to SEQ ID NO: 1706593
auccucccaggcaugcagc

SEQ ID NO: 1706595 - RNA, 19 nt, Artificial Sequence
  Description of Artificial Sequence: Synthetic oligonucleotide
  Sense strand starting at position 2524 of SEQ ID NO: 1561898
agaugugaugcuugaguga

SEQ ID NO: 1706596 - RNA, 19 nt, Artificial Sequence
  Description of Artificial Sequence: Synthetic oligonucleotide
  Antisense strand to SEQ ID NO: 1706595
ucacucaagcaucacaucu

SEQ ID NO: 1706597 - RNA, 19 nt, Artificial Sequence
  Description of Artificial Sequence: Synthetic oligonucleotide
  Sense strand starting at position 2529 of SEQ ID NO: 1561898
ugaugcuugagugagcuuu

SEQ ID NO: 1706598 - RNA, 19 nt, Artificial Sequence
  Description of Artificial Sequence: Synthetic oligonucleotide
  Antisense strand to SEQ ID NO: 1706597
aaagcucacucaagcauca

SEQ ID NO: 1706599 - RNA, 19 nt, Artificial Sequence
  Description of Artificial Sequence: Synthetic oligonucleotide
  Sense strand starting at position 2535 of SEQ ID NO: 1561898
uugagugagcuuuguuuag

SEQ ID NO: 1706600 - RNA, 19 nt, Artificial Sequence
  Description of Artificial Sequence: Synthetic oligonucleotide
  Antisense strand to SEQ ID NO: 1706599
cuaaacaaagcucacucaa

SEQ ID NO: 1706601 - RNA, 19 nt, Artificial Sequence
  Description of Artificial Sequence: Synthetic oligonucleotide
  Sense strand starting at position 2537 of SEQ ID NO: 1561898
gagugagcuuuguuuagag

SEQ ID NO: 1706602 - RNA, 19 nt, Artificial Sequence
  Description of Artificial Sequence: Synthetic oligonucleotide
  Antisense strand to SEQ ID NO: 1706601
cucuaaacaaagcucacuc

SEQ ID NO: 1706603 - RNA, 19 nt, Artificial Sequence
  Description of Artificial Sequence: Synthetic oligonucleotide
  Sense strand starting at position 2539 of SEQ ID NO: 1561898
gugagcuuuguuuagagac

SEQ ID NO: 1706604 - RNA, 19 nt, Artificial Sequence
  Description of Artificial Sequence: Synthetic oligonucleotide
  Antisense strand to SEQ ID NO: 1706603
gucucuaaacaaagcucac

SEQ ID NO: 1706605 - RNA, 19 nt, Artificial Sequence
  Description of Artificial Sequence: Synthetic oligonucleotide
  Sense strand starting at position 2922 of SEQ ID NO: 1561898
cccaguuucuucccaguuu

SEQ ID NO: 1706606 - RNA, 19 nt, Artificial Sequence
  Description of Artificial Sequence: Synthetic oligonucleotide
  Antisense strand to SEQ ID NO: 1706605
aaacugggaagaaacuggg

SEQ ID NO: 1706607 - RNA, 19 nt, Artificial Sequence
  Description of Artificial Sequence: Synthetic oligonucleotide
  Sense strand starting at position 3008 of SEQ ID NO: 1561898
cuauguuguagucauaaug

SEQ ID NO: 1706608 - RNA, 19 nt, Artificial Sequence
  Description of Artificial Sequence: Synthetic oligonucleotide
  Antisense strand to SEQ ID NO: 1706607
cauuaugacuacaacauag

SEQ ID NO: 1706609 - RNA, 19 nt, Artificial Sequence
  Description of Artificial Sequence: Synthetic oligonucleotide
  Sense strand starting at position 3052 of SEQ ID NO: 1561898
uuuagaagugauuaucucu

SEQ ID NO: 1706610 - RNA, 19 nt, Artificial Sequence
  Description of Artificial Sequence: Synthetic oligonucleotide
  Antisense strand to SEQ ID NO: 1706609
agagauaaucacuucuaaa

SEQ ID NO: 1706611 - RNA, 19 nt, Artificial Sequence
  Description of Artificial Sequence: Synthetic oligonucleotide
  Sense strand starting at position 3055 of SEQ ID NO: 1561898
agaagugauuaucucuaga

SEQ ID NO: 1706612 - RNA, 19 nt, Artificial Sequence
  Description of Artificial Sequence: Synthetic oligonucleotide
  Antisense strand to SEQ ID NO: 1706611
ucuagagauaaucacuucu

SEQ ID NO: 1706613 - RNA, 19 nt, Artificial Sequence
  Description of Artificial Sequence: Synthetic oligonucleotide
  Sense strand starting at position 3057 of SEQ ID NO: 1561898
aagugauuaucucuagaug

SEQ ID NO: 1706614 - RNA, 19 nt, Artificial Sequence
  Description of Artificial Sequence: Synthetic oligonucleotide
  Antisense strand to SEQ ID NO: 1706613
caucuagagauaaucacuu

SEQ ID NO: 1706615 - RNA, 19 nt, Artificial Sequence
  Description of Artificial Sequence: Synthetic oligonucleotide
  Sense strand starting at position 3084 of SEQ ID NO: 1561898
acgggauuuagguggcuuu

SEQ ID NO: 1706616 - RNA, 19 nt, Artificial Sequence
  Description of Artificial Sequence: Synthetic oligonucleotide
  Antisense strand to SEQ ID NO: 1706615
aaagccaccuaaaucccgu

SEQ ID NO: 1706617 - RNA, 19 nt, Artificial Sequence
  Description of Artificial Sequence: Synthetic oligonucleotide
  Sense strand starting at position 3085 of SEQ ID NO: 1561898
cgggauuuagguggcuuua

SEQ ID NO: 1706618 - RNA, 19 nt, Artificial Sequence
  Description of Artificial Sequence: Synthetic oligonucleotide
  Antisense strand to SEQ ID NO: 1706617
uaaagccaccuaaaucccg

SEQ ID NO: 1706619 - RNA, 19 nt, Artificial Sequence
  Description of Artificial Sequence: Synthetic oligonucleotide
  Sense strand starting at position 3235 of SEQ ID NO: 1561898
cugagaguucaucaggguu

SEQ ID NO: 1706620 - RNA, 19 nt, Artificial Sequence
  Description of Artificial Sequence: Synthetic oligonucleotide
  Antisense strand to SEQ ID NO: 1706619
aacccugaugaacucucag

SEQ ID NO: 1706621 - RNA, 19 nt, Artificial Sequence
  Description of Artificial Sequence: Synthetic oligonucleotide
  Sense strand starting at position 3251 of SEQ ID NO: 1561898
guuaaugagccacagcuuu

SEQ ID NO: 1706622 - RNA, 19 nt, Artificial Sequence
  Description of Artificial Sequence: Synthetic oligonucleotide
  Antisense strand to SEQ ID NO: 1706621
aaagcuguggcucauuaac

SEQ ID NO: 1706623 - RNA, 19 nt, Artificial Sequence
  Description of Artificial Sequence: Synthetic oligonucleotide
  Sense strand starting at position 3304 of SEQ ID NO: 1561898
gucaguccuuaucuggaca

SEQ ID NO: 1706624 - RNA, 19 nt, Artificial Sequence
  Description of Artificial Sequence: Synthetic oligonucleotide
  Antisense strand to SEQ ID NO: 1706623
uguccagauaaggacugac

SEQ ID NO: 1706625 - RNA, 19 nt, Artificial Sequence
  Description of Artificial Sequence: Synthetic oligonucleotide
  Sense strand starting at position 3345 of SEQ ID NO: 1561898
cucagaaacuggccuauua

SEQ ID NO: 1706626 - RNA, 19 nt, Artificial Sequence
  Description of Artificial Sequence: Synthetic oligonucleotide
  Antisense strand to SEQ ID NO: 1706625
uaauaggccaguuucugag

SEQ ID NO: 1706627 - RNA, 19 nt, Artificial Sequence
  Description of Artificial Sequence: Synthetic oligonucleotide
  Sense strand starting at position 3362 of SEQ ID NO: 1561898
uaggguugauugguuaauu

SEQ ID NO: 1706628 - RNA, 19 nt, Artificial Sequence
  Description of Artificial Sequence: Synthetic oligonucleotide
  Antisense strand to SEQ ID NO: 1706627
aauuaaccaaucaacccua

SEQ ID NO: 1706629 - RNA, 19 nt, Artificial Sequence
  Description of Artificial Sequence: Synthetic oligonucleotide
  Sense strand starting at position 3363 of SEQ ID NO: 1561898
aggguugauugguuaauug

SEQ ID NO: 1706630 - RNA, 19 nt, Artificial Sequence
  Description of Artificial Sequence: Synthetic oligonucleotide
  Antisense strand to SEQ ID NO: 1706629
caauuaaccaaucaacccu

SEQ ID NO: 1706631 - RNA, 19 nt, Artificial Sequence
  Description of Artificial Sequence: Synthetic oligonucleotide
  Sense strand starting at position 3367 of SEQ ID NO: 1561898
uugauugguuaauuggaaa

SEQ ID NO: 1706632 - RNA, 19 nt, Artificial Sequence
  Description of Artificial Sequence: Synthetic oligonucleotide
  Antisense strand to SEQ ID NO: 1706631
uuuccaauuaaccaaucaa

SEQ ID NO: 1706633 - RNA, 19 nt, Artificial Sequence
  Description of Artificial Sequence: Synthetic oligonucleotide
  Sense strand starting at position 3381 of SEQ ID NO: 1561898
ggaaauucccgaggaucuc

SEQ ID NO: 1706634 - RNA, 19 nt, Artificial Sequence
  Description of Artificial Sequence: Synthetic oligonucleotide
  Antisense strand to SEQ ID NO: 1706633
gagauccucgggaauuucc

SEQ ID NO: 1706635 - RNA, 19 nt, Artificial Sequence
  Description of Artificial Sequence: Synthetic oligonucleotide
  Sense strand starting at position 3423 of SEQ ID NO: 1561898
gccugaagaucuuuccagu

SEQ ID NO: 1706636 - RNA, 19 nt, Artificial Sequence
  Description of Artificial Sequence: Synthetic oligonucleotide
  Antisense strand to SEQ ID NO: 1706635
acuggaaagaucuucaggc

SEQ ID NO: 1706637 - RNA, 19 nt, Artificial Sequence
  Description of Artificial Sequence: Synthetic oligonucleotide
  Sense strand starting at position 3634 of SEQ ID NO: 1561898
guggguucagcuuagaggu

SEQ ID NO: 1706638 - RNA, 19 nt, Artificial Sequence
  Description of Artificial Sequence: Synthetic oligonucleotide
  Antisense strand to SEQ ID NO: 1706637
accucuaagcugaacccac

SEQ ID NO: 1706639 - RNA, 19 nt, Artificial Sequence
  Description of Artificial Sequence: Synthetic oligonucleotide
  Sense strand starting at position 3870 of SEQ ID NO: 1561898
acaucauguuucccucaga

SEQ ID NO: 1706640 - RNA, 19 nt, Artificial Sequence
  Description of Artificial Sequence: Synthetic oligonucleotide
  Antisense strand to SEQ ID NO: 1706639
ucugagggaaacaugaugu

SEQ ID NO: 1706641 - RNA, 19 nt, Artificial Sequence
  Description of Artificial Sequence: Synthetic oligonucleotide
  Sense strand starting at position 176 of SEQ ID NO: 1561899
cacguuugacucuguagau

SEQ ID NO: 1706642 - RNA, 19 nt, Artificial Sequence
  Description of Artificial Sequence: Synthetic oligonucleotide
  Antisense strand to SEQ ID NO: 1706641
aucuacagagucaaacgug

SEQ ID NO: 1706643 - RNA, 19 nt, Artificial Sequence
  Description of Artificial Sequence: Synthetic oligonucleotide
  Sense strand starting at position 177 of SEQ ID NO: 1561899
acguuugacucuguagauc

SEQ ID NO: 1706644 - RNA, 19 nt, Artificial Sequence
  Description of Artificial Sequence: Synthetic oligonucleotide
  Antisense strand to SEQ ID NO: 1706643
gaucuacagagucaaacgu

SEQ ID NO: 1706645 - RNA, 19 nt, Artificial Sequence
  Description of Artificial Sequence: Synthetic oligonucleotide
  Sense strand starting at position 267 of SEQ ID NO: 1561899
aaggaaucuagacgagugu

SEQ ID NO: 1706646 - RNA, 19 nt, Artificial Sequence
  Description of Artificial Sequence: Synthetic oligonucleotide
  Antisense strand to SEQ ID NO: 1706645
acacucgucuagauuccuu

SEQ ID NO: 1706647 - RNA, 19 nt, Artificial Sequence
  Description of Artificial Sequence: Synthetic oligonucleotide
  Sense strand starting at position 280 of SEQ ID NO: 1561899
gaguguugcccuuacccuu

SEQ ID NO: 1706648 - RNA, 19 nt, Artificial Sequence
  Description of Artificial Sequence: Synthetic oligonucleotide
  Antisense strand to SEQ ID NO: 1706647
aaggguaagggcaacacuc

SEQ ID NO: 1706649 - RNA, 19 nt, Artificial Sequence
  Description of Artificial Sequence: Synthetic oligonucleotide
  Sense strand starting at position 343 of SEQ ID NO: 1561899
gagacagggucccaggauu

SEQ ID NO: 1706650 - RNA, 19 nt, Artificial Sequence
  Description of Artificial Sequence: Synthetic oligonucleotide
  Antisense strand to SEQ ID NO: 1706649
aauccugggacccugucuc

SEQ ID NO: 1706651 - RNA, 19 nt, Artificial Sequence
  Description of Artificial Sequence: Synthetic oligonucleotide
  Sense strand starting at position 557 of SEQ ID NO: 1561899
ugggcucuccuguaauaag

SEQ ID NO: 1706652 - RNA, 19 nt, Artificial Sequence
  Description of Artificial Sequence: Synthetic oligonucleotide
  Antisense strand to SEQ ID NO: 1706651
cuuauuacaggagagccca

SEQ ID NO: 1706653 - RNA, 19 nt, Artificial Sequence
  Description of Artificial Sequence: Synthetic oligonucleotide
  Sense strand starting at position 667 of SEQ ID NO: 1561899
gacacucccuguuuggaau

SEQ ID NO: 1706654 - RNA, 19 nt, Artificial Sequence
  Description of Artificial Sequence: Synthetic oligonucleotide
  Antisense strand to SEQ ID NO: 1706653
auuccaaacagggaguguc

SEQ ID NO: 1706655 - RNA, 19 nt, Artificial Sequence
  Description of Artificial Sequence: Synthetic oligonucleotide
  Sense strand starting at position 689 of SEQ ID NO: 1561899
ugcguucuucuacacauga

SEQ ID NO: 1706656 - RNA, 19 nt, Artificial Sequence
  Description of Artificial Sequence: Synthetic oligonucleotide
  Antisense strand to SEQ ID NO: 1706655
ucauguguagaagaacgca

SEQ ID NO: 1706657 - RNA, 19 nt, Artificial Sequence
  Description of Artificial Sequence: Synthetic oligonucleotide
  Sense strand starting at position 705 of SEQ ID NO: 1561899
ugaaguucccugugaccua

SEQ ID NO: 1706658 - RNA, 19 nt, Artificial Sequence
  Description of Artificial Sequence: Synthetic oligonucleotide
  Antisense strand to SEQ ID NO: 1706657
uaggucacagggaacuuca

SEQ ID NO: 1706659 - RNA, 19 nt, Artificial Sequence
  Description of Artificial Sequence: Synthetic oligonucleotide
  Sense strand starting at position 856 of SEQ ID NO: 1561899
ccgucuucucugggugaug

SEQ ID NO: 1706660 - RNA, 19 nt, Artificial Sequence
  Description of Artificial Sequence: Synthetic oligonucleotide
  Antisense strand to SEQ ID NO: 1706659
caucacccagagaagacgg

SEQ ID NO: 1706661 - RNA, 19 nt, Artificial Sequence
  Description of Artificial Sequence: Synthetic oligonucleotide
  Sense strand starting at position 857 of SEQ ID NO: 1561899
cgucuucucugggugauga

SEQ ID NO: 1706662 - RNA, 19 nt, Artificial Sequence
  Description of Artificial Sequence: Synthetic oligonucleotide
  Antisense strand to SEQ ID NO: 1706661
ucaucacccagagaagacg

SEQ ID NO: 1706663 - RNA, 19 nt, Artificial Sequence
  Description of Artificial Sequence: Synthetic oligonucleotide
  Sense strand starting at position 858 of SEQ ID NO: 1561899
gucuucucugggugaugaa

SEQ ID NO: 1706664 - RNA, 19 nt, Artificial Sequence
  Description of Artificial Sequence: Synthetic oligonucleotide
  Antisense strand to SEQ ID NO: 1706663
uucaucacccagagaagac

SEQ ID NO: 1706665 - RNA, 19 nt, Artificial Sequence
  Description of Artificial Sequence: Synthetic oligonucleotide
  Sense strand starting at position 1103 of SEQ ID NO: 1561899
gcauuaggacgcgguauuu

SEQ ID NO: 1706666 - RNA, 19 nt, Artificial Sequence
  Description of Artificial Sequence: Synthetic oligonucleotide
  Antisense strand to SEQ ID NO: 1706665
aaauaccgcguccuaaugc

SEQ ID NO: 1706667 - RNA, 19 nt, Artificial Sequence
  Description of Artificial Sequence: Synthetic oligonucleotide
  Sense strand starting at position 1112 of SEQ ID NO: 1561899
cgcgguauuuguucaggau

SEQ ID NO: 1706668 - RNA, 19 nt, Artificial Sequence
  Description of Artificial Sequence: Synthetic oligonucleotide
  Antisense strand to SEQ ID NO: 1706667
auccugaacaaauaccgcg

SEQ ID NO: 1706669 - RNA, 19 nt, Artificial Sequence
  Description of Artificial Sequence: Synthetic oligonucleotide
  Sense strand starting at position 1113 of SEQ ID NO: 1561899
gcgguauuuguucaggauc

SEQ ID NO: 1706670 - RNA, 19 nt, Artificial Sequence
  Description of Artificial Sequence: Synthetic oligonucleotide
  Antisense strand to SEQ ID NO: 1706669
gauccugaacaaauaccgc

SEQ ID NO: 1706671 - RNA, 19 nt, Artificial Sequence
  Description of Artificial Sequence: Synthetic oligonucleotide
  Sense strand starting at position 1145 of SEQ ID NO: 1561899
ucuaauaaguuccagaaag

SEQ ID NO: 1706672 - RNA, 19 nt, Artificial Sequence
  Description of Artificial Sequence: Synthetic oligonucleotide
  Antisense strand to SEQ ID NO: 1706671
cuuucuggaacuuauuaga

SEQ ID NO: 1706673 - RNA, 19 nt, Artificial Sequence
  Description of Artificial Sequence: Synthetic oligonucleotide
  Sense strand starting at position 1169 of SEQ ID NO: 1561899
caggauucgcguguuguga

SEQ ID NO: 1706674 - RNA, 19 nt, Artificial Sequence
  Description of Artificial Sequence: Synthetic oligonucleotide
  Antisense strand to SEQ ID NO: 1706673
ucacaacacgcgaauccug

SEQ ID NO: 1706675 - RNA, 19 nt, Artificial Sequence
  Description of Artificial Sequence: Synthetic oligonucleotide
  Sense strand starting at position 2104 of SEQ ID NO: 1561899
gcccgccguccuuuaaaua

SEQ ID NO: 1706676 - RNA, 19 nt, Artificial Sequence
  Description of Artificial Sequence: Synthetic oligonucleotide
  Antisense strand to SEQ ID NO: 1706675
uauuuaaaggacggcgggc

SEQ ID NO: 1706677 - RNA, 19 nt, Artificial Sequence
  Description of Artificial Sequence: Synthetic oligonucleotide
  Sense strand starting at position 2105 of SEQ ID NO: 1561899
cccgccguccuuuaaauau

SEQ ID NO: 1706678 - RNA, 19 nt, Artificial Sequence
  Description of Artificial Sequence: Synthetic oligonucleotide
  Antisense strand to SEQ ID NO: 1706677
auauuuaaaggacggcggg

SEQ ID NO: 1706679 - RNA, 19 nt, Artificial Sequence
  Description of Artificial Sequence: Synthetic oligonucleotide
  Sense strand starting at position 2660 of SEQ ID NO: 1561899
cguggcagccucuaaauau

SEQ ID NO: 1706680 - RNA, 19 nt, Artificial Sequence
  Description of Artificial Sequence: Synthetic oligonucleotide
  Antisense strand to SEQ ID NO: 1706679
auauuuagaggcugccacg

SEQ ID NO: 1706681 - RNA, 19 nt, Artificial Sequence
  Description of Artificial Sequence: Synthetic oligonucleotide
  Sense strand starting at position 2890 of SEQ ID NO: 1561899
cguauacuccgcgugauua

SEQ ID NO: 1706682 - RNA, 19 nt, Artificial Sequence
  Description of Artificial Sequence: Synthetic oligonucleotide
  Antisense strand to SEQ ID NO: 1706681
uaaucacgcggaguauacg

SEQ ID NO: 1706683 - RNA, 19 nt, Artificial Sequence
  Description of Artificial Sequence: Synthetic oligonucleotide
  Sense strand starting at position 2946 of SEQ ID NO: 1561899
cgucuugaccgugaacauc

SEQ ID NO: 1706684 - RNA, 19 nt, Artificial Sequence
  Description of Artificial Sequence: Synthetic oligonucleotide
  Antisense strand to SEQ ID NO: 1706683
gauguucacggucaagacg

SEQ ID NO: 1706685 - RNA, 19 nt, Artificial Sequence
  Description of Artificial Sequence: Synthetic oligonucleotide
  Sense strand starting at position 2954 of SEQ ID NO: 1561899
ccgugaacaucaucagauc

SEQ ID NO: 1706686 - RNA, 19 nt, Artificial Sequence
  Description of Artificial Sequence: Synthetic oligonucleotide
  Antisense strand to SEQ ID NO: 1706685
gaucugaugauguucacgg

SEQ ID NO: 1706687 - RNA, 19 nt, Artificial Sequence
  Description of Artificial Sequence: Synthetic oligonucleotide
  Sense strand starting at position 3182 of SEQ ID NO: 1561899
uggugacagacacguguaa

SEQ ID NO: 1706688 - RNA, 19 nt, Artificial Sequence
  Description of Artificial Sequence: Synthetic oligonucleotide
  Antisense strand to SEQ ID NO: 1706687
uuacacgugucugucacca

SEQ ID NO: 1706689 - RNA, 19 nt, Artificial Sequence
  Description of Artificial Sequence: Synthetic oligonucleotide
  Sense strand starting at position 3184 of SEQ ID NO: 1561899
gugacagacacguguaauc

SEQ ID NO: 1706690 - RNA, 19 nt, Artificial Sequence
  Description of Artificial Sequence: Synthetic oligonucleotide
  Antisense strand to SEQ ID NO: 1706689
gauuacacgugucugucac

SEQ ID NO: 1706691 - RNA, 19 nt, Artificial Sequence
  Description of Artificial Sequence: Synthetic oligonucleotide
  Sense strand starting at position 3240 of SEQ ID NO: 1561899
gagccugagacgugaagau

SEQ ID NO: 1706692 - RNA, 19 nt, Artificial Sequence
  Description of Artificial Sequence: Synthetic oligonucleotide
  Antisense strand to SEQ ID NO: 1706691
aucuucacgucucaggcuc

SEQ ID NO: 1706693 - RNA, 19 nt, Artificial Sequence
  Description of Artificial Sequence: Synthetic oligonucleotide
  Sense strand starting at position 3256 of SEQ ID NO: 1561899
gauugcagucagcagagau

SEQ ID NO: 1706694 - RNA, 19 nt, Artificial Sequence
  Description of Artificial Sequence: Synthetic oligonucleotide
  Antisense strand to SEQ ID NO: 1706693
aucucugcugacugcaauc

SEQ ID NO: 1706695 - RNA, 19 nt, Artificial Sequence
  Description of Artificial Sequence: Synthetic oligonucleotide
  Sense strand starting at position 3358 of SEQ ID NO: 1561899
gaagauaucagauggcgug

SEQ ID NO: 1706696 - RNA, 19 nt, Artificial Sequence
  Description of Artificial Sequence: Synthetic oligonucleotide
  Antisense strand to SEQ ID NO: 1706695
cacgccaucugauaucuuc

SEQ ID NO: 1706697 - RNA, 19 nt, Artificial Sequence
  Description of Artificial Sequence: Synthetic oligonucleotide
  Sense strand starting at position 3612 of SEQ ID NO: 1561899
augagcugugauuggacua

SEQ ID NO: 1706698 - RNA, 19 nt, Artificial Sequence
  Description of Artificial Sequence: Synthetic oligonucleotide
  Antisense strand to SEQ ID NO: 1706697
uaguccaaucacagcucau

SEQ ID NO: 1706699 - RNA, 19 nt, Artificial Sequence
  Description of Artificial Sequence: Synthetic oligonucleotide
  Sense strand starting at position 3652 of SEQ ID NO: 1561899
agacccuauuucuaaagga

SEQ ID NO: 1706700 - RNA, 19 nt, Artificial Sequence
  Description of Artificial Sequence: Synthetic oligonucleotide
  Antisense strand to SEQ ID NO: 1706699
uccuuuagaaauagggucu

SEQ ID NO: 1706701 - RNA, 19 nt, Artificial Sequence
  Description of Artificial Sequence: Synthetic oligonucleotide
  Sense strand starting at position 3685 of SEQ ID NO: 1561899
uaguaucucgcauggugaa

SEQ ID NO: 1706702 - RNA, 19 nt, Artificial Sequence
  Description of Artificial Sequence: Synthetic oligonucleotide
  Antisense strand to SEQ ID NO: 1706701
uucaccaugcgagauacua

SEQ ID NO: 1706703 - RNA, 19 nt, Artificial Sequence
  Description of Artificial Sequence: Synthetic oligonucleotide
  Sense strand starting at position 3686 of SEQ ID NO: 1561899
aguaucucgcauggugaaa

SEQ ID NO: 1706704 - RNA, 19 nt, Artificial Sequence
  Description of Artificial Sequence: Synthetic oligonucleotide
  Antisense strand to SEQ ID NO: 1706703
uuucaccaugcgagauacu

SEQ ID NO: 1706705 - RNA, 19 nt, Artificial Sequence
  Description of Artificial Sequence: Synthetic oligonucleotide
  Sense strand starting at position 3697 of SEQ ID NO: 1561899
uggugaaaguaaguauuau

SEQ ID NO: 1706706 - RNA, 19 nt, Artificial Sequence
  Description of Artificial Sequence: Synthetic oligonucleotide
  Antisense strand to SEQ ID NO: 1706705
auaauacuuacuuucacca

SEQ ID NO: 1706707 - RNA, 19 nt, Artificial Sequence
  Description of Artificial Sequence: Synthetic oligonucleotide
  Sense strand starting at position 3698 of SEQ ID NO: 1561899
ggugaaaguaaguauuauu

SEQ ID NO: 1706708 - RNA, 19 nt, Artificial Sequence
  Description of Artificial Sequence: Synthetic oligonucleotide
  Antisense strand to SEQ ID NO: 1706707
aauaauacuuacuuucacc

SEQ ID NO: 1706709 - RNA, 19 nt, Artificial Sequence
  Description of Artificial Sequence: Synthetic oligonucleotide
  Sense strand starting at position 3764 of SEQ ID NO: 1561899
ggaccuagaauguguuucu

SEQ ID NO: 1706710 - RNA, 19 nt, Artificial Sequence
  Description of Artificial Sequence: Synthetic oligonucleotide
  Antisense strand to SEQ ID NO: 1706709
agaaacacauucuaggucc

SEQ ID NO: 1706711 - RNA, 19 nt, Artificial Sequence
  Description of Artificial Sequence: Synthetic oligonucleotide
  Sense strand starting at position 3767 of SEQ ID NO: 1561899
ccuagaauguguuucugac

SEQ ID NO: 1706712 - RNA, 19 nt, Artificial Sequence
  Description of Artificial Sequence: Synthetic oligonucleotide
  Antisense strand to SEQ ID NO: 1706711
gucagaaacacauucuagg

SEQ ID NO: 1706713 - RNA, 19 nt, Artificial Sequence
  Description of Artificial Sequence: Synthetic oligonucleotide
  Sense strand starting at position 3769 of SEQ ID NO: 1561899
uagaauguguuucugacua

SEQ ID NO: 1706714 - RNA, 19 nt, Artificial Sequence
  Description of Artificial Sequence: Synthetic oligonucleotide
  Antisense strand to SEQ ID NO: 1706713
uagucagaaacacauucua

SEQ ID NO: 1706715 - RNA, 19 nt, Artificial Sequence
  Description of Artificial Sequence: Synthetic oligonucleotide
  Sense strand starting at position 3773 of SEQ ID NO: 1561899
auguguuucugacuauaau

SEQ ID NO: 1706716 - RNA, 19 nt, Artificial Sequence
  Description of Artificial Sequence: Synthetic oligonucleotide
  Antisense strand to SEQ ID NO: 1706715
auuauagucagaaacacau

SEQ ID NO: 1706717 - RNA, 19 nt, Artificial Sequence
  Description of Artificial Sequence: Synthetic oligonucleotide
  Sense strand starting at position 3774 of SEQ ID NO: 1561899
uguguuucugacuauaaua

SEQ ID NO: 1706718 - RNA, 19 nt, Artificial Sequence
  Description of Artificial Sequence: Synthetic oligonucleotide
  Antisense strand to SEQ ID NO: 1706717
uauuauagucagaaacaca

SEQ ID NO: 1706719 - RNA, 19 nt, Artificial Sequence
  Description of Artificial Sequence: Synthetic oligonucleotide
  Sense strand starting at position 3870 of SEQ ID NO: 1561899
gggagucacgcagagaagu

SEQ ID NO: 1706720 - RNA, 19 nt, Artificial Sequence
  Description of Artificial Sequence: Synthetic oligonucleotide
  Antisense strand to SEQ ID NO: 1706719
acuucucugcgugacuccc

SEQ ID NO: 1706721 - RNA, 19 nt, Artificial Sequence
  Description of Artificial Sequence: Synthetic oligonucleotide
  Sense strand starting at position 5 of SEQ ID NO: 1561900
ggagguugcagugauauug

SEQ ID NO: 1706722 - RNA, 19 nt, Artificial Sequence
  Description of Artificial Sequence: Synthetic oligonucleotide
  Antisense strand to SEQ ID NO: 1706721
caauaucacugcaaccucc

SEQ ID NO: 1706723 - RNA, 19 nt, Artificial Sequence
  Description of Artificial Sequence: Synthetic oligonucleotide
  Sense strand starting at position 121 of SEQ ID NO: 1561900
ggauguuucccugguaagc

SEQ ID NO: 1706724 - RNA, 19 nt, Artificial Sequence
  Description of Artificial Sequence: Synthetic oligonucleotide
  Antisense strand to SEQ ID NO: 1706723
gcuuaccagggaaacaucc

SEQ ID NO: 1706725 - RNA, 19 nt, Artificial Sequence
  Description of Artificial Sequence: Synthetic oligonucleotide
  Sense strand starting at position 170 of SEQ ID NO: 1561900
ccugaacuaguccagguaa

SEQ ID NO: 1706726 - RNA, 19 nt, Artificial Sequence
  Description of Artificial Sequence: Synthetic oligonucleotide
  Antisense strand to SEQ ID NO: 1706725
uuaccuggacuaguucagg

SEQ ID NO: 1706727 - RNA, 19 nt, Artificial Sequence
  Description of Artificial Sequence: Synthetic oligonucleotide
  Sense strand starting at position 172 of SEQ ID NO: 1561900
ugaacuaguccagguaacu

SEQ ID NO: 1706728 - RNA, 19 nt, Artificial Sequence
  Description of Artificial Sequence: Synthetic oligonucleotide
  Antisense strand to SEQ ID NO: 1706727
aguuaccuggacuaguuca

SEQ ID NO: 1706729 - RNA, 19 nt, Artificial Sequence
  Description of Artificial Sequence: Synthetic oligonucleotide
  Sense strand starting at position 335 of SEQ ID NO: 1561900
cggacucuaccugacaguu

SEQ ID NO: 1706730 - RNA, 19 nt, Artificial Sequence
  Description of Artificial Sequence: Synthetic oligonucleotide
  Antisense strand to SEQ ID NO: 1706729
aacugucagguagaguccg

SEQ ID NO: 1706731 - RNA, 19 nt, Artificial Sequence
  Description of Artificial Sequence: Synthetic oligonucleotide
  Sense strand starting at position 663 of SEQ ID NO: 1561900
aucccagcuugacugauua

SEQ ID NO: 1706732 - RNA, 19 nt, Artificial Sequence
  Description of Artificial Sequence: Synthetic oligonucleotide
  Antisense strand to SEQ ID NO: 1706731
uaaucagucaagcugggau

SEQ ID NO: 1706733 - RNA, 19 nt, Artificial Sequence
  Description of Artificial Sequence: Synthetic oligonucleotide
  Sense strand starting at position 752 of SEQ ID NO: 1561900
aauguaugaugggugaaau

SEQ ID NO: 1706734 - RNA, 19 nt, Artificial Sequence
  Description of Artificial Sequence: Synthetic oligonucleotide
  Antisense strand to SEQ ID NO: 1706733
auuucacccaucauacauu

SEQ ID NO: 1706735 - RNA, 19 nt, Artificial Sequence
  Description of Artificial Sequence: Synthetic oligonucleotide
  Sense strand starting at position 753 of SEQ ID NO: 1561900
auguaugaugggugaaaug

SEQ ID NO: 1706736 - RNA, 19 nt, Artificial Sequence
  Description of Artificial Sequence: Synthetic oligonucleotide
  Antisense strand to SEQ ID NO: 1706735
cauuucacccaucauacau

SEQ ID NO: 1706737 - RNA, 19 nt, Artificial Sequence
  Description of Artificial Sequence: Synthetic oligonucleotide
  Sense strand starting at position 762 of SEQ ID NO: 1561900
gggugaaaugccugguauu

SEQ ID NO: 1706738 - RNA, 19 nt, Artificial Sequence
  Description of Artificial Sequence: Synthetic oligonucleotide
  Antisense strand to SEQ ID NO: 1706737
aauaccaggcauuucaccc

SEQ ID NO: 1706739 - RNA, 19 nt, Artificial Sequence
  Description of Artificial Sequence: Synthetic oligonucleotide
  Sense strand starting at position 763 of SEQ ID NO: 1561900
ggugaaaugccugguauuc

SEQ ID NO: 1706740 - RNA, 19 nt, Artificial Sequence
  Description of Artificial Sequence: Synthetic oligonucleotide
  Antisense strand to SEQ ID NO: 1706739
gaauaccaggcauuucacc

SEQ ID NO: 1706741 - RNA, 19 nt, Artificial Sequence
  Description of Artificial Sequence: Synthetic oligonucleotide
  Sense strand starting at position 1057 of SEQ ID NO: 1561900
uagguuucccaggagcaca

SEQ ID NO: 1706742 - RNA, 19 nt, Artificial Sequence
  Description of Artificial Sequence: Synthetic oligonucleotide
  Antisense strand to SEQ ID NO: 1706741
ugugcuccugggaaaccua

SEQ ID NO: 1706743 - RNA, 19 nt, Artificial Sequence
  Description of Artificial Sequence: Synthetic oligonucleotide
  Sense strand starting at position 1124 of SEQ ID NO: 1561900
ggcaaaugccugugggaau

SEQ ID NO: 1706744 - RNA, 19 nt, Artificial Sequence
  Description of Artificial Sequence: Synthetic oligonucleotide
  Antisense strand to SEQ ID NO: 1706743
auucccacaggcauuugcc

SEQ ID NO: 1706745 - RNA, 19 nt, Artificial Sequence
  Description of Artificial Sequence: Synthetic oligonucleotide
  Sense strand starting at position 1143 of SEQ ID NO: 1561900
gcuaguuaugggcaaugca

SEQ ID NO: 1706746 - RNA, 19 nt, Artificial Sequence
  Description of Artificial Sequence: Synthetic oligonucleotide
  Antisense strand to SEQ ID NO: 1706745
ugcauugcccauaacuagc

SEQ ID NO: 1706747 - RNA, 19 nt, Artificial Sequence
  Description of Artificial Sequence: Synthetic oligonucleotide
  Sense strand starting at position 1272 of SEQ ID NO: 1561900
agaacuucuugguugggau

SEQ ID NO: 1706748 - RNA, 19 nt, Artificial Sequence
  Description of Artificial Sequence: Synthetic oligonucleotide
  Antisense strand to SEQ ID NO: 1706747
aucccaaccaagaaguucu

SEQ ID NO: 1706749 - RNA, 19 nt, Artificial Sequence
  Description of Artificial Sequence: Synthetic oligonucleotide
  Sense strand starting at position 1356 of SEQ ID NO: 1561900
agcuacuggcucugaugaa

SEQ ID NO: 1706750 - RNA, 19 nt, Artificial Sequence
  Description of Artificial Sequence: Synthetic oligonucleotide
  Antisense strand to SEQ ID NO: 1706749
uucaucagagccaguagcu

SEQ ID NO: 1706751 - RNA, 19 nt, Artificial Sequence
  Description of Artificial Sequence: Synthetic oligonucleotide
  Sense strand starting at position 1687 of SEQ ID NO: 1561900
gggcgaagcauccaugaca

SEQ ID NO: 1706752 - RNA, 19 nt, Artificial Sequence
  Description of Artificial Sequence: Synthetic oligonucleotide
  Antisense strand to SEQ ID NO: 1706751
ugucauggaugcuucgccc

SEQ ID NO: 1706753 - RNA, 19 nt, Artificial Sequence
  Description of Artificial Sequence: Synthetic oligonucleotide
  Sense strand starting at position 1690 of SEQ ID NO: 1561900
cgaagcauccaugacauca

SEQ ID NO: 1706754 - RNA, 19 nt, Artificial Sequence
  Description of Artificial Sequence: Synthetic oligonucleotide
  Antisense strand to SEQ ID NO: 1706753
ugaugucauggaugcuucg

SEQ ID NO: 1706755 - RNA, 19 nt, Artificial Sequence
  Description of Artificial Sequence: Synthetic oligonucleotide
  Sense strand starting at position 2234 of SEQ ID NO: 1561900
gucguuccucugcaacaaa

SEQ ID NO: 1706756 - RNA, 19 nt, Artificial Sequence
  Description of Artificial Sequence: Synthetic oligonucleotide
  Antisense strand to SEQ ID NO: 1706755
uuuguugcagaggaacgac

SEQ ID NO: 1706757 - RNA, 19 nt, Artificial Sequence
  Description of Artificial Sequence: Synthetic oligonucleotide
  Sense strand starting at position 2551 of SEQ ID NO: 1561900
cggagacgauuugaaacuu

SEQ ID NO: 1706758 - RNA, 19 nt, Artificial Sequence
  Description of Artificial Sequence: Synthetic oligonucleotide
  Antisense strand to SEQ ID NO: 1706757
aaguuucaaaucgucuccg

SEQ ID NO: 1706759 - RNA, 19 nt, Artificial Sequence
  Description of Artificial Sequence: Synthetic oligonucleotide
  Sense strand starting at position 2831 of SEQ ID NO: 1561900
gggagucggccuugaauug

SEQ ID NO: 1706760 - RNA, 19 nt, Artificial Sequence
  Description of Artificial Sequence: Synthetic oligonucleotide
  Antisense strand to SEQ ID NO: 1706759
caauucaaggccgacuccc

SEQ ID NO: 1706761 - RNA, 19 nt, Artificial Sequence
  Description of Artificial Sequence: Synthetic oligonucleotide
  Sense strand starting at position 2832 of SEQ ID NO: 1561900
ggagucggccuugaauuga

SEQ ID NO: 1706762 - RNA, 19 nt, Artificial Sequence
  Description of Artificial Sequence: Synthetic oligonucleotide
  Antisense strand to SEQ ID NO: 1706761
ucaauucaaggccgacucc

SEQ ID NO: 1706763 - RNA, 19 nt, Artificial Sequence
  Description of Artificial Sequence: Synthetic oligonucleotide
  Sense strand starting at position 2880 of SEQ ID NO: 1561900
aagccuagccgagaguuua

SEQ ID NO: 1706764 - RNA, 19 nt, Artificial Sequence
  Description of Artificial Sequence: Synthetic oligonucleotide
  Antisense strand to SEQ ID NO: 1706763
uaaacucucggcuaggcuu

SEQ ID NO: 1706765 - RNA, 19 nt, Artificial Sequence
  Description of Artificial Sequence: Synthetic oligonucleotide
  Sense strand starting at position 2891 of SEQ ID NO: 1561900
agaguuuagcacuagcaaa

SEQ ID NO: 1706766 - RNA, 19 nt, Artificial Sequence
  Description of Artificial Sequence: Synthetic oligonucleotide
  Antisense strand to SEQ ID NO: 1706765
uuugcuagugcuaaacucu

SEQ ID NO: 1706767 - RNA, 19 nt, Artificial Sequence
  Description of Artificial Sequence: Synthetic oligonucleotide
  Sense strand starting at position 2923 of SEQ ID NO: 1561900
cagggucugcccuaagaac

SEQ ID NO: 1706768 - RNA, 19 nt, Artificial Sequence
  Description of Artificial Sequence: Synthetic oligonucleotide
  Antisense strand to SEQ ID NO: 1706767
guucuuagggcagacccug

SEQ ID NO: 1706769 - RNA, 19 nt, Artificial Sequence
  Description of Artificial Sequence: Synthetic oligonucleotide
  Sense strand starting at position 2952 of SEQ ID NO: 1561900
cugcucuggcugggauuua

SEQ ID NO: 1706770 - RNA, 19 nt, Artificial Sequence
  Description of Artificial Sequence: Synthetic oligonucleotide
  Antisense strand to SEQ ID NO: 1706769
uaaaucccagccagagcag

SEQ ID NO: 1706771 - RNA, 19 nt, Artificial Sequence
  Description of Artificial Sequence: Synthetic oligonucleotide
  Sense strand starting at position 2965 of SEQ ID NO: 1561900
gauuuaacgcauuacgucu

SEQ ID NO: 1706772 - RNA, 19 nt, Artificial Sequence
  Description of Artificial Sequence: Synthetic oligonucleotide
  Antisense strand to SEQ ID NO: 1706771
agacguaaugcguuaaauc

SEQ ID NO: 1706773 - RNA, 19 nt, Artificial Sequence
  Description of Artificial Sequence: Synthetic oligonucleotide
  Sense strand starting at position 2988 of SEQ ID NO: 1561900
uguuuauagguguuguguu

SEQ ID NO: 1706774 - RNA, 19 nt, Artificial Sequence
  Description of Artificial Sequence: Synthetic oligonucleotide
  Antisense strand to SEQ ID NO: 1706773
aacacaacaccuauaaaca

SEQ ID NO: 1706775 - RNA, 19 nt, Artificial Sequence
  Description of Artificial Sequence: Synthetic oligonucleotide
  Sense strand starting at position 3123 of SEQ ID NO: 1561900
cgcggcugccuuuagauuu

SEQ ID NO: 1706776 - RNA, 19 nt, Artificial Sequence
  Description of Artificial Sequence: Synthetic oligonucleotide
  Antisense strand to SEQ ID NO: 1706775
aaaucuaaaggcagccgcg

SEQ ID NO: 1706777 - RNA, 19 nt, Artificial Sequence
  Description of Artificial Sequence: Synthetic oligonucleotide
  Sense strand starting at position 3173 of SEQ ID NO: 1561900
uaguaaagucagugacaaa

SEQ ID NO: 1706778 - RNA, 19 nt, Artificial Sequence
  Description of Artificial Sequence: Synthetic oligonucleotide
  Antisense strand to SEQ ID NO: 1706777
uuugucacugacuuuacua

SEQ ID NO: 1706779 - RNA, 19 nt, Artificial Sequence
  Description of Artificial Sequence: Synthetic oligonucleotide
  Sense strand starting at position 3360 of SEQ ID NO: 1561900
ugccaacucuguuuaauug

SEQ ID NO: 1706780 - RNA, 19 nt, Artificial Sequence
  Description of Artificial Sequence: Synthetic oligonucleotide
  Antisense strand to SEQ ID NO: 1706779
caauuaaacagaguuggca

SEQ ID NO: 1706781 - RNA, 19 nt, Artificial Sequence
  Description of Artificial Sequence: Synthetic oligonucleotide
  Sense strand starting at position 3442 of SEQ ID NO: 1561900
ucacaugacuggugauuuc

SEQ ID NO: 1706782 - RNA, 19 nt, Artificial Sequence
  Description of Artificial Sequence: Synthetic oligonucleotide
  Antisense strand to SEQ ID NO: 1706781
gaaaucaccagucauguga

SEQ ID NO: 1706783 - RNA, 19 nt, Artificial Sequence
  Description of Artificial Sequence: Synthetic oligonucleotide
  Sense strand starting at position 3463 of SEQ ID NO: 1561900
ggaggacucuggaauguug

SEQ ID NO: 1706784 - RNA, 19 nt, Artificial Sequence
  Description of Artificial Sequence: Synthetic oligonucleotide
  Antisense strand to SEQ ID NO: 1706783
caacauuccagaguccucc

SEQ ID NO: 1706785 - RNA, 19 nt, Artificial Sequence
  Description of Artificial Sequence: Synthetic oligonucleotide
  Sense strand starting at position 3465 of SEQ ID NO: 1561900
aggacucuggaauguugua

SEQ ID NO: 1706786 - RNA, 19 nt, Artificial Sequence
  Description of Artificial Sequence: Synthetic oligonucleotide
  Antisense strand to SEQ ID NO: 1706785
uacaacauuccagaguccu

SEQ ID NO: 1706787 - RNA, 19 nt, Artificial Sequence
  Description of Artificial Sequence: Synthetic oligonucleotide
  Sense strand starting at position 3490 of SEQ ID NO: 1561900
aagccuuugccuuagguga

SEQ ID NO: 1706788 - RNA, 19 nt, Artificial Sequence
  Description of Artificial Sequence: Synthetic oligonucleotide
  Antisense strand to SEQ ID NO: 1706787
ucaccuaaggcaaaggcuu

SEQ ID NO: 1706789 - RNA, 19 nt, Artificial Sequence
  Description of Artificial Sequence: Synthetic oligonucleotide
  Sense strand starting at position 3494 of SEQ ID NO: 1561900
cuuugccuuaggugagaau

SEQ ID NO: 1706790 - RNA, 19 nt, Artificial Sequence
  Description of Artificial Sequence: Synthetic oligonucleotide
  Antisense strand to SEQ ID NO: 1706789
auucucaccuaaggcaaag

SEQ ID NO: 1706791 - RNA, 19 nt, Artificial Sequence
  Description of Artificial Sequence: Synthetic oligonucleotide
  Sense strand starting at position 3503 of SEQ ID NO: 1561900
aggugagaaugccuuuaua

SEQ ID NO: 1706792 - RNA, 19 nt, Artificial Sequence
  Description of Artificial Sequence: Synthetic oligonucleotide
  Antisense strand to SEQ ID NO: 1706791
uauaaaggcauucucaccu

SEQ ID NO: 1706793 - RNA, 19 nt, Artificial Sequence
  Description of Artificial Sequence: Synthetic oligonucleotide
  Sense strand starting at position 3537 of SEQ ID NO: 1561900
uaggauucuugagucucaa

SEQ ID NO: 1706794 - RNA, 19 nt, Artificial Sequence
  Description of Artificial Sequence: Synthetic oligonucleotide
  Antisense strand to SEQ ID NO: 1706793
uugagacucaagaauccua

SEQ ID NO: 1706795 - RNA, 19 nt, Artificial Sequence
  Description of Artificial Sequence: Synthetic oligonucleotide
  Sense strand starting at position 3616 of SEQ ID NO: 1561900
cuggguuugucuguuuaag

SEQ ID NO: 1706796 - RNA, 19 nt, Artificial Sequence
  Description of Artificial Sequence: Synthetic oligonucleotide
  Antisense strand to SEQ ID NO: 1706795
cuuaaacagacaaacccag

SEQ ID NO: 1706797 - RNA, 19 nt, Artificial Sequence
  Description of Artificial Sequence: Synthetic oligonucleotide
  Sense strand starting at position 3749 of SEQ ID NO: 1561900
ucuucuuuguagcuuagaa

SEQ ID NO: 1706798 - RNA, 19 nt, Artificial Sequence
  Description of Artificial Sequence: Synthetic oligonucleotide
  Antisense strand to SEQ ID NO: 1706797
uucuaagcuacaaagaaga

SEQ ID NO: 1706799 - RNA, 19 nt, Artificial Sequence
  Description of Artificial Sequence: Synthetic oligonucleotide
  Sense strand starting at position 3838 of SEQ ID NO: 1561900
uuggaucaccaaugucaaa

SEQ ID NO: 1706800 - RNA, 19 nt, Artificial Sequence
  Description of Artificial Sequence: Synthetic oligonucleotide
  Antisense strand to SEQ ID NO: 1706799
uuugacauuggugauccaa

SEQ ID NO: 1706801 - RNA, 19 nt, Artificial Sequence
  Description of Artificial Sequence: Synthetic oligonucleotide
  Sense strand starting at position 4 of SEQ ID NO: 1561901
gguggagucacaugucaag

SEQ ID NO: 1706802 - RNA, 19 nt, Artificial Sequence
  Description of Artificial Sequence: Synthetic oligonucleotide
  Antisense strand to SEQ ID NO: 1706801
cuugacaugugacuccacc

SEQ ID NO: 1706803 - RNA, 19 nt, Artificial Sequence
  Description of Artificial Sequence: Synthetic oligonucleotide
  Sense strand starting at position 48 of SEQ ID NO: 1561901
agcagauugcuacacucua

SEQ ID NO: 1706804 - RNA, 19 nt, Artificial Sequence
  Description of Artificial Sequence: Synthetic oligonucleotide
  Antisense strand to SEQ ID NO: 1706803
uagaguguagcaaucugcu

SEQ ID NO: 1706805 - RNA, 19 nt, Artificial Sequence
  Description of Artificial Sequence: Synthetic oligonucleotide
  Sense strand starting at position 69 of SEQ ID NO: 1561901
gagucucuucuauggaaau

SEQ ID NO: 1706806 - RNA, 19 nt, Artificial Sequence
  Description of Artificial Sequence: Synthetic oligonucleotide
  Antisense strand to SEQ ID NO: 1706805
auuuccauagaagagacuc

SEQ ID NO: 1706807 - RNA, 19 nt, Artificial Sequence
  Description of Artificial Sequence: Synthetic oligonucleotide
  Sense strand starting at position 184 of SEQ ID NO: 1561901
ggagcagugaaaugaauua

SEQ ID NO: 1706808 - RNA, 19 nt, Artificial Sequence
  Description of Artificial Sequence: Synthetic oligonucleotide
  Antisense strand to SEQ ID NO: 1706807
uaauucauuucacugcucc

SEQ ID NO: 1706809 - RNA, 19 nt, Artificial Sequence
  Description of Artificial Sequence: Synthetic oligonucleotide
  Sense strand starting at position 264 of SEQ ID NO: 1561901
acaggauaauacuaaugau

SEQ ID NO: 1706810 - RNA, 19 nt, Artificial Sequence
  Description of Artificial Sequence: Synthetic oligonucleotide
  Antisense strand to SEQ ID NO: 1706809
aucauuaguauuauccugu

SEQ ID NO: 1706811 - RNA, 19 nt, Artificial Sequence
  Description of Artificial Sequence: Synthetic oligonucleotide
  Sense strand starting at position 312 of SEQ ID NO: 1561901
ucaguuguauauccaguga

SEQ ID NO: 1706812 - RNA, 19 nt, Artificial Sequence
  Description of Artificial Sequence: Synthetic oligonucleotide
  Antisense strand to SEQ ID NO: 1706811
ucacuggauauacaacuga

SEQ ID NO: 1706813 - RNA, 19 nt, Artificial Sequence
  Description of Artificial Sequence: Synthetic oligonucleotide
  Sense strand starting at position 316 of SEQ ID NO: 1561901
uuguauauccagugaucuc

SEQ ID NO: 1706814 - RNA, 19 nt, Artificial Sequence
  Description of Artificial Sequence: Synthetic oligonucleotide
  Antisense strand to SEQ ID NO: 1706813
gagaucacuggauauacaa

SEQ ID NO: 1706815 - RNA, 19 nt, Artificial Sequence
  Description of Artificial Sequence: Synthetic oligonucleotide
  Sense strand starting at position 323 of SEQ ID NO: 1561901
uccagugaucucuaguaua

SEQ ID NO: 1706816 - RNA, 19 nt, Artificial Sequence
  Description of Artificial Sequence: Synthetic oligonucleotide
  Antisense strand to SEQ ID NO: 1706815
uauacuagagaucacugga

SEQ ID NO: 1706817 - RNA, 19 nt, Artificial Sequence
  Description of Artificial Sequence: Synthetic oligonucleotide
  Sense strand starting at position 385 of SEQ ID NO: 1561901
ugucaaauguaagcaauaa

SEQ ID NO: 1706818 - RNA, 19 nt, Artificial Sequence
  Description of Artificial Sequence: Synthetic oligonucleotide
  Antisense strand to SEQ ID NO: 1706817
uuauugcuuacauuugaca

SEQ ID NO: 1706819 - RNA, 19 nt, Artificial Sequence
  Description of Artificial Sequence: Synthetic oligonucleotide
  Sense strand starting at position 403 of SEQ ID NO: 1561901
auuaucucugagcaguaaa

SEQ ID NO: 1706820 - RNA, 19 nt, Artificial Sequence
  Description of Artificial Sequence: Synthetic oligonucleotide
  Antisense strand to SEQ ID NO: 1706819
uuuacugcucagagauaau

SEQ ID NO: 1706821 - RNA, 19 nt, Artificial Sequence
  Description of Artificial Sequence: Synthetic oligonucleotide
  Sense strand starting at position 415 of SEQ ID NO: 1561901
caguaaauuuaugacgaau

SEQ ID NO: 1706822 - RNA, 19 nt, Artificial Sequence
  Description of Artificial Sequence: Synthetic oligonucleotide
  Antisense strand to SEQ ID NO: 1706821
auucgucauaaauuuacug

SEQ ID NO: 1706823 - RNA, 19 nt, Artificial Sequence
  Description of Artificial Sequence: Synthetic oligonucleotide
  Sense strand starting at position 482 of SEQ ID NO: 1561901
cgcguuggcaaugcuuaua

SEQ ID NO: 1706824 - RNA, 19 nt, Artificial Sequence
  Description of Artificial Sequence: Synthetic oligonucleotide
  Antisense strand to SEQ ID NO: 1706823
uauaagcauugccaacgcg

SEQ ID NO: 1706825 - RNA, 19 nt, Artificial Sequence
  Description of Artificial Sequence: Synthetic oligonucleotide
  Sense strand starting at position 1265 of SEQ ID NO: 1561901
agugauaagcauuaaaucu

SEQ ID NO: 1706826 - RNA, 19 nt, Artificial Sequence
  Description of Artificial Sequence: Synthetic oligonucleotide
  Antisense strand to SEQ ID NO: 1706825
agauuuaaugcuuaucacu

SEQ ID NO: 1706827 - RNA, 19 nt, Artificial Sequence
  Description of Artificial Sequence: Synthetic oligonucleotide
  Sense strand starting at position 1300 of SEQ ID NO: 1561901
ggcuguaggccagagauuc

SEQ ID NO: 1706828 - RNA, 19 nt, Artificial Sequence
  Description of Artificial Sequence: Synthetic oligonucleotide
  Antisense strand to SEQ ID NO: 1706827
gaaucucuggccuacagcc

SEQ ID NO: 1706829 - RNA, 19 nt, Artificial Sequence
  Description of Artificial Sequence: Synthetic oligonucleotide
  Sense strand starting at position 1357 of SEQ ID NO: 1561901
uuaagaaaggcuuauaugu

SEQ ID NO: 1706830 - RNA, 19 nt, Artificial Sequence
  Description of Artificial Sequence: Synthetic oligonucleotide
  Antisense strand to SEQ ID NO: 1706829
acauauaagccuuucuuaa

SEQ ID NO: 1706831 - RNA, 19 nt, Artificial Sequence
  Description of Artificial Sequence: Synthetic oligonucleotide
  Sense strand starting at position 1364 of SEQ ID NO: 1561901
aggcuuauaugucucgaua

SEQ ID NO: 1706832 - RNA, 19 nt, Artificial Sequence
  Description of Artificial Sequence: Synthetic oligonucleotide
  Antisense strand to SEQ ID NO: 1706831
uaucgagacauauaagccu

SEQ ID NO: 1706833 - RNA, 19 nt, Artificial Sequence
  Description of Artificial Sequence: Synthetic oligonucleotide
  Sense strand starting at position 1367 of SEQ ID NO: 1561901
cuuauaugucucgauacaa

SEQ ID NO: 1706834 - RNA, 19 nt, Artificial Sequence
  Description of Artificial Sequence: Synthetic oligonucleotide
  Antisense strand to SEQ ID NO: 1706833
uuguaucgagacauauaag

SEQ ID NO: 1706835 - RNA, 19 nt, Artificial Sequence
  Description of Artificial Sequence: Synthetic oligonucleotide
  Sense strand starting at position 1601 of SEQ ID NO: 1561901
ucuccuuugggaugucauu

SEQ ID NO: 1706836 - RNA, 19 nt, Artificial Sequence
  Description of Artificial Sequence: Synthetic oligonucleotide
  Antisense strand to SEQ ID NO: 1706835
aaugacaucccaaaggaga

SEQ ID NO: 1706837 - RNA, 19 nt, Artificial Sequence
  Description of Artificial Sequence: Synthetic oligonucleotide
  Sense strand starting at position 1799 of SEQ ID NO: 1561901
accuuauaagagugagcaa

SEQ ID NO: 1706838 - RNA, 19 nt, Artificial Sequence
  Description of Artificial Sequence: Synthetic oligonucleotide
  Antisense strand to SEQ ID NO: 1706837
uugcucacucuuauaaggu

SEQ ID NO: 1706839 - RNA, 19 nt, Artificial Sequence
  Description of Artificial Sequence: Synthetic oligonucleotide
  Sense strand starting at position 2003 of SEQ ID NO: 1561901
gcauaucugguauggauaa

SEQ ID NO: 1706840 - RNA, 19 nt, Artificial Sequence
  Description of Artificial Sequence: Synthetic oligonucleotide
  Antisense strand to SEQ ID NO: 1706839
uuauccauaccagauaugc

SEQ ID NO: 1706841 - RNA, 19 nt, Artificial Sequence
  Description of Artificial Sequence: Synthetic oligonucleotide
  Sense strand starting at position 2135 of SEQ ID NO: 1561901
cucaguccuggccaacaau

SEQ ID NO: 1706842 - RNA, 19 nt, Artificial Sequence
  Description of Artificial Sequence: Synthetic oligonucleotide
  Antisense strand to SEQ ID NO: 1706841
auuguuggccaggacugag

SEQ ID NO: 1706843 - RNA, 19 nt, Artificial Sequence
  Description of Artificial Sequence: Synthetic oligonucleotide
  Sense strand starting at position 2237 of SEQ ID NO: 1561901
uggcuuacuacugauugga

SEQ ID NO: 1706844 - RNA, 19 nt, Artificial Sequence
  Description of Artificial Sequence: Synthetic oligonucleotide
  Antisense strand to SEQ ID NO: 1706843
uccaaucaguaguaagcca

SEQ ID NO: 1706845 - RNA, 19 nt, Artificial Sequence
  Description of Artificial Sequence: Synthetic oligonucleotide
  Sense strand starting at position 2239 of SEQ ID NO: 1561901
gcuuacuacugauuggacu

SEQ ID NO: 1706846 - RNA, 19 nt, Artificial Sequence
  Description of Artificial Sequence: Synthetic oligonucleotide
  Antisense strand to SEQ ID NO: 1706845
aguccaaucaguaguaagc

SEQ ID NO: 1706847 - RNA, 19 nt, Artificial Sequence
  Description of Artificial Sequence: Synthetic oligonucleotide
  Sense strand starting at position 2240 of SEQ ID NO: 1561901
cuuacuacugauuggacua

SEQ ID NO: 1706848 - RNA, 19 nt, Artificial Sequence
  Description of Artificial Sequence: Synthetic oligonucleotide
  Antisense strand to SEQ ID NO: 1706847
uaguccaaucaguaguaag

SEQ ID NO: 1706849 - RNA, 19 nt, Artificial Sequence
  Description of Artificial Sequence: Synthetic oligonucleotide
  Sense strand starting at position 2270 of SEQ ID NO: 1561901
uuagaaugcagacguuaac

SEQ ID NO: 1706850 - RNA, 19 nt, Artificial Sequence
  Description of Artificial Sequence: Synthetic oligonucleotide
  Antisense strand to SEQ ID NO: 1706849
guuaacgucugcauucuaa

SEQ ID NO: 1706851 - RNA, 19 nt, Artificial Sequence
  Description of Artificial Sequence: Synthetic oligonucleotide
  Sense strand starting at position 2299 of SEQ ID NO: 1561901
uuguccaguagagauguaa

SEQ ID NO: 1706852 - RNA, 19 nt, Artificial Sequence
  Description of Artificial Sequence: Synthetic oligonucleotide
  Antisense strand to SEQ ID NO: 1706851
uuacaucucuacuggacaa

SEQ ID NO: 1706853 - RNA, 19 nt, Artificial Sequence
  Description of Artificial Sequence: Synthetic oligonucleotide
  Sense strand starting at position 2339 of SEQ ID NO: 1561901
guauaaucccaaggauuau

SEQ ID NO: 1706854 - RNA, 19 nt, Artificial Sequence
  Description of Artificial Sequence: Synthetic oligonucleotide
  Antisense strand to SEQ ID NO: 1706853
auaauccuugggauuauac

SEQ ID NO: 1706855 - RNA, 19 nt, Artificial Sequence
  Description of Artificial Sequence: Synthetic oligonucleotide
  Sense strand starting at position 2355 of SEQ ID NO: 1561901
uaugguuuaugguccucua

SEQ ID NO: 1706856 - RNA, 19 nt, Artificial Sequence
  Description of Artificial Sequence: Synthetic oligonucleotide
  Antisense strand to SEQ ID NO: 1706855
uagaggaccauaaaccaua

SEQ ID NO: 1706857 - RNA, 19 nt, Artificial Sequence
  Description of Artificial Sequence: Synthetic oligonucleotide
  Sense strand starting at position 2358 of SEQ ID NO: 1561901
gguuuaugguccucuaaga

SEQ ID NO: 1706858 - RNA, 19 nt, Artificial Sequence
  Description of Artificial Sequence: Synthetic oligonucleotide
  Antisense strand to SEQ ID NO: 1706857
ucuuagaggaccauaaacc

SEQ ID NO: 1706859 - RNA, 19 nt, Artificial Sequence
  Description of Artificial Sequence: Synthetic oligonucleotide
  Sense strand starting at position 2391 of SEQ ID NO: 1561901
guaucuaagccagaaaucu

SEQ ID NO: 1706860 - RNA, 19 nt, Artificial Sequence
  Description of Artificial Sequence: Synthetic oligonucleotide
  Antisense strand to SEQ ID NO: 1706859
agauuucuggcuuagauac

SEQ ID NO: 1706861 - RNA, 19 nt, Artificial Sequence
  Description of Artificial Sequence: Synthetic oligonucleotide
  Sense strand starting at position 2412 of SEQ ID NO: 1561901
uucuaacaucucggguaaa

SEQ ID NO: 1706862 - RNA, 19 nt, Artificial Sequence
  Description of Artificial Sequence: Synthetic oligonucleotide
  Antisense strand to SEQ ID NO: 1706861
uuuacccgagauguuagaa

SEQ ID NO: 1706863 - RNA, 19 nt, Artificial Sequence
  Description of Artificial Sequence: Synthetic oligonucleotide
  Sense strand starting at position 2519 of SEQ ID NO: 1561901
gcauuuguuguauguucuu

SEQ ID NO: 1706864 - RNA, 19 nt, Artificial Sequence
  Description of Artificial Sequence: Synthetic oligonucleotide
  Antisense strand to SEQ ID NO: 1706863
aagaacauacaacaaaugc

SEQ ID NO: 1706865 - RNA, 19 nt, Artificial Sequence
  Description of Artificial Sequence: Synthetic oligonucleotide
  Sense strand starting at position 2660 of SEQ ID NO: 1561901
uagguaaacaugugcgaug

SEQ ID NO: 1706866 - RNA, 19 nt, Artificial Sequence
  Description of Artificial Sequence: Synthetic oligonucleotide
  Antisense strand to SEQ ID NO: 1706865
caucgcacauguuuaccua

SEQ ID NO: 1706867 - RNA, 19 nt, Artificial Sequence
  Description of Artificial Sequence: Synthetic oligonucleotide
  Sense strand starting at position 2662 of SEQ ID NO: 1561901
gguaaacaugugcgaugau

SEQ ID NO: 1706868 - RNA, 19 nt, Artificial Sequence
  Description of Artificial Sequence: Synthetic oligonucleotide
  Antisense strand to SEQ ID NO: 1706867
aucaucgcacauguuuacc

SEQ ID NO: 1706869 - RNA, 19 nt, Artificial Sequence
  Description of Artificial Sequence: Synthetic oligonucleotide
  Sense strand starting at position 2665 of SEQ ID NO: 1561901
aaacaugugcgaugauggu

SEQ ID NO: 1706870 - RNA, 19 nt, Artificial Sequence
  Description of Artificial Sequence: Synthetic oligonucleotide
  Antisense strand to SEQ ID NO: 1706869
accaucaucgcacauguuu

SEQ ID NO: 1706871 - RNA, 19 nt, Artificial Sequence
  Description of Artificial Sequence: Synthetic oligonucleotide
  Sense strand starting at position 2721 of SEQ ID NO: 1561901
cuauuaaacucggcaucca

SEQ ID NO: 1706872 - RNA, 19 nt, Artificial Sequence
  Description of Artificial Sequence: Synthetic oligonucleotide
  Antisense strand to SEQ ID NO: 1706871
uggaugccgaguuuaauag

SEQ ID NO: 1706873 - RNA, 19 nt, Artificial Sequence
  Description of Artificial Sequence: Synthetic oligonucleotide
  Sense strand starting at position 2890 of SEQ ID NO: 1561901
guuuguugaagauaacagu

SEQ ID NO: 1706874 - RNA, 19 nt, Artificial Sequence
  Description of Artificial Sequence: Synthetic oligonucleotide
  Antisense strand to SEQ ID NO: 1706873
acuguuaucuucaacaaac

SEQ ID NO: 1706875 - RNA, 19 nt, Artificial Sequence
  Description of Artificial Sequence: Synthetic oligonucleotide
  Sense strand starting at position 3149 of SEQ ID NO: 1561901
gccaaaugguauuucugca

SEQ ID NO: 1706876 - RNA, 19 nt, Artificial Sequence
  Description of Artificial Sequence: Synthetic oligonucleotide
  Antisense strand to SEQ ID NO: 1706875
ugcagaaauaccauuuggc

SEQ ID NO: 1706877 - RNA, 19 nt, Artificial Sequence
  Description of Artificial Sequence: Synthetic oligonucleotide
  Sense strand starting at position 3234 of SEQ ID NO: 1561901
aguguaacagcguuccuuu

SEQ ID NO: 1706878 - RNA, 19 nt, Artificial Sequence
  Description of Artificial Sequence: Synthetic oligonucleotide
  Antisense strand to SEQ ID NO: 1706877
aaaggaacgcuguuacacu

SEQ ID NO: 1706879 - RNA, 19 nt, Artificial Sequence
  Description of Artificial Sequence: Synthetic oligonucleotide
  Sense strand starting at position 3300 of SEQ ID NO: 1561901
ugaccauucugacuggcau

SEQ ID NO: 1706880 - RNA, 19 nt, Artificial Sequence
  Description of Artificial Sequence: Synthetic oligonucleotide
  Antisense strand to SEQ ID NO: 1706879
augccagucagaaugguca

SEQ ID NO: 1706881 - RNA, 19 nt, Artificial Sequence
  Description of Artificial Sequence: Synthetic oligonucleotide
  Sense strand starting at position 151 of SEQ ID NO: 1561902
caaggcaaauccuuguuga

SEQ ID NO: 1706882 - RNA, 19 nt, Artificial Sequence
  Description of Artificial Sequence: Synthetic oligonucleotide
  Antisense strand to SEQ ID NO: 1706881
ucaacaaggauuugccuug

SEQ ID NO: 1706883 - RNA, 19 nt, Artificial Sequence
  Description of Artificial Sequence: Synthetic oligonucleotide
  Sense strand starting at position 172 of SEQ ID NO: 1561902
guguguugaaacuaaagua

SEQ ID NO: 1706884 - RNA, 19 nt, Artificial Sequence
  Description of Artificial Sequence: Synthetic oligonucleotide
  Antisense strand to SEQ ID NO: 1706883
uacuuuaguuucaacacac

SEQ ID NO: 1706885 - RNA, 19 nt, Artificial Sequence
  Description of Artificial Sequence: Synthetic oligonucleotide
  Sense strand starting at position 244 of SEQ ID NO: 1561902
gcuauuacucucgacagca

SEQ ID NO: 1706886 - RNA, 19 nt, Artificial Sequence
  Description of Artificial Sequence: Synthetic oligonucleotide
  Antisense strand to SEQ ID NO: 1706885
ugcugucgagaguaauagc

SEQ ID NO: 1706887 - RNA, 19 nt, Artificial Sequence
  Description of Artificial Sequence: Synthetic oligonucleotide
  Sense strand starting at position 254 of SEQ ID NO: 1561902
ucgacagcauuugauuuau

SEQ ID NO: 1706888 - RNA, 19 nt, Artificial Sequence
  Description of Artificial Sequence: Synthetic oligonucleotide
  Antisense strand to SEQ ID NO: 1706887
auaaaucaaaugcugucga

SEQ ID NO: 1706889 - RNA, 19 nt, Artificial Sequence
  Description of Artificial Sequence: Synthetic oligonucleotide
  Sense strand starting at position 268 of SEQ ID NO: 1561902
uuuauaacaccagaagugu

SEQ ID NO: 1706890 - RNA, 19 nt, Artificial Sequence
  Description of Artificial Sequence: Synthetic oligonucleotide
  Antisense strand to SEQ ID NO: 1706889
acacuucugguguuauaaa

SEQ ID NO: 1706891 - RNA, 19 nt, Artificial Sequence
  Description of Artificial Sequence: Synthetic oligonucleotide
  Sense strand starting at position 282 of SEQ ID NO: 1561902
aguguuagcucucuauaaa

SEQ ID NO: 1706892 - RNA, 19 nt, Artificial Sequence
  Description of Artificial Sequence: Synthetic oligonucleotide
  Antisense strand to SEQ ID NO: 1706891
uuuauagagagcuaacacu

SEQ ID NO: 1706893 - RNA, 19 nt, Artificial Sequence
  Description of Artificial Sequence: Synthetic oligonucleotide
  Sense strand starting at position 283 of SEQ ID NO: 1561902
guguuagcucucuauaaac

SEQ ID NO: 1706894 - RNA, 19 nt, Artificial Sequence
  Description of Artificial Sequence: Synthetic oligonucleotide
  Antisense strand to SEQ ID NO: 1706893
guuuauagagagcuaacac

SEQ ID NO: 1706895 - RNA, 19 nt, Artificial Sequence
  Description of Artificial Sequence: Synthetic oligonucleotide
  Sense strand starting at position 364 of SEQ ID NO: 1561902
uguguuguucgguucuauu

SEQ ID NO: 1706896 - RNA, 19 nt, Artificial Sequence
  Description of Artificial Sequence: Synthetic oligonucleotide
  Antisense strand to SEQ ID NO: 1706895
aauagaaccgaacaacaca

SEQ ID NO: 1706897 - RNA, 19 nt, Artificial Sequence
  Description of Artificial Sequence: Synthetic oligonucleotide
  Sense strand starting at position 372 of SEQ ID NO: 1561902
ucgguucuauuauuaaauc

SEQ ID NO: 1706898 - RNA, 19 nt, Artificial Sequence
  Description of Artificial Sequence: Synthetic oligonucleotide
  Antisense strand to SEQ ID NO: 1706897
gauuuaauaauagaaccga

SEQ ID NO: 1706899 - RNA, 19 nt, Artificial Sequence
  Description of Artificial Sequence: Synthetic oligonucleotide
  Sense strand starting at position 430 of SEQ ID NO: 1561902
gccuuuguucgugcauugu

SEQ ID NO: 1706900 - RNA, 19 nt, Artificial Sequence
  Description of Artificial Sequence: Synthetic oligonucleotide
  Antisense strand to SEQ ID NO: 1706899
acaaugcacgaacaaaggc

SEQ ID NO: 1706901 - RNA, 19 nt, Artificial Sequence
  Description of Artificial Sequence: Synthetic oligonucleotide
  Sense strand starting at position 644 of SEQ ID NO: 1561902
gcgcacuacccucaauaga

SEQ ID NO: 1706902 - RNA, 19 nt, Artificial Sequence
  Description of Artificial Sequence: Synthetic oligonucleotide
  Antisense strand to SEQ ID NO: 1706901
ucuauugaggguagugcgc

SEQ ID NO: 1706903 - RNA, 19 nt, Artificial Sequence
  Description of Artificial Sequence: Synthetic oligonucleotide
  Sense strand starting at position 696 of SEQ ID NO: 1561902
uagcaauaggagugcaaga

SEQ ID NO: 1706904 - RNA, 19 nt, Artificial Sequence
  Description of Artificial Sequence: Synthetic oligonucleotide
  Antisense strand to SEQ ID NO: 1706903
ucuugcacuccuauugcua

SEQ ID NO: 1706905 - RNA, 19 nt, Artificial Sequence
  Description of Artificial Sequence: Synthetic oligonucleotide
  Sense strand starting at position 701 of SEQ ID NO: 1561902
auaggagugcaagaaguuu

SEQ ID NO: 1706906 - RNA, 19 nt, Artificial Sequence
  Description of Artificial Sequence: Synthetic oligonucleotide
  Antisense strand to SEQ ID NO: 1706905
aaacuucuugcacuccuau

SEQ ID NO: 1706907 - RNA, 19 nt, Artificial Sequence
  Description of Artificial Sequence: Synthetic oligonucleotide
  Sense strand starting at position 729 of SEQ ID NO: 1561902
uucuguaaauagcuaaaga

SEQ ID NO: 1706908 - RNA, 19 nt, Artificial Sequence
  Description of Artificial Sequence: Synthetic oligonucleotide
  Antisense strand to SEQ ID NO: 1706907
ucuuuagcuauuuacagaa

SEQ ID NO: 1706909 - RNA, 19 nt, Artificial Sequence
  Description of Artificial Sequence: Synthetic oligonucleotide
  Sense strand starting at position 862 of SEQ ID NO: 1561902
guacacuuguguuucuuaa

SEQ ID NO: 1706910 - RNA, 19 nt, Artificial Sequence
  Description of Artificial Sequence: Synthetic oligonucleotide
  Antisense strand to SEQ ID NO: 1706909
uuaagaaacacaaguguac

SEQ ID NO: 1706911 - RNA, 19 nt, Artificial Sequence
  Description of Artificial Sequence: Synthetic oligonucleotide
  Sense strand starting at position 864 of SEQ ID NO: 1561902
acacuuguguuucuuaaag

SEQ ID NO: 1706912 - RNA, 19 nt, Artificial Sequence
  Description of Artificial Sequence: Synthetic oligonucleotide
  Antisense strand to SEQ ID NO: 1706911
cuuuaagaaacacaagugu

SEQ ID NO: 1706913 - RNA, 19 nt, Artificial Sequence
  Description of Artificial Sequence: Synthetic oligonucleotide
  Sense strand starting at position 894 of SEQ ID NO: 1561902
cugucaaucuagcugauuu

SEQ ID NO: 1706914 - RNA, 19 nt, Artificial Sequence
  Description of Artificial Sequence: Synthetic oligonucleotide
  Antisense strand to SEQ ID NO: 1706913
aaaucagcuagauugacag

SEQ ID NO: 1706915 - RNA, 19 nt, Artificial Sequence
  Description of Artificial Sequence: Synthetic oligonucleotide
  Sense strand starting at position 902 of SEQ ID NO: 1561902
cuagcugauuuagauaaac

SEQ ID NO: 1706916 - RNA, 19 nt, Artificial Sequence
  Description of Artificial Sequence: Synthetic oligonucleotide
  Antisense strand to SEQ ID NO: 1706915
guuuaucuaaaucagcuag

SEQ ID NO: 1706917 - RNA, 19 nt, Artificial Sequence
  Description of Artificial Sequence: Synthetic oligonucleotide
  Sense strand starting at position 2428 of SEQ ID NO: 1561902
cgaauuguccgugcucacu

SEQ ID NO: 1706918 - RNA, 19 nt, Artificial Sequence
  Description of Artificial Sequence: Synthetic oligonucleotide
  Antisense strand to SEQ ID NO: 1706917
agugagcacggacaauucg

SEQ ID NO: 1706919 - RNA, 19 nt, Artificial Sequence
  Description of Artificial Sequence: Synthetic oligonucleotide
  Sense strand starting at position 2452 of SEQ ID NO: 1561902
ugcccuguugaggaggauu

SEQ ID NO: 1706920 - RNA, 19 nt, Artificial Sequence
  Description of Artificial Sequence: Synthetic oligonucleotide
  Antisense strand to SEQ ID NO: 1706919
aauccuccucaacagggca

SEQ ID NO: 1706921 - RNA, 19 nt, Artificial Sequence
  Description of Artificial Sequence: Synthetic oligonucleotide
  Sense strand starting at position 2528 of SEQ ID NO: 1561902
augaaaguauuggcaaaug

SEQ ID NO: 1706922 - RNA, 19 nt, Artificial Sequence
  Description of Artificial Sequence: Synthetic oligonucleotide
  Antisense strand to SEQ ID NO: 1706921
cauuugccaauacuuucau

SEQ ID NO: 1706923 - RNA, 19 nt, Artificial Sequence
  Description of Artificial Sequence: Synthetic oligonucleotide
  Sense strand starting at position 2570 of SEQ ID NO: 1561902
uccucaaaccuguagugaa

SEQ ID NO: 1706924 - RNA, 19 nt, Artificial Sequence
  Description of Artificial Sequence: Synthetic oligonucleotide
  Antisense strand to SEQ ID NO: 1706923
uucacuacagguuugagga

SEQ ID NO: 1706925 - RNA, 19 nt, Artificial Sequence
  Description of Artificial Sequence: Synthetic oligonucleotide
  Sense strand starting at position 2602 of SEQ ID NO: 1561902
auuggaauuuggugaaguu

SEQ ID NO: 1706926 - RNA, 19 nt, Artificial Sequence
  Description of Artificial Sequence: Synthetic oligonucleotide
  Antisense strand to SEQ ID NO: 1706925
aacuucaccaaauuccaau

SEQ ID NO: 1706927 - RNA, 19 nt, Artificial Sequence
  Description of Artificial Sequence: Synthetic oligonucleotide
  Sense strand starting at position 2629 of SEQ ID NO: 1561902
acaaauguagacugcgaua

SEQ ID NO: 1706928 - RNA, 19 nt, Artificial Sequence
  Description of Artificial Sequence: Synthetic oligonucleotide
  Antisense strand to SEQ ID NO: 1706927
uaucgcagucuacauuugu

SEQ ID NO: 1706929 - RNA, 19 nt, Artificial Sequence
  Description of Artificial Sequence: Synthetic oligonucleotide
  Sense strand starting at position 2631 of SEQ ID NO: 1561902
aaauguagacugcgauacu

SEQ ID NO: 1706930 - RNA, 19 nt, Artificial Sequence
  Description of Artificial Sequence: Synthetic oligonucleotide
  Antisense strand to SEQ ID NO: 1706929
aguaucgcagucuacauuu

SEQ ID NO: 1706931 - RNA, 19 nt, Artificial Sequence
  Description of Artificial Sequence: Synthetic oligonucleotide
  Sense strand starting at position 2634 of SEQ ID NO: 1561902
uguagacugcgauacucaa

SEQ ID NO: 1706932 - RNA, 19 nt, Artificial Sequence
  Description of Artificial Sequence: Synthetic oligonucleotide
  Antisense strand to SEQ ID NO: 1706931
uugaguaucgcagucuaca

SEQ ID NO: 1706933 - RNA, 19 nt, Artificial Sequence
  Description of Artificial Sequence: Synthetic oligonucleotide
  Sense strand starting at position 2752 of SEQ ID NO: 1561902
guggucuuacuuuauucua

SEQ ID NO: 1706934 - RNA, 19 nt, Artificial Sequence
  Description of Artificial Sequence: Synthetic oligonucleotide
  Antisense strand to SEQ ID NO: 1706933
uagaauaaaguaagaccac

SEQ ID NO: 1706935 - RNA, 19 nt, Artificial Sequence
  Description of Artificial Sequence: Synthetic oligonucleotide
  Sense strand starting at position 2871 of SEQ ID NO: 1561902
acaugaguagggugaccua

SEQ ID NO: 1706936 - RNA, 19 nt, Artificial Sequence
  Description of Artificial Sequence: Synthetic oligonucleotide
  Antisense strand to SEQ ID NO: 1706935
uaggucacccuacucaugu

SEQ ID NO: 1706937 - RNA, 19 nt, Artificial Sequence
  Description of Artificial Sequence: Synthetic oligonucleotide
  Sense strand starting at position 2874 of SEQ ID NO: 1561902
ugaguagggugaccuauaa

SEQ ID NO: 1706938 - RNA, 19 nt, Artificial Sequence
  Description of Artificial Sequence: Synthetic oligonucleotide
  Antisense strand to SEQ ID NO: 1706937
uuauaggucacccuacuca

SEQ ID NO: 1706939 - RNA, 19 nt, Artificial Sequence
  Description of Artificial Sequence: Synthetic oligonucleotide
  Sense strand starting at position 2954 of SEQ ID NO: 1561902
aggcuaauugaguggaugu

SEQ ID NO: 1706940 - RNA, 19 nt, Artificial Sequence
  Description of Artificial Sequence: Synthetic oligonucleotide
  Antisense strand to SEQ ID NO: 1706939
acauccacucaauuagccu

SEQ ID NO: 1706941 - RNA, 19 nt, Artificial Sequence
  Description of Artificial Sequence: Synthetic oligonucleotide
  Sense strand starting at position 2955 of SEQ ID NO: 1561902
ggcuaauugaguggauguu

SEQ ID NO: 1706942 - RNA, 19 nt, Artificial Sequence
  Description of Artificial Sequence: Synthetic oligonucleotide
  Antisense strand to SEQ ID NO: 1706941
aacauccacucaauuagcc

SEQ ID NO: 1706943 - RNA, 19 nt, Artificial Sequence
  Description of Artificial Sequence: Synthetic oligonucleotide
  Sense strand starting at position 2994 of SEQ ID NO: 1561902
caguuuggguacuuguuau

SEQ ID NO: 1706944 - RNA, 19 nt, Artificial Sequence
  Description of Artificial Sequence: Synthetic oligonucleotide
  Antisense strand to SEQ ID NO: 1706943
auaacaaguacccaaacug

SEQ ID NO: 1706945 - RNA, 19 nt, Artificial Sequence
  Description of Artificial Sequence: Synthetic oligonucleotide
  Sense strand starting at position 3127 of SEQ ID NO: 1561902
aggacacucucauaaggau

SEQ ID NO: 1706946 - RNA, 19 nt, Artificial Sequence
  Description of Artificial Sequence: Synthetic oligonucleotide
  Antisense strand to SEQ ID NO: 1706945
auccuuaugagaguguccu

SEQ ID NO: 1706947 - RNA, 19 nt, Artificial Sequence
  Description of Artificial Sequence: Synthetic oligonucleotide
  Sense strand starting at position 3577 of SEQ ID NO: 1561902
cuuauuuauuggcacuaga

SEQ ID NO: 1706948 - RNA, 19 nt, Artificial Sequence
  Description of Artificial Sequence: Synthetic oligonucleotide
  Antisense strand to SEQ ID NO: 1706947
ucuagugccaauaaauaag

SEQ ID NO: 1706949 - RNA, 19 nt, Artificial Sequence
  Description of Artificial Sequence: Synthetic oligonucleotide
  Sense strand starting at position 3616 of SEQ ID NO: 1561902
uagagacauuaccagggaa

SEQ ID NO: 1706950 - RNA, 19 nt, Artificial Sequence
  Description of Artificial Sequence: Synthetic oligonucleotide
  Antisense strand to SEQ ID NO: 1706949
uucccugguaaugucucua

SEQ ID NO: 1706951 - RNA, 19 nt, Artificial Sequence
  Description of Artificial Sequence: Synthetic oligonucleotide
  Sense strand starting at position 3781 of SEQ ID NO: 1561902
uugacuucuuauguagaaa

SEQ ID NO: 1706952 - RNA, 19 nt, Artificial Sequence
  Description of Artificial Sequence: Synthetic oligonucleotide
  Antisense strand to SEQ ID NO: 1706951
uuucuacauaagaagucaa

SEQ ID NO: 1706953 - RNA, 19 nt, Artificial Sequence
  Description of Artificial Sequence: Synthetic oligonucleotide
  Sense strand starting at position 3784 of SEQ ID NO: 1561902
acuucuuauguagaaaugu

SEQ ID NO: 1706954 - RNA, 19 nt, Artificial Sequence
  Description of Artificial Sequence: Synthetic oligonucleotide
  Antisense strand to SEQ ID NO: 1706953
acauuucuacauaagaagu

SEQ ID NO: 1706955 - RNA, 19 nt, Artificial Sequence
  Description of Artificial Sequence: Synthetic oligonucleotide
  Sense strand starting at position 3846 of SEQ ID NO: 1561902
cagagaagcuguuugcacu

SEQ ID NO: 1706956 - RNA, 19 nt, Artificial Sequence
  Description of Artificial Sequence: Synthetic oligonucleotide
  Antisense strand to SEQ ID NO: 1706955
agugcaaacagcuucucug

SEQ ID NO: 1706957 - RNA, 19 nt, Artificial Sequence
  Description of Artificial Sequence: Synthetic oligonucleotide
  Sense strand starting at position 3887 of SEQ ID NO: 1561902
acaugugcuuucuuaggaa

SEQ ID NO: 1706958 - RNA, 19 nt, Artificial Sequence
  Description of Artificial Sequence: Synthetic oligonucleotide
  Antisense strand to SEQ ID NO: 1706957
uuccuaagaaagcacaugu

SEQ ID NO: 1706959 - RNA, 19 nt, Artificial Sequence
  Description of Artificial Sequence: Synthetic oligonucleotide
  Sense strand starting at position 3980 of SEQ ID NO: 1561902
aaaguauguagagggcauu

SEQ ID NO: 1706960 - RNA, 19 nt, Artificial Sequence
  Description of Artificial Sequence: Synthetic oligonucleotide
  Antisense strand to SEQ ID NO: 1706959
aaugcccucuacauacuuu

SEQ ID NO: 1706961 - RNA, 19 nt, Artificial Sequence
  Description of Artificial Sequence: Synthetic oligonucleotide
  Sense strand starting at position 29 of SEQ ID NO: 1561903
uauauaaucgagcaggcaa

SEQ ID NO: 1706962 - RNA, 19 nt, Artificial Sequence
  Description of Artificial Sequence: Synthetic oligonucleotide
  Antisense strand to SEQ ID NO: 1706961
uugccugcucgauuauaua

SEQ ID NO: 1706963 - RNA, 19 nt, Artificial Sequence
  Description of Artificial Sequence: Synthetic oligonucleotide
  Sense strand starting at position 31 of SEQ ID NO: 1561903
uauaaucgagcaggcaaua

SEQ ID NO: 1706964 - RNA, 19 nt, Artificial Sequence
  Description of Artificial Sequence: Synthetic oligonucleotide
  Antisense strand to SEQ ID NO: 1706963
uauugccugcucgauuaua

SEQ ID NO: 1706965 - RNA, 19 nt, Artificial Sequence
  Description of Artificial Sequence: Synthetic oligonucleotide
  Sense strand starting at position 107 of SEQ ID NO: 1561903
gagccaguguucuccgaac

SEQ ID NO: 1706966 - RNA, 19 nt, Artificial Sequence
  Description of Artificial Sequence: Synthetic oligonucleotide
  Antisense strand to SEQ ID NO: 1706965
guucggagaacacuggcuc

SEQ ID NO: 1706967 - RNA, 19 nt, Artificial Sequence
  Description of Artificial Sequence: Synthetic oligonucleotide
  Sense strand starting at position 109 of SEQ ID NO: 1561903
gccaguguucuccgaacuc

SEQ ID NO: 1706968 - RNA, 19 nt, Artificial Sequence
  Description of Artificial Sequence: Synthetic oligonucleotide
  Antisense strand to SEQ ID NO: 1706967
gaguucggagaacacuggc

SEQ ID NO: 1706969 - RNA, 19 nt, Artificial Sequence
  Description of Artificial Sequence: Synthetic oligonucleotide
  Sense strand starting at position 264 of SEQ ID NO: 1561903
cggcuuaacgcgcaaaguu

SEQ ID NO: 1706970 - RNA, 19 nt, Artificial Sequence
  Description of Artificial Sequence: Synthetic oligonucleotide
  Antisense strand to SEQ ID NO: 1706969
aacuuugcgcguuaagccg

SEQ ID NO: 1706971 - RNA, 19 nt, Artificial Sequence
  Description of Artificial Sequence: Synthetic oligonucleotide
  Sense strand starting at position 311 of SEQ ID NO: 1561903
uggugacuucucgggacua

SEQ ID NO: 1706972 - RNA, 19 nt, Artificial Sequence
  Description of Artificial Sequence: Synthetic oligonucleotide
  Antisense strand to SEQ ID NO: 1706971
uagucccgagaagucacca

SEQ ID NO: 1706973 - RNA, 19 nt, Artificial Sequence
  Description of Artificial Sequence: Synthetic oligonucleotide
  Sense strand starting at position 312 of SEQ ID NO: 1561903
ggugacuucucgggacuau

SEQ ID NO: 1706974 - RNA, 19 nt, Artificial Sequence
  Description of Artificial Sequence: Synthetic oligonucleotide
  Antisense strand to SEQ ID NO: 1706973
auagucccgagaagucacc

SEQ ID NO: 1706975 - RNA, 19 nt, Artificial Sequence
  Description of Artificial Sequence: Synthetic oligonucleotide
  Sense strand starting at position 313 of SEQ ID NO: 1561903
gugacuucucgggacuaug

SEQ ID NO: 1706976 - RNA, 19 nt, Artificial Sequence
  Description of Artificial Sequence: Synthetic oligonucleotide
  Antisense strand to SEQ ID NO: 1706975
cauagucccgagaagucac

SEQ ID NO: 1706977 - RNA, 19 nt, Artificial Sequence
  Description of Artificial Sequence: Synthetic oligonucleotide
  Sense strand starting at position 352 of SEQ ID NO: 1561903
gagagaaguuacuccggga

SEQ ID NO: 1706978 - RNA, 19 nt, Artificial Sequence
  Description of Artificial Sequence: Synthetic oligonucleotide
  Antisense strand to SEQ ID NO: 1706977
ucccggaguaacuucucuc

SEQ ID NO: 1706979 - RNA, 19 nt, Artificial Sequence
  Description of Artificial Sequence: Synthetic oligonucleotide
  Sense strand starting at position 791 of SEQ ID NO: 1561903
ugagcugcgucuucucauu

SEQ ID NO: 1706980 - RNA, 19 nt, Artificial Sequence
  Description of Artificial Sequence: Synthetic oligonucleotide
  Antisense strand to SEQ ID NO: 1706979
aaugagaagacgcagcuca

SEQ ID NO: 1706981 - RNA, 19 nt, Artificial Sequence
  Description of Artificial Sequence: Synthetic oligonucleotide
  Sense strand starting at position 824 of SEQ ID NO: 1561903
ucugcuggacgcguuuaua

SEQ ID NO: 1706982 - RNA, 19 nt, Artificial Sequence
  Description of Artificial Sequence: Synthetic oligonucleotide
  Antisense strand to SEQ ID NO: 1706981
uauaaacgcguccagcaga

SEQ ID NO: 1706983 - RNA, 19 nt, Artificial Sequence
  Description of Artificial Sequence: Synthetic oligonucleotide
  Sense strand starting at position 833 of SEQ ID NO: 1561903
cgcguuuauaccugcaaga

SEQ ID NO: 1706984 - RNA, 19 nt, Artificial Sequence
  Description of Artificial Sequence: Synthetic oligonucleotide
  Antisense strand to SEQ ID NO: 1706983
ucuugcagguauaaacgcg

SEQ ID NO: 1706985 - RNA, 19 nt, Artificial Sequence
  Description of Artificial Sequence: Synthetic oligonucleotide
  Sense strand starting at position 835 of SEQ ID NO: 1561903
cguuuauaccugcaagacu

SEQ ID NO: 1706986 - RNA, 19 nt, Artificial Sequence
  Description of Artificial Sequence: Synthetic oligonucleotide
  Antisense strand to SEQ ID NO: 1706985
agucuugcagguauaaacg

SEQ ID NO: 1706987 - RNA, 19 nt, Artificial Sequence
  Description of Artificial Sequence: Synthetic oligonucleotide
  Sense strand starting at position 962 of SEQ ID NO: 1561903
cgagcuggucgucggagaa

SEQ ID NO: 1706988 - RNA, 19 nt, Artificial Sequence
  Description of Artificial Sequence: Synthetic oligonucleotide
  Antisense strand to SEQ ID NO: 1706987
uucuccgacgaccagcucg

SEQ ID NO: 1706989 - RNA, 19 nt, Artificial Sequence
  Description of Artificial Sequence: Synthetic oligonucleotide
  Sense strand starting at position 1227 of SEQ ID NO: 1561903
gcgaaagcugucgaagcuu

SEQ ID NO: 1706990 - RNA, 19 nt, Artificial Sequence
  Description of Artificial Sequence: Synthetic oligonucleotide
  Antisense strand to SEQ ID NO: 1706989
aagcuucgacagcuuucgc

SEQ ID NO: 1706991 - RNA, 19 nt, Artificial Sequence
  Description of Artificial Sequence: Synthetic oligonucleotide
  Sense strand starting at position 1322 of SEQ ID NO: 1561903
gguucaucugcugguaguu

SEQ ID NO: 1706992 - RNA, 19 nt, Artificial Sequence
  Description of Artificial Sequence: Synthetic oligonucleotide
  Antisense strand to SEQ ID NO: 1706991
aacuaccagcagaugaacc

SEQ ID NO: 1706993 - RNA, 19 nt, Artificial Sequence
  Description of Artificial Sequence: Synthetic oligonucleotide
  Sense strand starting at position 1334 of SEQ ID NO: 1561903
gguaguugcucgccaucca

SEQ ID NO: 1706994 - RNA, 19 nt, Artificial Sequence
  Description of Artificial Sequence: Synthetic oligonucleotide
  Antisense strand to SEQ ID NO: 1706993
uggauggcgagcaacuacc

SEQ ID NO: 1706995 - RNA, 19 nt, Artificial Sequence
  Description of Artificial Sequence: Synthetic oligonucleotide
  Sense strand starting at position 1342 of SEQ ID NO: 1561903
cucgccauccaguacagau

SEQ ID NO: 1706996 - RNA, 19 nt, Artificial Sequence
  Description of Artificial Sequence: Synthetic oligonucleotide
  Antisense strand to SEQ ID NO: 1706995
aucuguacuggauggcgag

SEQ ID NO: 1706997 - RNA, 19 nt, Artificial Sequence
  Description of Artificial Sequence: Synthetic oligonucleotide
  Sense strand starting at position 1535 of SEQ ID NO: 1561903
ggucgaagucguugacaua

SEQ ID NO: 1706998 - RNA, 19 nt, Artificial Sequence
  Description of Artificial Sequence: Synthetic oligonucleotide
  Antisense strand to SEQ ID NO: 1706997
uaugucaacgacuucgacc

SEQ ID NO: 1706999 - RNA, 19 nt, Artificial Sequence
  Description of Artificial Sequence: Synthetic oligonucleotide
  Sense strand starting at position 1536 of SEQ ID NO: 1561903
gucgaagucguugacauac

SEQ ID NO: 1707000 - RNA, 19 nt, Artificial Sequence
  Description of Artificial Sequence: Synthetic oligonucleotide
  Antisense strand to SEQ ID NO: 1706999
guaugucaacgacuucgac

SEQ ID NO: 1707001 - RNA, 19 nt, Artificial Sequence
  Description of Artificial Sequence: Synthetic oligonucleotide
  Sense strand starting at position 2494 of SEQ ID NO: 1561903
gugcguuccuguuucugga

SEQ ID NO: 1707002 - RNA, 19 nt, Artificial Sequence
  Description of Artificial Sequence: Synthetic oligonucleotide
  Antisense strand to SEQ ID NO: 1707001
uccagaaacaggaacgcac

SEQ ID NO: 1707003 - RNA, 19 nt, Artificial Sequence
  Description of Artificial Sequence: Synthetic oligonucleotide
  Sense strand starting at position 2507 of SEQ ID NO: 1561903
ucuggagaucugcgcguau

SEQ ID NO: 1707004 - RNA, 19 nt, Artificial Sequence
  Description of Artificial Sequence: Synthetic oligonucleotide
  Antisense strand to SEQ ID NO: 1707003
auacgcgcagaucuccaga

SEQ ID NO: 1707005 - RNA, 19 nt, Artificial Sequence
  Description of Artificial Sequence: Synthetic oligonucleotide
  Sense strand starting at position 2509 of SEQ ID NO: 1561903
uggagaucugcgcguauuu

SEQ ID NO: 1707006 - RNA, 19 nt, Artificial Sequence
  Description of Artificial Sequence: Synthetic oligonucleotide
  Antisense strand to SEQ ID NO: 1707005
aaauacgcgcagaucucca

SEQ ID NO: 1707007 - RNA, 19 nt, Artificial Sequence
  Description of Artificial Sequence: Synthetic oligonucleotide
  Sense strand starting at position 2511 of SEQ ID NO: 1561903
gagaucugcgcguauuugu

SEQ ID NO: 1707008 - RNA, 19 nt, Artificial Sequence
  Description of Artificial Sequence: Synthetic oligonucleotide
  Antisense strand to SEQ ID NO: 1707007
acaaauacgcgcagaucuc

SEQ ID NO: 1707009 - RNA, 19 nt, Artificial Sequence
  Description of Artificial Sequence: Synthetic oligonucleotide
  Sense strand starting at position 2733 of SEQ ID NO: 1561903
gcccaaaggcucugaauuc

SEQ ID NO: 1707010 - RNA, 19 nt, Artificial Sequence
  Description of Artificial Sequence: Synthetic oligonucleotide
  Antisense strand to SEQ ID NO: 1707009
gaauucagagccuuugggc

SEQ ID NO: 1707011 - RNA, 19 nt, Artificial Sequence
  Description of Artificial Sequence: Synthetic oligonucleotide
  Sense strand starting at position 3066 of SEQ ID NO: 1561903
auacuaugugugcaccaga

SEQ ID NO: 1707012 - RNA, 19 nt, Artificial Sequence
  Description of Artificial Sequence: Synthetic oligonucleotide
  Antisense strand to SEQ ID NO: 1707011
ucuggugcacacauaguau

SEQ ID NO: 1707013 - RNA, 19 nt, Artificial Sequence
  Description of Artificial Sequence: Synthetic oligonucleotide
  Sense strand starting at position 3405 of SEQ ID NO: 1561903
gauccaggauggcuagaau

SEQ ID NO: 1707014 - RNA, 19 nt, Artificial Sequence
  Description of Artificial Sequence: Synthetic oligonucleotide
  Antisense strand to SEQ ID NO: 1707013
auucuagccauccuggauc

SEQ ID NO: 1707015 - RNA, 19 nt, Artificial Sequence
  Description of Artificial Sequence: Synthetic oligonucleotide
  Sense strand starting at position 3416 of SEQ ID NO: 1561903
gcuagaauuaacggguucu

SEQ ID NO: 1707016 - RNA, 19 nt, Artificial Sequence
  Description of Artificial Sequence: Synthetic oligonucleotide
  Antisense strand to SEQ ID NO: 1707015
agaacccguuaauucuagc

SEQ ID NO: 1707017 - RNA, 19 nt, Artificial Sequence
  Description of Artificial Sequence: Synthetic oligonucleotide
  Sense strand starting at position 3417 of SEQ ID NO: 1561903
cuagaauuaacggguucuu

SEQ ID NO: 1707018 - RNA, 19 nt, Artificial Sequence
  Description of Artificial Sequence: Synthetic oligonucleotide
  Antisense strand to SEQ ID NO: 1707017
aagaacccguuaauucuag

SEQ ID NO: 1707019 - RNA, 19 nt, Artificial Sequence
  Description of Artificial Sequence: Synthetic oligonucleotide
  Sense strand starting at position 3427 of SEQ ID NO: 1561903
cggguucuuucugagaccu

SEQ ID NO: 1707020 - RNA, 19 nt, Artificial Sequence
  Description of Artificial Sequence: Synthetic oligonucleotide
  Antisense strand to SEQ ID NO: 1707019
aggucucagaaagaacccg

SEQ ID NO: 1707021 - RNA, 19 nt, Artificial Sequence
  Description of Artificial Sequence: Synthetic oligonucleotide
  Sense strand starting at position 3652 of SEQ ID NO: 1561903
ugcagacgcgccuagauua

SEQ ID NO: 1707022 - RNA, 19 nt, Artificial Sequence
  Description of Artificial Sequence: Synthetic oligonucleotide
  Antisense strand to SEQ ID NO: 1707021
uaaucuaggcgcgucugca

SEQ ID NO: 1707023 - RNA, 19 nt, Artificial Sequence
  Description of Artificial Sequence: Synthetic oligonucleotide
  Sense strand starting at position 3760 of SEQ ID NO: 1561903
gugguauugggccgccuau

SEQ ID NO: 1707024 - RNA, 19 nt, Artificial Sequence
  Description of Artificial Sequence: Synthetic oligonucleotide
  Antisense strand to SEQ ID NO: 1707023
auaggcggcccaauaccac

SEQ ID NO: 1707025 - RNA, 19 nt, Artificial Sequence
  Description of Artificial Sequence: Synthetic oligonucleotide
  Sense strand starting at position 3858 of SEQ ID NO: 1561903
cuacaacccucuucgagaa

SEQ ID NO: 1707026 - RNA, 19 nt, Artificial Sequence
  Description of Artificial Sequence: Synthetic oligonucleotide
  Antisense strand to SEQ ID NO: 1707025
uucucgaagaggguuguag

SEQ ID NO: 1707027 - RNA, 19 nt, Artificial Sequence
  Description of Artificial Sequence: Synthetic oligonucleotide
  Sense strand starting at position 3875 of SEQ ID NO: 1561903
aagcgugcucuccgcagaa

SEQ ID NO: 1707028 - RNA, 19 nt, Artificial Sequence
  Description of Artificial Sequence: Synthetic oligonucleotide
  Antisense strand to SEQ ID NO: 1707027
uucugcggagagcacgcuu

SEQ ID NO: 1707029 - RNA, 19 nt, Artificial Sequence
  Description of Artificial Sequence: Synthetic oligonucleotide
  Sense strand starting at position 3877 of SEQ ID NO: 1561903
gcgugcucuccgcagaaau

SEQ ID NO: 1707030 - RNA, 19 nt, Artificial Sequence
  Description of Artificial Sequence: Synthetic oligonucleotide
  Antisense strand to SEQ ID NO: 1707029
auuucugcggagagcacgc

SEQ ID NO: 1707031 - RNA, 19 nt, Artificial Sequence
  Description of Artificial Sequence: Synthetic oligonucleotide
  Sense strand starting at position 3879 of SEQ ID NO: 1561903
gugcucuccgcagaaauga

SEQ ID NO: 1707032 - RNA, 19 nt, Artificial Sequence
  Description of Artificial Sequence: Synthetic oligonucleotide
  Antisense strand to SEQ ID NO: 1707031
ucauuucugcggagagcac

SEQ ID NO: 1707033 - RNA, 19 nt, Artificial Sequence
  Description of Artificial Sequence: Synthetic oligonucleotide
  Sense strand starting at position 3965 of SEQ ID NO: 1561903
ggacucgcaccuuguaaau

SEQ ID NO: 1707034 - RNA, 19 nt, Artificial Sequence
  Description of Artificial Sequence: Synthetic oligonucleotide
  Antisense strand to SEQ ID NO: 1707033
auuuacaaggugcgagucc

SEQ ID NO: 1707035 - RNA, 19 nt, Artificial Sequence
  Description of Artificial Sequence: Synthetic oligonucleotide
  Sense strand starting at position 3976 of SEQ ID NO: 1561903
uuguaaauguccucgucuu

SEQ ID NO: 1707036 - RNA, 19 nt, Artificial Sequence
  Description of Artificial Sequence: Synthetic oligonucleotide
  Antisense strand to SEQ ID NO: 1707035
aagacgaggacauuuacaa

SEQ ID NO: 1707037 - RNA, 19 nt, Artificial Sequence
  Description of Artificial Sequence: Synthetic oligonucleotide
  Sense strand starting at position 3977 of SEQ ID NO: 1561903
uguaaauguccucgucuug

SEQ ID NO: 1707038 - RNA, 19 nt, Artificial Sequence
  Description of Artificial Sequence: Synthetic oligonucleotide
  Antisense strand to SEQ ID NO: 1707037
caagacgaggacauuuaca

SEQ ID NO: 1707039 - RNA, 19 nt, Artificial Sequence
  Description of Artificial Sequence: Synthetic oligonucleotide
  Sense strand starting at position 3978 of SEQ ID NO: 1561903
guaaauguccucgucuugu

SEQ ID NO: 1707040 - RNA, 19 nt, Artificial Sequence
  Description of Artificial Sequence: Synthetic oligonucleotide
  Antisense strand to SEQ ID NO: 1707039
acaagacgaggacauuuac

SEQ ID NO: 1707041 - RNA, 19 nt, Artificial Sequence
  Description of Artificial Sequence: Synthetic oligonucleotide
  Sense strand starting at position 189 of SEQ ID NO: 1561904
gagaaacgaucacagagau

SEQ ID NO: 1707042 - RNA, 19 nt, Artificial Sequence
  Description of Artificial Sequence: Synthetic oligonucleotide
  Antisense strand to SEQ ID NO: 1707041
aucucugugaucguuucuc

SEQ ID NO: 1707043 - RNA, 19 nt, Artificial Sequence
  Description of Artificial Sequence: Synthetic oligonucleotide
  Sense strand starting at position 242 of SEQ ID NO: 1561904
uagggugcccuggauaaua

SEQ ID NO: 1707044 - RNA, 19 nt, Artificial Sequence
  Description of Artificial Sequence: Synthetic oligonucleotide
  Antisense strand to SEQ ID NO: 1707043
uauuauccagggcacccua

SEQ ID NO: 1707045 - RNA, 19 nt, Artificial Sequence
  Description of Artificial Sequence: Synthetic oligonucleotide
  Sense strand starting at position 399 of SEQ ID NO: 1561904
ugggcacucacugaaguau

SEQ ID NO: 1707046 - RNA, 19 nt, Artificial Sequence
  Description of Artificial Sequence: Synthetic oligonucleotide
  Antisense strand to SEQ ID NO: 1707045
auacuucagugagugccca

SEQ ID NO: 1707047 - RNA, 19 nt, Artificial Sequence
  Description of Artificial Sequence: Synthetic oligonucleotide
  Sense strand starting at position 408 of SEQ ID NO: 1561904
acugaaguaucuuugcgau

SEQ ID NO: 1707048 - RNA, 19 nt, Artificial Sequence
  Description of Artificial Sequence: Synthetic oligonucleotide
  Antisense strand to SEQ ID NO: 1707047
aucgcaaagauacuucagu

SEQ ID NO: 1707049 - RNA, 19 nt, Artificial Sequence
  Description of Artificial Sequence: Synthetic oligonucleotide
  Sense strand starting at position 410 of SEQ ID NO: 1561904
ugaaguaucuuugcgauaa

SEQ ID NO: 1707050 - RNA, 19 nt, Artificial Sequence
  Description of Artificial Sequence: Synthetic oligonucleotide
  Antisense strand to SEQ ID NO: 1707049
uuaucgcaaagauacuuca

SEQ ID NO: 1707051 - RNA, 19 nt, Artificial Sequence
  Description of Artificial Sequence: Synthetic oligonucleotide
  Sense strand starting at position 414 of SEQ ID NO: 1561904
guaucuuugcgauaacuuu

SEQ ID NO: 1707052 - RNA, 19 nt, Artificial Sequence
  Description of Artificial Sequence: Synthetic oligonucleotide
  Antisense strand to SEQ ID NO: 1707051
aaaguuaucgcaaagauac

SEQ ID NO: 1707053 - RNA, 19 nt, Artificial Sequence
  Description of Artificial Sequence: Synthetic oligonucleotide
  Sense strand starting at position 420 of SEQ ID NO: 1561904
uugcgauaacuuuguaaau

SEQ ID NO: 1707054 - RNA, 19 nt, Artificial Sequence
  Description of Artificial Sequence: Synthetic oligonucleotide
  Antisense strand to SEQ ID NO: 1707053
auuuacaaaguuaucgcaa

SEQ ID NO: 1707055 - RNA, 19 nt, Artificial Sequence
  Description of Artificial Sequence: Synthetic oligonucleotide
  Sense strand starting at position 421 of SEQ ID NO: 1561904
ugcgauaacuuuguaaauc

SEQ ID NO: 1707056 - RNA, 19 nt, Artificial Sequence
  Description of Artificial Sequence: Synthetic oligonucleotide
  Antisense strand to SEQ ID NO: 1707055
gauuuacaaaguuaucgca

SEQ ID NO: 1707057 - RNA, 19 nt, Artificial Sequence
  Description of Artificial Sequence: Synthetic oligonucleotide
  Sense strand starting at position 522 of SEQ ID NO: 1561904
agacaaguauagcucucaa

SEQ ID NO: 1707058 - RNA, 19 nt, Artificial Sequence
  Description of Artificial Sequence: Synthetic oligonucleotide
  Antisense strand to SEQ ID NO: 1707057
uugagagcuauacuugucu

SEQ ID NO: 1707059 - RNA, 19 nt, Artificial Sequence
  Description of Artificial Sequence: Synthetic oligonucleotide
  Sense strand starting at position 708 of SEQ ID NO: 1561904
aauagaaaccagugucaga

SEQ ID NO: 1707060 - RNA, 19 nt, Artificial Sequence
  Description of Artificial Sequence: Synthetic oligonucleotide
  Antisense strand to SEQ ID NO: 1707059
ucugacacugguuucuauu

SEQ ID NO: 1707061 - RNA, 19 nt, Artificial Sequence
  Description of Artificial Sequence: Synthetic oligonucleotide
  Sense strand starting at position 800 of SEQ ID NO: 1561904
auaucuugccuccaggagu

SEQ ID NO: 1707062 - RNA, 19 nt, Artificial Sequence
  Description of Artificial Sequence: Synthetic oligonucleotide
  Antisense strand to SEQ ID NO: 1707061
acuccuggaggcaagauau

SEQ ID NO: 1707063 - RNA, 19 nt, Artificial Sequence
  Description of Artificial Sequence: Synthetic oligonucleotide
  Sense strand starting at position 1357 of SEQ ID NO: 1561904
cugaaacuggugugcagau

SEQ ID NO: 1707064 - RNA, 19 nt, Artificial Sequence
  Description of Artificial Sequence: Synthetic oligonucleotide
  Antisense strand to SEQ ID NO: 1707063
aucugcacaccaguuucag

SEQ ID NO: 1707065 - RNA, 19 nt, Artificial Sequence
  Description of Artificial Sequence: Synthetic oligonucleotide
  Sense strand starting at position 1400 of SEQ ID NO: 1561904
cuaaauguguugucaccau

SEQ ID NO: 1707066 - RNA, 19 nt, Artificial Sequence
  Description of Artificial Sequence: Synthetic oligonucleotide
  Antisense strand to SEQ ID NO: 1707065
auggugacaacacauuuag

SEQ ID NO: 1707067 - RNA, 19 nt, Artificial Sequence
  Description of Artificial Sequence: Synthetic oligonucleotide
  Sense strand starting at position 1441 of SEQ ID NO: 1561904
auuucucgcuucucuuaga

SEQ ID NO: 1707068 - RNA, 19 nt, Artificial Sequence
  Description of Artificial Sequence: Synthetic oligonucleotide
  Antisense strand to SEQ ID NO: 1707067
ucuaagagaagcgagaaau

SEQ ID NO: 1707069 - RNA, 19 nt, Artificial Sequence
  Description of Artificial Sequence: Synthetic oligonucleotide
  Sense strand starting at position 1452 of SEQ ID NO: 1561904
cucuuagaauucguacaac

SEQ ID NO: 1707070 - RNA, 19 nt, Artificial Sequence
  Description of Artificial Sequence: Synthetic oligonucleotide
  Antisense strand to SEQ ID NO: 1707069
guuguacgaauucuaagag

SEQ ID NO: 1707071 - RNA, 19 nt, Artificial Sequence
  Description of Artificial Sequence: Synthetic oligonucleotide
  Sense strand starting at position 1584 of SEQ ID NO: 1561904
ugacuugcccacgguaaga

SEQ ID NO: 1707072 - RNA, 19 nt, Artificial Sequence
  Description of Artificial Sequence: Synthetic oligonucleotide
  Antisense strand to SEQ ID NO: 1707071
ucuuaccgugggcaaguca

SEQ ID NO: 1707073 - RNA, 19 nt, Artificial Sequence
  Description of Artificial Sequence: Synthetic oligonucleotide
  Sense strand starting at position 1597 of SEQ ID NO: 1561904
guaagagagccauacggau

SEQ ID NO: 1707074 - RNA, 19 nt, Artificial Sequence
  Description of Artificial Sequence: Synthetic oligonucleotide
  Antisense strand to SEQ ID NO: 1707073
auccguauggcucucuuac

SEQ ID NO: 1707075 - RNA, 19 nt, Artificial Sequence
  Description of Artificial Sequence: Synthetic oligonucleotide
  Sense strand starting at position 2007 of SEQ ID NO: 1561904
cccugagucccggaaguga

SEQ ID NO: 1707076 - RNA, 19 nt, Artificial Sequence
  Description of Artificial Sequence: Synthetic oligonucleotide
  Antisense strand to SEQ ID NO: 1707075
ucacuuccgggacucaggg

SEQ ID NO: 1707077 - RNA, 19 nt, Artificial Sequence
  Description of Artificial Sequence: Synthetic oligonucleotide
  Sense strand starting at position 2068 of SEQ ID NO: 1561904
cagguuucugggugaggca

SEQ ID NO: 1707078 - RNA, 19 nt, Artificial Sequence
  Description of Artificial Sequence: Synthetic oligonucleotide
  Antisense strand to SEQ ID NO: 1707077
ugccucacccagaaaccug

SEQ ID NO: 1707079 - RNA, 19 nt, Artificial Sequence
  Description of Artificial Sequence: Synthetic oligonucleotide
  Sense strand starting at position 2121 of SEQ ID NO: 1561904
uggguucgagcuggacaaa

SEQ ID NO: 1707080 - RNA, 19 nt, Artificial Sequence
  Description of Artificial Sequence: Synthetic oligonucleotide
  Antisense strand to SEQ ID NO: 1707079
uuuguccagcucgaaccca

SEQ ID NO: 1707081 - RNA, 19 nt, Artificial Sequence
  Description of Artificial Sequence: Synthetic oligonucleotide
  Sense strand starting at position 2454 of SEQ ID NO: 1561904
ucuugaaucccgggaggca

SEQ ID NO: 1707082 - RNA, 19 nt, Artificial Sequence
  Description of Artificial Sequence: Synthetic oligonucleotide
  Antisense strand to SEQ ID NO: 1707081
ugccucccgggauucaaga

SEQ ID NO: 1707083 - RNA, 19 nt, Artificial Sequence
  Description of Artificial Sequence: Synthetic oligonucleotide
  Sense strand starting at position 2593 of SEQ ID NO: 1561904
uagcuuggcccgucucauu

SEQ ID NO: 1707084 - RNA, 19 nt, Artificial Sequence
  Description of Artificial Sequence: Synthetic oligonucleotide
  Antisense strand to SEQ ID NO: 1707083
aaugagacgggccaagcua

SEQ ID NO: 1707085 - RNA, 19 nt, Artificial Sequence
  Description of Artificial Sequence: Synthetic oligonucleotide
  Sense strand starting at position 2611 of SEQ ID NO: 1561904
uguaacaaauucguaagaa

SEQ ID NO: 1707086 - RNA, 19 nt, Artificial Sequence
  Description of Artificial Sequence: Synthetic oligonucleotide
  Antisense strand to SEQ ID NO: 1707085
uucuuacgaauuuguuaca

SEQ ID NO: 1707087 - RNA, 19 nt, Artificial Sequence
  Description of Artificial Sequence: Synthetic oligonucleotide
  Sense strand starting at position 2624 of SEQ ID NO: 1561904
uaagaacugcgcgaaacua

SEQ ID NO: 1707088 - RNA, 19 nt, Artificial Sequence
  Description of Artificial Sequence: Synthetic oligonucleotide
  Antisense strand to SEQ ID NO: 1707087
uaguuucgcgcaguucuua

SEQ ID NO: 1707089 - RNA, 19 nt, Artificial Sequence
  Description of Artificial Sequence: Synthetic oligonucleotide
  Sense strand starting at position 3074 of SEQ ID NO: 1561904
aaagaacaguguuccauga

SEQ ID NO: 1707090 - RNA, 19 nt, Artificial Sequence
  Description of Artificial Sequence: Synthetic oligonucleotide
  Antisense strand to SEQ ID NO: 1707089
ucauggaacacuguucuuu

SEQ ID NO: 1707091 - RNA, 19 nt, Artificial Sequence
  Description of Artificial Sequence: Synthetic oligonucleotide
  Sense strand starting at position 3081 of SEQ ID NO: 1561904
aguguuccaugauuaagaa

SEQ ID NO: 1707092 - RNA, 19 nt, Artificial Sequence
  Description of Artificial Sequence: Synthetic oligonucleotide
  Antisense strand to SEQ ID NO: 1707091
uucuuaaucauggaacacu

SEQ ID NO: 1707093 - RNA, 19 nt, Artificial Sequence
  Description of Artificial Sequence: Synthetic oligonucleotide
  Sense strand starting at position 3108 of SEQ ID NO: 1561904
gggcaaguaguaggagaaa

SEQ ID NO: 1707094 - RNA, 19 nt, Artificial Sequence
  Description of Artificial Sequence: Synthetic oligonucleotide
  Antisense strand to SEQ ID NO: 1707093
uuucuccuacuacuugccc

SEQ ID NO: 1707095 - RNA, 19 nt, Artificial Sequence
  Description of Artificial Sequence: Synthetic oligonucleotide
  Sense strand starting at position 3174 of SEQ ID NO: 1561904
gacgauucuuggcuccuga

SEQ ID NO: 1707096 - RNA, 19 nt, Artificial Sequence
  Description of Artificial Sequence: Synthetic oligonucleotide
  Antisense strand to SEQ ID NO: 1707095
ucaggagccaagaaucguc

SEQ ID NO: 1707097 - RNA, 19 nt, Artificial Sequence
  Description of Artificial Sequence: Synthetic oligonucleotide
  Sense strand starting at position 3226 of SEQ ID NO: 1561904
gaauaagacugaccuguau

SEQ ID NO: 1707098 - RNA, 19 nt, Artificial Sequence
  Description of Artificial Sequence: Synthetic oligonucleotide
  Antisense strand to SEQ ID NO: 1707097
auacaggucagucuuauuc

SEQ ID NO: 1707099 - RNA, 19 nt, Artificial Sequence
  Description of Artificial Sequence: Synthetic oligonucleotide
  Sense strand starting at position 3251 of SEQ ID NO: 1561904
uaggauauugcggaaaucu

SEQ ID NO: 1707100 - RNA, 19 nt, Artificial Sequence
  Description of Artificial Sequence: Synthetic oligonucleotide
  Antisense strand to SEQ ID NO: 1707099
agauuuccgcaauauccua

SEQ ID NO: 1707101 - RNA, 19 nt, Artificial Sequence
  Description of Artificial Sequence: Synthetic oligonucleotide
  Sense strand starting at position 3263 of SEQ ID NO: 1561904
gaaaucuuggagcacgagu

SEQ ID NO: 1707102 - RNA, 19 nt, Artificial Sequence
  Description of Artificial Sequence: Synthetic oligonucleotide
  Antisense strand to SEQ ID NO: 1707101
acucgugcuccaagauuuc

SEQ ID NO: 1707103 - RNA, 19 nt, Artificial Sequence
  Description of Artificial Sequence: Synthetic oligonucleotide
  Sense strand starting at position 3540 of SEQ ID NO: 1561904
ccagaaauaccuugcaaug

SEQ ID NO: 1707104 - RNA, 19 nt, Artificial Sequence
  Description of Artificial Sequence: Synthetic oligonucleotide
  Antisense strand to SEQ ID NO: 1707103
cauugcaagguauuucugg

SEQ ID NO: 1707105 - RNA, 19 nt, Artificial Sequence
  Description of Artificial Sequence: Synthetic oligonucleotide
  Sense strand starting at position 3626 of SEQ ID NO: 1561904
uaggauaauugguuaugca

SEQ ID NO: 1707106 - RNA, 19 nt, Artificial Sequence
  Description of Artificial Sequence: Synthetic oligonucleotide
  Antisense strand to SEQ ID NO: 1707105
ugcauaaccaauuauccua

SEQ ID NO: 1707107 - RNA, 19 nt, Artificial Sequence
  Description of Artificial Sequence: Synthetic oligonucleotide
  Sense strand starting at position 3636 of SEQ ID NO: 1561904
gguuaugcagccuagauaa

SEQ ID NO: 1707108 - RNA, 19 nt, Artificial Sequence
  Description of Artificial Sequence: Synthetic oligonucleotide
  Antisense strand to SEQ ID NO: 1707107
uuaucuaggcugcauaacc

SEQ ID NO: 1707109 - RNA, 19 nt, Artificial Sequence
  Description of Artificial Sequence: Synthetic oligonucleotide
  Sense strand starting at position 3638 of SEQ ID NO: 1561904
uuaugcagccuagauaaca

SEQ ID NO: 1707110 - RNA, 19 nt, Artificial Sequence
  Description of Artificial Sequence: Synthetic oligonucleotide
  Antisense strand to SEQ ID NO: 1707109
uguuaucuaggcugcauaa

SEQ ID NO: 1707111 - RNA, 19 nt, Artificial Sequence
  Description of Artificial Sequence: Synthetic oligonucleotide
  Sense strand starting at position 3726 of SEQ ID NO: 1561904
ccuaucuugcccuaaagga

SEQ ID NO: 1707112 - RNA, 19 nt, Artificial Sequence
  Description of Artificial Sequence: Synthetic oligonucleotide
  Antisense strand to SEQ ID NO: 1707111
uccuuuagggcaagauagg

SEQ ID NO: 1707113 - RNA, 19 nt, Artificial Sequence
  Description of Artificial Sequence: Synthetic oligonucleotide
  Sense strand starting at position 3855 of SEQ ID NO: 1561904
uggaguuucuacucuggau

SEQ ID NO: 1707114 - RNA, 19 nt, Artificial Sequence
  Description of Artificial Sequence: Synthetic oligonucleotide
  Antisense strand to SEQ ID NO: 1707113
auccagaguagaaacucca

SEQ ID NO: 1707115 - RNA, 19 nt, Artificial Sequence
  Description of Artificial Sequence: Synthetic oligonucleotide
  Sense strand starting at position 3857 of SEQ ID NO: 1561904
gaguuucuacucuggauca

SEQ ID NO: 1707116 - RNA, 19 nt, Artificial Sequence
  Description of Artificial Sequence: Synthetic oligonucleotide
  Antisense strand to SEQ ID NO: 1707115
ugauccagaguagaaacuc

SEQ ID NO: 1707117 - RNA, 19 nt, Artificial Sequence
  Description of Artificial Sequence: Synthetic oligonucleotide
  Sense strand starting at position 3910 of SEQ ID NO: 1561904
gugggauccuacccugacu

SEQ ID NO: 1707118 - RNA, 19 nt, Artificial Sequence
  Description of Artificial Sequence: Synthetic oligonucleotide
  Antisense strand to SEQ ID NO: 1707117
agucaggguaggaucccac

SEQ ID NO: 1707119 - RNA, 19 nt, Artificial Sequence
  Description of Artificial Sequence: Synthetic oligonucleotide
  Sense strand starting at position 3921 of SEQ ID NO: 1561904
cccugacugugcuuauaga

SEQ ID NO: 1707120 - RNA, 19 nt, Artificial Sequence
  Description of Artificial Sequence: Synthetic oligonucleotide
  Antisense strand to SEQ ID NO: 1707119
ucuauaagcacagucaggg

SEQ ID NO: 1707121 - RNA, 19 nt, Artificial Sequence
  Description of Artificial Sequence: Synthetic oligonucleotide
  Sense strand starting at position 99 of SEQ ID NO: 1561905
gugagcagggcuuguuaga

SEQ ID NO: 1707122 - RNA, 19 nt, Artificial Sequence
  Description of Artificial Sequence: Synthetic oligonucleotide
  Antisense strand to SEQ ID NO: 1707121
ucuaacaagcccugcucac

SEQ ID NO: 1707123 - RNA, 19 nt, Artificial Sequence
  Description of Artificial Sequence: Synthetic oligonucleotide
  Sense strand starting at position 110 of SEQ ID NO: 1561905
uuguuagauuguggcuacu

SEQ ID NO: 1707124 - RNA, 19 nt, Artificial Sequence
  Description of Artificial Sequence: Synthetic oligonucleotide
  Antisense strand to SEQ ID NO: 1707123
aguagccacaaucuaacaa

SEQ ID NO: 1707125 - RNA, 19 nt, Artificial Sequence
  Description of Artificial Sequence: Synthetic oligonucleotide
  Sense strand starting at position 112 of SEQ ID NO: 1561905
guuagauuguggcuacuua

SEQ ID NO: 1707126 - RNA, 19 nt, Artificial Sequence
  Description of Artificial Sequence: Synthetic oligonucleotide
  Antisense strand to SEQ ID NO: 1707125
uaaguagccacaaucuaac

SEQ ID NO: 1707127 - RNA, 19 nt, Artificial Sequence
  Description of Artificial Sequence: Synthetic oligonucleotide
  Sense strand starting at position 113 of SEQ ID NO: 1561905
uuagauuguggcuacuuaa

SEQ ID NO: 1707128 - RNA, 19 nt, Artificial Sequence
  Description of Artificial Sequence: Synthetic oligonucleotide
  Antisense strand to SEQ ID NO: 1707127
uuaaguagccacaaucuaa

SEQ ID NO: 1707129 - RNA, 19 nt, Artificial Sequence
  Description of Artificial Sequence: Synthetic oligonucleotide
  Sense strand starting at position 116 of SEQ ID NO: 1561905
gauuguggcuacuuaauaa

SEQ ID NO: 1707130 - RNA, 19 nt, Artificial Sequence
  Description of Artificial Sequence: Synthetic oligonucleotide
  Antisense strand to SEQ ID NO: 1707129
uuauuaaguagccacaauc

SEQ ID NO: 1707131 - RNA, 19 nt, Artificial Sequence
  Description of Artificial Sequence: Synthetic oligonucleotide
  Sense strand starting at position 120 of SEQ ID NO: 1561905
guggcuacuuaauaaaugu

SEQ ID NO: 1707132 - RNA, 19 nt, Artificial Sequence
  Description of Artificial Sequence: Synthetic oligonucleotide
  Antisense strand to SEQ ID NO: 1707131
acauuuauuaaguagccac

SEQ ID NO: 1707133 - RNA, 19 nt, Artificial Sequence
  Description of Artificial Sequence: Synthetic oligonucleotide
  Sense strand starting at position 146 of SEQ ID NO: 1561905
uaugaagucuacccugaga

SEQ ID NO: 1707134 - RNA, 19 nt, Artificial Sequence
  Description of Artificial Sequence: Synthetic oligonucleotide
  Antisense strand to SEQ ID NO: 1707133
ucucaggguagacuucaua

SEQ ID NO: 1707135 - RNA, 19 nt, Artificial Sequence
  Description of Artificial Sequence: Synthetic oligonucleotide
  Sense strand starting at position 198 of SEQ ID NO: 1561905
cccuaauaauguucuggaa

SEQ ID NO: 1707136 - RNA, 19 nt, Artificial Sequence
  Description of Artificial Sequence: Synthetic oligonucleotide
  Antisense strand to SEQ ID NO: 1707135
uuccagaacauuauuaggg

SEQ ID NO: 1707137 - RNA, 19 nt, Artificial Sequence
  Description of Artificial Sequence: Synthetic oligonucleotide
  Sense strand starting at position 200 of SEQ ID NO: 1561905
cuaauaauguucuggaaca

SEQ ID NO: 1707138 - RNA, 19 nt, Artificial Sequence
  Description of Artificial Sequence: Synthetic oligonucleotide
  Antisense strand to SEQ ID NO: 1707137
uguuccagaacauuauuag

SEQ ID NO: 1707139 - RNA, 19 nt, Artificial Sequence
  Description of Artificial Sequence: Synthetic oligonucleotide
  Sense strand starting at position 1424 of SEQ ID NO: 1561905
gcgggacucaccgggauuu

SEQ ID NO: 1707140 - RNA, 19 nt, Artificial Sequence
  Description of Artificial Sequence: Synthetic oligonucleotide
  Antisense strand to SEQ ID NO: 1707139
aaaucccggugagucccgc

SEQ ID NO: 1707141 - RNA, 19 nt, Artificial Sequence
  Description of Artificial Sequence: Synthetic oligonucleotide
  Sense strand starting at position 1984 of SEQ ID NO: 1561905
gacgucaggucacaacauu

SEQ ID NO: 1707142 - RNA, 19 nt, Artificial Sequence
  Description of Artificial Sequence: Synthetic oligonucleotide
  Antisense strand to SEQ ID NO: 1707141
aauguugugaccugacguc

SEQ ID NO: 1707143 - RNA, 19 nt, Artificial Sequence
  Description of Artificial Sequence: Synthetic oligonucleotide
  Sense strand starting at position 2409 of SEQ ID NO: 1561905
agaacaggaugcuagaaau

SEQ ID NO: 1707144 - RNA, 19 nt, Artificial Sequence
  Description of Artificial Sequence: Synthetic oligonucleotide
  Antisense strand to SEQ ID NO: 1707143
auuucuagcauccuguucu

SEQ ID NO: 1707145 - RNA, 19 nt, Artificial Sequence
  Description of Artificial Sequence: Synthetic oligonucleotide
  Sense strand starting at position 2722 of SEQ ID NO: 1561905
gcagaaugcgcagacugaa

SEQ ID NO: 1707146 - RNA, 19 nt, Artificial Sequence
  Description of Artificial Sequence: Synthetic oligonucleotide
  Antisense strand to SEQ ID NO: 1707145
uucagucugcgcauucugc

SEQ ID NO: 1707147 - RNA, 19 nt, Artificial Sequence
  Description of Artificial Sequence: Synthetic oligonucleotide
  Sense strand starting at position 3072 of SEQ ID NO: 1561905
gaauguaguuuaguaacaa

SEQ ID NO: 1707148 - RNA, 19 nt, Artificial Sequence
  Description of Artificial Sequence: Synthetic oligonucleotide
  Antisense strand to SEQ ID NO: 1707147
uuguuacuaaacuacauuc

SEQ ID NO: 1707149 - RNA, 19 nt, Artificial Sequence
  Description of Artificial Sequence: Synthetic oligonucleotide
  Sense strand starting at position 3073 of SEQ ID NO: 1561905
aauguaguuuaguaacaag

SEQ ID NO: 1707150 - RNA, 19 nt, Artificial Sequence
  Description of Artificial Sequence: Synthetic oligonucleotide
  Antisense strand to SEQ ID NO: 1707149
cuuguuacuaaacuacauu

SEQ ID NO: 1707151 - RNA, 19 nt, Artificial Sequence
  Description of Artificial Sequence: Synthetic oligonucleotide
  Sense strand starting at position 3129 of SEQ ID NO: 1561905
uggugagcaaauugguaaa

SEQ ID NO: 1707152 - RNA, 19 nt, Artificial Sequence
  Description of Artificial Sequence: Synthetic oligonucleotide
  Antisense strand to SEQ ID NO: 1707151
uuuaccaauuugcucacca

SEQ ID NO: 1707153 - RNA, 19 nt, Artificial Sequence
  Description of Artificial Sequence: Synthetic oligonucleotide
  Sense strand starting at position 3131 of SEQ ID NO: 1561905
gugagcaaauugguaaaca

SEQ ID NO: 1707154 - RNA, 19 nt, Artificial Sequence
  Description of Artificial Sequence: Synthetic oligonucleotide
  Antisense strand to SEQ ID NO: 1707153
uguuuaccaauuugcucac

SEQ ID NO: 1707155 - RNA, 19 nt, Artificial Sequence
  Description of Artificial Sequence: Synthetic oligonucleotide
  Sense strand starting at position 3132 of SEQ ID NO: 1561905
ugagcaaauugguaaacau

SEQ ID NO: 1707156 - RNA, 19 nt, Artificial Sequence
  Description of Artificial Sequence: Synthetic oligonucleotide
  Antisense strand to SEQ ID NO: 1707155
auguuuaccaauuugcuca

SEQ ID NO: 1707157 - RNA, 19 nt, Artificial Sequence
  Description of Artificial Sequence: Synthetic oligonucleotide
  Sense strand starting at position 3141 of SEQ ID NO: 1561905
ugguaaacaugugaaucua

SEQ ID NO: 1707158 - RNA, 19 nt, Artificial Sequence
  Description of Artificial Sequence: Synthetic oligonucleotide
  Antisense strand to SEQ ID NO: 1707157
uagauucacauguuuacca

SEQ ID NO: 1707159 - RNA, 19 nt, Artificial Sequence
  Description of Artificial Sequence: Synthetic oligonucleotide
  Sense strand starting at position 3191 of SEQ ID NO: 1561905
augauuaauuugugggcca

SEQ ID NO: 1707160 - RNA, 19 nt, Artificial Sequence
  Description of Artificial Sequence: Synthetic oligonucleotide
  Antisense strand to SEQ ID NO: 1707159
uggcccacaaauuaaucau

SEQ ID NO: 1707161 - RNA, 19 nt, Artificial Sequence
  Description of Artificial Sequence: Synthetic oligonucleotide
  Sense strand starting at position 3269 of SEQ ID NO: 1561905
gguuaaagagacugagcau

SEQ ID NO: 1707162 - RNA, 19 nt, Artificial Sequence
  Description of Artificial Sequence: Synthetic oligonucleotide
  Antisense strand to SEQ ID NO: 1707161
augcucagucucuuuaacc

SEQ ID NO: 1707163 - RNA, 19 nt, Artificial Sequence
  Description of Artificial Sequence: Synthetic oligonucleotide
  Sense strand starting at position 3280 of SEQ ID NO: 1561905
cugagcauugucuggcuuu

SEQ ID NO: 1707164 - RNA, 19 nt, Artificial Sequence
  Description of Artificial Sequence: Synthetic oligonucleotide
  Antisense strand to SEQ ID NO: 1707163
aaagccagacaaugcucag

SEQ ID NO: 1707165 - RNA, 19 nt, Artificial Sequence
  Description of Artificial Sequence: Synthetic oligonucleotide
  Sense strand starting at position 3283 of SEQ ID NO: 1561905
agcauugucuggcuuugua

SEQ ID NO: 1707166 - RNA, 19 nt, Artificial Sequence
  Description of Artificial Sequence: Synthetic oligonucleotide
  Antisense strand to SEQ ID NO: 1707165
uacaaagccagacaaugcu

SEQ ID NO: 1707167 - RNA, 19 nt, Artificial Sequence
  Description of Artificial Sequence: Synthetic oligonucleotide
  Sense strand starting at position 3286 of SEQ ID NO: 1561905
auugucuggcuuuguaaag

SEQ ID NO: 1707168 - RNA, 19 nt, Artificial Sequence
  Description of Artificial Sequence: Synthetic oligonucleotide
  Antisense strand to SEQ ID NO: 1707167
cuuuacaaagccagacaau

SEQ ID NO: 1707169 - RNA, 19 nt, Artificial Sequence
  Description of Artificial Sequence: Synthetic oligonucleotide
  Sense strand starting at position 3287 of SEQ ID NO: 1561905
uugucuggcuuuguaaagu

SEQ ID NO: 1707170 - RNA, 19 nt, Artificial Sequence
  Description of Artificial Sequence: Synthetic oligonucleotide
  Antisense strand to SEQ ID NO: 1707169
acuuuacaaagccagacaa

SEQ ID NO: 1707171 - RNA, 19 nt, Artificial Sequence
  Description of Artificial Sequence: Synthetic oligonucleotide
  Sense strand starting at position 3296 of SEQ ID NO: 1561905
uuuguaaagucaggugugu

SEQ ID NO: 1707172 - RNA, 19 nt, Artificial Sequence
  Description of Artificial Sequence: Synthetic oligonucleotide
  Antisense strand to SEQ ID NO: 1707171
acacaccugacuuuacaaa

SEQ ID NO: 1707173 - RNA, 19 nt, Artificial Sequence
  Description of Artificial Sequence: Synthetic oligonucleotide
  Sense strand starting at position 3298 of SEQ ID NO: 1561905
uguaaagucagguguguau

SEQ ID NO: 1707174 - RNA, 19 nt, Artificial Sequence
  Description of Artificial Sequence: Synthetic oligonucleotide
  Antisense strand to SEQ ID NO: 1707173
auacacaccugacuuuaca

SEQ ID NO: 1707175 - RNA, 19 nt, Artificial Sequence
  Description of Artificial Sequence: Synthetic oligonucleotide
  Sense strand starting at position 3300 of SEQ ID NO: 1561905
uaaagucagguguguauuu

SEQ ID NO: 1707176 - RNA, 19 nt, Artificial Sequence
  Description of Artificial Sequence: Synthetic oligonucleotide
  Antisense strand to SEQ ID NO: 1707175
aaauacacaccugacuuua

SEQ ID NO: 1707177 - RNA, 19 nt, Artificial Sequence
  Description of Artificial Sequence: Synthetic oligonucleotide
  Sense strand starting at position 3318 of SEQ ID NO: 1561905
ucagauauuuaagaggauc

SEQ ID NO: 1707178 - RNA, 19 nt, Artificial Sequence
  Description of Artificial Sequence: Synthetic oligonucleotide
  Antisense strand to SEQ ID NO: 1707177
gauccucuuaaauaucuga

SEQ ID NO: 1707179 - RNA, 19 nt, Artificial Sequence
  Description of Artificial Sequence: Synthetic oligonucleotide
  Sense strand starting at position 3380 of SEQ ID NO: 1561905
aaggguagugauggguauu

SEQ ID NO: 1707180 - RNA, 19 nt, Artificial Sequence
  Description of Artificial Sequence: Synthetic oligonucleotide
  Antisense strand to SEQ ID NO: 1707179
aauacccaucacuacccuu

SEQ ID NO: 1707181 - RNA, 19 nt, Artificial Sequence
  Description of Artificial Sequence: Synthetic oligonucleotide
  Sense strand starting at position 3381 of SEQ ID NO: 1561905
aggguagugauggguauua

SEQ ID NO: 1707182 - RNA, 19 nt, Artificial Sequence
  Description of Artificial Sequence: Synthetic oligonucleotide
  Antisense strand to SEQ ID NO: 1707181
uaauacccaucacuacccu

SEQ ID NO: 1707183 - RNA, 19 nt, Artificial Sequence
  Description of Artificial Sequence: Synthetic oligonucleotide
  Sense strand starting at position 3383 of SEQ ID NO: 1561905
gguagugauggguauuaaa

SEQ ID NO: 1707184 - RNA, 19 nt, Artificial Sequence
  Description of Artificial Sequence: Synthetic oligonucleotide
  Antisense strand to SEQ ID NO: 1707183
uuuaauacccaucacuacc

SEQ ID NO: 1707185 - RNA, 19 nt, Artificial Sequence
  Description of Artificial Sequence: Synthetic oligonucleotide
  Sense strand starting at position 3543 of SEQ ID NO: 1561905
gaugcagcucuaugcuauu

SEQ ID NO: 1707186 - RNA, 19 nt, Artificial Sequence
  Description of Artificial Sequence: Synthetic oligonucleotide
  Antisense strand to SEQ ID NO: 1707185
aauagcauagagcugcauc

SEQ ID NO: 1707187 - RNA, 19 nt, Artificial Sequence
  Description of Artificial Sequence: Synthetic oligonucleotide
  Sense strand starting at position 3726 of SEQ ID NO: 1561905
gaggaacucugugaagaga

SEQ ID NO: 1707188 - RNA, 19 nt, Artificial Sequence
  Description of Artificial Sequence: Synthetic oligonucleotide
  Antisense strand to SEQ ID NO: 1707187
ucucuucacagaguuccuc

SEQ ID NO: 1707189 - RNA, 19 nt, Artificial Sequence
  Description of Artificial Sequence: Synthetic oligonucleotide
  Sense strand starting at position 3742 of SEQ ID NO: 1561905
agaggaaaguucugaacuu

SEQ ID NO: 1707190 - RNA, 19 nt, Artificial Sequence
  Description of Artificial Sequence: Synthetic oligonucleotide
  Antisense strand to SEQ ID NO: 1707189
aaguucagaacuuuccucu

SEQ ID NO: 1707191 - RNA, 19 nt, Artificial Sequence
  Description of Artificial Sequence: Synthetic oligonucleotide
  Sense strand starting at position 3743 of SEQ ID NO: 1561905
gaggaaaguucugaacuuc

SEQ ID NO: 1707192 - RNA, 19 nt, Artificial Sequence
  Description of Artificial Sequence: Synthetic oligonucleotide
  Antisense strand to SEQ ID NO: 1707191
gaaguucagaacuuuccuc

SEQ ID NO: 1707193 - RNA, 19 nt, Artificial Sequence
  Description of Artificial Sequence: Synthetic oligonucleotide
  Sense strand starting at position 200 of SEQ ID NO: 1561906
caaagauuguagggacuga

SEQ ID NO: 1707194 - RNA, 19 nt, Artificial Sequence
  Description of Artificial Sequence: Synthetic oligonucleotide
  Antisense strand to SEQ ID NO: 1707193
ucagucccuacaaucuuug

SEQ ID NO: 1707195 - RNA, 19 nt, Artificial Sequence
  Description of Artificial Sequence: Synthetic oligonucleotide
  Sense strand starting at position 584 of SEQ ID NO: 1561906
cagugccuccacuaugagu

SEQ ID NO: 1707196 - RNA, 19 nt, Artificial Sequence
  Description of Artificial Sequence: Synthetic oligonucleotide
  Antisense strand to SEQ ID NO: 1707195
acucauaguggaggcacug

SEQ ID NO: 1707197 - RNA, 19 nt, Artificial Sequence
  Description of Artificial Sequence: Synthetic oligonucleotide
  Sense strand starting at position 586 of SEQ ID NO: 1561906
gugccuccacuaugaguga

SEQ ID NO: 1707198 - RNA, 19 nt, Artificial Sequence
  Description of Artificial Sequence: Synthetic oligonucleotide
  Antisense strand to SEQ ID NO: 1707197
ucacucauaguggaggcac

SEQ ID NO: 1707199 - RNA, 19 nt, Artificial Sequence
  Description of Artificial Sequence: Synthetic oligonucleotide
  Sense strand starting at position 590 of SEQ ID NO: 1561906
cuccacuaugagugacgua

SEQ ID NO: 1707200 - RNA, 19 nt, Artificial Sequence
  Description of Artificial Sequence: Synthetic oligonucleotide
  Antisense strand to SEQ ID NO: 1707199
uacgucacucauaguggag

SEQ ID NO: 1707201 - RNA, 19 nt, Artificial Sequence
  Description of Artificial Sequence: Synthetic oligonucleotide
  Sense strand starting at position 595 of SEQ ID NO: 1561906
cuaugagugacguacaauc

SEQ ID NO: 1707202 - RNA, 19 nt, Artificial Sequence
  Description of Artificial Sequence: Synthetic oligonucleotide
  Antisense strand to SEQ ID NO: 1707201
gauuguacgucacucauag

SEQ ID NO: 1707203 - RNA, 19 nt, Artificial Sequence
  Description of Artificial Sequence: Synthetic oligonucleotide
  Sense strand starting at position 804 of SEQ ID NO: 1561906
aguccugaguccucucaag

SEQ ID NO: 1707204 - RNA, 19 nt, Artificial Sequence
  Description of Artificial Sequence: Synthetic oligonucleotide
  Antisense strand to SEQ ID NO: 1707203
cuugagaggacucaggacu

SEQ ID NO: 1707205 - RNA, 19 nt, Artificial Sequence
  Description of Artificial Sequence: Synthetic oligonucleotide
  Sense strand starting at position 1097 of SEQ ID NO: 1561906
gcccgagccugaguaauuu

SEQ ID NO: 1707206 - RNA, 19 nt, Artificial Sequence
  Description of Artificial Sequence: Synthetic oligonucleotide
  Antisense strand to SEQ ID NO: 1707205
aaauuacucaggcucgggc

SEQ ID NO: 1707207 - RNA, 19 nt, Artificial Sequence
  Description of Artificial Sequence: Synthetic oligonucleotide
  Sense strand starting at position 1277 of SEQ ID NO: 1561906
ugagaacuaucacgggaag

SEQ ID NO: 1707208 - RNA, 19 nt, Artificial Sequence
  Description of Artificial Sequence: Synthetic oligonucleotide
  Antisense strand to SEQ ID NO: 1707207
cuucccgugauaguucuca

SEQ ID NO: 1707209 - RNA, 19 nt, Artificial Sequence
  Description of Artificial Sequence: Synthetic oligonucleotide
  Sense strand starting at position 1618 of SEQ ID NO: 1561906
gccuuaaccuggccgaguu

SEQ ID NO: 1707210 - RNA, 19 nt, Artificial Sequence
  Description of Artificial Sequence: Synthetic oligonucleotide
  Antisense strand to SEQ ID NO: 1707209
aacucggccagguuaaggc

SEQ ID NO: 1707211 - RNA, 19 nt, Artificial Sequence
  Description of Artificial Sequence: Synthetic oligonucleotide
  Sense strand starting at position 1821 of SEQ ID NO: 1561906
uggcuaugcugaguggaau

SEQ ID NO: 1707212 - RNA, 19 nt, Artificial Sequence
  Description of Artificial Sequence: Synthetic oligonucleotide
  Antisense strand to SEQ ID NO: 1707211
auuccacucagcauagcca

SEQ ID NO: 1707213 - RNA, 19 nt, Artificial Sequence
  Description of Artificial Sequence: Synthetic oligonucleotide
  Sense strand starting at position 1822 of SEQ ID NO: 1561906
ggcuaugcugaguggaauc

SEQ ID NO: 1707214 - RNA, 19 nt, Artificial Sequence
  Description of Artificial Sequence: Synthetic oligonucleotide
  Antisense strand to SEQ ID NO: 1707213
gauuccacucagcauagcc

SEQ ID NO: 1707215 - RNA, 19 nt, Artificial Sequence
  Description of Artificial Sequence: Synthetic oligonucleotide
  Sense strand starting at position 1928 of SEQ ID NO: 1561906
acgaucucuccgcagcaaa

SEQ ID NO: 1707216 - RNA, 19 nt, Artificial Sequence
  Description of Artificial Sequence: Synthetic oligonucleotide
  Antisense strand to SEQ ID NO: 1707215
uuugcugcggagagaucgu

SEQ ID NO: 1707217 - RNA, 19 nt, Artificial Sequence
  Description of Artificial Sequence: Synthetic oligonucleotide
  Sense strand starting at position 2039 of SEQ ID NO: 1561906
guuaauuaggccuaaguag

SEQ ID NO: 1707218 - RNA, 19 nt, Artificial Sequence
  Description of Artificial Sequence: Synthetic oligonucleotide
  Antisense strand to SEQ ID NO: 1707217
cuacuuaggccuaauuaac

SEQ ID NO: 1707219 - RNA, 19 nt, Artificial Sequence
  Description of Artificial Sequence: Synthetic oligonucleotide
  Sense strand starting at position 2077 of SEQ ID NO: 1561906
cugggaaauugccuuaaag

SEQ ID NO: 1707220 - RNA, 19 nt, Artificial Sequence
  Description of Artificial Sequence: Synthetic oligonucleotide
  Antisense strand to SEQ ID NO: 1707219
cuuuaaggcaauuucccag

SEQ ID NO: 1707221 - RNA, 19 nt, Artificial Sequence
  Description of Artificial Sequence: Synthetic oligonucleotide
  Sense strand starting at position 2142 of SEQ ID NO: 1561906
cuggaacuugaacgugaua

SEQ ID NO: 1707222 - RNA, 19 nt, Artificial Sequence
  Description of Artificial Sequence: Synthetic oligonucleotide
  Antisense strand to SEQ ID NO: 1707221
uaucacguucaaguuccag

SEQ ID NO: 1707223 - RNA, 19 nt, Artificial Sequence
  Description of Artificial Sequence: Synthetic oligonucleotide
  Sense strand starting at position 2144 of SEQ ID NO: 1561906
ggaacuugaacgugauaac

SEQ ID NO: 1707224 - RNA, 19 nt, Artificial Sequence
  Description of Artificial Sequence: Synthetic oligonucleotide
  Antisense strand to SEQ ID NO: 1707223
guuaucacguucaaguucc

SEQ ID NO: 1707225 - RNA, 19 nt, Artificial Sequence
  Description of Artificial Sequence: Synthetic oligonucleotide
  Sense strand starting at position 2799 of SEQ ID NO: 1561906
gcuccauauccuuaugucu

SEQ ID NO: 1707226 - RNA, 19 nt, Artificial Sequence
  Description of Artificial Sequence: Synthetic oligonucleotide
  Antisense strand to SEQ ID NO: 1707225
agacauaaggauauggagc

SEQ ID NO: 1707227 - RNA, 19 nt, Artificial Sequence
  Description of Artificial Sequence: Synthetic oligonucleotide
  Sense strand starting at position 2828 of SEQ ID NO: 1561906
ggcagaguuggguauucaa

SEQ ID NO: 1707228 - RNA, 19 nt, Artificial Sequence
  Description of Artificial Sequence: Synthetic oligonucleotide
  Antisense strand to SEQ ID NO: 1707227
uugaauacccaacucugcc

SEQ ID NO: 1707229 - RNA, 19 nt, Artificial Sequence
  Description of Artificial Sequence: Synthetic oligonucleotide
  Sense strand starting at position 2994 of SEQ ID NO: 1561906
ggaggagucuccuuugaug

SEQ ID NO: 1707230 - RNA, 19 nt, Artificial Sequence
  Description of Artificial Sequence: Synthetic oligonucleotide
  Antisense strand to SEQ ID NO: 1707229
caucaaaggagacuccucc

SEQ ID NO: 1707231 - RNA, 19 nt, Artificial Sequence
  Description of Artificial Sequence: Synthetic oligonucleotide
  Sense strand starting at position 2996 of SEQ ID NO: 1561906
aggagucuccuuugauguc

SEQ ID NO: 1707232 - RNA, 19 nt, Artificial Sequence
  Description of Artificial Sequence: Synthetic oligonucleotide
  Antisense strand to SEQ ID NO: 1707231
gacaucaaaggagacuccu

SEQ ID NO: 1707233 - RNA, 19 nt, Artificial Sequence
  Description of Artificial Sequence: Synthetic oligonucleotide
  Sense strand starting at position 3181 of SEQ ID NO: 1561906
gacgcaaaccuguguacau

SEQ ID NO: 1707234 - RNA, 19 nt, Artificial Sequence
  Description of Artificial Sequence: Synthetic oligonucleotide
  Antisense strand to SEQ ID NO: 1707233
auguacacagguuugcguc

SEQ ID NO: 1707235 - RNA, 19 nt, Artificial Sequence
  Description of Artificial Sequence: Synthetic oligonucleotide
  Sense strand starting at position 3182 of SEQ ID NO: 1561906
acgcaaaccuguguacauu

SEQ ID NO: 1707236 - RNA, 19 nt, Artificial Sequence
  Description of Artificial Sequence: Synthetic oligonucleotide
  Antisense strand to SEQ ID NO: 1707235
aauguacacagguuugcgu

SEQ ID NO: 1707237 - RNA, 19 nt, Artificial Sequence
  Description of Artificial Sequence: Synthetic oligonucleotide
  Sense strand starting at position 3183 of SEQ ID NO: 1561906
cgcaaaccuguguacauuu

SEQ ID NO: 1707238 - RNA, 19 nt, Artificial Sequence
  Description of Artificial Sequence: Synthetic oligonucleotide
  Antisense strand to SEQ ID NO: 1707237
aaauguacacagguuugcg

SEQ ID NO: 1707239 - RNA, 19 nt, Artificial Sequence
  Description of Artificial Sequence: Synthetic oligonucleotide
  Sense strand starting at position 3191 of SEQ ID NO: 1561906
uguguacauuucuagagag

SEQ ID NO: 1707240 - RNA, 19 nt, Artificial Sequence
  Description of Artificial Sequence: Synthetic oligonucleotide
  Antisense strand to SEQ ID NO: 1707239
cucucuagaaauguacaca

SEQ ID NO: 1707241 - RNA, 19 nt, Artificial Sequence
  Description of Artificial Sequence: Synthetic oligonucleotide
  Sense strand starting at position 3250 of SEQ ID NO: 1561906
gcagauucgcccugacuuc

SEQ ID NO: 1707242 - RNA, 19 nt, Artificial Sequence
  Description of Artificial Sequence: Synthetic oligonucleotide
  Antisense strand to SEQ ID NO: 1707241
gaagucagggcgaaucugc

SEQ ID NO: 1707243 - RNA, 19 nt, Artificial Sequence
  Description of Artificial Sequence: Synthetic oligonucleotide
  Sense strand starting at position 3270 of SEQ ID NO: 1561906
agauaacgcuccucauucu

SEQ ID NO: 1707244 - RNA, 19 nt, Artificial Sequence
  Description of Artificial Sequence: Synthetic oligonucleotide
  Antisense strand to SEQ ID NO: 1707243
agaaugaggagcguuaucu

SEQ ID NO: 1707245 - RNA, 19 nt, Artificial Sequence
  Description of Artificial Sequence: Synthetic oligonucleotide
  Sense strand starting at position 3345 of SEQ ID NO: 1561906
guuguuagguuauugcaaa

SEQ ID NO: 1707246 - RNA, 19 nt, Artificial Sequence
  Description of Artificial Sequence: Synthetic oligonucleotide
  Antisense strand to SEQ ID NO: 1707245
uuugcaauaaccuaacaac

SEQ ID NO: 1707247 - RNA, 19 nt, Artificial Sequence
  Description of Artificial Sequence: Synthetic oligonucleotide
  Sense strand starting at position 3503 of SEQ ID NO: 1561906
gcuuuagcaacauggugaa

SEQ ID NO: 1707248 - RNA, 19 nt, Artificial Sequence
  Description of Artificial Sequence: Synthetic oligonucleotide
  Antisense strand to SEQ ID NO: 1707247
uucaccauguugcuaaagc

SEQ ID NO: 1707249 - RNA, 19 nt, Artificial Sequence
  Description of Artificial Sequence: Synthetic oligonucleotide
  Sense strand starting at position 3768 of SEQ ID NO: 1561906
uaacguauuucuugugaac

SEQ ID NO: 1707250 - RNA, 19 nt, Artificial Sequence
  Description of Artificial Sequence: Synthetic oligonucleotide
  Antisense strand to SEQ ID NO: 1707249
guucacaagaaauacguua

SEQ ID NO: 1707251 - RNA, 19 nt, Artificial Sequence
  Description of Artificial Sequence: Synthetic oligonucleotide
  Sense strand starting at position 3770 of SEQ ID NO: 1561906
acguauuucuugugaacua

SEQ ID NO: 1707252 - RNA, 19 nt, Artificial Sequence
  Description of Artificial Sequence: Synthetic oligonucleotide
  Antisense strand to SEQ ID NO: 1707251
uaguucacaagaaauacgu

SEQ ID NO: 1707253 - RNA, 19 nt, Artificial Sequence
  Description of Artificial Sequence: Synthetic oligonucleotide
  Sense strand starting at position 3771 of SEQ ID NO: 1561906
cguauuucuugugaacuag

SEQ ID NO: 1707254 - RNA, 19 nt, Artificial Sequence
  Description of Artificial Sequence: Synthetic oligonucleotide
  Antisense strand to SEQ ID NO: 1707253
cuaguucacaagaaauacg

SEQ ID NO: 1707255 - RNA, 19 nt, Artificial Sequence
  Description of Artificial Sequence: Synthetic oligonucleotide
  Sense strand starting at position 3777 of SEQ ID NO: 1561906
ucuugugaacuagggaguu

SEQ ID NO: 1707256 - RNA, 19 nt, Artificial Sequence
  Description of Artificial Sequence: Synthetic oligonucleotide
  Antisense strand to SEQ ID NO: 1707255
aacucccuaguucacaaga

SEQ ID NO: 1707257 - RNA, 19 nt, Artificial Sequence
  Description of Artificial Sequence: Synthetic oligonucleotide
  Sense strand starting at position 3783 of SEQ ID NO: 1561906
gaacuagggaguugaaguu

SEQ ID NO: 1707258 - RNA, 19 nt, Artificial Sequence
  Description of Artificial Sequence: Synthetic oligonucleotide
  Antisense strand to SEQ ID NO: 1707257
aacuucaacucccuaguuc

SEQ ID NO: 1707259 - RNA, 19 nt, Artificial Sequence
  Description of Artificial Sequence: Synthetic oligonucleotide
  Sense strand starting at position 3789 of SEQ ID NO: 1561906
gggaguugaaguugaauua

SEQ ID NO: 1707260 - RNA, 19 nt, Artificial Sequence
  Description of Artificial Sequence: Synthetic oligonucleotide
  Antisense strand to SEQ ID NO: 1707259
uaauucaacuucaacuccc

SEQ ID NO: 1707261 - RNA, 19 nt, Artificial Sequence
  Description of Artificial Sequence: Synthetic oligonucleotide
  Sense strand starting at position 3813 of SEQ ID NO: 1561906
aucuuaguuucugcugaga

SEQ ID NO: 1707262 - RNA, 19 nt, Artificial Sequence
  Description of Artificial Sequence: Synthetic oligonucleotide
  Antisense strand to SEQ ID NO: 1707261
ucucagcagaaacuaagau

SEQ ID NO: 1707263 - RNA, 19 nt, Artificial Sequence
  Description of Artificial Sequence: Synthetic oligonucleotide
  Sense strand starting at position 3841 of SEQ ID NO: 1561906
gcauauucucugggccgau

SEQ ID NO: 1707264 - RNA, 19 nt, Artificial Sequence
  Description of Artificial Sequence: Synthetic oligonucleotide
  Antisense strand to SEQ ID NO: 1707263
aucggcccagagaauaugc

SEQ ID NO: 1707265 - RNA, 19 nt, Artificial Sequence
  Description of Artificial Sequence: Synthetic oligonucleotide
  Sense strand starting at position 3842 of SEQ ID NO: 1561906
cauauucucugggccgauu

SEQ ID NO: 1707266 - RNA, 19 nt, Artificial Sequence
  Description of Artificial Sequence: Synthetic oligonucleotide
  Antisense strand to SEQ ID NO: 1707265
aaucggcccagagaauaug

SEQ ID NO: 1707267 - RNA, 19 nt, Artificial Sequence
  Description of Artificial Sequence: Synthetic oligonucleotide
  Sense strand starting at position 3935 of SEQ ID NO: 1561906
cugggaauguggucuauaa

SEQ ID NO: 1707268 - RNA, 19 nt, Artificial Sequence
  Description of Artificial Sequence: Synthetic oligonucleotide
  Antisense strand to SEQ ID NO: 1707267
uuauagaccacauucccag

SEQ ID NO: 1707269 - RNA, 19 nt, Artificial Sequence
  Description of Artificial Sequence: Synthetic oligonucleotide
  Sense strand starting at position 3958 of SEQ ID NO: 1561906
gcuggaaguucgaggaaga

SEQ ID NO: 1707270 - RNA, 19 nt, Artificial Sequence
  Description of Artificial Sequence: Synthetic oligonucleotide
  Antisense strand to SEQ ID NO: 1707269
ucuuccucgaacuuccagc

SEQ ID NO: 1707271 - RNA, 19 nt, Artificial Sequence
  Description of Artificial Sequence: Synthetic oligonucleotide
  Sense strand starting at position 3959 of SEQ ID NO: 1561906
cuggaaguucgaggaagau

SEQ ID NO: 1707272 - RNA, 19 nt, Artificial Sequence
  Description of Artificial Sequence: Synthetic oligonucleotide
  Antisense strand to SEQ ID NO: 1707271
aucuuccucgaacuuccag

SEQ ID NO: 1707273 - RNA, 19 nt, Artificial Sequence
  Description of Artificial Sequence: Synthetic oligonucleotide
  Sense strand starting at position 242 of SEQ ID NO: 1561907
acaaauggcucauccugua

SEQ ID NO: 1707274 - RNA, 19 nt, Artificial Sequence
  Description of Artificial Sequence: Synthetic oligonucleotide
  Antisense strand to SEQ ID NO: 1707273
uacaggaugagccauuugu

SEQ ID NO: 1707275 - RNA, 19 nt, Artificial Sequence
  Description of Artificial Sequence: Synthetic oligonucleotide
  Sense strand starting at position 272 of SEQ ID NO: 1561907
acaguaucucugcacaaag

SEQ ID NO: 1707276 - RNA, 19 nt, Artificial Sequence
  Description of Artificial Sequence: Synthetic oligonucleotide
  Antisense strand to SEQ ID NO: 1707275
cuuugugcagagauacugu

SEQ ID NO: 1707277 - RNA, 19 nt, Artificial Sequence
  Description of Artificial Sequence: Synthetic oligonucleotide
  Sense strand starting at position 442 of SEQ ID NO: 1561907
gagaaaguguaauaaagag

SEQ ID NO: 1707278 - RNA, 19 nt, Artificial Sequence
  Description of Artificial Sequence: Synthetic oligonucleotide
  Antisense strand to SEQ ID NO: 1707277
cucuuuauuacacuuucuc

SEQ ID NO: 1707279 - RNA, 19 nt, Artificial Sequence
  Description of Artificial Sequence: Synthetic oligonucleotide
  Sense strand starting at position 448 of SEQ ID NO: 1561907
guguaauaaagagguuaag

SEQ ID NO: 1707280 - RNA, 19 nt, Artificial Sequence
  Description of Artificial Sequence: Synthetic oligonucleotide
  Antisense strand to SEQ ID NO: 1707279
cuuaaccucuuuauuacac

SEQ ID NO: 1707281 - RNA, 19 nt, Artificial Sequence
  Description of Artificial Sequence: Synthetic oligonucleotide
  Sense strand starting at position 886 of SEQ ID NO: 1561907
ucuuaaagacaguguuagu

SEQ ID NO: 1707282 - RNA, 19 nt, Artificial Sequence
  Description of Artificial Sequence: Synthetic oligonucleotide
  Antisense strand to SEQ ID NO: 1707281
acuaacacugucuuuaaga

SEQ ID NO: 1707283 - RNA, 19 nt, Artificial Sequence
  Description of Artificial Sequence: Synthetic oligonucleotide
  Sense strand starting at position 891 of SEQ ID NO: 1561907
aagacaguguuaguauuaa

SEQ ID NO: 1707284 - RNA, 19 nt, Artificial Sequence
  Description of Artificial Sequence: Synthetic oligonucleotide
  Antisense strand to SEQ ID NO: 1707283
uuaauacuaacacugucuu

SEQ ID NO: 1707285 - RNA, 19 nt, Artificial Sequence
  Description of Artificial Sequence: Synthetic oligonucleotide
  Sense strand starting at position 933 of SEQ ID NO: 1561907
cuuaacagugcuugacaca

SEQ ID NO: 1707286 - RNA, 19 nt, Artificial Sequence
  Description of Artificial Sequence: Synthetic oligonucleotide
  Antisense strand to SEQ ID NO: 1707285
ugugucaagcacuguuaag

SEQ ID NO: 1707287 - RNA, 19 nt, Artificial Sequence
  Description of Artificial Sequence: Synthetic oligonucleotide
  Sense strand starting at position 934 of SEQ ID NO: 1561907
uuaacagugcuugacacaa

SEQ ID NO: 1707288 - RNA, 19 nt, Artificial Sequence
  Description of Artificial Sequence: Synthetic oligonucleotide
  Antisense strand to SEQ ID NO: 1707287
uugugucaagcacuguuaa

SEQ ID NO: 1707289 - RNA, 19 nt, Artificial Sequence
  Description of Artificial Sequence: Synthetic oligonucleotide
  Sense strand starting at position 1001 of SEQ ID NO: 1561907
gagacaugccaucggagaa

SEQ ID NO: 1707290 - RNA, 19 nt, Artificial Sequence
  Description of Artificial Sequence: Synthetic oligonucleotide
  Antisense strand to SEQ ID NO: 1707289
uucuccgauggcaugucuc

SEQ ID NO: 1707291 - RNA, 19 nt, Artificial Sequence
  Description of Artificial Sequence: Synthetic oligonucleotide
  Sense strand starting at position 1152 of SEQ ID NO: 1561907
auaccaucccguuauacug

SEQ ID NO: 1707292 - RNA, 19 nt, Artificial Sequence
  Description of Artificial Sequence: Synthetic oligonucleotide
  Antisense strand to SEQ ID NO: 1707291
caguauaacgggaugguau

SEQ ID NO: 1707293 - RNA, 19 nt, Artificial Sequence
  Description of Artificial Sequence: Synthetic oligonucleotide
  Sense strand starting at position 1186 of SEQ ID NO: 1561907
uaauguggauuccuggaga

SEQ ID NO: 1707294 - RNA, 19 nt, Artificial Sequence
  Description of Artificial Sequence: Synthetic oligonucleotide
  Antisense strand to SEQ ID NO: 1707293
ucuccaggaauccacauua

SEQ ID NO: 1707295 - RNA, 19 nt, Artificial Sequence
  Description of Artificial Sequence: Synthetic oligonucleotide
  Sense strand starting at position 1189 of SEQ ID NO: 1561907
uguggauuccuggagagca

SEQ ID NO: 1707296 - RNA, 19 nt, Artificial Sequence
  Description of Artificial Sequence: Synthetic oligonucleotide
  Antisense strand to SEQ ID NO: 1707295
ugcucuccaggaauccaca

SEQ ID NO: 1707297 - RNA, 19 nt, Artificial Sequence
  Description of Artificial Sequence: Synthetic oligonucleotide
  Sense strand starting at position 1207 of SEQ ID NO: 1561907
aaaucuuuguucccgggaa

SEQ ID NO: 1707298 - RNA, 19 nt, Artificial Sequence
  Description of Artificial Sequence: Synthetic oligonucleotide
  Antisense strand to SEQ ID NO: 1707297
uucccgggaacaaagauuu

SEQ ID NO: 1707299 - RNA, 19 nt, Artificial Sequence
  Description of Artificial Sequence: Synthetic oligonucleotide
  Sense strand starting at position 1323 of SEQ ID NO: 1561907
cauacaucgcgcuaagagu

SEQ ID NO: 1707300 - RNA, 19 nt, Artificial Sequence
  Description of Artificial Sequence: Synthetic oligonucleotide
  Antisense strand to SEQ ID NO: 1707299
acucuuagcgcgauguaug

SEQ ID NO: 1707301 - RNA, 19 nt, Artificial Sequence
  Description of Artificial Sequence: Synthetic oligonucleotide
  Sense strand starting at position 1330 of SEQ ID NO: 1561907
cgcgcuaagaguuuaaugu

SEQ ID NO: 1707302 - RNA, 19 nt, Artificial Sequence
  Description of Artificial Sequence: Synthetic oligonucleotide
  Antisense strand to SEQ ID NO: 1707301
acauuaaacucuuagcgcg

SEQ ID NO: 1707303 - RNA, 19 nt, Artificial Sequence
  Description of Artificial Sequence: Synthetic oligonucleotide
  Sense strand starting at position 1331 of SEQ ID NO: 1561907
gcgcuaagaguuuaaugug

SEQ ID NO: 1707304 - RNA, 19 nt, Artificial Sequence
  Description of Artificial Sequence: Synthetic oligonucleotide
  Antisense strand to SEQ ID NO: 1707303
cacauuaaacucuuagcgc

SEQ ID NO: 1707305 - RNA, 19 nt, Artificial Sequence
  Description of Artificial Sequence: Synthetic oligonucleotide
  Sense strand starting at position 1336 of SEQ ID NO: 1561907
aagaguuuaauguggguag

SEQ ID NO: 1707306 - RNA, 19 nt, Artificial Sequence
  Description of Artificial Sequence: Synthetic oligonucleotide
  Antisense strand to SEQ ID NO: 1707305
cuacccacauuaaacucuu

SEQ ID NO: 1707307 - RNA, 19 nt, Artificial Sequence
  Description of Artificial Sequence: Synthetic oligonucleotide
  Sense strand starting at position 1338 of SEQ ID NO: 1561907
gaguuuaauguggguagua

SEQ ID NO: 1707308 - RNA, 19 nt, Artificial Sequence
  Description of Artificial Sequence: Synthetic oligonucleotide
  Antisense strand to SEQ ID NO: 1707307
uacuacccacauuaaacuc

SEQ ID NO: 1707309 - RNA, 19 nt, Artificial Sequence
  Description of Artificial Sequence: Synthetic oligonucleotide
  Sense strand starting at position 1339 of SEQ ID NO: 1561907
aguuuaauguggguaguau

SEQ ID NO: 1707310 - RNA, 19 nt, Artificial Sequence
  Description of Artificial Sequence: Synthetic oligonucleotide
  Antisense strand to SEQ ID NO: 1707309
auacuacccacauuaaacu

SEQ ID NO: 1707311 - RNA, 19 nt, Artificial Sequence
  Description of Artificial Sequence: Synthetic oligonucleotide
  Sense strand starting at position 1340 of SEQ ID NO: 1561907
guuuaauguggguaguauu

SEQ ID NO: 1707312 - RNA, 19 nt, Artificial Sequence
  Description of Artificial Sequence: Synthetic oligonucleotide
  Antisense strand to SEQ ID NO: 1707311
aauacuacccacauuaaac

SEQ ID NO: 1707313 - RNA, 19 nt, Artificial Sequence
  Description of Artificial Sequence: Synthetic oligonucleotide
  Sense strand starting at position 2167 of SEQ ID NO: 1561907
cggugugacucaguuacaa

SEQ ID NO: 1707314 - RNA, 19 nt, Artificial Sequence
  Description of Artificial Sequence: Synthetic oligonucleotide
  Antisense strand to SEQ ID NO: 1707313
uuguaacugagucacaccg

SEQ ID NO: 1707315 - RNA, 19 nt, Artificial Sequence
  Description of Artificial Sequence: Synthetic oligonucleotide
  Sense strand starting at position 2245 of SEQ ID NO: 1561907
ugcuuagagauguauggag

SEQ ID NO: 1707316 - RNA, 19 nt, Artificial Sequence
  Description of Artificial Sequence: Synthetic oligonucleotide
  Antisense strand to SEQ ID NO: 1707315
cuccauacaucucuaagca

SEQ ID NO: 1707317 - RNA, 19 nt, Artificial Sequence
  Description of Artificial Sequence: Synthetic oligonucleotide
  Sense strand starting at position 2247 of SEQ ID NO: 1561907
cuuagagauguauggaggu

SEQ ID NO: 1707318 - RNA, 19 nt, Artificial Sequence
  Description of Artificial Sequence: Synthetic oligonucleotide
  Antisense strand to SEQ ID NO: 1707317
accuccauacaucucuaag

SEQ ID NO: 1707319 - RNA, 19 nt, Artificial Sequence
  Description of Artificial Sequence: Synthetic oligonucleotide
  Sense strand starting at position 2383 of SEQ ID NO: 1561907
uucuguaagaauggguuau

SEQ ID NO: 1707320 - RNA, 19 nt, Artificial Sequence
  Description of Artificial Sequence: Synthetic oligonucleotide
  Antisense strand to SEQ ID NO: 1707319
auaacccauucuuacagaa

SEQ ID NO: 1707321 - RNA, 19 nt, Artificial Sequence
  Description of Artificial Sequence: Synthetic oligonucleotide
  Sense strand starting at position 2384 of SEQ ID NO: 1561907
ucuguaagaauggguuauu

SEQ ID NO: 1707322 - RNA, 19 nt, Artificial Sequence
  Description of Artificial Sequence: Synthetic oligonucleotide
  Antisense strand to SEQ ID NO: 1707321
aauaacccauucuuacaga

SEQ ID NO: 1707323 - RNA, 19 nt, Artificial Sequence
  Description of Artificial Sequence: Synthetic oligonucleotide
  Sense strand starting at position 2791 of SEQ ID NO: 1561907
ugcaauaucaugcggcaua

SEQ ID NO: 1707324 - RNA, 19 nt, Artificial Sequence
  Description of Artificial Sequence: Synthetic oligonucleotide
  Antisense strand to SEQ ID NO: 1707323
uaugccgcaugauauugca

SEQ ID NO: 1707325 - RNA, 19 nt, Artificial Sequence
  Description of Artificial Sequence: Synthetic oligonucleotide
  Sense strand starting at position 2852 of SEQ ID NO: 1561907
gucugucuccuguaaaguc

SEQ ID NO: 1707326 - RNA, 19 nt, Artificial Sequence
  Description of Artificial Sequence: Synthetic oligonucleotide
  Antisense strand to SEQ ID NO: 1707325
gacuuuacaggagacagac

SEQ ID NO: 1707327 - RNA, 19 nt, Artificial Sequence
  Description of Artificial Sequence: Synthetic oligonucleotide
  Sense strand starting at position 3010 of SEQ ID NO: 1561907
gucuccugggcucgagaga

SEQ ID NO: 1707328 - RNA, 19 nt, Artificial Sequence
  Description of Artificial Sequence: Synthetic oligonucleotide
  Antisense strand to SEQ ID NO: 1707327
ucucucgagcccaggagac

SEQ ID NO: 1707329 - RNA, 19 nt, Artificial Sequence
  Description of Artificial Sequence: Synthetic oligonucleotide
  Sense strand starting at position 3098 of SEQ ID NO: 1561907
ucaagagagccuuggcuga

SEQ ID NO: 1707330 - RNA, 19 nt, Artificial Sequence
  Description of Artificial Sequence: Synthetic oligonucleotide
  Antisense strand to SEQ ID NO: 1707329
ucagccaaggcucucuuga

SEQ ID NO: 1707331 - RNA, 19 nt, Artificial Sequence
  Description of Artificial Sequence: Synthetic oligonucleotide
  Sense strand starting at position 3342 of SEQ ID NO: 1561907
agagguugcagucagacuu

SEQ ID NO: 1707332 - RNA, 19 nt, Artificial Sequence
  Description of Artificial Sequence: Synthetic oligonucleotide
  Antisense strand to SEQ ID NO: 1707331
aagucugacugcaaccucu

SEQ ID NO: 1707333 - RNA, 19 nt, Artificial Sequence
  Description of Artificial Sequence: Synthetic oligonucleotide
  Sense strand starting at position 3349 of SEQ ID NO: 1561907
gcagucagacuucgucuaa

SEQ ID NO: 1707334 - RNA, 19 nt, Artificial Sequence
  Description of Artificial Sequence: Synthetic oligonucleotide
  Antisense strand to SEQ ID NO: 1707333
uuagacgaagucugacugc

SEQ ID NO: 1707335 - RNA, 19 nt, Artificial Sequence
  Description of Artificial Sequence: Synthetic oligonucleotide
  Sense strand starting at position 3350 of SEQ ID NO: 1561907
cagucagacuucgucuaaa

SEQ ID NO: 1707336 - RNA, 19 nt, Artificial Sequence
  Description of Artificial Sequence: Synthetic oligonucleotide
  Antisense strand to SEQ ID NO: 1707335
uuuagacgaagucugacug

SEQ ID NO: 1707337 - RNA, 19 nt, Artificial Sequence
  Description of Artificial Sequence: Synthetic oligonucleotide
  Sense strand starting at position 3433 of SEQ ID NO: 1561907
ugacucacucagugucaga

SEQ ID NO: 1707338 - RNA, 19 nt, Artificial Sequence
  Description of Artificial Sequence: Synthetic oligonucleotide
  Antisense strand to SEQ ID NO: 1707337
ucugacacugagugaguca

SEQ ID NO: 1707339 - RNA, 19 nt, Artificial Sequence
  Description of Artificial Sequence: Synthetic oligonucleotide
  Sense strand starting at position 3440 of SEQ ID NO: 1561907
cucagugucagagguagau

SEQ ID NO: 1707340 - RNA, 19 nt, Artificial Sequence
  Description of Artificial Sequence: Synthetic oligonucleotide
  Antisense strand to SEQ ID NO: 1707339
aucuaccucugacacugag

SEQ ID NO: 1707341 - RNA, 19 nt, Artificial Sequence
  Description of Artificial Sequence: Synthetic oligonucleotide
  Sense strand starting at position 3481 of SEQ ID NO: 1561907
uugucuggguaucauuuau

SEQ ID NO: 1707342 - RNA, 19 nt, Artificial Sequence
  Description of Artificial Sequence: Synthetic oligonucleotide
  Antisense strand to SEQ ID NO: 1707341
auaaaugauacccagacaa

SEQ ID NO: 1707343 - RNA, 19 nt, Artificial Sequence
  Description of Artificial Sequence: Synthetic oligonucleotide
  Sense strand starting at position 3529 of SEQ ID NO: 1561907
caaucaggcccuggugaaa

SEQ ID NO: 1707344 - RNA, 19 nt, Artificial Sequence
  Description of Artificial Sequence: Synthetic oligonucleotide
  Antisense strand to SEQ ID NO: 1707343
uuucaccagggccugauug

SEQ ID NO: 1707345 - RNA, 19 nt, Artificial Sequence
  Description of Artificial Sequence: Synthetic oligonucleotide
  Sense strand starting at position 3552 of SEQ ID NO: 1561907
gacacaaucugaucauggu

SEQ ID NO: 1707346 - RNA, 19 nt, Artificial Sequence
  Description of Artificial Sequence: Synthetic oligonucleotide
  Antisense strand to SEQ ID NO: 1707345
accaugaucagauuguguc

SEQ ID NO: 1707347 - RNA, 19 nt, Artificial Sequence
  Description of Artificial Sequence: Synthetic oligonucleotide
  Sense strand starting at position 3556 of SEQ ID NO: 1561907
caaucugaucaugguggua

SEQ ID NO: 1707348 - RNA, 19 nt, Artificial Sequence
  Description of Artificial Sequence: Synthetic oligonucleotide
  Antisense strand to SEQ ID NO: 1707347
uaccaccaugaucagauug

SEQ ID NO: 1707349 - RNA, 19 nt, Artificial Sequence
  Description of Artificial Sequence: Synthetic oligonucleotide
  Sense strand starting at position 3569 of SEQ ID NO: 1561907
gugguacgugccuuuaguu

SEQ ID NO: 1707350 - RNA, 19 nt, Artificial Sequence
  Description of Artificial Sequence: Synthetic oligonucleotide
  Antisense strand to SEQ ID NO: 1707349
aacuaaaggcacguaccac

SEQ ID NO: 1707351 - RNA, 19 nt, Artificial Sequence
  Description of Artificial Sequence: Synthetic oligonucleotide
  Sense strand starting at position 3902 of SEQ ID NO: 1561907
ggccaaaucucacccaguu

SEQ ID NO: 1707352 - RNA, 19 nt, Artificial Sequence
  Description of Artificial Sequence: Synthetic oligonucleotide
  Antisense strand to SEQ ID NO: 1707351
aacugggugagauuuggcc

SEQ ID NO: 1707353 - RNA, 19 nt, Artificial Sequence
  Description of Artificial Sequence: Synthetic oligonucleotide
  Sense strand starting at position 281 of SEQ ID NO: 1561908
ggauauaacccgcgcaaga

SEQ ID NO: 1707354 - RNA, 19 nt, Artificial Sequence
  Description of Artificial Sequence: Synthetic oligonucleotide
  Antisense strand to SEQ ID NO: 1707353
ucuugcgcggguuauaucc

SEQ ID NO: 1707355 - RNA, 19 nt, Artificial Sequence
  Description of Artificial Sequence: Synthetic oligonucleotide
  Sense strand starting at position 655 of SEQ ID NO: 1561908
ccaugcugaagcuguguua

SEQ ID NO: 1707356 - RNA, 19 nt, Artificial Sequence
  Description of Artificial Sequence: Synthetic oligonucleotide
  Antisense strand to SEQ ID NO: 1707355
uaacacagcuucagcaugg

SEQ ID NO: 1707357 - RNA, 19 nt, Artificial Sequence
  Description of Artificial Sequence: Synthetic oligonucleotide
  Sense strand starting at position 662 of SEQ ID NO: 1561908
gaagcuguguuagccauuu

SEQ ID NO: 1707358 - RNA, 19 nt, Artificial Sequence
  Description of Artificial Sequence: Synthetic oligonucleotide
  Antisense strand to SEQ ID NO: 1707357
aaauggcuaacacagcuuc

SEQ ID NO: 1707359 - RNA, 19 nt, Artificial Sequence
  Description of Artificial Sequence: Synthetic oligonucleotide
  Sense strand starting at position 687 of SEQ ID NO: 1561908
ugcuguuucuuggcagaga

SEQ ID NO: 1707360 - RNA, 19 nt, Artificial Sequence
  Description of Artificial Sequence: Synthetic oligonucleotide
  Antisense strand to SEQ ID NO: 1707359
ucucugccaagaaacagca

SEQ ID NO: 1707361 - RNA, 19 nt, Artificial Sequence
  Description of Artificial Sequence: Synthetic oligonucleotide
  Sense strand starting at position 755 of SEQ ID NO: 1561908
ccgugaaugcgccuauucu

SEQ ID NO: 1707362 - RNA, 19 nt, Artificial Sequence
  Description of Artificial Sequence: Synthetic oligonucleotide
  Antisense strand to SEQ ID NO: 1707361
agaauaggcgcauucacgg

SEQ ID NO: 1707363 - RNA, 19 nt, Artificial Sequence
  Description of Artificial Sequence: Synthetic oligonucleotide
  Sense strand starting at position 810 of SEQ ID NO: 1561908
cuucucaucccggauucuu

SEQ ID NO: 1707364 - RNA, 19 nt, Artificial Sequence
  Description of Artificial Sequence: Synthetic oligonucleotide
  Antisense strand to SEQ ID NO: 1707363
aagaauccgggaugagaag

SEQ ID NO: 1707365 - RNA, 19 nt, Artificial Sequence
  Description of Artificial Sequence: Synthetic oligonucleotide
  Sense strand starting at position 818 of SEQ ID NO: 1561908
cccggauucuucucccuuu

SEQ ID NO: 1707366 - RNA, 19 nt, Artificial Sequence
  Description of Artificial Sequence: Synthetic oligonucleotide
  Antisense strand to SEQ ID NO: 1707365
aaagggagaagaauccggg

SEQ ID NO: 1707367 - RNA, 19 nt, Artificial Sequence
  Description of Artificial Sequence: Synthetic oligonucleotide
  Sense strand starting at position 1028 of SEQ ID NO: 1561908
auacuuuccuacccggaga

SEQ ID NO: 1707368 - RNA, 19 nt, Artificial Sequence
  Description of Artificial Sequence: Synthetic oligonucleotide
  Antisense strand to SEQ ID NO: 1707367
ucuccggguaggaaaguau

SEQ ID NO: 1707369 - RNA, 19 nt, Artificial Sequence
  Description of Artificial Sequence: Synthetic oligonucleotide
  Sense strand starting at position 1059 of SEQ ID NO: 1561908
ccuaaaucuugguuaaggu

SEQ ID NO: 1707370 - RNA, 19 nt, Artificial Sequence
  Description of Artificial Sequence: Synthetic oligonucleotide
  Antisense strand to SEQ ID NO: 1707369
accuuaaccaagauuuagg

SEQ ID NO: 1707371 - RNA, 19 nt, Artificial Sequence
  Description of Artificial Sequence: Synthetic oligonucleotide
  Sense strand starting at position 1060 of SEQ ID NO: 1561908
cuaaaucuugguuaagguu

SEQ ID NO: 1707372 - RNA, 19 nt, Artificial Sequence
  Description of Artificial Sequence: Synthetic oligonucleotide
  Antisense strand to SEQ ID NO: 1707371
aaccuuaaccaagauuuag

SEQ ID NO: 1707373 - RNA, 19 nt, Artificial Sequence
  Description of Artificial Sequence: Synthetic oligonucleotide
  Sense strand starting at position 1088 of SEQ ID NO: 1561908
ccauucuuggucugagcca

SEQ ID NO: 1707374 - RNA, 19 nt, Artificial Sequence
  Description of Artificial Sequence: Synthetic oligonucleotide
  Antisense strand to SEQ ID NO: 1707373
uggcucagaccaagaaugg

SEQ ID NO: 1707375 - RNA, 19 nt, Artificial Sequence
  Description of Artificial Sequence: Synthetic oligonucleotide
  Sense strand starting at position 1089 of SEQ ID NO: 1561908
cauucuuggucugagccaa

SEQ ID NO: 1707376 - RNA, 19 nt, Artificial Sequence
  Description of Artificial Sequence: Synthetic oligonucleotide
  Antisense strand to SEQ ID NO: 1707375
uuggcucagaccaagaaug

SEQ ID NO: 1707377 - RNA, 19 nt, Artificial Sequence
  Description of Artificial Sequence: Synthetic oligonucleotide
  Sense strand starting at position 1286 of SEQ ID NO: 1561908
cugggauuccucugaggag

SEQ ID NO: 1707378 - RNA, 19 nt, Artificial Sequence
  Description of Artificial Sequence: Synthetic oligonucleotide
  Antisense strand to SEQ ID NO: 1707377
cuccucagaggaaucccag

SEQ ID NO: 1707379 - RNA, 19 nt, Artificial Sequence
  Description of Artificial Sequence: Synthetic oligonucleotide
  Sense strand starting at position 1287 of SEQ ID NO: 1561908
ugggauuccucugaggagu

SEQ ID NO: 1707380 - RNA, 19 nt, Artificial Sequence
  Description of Artificial Sequence: Synthetic oligonucleotide
  Antisense strand to SEQ ID NO: 1707379
acuccucagaggaauccca

SEQ ID NO: 1707381 - RNA, 19 nt, Artificial Sequence
  Description of Artificial Sequence: Synthetic oligonucleotide
  Sense strand starting at position 1289 of SEQ ID NO: 1561908
ggauuccucugaggaguua

SEQ ID NO: 1707382 - RNA, 19 nt, Artificial Sequence
  Description of Artificial Sequence: Synthetic oligonucleotide
  Antisense strand to SEQ ID NO: 1707381
uaacuccucagaggaaucc

SEQ ID NO: 1707383 - RNA, 19 nt, Artificial Sequence
  Description of Artificial Sequence: Synthetic oligonucleotide
  Sense strand starting at position 1300 of SEQ ID NO: 1561908
aggaguuaauccuugcauu

SEQ ID NO: 1707384 - RNA, 19 nt, Artificial Sequence
  Description of Artificial Sequence: Synthetic oligonucleotide
  Antisense strand to SEQ ID NO: 1707383
aaugcaaggauuaacuccu

SEQ ID NO: 1707385 - RNA, 19 nt, Artificial Sequence
  Description of Artificial Sequence: Synthetic oligonucleotide
  Sense strand starting at position 1301 of SEQ ID NO: 1561908
ggaguuaauccuugcauua

SEQ ID NO: 1707386 - RNA, 19 nt, Artificial Sequence
  Description of Artificial Sequence: Synthetic oligonucleotide
  Antisense strand to SEQ ID NO: 1707385
uaaugcaaggauuaacucc

SEQ ID NO: 1707387 - RNA, 19 nt, Artificial Sequence
  Description of Artificial Sequence: Synthetic oligonucleotide
  Sense strand starting at position 1334 of SEQ ID NO: 1561908
cagagaugcccugagguga

SEQ ID NO: 1707388 - RNA, 19 nt, Artificial Sequence
  Description of Artificial Sequence: Synthetic oligonucleotide
  Antisense strand to SEQ ID NO: 1707387
ucaccucagggcaucucug

SEQ ID NO: 1707389 - RNA, 19 nt, Artificial Sequence
  Description of Artificial Sequence: Synthetic oligonucleotide
  Sense strand starting at position 1376 of SEQ ID NO: 1561908
ggaggagaggccuguaaau

SEQ ID NO: 1707390 - RNA, 19 nt, Artificial Sequence
  Description of Artificial Sequence: Synthetic oligonucleotide
  Antisense strand to SEQ ID NO: 1707389
auuuacaggccucuccucc

SEQ ID NO: 1707391 - RNA, 19 nt, Artificial Sequence
  Description of Artificial Sequence: Synthetic oligonucleotide
  Sense strand starting at position 1489 of SEQ ID NO: 1561908
gggcucgauuuggaaagga

SEQ ID NO: 1707392 - RNA, 19 nt, Artificial Sequence
  Description of Artificial Sequence: Synthetic oligonucleotide
  Antisense strand to SEQ ID NO: 1707391
uccuuuccaaaucgagccc

SEQ ID NO: 1707393 - RNA, 19 nt, Artificial Sequence
  Description of Artificial Sequence: Synthetic oligonucleotide
  Sense strand starting at position 2151 of SEQ ID NO: 1561908
ugguccugccaagaggaau

SEQ ID NO: 1707394 - RNA, 19 nt, Artificial Sequence
  Description of Artificial Sequence: Synthetic oligonucleotide
  Antisense strand to SEQ ID NO: 1707393
auuccucuuggcaggacca

SEQ ID NO: 1707395 - RNA, 19 nt, Artificial Sequence
  Description of Artificial Sequence: Synthetic oligonucleotide
  Sense strand starting at position 2268 of SEQ ID NO: 1561908
cugcaauugcucgggccua

SEQ ID NO: 1707396 - RNA, 19 nt, Artificial Sequence
  Description of Artificial Sequence: Synthetic oligonucleotide
  Antisense strand to SEQ ID NO: 1707395
uaggcccgagcaauugcag

SEQ ID NO: 1707397 - RNA, 19 nt, Artificial Sequence
  Description of Artificial Sequence: Synthetic oligonucleotide
  Sense strand starting at position 2361 of SEQ ID NO: 1561908
ggaccaaugucaucugccu

SEQ ID NO: 1707398 - RNA, 19 nt, Artificial Sequence
  Description of Artificial Sequence: Synthetic oligonucleotide
  Antisense strand to SEQ ID NO: 1707397
aggcagaugacauuggucc

SEQ ID NO: 1707399 - RNA, 19 nt, Artificial Sequence
  Description of Artificial Sequence: Synthetic oligonucleotide
  Sense strand starting at position 2385 of SEQ ID NO: 1561908
ccuguaaucaaggguagga

SEQ ID NO: 1707400 - RNA, 19 nt, Artificial Sequence
  Description of Artificial Sequence: Synthetic oligonucleotide
  Antisense strand to SEQ ID NO: 1707399
uccuacccuugauuacagg

SEQ ID NO: 1707401 - RNA, 19 nt, Artificial Sequence
  Description of Artificial Sequence: Synthetic oligonucleotide
  Sense strand starting at position 2421 of SEQ ID NO: 1561908
ggccacuucucaugggaga

SEQ ID NO: 1707402 - RNA, 19 nt, Artificial Sequence
  Description of Artificial Sequence: Synthetic oligonucleotide
  Antisense strand to SEQ ID NO: 1707401
ucucccaugagaaguggcc

SEQ ID NO: 1707403 - RNA, 19 nt, Artificial Sequence
  Description of Artificial Sequence: Synthetic oligonucleotide
  Sense strand starting at position 2422 of SEQ ID NO: 1561908
gccacuucucaugggagaa

SEQ ID NO: 1707404 - RNA, 19 nt, Artificial Sequence
  Description of Artificial Sequence: Synthetic oligonucleotide
  Antisense strand to SEQ ID NO: 1707403
uucucccaugagaaguggc

SEQ ID NO: 1707405 - RNA, 19 nt, Artificial Sequence
  Description of Artificial Sequence: Synthetic oligonucleotide
  Sense strand starting at position 2678 of SEQ ID NO: 1561908
ucccaaggccaguauaagu

SEQ ID NO: 1707406 - RNA, 19 nt, Artificial Sequence
  Description of Artificial Sequence: Synthetic oligonucleotide
  Antisense strand to SEQ ID NO: 1707405
acuuauacuggccuuggga

SEQ ID NO: 1707407 - RNA, 19 nt, Artificial Sequence
  Description of Artificial Sequence: Synthetic oligonucleotide
  Sense strand starting at position 3269 of SEQ ID NO: 1561908
ugagaucucagcuauuggu

SEQ ID NO: 1707408 - RNA, 19 nt, Artificial Sequence
  Description of Artificial Sequence: Synthetic oligonucleotide
  Antisense strand to SEQ ID NO: 1707407
accaauagcugagaucuca

SEQ ID NO: 1707409 - RNA, 19 nt, Artificial Sequence
  Description of Artificial Sequence: Synthetic oligonucleotide
  Sense strand starting at position 3322 of SEQ ID NO: 1561908
cccacuuuggucuauaguu

SEQ ID NO: 1707410 - RNA, 19 nt, Artificial Sequence
  Description of Artificial Sequence: Synthetic oligonucleotide
  Antisense strand to SEQ ID NO: 1707409
aacuauagaccaaaguggg

SEQ ID NO: 1707411 - RNA, 19 nt, Artificial Sequence
  Description of Artificial Sequence: Synthetic oligonucleotide
  Sense strand starting at position 3327 of SEQ ID NO: 1561908
uuuggucuauaguucuaca

SEQ ID NO: 1707412 - RNA, 19 nt, Artificial Sequence
  Description of Artificial Sequence: Synthetic oligonucleotide
  Antisense strand to SEQ ID NO: 1707411
uguagaacuauagaccaaa

SEQ ID NO: 1707413 - RNA, 19 nt, Artificial Sequence
  Description of Artificial Sequence: Synthetic oligonucleotide
  Sense strand starting at position 3330 of SEQ ID NO: 1561908
ggucuauaguucuacagca

SEQ ID NO: 1707414 - RNA, 19 nt, Artificial Sequence
  Description of Artificial Sequence: Synthetic oligonucleotide
  Antisense strand to SEQ ID NO: 1707413
ugcuguagaacuauagacc

SEQ ID NO: 1707415 - RNA, 19 nt, Artificial Sequence
  Description of Artificial Sequence: Synthetic oligonucleotide
  Sense strand starting at position 3337 of SEQ ID NO: 1561908
aguucuacagcaggagauu

SEQ ID NO: 1707416 - RNA, 19 nt, Artificial Sequence
  Description of Artificial Sequence: Synthetic oligonucleotide
  Antisense strand to SEQ ID NO: 1707415
aaucuccugcuguagaacu

SEQ ID NO: 1707417 - RNA, 19 nt, Artificial Sequence
  Description of Artificial Sequence: Synthetic oligonucleotide
  Sense strand starting at position 3350 of SEQ ID NO: 1561908
gagauucccugugaaucuc

SEQ ID NO: 1707418 - RNA, 19 nt, Artificial Sequence
  Description of Artificial Sequence: Synthetic oligonucleotide
  Antisense strand to SEQ ID NO: 1707417
gagauucacagggaaucuc

SEQ ID NO: 1707419 - RNA, 19 nt, Artificial Sequence
  Description of Artificial Sequence: Synthetic oligonucleotide
  Sense strand starting at position 3426 of SEQ ID NO: 1561908
cuacuuacugaguguuugu

SEQ ID NO: 1707420 - RNA, 19 nt, Artificial Sequence
  Description of Artificial Sequence: Synthetic oligonucleotide
  Antisense strand to SEQ ID NO: 1707419
acaaacacucaguaaguag

SEQ ID NO: 1707421 - RNA, 19 nt, Artificial Sequence
  Description of Artificial Sequence: Synthetic oligonucleotide
  Sense strand starting at position 3429 of SEQ ID NO: 1561908
cuuacugaguguuugucau

SEQ ID NO: 1707422 - RNA, 19 nt, Artificial Sequence
  Description of Artificial Sequence: Synthetic oligonucleotide
  Antisense strand to SEQ ID NO: 1707421
augacaaacacucaguaag

SEQ ID NO: 1707423 - RNA, 19 nt, Artificial Sequence
  Description of Artificial Sequence: Synthetic oligonucleotide
  Sense strand starting at position 3437 of SEQ ID NO: 1561908
guguuugucauguaugcac

SEQ ID NO: 1707424 - RNA, 19 nt, Artificial Sequence
  Description of Artificial Sequence: Synthetic oligonucleotide
  Antisense strand to SEQ ID NO: 1707423
gugcauacaugacaaacac

SEQ ID NO: 1707425 - RNA, 19 nt, Artificial Sequence
  Description of Artificial Sequence: Synthetic oligonucleotide
  Sense strand starting at position 3584 of SEQ ID NO: 1561908
acaagauacuugcagauua

SEQ ID NO: 1707426 - RNA, 19 nt, Artificial Sequence
  Description of Artificial Sequence: Synthetic oligonucleotide
  Antisense strand to SEQ ID NO: 1707425
uaaucugcaaguaucuugu

SEQ ID NO: 1707427 - RNA, 19 nt, Artificial Sequence
  Description of Artificial Sequence: Synthetic oligonucleotide
  Sense strand starting at position 3595 of SEQ ID NO: 1561908
gcagauuaugaugagcacu

SEQ ID NO: 1707428 - RNA, 19 nt, Artificial Sequence
  Description of Artificial Sequence: Synthetic oligonucleotide
  Antisense strand to SEQ ID NO: 1707427
agugcucaucauaaucugc

SEQ ID NO: 1707429 - RNA, 19 nt, Artificial Sequence
  Description of Artificial Sequence: Synthetic oligonucleotide
  Sense strand starting at position 3671 of SEQ ID NO: 1561908
uagaaaggucaaggagguu

SEQ ID NO: 1707430 - RNA, 19 nt, Artificial Sequence
  Description of Artificial Sequence: Synthetic oligonucleotide
  Antisense strand to SEQ ID NO: 1707429
aaccuccuugaccuuucua

SEQ ID NO: 1707431 - RNA, 19 nt, Artificial Sequence
  Description of Artificial Sequence: Synthetic oligonucleotide
  Sense strand starting at position 3719 of SEQ ID NO: 1561908
cugaaacuugaaugcugaa

SEQ ID NO: 1707432 - RNA, 19 nt, Artificial Sequence
  Description of Artificial Sequence: Synthetic oligonucleotide
  Antisense strand to SEQ ID NO: 1707431
uucagcauucaaguuucag

SEQ ID NO: 1707433 - RNA, 19 nt, Artificial Sequence
  Description of Artificial Sequence: Synthetic oligonucleotide
  Sense strand starting at position 483 of SEQ ID NO: 1561909
ggauauaacccgcgcaaga

SEQ ID NO: 1707434 - RNA, 19 nt, Artificial Sequence
  Description of Artificial Sequence: Synthetic oligonucleotide
  Antisense strand to SEQ ID NO: 1707433
ucuugcgcggguuauaucc

SEQ ID NO: 1707435 - RNA, 19 nt, Artificial Sequence
  Description of Artificial Sequence: Synthetic oligonucleotide
  Sense strand starting at position 857 of SEQ ID NO: 1561909
ccaugcugaagcuguguua

SEQ ID NO: 1707436 - RNA, 19 nt, Artificial Sequence
  Description of Artificial Sequence: Synthetic oligonucleotide
  Antisense strand to SEQ ID NO: 1707435
uaacacagcuucagcaugg

SEQ ID NO: 1707437 - RNA, 19 nt, Artificial Sequence
  Description of Artificial Sequence: Synthetic oligonucleotide
  Sense strand starting at position 864 of SEQ ID NO: 1561909
gaagcuguguuagccauuu

SEQ ID NO: 1707438 - RNA, 19 nt, Artificial Sequence
  Description of Artificial Sequence: Synthetic oligonucleotide
  Antisense strand to SEQ ID NO: 1707437
aaauggcuaacacagcuuc

SEQ ID NO: 1707439 - RNA, 19 nt, Artificial Sequence
  Description of Artificial Sequence: Synthetic oligonucleotide
  Sense strand starting at position 889 of SEQ ID NO: 1561909
ugcuguuucuuggcagaga

SEQ ID NO: 1707440 - RNA, 19 nt, Artificial Sequence
  Description of Artificial Sequence: Synthetic oligonucleotide
  Antisense strand to SEQ ID NO: 1707439
ucucugccaagaaacagca

SEQ ID NO: 1707441 - RNA, 19 nt, Artificial Sequence
  Description of Artificial Sequence: Synthetic oligonucleotide
  Sense strand starting at position 957 of SEQ ID NO: 1561909
ccgugaaugcgccuauucu

SEQ ID NO: 1707442 - RNA, 19 nt, Artificial Sequence
  Description of Artificial Sequence: Synthetic oligonucleotide
  Antisense strand to SEQ ID NO: 1707441
agaauaggcgcauucacgg

SEQ ID NO: 1707443 - RNA, 19 nt, Artificial Sequence
  Description of Artificial Sequence: Synthetic oligonucleotide
  Sense strand starting at position 1012 of SEQ ID NO: 1561909
cuucucaucccggauucuu

SEQ ID NO: 1707444 - RNA, 19 nt, Artificial Sequence
  Description of Artificial Sequence: Synthetic oligonucleotide
  Antisense strand to SEQ ID NO: 1707443
aagaauccgggaugagaag

SEQ ID NO: 1707445 - RNA, 19 nt, Artificial Sequence
  Description of Artificial Sequence: Synthetic oligonucleotide
  Sense strand starting at position 1020 of SEQ ID NO: 1561909
cccggauucuucucccuuu

SEQ ID NO: 1707446 - RNA, 19 nt, Artificial Sequence
  Description of Artificial Sequence: Synthetic oligonucleotide
  Antisense strand to SEQ ID NO: 1707445
aaagggagaagaauccggg

SEQ ID NO: 1707447 - RNA, 19 nt, Artificial Sequence
  Description of Artificial Sequence: Synthetic oligonucleotide
  Sense strand starting at position 1230 of SEQ ID NO: 1561909
auacuuuccuacccggaga

SEQ ID NO: 1707448 - RNA, 19 nt, Artificial Sequence
  Description of Artificial Sequence: Synthetic oligonucleotide
  Antisense strand to SEQ ID NO: 1707447
ucuccggguaggaaaguau

SEQ ID NO: 1707449 - RNA, 19 nt, Artificial Sequence
  Description of Artificial Sequence: Synthetic oligonucleotide
  Sense strand starting at position 1261 of SEQ ID NO: 1561909
ccuaaaucuugguuaaggu

SEQ ID NO: 1707450 - RNA, 19 nt, Artificial Sequence
  Description of Artificial Sequence: Synthetic oligonucleotide
  Antisense strand to SEQ ID NO: 1707449
accuuaaccaagauuuagg

SEQ ID NO: 1707451 - RNA, 19 nt, Artificial Sequence
  Description of Artificial Sequence: Synthetic oligonucleotide
  Sense strand starting at position 1262 of SEQ ID NO: 1561909
cuaaaucuugguuaagguu

SEQ ID NO: 1707452 - RNA, 19 nt, Artificial Sequence
  Description of Artificial Sequence: Synthetic oligonucleotide
  Antisense strand to SEQ ID NO: 1707451
aaccuuaaccaagauuuag

SEQ ID NO: 1707453 - RNA, 19 nt, Artificial Sequence
  Description of Artificial Sequence: Synthetic oligonucleotide
  Sense strand starting at position 1290 of SEQ ID NO: 1561909
ccauucuuggucugagcca

SEQ ID NO: 1707454 - RNA, 19 nt, Artificial Sequence
  Description of Artificial Sequence: Synthetic oligonucleotide
  Antisense strand to SEQ ID NO: 1707453
uggcucagaccaagaaugg

SEQ ID NO: 1707455 - RNA, 19 nt, Artificial Sequence
  Description of Artificial Sequence: Synthetic oligonucleotide
  Sense strand starting at position 1291 of SEQ ID NO: 1561909
cauucuuggucugagccaa

SEQ ID NO: 1707456 - RNA, 19 nt, Artificial Sequence
  Description of Artificial Sequence: Synthetic oligonucleotide
  Antisense strand to SEQ ID NO: 1707455
uuggcucagaccaagaaug

SEQ ID NO: 1707457 - RNA, 19 nt, Artificial Sequence
  Description of Artificial Sequence: Synthetic oligonucleotide
  Sense strand starting at position 1488 of SEQ ID NO: 1561909
cugggauuccucugaggag

SEQ ID NO: 1707458 - RNA, 19 nt, Artificial Sequence
  Description of Artificial Sequence: Synthetic oligonucleotide
  Antisense strand to SEQ ID NO: 1707457
cuccucagaggaaucccag

SEQ ID NO: 1707459 - RNA, 19 nt, Artificial Sequence
  Description of Artificial Sequence: Synthetic oligonucleotide
  Sense strand starting at position 1489 of SEQ ID NO: 1561909
ugggauuccucugaggagu

SEQ ID NO: 1707460 - RNA, 19 nt, Artificial Sequence
  Description of Artificial Sequence: Synthetic oligonucleotide
  Antisense strand to SEQ ID NO: 1707459
acuccucagaggaauccca

SEQ ID NO: 1707461 - RNA, 19 nt, Artificial Sequence
  Description of Artificial Sequence: Synthetic oligonucleotide
  Sense strand starting at position 1491 of SEQ ID NO: 1561909
ggauuccucugaggaguua

SEQ ID NO: 1707462 - RNA, 19 nt, Artificial Sequence
  Description of Artificial Sequence: Synthetic oligonucleotide
  Antisense strand to SEQ ID NO: 1707461
uaacuccucagaggaaucc

SEQ ID NO: 1707463 - RNA, 19 nt, Artificial Sequence
  Description of Artificial Sequence: Synthetic oligonucleotide
  Sense strand starting at position 1502 of SEQ ID NO: 1561909
aggaguuaauccuugcauu

SEQ ID NO: 1707464 - RNA, 19 nt, Artificial Sequence
  Description of Artificial Sequence: Synthetic oligonucleotide
  Antisense strand to SEQ ID NO: 1707463
aaugcaaggauuaacuccu

SEQ ID NO: 1707465 - RNA, 19 nt, Artificial Sequence
  Description of Artificial Sequence: Synthetic oligonucleotide
  Sense strand starting at position 1503 of SEQ ID NO: 1561909
ggaguuaauccuugcauua

SEQ ID NO: 1707466 - RNA, 19 nt, Artificial Sequence
  Description of Artificial Sequence: Synthetic oligonucleotide
  Antisense strand to SEQ ID NO: 1707465
uaaugcaaggauuaacucc

SEQ ID NO: 1707467 - RNA, 19 nt, Artificial Sequence
  Description of Artificial Sequence: Synthetic oligonucleotide
  Sense strand starting at position 1536 of SEQ ID NO: 1561909
cagagaugcccugagguga

SEQ ID NO: 1707468 - RNA, 19 nt, Artificial Sequence
  Description of Artificial Sequence: Synthetic oligonucleotide
  Antisense strand to SEQ ID NO: 1707467
ucaccucagggcaucucug

SEQ ID NO: 1707469 - RNA, 19 nt, Artificial Sequence
  Description of Artificial Sequence: Synthetic oligonucleotide
  Sense strand starting at position 1578 of SEQ ID NO: 1561909
ggaggagaggccuguaaau

SEQ ID NO: 1707470 - RNA, 19 nt, Artificial Sequence
  Description of Artificial Sequence: Synthetic oligonucleotide
  Antisense strand to SEQ ID NO: 1707469
auuuacaggccucuccucc

SEQ ID NO: 1707471 - RNA, 19 nt, Artificial Sequence
  Description of Artificial Sequence: Synthetic oligonucleotide
  Sense strand starting at position 1691 of SEQ ID NO: 1561909
gggcucgauuuggaaagga

SEQ ID NO: 1707472 - RNA, 19 nt, Artificial Sequence
  Description of Artificial Sequence: Synthetic oligonucleotide
  Antisense strand to SEQ ID NO: 1707471
uccuuuccaaaucgagccc

SEQ ID NO: 1707473 - RNA, 19 nt, Artificial Sequence
  Description of Artificial Sequence: Synthetic oligonucleotide
  Sense strand starting at position 2353 of SEQ ID NO: 1561909
ugguccugccaagaggaau

SEQ ID NO: 1707474 - RNA, 19 nt, Artificial Sequence
  Description of Artificial Sequence: Synthetic oligonucleotide
  Antisense strand to SEQ ID NO: 1707473
auuccucuuggcaggacca

SEQ ID NO: 1707475 - RNA, 19 nt, Artificial Sequence
  Description of Artificial Sequence: Synthetic oligonucleotide
  Sense strand starting at position 2470 of SEQ ID NO: 1561909
cugcaauugcucgggccua

SEQ ID NO: 1707476 - RNA, 19 nt, Artificial Sequence
  Description of Artificial Sequence: Synthetic oligonucleotide
  Antisense strand to SEQ ID NO: 1707475
uaggcccgagcaauugcag

SEQ ID NO: 1707477 - RNA, 19 nt, Artificial Sequence
  Description of Artificial Sequence: Synthetic oligonucleotide
  Sense strand starting at position 2563 of SEQ ID NO: 1561909
ggaccaaugucaucugccu

SEQ ID NO: 1707478 - RNA, 19 nt, Artificial Sequence
  Description of Artificial Sequence: Synthetic oligonucleotide
  Antisense strand to SEQ ID NO: 1707477
aggcagaugacauuggucc

SEQ ID NO: 1707479 - RNA, 19 nt, Artificial Sequence
  Description of Artificial Sequence: Synthetic oligonucleotide
  Sense strand starting at position 2587 of SEQ ID NO: 1561909
ccuguaaucaaggguagga

SEQ ID NO: 1707480 - RNA, 19 nt, Artificial Sequence
  Description of Artificial Sequence: Synthetic oligonucleotide
  Antisense strand to SEQ ID NO: 1707479
uccuacccuugauuacagg

SEQ ID NO: 1707481 - RNA, 19 nt, Artificial Sequence
  Description of Artificial Sequence: Synthetic oligonucleotide
  Sense strand starting at position 2623 of SEQ ID NO: 1561909
ggccacuucucaugggaga

SEQ ID NO: 1707482 - RNA, 19 nt, Artificial Sequence
  Description of Artificial Sequence: Synthetic oligonucleotide
  Antisense strand to SEQ ID NO: 1707481
ucucccaugagaaguggcc

SEQ ID NO: 1707483 - RNA, 19 nt, Artificial Sequence
  Description of Artificial Sequence: Synthetic oligonucleotide
  Sense strand starting at position 2624 of SEQ ID NO: 1561909
gccacuucucaugggagaa

SEQ ID NO: 1707484 - RNA, 19 nt, Artificial Sequence
  Description of Artificial Sequence: Synthetic oligonucleotide
  Antisense strand to SEQ ID NO: 1707483
uucucccaugagaaguggc

SEQ ID NO: 1707485 - RNA, 19 nt, Artificial Sequence
  Description of Artificial Sequence: Synthetic oligonucleotide
  Sense strand starting at position 2880 of SEQ ID NO: 1561909
ucccaaggccaguauaagu

SEQ ID NO: 1707486 - RNA, 19 nt, Artificial Sequence
  Description of Artificial Sequence: Synthetic oligonucleotide
  Antisense strand to SEQ ID NO: 1707485
acuuauacuggccuuggga

SEQ ID NO: 1707487 - RNA, 19 nt, Artificial Sequence
  Description of Artificial Sequence: Synthetic oligonucleotide
  Sense strand starting at position 3471 of SEQ ID NO: 1561909
ugagaucucagcuauuggu

SEQ ID NO: 1707488 - RNA, 19 nt, Artificial Sequence
  Description of Artificial Sequence: Synthetic oligonucleotide
  Antisense strand to SEQ ID NO: 1707487
accaauagcugagaucuca

SEQ ID NO: 1707489 - RNA, 19 nt, Artificial Sequence
  Description of Artificial Sequence: Synthetic oligonucleotide
  Sense strand starting at position 3524 of SEQ ID NO: 1561909
cccacuuuggucuauaguu

SEQ ID NO: 1707490 - RNA, 19 nt, Artificial Sequence
  Description of Artificial Sequence: Synthetic oligonucleotide
  Antisense strand to SEQ ID NO: 1707489
aacuauagaccaaaguggg

SEQ ID NO: 1707491 - RNA, 19 nt, Artificial Sequence
  Description of Artificial Sequence: Synthetic oligonucleotide
  Sense strand starting at position 3529 of SEQ ID NO: 1561909
uuuggucuauaguucuaca

SEQ ID NO: 1707492 - RNA, 19 nt, Artificial Sequence
  Description of Artificial Sequence: Synthetic oligonucleotide
  Antisense strand to SEQ ID NO: 1707491
uguagaacuauagaccaaa

SEQ ID NO: 1707493 - RNA, 19 nt, Artificial Sequence
  Description of Artificial Sequence: Synthetic oligonucleotide
  Sense strand starting at position 3532 of SEQ ID NO: 1561909
ggucuauaguucuacagca

SEQ ID NO: 1707494 - RNA, 19 nt, Artificial Sequence
  Description of Artificial Sequence: Synthetic oligonucleotide
  Antisense strand to SEQ ID NO: 1707493
ugcuguagaacuauagacc

SEQ ID NO: 1707495 - RNA, 19 nt, Artificial Sequence
  Description of Artificial Sequence: Synthetic oligonucleotide
  Sense strand starting at position 3539 of SEQ ID NO: 1561909
aguucuacagcaggagauu

SEQ ID NO: 1707496 - RNA, 19 nt, Artificial Sequence
  Description of Artificial Sequence: Synthetic oligonucleotide
  Antisense strand to SEQ ID NO: 1707495
aaucuccugcuguagaacu

SEQ ID NO: 1707497 - RNA, 19 nt, Artificial Sequence
  Description of Artificial Sequence: Synthetic oligonucleotide
  Sense strand starting at position 3552 of SEQ ID NO: 1561909
gagauucccugugaaucuc

SEQ ID NO: 1707498 - RNA, 19 nt, Artificial Sequence
  Description of Artificial Sequence: Synthetic oligonucleotide
  Antisense strand to SEQ ID NO: 1707497
gagauucacagggaaucuc

SEQ ID NO: 1707499 - RNA, 19 nt, Artificial Sequence
  Description of Artificial Sequence: Synthetic oligonucleotide
  Sense strand starting at position 3628 of SEQ ID NO: 1561909
cuacuuacugaguguuugu

SEQ ID NO: 1707500 - RNA, 19 nt, Artificial Sequence
  Description of Artificial Sequence: Synthetic oligonucleotide
  Antisense strand to SEQ ID NO: 1707499
acaaacacucaguaaguag

SEQ ID NO: 1707501 - RNA, 19 nt, Artificial Sequence
  Description of Artificial Sequence: Synthetic oligonucleotide
  Sense strand starting at position 3631 of SEQ ID NO: 1561909
cuuacugaguguuugucau

SEQ ID NO: 1707502 - RNA, 19 nt, Artificial Sequence
  Description of Artificial Sequence: Synthetic oligonucleotide
  Antisense strand to SEQ ID NO: 1707501
augacaaacacucaguaag

SEQ ID NO: 1707503 - RNA, 19 nt, Artificial Sequence
  Description of Artificial Sequence: Synthetic oligonucleotide
  Sense strand starting at position 3639 of SEQ ID NO: 1561909
guguuugucauguaugcac

SEQ ID NO: 1707504 - RNA, 19 nt, Artificial Sequence
  Description of Artificial Sequence: Synthetic oligonucleotide
  Antisense strand to SEQ ID NO: 1707503
gugcauacaugacaaacac

SEQ ID NO: 1707505 - RNA, 19 nt, Artificial Sequence
  Description of Artificial Sequence: Synthetic oligonucleotide
  Sense strand starting at position 3786 of SEQ ID NO: 1561909
acaagauacuugcagauua

SEQ ID NO: 1707506 - RNA, 19 nt, Artificial Sequence
  Description of Artificial Sequence: Synthetic oligonucleotide
  Antisense strand to SEQ ID NO: 1707505
uaaucugcaaguaucuugu

SEQ ID NO: 1707507 - RNA, 19 nt, Artificial Sequence
  Description of Artificial Sequence: Synthetic oligonucleotide
  Sense strand starting at position 3797 of SEQ ID NO: 1561909
gcagauuaugaugagcacu

SEQ ID NO: 1707508 - RNA, 19 nt, Artificial Sequence
  Description of Artificial Sequence: Synthetic oligonucleotide
  Antisense strand to SEQ ID NO: 1707507
agugcucaucauaaucugc

SEQ ID NO: 1707509 - RNA, 19 nt, Artificial Sequence
  Description of Artificial Sequence: Synthetic oligonucleotide
  Sense strand starting at position 3873 of SEQ ID NO: 1561909
uagaaaggucaaggagguu

SEQ ID NO: 1707510 - RNA, 19 nt, Artificial Sequence
  Description of Artificial Sequence: Synthetic oligonucleotide
  Antisense strand to SEQ ID NO: 1707509
aaccuccuugaccuuucua

SEQ ID NO: 1707511 - RNA, 19 nt, Artificial Sequence
  Description of Artificial Sequence: Synthetic oligonucleotide
  Sense strand starting at position 3921 of SEQ ID NO: 1561909
cugaaacuugaaugcugaa

SEQ ID NO: 1707512 - RNA, 19 nt, Artificial Sequence
  Description of Artificial Sequence: Synthetic oligonucleotide
  Antisense strand to SEQ ID NO: 1707511
uucagcauucaaguuucag

SEQ ID NO: 1707513 - RNA, 19 nt, Artificial Sequence
  Description of Artificial Sequence: Synthetic oligonucleotide
  Sense strand starting at position 513 of SEQ ID NO: 1561910
ggauauaacccgcgcaaga

SEQ ID NO: 1707514 - RNA, 19 nt, Artificial Sequence
  Description of Artificial Sequence: Synthetic oligonucleotide
  Antisense strand to SEQ ID NO: 1707513
ucuugcgcggguuauaucc

SEQ ID NO: 1707515 - RNA, 19 nt, Artificial Sequence
  Description of Artificial Sequence: Synthetic oligonucleotide
  Sense strand starting at position 887 of SEQ ID NO: 1561910
ccaugcugaagcuguguua

SEQ ID NO: 1707516 - RNA, 19 nt, Artificial Sequence
  Description of Artificial Sequence: Synthetic oligonucleotide
  Antisense strand to SEQ ID NO: 1707515
uaacacagcuucagcaugg

SEQ ID NO: 1707517 - RNA, 19 nt, Artificial Sequence
  Description of Artificial Sequence: Synthetic oligonucleotide
  Sense strand starting at position 894 of SEQ ID NO: 1561910
gaagcuguguuagccauuu

SEQ ID NO: 1707518 - RNA, 19 nt, Artificial Sequence
  Description of Artificial Sequence: Synthetic oligonucleotide
  Antisense strand to SEQ ID NO: 1707517
aaauggcuaacacagcuuc

SEQ ID NO: 1707519 - RNA, 19 nt, Artificial Sequence
  Description of Artificial Sequence: Synthetic oligonucleotide
  Sense strand starting at position 919 of SEQ ID NO: 1561910
ugcuguuucuuggcagaga

SEQ ID NO: 1707520 - RNA, 19 nt, Artificial Sequence
  Description of Artificial Sequence: Synthetic oligonucleotide
  Antisense strand to SEQ ID NO: 1707519
ucucugccaagaaacagca

SEQ ID NO: 1707521 - RNA, 19 nt, Artificial Sequence
  Description of Artificial Sequence: Synthetic oligonucleotide
  Sense strand starting at position 987 of SEQ ID NO: 1561910
ccgugaaugcgccuauucu

SEQ ID NO: 1707522 - RNA, 19 nt, Artificial Sequence
  Description of Artificial Sequence: Synthetic oligonucleotide
  Antisense strand to SEQ ID NO: 1707521
agaauaggcgcauucacgg

SEQ ID NO: 1707523 - RNA, 19 nt, Artificial Sequence
  Description of Artificial Sequence: Synthetic oligonucleotide
  Sense strand starting at position 1042 of SEQ ID NO: 1561910
cuucucaucccggauucuu

SEQ ID NO: 1707524 - RNA, 19 nt, Artificial Sequence
  Description of Artificial Sequence: Synthetic oligonucleotide
  Antisense strand to SEQ ID NO: 1707523
aagaauccgggaugagaag

SEQ ID NO: 1707525 - RNA, 19 nt, Artificial Sequence
  Description of Artificial Sequence: Synthetic oligonucleotide
  Sense strand starting at position 1050 of SEQ ID NO: 1561910
cccggauucuucucccuuu

SEQ ID NO: 1707526 - RNA, 19 nt, Artificial Sequence
  Description of Artificial Sequence: Synthetic oligonucleotide
  Antisense strand to SEQ ID NO: 1707525
aaagggagaagaauccggg

SEQ ID NO: 1707527 - RNA, 19 nt, Artificial Sequence
  Description of Artificial Sequence: Synthetic oligonucleotide
  Sense strand starting at position 1260 of SEQ ID NO: 1561910
auacuuuccuacccggaga

SEQ ID NO: 1707528 - RNA, 19 nt, Artificial Sequence
  Description of Artificial Sequence: Synthetic oligonucleotide
  Antisense strand to SEQ ID NO: 1707527
ucuccggguaggaaaguau

SEQ ID NO: 1707529 - RNA, 19 nt, Artificial Sequence
  Description of Artificial Sequence: Synthetic oligonucleotide
  Sense strand starting at position 1291 of SEQ ID NO: 1561910
ccuaaaucuugguuaaggu

SEQ ID NO: 1707530 - RNA, 19 nt, Artificial Sequence
  Description of Artificial Sequence: Synthetic oligonucleotide
  Antisense strand to SEQ ID NO: 1707529
accuuaaccaagauuuagg

SEQ ID NO: 1707531 - RNA, 19 nt, Artificial Sequence
  Description of Artificial Sequence: Synthetic oligonucleotide
  Sense strand starting at position 1292 of SEQ ID NO: 1561910
cuaaaucuugguuaagguu

SEQ ID NO: 1707532 - RNA, 19 nt, Artificial Sequence
  Description of Artificial Sequence: Synthetic oligonucleotide
  Antisense strand to SEQ ID NO: 1707531
aaccuuaaccaagauuuag

SEQ ID NO: 1707533 - RNA, 19 nt, Artificial Sequence
  Description of Artificial Sequence: Synthetic oligonucleotide
  Sense strand starting at position 1320 of SEQ ID NO: 1561910
ccauucuuggucugagcca

SEQ ID NO: 1707534 - RNA, 19 nt, Artificial Sequence
  Description of Artificial Sequence: Synthetic oligonucleotide
  Antisense strand to SEQ ID NO: 1707533
uggcucagaccaagaaugg

SEQ ID NO: 1707535 - RNA, 19 nt, Artificial Sequence
  Description of Artificial Sequence: Synthetic oligonucleotide
  Sense strand starting at position 1321 of SEQ ID NO: 1561910
cauucuuggucugagccaa

SEQ ID NO: 1707536 - RNA, 19 nt, Artificial Sequence
  Description of Artificial Sequence: Synthetic oligonucleotide
  Antisense strand to SEQ ID NO: 1707535
uuggcucagaccaagaaug

SEQ ID NO: 1707537 - RNA, 19 nt, Artificial Sequence
  Description of Artificial Sequence: Synthetic oligonucleotide
  Sense strand starting at position 1518 of SEQ ID NO: 1561910
cugggauuccucugaggag

SEQ ID NO: 1707538 - RNA, 19 nt, Artificial Sequence
  Description of Artificial Sequence: Synthetic oligonucleotide
  Antisense strand to SEQ ID NO: 1707537
cuccucagaggaaucccag

SEQ ID NO: 1707539 - RNA, 19 nt, Artificial Sequence
  Description of Artificial Sequence: Synthetic oligonucleotide
  Sense strand starting at position 1519 of SEQ ID NO: 1561910
ugggauuccucugaggagu

SEQ ID NO: 1707540 - RNA, 19 nt, Artificial Sequence
  Description of Artificial Sequence: Synthetic oligonucleotide
  Antisense strand to SEQ ID NO: 1707539
acuccucagaggaauccca

SEQ ID NO: 1707541 - RNA, 19 nt, Artificial Sequence
  Description of Artificial Sequence: Synthetic oligonucleotide
  Sense strand starting at position 1521 of SEQ ID NO: 1561910
ggauuccucugaggaguua

SEQ ID NO: 1707542 - RNA, 19 nt, Artificial Sequence
  Description of Artificial Sequence: Synthetic oligonucleotide
  Antisense strand to SEQ ID NO: 1707541
uaacuccucagaggaaucc

SEQ ID NO: 1707543 - RNA, 19 nt, Artificial Sequence
  Description of Artificial Sequence: Synthetic oligonucleotide
  Sense strand starting at position 1532 of SEQ ID NO: 1561910
aggaguuaauccuugcauu

SEQ ID NO: 1707544 - RNA, 19 nt, Artificial Sequence
  Description of Artificial Sequence: Synthetic oligonucleotide
  Antisense strand to SEQ ID NO: 1707543
aaugcaaggauuaacuccu

SEQ ID NO: 1707545 - RNA, 19 nt, Artificial Sequence
  Description of Artificial Sequence: Synthetic oligonucleotide
  Sense strand starting at position 1533 of SEQ ID NO: 1561910
ggaguuaauccuugcauua

SEQ ID NO: 1707546 - RNA, 19 nt, Artificial Sequence
  Description of Artificial Sequence: Synthetic oligonucleotide
  Antisense strand to SEQ ID NO: 1707545
uaaugcaaggauuaacucc

SEQ ID NO: 1707547 - RNA, 19 nt, Artificial Sequence
  Description of Artificial Sequence: Synthetic oligonucleotide
  Sense strand starting at position 1566 of SEQ ID NO: 1561910
cagagaugcccugagguga

SEQ ID NO: 1707548 - RNA, 19 nt, Artificial Sequence
  Description of Artificial Sequence: Synthetic oligonucleotide
  Antisense strand to SEQ ID NO: 1707547
ucaccucagggcaucucug

SEQ ID NO: 1707549 - RNA, 19 nt, Artificial Sequence
  Description of Artificial Sequence: Synthetic oligonucleotide
  Sense strand starting at position 1608 of SEQ ID NO: 1561910
ggaggagaggccuguaaau

SEQ ID NO: 1707550 - RNA, 19 nt, Artificial Sequence
  Description of Artificial Sequence: Synthetic oligonucleotide
  Antisense strand to SEQ ID NO: 1707549
auuuacaggccucuccucc

SEQ ID NO: 1707551 - RNA, 19 nt, Artificial Sequence
  Description of Artificial Sequence: Synthetic oligonucleotide
  Sense strand starting at position 1721 of SEQ ID NO: 1561910
gggcucgauuuggaaagga

SEQ ID NO: 1707552 - RNA, 19 nt, Artificial Sequence
  Description of Artificial Sequence: Synthetic oligonucleotide
  Antisense strand to SEQ ID NO: 1707551
uccuuuccaaaucgagccc

SEQ ID NO: 1707553 - RNA, 19 nt, Artificial Sequence
  Description of Artificial Sequence: Synthetic oligonucleotide
  Sense strand starting at position 2383 of SEQ ID NO: 1561910
ugguccugccaagaggaau

SEQ ID NO: 1707554 - RNA, 19 nt, Artificial Sequence
  Description of Artificial Sequence: Synthetic oligonucleotide
  Antisense strand to SEQ ID NO: 1707553
auuccucuuggcaggacca

SEQ ID NO: 1707555 - RNA, 19 nt, Artificial Sequence
  Description of Artificial Sequence: Synthetic oligonucleotide
  Sense strand starting at position 2500 of SEQ ID NO: 1561910
cugcaauugcucgggccua

SEQ ID NO: 1707556 - RNA, 19 nt, Artificial Sequence
  Description of Artificial Sequence: Synthetic oligonucleotide
  Antisense strand to SEQ ID NO: 1707555
uaggcccgagcaauugcag

SEQ ID NO: 1707557 - RNA, 19 nt, Artificial Sequence
  Description of Artificial Sequence: Synthetic oligonucleotide
  Sense strand starting at position 2593 of SEQ ID NO: 1561910
ggaccaaugucaucugccu

SEQ ID NO: 1707558 - RNA, 19 nt, Artificial Sequence
  Description of Artificial Sequence: Synthetic oligonucleotide
  Antisense strand to SEQ ID NO: 1707557
aggcagaugacauuggucc

SEQ ID NO: 1707559 - RNA, 19 nt, Artificial Sequence
  Description of Artificial Sequence: Synthetic oligonucleotide
  Sense strand starting at position 2617 of SEQ ID NO: 1561910
ccuguaaucaaggguagga

SEQ ID NO: 1707560 - RNA, 19 nt, Artificial Sequence
  Description of Artificial Sequence: Synthetic oligonucleotide
  Antisense strand to SEQ ID NO: 1707559
uccuacccuugauuacagg

SEQ ID NO: 1707561 - RNA, 19 nt, Artificial Sequence
  Description of Artificial Sequence: Synthetic oligonucleotide
  Sense strand starting at position 2653 of SEQ ID NO: 1561910
ggccacuucucaugggaga

SEQ ID NO: 1707562 - RNA, 19 nt, Artificial Sequence
  Description of Artificial Sequence: Synthetic oligonucleotide
  Antisense strand to SEQ ID NO: 1707561
ucucccaugagaaguggcc

SEQ ID NO: 1707563 - RNA, 19 nt, Artificial Sequence
  Description of Artificial Sequence: Synthetic oligonucleotide
  Sense strand starting at position 2654 of SEQ ID NO: 1561910
gccacuucucaugggagaa

SEQ ID NO: 1707564 - RNA, 19 nt, Artificial Sequence
  Description of Artificial Sequence: Synthetic oligonucleotide
  Antisense strand to SEQ ID NO: 1707563
uucucccaugagaaguggc

SEQ ID NO: 1707565 - RNA, 19 nt, Artificial Sequence
  Description of Artificial Sequence: Synthetic oligonucleotide
  Sense strand starting at position 2910 of SEQ ID NO: 1561910
ucccaaggccaguauaagu

SEQ ID NO: 1707566 - RNA, 19 nt, Artificial Sequence
  Description of Artificial Sequence: Synthetic oligonucleotide
  Antisense strand to SEQ ID NO: 1707565
acuuauacuggccuuggga

SEQ ID NO: 1707567 - RNA, 19 nt, Artificial Sequence
  Description of Artificial Sequence: Synthetic oligonucleotide
  Sense strand starting at position 3501 of SEQ ID NO: 1561910
ugagaucucagcuauuggu

SEQ ID NO: 1707568 - RNA, 19 nt, Artificial Sequence
  Description of Artificial Sequence: Synthetic oligonucleotide
  Antisense strand to SEQ ID NO: 1707567
accaauagcugagaucuca

SEQ ID NO: 1707569 - RNA, 19 nt, Artificial Sequence
  Description of Artificial Sequence: Synthetic oligonucleotide
  Sense strand starting at position 3554 of SEQ ID NO: 1561910
cccacuuuggucuauaguu

SEQ ID NO: 1707570 - RNA, 19 nt, Artificial Sequence
  Description of Artificial Sequence: Synthetic oligonucleotide
  Antisense strand to SEQ ID NO: 1707569
aacuauagaccaaaguggg

SEQ ID NO: 1707571 - RNA, 19 nt, Artificial Sequence
  Description of Artificial Sequence: Synthetic oligonucleotide
  Sense strand starting at position 3559 of SEQ ID NO: 1561910
uuuggucuauaguucuaca

SEQ ID NO: 1707572 - RNA, 19 nt, Artificial Sequence
  Description of Artificial Sequence: Synthetic oligonucleotide
  Antisense strand to SEQ ID NO: 1707571
uguagaacuauagaccaaa

SEQ ID NO: 1707573 - RNA, 19 nt, Artificial Sequence
  Description of Artificial Sequence: Synthetic oligonucleotide
  Sense strand starting at position 3562 of SEQ ID NO: 1561910
ggucuauaguucuacagca

SEQ ID NO: 1707574 - RNA, 19 nt, Artificial Sequence
  Description of Artificial Sequence: Synthetic oligonucleotide
  Antisense strand to SEQ ID NO: 1707573
ugcuguagaacuauagacc

SEQ ID NO: 1707575 - RNA, 19 nt, Artificial Sequence
  Description of Artificial Sequence: Synthetic oligonucleotide
  Sense strand starting at position 3569 of SEQ ID NO: 1561910
aguucuacagcaggagauu

SEQ ID NO: 1707576 - RNA, 19 nt, Artificial Sequence
  Description of Artificial Sequence: Synthetic oligonucleotide
  Antisense strand to SEQ ID NO: 1707575
aaucuccugcuguagaacu

SEQ ID NO: 1707577 - RNA, 19 nt, Artificial Sequence
  Description of Artificial Sequence: Synthetic oligonucleotide
  Sense strand starting at position 3582 of SEQ ID NO: 1561910
gagauucccugugaaucuc

SEQ ID NO: 1707578 - RNA, 19 nt, Artificial Sequence
  Description of Artificial Sequence: Synthetic oligonucleotide
  Antisense strand to SEQ ID NO: 1707577
gagauucacagggaaucuc

SEQ ID NO: 1707579 - RNA, 19 nt, Artificial Sequence
  Description of Artificial Sequence: Synthetic oligonucleotide
  Sense strand starting at position 3658 of SEQ ID NO: 1561910
cuacuuacugaguguuugu

SEQ ID NO: 1707580 - RNA, 19 nt, Artificial Sequence
  Description of Artificial Sequence: Synthetic oligonucleotide
  Antisense strand to SEQ ID NO: 1707579
acaaacacucaguaaguag

SEQ ID NO: 1707581 - RNA, 19 nt, Artificial Sequence
  Description of Artificial Sequence: Synthetic oligonucleotide
  Sense strand starting at position 3661 of SEQ ID NO: 1561910
cuuacugaguguuugucau

SEQ ID NO: 1707582 - RNA, 19 nt, Artificial Sequence
  Description of Artificial Sequence: Synthetic oligonucleotide
  Antisense strand to SEQ ID NO: 1707581
augacaaacacucaguaag

SEQ ID NO: 1707583 - RNA, 19 nt, Artificial Sequence
  Description of Artificial Sequence: Synthetic oligonucleotide
  Sense strand starting at position 3669 of SEQ ID NO: 1561910
guguuugucauguaugcac

SEQ ID NO: 1707584 - RNA, 19 nt, Artificial Sequence
  Description of Artificial Sequence: Synthetic oligonucleotide
  Antisense strand to SEQ ID NO: 1707583
gugcauacaugacaaacac

SEQ ID NO: 1707585 - RNA, 19 nt, Artificial Sequence
  Description of Artificial Sequence: Synthetic oligonucleotide
  Sense strand starting at position 3816 of SEQ ID NO: 1561910
acaagauacuugcagauua

SEQ ID NO: 1707586 - RNA, 19 nt, Artificial Sequence
  Description of Artificial Sequence: Synthetic oligonucleotide
  Antisense strand to SEQ ID NO: 1707585
uaaucugcaaguaucuugu

SEQ ID NO: 1707587 - RNA, 19 nt, Artificial Sequence
  Description of Artificial Sequence: Synthetic oligonucleotide
  Sense strand starting at position 3827 of SEQ ID NO: 1561910
gcagauuaugaugagcacu

SEQ ID NO: 1707588 - RNA, 19 nt, Artificial Sequence
  Description of Artificial Sequence: Synthetic oligonucleotide
  Antisense strand to SEQ ID NO: 1707587
agugcucaucauaaucugc

SEQ ID NO: 1707589 - RNA, 19 nt, Artificial Sequence
  Description of Artificial Sequence: Synthetic oligonucleotide
  Sense strand starting at position 3903 of SEQ ID NO: 1561910
uagaaaggucaaggagguu

SEQ ID NO: 1707590 - RNA, 19 nt, Artificial Sequence
  Description of Artificial Sequence: Synthetic oligonucleotide
  Antisense strand to SEQ ID NO: 1707589
aaccuccuugaccuuucua

SEQ ID NO: 1707591 - RNA, 19 nt, Artificial Sequence
  Description of Artificial Sequence: Synthetic oligonucleotide
  Sense strand starting at position 3951 of SEQ ID NO: 1561910
cugaaacuugaaugcugaa

SEQ ID NO: 1707592 - RNA, 19 nt, Artificial Sequence
  Description of Artificial Sequence: Synthetic oligonucleotide
  Antisense strand to SEQ ID NO: 1707591
uucagcauucaaguuucag

SEQ ID NO: 1707593 - RNA, 19 nt, Artificial Sequence
  Description of Artificial Sequence: Synthetic oligonucleotide
  Sense strand starting at position 25 of SEQ ID NO: 1561911
agaacucaguucggaacaa

SEQ ID NO: 1707594 - RNA, 19 nt, Artificial Sequence
  Description of Artificial Sequence: Synthetic oligonucleotide
  Antisense strand to SEQ ID NO: 1707593
uuguuccgaacugaguucu

SEQ ID NO: 1707595 - RNA, 19 nt, Artificial Sequence
  Description of Artificial Sequence: Synthetic oligonucleotide
  Sense strand starting at position 29 of SEQ ID NO: 1561911
cucaguucggaacaaguga

SEQ ID NO: 1707596 - RNA, 19 nt, Artificial Sequence
  Description of Artificial Sequence: Synthetic oligonucleotide
  Antisense strand to SEQ ID NO: 1707595
ucacuuguuccgaacugag

SEQ ID NO: 1707597 - RNA, 19 nt, Artificial Sequence
  Description of Artificial Sequence: Synthetic oligonucleotide
  Sense strand starting at position 43 of SEQ ID NO: 1561911
agugaaguuugagaugcua

SEQ ID NO: 1707598 - RNA, 19 nt, Artificial Sequence
  Description of Artificial Sequence: Synthetic oligonucleotide
  Antisense strand to SEQ ID NO: 1707597
uagcaucucaaacuucacu

SEQ ID NO: 1707599 - RNA, 19 nt, Artificial Sequence
  Description of Artificial Sequence: Synthetic oligonucleotide
  Sense strand starting at position 45 of SEQ ID NO: 1561911
ugaaguuugagaugcuauu

SEQ ID NO: 1707600 - RNA, 19 nt, Artificial Sequence
  Description of Artificial Sequence: Synthetic oligonucleotide
  Antisense strand to SEQ ID NO: 1707599
aauagcaucucaaacuuca

SEQ ID NO: 1707601 - RNA, 19 nt, Artificial Sequence
  Description of Artificial Sequence: Synthetic oligonucleotide
  Sense strand starting at position 51 of SEQ ID NO: 1561911
uugagaugcuauuggauuc

SEQ ID NO: 1707602 - RNA, 19 nt, Artificial Sequence
  Description of Artificial Sequence: Synthetic oligonucleotide
  Antisense strand to SEQ ID NO: 1707601
gaauccaauagcaucucaa

SEQ ID NO: 1707603 - RNA, 19 nt, Artificial Sequence
  Description of Artificial Sequence: Synthetic oligonucleotide
  Sense strand starting at position 73 of SEQ ID NO: 1561911
guggguugucagggaggga

SEQ ID NO: 1707604 - RNA, 19 nt, Artificial Sequence
  Description of Artificial Sequence: Synthetic oligonucleotide
  Antisense strand to SEQ ID NO: 1707603
ucccucccugacaacccac

SEQ ID NO: 1707605 - RNA, 19 nt, Artificial Sequence
  Description of Artificial Sequence: Synthetic oligonucleotide
  Sense strand starting at position 301 of SEQ ID NO: 1561911
aaugacaggucaggagaau

SEQ ID NO: 1707606 - RNA, 19 nt, Artificial Sequence
  Description of Artificial Sequence: Synthetic oligonucleotide
  Antisense strand to SEQ ID NO: 1707605
auucuccugaccugucauu

SEQ ID NO: 1707607 - RNA, 19 nt, Artificial Sequence
  Description of Artificial Sequence: Synthetic oligonucleotide
  Sense strand starting at position 351 of SEQ ID NO: 1561911
ucaagaaauuagcaaagaa

SEQ ID NO: 1707608 - RNA, 19 nt, Artificial Sequence
  Description of Artificial Sequence: Synthetic oligonucleotide
  Antisense strand to SEQ ID NO: 1707607
uucuuugcuaauuucuuga

SEQ ID NO: 1707609 - RNA, 19 nt, Artificial Sequence
  Description of Artificial Sequence: Synthetic oligonucleotide
  Sense strand starting at position 367 of SEQ ID NO: 1561911
gaacaacucuaugggaguu

SEQ ID NO: 1707610 - RNA, 19 nt, Artificial Sequence
  Description of Artificial Sequence: Synthetic oligonucleotide
  Antisense strand to SEQ ID NO: 1707609
aacucccauagaguuguuc

SEQ ID NO: 1707611 - RNA, 19 nt, Artificial Sequence
  Description of Artificial Sequence: Synthetic oligonucleotide
  Sense strand starting at position 369 of SEQ ID NO: 1561911
acaacucuaugggaguuaa

SEQ ID NO: 1707612 - RNA, 19 nt, Artificial Sequence
  Description of Artificial Sequence: Synthetic oligonucleotide
  Antisense strand to SEQ ID NO: 1707611
uuaacucccauagaguugu

SEQ ID NO: 1707613 - RNA, 19 nt, Artificial Sequence
  Description of Artificial Sequence: Synthetic oligonucleotide
  Sense strand starting at position 917 of SEQ ID NO: 1561911
gggaaaguguugccaaggu

SEQ ID NO: 1707614 - RNA, 19 nt, Artificial Sequence
  Description of Artificial Sequence: Synthetic oligonucleotide
  Antisense strand to SEQ ID NO: 1707613
accuuggcaacacuuuccc

SEQ ID NO: 1707615 - RNA, 19 nt, Artificial Sequence
  Description of Artificial Sequence: Synthetic oligonucleotide
  Sense strand starting at position 1212 of SEQ ID NO: 1561911
acggcuuccauacagagaa

SEQ ID NO: 1707616 - RNA, 19 nt, Artificial Sequence
  Description of Artificial Sequence: Synthetic oligonucleotide
  Antisense strand to SEQ ID NO: 1707615
uucucuguauggaagccgu

SEQ ID NO: 1707617 - RNA, 19 nt, Artificial Sequence
  Description of Artificial Sequence: Synthetic oligonucleotide
  Sense strand starting at position 1300 of SEQ ID NO: 1561911
gugacagaguguucccaau

SEQ ID NO: 1707618 - RNA, 19 nt, Artificial Sequence
  Description of Artificial Sequence: Synthetic oligonucleotide
  Antisense strand to SEQ ID NO: 1707617
auugggaacacucugucac

SEQ ID NO: 1707619 - RNA, 19 nt, Artificial Sequence
  Description of Artificial Sequence: Synthetic oligonucleotide
  Sense strand starting at position 1302 of SEQ ID NO: 1561911
gacagaguguucccaauac

SEQ ID NO: 1707620 - RNA, 19 nt, Artificial Sequence
  Description of Artificial Sequence: Synthetic oligonucleotide
  Antisense strand to SEQ ID NO: 1707619
guauugggaacacucuguc

SEQ ID NO: 1707621 - RNA, 19 nt, Artificial Sequence
  Description of Artificial Sequence: Synthetic oligonucleotide
  Sense strand starting at position 1306 of SEQ ID NO: 1561911
gaguguucccaauacagca

SEQ ID NO: 1707622 - RNA, 19 nt, Artificial Sequence
  Description of Artificial Sequence: Synthetic oligonucleotide
  Antisense strand to SEQ ID NO: 1707621
ugcuguauugggaacacuc

SEQ ID NO: 1707623 - RNA, 19 nt, Artificial Sequence
  Description of Artificial Sequence: Synthetic oligonucleotide
  Sense strand starting at position 1321 of SEQ ID NO: 1561911
agcaaaguuuccgaccuga

SEQ ID NO: 1707624 - RNA, 19 nt, Artificial Sequence
  Description of Artificial Sequence: Synthetic oligonucleotide
  Antisense strand to SEQ ID NO: 1707623
ucaggucggaaacuuugcu

SEQ ID NO: 1707625 - RNA, 19 nt, Artificial Sequence
  Description of Artificial Sequence: Synthetic oligonucleotide
  Sense strand starting at position 1353 of SEQ ID NO: 1561911
cugagugcaucccggaaau

SEQ ID NO: 1707626 - RNA, 19 nt, Artificial Sequence
  Description of Artificial Sequence: Synthetic oligonucleotide
  Antisense strand to SEQ ID NO: 1707625
auuuccgggaugcacucag

SEQ ID NO: 1707627 - RNA, 19 nt, Artificial Sequence
  Description of Artificial Sequence: Synthetic oligonucleotide
  Sense strand starting at position 1355 of SEQ ID NO: 1561911
gagugcaucccggaaauaa

SEQ ID NO: 1707628 - RNA, 19 nt, Artificial Sequence
  Description of Artificial Sequence: Synthetic oligonucleotide
  Antisense strand to SEQ ID NO: 1707627
uuauuuccgggaugcacuc

SEQ ID NO: 1707629 - RNA, 19 nt, Artificial Sequence
  Description of Artificial Sequence: Synthetic oligonucleotide
  Sense strand starting at position 1701 of SEQ ID NO: 1561911
cccucaguguucccgaaac

SEQ ID NO: 1707630 - RNA, 19 nt, Artificial Sequence
  Description of Artificial Sequence: Synthetic oligonucleotide
  Antisense strand to SEQ ID NO: 1707629
guuucgggaacacugaggg

SEQ ID NO: 1707631 - RNA, 19 nt, Artificial Sequence
  Description of Artificial Sequence: Synthetic oligonucleotide
  Sense strand starting at position 1703 of SEQ ID NO: 1561911
cucaguguucccgaaacuc

SEQ ID NO: 1707632 - RNA, 19 nt, Artificial Sequence
  Description of Artificial Sequence: Synthetic oligonucleotide
  Antisense strand to SEQ ID NO: 1707631
gaguuucgggaacacugag

SEQ ID NO: 1707633 - RNA, 19 nt, Artificial Sequence
  Description of Artificial Sequence: Synthetic oligonucleotide
  Sense strand starting at position 1711 of SEQ ID NO: 1561911
ucccgaaacucuugcgaca

SEQ ID NO: 1707634 - RNA, 19 nt, Artificial Sequence
  Description of Artificial Sequence: Synthetic oligonucleotide
  Antisense strand to SEQ ID NO: 1707633
ugucgcaagaguuucggga

SEQ ID NO: 1707635 - RNA, 19 nt, Artificial Sequence
  Description of Artificial Sequence: Synthetic oligonucleotide
  Sense strand starting at position 2339 of SEQ ID NO: 1561911
acaguuagugcccaauaaa

SEQ ID NO: 1707636 - RNA, 19 nt, Artificial Sequence
  Description of Artificial Sequence: Synthetic oligonucleotide
  Antisense strand to SEQ ID NO: 1707635
uuuauugggcacuaacugu

SEQ ID NO: 1707637 - RNA, 19 nt, Artificial Sequence
  Description of Artificial Sequence: Synthetic oligonucleotide
  Sense strand starting at position 2342 of SEQ ID NO: 1561911
guuagugcccaauaaacgu

SEQ ID NO: 1707638 - RNA, 19 nt, Artificial Sequence
  Description of Artificial Sequence: Synthetic oligonucleotide
  Antisense strand to SEQ ID NO: 1707637
acguuuauugggcacuaac

SEQ ID NO: 1707639 - RNA, 19 nt, Artificial Sequence
  Description of Artificial Sequence: Synthetic oligonucleotide
  Sense strand starting at position 3213 of SEQ ID NO: 1561911
agcuaucacuccugucuuu

SEQ ID NO: 1707640 - RNA, 19 nt, Artificial Sequence
  Description of Artificial Sequence: Synthetic oligonucleotide
  Antisense strand to SEQ ID NO: 1707639
aaagacaggagugauagcu

SEQ ID NO: 1707641 - RNA, 19 nt, Artificial Sequence
  Description of Artificial Sequence: Synthetic oligonucleotide
  Sense strand starting at position 3333 of SEQ ID NO: 1561911
acaacaugcuuaugguauu

SEQ ID NO: 1707642 - RNA, 19 nt, Artificial Sequence
  Description of Artificial Sequence: Synthetic oligonucleotide
  Antisense strand to SEQ ID NO: 1707641
aauaccauaagcauguugu

SEQ ID NO: 1707643 - RNA, 19 nt, Artificial Sequence
  Description of Artificial Sequence: Synthetic oligonucleotide
  Sense strand starting at position 3361 of SEQ ID NO: 1561911
agcucaugaucugaaacua

SEQ ID NO: 1707644 - RNA, 19 nt, Artificial Sequence
  Description of Artificial Sequence: Synthetic oligonucleotide
  Antisense strand to SEQ ID NO: 1707643
uaguuucagaucaugagcu

SEQ ID NO: 1707645 - RNA, 19 nt, Artificial Sequence
  Description of Artificial Sequence: Synthetic oligonucleotide
  Sense strand starting at position 3875 of SEQ ID NO: 1561911
ggcuucauacucggugaca

SEQ ID NO: 1707646 - RNA, 19 nt, Artificial Sequence
  Description of Artificial Sequence: Synthetic oligonucleotide
  Antisense strand to SEQ ID NO: 1707645
ugucaccgaguaugaagcc

SEQ ID NO: 1707647 - RNA, 19 nt, Artificial Sequence
  Description of Artificial Sequence: Synthetic oligonucleotide
  Sense strand starting at position 3947 of SEQ ID NO: 1561911
uguuguugagguuggagua

SEQ ID NO: 1707648 - RNA, 19 nt, Artificial Sequence
  Description of Artificial Sequence: Synthetic oligonucleotide
  Antisense strand to SEQ ID NO: 1707647
uacuccaaccucaacaaca

SEQ ID NO: 1707649 - RNA, 19 nt, Artificial Sequence
  Description of Artificial Sequence: Synthetic oligonucleotide
  Sense strand starting at position 165 of SEQ ID NO: 1561912
aguauauucugauugucca

SEQ ID NO: 1707650 - RNA, 19 nt, Artificial Sequence
  Description of Artificial Sequence: Synthetic oligonucleotide
  Antisense strand to SEQ ID NO: 1707649
uggacaaucagaauauacu

SEQ ID NO: 1707651 - RNA, 19 nt, Artificial Sequence
  Description of Artificial Sequence: Synthetic oligonucleotide
  Sense strand starting at position 166 of SEQ ID NO: 1561912
guauauucugauuguccaa

SEQ ID NO: 1707652 - RNA, 19 nt, Artificial Sequence
  Description of Artificial Sequence: Synthetic oligonucleotide
  Antisense strand to SEQ ID NO: 1707651
uuggacaaucagaauauac

SEQ ID NO: 1707653 - RNA, 19 nt, Artificial Sequence
  Description of Artificial Sequence: Synthetic oligonucleotide
  Sense strand starting at position 168 of SEQ ID NO: 1561912
auauucugauuguccaaag

SEQ ID NO: 1707654 - RNA, 19 nt, Artificial Sequence
  Description of Artificial Sequence: Synthetic oligonucleotide
  Antisense strand to SEQ ID NO: 1707653
cuuuggacaaucagaauau

SEQ ID NO: 1707655 - RNA, 19 nt, Artificial Sequence
  Description of Artificial Sequence: Synthetic oligonucleotide
  Sense strand starting at position 210 of SEQ ID NO: 1561912
uuugaagguugucuuagau

SEQ ID NO: 1707656 - RNA, 19 nt, Artificial Sequence
  Description of Artificial Sequence: Synthetic oligonucleotide
  Antisense strand to SEQ ID NO: 1707655
aucuaagacaaccuucaaa

SEQ ID NO: 1707657 - RNA, 19 nt, Artificial Sequence
  Description of Artificial Sequence: Synthetic oligonucleotide
  Sense strand starting at position 287 of SEQ ID NO: 1561912
ggguuacauccucaugcua

SEQ ID NO: 1707658 - RNA, 19 nt, Artificial Sequence
  Description of Artificial Sequence: Synthetic oligonucleotide
  Antisense strand to SEQ ID NO: 1707657
uagcaugaggauguaaccc

SEQ ID NO: 1707659 - RNA, 19 nt, Artificial Sequence
  Description of Artificial Sequence: Synthetic oligonucleotide
  Sense strand starting at position 384 of SEQ ID NO: 1561912
gagacaauugucuaacugu

SEQ ID NO: 1707660 - RNA, 19 nt, Artificial Sequence
  Description of Artificial Sequence: Synthetic oligonucleotide
  Antisense strand to SEQ ID NO: 1707659
acaguuagacaauugucuc

SEQ ID NO: 1707661 - RNA, 19 nt, Artificial Sequence
  Description of Artificial Sequence: Synthetic oligonucleotide
  Sense strand starting at position 430 of SEQ ID NO: 1561912
cuccuacggaguuauaagu

SEQ ID NO: 1707662 - RNA, 19 nt, Artificial Sequence
  Description of Artificial Sequence: Synthetic oligonucleotide
  Antisense strand to SEQ ID NO: 1707661
acuuauaacuccguaggag

SEQ ID NO: 1707663 - RNA, 19 nt, Artificial Sequence
  Description of Artificial Sequence: Synthetic oligonucleotide
  Sense strand starting at position 438 of SEQ ID NO: 1561912
gaguuauaagugcaaagcu

SEQ ID NO: 1707664 - RNA, 19 nt, Artificial Sequence
  Description of Artificial Sequence: Synthetic oligonucleotide
  Antisense strand to SEQ ID NO: 1707663
agcuuugcacuuauaacuc

SEQ ID NO: 1707665 - RNA, 19 nt, Artificial Sequence
  Description of Artificial Sequence: Synthetic oligonucleotide
  Sense strand starting at position 477 of SEQ ID NO: 1561912
gcaggaggucguagcugua

SEQ ID NO: 1707666 - RNA, 19 nt, Artificial Sequence
  Description of Artificial Sequence: Synthetic oligonucleotide
  Antisense strand to SEQ ID NO: 1707665
uacagcuacgaccuccugc

SEQ ID NO: 1707667 - RNA, 19 nt, Artificial Sequence
  Description of Artificial Sequence: Synthetic oligonucleotide
  Sense strand starting at position 502 of SEQ ID NO: 1561912
uugcuugcaagagaucuga

SEQ ID NO: 1707668 - RNA, 19 nt, Artificial Sequence
  Description of Artificial Sequence: Synthetic oligonucleotide
  Antisense strand to SEQ ID NO: 1707667
ucagaucucuugcaagcaa

SEQ ID NO: 1707669 - RNA, 19 nt, Artificial Sequence
  Description of Artificial Sequence: Synthetic oligonucleotide
  Sense strand starting at position 676 of SEQ ID NO: 1561912
gugacuauuugggaaauca

SEQ ID NO: 1707670 - RNA, 19 nt, Artificial Sequence
  Description of Artificial Sequence: Synthetic oligonucleotide
  Antisense strand to SEQ ID NO: 1707669
ugauuucccaaauagucac

SEQ ID NO: 1707671 - RNA, 19 nt, Artificial Sequence
  Description of Artificial Sequence: Synthetic oligonucleotide
  Sense strand starting at position 689 of SEQ ID NO: 1561912
aaaucagaguuugugacuu

SEQ ID NO: 1707672 - RNA, 19 nt, Artificial Sequence
  Description of Artificial Sequence: Synthetic oligonucleotide
  Antisense strand to SEQ ID NO: 1707671
aagucacaaacucugauuu

SEQ ID NO: 1707673 - RNA, 19 nt, Artificial Sequence
  Description of Artificial Sequence: Synthetic oligonucleotide
  Sense strand starting at position 879 of SEQ ID NO: 1561912
aagugacccgacugaugau

SEQ ID NO: 1707674 - RNA, 19 nt, Artificial Sequence
  Description of Artificial Sequence: Synthetic oligonucleotide
  Antisense strand to SEQ ID NO: 1707673
aucaucagucgggucacuu

SEQ ID NO: 1707675 - RNA, 19 nt, Artificial Sequence
  Description of Artificial Sequence: Synthetic oligonucleotide
  Sense strand starting at position 2001 of SEQ ID NO: 1561912
ucaaucuggccuuagaguu

SEQ ID NO: 1707676 - RNA, 19 nt, Artificial Sequence
  Description of Artificial Sequence: Synthetic oligonucleotide
  Antisense strand to SEQ ID NO: 1707675
aacucuaaggccagauuga

SEQ ID NO: 1707677 - RNA, 19 nt, Artificial Sequence
  Description of Artificial Sequence: Synthetic oligonucleotide
  Sense strand starting at position 2014 of SEQ ID NO: 1561912
agaguuuauucuccucuag

SEQ ID NO: 1707678 - RNA, 19 nt, Artificial Sequence
  Description of Artificial Sequence: Synthetic oligonucleotide
  Antisense strand to SEQ ID NO: 1707677
cuagaggagaauaaacucu

SEQ ID NO: 1707679 - RNA, 19 nt, Artificial Sequence
  Description of Artificial Sequence: Synthetic oligonucleotide
  Sense strand starting at position 2147 of SEQ ID NO: 1561912
gagggagaguagcuaguua

SEQ ID NO: 1707680 - RNA, 19 nt, Artificial Sequence
  Description of Artificial Sequence: Synthetic oligonucleotide
  Antisense strand to SEQ ID NO: 1707679
uaacuagcuacucucccuc

SEQ ID NO: 1707681 - RNA, 19 nt, Artificial Sequence
  Description of Artificial Sequence: Synthetic oligonucleotide
  Sense strand starting at position 2169 of SEQ ID NO: 1561912
gcuagcaugcaaguuugua

SEQ ID NO: 1707682 - RNA, 19 nt, Artificial Sequence
  Description of Artificial Sequence: Synthetic oligonucleotide
  Antisense strand to SEQ ID NO: 1707681
uacaaacuugcaugcuagc

SEQ ID NO: 1707683 - RNA, 19 nt, Artificial Sequence
  Description of Artificial Sequence: Synthetic oligonucleotide
  Sense strand starting at position 2205 of SEQ ID NO: 1561912
gaacuuugcuguuccagga

SEQ ID NO: 1707684 - RNA, 19 nt, Artificial Sequence
  Description of Artificial Sequence: Synthetic oligonucleotide
  Antisense strand to SEQ ID NO: 1707683
uccuggaacagcaaaguuc

SEQ ID NO: 1707685 - RNA, 19 nt, Artificial Sequence
  Description of Artificial Sequence: Synthetic oligonucleotide
  Sense strand starting at position 2534 of SEQ ID NO: 1561912
guaccuggcccugaggauu

SEQ ID NO: 1707686 - RNA, 19 nt, Artificial Sequence
  Description of Artificial Sequence: Synthetic oligonucleotide
  Antisense strand to SEQ ID NO: 1707685
aauccucagggccagguac

SEQ ID NO: 1707687 - RNA, 19 nt, Artificial Sequence
  Description of Artificial Sequence: Synthetic oligonucleotide
  Sense strand starting at position 2546 of SEQ ID NO: 1561912
gaggauucugcagggagau

SEQ ID NO: 1707688 - RNA, 19 nt, Artificial Sequence
  Description of Artificial Sequence: Synthetic oligonucleotide
  Antisense strand to SEQ ID NO: 1707687
aucucccugcagaauccuc

SEQ ID NO: 1707689 - RNA, 19 nt, Artificial Sequence
  Description of Artificial Sequence: Synthetic oligonucleotide
  Sense strand starting at position 2547 of SEQ ID NO: 1561912
aggauucugcagggagauu

SEQ ID NO: 1707690 - RNA, 19 nt, Artificial Sequence
  Description of Artificial Sequence: Synthetic oligonucleotide
  Antisense strand to SEQ ID NO: 1707689
aaucucccugcagaauccu

SEQ ID NO: 1707691 - RNA, 19 nt, Artificial Sequence
  Description of Artificial Sequence: Synthetic oligonucleotide
  Sense strand starting at position 2618 of SEQ ID NO: 1561912
uggcuuagcccuuuguguu

SEQ ID NO: 1707692 - RNA, 19 nt, Artificial Sequence
  Description of Artificial Sequence: Synthetic oligonucleotide
  Antisense strand to SEQ ID NO: 1707691
aacacaaagggcuaagcca

SEQ ID NO: 1707693 - RNA, 19 nt, Artificial Sequence
  Description of Artificial Sequence: Synthetic oligonucleotide
  Sense strand starting at position 2632 of SEQ ID NO: 1561912
guguuugucauggaaacug

SEQ ID NO: 1707694 - RNA, 19 nt, Artificial Sequence
  Description of Artificial Sequence: Synthetic oligonucleotide
  Antisense strand to SEQ ID NO: 1707693
caguuuccaugacaaacac

SEQ ID NO: 1707695 - RNA, 19 nt, Artificial Sequence
  Description of Artificial Sequence: Synthetic oligonucleotide
  Sense strand starting at position 2919 of SEQ ID NO: 1561912
gucaaaguuccuggaggaa

SEQ ID NO: 1707696 - RNA, 19 nt, Artificial Sequence
  Description of Artificial Sequence: Synthetic oligonucleotide
  Antisense strand to SEQ ID NO: 1707695
uuccuccaggaacuuugac

SEQ ID NO: 1707697 - RNA, 19 nt, Artificial Sequence
  Description of Artificial Sequence: Synthetic oligonucleotide
  Sense strand starting at position 3095 of SEQ ID NO: 1561912
gucaucacagauuguggau

SEQ ID NO: 1707698 - RNA, 19 nt, Artificial Sequence
  Description of Artificial Sequence: Synthetic oligonucleotide
  Antisense strand to SEQ ID NO: 1707697
auccacaaucugugaugac

SEQ ID NO: 1707699 - RNA, 19 nt, Artificial Sequence
  Description of Artificial Sequence: Synthetic oligonucleotide
  Sense strand starting at position 3139 of SEQ ID NO: 1561912
gucagaaucacccaggugu

SEQ ID NO: 1707700 - RNA, 19 nt, Artificial Sequence
  Description of Artificial Sequence: Synthetic oligonucleotide
  Antisense strand to SEQ ID NO: 1707699
acaccugggugauucugac

SEQ ID NO: 1707701 - RNA, 19 nt, Artificial Sequence
  Description of Artificial Sequence: Synthetic oligonucleotide
  Sense strand starting at position 3141 of SEQ ID NO: 1561912
cagaaucacccagguguaa

SEQ ID NO: 1707702 - RNA, 19 nt, Artificial Sequence
  Description of Artificial Sequence: Synthetic oligonucleotide
  Antisense strand to SEQ ID NO: 1707701
uuacaccugggugauucug

SEQ ID NO: 1707703 - RNA, 19 nt, Artificial Sequence
  Description of Artificial Sequence: Synthetic oligonucleotide
  Sense strand starting at position 3152 of SEQ ID NO: 1561912
agguguaagaccugaacaa

SEQ ID NO: 1707704 - RNA, 19 nt, Artificial Sequence
  Description of Artificial Sequence: Synthetic oligonucleotide
  Antisense strand to SEQ ID NO: 1707703
uuguucaggucuuacaccu

SEQ ID NO: 1707705 - RNA, 19 nt, Artificial Sequence
  Description of Artificial Sequence: Synthetic oligonucleotide
  Sense strand starting at position 3167 of SEQ ID NO: 1561912
acaaguguguuugcaauuu

SEQ ID NO: 1707706 - RNA, 19 nt, Artificial Sequence
  Description of Artificial Sequence: Synthetic oligonucleotide
  Antisense strand to SEQ ID NO: 1707705
aaauugcaaacacacuugu

SEQ ID NO: 1707707 - RNA, 19 nt, Artificial Sequence
  Description of Artificial Sequence: Synthetic oligonucleotide
  Sense strand starting at position 3211 of SEQ ID NO: 1561912
acaguugagcuccacugaa

SEQ ID NO: 1707708 - RNA, 19 nt, Artificial Sequence
  Description of Artificial Sequence: Synthetic oligonucleotide
  Antisense strand to SEQ ID NO: 1707707
uucaguggagcucaacugu

SEQ ID NO: 1707709 - RNA, 19 nt, Artificial Sequence
  Description of Artificial Sequence: Synthetic oligonucleotide
  Sense strand starting at position 3245 of SEQ ID NO: 1561912
uuugaaagugcugaaagua

SEQ ID NO: 1707710 - RNA, 19 nt, Artificial Sequence
  Description of Artificial Sequence: Synthetic oligonucleotide
  Antisense strand to SEQ ID NO: 1707709
uacuuucagcacuuucaaa

SEQ ID NO: 1707711 - RNA, 19 nt, Artificial Sequence
  Description of Artificial Sequence: Synthetic oligonucleotide
  Sense strand starting at position 3271 of SEQ ID NO: 1561912
cuggucagagcauggaaau

SEQ ID NO: 1707712 - RNA, 19 nt, Artificial Sequence
  Description of Artificial Sequence: Synthetic oligonucleotide
  Antisense strand to SEQ ID NO: 1707711
auuuccaugcucugaccag

SEQ ID NO: 1707713 - RNA, 19 nt, Artificial Sequence
  Description of Artificial Sequence: Synthetic oligonucleotide
  Sense strand starting at position 3272 of SEQ ID NO: 1561912
uggucagagcauggaaaua

SEQ ID NO: 1707714 - RNA, 19 nt, Artificial Sequence
  Description of Artificial Sequence: Synthetic oligonucleotide
  Antisense strand to SEQ ID NO: 1707713
uauuuccaugcucugacca

SEQ ID NO: 1707715 - RNA, 19 nt, Artificial Sequence
  Description of Artificial Sequence: Synthetic oligonucleotide
  Sense strand starting at position 3459 of SEQ ID NO: 1561912
uuagaaauauuccugguug

SEQ ID NO: 1707716 - RNA, 19 nt, Artificial Sequence
  Description of Artificial Sequence: Synthetic oligonucleotide
  Antisense strand to SEQ ID NO: 1707715
caaccaggaauauuucuaa

SEQ ID NO: 1707717 - RNA, 19 nt, Artificial Sequence
  Description of Artificial Sequence: Synthetic oligonucleotide
  Sense strand starting at position 3461 of SEQ ID NO: 1561912
agaaauauuccugguugca

SEQ ID NO: 1707718 - RNA, 19 nt, Artificial Sequence
  Description of Artificial Sequence: Synthetic oligonucleotide
  Antisense strand to SEQ ID NO: 1707717
ugcaaccaggaauauuucu

SEQ ID NO: 1707719 - RNA, 19 nt, Artificial Sequence
  Description of Artificial Sequence: Synthetic oligonucleotide
  Sense strand starting at position 3801 of SEQ ID NO: 1561912
uuggaaguaugguuuaaca

SEQ ID NO: 1707720 - RNA, 19 nt, Artificial Sequence
  Description of Artificial Sequence: Synthetic oligonucleotide
  Antisense strand to SEQ ID NO: 1707719
uguuaaaccauacuuccaa

SEQ ID NO: 1707721 - RNA, 19 nt, Artificial Sequence
  Description of Artificial Sequence: Synthetic oligonucleotide
  Sense strand starting at position 3811 of SEQ ID NO: 1561912
gguuuaacacuugguccau

SEQ ID NO: 1707722 - RNA, 19 nt, Artificial Sequence
  Description of Artificial Sequence: Synthetic oligonucleotide
  Antisense strand to SEQ ID NO: 1707721
auggaccaaguguuaaacc

SEQ ID NO: 1707723 - RNA, 19 nt, Artificial Sequence
  Description of Artificial Sequence: Synthetic oligonucleotide
  Sense strand starting at position 3817 of SEQ ID NO: 1561912
acacuugguccauguuaga

SEQ ID NO: 1707724 - RNA, 19 nt, Artificial Sequence
  Description of Artificial Sequence: Synthetic oligonucleotide
  Antisense strand to SEQ ID NO: 1707723
ucuaacauggaccaagugu

SEQ ID NO: 1707725 - RNA, 19 nt, Artificial Sequence
  Description of Artificial Sequence: Synthetic oligonucleotide
  Sense strand starting at position 3939 of SEQ ID NO: 1561912
gugaauuaaugauccaucu

SEQ ID NO: 1707726 - RNA, 19 nt, Artificial Sequence
  Description of Artificial Sequence: Synthetic oligonucleotide
  Antisense strand to SEQ ID NO: 1707725
agauggaucauuaauucac

SEQ ID NO: 1707727 - RNA, 19 nt, Artificial Sequence
  Description of Artificial Sequence: Synthetic oligonucleotide
  Sense strand starting at position 3948 of SEQ ID NO: 1561912
ugauccaucucuccaugua

SEQ ID NO: 1707728 - RNA, 19 nt, Artificial Sequence
  Description of Artificial Sequence: Synthetic oligonucleotide
  Antisense strand to SEQ ID NO: 1707727
uacauggagagauggauca

SEQ ID NO: 1707729 - RNA, 19 nt, Artificial Sequence
  Description of Artificial Sequence: Synthetic oligonucleotide
  Sense strand starting at position 10 of SEQ ID NO: 1561913
aagauuaaagcagguauau

SEQ ID NO: 1707730 - RNA, 19 nt, Artificial Sequence
  Description of Artificial Sequence: Synthetic oligonucleotide
  Antisense strand to SEQ ID NO: 1707729
auauaccugcuuuaaucuu

SEQ ID NO: 1707731 - RNA, 19 nt, Artificial Sequence
  Description of Artificial Sequence: Synthetic oligonucleotide
  Sense strand starting at position 21 of SEQ ID NO: 1561913
agguauauguuaguaaaug

SEQ ID NO: 1707732 - RNA, 19 nt, Artificial Sequence
  Description of Artificial Sequence: Synthetic oligonucleotide
  Antisense strand to SEQ ID NO: 1707731
cauuuacuaacauauaccu

SEQ ID NO: 1707733 - RNA, 19 nt, Artificial Sequence
  Description of Artificial Sequence: Synthetic oligonucleotide
  Sense strand starting at position 375 of SEQ ID NO: 1561913
uaaggaguagcaugaaaua

SEQ ID NO: 1707734 - RNA, 19 nt, Artificial Sequence
  Description of Artificial Sequence: Synthetic oligonucleotide
  Antisense strand to SEQ ID NO: 1707733
uauuucaugcuacuccuua

SEQ ID NO: 1707735 - RNA, 19 nt, Artificial Sequence
  Description of Artificial Sequence: Synthetic oligonucleotide
  Sense strand starting at position 414 of SEQ ID NO: 1561913
gauaaaccgccuuguauga

SEQ ID NO: 1707736 - RNA, 19 nt, Artificial Sequence
  Description of Artificial Sequence: Synthetic oligonucleotide
  Antisense strand to SEQ ID NO: 1707735
ucauacaaggcgguuuauc

SEQ ID NO: 1707737 - RNA, 19 nt, Artificial Sequence
  Description of Artificial Sequence: Synthetic oligonucleotide
  Sense strand starting at position 423 of SEQ ID NO: 1561913
ccuuguaugauagacguga

SEQ ID NO: 1707738 - RNA, 19 nt, Artificial Sequence
  Description of Artificial Sequence: Synthetic oligonucleotide
  Antisense strand to SEQ ID NO: 1707737
ucacgucuaucauacaagg

SEQ ID NO: 1707739 - RNA, 19 nt, Artificial Sequence
  Description of Artificial Sequence: Synthetic oligonucleotide
  Sense strand starting at position 425 of SEQ ID NO: 1561913
uuguaugauagacgugaau

SEQ ID NO: 1707740 - RNA, 19 nt, Artificial Sequence
  Description of Artificial Sequence: Synthetic oligonucleotide
  Antisense strand to SEQ ID NO: 1707739
auucacgucuaucauacaa

SEQ ID NO: 1707741 - RNA, 19 nt, Artificial Sequence
  Description of Artificial Sequence: Synthetic oligonucleotide
  Sense strand starting at position 427 of SEQ ID NO: 1561913
guaugauagacgugaauug

SEQ ID NO: 1707742 - RNA, 19 nt, Artificial Sequence
  Description of Artificial Sequence: Synthetic oligonucleotide
  Antisense strand to SEQ ID NO: 1707741
caauucacgucuaucauac

SEQ ID NO: 1707743 - RNA, 19 nt, Artificial Sequence
  Description of Artificial Sequence: Synthetic oligonucleotide
  Sense strand starting at position 439 of SEQ ID NO: 1561913
ugaauugcuuccuuaagug

SEQ ID NO: 1707744 - RNA, 19 nt, Artificial Sequence
  Description of Artificial Sequence: Synthetic oligonucleotide
  Antisense strand to SEQ ID NO: 1707743
cacuuaaggaagcaauuca

SEQ ID NO: 1707745 - RNA, 19 nt, Artificial Sequence
  Description of Artificial Sequence: Synthetic oligonucleotide
  Sense strand starting at position 769 of SEQ ID NO: 1561913
guuguacagcuaugauaca

SEQ ID NO: 1707746 - RNA, 19 nt, Artificial Sequence
  Description of Artificial Sequence: Synthetic oligonucleotide
  Antisense strand to SEQ ID NO: 1707745
uguaucauagcuguacaac

SEQ ID NO: 1707747 - RNA, 19 nt, Artificial Sequence
  Description of Artificial Sequence: Synthetic oligonucleotide
  Sense strand starting at position 868 of SEQ ID NO: 1561913
augguuuacguauacuaga

SEQ ID NO: 1707748 - RNA, 19 nt, Artificial Sequence
  Description of Artificial Sequence: Synthetic oligonucleotide
  Antisense strand to SEQ ID NO: 1707747
ucuaguauacguaaaccau

SEQ ID NO: 1707749 - RNA, 19 nt, Artificial Sequence
  Description of Artificial Sequence: Synthetic oligonucleotide
  Sense strand starting at position 1029 of SEQ ID NO: 1561913
acauaauucuggccuguga

SEQ ID NO: 1707750 - RNA, 19 nt, Artificial Sequence
  Description of Artificial Sequence: Synthetic oligonucleotide
  Antisense strand to SEQ ID NO: 1707749
ucacaggccagaauuaugu

SEQ ID NO: 1707751 - RNA, 19 nt, Artificial Sequence
  Description of Artificial Sequence: Synthetic oligonucleotide
  Sense strand starting at position 1031 of SEQ ID NO: 1561913
auaauucuggccugugaga

SEQ ID NO: 1707752 - RNA, 19 nt, Artificial Sequence
  Description of Artificial Sequence: Synthetic oligonucleotide
  Antisense strand to SEQ ID NO: 1707751
ucucacaggccagaauuau

SEQ ID NO: 1707753 - RNA, 19 nt, Artificial Sequence
  Description of Artificial Sequence: Synthetic oligonucleotide
  Sense strand starting at position 1033 of SEQ ID NO: 1561913
aauucuggccugugagaca

SEQ ID NO: 1707754 - RNA, 19 nt, Artificial Sequence
  Description of Artificial Sequence: Synthetic oligonucleotide
  Antisense strand to SEQ ID NO: 1707753
ugucucacaggccagaauu

SEQ ID NO: 1707755 - RNA, 19 nt, Artificial Sequence
  Description of Artificial Sequence: Synthetic oligonucleotide
  Sense strand starting at position 1985 of SEQ ID NO: 1561913
ccaacuuccgcucaaagaa

SEQ ID NO: 1707756 - RNA, 19 nt, Artificial Sequence
  Description of Artificial Sequence: Synthetic oligonucleotide
  Antisense strand to SEQ ID NO: 1707755
uucuuugagcggaaguugg

SEQ ID NO: 1707757 - RNA, 19 nt, Artificial Sequence
  Description of Artificial Sequence: Synthetic oligonucleotide
  Sense strand starting at position 2045 of SEQ ID NO: 1561913
ggaguuuggccagacggaa

SEQ ID NO: 1707758 - RNA, 19 nt, Artificial Sequence
  Description of Artificial Sequence: Synthetic oligonucleotide
  Antisense strand to SEQ ID NO: 1707757
uuccgucuggccaaacucc

SEQ ID NO: 1707759 - RNA, 19 nt, Artificial Sequence
  Description of Artificial Sequence: Synthetic oligonucleotide
  Sense strand starting at position 2325 of SEQ ID NO: 1561913
ggugcugaaacgugaagau

SEQ ID NO: 1707760 - RNA, 19 nt, Artificial Sequence
  Description of Artificial Sequence: Synthetic oligonucleotide
  Antisense strand to SEQ ID NO: 1707759
aucuucacguuucagcacc

SEQ ID NO: 1707761 - RNA, 19 nt, Artificial Sequence
  Description of Artificial Sequence: Synthetic oligonucleotide
  Sense strand starting at position 2334 of SEQ ID NO: 1561913
acgugaagauguguuuaaa

SEQ ID NO: 1707762 - RNA, 19 nt, Artificial Sequence
  Description of Artificial Sequence: Synthetic oligonucleotide
  Antisense strand to SEQ ID NO: 1707761
uuuaaacacaucuucacgu

SEQ ID NO: 1707763 - RNA, 19 nt, Artificial Sequence
  Description of Artificial Sequence: Synthetic oligonucleotide
  Sense strand starting at position 2337 of SEQ ID NO: 1561913
ugaagauguguuuaaagca

SEQ ID NO: 1707764 - RNA, 19 nt, Artificial Sequence
  Description of Artificial Sequence: Synthetic oligonucleotide
  Antisense strand to SEQ ID NO: 1707763
ugcuuuaaacacaucuuca

SEQ ID NO: 1707765 - RNA, 19 nt, Artificial Sequence
  Description of Artificial Sequence: Synthetic oligonucleotide
  Sense strand starting at position 2342 of SEQ ID NO: 1561913
auguguuuaaagcaguaca

SEQ ID NO: 1707766 - RNA, 19 nt, Artificial Sequence
  Description of Artificial Sequence: Synthetic oligonucleotide
  Antisense strand to SEQ ID NO: 1707765
uguacugcuuuaaacacau

SEQ ID NO: 1707767 - RNA, 19 nt, Artificial Sequence
  Description of Artificial Sequence: Synthetic oligonucleotide
  Sense strand starting at position 2345 of SEQ ID NO: 1561913
uguuuaaagcaguacaagu

SEQ ID NO: 1707768 - RNA, 19 nt, Artificial Sequence
  Description of Artificial Sequence: Synthetic oligonucleotide
  Antisense strand to SEQ ID NO: 1707767
acuuguacugcuuuaaaca

SEQ ID NO: 1707769 - RNA, 19 nt, Artificial Sequence
  Description of Artificial Sequence: Synthetic oligonucleotide
  Sense strand starting at position 2356 of SEQ ID NO: 1561913
guacaaguccagcggagaa

SEQ ID NO: 1707770 - RNA, 19 nt, Artificial Sequence
  Description of Artificial Sequence: Synthetic oligonucleotide
  Antisense strand to SEQ ID NO: 1707769
uucuccgcuggacuuguac

SEQ ID NO: 1707771 - RNA, 19 nt, Artificial Sequence
  Description of Artificial Sequence: Synthetic oligonucleotide
  Sense strand starting at position 2368 of SEQ ID NO: 1561913
cggagaaaguaagucagau

SEQ ID NO: 1707772 - RNA, 19 nt, Artificial Sequence
  Description of Artificial Sequence: Synthetic oligonucleotide
  Antisense strand to SEQ ID NO: 1707771
aucugacuuacuuucuccg

SEQ ID NO: 1707773 - RNA, 19 nt, Artificial Sequence
  Description of Artificial Sequence: Synthetic oligonucleotide
  Sense strand starting at position 2377 of SEQ ID NO: 1561913
uaagucagaucgcugauuu

SEQ ID NO: 1707774 - RNA, 19 nt, Artificial Sequence
  Description of Artificial Sequence: Synthetic oligonucleotide
  Antisense strand to SEQ ID NO: 1707773
aaaucagcgaucugacuua

SEQ ID NO: 1707775 - RNA, 19 nt, Artificial Sequence
  Description of Artificial Sequence: Synthetic oligonucleotide
  Sense strand starting at position 2650 of SEQ ID NO: 1561913
ucagucuuuccacagaguu

SEQ ID NO: 1707776 - RNA, 19 nt, Artificial Sequence
  Description of Artificial Sequence: Synthetic oligonucleotide
  Antisense strand to SEQ ID NO: 1707775
aacucuguggaaagacuga

SEQ ID NO: 1707777 - RNA, 19 nt, Artificial Sequence
  Description of Artificial Sequence: Synthetic oligonucleotide
  Sense strand starting at position 2739 of SEQ ID NO: 1561913
ugaaguucuuucccuagga

SEQ ID NO: 1707778 - RNA, 19 nt, Artificial Sequence
  Description of Artificial Sequence: Synthetic oligonucleotide
  Antisense strand to SEQ ID NO: 1707777
uccuagggaaagaacuuca

SEQ ID NO: 1707779 - RNA, 19 nt, Artificial Sequence
  Description of Artificial Sequence: Synthetic oligonucleotide
  Sense strand starting at position 2740 of SEQ ID NO: 1561913
gaaguucuuucccuaggac

SEQ ID NO: 1707780 - RNA, 19 nt, Artificial Sequence
  Description of Artificial Sequence: Synthetic oligonucleotide
  Antisense strand to SEQ ID NO: 1707779
guccuagggaaagaacuuc

SEQ ID NO: 1707781 - RNA, 19 nt, Artificial Sequence
  Description of Artificial Sequence: Synthetic oligonucleotide
  Sense strand starting at position 3007 of SEQ ID NO: 1561913
guggaaucacuuugaguuu

SEQ ID NO: 1707782 - RNA, 19 nt, Artificial Sequence
  Description of Artificial Sequence: Synthetic oligonucleotide
  Antisense strand to SEQ ID NO: 1707781
aaacucaaagugauuccac

SEQ ID NO: 1707783 - RNA, 19 nt, Artificial Sequence
  Description of Artificial Sequence: Synthetic oligonucleotide
  Sense strand starting at position 3045 of SEQ ID NO: 1561913
aggauucaacgcugggaaa

SEQ ID NO: 1707784 - RNA, 19 nt, Artificial Sequence
  Description of Artificial Sequence: Synthetic oligonucleotide
  Antisense strand to SEQ ID NO: 1707783
uuucccagcguugaauccu

SEQ ID NO: 1707785 - RNA, 19 nt, Artificial Sequence
  Description of Artificial Sequence: Synthetic oligonucleotide
  Sense strand starting at position 3170 of SEQ ID NO: 1561913
uuugauaacuuucuggaag

SEQ ID NO: 1707786 - RNA, 19 nt, Artificial Sequence
  Description of Artificial Sequence: Synthetic oligonucleotide
  Antisense strand to SEQ ID NO: 1707785
cuuccagaaaguuaucaaa

SEQ ID NO: 1707787 - RNA, 19 nt, Artificial Sequence
  Description of Artificial Sequence: Synthetic oligonucleotide
  Sense strand starting at position 3195 of SEQ ID NO: 1561913
ugagguuguuaaguccuaa

SEQ ID NO: 1707788 - RNA, 19 nt, Artificial Sequence
  Description of Artificial Sequence: Synthetic oligonucleotide
  Antisense strand to SEQ ID NO: 1707787
uuaggacuuaacaaccuca

SEQ ID NO: 1707789 - RNA, 19 nt, Artificial Sequence
  Description of Artificial Sequence: Synthetic oligonucleotide
  Sense strand starting at position 3207 of SEQ ID NO: 1561913
guccuaagagcuuauuaau

SEQ ID NO: 1707790 - RNA, 19 nt, Artificial Sequence
  Description of Artificial Sequence: Synthetic oligonucleotide
  Antisense strand to SEQ ID NO: 1707789
auuaauaagcucuuaggac

SEQ ID NO: 1707791 - RNA, 19 nt, Artificial Sequence
  Description of Artificial Sequence: Synthetic oligonucleotide
  Sense strand starting at position 3238 of SEQ ID NO: 1561913
uugggauauuuggauuaau

SEQ ID NO: 1707792 - RNA, 19 nt, Artificial Sequence
  Description of Artificial Sequence: Synthetic oligonucleotide
  Antisense strand to SEQ ID NO: 1707791
auuaauccaaauaucccaa

SEQ ID NO: 1707793 - RNA, 19 nt, Artificial Sequence
  Description of Artificial Sequence: Synthetic oligonucleotide
  Sense strand starting at position 3624 of SEQ ID NO: 1561913
agauaaguugaaugcaaug

SEQ ID NO: 1707794 - RNA, 19 nt, Artificial Sequence
  Description of Artificial Sequence: Synthetic oligonucleotide
  Antisense strand to SEQ ID NO: 1707793
cauugcauucaacuuaucu

SEQ ID NO: 1707795 - RNA, 19 nt, Artificial Sequence
  Description of Artificial Sequence: Synthetic oligonucleotide
  Sense strand starting at position 3683 of SEQ ID NO: 1561913
uggaauuucugauaaguac

SEQ ID NO: 1707796 - RNA, 19 nt, Artificial Sequence
  Description of Artificial Sequence: Synthetic oligonucleotide
  Antisense strand to SEQ ID NO: 1707795
guacuuaucagaaauucca

SEQ ID NO: 1707797 - RNA, 19 nt, Artificial Sequence
  Description of Artificial Sequence: Synthetic oligonucleotide
  Sense strand starting at position 3737 of SEQ ID NO: 1561913
caaacuguugacugguauu

SEQ ID NO: 1707798 - RNA, 19 nt, Artificial Sequence
  Description of Artificial Sequence: Synthetic oligonucleotide
  Antisense strand to SEQ ID NO: 1707797
aauaccagucaacaguuug

SEQ ID NO: 1707799 - RNA, 19 nt, Artificial Sequence
  Description of Artificial Sequence: Synthetic oligonucleotide
  Sense strand starting at position 3758 of SEQ ID NO: 1561913
aggugaagcaagcaucaua

SEQ ID NO: 1707800 - RNA, 19 nt, Artificial Sequence
  Description of Artificial Sequence: Synthetic oligonucleotide
  Antisense strand to SEQ ID NO: 1707799
uaugaugcuugcuucaccu

SEQ ID NO: 1707801 - RNA, 19 nt, Artificial Sequence
  Description of Artificial Sequence: Synthetic oligonucleotide
  Sense strand starting at position 3801 of SEQ ID NO: 1561913
gagcacuaagcuggugaua

SEQ ID NO: 1707802 - RNA, 19 nt, Artificial Sequence
  Description of Artificial Sequence: Synthetic oligonucleotide
  Antisense strand to SEQ ID NO: 1707801
uaucaccagcuuagugcuc

SEQ ID NO: 1707803 - RNA, 19 nt, Artificial Sequence
  Description of Artificial Sequence: Synthetic oligonucleotide
  Sense strand starting at position 3810 of SEQ ID NO: 1561913
gcuggugauaaccaagcuu

SEQ ID NO: 1707804 - RNA, 19 nt, Artificial Sequence
  Description of Artificial Sequence: Synthetic oligonucleotide
  Antisense strand to SEQ ID NO: 1707803
aagcuugguuaucaccagc

SEQ ID NO: 1707805 - RNA, 19 nt, Artificial Sequence
  Description of Artificial Sequence: Synthetic oligonucleotide
  Sense strand starting at position 3838 of SEQ ID NO: 1561913
gcacuaauuuaguaaagau

SEQ ID NO: 1707806 - RNA, 19 nt, Artificial Sequence
  Description of Artificial Sequence: Synthetic oligonucleotide
  Antisense strand to SEQ ID NO: 1707805
aucuuuacuaaauuagugc

SEQ ID NO: 1707807 - RNA, 19 nt, Artificial Sequence
  Description of Artificial Sequence: Synthetic oligonucleotide
  Sense strand starting at position 3889 of SEQ ID NO: 1561913
uuaguccggaaauguaaua

SEQ ID NO: 1707808 - RNA, 19 nt, Artificial Sequence
  Description of Artificial Sequence: Synthetic oligonucleotide
  Antisense strand to SEQ ID NO: 1707807
uauuacauuuccggacuaa

SEQ ID NO: 1707809 - RNA, 19 nt, Artificial Sequence
  Description of Artificial Sequence: Synthetic oligonucleotide
  Sense strand starting at position 1 of SEQ ID NO: 1561914
aaugaaagaguuuguguac

SEQ ID NO: 1707810 - RNA, 19 nt, Artificial Sequence
  Description of Artificial Sequence: Synthetic oligonucleotide
  Antisense strand to SEQ ID NO: 1707809
guacacaaacucuuucauu

SEQ ID NO: 1707811 - RNA, 19 nt, Artificial Sequence
  Description of Artificial Sequence: Synthetic oligonucleotide
  Sense strand starting at position 2 of SEQ ID NO: 1561914
augaaagaguuuguguacu

SEQ ID NO: 1707812 - RNA, 19 nt, Artificial Sequence
  Description of Artificial Sequence: Synthetic oligonucleotide
  Antisense strand to SEQ ID NO: 1707811
aguacacaaacucuuucau

SEQ ID NO: 1707813 - RNA, 19 nt, Artificial Sequence
  Description of Artificial Sequence: Synthetic oligonucleotide
  Sense strand starting at position 4 of SEQ ID NO: 1561914
gaaagaguuuguguacuac

SEQ ID NO: 1707814 - RNA, 19 nt, Artificial Sequence
  Description of Artificial Sequence: Synthetic oligonucleotide
  Antisense strand to SEQ ID NO: 1707813
guaguacacaaacucuuuc

SEQ ID NO: 1707815 - RNA, 19 nt, Artificial Sequence
  Description of Artificial Sequence: Synthetic oligonucleotide
  Sense strand starting at position 174 of SEQ ID NO: 1561914
ggaagcuauucuccucacu

SEQ ID NO: 1707816 - RNA, 19 nt, Artificial Sequence
  Description of Artificial Sequence: Synthetic oligonucleotide
  Antisense strand to SEQ ID NO: 1707815
agugaggagaauagcuucc

SEQ ID NO: 1707817 - RNA, 19 nt, Artificial Sequence
  Description of Artificial Sequence: Synthetic oligonucleotide
  Sense strand starting at position 185 of SEQ ID NO: 1561914
uccucacuuguccaaguua

SEQ ID NO: 1707818 - RNA, 19 nt, Artificial Sequence
  Description of Artificial Sequence: Synthetic oligonucleotide
  Antisense strand to SEQ ID NO: 1707817
uaacuuggacaagugagga

SEQ ID NO: 1707819 - RNA, 19 nt, Artificial Sequence
  Description of Artificial Sequence: Synthetic oligonucleotide
  Sense strand starting at position 209 of SEQ ID NO: 1561914
uuagaaguugaagguuaaa

SEQ ID NO: 1707820 - RNA, 19 nt, Artificial Sequence
  Description of Artificial Sequence: Synthetic oligonucleotide
  Antisense strand to SEQ ID NO: 1707819
uuuaaccuucaacuucuaa

SEQ ID NO: 1707821 - RNA, 19 nt, Artificial Sequence
  Description of Artificial Sequence: Synthetic oligonucleotide
  Sense strand starting at position 222 of SEQ ID NO: 1561914
guuaaaguguauuuauccu

SEQ ID NO: 1707822 - RNA, 19 nt, Artificial Sequence
  Description of Artificial Sequence: Synthetic oligonucleotide
  Antisense strand to SEQ ID NO: 1707821
aggauaaauacacuuuaac

SEQ ID NO: 1707823 - RNA, 19 nt, Artificial Sequence
  Description of Artificial Sequence: Synthetic oligonucleotide
  Sense strand starting at position 262 of SEQ ID NO: 1561914
ugauuauguuuaccaaggu

SEQ ID NO: 1707824 - RNA, 19 nt, Artificial Sequence
  Description of Artificial Sequence: Synthetic oligonucleotide
  Antisense strand to SEQ ID NO: 1707823
accuugguaaacauaauca

SEQ ID NO: 1707825 - RNA, 19 nt, Artificial Sequence
  Description of Artificial Sequence: Synthetic oligonucleotide
  Sense strand starting at position 278 of SEQ ID NO: 1561914
ggucuaaauauaggucaug

SEQ ID NO: 1707826 - RNA, 19 nt, Artificial Sequence
  Description of Artificial Sequence: Synthetic oligonucleotide
  Antisense strand to SEQ ID NO: 1707825
caugaccuauauuuagacc

SEQ ID NO: 1707827 - RNA, 19 nt, Artificial Sequence
  Description of Artificial Sequence: Synthetic oligonucleotide
  Sense strand starting at position 281 of SEQ ID NO: 1561914
cuaaauauaggucaugugu

SEQ ID NO: 1707828 - RNA, 19 nt, Artificial Sequence
  Description of Artificial Sequence: Synthetic oligonucleotide
  Antisense strand to SEQ ID NO: 1707827
acacaugaccuauauuuag

SEQ ID NO: 1707829 - RNA, 19 nt, Artificial Sequence
  Description of Artificial Sequence: Synthetic oligonucleotide
  Sense strand starting at position 541 of SEQ ID NO: 1561914
uguggauaacaguaucuau

SEQ ID NO: 1707830 - RNA, 19 nt, Artificial Sequence
  Description of Artificial Sequence: Synthetic oligonucleotide
  Antisense strand to SEQ ID NO: 1707829
auagauacuguuauccaca

SEQ ID NO: 1707831 - RNA, 19 nt, Artificial Sequence
  Description of Artificial Sequence: Synthetic oligonucleotide
  Sense strand starting at position 544 of SEQ ID NO: 1561914
ggauaacaguaucuauacu

SEQ ID NO: 1707832 - RNA, 19 nt, Artificial Sequence
  Description of Artificial Sequence: Synthetic oligonucleotide
  Antisense strand to SEQ ID NO: 1707831
aguauagauacuguuaucc

SEQ ID NO: 1707833 - RNA, 19 nt, Artificial Sequence
  Description of Artificial Sequence: Synthetic oligonucleotide
  Sense strand starting at position 738 of SEQ ID NO: 1561914
ugagauaauuacuugaagu

SEQ ID NO: 1707834 - RNA, 19 nt, Artificial Sequence
  Description of Artificial Sequence: Synthetic oligonucleotide
  Antisense strand to SEQ ID NO: 1707833
acuucaaguaauuaucuca

SEQ ID NO: 1707835 - RNA, 19 nt, Artificial Sequence
  Description of Artificial Sequence: Synthetic oligonucleotide
  Sense strand starting at position 746 of SEQ ID NO: 1561914
uuacuugaaguguauucuu

SEQ ID NO: 1707836 - RNA, 19 nt, Artificial Sequence
  Description of Artificial Sequence: Synthetic oligonucleotide
  Antisense strand to SEQ ID NO: 1707835
aagaauacacuucaaguaa

SEQ ID NO: 1707837 - RNA, 19 nt, Artificial Sequence
  Description of Artificial Sequence: Synthetic oligonucleotide
  Sense strand starting at position 1313 of SEQ ID NO: 1561914
uguauuccuauuggagaga

SEQ ID NO: 1707838 - RNA, 19 nt, Artificial Sequence
  Description of Artificial Sequence: Synthetic oligonucleotide
  Antisense strand to SEQ ID NO: 1707837
ucucuccaauaggaauaca

SEQ ID NO: 1707839 - RNA, 19 nt, Artificial Sequence
  Description of Artificial Sequence: Synthetic oligonucleotide
  Sense strand starting at position 1344 of SEQ ID NO: 1561914
aagcgaaagcugcaucaga

SEQ ID NO: 1707840 - RNA, 19 nt, Artificial Sequence
  Description of Artificial Sequence: Synthetic oligonucleotide
  Antisense strand to SEQ ID NO: 1707839
ucugaugcagcuuucgcuu

SEQ ID NO: 1707841 - RNA, 19 nt, Artificial Sequence
  Description of Artificial Sequence: Synthetic oligonucleotide
  Sense strand starting at position 1505 of SEQ ID NO: 1561914
cuaaaugcgaauuaguaga

SEQ ID NO: 1707842 - RNA, 19 nt, Artificial Sequence
  Description of Artificial Sequence: Synthetic oligonucleotide
  Antisense strand to SEQ ID NO: 1707841
ucuacuaauucgcauuuag

SEQ ID NO: 1707843 - RNA, 19 nt, Artificial Sequence
  Description of Artificial Sequence: Synthetic oligonucleotide
  Sense strand starting at position 1545 of SEQ ID NO: 1561914
aguuucuaaucugcaggaa

SEQ ID NO: 1707844 - RNA, 19 nt, Artificial Sequence
  Description of Artificial Sequence: Synthetic oligonucleotide
  Antisense strand to SEQ ID NO: 1707843
uuccugcagauuagaaacu

SEQ ID NO: 1707845 - RNA, 19 nt, Artificial Sequence
  Description of Artificial Sequence: Synthetic oligonucleotide
  Sense strand starting at position 1546 of SEQ ID NO: 1561914
guuucuaaucugcaggaau

SEQ ID NO: 1707846 - RNA, 19 nt, Artificial Sequence
  Description of Artificial Sequence: Synthetic oligonucleotide
  Antisense strand to SEQ ID NO: 1707845
auuccugcagauuagaaac

SEQ ID NO: 1707847 - RNA, 19 nt, Artificial Sequence
  Description of Artificial Sequence: Synthetic oligonucleotide
  Sense strand starting at position 1648 of SEQ ID NO: 1561914
gugacagacgacgacuaau

SEQ ID NO: 1707848 - RNA, 19 nt, Artificial Sequence
  Description of Artificial Sequence: Synthetic oligonucleotide
  Antisense strand to SEQ ID NO: 1707847
auuagucgucgucugucac

SEQ ID NO: 1707849 - RNA, 19 nt, Artificial Sequence
  Description of Artificial Sequence: Synthetic oligonucleotide
  Sense strand starting at position 1692 of SEQ ID NO: 1561914
guauucuguguggauacuu

SEQ ID NO: 1707850 - RNA, 19 nt, Artificial Sequence
  Description of Artificial Sequence: Synthetic oligonucleotide
  Antisense strand to SEQ ID NO: 1707849
aaguauccacacagaauac

SEQ ID NO: 1707851 - RNA, 19 nt, Artificial Sequence
  Description of Artificial Sequence: Synthetic oligonucleotide
  Sense strand starting at position 2051 of SEQ ID NO: 1561914
ccgcgcuuugguuucgaau

SEQ ID NO: 1707852 - RNA, 19 nt, Artificial Sequence
  Description of Artificial Sequence: Synthetic oligonucleotide
  Antisense strand to SEQ ID NO: 1707851
auucgaaaccaaagcgcgg

SEQ ID NO: 1707853 - RNA, 19 nt, Artificial Sequence
  Description of Artificial Sequence: Synthetic oligonucleotide
  Sense strand starting at position 2052 of SEQ ID NO: 1561914
cgcgcuuugguuucgaauu

SEQ ID NO: 1707854 - RNA, 19 nt, Artificial Sequence
  Description of Artificial Sequence: Synthetic oligonucleotide
  Antisense strand to SEQ ID NO: 1707853
aauucgaaaccaaagcgcg

SEQ ID NO: 1707855 - RNA, 19 nt, Artificial Sequence
  Description of Artificial Sequence: Synthetic oligonucleotide
  Sense strand starting at position 2246 of SEQ ID NO: 1561914
acgagaucuggugacguca

SEQ ID NO: 1707856 - RNA, 19 nt, Artificial Sequence
  Description of Artificial Sequence: Synthetic oligonucleotide
  Antisense strand to SEQ ID NO: 1707855
ugacgucaccagaucucgu

SEQ ID NO: 1707857 - RNA, 19 nt, Artificial Sequence
  Description of Artificial Sequence: Synthetic oligonucleotide
  Sense strand starting at position 2281 of SEQ ID NO: 1561914
uggacucgggcugaguaau

SEQ ID NO: 1707858 - RNA, 19 nt, Artificial Sequence
  Description of Artificial Sequence: Synthetic oligonucleotide
  Antisense strand to SEQ ID NO: 1707857
auuacucagcccgagucca

SEQ ID NO: 1707859 - RNA, 19 nt, Artificial Sequence
  Description of Artificial Sequence: Synthetic oligonucleotide
  Sense strand starting at position 2931 of SEQ ID NO: 1561914
guggaugucccggauucua

SEQ ID NO: 1707860 - RNA, 19 nt, Artificial Sequence
  Description of Artificial Sequence: Synthetic oligonucleotide
  Antisense strand to SEQ ID NO: 1707859
uagaauccgggacauccac

SEQ ID NO: 1707861 - RNA, 19 nt, Artificial Sequence
  Description of Artificial Sequence: Synthetic oligonucleotide
  Sense strand starting at position 3076 of SEQ ID NO: 1561914
ccaguaggugaacgugaaa

SEQ ID NO: 1707862 - RNA, 19 nt, Artificial Sequence
  Description of Artificial Sequence: Synthetic oligonucleotide
  Antisense strand to SEQ ID NO: 1707861
uuucacguucaccuacugg

SEQ ID NO: 1707863 - RNA, 19 nt, Artificial Sequence
  Description of Artificial Sequence: Synthetic oligonucleotide
  Sense strand starting at position 3079 of SEQ ID NO: 1561914
guaggugaacgugaaauug

SEQ ID NO: 1707864 - RNA, 19 nt, Artificial Sequence
  Description of Artificial Sequence: Synthetic oligonucleotide
  Antisense strand to SEQ ID NO: 1707863
caauuucacguucaccuac

SEQ ID NO: 1707865 - RNA, 19 nt, Artificial Sequence
  Description of Artificial Sequence: Synthetic oligonucleotide
  Sense strand starting at position 3087 of SEQ ID NO: 1561914
acgugaaauugacuuaaca

SEQ ID NO: 1707866 - RNA, 19 nt, Artificial Sequence
  Description of Artificial Sequence: Synthetic oligonucleotide
  Antisense strand to SEQ ID NO: 1707865
uguuaagucaauuucacgu

SEQ ID NO: 1707867 - RNA, 19 nt, Artificial Sequence
  Description of Artificial Sequence: Synthetic oligonucleotide
  Sense strand starting at position 3096 of SEQ ID NO: 1561914
ugacuuaacaugcgacaga

SEQ ID NO: 1707868 - RNA, 19 nt, Artificial Sequence
  Description of Artificial Sequence: Synthetic oligonucleotide
  Antisense strand to SEQ ID NO: 1707867
ucugucgcauguuaaguca

SEQ ID NO: 1707869 - RNA, 19 nt, Artificial Sequence
  Description of Artificial Sequence: Synthetic oligonucleotide
  Sense strand starting at position 3202 of SEQ ID NO: 1561914
gggaaauugcaucaagcgu

SEQ ID NO: 1707870 - RNA, 19 nt, Artificial Sequence
  Description of Artificial Sequence: Synthetic oligonucleotide
  Antisense strand to SEQ ID NO: 1707869
acgcuugaugcaauuuccc

SEQ ID NO: 1707871 - RNA, 19 nt, Artificial Sequence
  Description of Artificial Sequence: Synthetic oligonucleotide
  Sense strand starting at position 3324 of SEQ ID NO: 1561914
uuaagucuugcccauugau

SEQ ID NO: 1707872 - RNA, 19 nt, Artificial Sequence
  Description of Artificial Sequence: Synthetic oligonucleotide
  Antisense strand to SEQ ID NO: 1707871
aucaaugggcaagacuuaa

SEQ ID NO: 1707873 - RNA, 19 nt, Artificial Sequence
  Description of Artificial Sequence: Synthetic oligonucleotide
  Sense strand starting at position 3343 of SEQ ID NO: 1561914
guaaacugucccuagguca

SEQ ID NO: 1707874 - RNA, 19 nt, Artificial Sequence
  Description of Artificial Sequence: Synthetic oligonucleotide
  Antisense strand to SEQ ID NO: 1707873
ugaccuagggacaguuuac

SEQ ID NO: 1707875 - RNA, 19 nt, Artificial Sequence
  Description of Artificial Sequence: Synthetic oligonucleotide
  Sense strand starting at position 3459 of SEQ ID NO: 1561914
cuuuaaauuugccucggua

SEQ ID NO: 1707876 - RNA, 19 nt, Artificial Sequence
  Description of Artificial Sequence: Synthetic oligonucleotide
  Antisense strand to SEQ ID NO: 1707875
uaccgaggcaaauuuaaag

SEQ ID NO: 1707877 - RNA, 19 nt, Artificial Sequence
  Description of Artificial Sequence: Synthetic oligonucleotide
  Sense strand starting at position 3463 of SEQ ID NO: 1561914
aaauuugccucgguagcuu

SEQ ID NO: 1707878 - RNA, 19 nt, Artificial Sequence
  Description of Artificial Sequence: Synthetic oligonucleotide
  Antisense strand to SEQ ID NO: 1707877
aagcuaccgaggcaaauuu

SEQ ID NO: 1707879 - RNA, 19 nt, Artificial Sequence
  Description of Artificial Sequence: Synthetic oligonucleotide
  Sense strand starting at position 3584 of SEQ ID NO: 1561914
guaauuuggagccgucuua

SEQ ID NO: 1707880 - RNA, 19 nt, Artificial Sequence
  Description of Artificial Sequence: Synthetic oligonucleotide
  Antisense strand to SEQ ID NO: 1707879
uaagacggcuccaaauuac

SEQ ID NO: 1707881 - RNA, 19 nt, Artificial Sequence
  Description of Artificial Sequence: Synthetic oligonucleotide
  Sense strand starting at position 3747 of SEQ ID NO: 1561914
gaggguguuguuuagagug

SEQ ID NO: 1707882 - RNA, 19 nt, Artificial Sequence
  Description of Artificial Sequence: Synthetic oligonucleotide
  Antisense strand to SEQ ID NO: 1707881
cacucuaaacaacacccuc

SEQ ID NO: 1707883 - RNA, 19 nt, Artificial Sequence
  Description of Artificial Sequence: Synthetic oligonucleotide
  Sense strand starting at position 3808 of SEQ ID NO: 1561914
acuugagaccacgauucuu

SEQ ID NO: 1707884 - RNA, 19 nt, Artificial Sequence
  Description of Artificial Sequence: Synthetic oligonucleotide
  Antisense strand to SEQ ID NO: 1707883
aagaaucguggucucaagu

SEQ ID NO: 1707885 - RNA, 19 nt, Artificial Sequence
  Description of Artificial Sequence: Synthetic oligonucleotide
  Sense strand starting at position 3813 of SEQ ID NO: 1561914
agaccacgauucuuuguaa

SEQ ID NO: 1707886 - RNA, 19 nt, Artificial Sequence
  Description of Artificial Sequence: Synthetic oligonucleotide
  Antisense strand to SEQ ID NO: 1707885
uuacaaagaaucguggucu

SEQ ID NO: 1707887 - RNA, 19 nt, Artificial Sequence
  Description of Artificial Sequence: Synthetic oligonucleotide
  Sense strand starting at position 3814 of SEQ ID NO: 1561914
gaccacgauucuuuguaaa

SEQ ID NO: 1707888 - RNA, 19 nt, Artificial Sequence
  Description of Artificial Sequence: Synthetic oligonucleotide
  Antisense strand to SEQ ID NO: 1707887
uuuacaaagaaucgugguc

SEQ ID NO: 1707889 - RNA, 19 nt, Artificial Sequence
  Description of Artificial Sequence: Synthetic oligonucleotide
  Sense strand starting at position 16 of SEQ ID NO: 1561915
agggcaaugucuccgcaga

SEQ ID NO: 1707890 - RNA, 19 nt, Artificial Sequence
  Description of Artificial Sequence: Synthetic oligonucleotide
  Antisense strand to SEQ ID NO: 1707889
ucugcggagacauugcccu

SEQ ID NO: 1707891 - RNA, 19 nt, Artificial Sequence
  Description of Artificial Sequence: Synthetic oligonucleotide
  Sense strand starting at position 231 of SEQ ID NO: 1561915
ccacguagcugcugugauu

SEQ ID NO: 1707892 - RNA, 19 nt, Artificial Sequence
  Description of Artificial Sequence: Synthetic oligonucleotide
  Antisense strand to SEQ ID NO: 1707891
aaucacagcagcuacgugg

SEQ ID NO: 1707893 - RNA, 19 nt, Artificial Sequence
  Description of Artificial Sequence: Synthetic oligonucleotide
  Sense strand starting at position 234 of SEQ ID NO: 1561915
cguagcugcugugauuuau

SEQ ID NO: 1707894 - RNA, 19 nt, Artificial Sequence
  Description of Artificial Sequence: Synthetic oligonucleotide
  Antisense strand to SEQ ID NO: 1707893
auaaaucacagcagcuacg

SEQ ID NO: 1707895 - RNA, 19 nt, Artificial Sequence
  Description of Artificial Sequence: Synthetic oligonucleotide
  Sense strand starting at position 349 of SEQ ID NO: 1561915
ucccaagaccuccgcaaua

SEQ ID NO: 1707896 - RNA, 19 nt, Artificial Sequence
  Description of Artificial Sequence: Synthetic oligonucleotide
  Antisense strand to SEQ ID NO: 1707895
uauugcggaggucuuggga

SEQ ID NO: 1707897 - RNA, 19 nt, Artificial Sequence
  Description of Artificial Sequence: Synthetic oligonucleotide
  Sense strand starting at position 712 of SEQ ID NO: 1561915
gcucuucagcggugaauac

SEQ ID NO: 1707898 - RNA, 19 nt, Artificial Sequence
  Description of Artificial Sequence: Synthetic oligonucleotide
  Antisense strand to SEQ ID NO: 1707897
guauucaccgcugaagagc

SEQ ID NO: 1707899 - RNA, 19 nt, Artificial Sequence
  Description of Artificial Sequence: Synthetic oligonucleotide
  Sense strand starting at position 1243 of SEQ ID NO: 1561915
ggaugaugccgcgagccaa

SEQ ID NO: 1707900 - RNA, 19 nt, Artificial Sequence
  Description of Artificial Sequence: Synthetic oligonucleotide
  Antisense strand to SEQ ID NO: 1707899
uuggcucgcggcaucaucc

SEQ ID NO: 1707901 - RNA, 19 nt, Artificial Sequence
  Description of Artificial Sequence: Synthetic oligonucleotide
  Sense strand starting at position 2752 of SEQ ID NO: 1561915
gcccgaauuauguaacaga

SEQ ID NO: 1707902 - RNA, 19 nt, Artificial Sequence
  Description of Artificial Sequence: Synthetic oligonucleotide
  Antisense strand to SEQ ID NO: 1707901
ucuguuacauaauucgggc

SEQ ID NO: 1707903 - RNA, 19 nt, Artificial Sequence
  Description of Artificial Sequence: Synthetic oligonucleotide
  Sense strand starting at position 2755 of SEQ ID NO: 1561915
cgaauuauguaacagacga

SEQ ID NO: 1707904 - RNA, 19 nt, Artificial Sequence
  Description of Artificial Sequence: Synthetic oligonucleotide
  Antisense strand to SEQ ID NO: 1707903
ucgucuguuacauaauucg

SEQ ID NO: 1707905 - RNA, 19 nt, Artificial Sequence
  Description of Artificial Sequence: Synthetic oligonucleotide
  Sense strand starting at position 2996 of SEQ ID NO: 1561915
gacaaugagcuuugguauu

SEQ ID NO: 1707906 - RNA, 19 nt, Artificial Sequence
  Description of Artificial Sequence: Synthetic oligonucleotide
  Antisense strand to SEQ ID NO: 1707905
aauaccaaagcucauuguc

SEQ ID NO: 1707907 - RNA, 19 nt, Artificial Sequence
  Description of Artificial Sequence: Synthetic oligonucleotide
  Sense strand starting at position 3003 of SEQ ID NO: 1561915
agcuuugguauuugugagu

SEQ ID NO: 1707908 - RNA, 19 nt, Artificial Sequence
  Description of Artificial Sequence: Synthetic oligonucleotide
  Antisense strand to SEQ ID NO: 1707907
acucacaaauaccaaagcu

SEQ ID NO: 1707909 - RNA, 19 nt, Artificial Sequence
  Description of Artificial Sequence: Synthetic oligonucleotide
  Sense strand starting at position 3008 of SEQ ID NO: 1561915
ugguauuugugaguccugu

SEQ ID NO: 1707910 - RNA, 19 nt, Artificial Sequence
  Description of Artificial Sequence: Synthetic oligonucleotide
  Antisense strand to SEQ ID NO: 1707909
acaggacucacaaauacca

SEQ ID NO: 1707911 - RNA, 19 nt, Artificial Sequence
  Description of Artificial Sequence: Synthetic oligonucleotide
  Sense strand starting at position 3018 of SEQ ID NO: 1561915
gaguccuguccagagcaua

SEQ ID NO: 1707912 - RNA, 19 nt, Artificial Sequence
  Description of Artificial Sequence: Synthetic oligonucleotide
  Antisense strand to SEQ ID NO: 1707911
uaugcucuggacaggacuc

SEQ ID NO: 1707913 - RNA, 19 nt, Artificial Sequence
  Description of Artificial Sequence: Synthetic oligonucleotide
  Sense strand starting at position 3030 of SEQ ID NO: 1561915
gagcauagguccuccuguu

SEQ ID NO: 1707914 - RNA, 19 nt, Artificial Sequence
  Description of Artificial Sequence: Synthetic oligonucleotide
  Antisense strand to SEQ ID NO: 1707913
aacaggaggaccuaugcuc

SEQ ID NO: 1707915 - RNA, 19 nt, Artificial Sequence
  Description of Artificial Sequence: Synthetic oligonucleotide
  Sense strand starting at position 3141 of SEQ ID NO: 1561915
gucuaugccgcucagaaca

SEQ ID NO: 1707916 - RNA, 19 nt, Artificial Sequence
  Description of Artificial Sequence: Synthetic oligonucleotide
  Antisense strand to SEQ ID NO: 1707915
uguucugagcggcauagac

SEQ ID NO: 1707917 - RNA, 19 nt, Artificial Sequence
  Description of Artificial Sequence: Synthetic oligonucleotide
  Sense strand starting at position 3428 of SEQ ID NO: 1561915
ggcuucuugagugaugcca

SEQ ID NO: 1707918 - RNA, 19 nt, Artificial Sequence
  Description of Artificial Sequence: Synthetic oligonucleotide
  Antisense strand to SEQ ID NO: 1707917
uggcaucacucaagaagcc

SEQ ID NO: 1707919 - RNA, 19 nt, Artificial Sequence
  Description of Artificial Sequence: Synthetic oligonucleotide
  Sense strand starting at position 3595 of SEQ ID NO: 1561915
ugugaggugugguguccaa

SEQ ID NO: 1707920 - RNA, 19 nt, Artificial Sequence
  Description of Artificial Sequence: Synthetic oligonucleotide
  Antisense strand to SEQ ID NO: 1707919
uuggacaccacaccucaca

SEQ ID NO: 1707921 - RNA, 19 nt, Artificial Sequence
  Description of Artificial Sequence: Synthetic oligonucleotide
  Sense strand starting at position 3788 of SEQ ID NO: 1561915
gugcuuugugguggugaga

SEQ ID NO: 1707922 - RNA, 19 nt, Artificial Sequence
  Description of Artificial Sequence: Synthetic oligonucleotide
  Antisense strand to SEQ ID NO: 1707921
ucucaccaccacaaagcac

SEQ ID NO: 1707923 - RNA, 19 nt, Artificial Sequence
  Description of Artificial Sequence: Synthetic oligonucleotide
  Sense strand starting at position 3790 of SEQ ID NO: 1561915
gcuuugugguggugagaga

SEQ ID NO: 1707924 - RNA, 19 nt, Artificial Sequence
  Description of Artificial Sequence: Synthetic oligonucleotide
  Antisense strand to SEQ ID NO: 1707923
ucucucaccaccacaaagc

SEQ ID NO: 1707925 - RNA, 19 nt, Artificial Sequence
  Description of Artificial Sequence: Synthetic oligonucleotide
  Sense strand starting at position 3819 of SEQ ID NO: 1561915
agcagacguggccauaaau

SEQ ID NO: 1707926 - RNA, 19 nt, Artificial Sequence
  Description of Artificial Sequence: Synthetic oligonucleotide
  Antisense strand to SEQ ID NO: 1707925
auuuauggccacgucugcu

SEQ ID NO: 1707927 - RNA, 19 nt, Artificial Sequence
  Description of Artificial Sequence: Synthetic oligonucleotide
  Sense strand starting at position 3888 of SEQ ID NO: 1561915
gccaucuccuuccaggaga

SEQ ID NO: 1707928 - RNA, 19 nt, Artificial Sequence
  Description of Artificial Sequence: Synthetic oligonucleotide
  Antisense strand to SEQ ID NO: 1707927
ucuccuggaaggagauggc

SEQ ID NO: 1707929 - RNA, 19 nt, Artificial Sequence
  Description of Artificial Sequence: Synthetic oligonucleotide
  Sense strand starting at position 8 of SEQ ID NO: 1561916
uucuuuagguaauucugaa

SEQ ID NO: 1707930 - RNA, 19 nt, Artificial Sequence
  Description of Artificial Sequence: Synthetic oligonucleotide
  Antisense strand to SEQ ID NO: 1707929
uucagaauuaccuaaagaa

SEQ ID NO: 1707931 - RNA, 19 nt, Artificial Sequence
  Description of Artificial Sequence: Synthetic oligonucleotide
  Sense strand starting at position 141 of SEQ ID NO: 1561916
guuguauuccugcuuugcu

SEQ ID NO: 1707932 - RNA, 19 nt, Artificial Sequence
  Description of Artificial Sequence: Synthetic oligonucleotide
  Antisense strand to SEQ ID NO: 1707931
agcaaagcaggaauacaac

SEQ ID NO: 1707933 - RNA, 19 nt, Artificial Sequence
  Description of Artificial Sequence: Synthetic oligonucleotide
  Sense strand starting at position 300 of SEQ ID NO: 1561916
uugucauguagugauuaag

SEQ ID NO: 1707934 - RNA, 19 nt, Artificial Sequence
  Description of Artificial Sequence: Synthetic oligonucleotide
  Antisense strand to SEQ ID NO: 1707933
cuuaaucacuacaugacaa

SEQ ID NO: 1707935 - RNA, 19 nt, Artificial Sequence
  Description of Artificial Sequence: Synthetic oligonucleotide
  Sense strand starting at position 319 of SEQ ID NO: 1561916
ggaugagcuguggacucau

SEQ ID NO: 1707936 - RNA, 19 nt, Artificial Sequence
  Description of Artificial Sequence: Synthetic oligonucleotide
  Antisense strand to SEQ ID NO: 1707935
augaguccacagcucaucc

SEQ ID NO: 1707937 - RNA, 19 nt, Artificial Sequence
  Description of Artificial Sequence: Synthetic oligonucleotide
  Sense strand starting at position 389 of SEQ ID NO: 1561916
uuggauuagucacuuaauc

SEQ ID NO: 1707938 - RNA, 19 nt, Artificial Sequence
  Description of Artificial Sequence: Synthetic oligonucleotide
  Antisense strand to SEQ ID NO: 1707937
gauuaagugacuaauccaa

SEQ ID NO: 1707939 - RNA, 19 nt, Artificial Sequence
  Description of Artificial Sequence: Synthetic oligonucleotide
  Sense strand starting at position 465 of SEQ ID NO: 1561916
gcuugcugugcaguuauca

SEQ ID NO: 1707940 - RNA, 19 nt, Artificial Sequence
  Description of Artificial Sequence: Synthetic oligonucleotide
  Antisense strand to SEQ ID NO: 1707939
ugauaacugcacagcaagc

SEQ ID NO: 1707941 - RNA, 19 nt, Artificial Sequence
  Description of Artificial Sequence: Synthetic oligonucleotide
  Sense strand starting at position 729 of SEQ ID NO: 1561916
guuugacuaggguagugaa

SEQ ID NO: 1707942 - RNA, 19 nt, Artificial Sequence
  Description of Artificial Sequence: Synthetic oligonucleotide
  Antisense strand to SEQ ID NO: 1707941
uucacuacccuagucaaac

SEQ ID NO: 1707943 - RNA, 19 nt, Artificial Sequence
  Description of Artificial Sequence: Synthetic oligonucleotide
  Sense strand starting at position 744 of SEQ ID NO: 1561916
ugaaucugguaauuagauu

SEQ ID NO: 1707944 - RNA, 19 nt, Artificial Sequence
  Description of Artificial Sequence: Synthetic oligonucleotide
  Antisense strand to SEQ ID NO: 1707943
aaucuaauuaccagauuca

SEQ ID NO: 1707945 - RNA, 19 nt, Artificial Sequence
  Description of Artificial Sequence: Synthetic oligonucleotide
  Sense strand starting at position 809 of SEQ ID NO: 1561916
ccaggaaagcugugaagga

SEQ ID NO: 1707946 - RNA, 19 nt, Artificial Sequence
  Description of Artificial Sequence: Synthetic oligonucleotide
  Antisense strand to SEQ ID NO: 1707945
uccuucacagcuuuccugg

SEQ ID NO: 1707947 - RNA, 19 nt, Artificial Sequence
  Description of Artificial Sequence: Synthetic oligonucleotide
  Sense strand starting at position 904 of SEQ ID NO: 1561916
agagcagccaagugaucaa

SEQ ID NO: 1707948 - RNA, 19 nt, Artificial Sequence
  Description of Artificial Sequence: Synthetic oligonucleotide
  Antisense strand to SEQ ID NO: 1707947
uugaucacuuggcugcucu

SEQ ID NO: 1707949 - RNA, 19 nt, Artificial Sequence
  Description of Artificial Sequence: Synthetic oligonucleotide
  Sense strand starting at position 908 of SEQ ID NO: 1561916
cagccaagugaucaaaugu

SEQ ID NO: 1707950 - RNA, 19 nt, Artificial Sequence
  Description of Artificial Sequence: Synthetic oligonucleotide
  Antisense strand to SEQ ID NO: 1707949
acauuugaucacuuggcug

SEQ ID NO: 1707951 - RNA, 19 nt, Artificial Sequence
  Description of Artificial Sequence: Synthetic oligonucleotide
  Sense strand starting at position 914 of SEQ ID NO: 1561916
agugaucaaaugugagaau

SEQ ID NO: 1707952 - RNA, 19 nt, Artificial Sequence
  Description of Artificial Sequence: Synthetic oligonucleotide
  Antisense strand to SEQ ID NO: 1707951
auucucacauuugaucacu

SEQ ID NO: 1707953 - RNA, 19 nt, Artificial Sequence
  Description of Artificial Sequence: Synthetic oligonucleotide
  Sense strand starting at position 941 of SEQ ID NO: 1561916
gacugaaacuuggucgaca

SEQ ID NO: 1707954 - RNA, 19 nt, Artificial Sequence
  Description of Artificial Sequence: Synthetic oligonucleotide
  Antisense strand to SEQ ID NO: 1707953
ugucgaccaaguuucaguc

SEQ ID NO: 1707955 - RNA, 19 nt, Artificial Sequence
  Description of Artificial Sequence: Synthetic oligonucleotide
  Sense strand starting at position 942 of SEQ ID NO: 1561916
acugaaacuuggucgacau

SEQ ID NO: 1707956 - RNA, 19 nt, Artificial Sequence
  Description of Artificial Sequence: Synthetic oligonucleotide
  Antisense strand to SEQ ID NO: 1707955
augucgaccaaguuucagu

SEQ ID NO: 1707957 - RNA, 19 nt, Artificial Sequence
  Description of Artificial Sequence: Synthetic oligonucleotide
  Sense strand starting at position 943 of SEQ ID NO: 1561916
cugaaacuuggucgacauu

SEQ ID NO: 1707958 - RNA, 19 nt, Artificial Sequence
  Description of Artificial Sequence: Synthetic oligonucleotide
  Antisense strand to SEQ ID NO: 1707957
aaugucgaccaaguuucag

SEQ ID NO: 1707959 - RNA, 19 nt, Artificial Sequence
  Description of Artificial Sequence: Synthetic oligonucleotide
  Sense strand starting at position 1012 of SEQ ID NO: 1561916
uugaguaauggcgagaauc

SEQ ID NO: 1707960 - RNA, 19 nt, Artificial Sequence
  Description of Artificial Sequence: Synthetic oligonucleotide
  Antisense strand to SEQ ID NO: 1707959
gauucucgccauuacucaa

SEQ ID NO: 1707961 - RNA, 19 nt, Artificial Sequence
  Description of Artificial Sequence: Synthetic oligonucleotide
  Sense strand starting at position 1055 of SEQ ID NO: 1561916
aguuauggucuuggacaaa

SEQ ID NO: 1707962 - RNA, 19 nt, Artificial Sequence
  Description of Artificial Sequence: Synthetic oligonucleotide
  Antisense strand to SEQ ID NO: 1707961
uuuguccaagaccauaacu

SEQ ID NO: 1707963 - RNA, 19 nt, Artificial Sequence
  Description of Artificial Sequence: Synthetic oligonucleotide
  Sense strand starting at position 1088 of SEQ ID NO: 1561916
ccucaaugucaugaucuga

SEQ ID NO: 1707964 - RNA, 19 nt, Artificial Sequence
  Description of Artificial Sequence: Synthetic oligonucleotide
  Antisense strand to SEQ ID NO: 1707963
ucagaucaugacauugagg

SEQ ID NO: 1707965 - RNA, 19 nt, Artificial Sequence
  Description of Artificial Sequence: Synthetic oligonucleotide
  Sense strand starting at position 1169 of SEQ ID NO: 1561916
gugggaagugcucaauaca

SEQ ID NO: 1707966 - RNA, 19 nt, Artificial Sequence
  Description of Artificial Sequence: Synthetic oligonucleotide
  Antisense strand to SEQ ID NO: 1707965
uguauugagcacuucccac

SEQ ID NO: 1707967 - RNA, 19 nt, Artificial Sequence
  Description of Artificial Sequence: Synthetic oligonucleotide
  Sense strand starting at position 1208 of SEQ ID NO: 1561916
gggaguauauuaucuuaua

SEQ ID NO: 1707968 - RNA, 19 nt, Artificial Sequence
  Description of Artificial Sequence: Synthetic oligonucleotide
  Antisense strand to SEQ ID NO: 1707967
uauaagauaauauacuccc

SEQ ID NO: 1707969 - RNA, 19 nt, Artificial Sequence
  Description of Artificial Sequence: Synthetic oligonucleotide
  Sense strand starting at position 1209 of SEQ ID NO: 1561916
ggaguauauuaucuuauac

SEQ ID NO: 1707970 - RNA, 19 nt, Artificial Sequence
  Description of Artificial Sequence: Synthetic oligonucleotide
  Antisense strand to SEQ ID NO: 1707969
guauaagauaauauacucc

SEQ ID NO: 1707971 - RNA, 19 nt, Artificial Sequence
  Description of Artificial Sequence: Synthetic oligonucleotide
  Sense strand starting at position 1257 of SEQ ID NO: 1561916
agguuccugcuugaucaaa

SEQ ID NO: 1707972 - RNA, 19 nt, Artificial Sequence
  Description of Artificial Sequence: Synthetic oligonucleotide
  Antisense strand to SEQ ID NO: 1707971
uuugaucaagcaggaaccu

SEQ ID NO: 1707973 - RNA, 19 nt, Artificial Sequence
  Description of Artificial Sequence: Synthetic oligonucleotide
  Sense strand starting at position 1362 of SEQ ID NO: 1561916
acagucauguaucccacau

SEQ ID NO: 1707974 - RNA, 19 nt, Artificial Sequence
  Description of Artificial Sequence: Synthetic oligonucleotide
  Antisense strand to SEQ ID NO: 1707973
augugggauacaugacugu

SEQ ID NO: 1707975 - RNA, 19 nt, Artificial Sequence
  Description of Artificial Sequence: Synthetic oligonucleotide
  Sense strand starting at position 1381 of SEQ ID NO: 1561916
ucacaauauuuagggauua

SEQ ID NO: 1707976 - RNA, 19 nt, Artificial Sequence
  Description of Artificial Sequence: Synthetic oligonucleotide
  Antisense strand to SEQ ID NO: 1707975
uaaucccuaaauauuguga

SEQ ID NO: 1707977 - RNA, 19 nt, Artificial Sequence
  Description of Artificial Sequence: Synthetic oligonucleotide
  Sense strand starting at position 1504 of SEQ ID NO: 1561916
aagaguaaggcaugauucu

SEQ ID NO: 1707978 - RNA, 19 nt, Artificial Sequence
  Description of Artificial Sequence: Synthetic oligonucleotide
  Antisense strand to SEQ ID NO: 1707977
agaaucaugccuuacucuu

SEQ ID NO: 1707979 - RNA, 19 nt, Artificial Sequence
  Description of Artificial Sequence: Synthetic oligonucleotide
  Sense strand starting at position 1505 of SEQ ID NO: 1561916
agaguaaggcaugauucuu

SEQ ID NO: 1707980 - RNA, 19 nt, Artificial Sequence
  Description of Artificial Sequence: Synthetic oligonucleotide
  Antisense strand to SEQ ID NO: 1707979
aagaaucaugccuuacucu

SEQ ID NO: 1707981 - RNA, 19 nt, Artificial Sequence
  Description of Artificial Sequence: Synthetic oligonucleotide
  Sense strand starting at position 1516 of SEQ ID NO: 1561916
ugauucuuguccucaagga

SEQ ID NO: 1707982 - RNA, 19 nt, Artificial Sequence
  Description of Artificial Sequence: Synthetic oligonucleotide
  Antisense strand to SEQ ID NO: 1707981
uccuugaggacaagaauca

SEQ ID NO: 1707983 - RNA, 19 nt, Artificial Sequence
  Description of Artificial Sequence: Synthetic oligonucleotide
  Sense strand starting at position 1520 of SEQ ID NO: 1561916
ucuuguccucaaggagaau

SEQ ID NO: 1707984 - RNA, 19 nt, Artificial Sequence
  Description of Artificial Sequence: Synthetic oligonucleotide
  Antisense strand to SEQ ID NO: 1707983
auucuccuugaggacaaga

SEQ ID NO: 1707985 - RNA, 19 nt, Artificial Sequence
  Description of Artificial Sequence: Synthetic oligonucleotide
  Sense strand starting at position 1661 of SEQ ID NO: 1561916
gcauaaagucuuuaccaag

SEQ ID NO: 1707986 - RNA, 19 nt, Artificial Sequence
  Description of Artificial Sequence: Synthetic oligonucleotide
  Antisense strand to SEQ ID NO: 1707985
cuugguaaagacuuuaugc

SEQ ID NO: 1707987 - RNA, 19 nt, Artificial Sequence
  Description of Artificial Sequence: Synthetic oligonucleotide
  Sense strand starting at position 1850 of SEQ ID NO: 1561916
gcuauauuccuagugcgua

SEQ ID NO: 1707988 - RNA, 19 nt, Artificial Sequence
  Description of Artificial Sequence: Synthetic oligonucleotide
  Antisense strand to SEQ ID NO: 1707987
uacgcacuaggaauauagc

SEQ ID NO: 1707989 - RNA, 19 nt, Artificial Sequence
  Description of Artificial Sequence: Synthetic oligonucleotide
  Sense strand starting at position 2153 of SEQ ID NO: 1561916
ccaugauugacuuggcuga

SEQ ID NO: 1707990 - RNA, 19 nt, Artificial Sequence
  Description of Artificial Sequence: Synthetic oligonucleotide
  Antisense strand to SEQ ID NO: 1707989
ucagccaagucaaucaugg

SEQ ID NO: 1707991 - RNA, 19 nt, Artificial Sequence
  Description of Artificial Sequence: Synthetic oligonucleotide
  Sense strand starting at position 2154 of SEQ ID NO: 1561916
caugauugacuuggcugaa

SEQ ID NO: 1707992 - RNA, 19 nt, Artificial Sequence
  Description of Artificial Sequence: Synthetic oligonucleotide
  Antisense strand to SEQ ID NO: 1707991
uucagccaagucaaucaug

SEQ ID NO: 1707993 - RNA, 19 nt, Artificial Sequence
  Description of Artificial Sequence: Synthetic oligonucleotide
  Sense strand starting at position 2157 of SEQ ID NO: 1561916
gauugacuuggcugaagag

SEQ ID NO: 1707994 - RNA, 19 nt, Artificial Sequence
  Description of Artificial Sequence: Synthetic oligonucleotide
  Antisense strand to SEQ ID NO: 1707993
cucuucagccaagucaauc

SEQ ID NO: 1707995 - RNA, 19 nt, Artificial Sequence
  Description of Artificial Sequence: Synthetic oligonucleotide
  Sense strand starting at position 2167 of SEQ ID NO: 1561916
gcugaagagaguugaaguu

SEQ ID NO: 1707996 - RNA, 19 nt, Artificial Sequence
  Description of Artificial Sequence: Synthetic oligonucleotide
  Antisense strand to SEQ ID NO: 1707995
aacuucaacucucuucagc

SEQ ID NO: 1707997 - RNA, 19 nt, Artificial Sequence
  Description of Artificial Sequence: Synthetic oligonucleotide
  Sense strand starting at position 2187 of SEQ ID NO: 1561916
ggcccuuuccagggaaaca

SEQ ID NO: 1707998 - RNA, 19 nt, Artificial Sequence
  Description of Artificial Sequence: Synthetic oligonucleotide
  Antisense strand to SEQ ID NO: 1707997
uguuucccuggaaagggcc

SEQ ID NO: 1707999 - RNA, 19 nt, Artificial Sequence
  Description of Artificial Sequence: Synthetic oligonucleotide
  Sense strand starting at position 2426 of SEQ ID NO: 1561916
agagucugauucucaggaa

SEQ ID NO: 1708000 - RNA, 19 nt, Artificial Sequence
  Description of Artificial Sequence: Synthetic oligonucleotide
  Antisense strand to SEQ ID NO: 1707999
uuccugagaaucagacucu

SEQ ID NO: 1708001 - RNA, 19 nt, Artificial Sequence
  Description of Artificial Sequence: Synthetic oligonucleotide
  Sense strand starting at position 2553 of SEQ ID NO: 1561916
ugcucaggucccugauuua

SEQ ID NO: 1708002 - RNA, 19 nt, Artificial Sequence
  Description of Artificial Sequence: Synthetic oligonucleotide
  Antisense strand to SEQ ID NO: 1708001
uaaaucagggaccugagca

SEQ ID NO: 1708003 - RNA, 19 nt, Artificial Sequence
  Description of Artificial Sequence: Synthetic oligonucleotide
  Sense strand starting at position 2753 of SEQ ID NO: 1561916
caaacuucuccggaggcua

SEQ ID NO: 1708004 - RNA, 19 nt, Artificial Sequence
  Description of Artificial Sequence: Synthetic oligonucleotide
  Antisense strand to SEQ ID NO: 1708003
uagccuccggagaaguuug

SEQ ID NO: 1708005 - RNA, 19 nt, Artificial Sequence
  Description of Artificial Sequence: Synthetic oligonucleotide
  Sense strand starting at position 2999 of SEQ ID NO: 1561916
cacugcaguguuuagggaa

SEQ ID NO: 1708006 - RNA, 19 nt, Artificial Sequence
  Description of Artificial Sequence: Synthetic oligonucleotide
  Antisense strand to SEQ ID NO: 1708005
uucccuaaacacugcagug

SEQ ID NO: 1708007 - RNA, 19 nt, Artificial Sequence
  Description of Artificial Sequence: Synthetic oligonucleotide
  Sense strand starting at position 3006 of SEQ ID NO: 1561916
guguuuagggaaugacaag

SEQ ID NO: 1708008 - RNA, 19 nt, Artificial Sequence
  Description of Artificial Sequence: Synthetic oligonucleotide
  Antisense strand to SEQ ID NO: 1708007
cuugucauucccuaaacac

SEQ ID NO: 1708009 - RNA, 19 nt, Artificial Sequence
  Description of Artificial Sequence: Synthetic oligonucleotide
  Sense strand starting at position 112 of SEQ ID NO: 1561917
agagucugauucucaggaa

SEQ ID NO: 1708010 - RNA, 19 nt, Artificial Sequence
  Description of Artificial Sequence: Synthetic oligonucleotide
  Antisense strand to SEQ ID NO: 1708009
uuccugagaaucagacucu

SEQ ID NO: 1708011 - RNA, 19 nt, Artificial Sequence
  Description of Artificial Sequence: Synthetic oligonucleotide
  Sense strand starting at position 161 of SEQ ID NO: 1561917
gcucaauaucaaugugcaa

SEQ ID NO: 1708012 - RNA, 19 nt, Artificial Sequence
  Description of Artificial Sequence: Synthetic oligonucleotide
  Antisense strand to SEQ ID NO: 1708011
uugcacauugauauugagc

SEQ ID NO: 1708013 - RNA, 19 nt, Artificial Sequence
  Description of Artificial Sequence: Synthetic oligonucleotide
  Sense strand starting at position 239 of SEQ ID NO: 1561917
ugcucaggucccugauuua

SEQ ID NO: 1708014 - RNA, 19 nt, Artificial Sequence
  Description of Artificial Sequence: Synthetic oligonucleotide
  Antisense strand to SEQ ID NO: 1708013
uaaaucagggaccugagca

SEQ ID NO: 1708015 - RNA, 19 nt, Artificial Sequence
  Description of Artificial Sequence: Synthetic oligonucleotide
  Sense strand starting at position 439 of SEQ ID NO: 1561917
caaacuucuccggaggcua

SEQ ID NO: 1708016 - RNA, 19 nt, Artificial Sequence
  Description of Artificial Sequence: Synthetic oligonucleotide
  Antisense strand to SEQ ID NO: 1708015
uagccuccggagaaguuug

SEQ ID NO: 1708017 - RNA, 19 nt, Artificial Sequence
  Description of Artificial Sequence: Synthetic oligonucleotide
  Sense strand starting at position 659 of SEQ ID NO: 1561917
guuaaaugcuauguaagua

SEQ ID NO: 1708018 - RNA, 19 nt, Artificial Sequence
  Description of Artificial Sequence: Synthetic oligonucleotide
  Antisense strand to SEQ ID NO: 1708017
uacuuacauagcauuuaac

SEQ ID NO: 1708019 - RNA, 19 nt, Artificial Sequence
  Description of Artificial Sequence: Synthetic oligonucleotide
  Sense strand starting at position 685 of SEQ ID NO: 1561917
cacugcaguguuuagggaa

SEQ ID NO: 1708020 - RNA, 19 nt, Artificial Sequence
  Description of Artificial Sequence: Synthetic oligonucleotide
  Antisense strand to SEQ ID NO: 1708019
uucccuaaacacugcagug

SEQ ID NO: 1708021 - RNA, 19 nt, Artificial Sequence
  Description of Artificial Sequence: Synthetic oligonucleotide
  Sense strand starting at position 692 of SEQ ID NO: 1561917
guguuuagggaaugacaag

SEQ ID NO: 1708022 - RNA, 19 nt, Artificial Sequence
  Description of Artificial Sequence: Synthetic oligonucleotide
  Antisense strand to SEQ ID NO: 1708021
cuugucauucccuaaacac

SEQ ID NO: 1708023 - RNA, 19 nt, Artificial Sequence
  Description of Artificial Sequence: Synthetic oligonucleotide
  Sense strand starting at position 724 of SEQ ID NO: 1561917
acguguucaguacagaugu

SEQ ID NO: 1708024 - RNA, 19 nt, Artificial Sequence
  Description of Artificial Sequence: Synthetic oligonucleotide
  Antisense strand to SEQ ID NO: 1708023
acaucuguacugaacacgu

SEQ ID NO: 1708025 - RNA, 19 nt, Artificial Sequence
  Description of Artificial Sequence: Synthetic oligonucleotide
  Sense strand starting at position 1119 of SEQ ID NO: 1561917
ggauagggagcguauuguu

SEQ ID NO: 1708026 - RNA, 19 nt, Artificial Sequence
  Description of Artificial Sequence: Synthetic oligonucleotide
  Antisense strand to SEQ ID NO: 1708025
aacaauacgcucccuaucc

SEQ ID NO: 1708027 - RNA, 19 nt, Artificial Sequence
  Description of Artificial Sequence: Synthetic oligonucleotide
  Sense strand starting at position 1218 of SEQ ID NO: 1561917
uguagacacguguauaucu

SEQ ID NO: 1708028 - RNA, 19 nt, Artificial Sequence
  Description of Artificial Sequence: Synthetic oligonucleotide
  Antisense strand to SEQ ID NO: 1708027
agauauacacgugucuaca

SEQ ID NO: 1708029 - RNA, 19 nt, Artificial Sequence
  Description of Artificial Sequence: Synthetic oligonucleotide
  Sense strand starting at position 1694 of SEQ ID NO: 1561917
cggucuuucgccuccuaca

SEQ ID NO: 1708030 - RNA, 19 nt, Artificial Sequence
  Description of Artificial Sequence: Synthetic oligonucleotide
  Antisense strand to SEQ ID NO: 1708029
uguaggaggcgaaagaccg

SEQ ID NO: 1708031 - RNA, 19 nt, Artificial Sequence
  Description of Artificial Sequence: Synthetic oligonucleotide
  Sense strand starting at position 2105 of SEQ ID NO: 1561917
cguauauuccagcaaauug

SEQ ID NO: 1708032 - RNA, 19 nt, Artificial Sequence
  Description of Artificial Sequence: Synthetic oligonucleotide
  Antisense strand to SEQ ID NO: 1708031
caauuugcuggaauauacg

SEQ ID NO: 1708033 - RNA, 19 nt, Artificial Sequence
  Description of Artificial Sequence: Synthetic oligonucleotide
  Sense strand starting at position 2194 of SEQ ID NO: 1561917
uggugagcgcuugacaaug

SEQ ID NO: 1708034 - RNA, 19 nt, Artificial Sequence
  Description of Artificial Sequence: Synthetic oligonucleotide
  Antisense strand to SEQ ID NO: 1708033
cauugucaagcgcucacca

SEQ ID NO: 1708035 - RNA, 19 nt, Artificial Sequence
  Description of Artificial Sequence: Synthetic oligonucleotide
  Sense strand starting at position 2199 of SEQ ID NO: 1561917
agcgcuugacaaugauuua

SEQ ID NO: 1708036 - RNA, 19 nt, Artificial Sequence
  Description of Artificial Sequence: Synthetic oligonucleotide
  Antisense strand to SEQ ID NO: 1708035
uaaaucauugucaagcgcu

SEQ ID NO: 1708037 - RNA, 19 nt, Artificial Sequence
  Description of Artificial Sequence: Synthetic oligonucleotide
  Sense strand starting at position 2252 of SEQ ID NO: 1561917
gcucucuguccugacauga

SEQ ID NO: 1708038 - RNA, 19 nt, Artificial Sequence
  Description of Artificial Sequence: Synthetic oligonucleotide
  Antisense strand to SEQ ID NO: 1708037
ucaugucaggacagagagc

SEQ ID NO: 1708039 - RNA, 19 nt, Artificial Sequence
  Description of Artificial Sequence: Synthetic oligonucleotide
  Sense strand starting at position 2275 of SEQ ID NO: 1561917
uuacaaagcgcuuggauuu

SEQ ID NO: 1708040 - RNA, 19 nt, Artificial Sequence
  Description of Artificial Sequence: Synthetic oligonucleotide
  Antisense strand to SEQ ID NO: 1708039
aaauccaagcgcuuuguaa

SEQ ID NO: 1708041 - RNA, 19 nt, Artificial Sequence
  Description of Artificial Sequence: Synthetic oligonucleotide
  Sense strand starting at position 2466 of SEQ ID NO: 1561917
cggaguuucgcagcucgua

SEQ ID NO: 1708042 - RNA, 19 nt, Artificial Sequence
  Description of Artificial Sequence: Synthetic oligonucleotide
  Antisense strand to SEQ ID NO: 1708041
uacgagcugcgaaacuccg

SEQ ID NO: 1708043 - RNA, 19 nt, Artificial Sequence
  Description of Artificial Sequence: Synthetic oligonucleotide
  Sense strand starting at position 2767 of SEQ ID NO: 1561917
caccgugaguuaccaugau

SEQ ID NO: 1708044 - RNA, 19 nt, Artificial Sequence
  Description of Artificial Sequence: Synthetic oligonucleotide
  Antisense strand to SEQ ID NO: 1708043
aucaugguaacucacggug

SEQ ID NO: 1708045 - RNA, 19 nt, Artificial Sequence
  Description of Artificial Sequence: Synthetic oligonucleotide
  Sense strand starting at position 2771 of SEQ ID NO: 1561917
gugaguuaccaugauacgu

SEQ ID NO: 1708046 - RNA, 19 nt, Artificial Sequence
  Description of Artificial Sequence: Synthetic oligonucleotide
  Antisense strand to SEQ ID NO: 1708045
acguaucaugguaacucac

SEQ ID NO: 1708047 - RNA, 19 nt, Artificial Sequence
  Description of Artificial Sequence: Synthetic oligonucleotide
  Sense strand starting at position 2780 of SEQ ID NO: 1561917
caugauacguuauuugcua

SEQ ID NO: 1708048 - RNA, 19 nt, Artificial Sequence
  Description of Artificial Sequence: Synthetic oligonucleotide
  Antisense strand to SEQ ID NO: 1708047
uagcaaauaacguaucaug

SEQ ID NO: 1708049 - RNA, 19 nt, Artificial Sequence
  Description of Artificial Sequence: Synthetic oligonucleotide
  Sense strand starting at position 2933 of SEQ ID NO: 1561917
aguguuucgcugccaucuu

SEQ ID NO: 1708050 - RNA, 19 nt, Artificial Sequence
  Description of Artificial Sequence: Synthetic oligonucleotide
  Antisense strand to SEQ ID NO: 1708049
aagauggcagcgaaacacu

SEQ ID NO: 1708051 - RNA, 19 nt, Artificial Sequence
  Description of Artificial Sequence: Synthetic oligonucleotide
  Sense strand starting at position 2981 of SEQ ID NO: 1561917
cgaagcugcccagaucauu

SEQ ID NO: 1708052 - RNA, 19 nt, Artificial Sequence
  Description of Artificial Sequence: Synthetic oligonucleotide
  Antisense strand to SEQ ID NO: 1708051
aaugaucugggcagcuucg

SEQ ID NO: 1708053 - RNA, 19 nt, Artificial Sequence
  Description of Artificial Sequence: Synthetic oligonucleotide
  Sense strand starting at position 3063 of SEQ ID NO: 1561917
cgcgaaagugcuucccuua

SEQ ID NO: 1708054 - RNA, 19 nt, Artificial Sequence
  Description of Artificial Sequence: Synthetic oligonucleotide
  Antisense strand to SEQ ID NO: 1708053
uaagggaagcacuuucgcg

SEQ ID NO: 1708055 - RNA, 19 nt, Artificial Sequence
  Description of Artificial Sequence: Synthetic oligonucleotide
  Sense strand starting at position 3404 of SEQ ID NO: 1561917
ugggcauuacgguggagau

SEQ ID NO: 1708056 - RNA, 19 nt, Artificial Sequence
  Description of Artificial Sequence: Synthetic oligonucleotide
  Antisense strand to SEQ ID NO: 1708055
aucuccaccguaaugccca

SEQ ID NO: 1708057 - RNA, 19 nt, Artificial Sequence
  Description of Artificial Sequence: Synthetic oligonucleotide
  Sense strand starting at position 3405 of SEQ ID NO: 1561917
gggcauuacgguggagaua

SEQ ID NO: 1708058 - RNA, 19 nt, Artificial Sequence
  Description of Artificial Sequence: Synthetic oligonucleotide
  Antisense strand to SEQ ID NO: 1708057
uaucuccaccguaaugccc

SEQ ID NO: 1708059 - RNA, 19 nt, Artificial Sequence
  Description of Artificial Sequence: Synthetic oligonucleotide
  Sense strand starting at position 3406 of SEQ ID NO: 1561917
ggcauuacgguggagauau

SEQ ID NO: 1708060 - RNA, 19 nt, Artificial Sequence
  Description of Artificial Sequence: Synthetic oligonucleotide
  Antisense strand to SEQ ID NO: 1708059
auaucuccaccguaaugcc

SEQ ID NO: 1708061 - RNA, 19 nt, Artificial Sequence
  Description of Artificial Sequence: Synthetic oligonucleotide
  Sense strand starting at position 3429 of SEQ ID NO: 1561917
caggaaaguuaacugucuu

SEQ ID NO: 1708062 - RNA, 19 nt, Artificial Sequence
  Description of Artificial Sequence: Synthetic oligonucleotide
  Antisense strand to SEQ ID NO: 1708061
aagacaguuaacuuuccug

SEQ ID NO: 1708063 - RNA, 19 nt, Artificial Sequence
  Description of Artificial Sequence: Synthetic oligonucleotide
  Sense strand starting at position 3471 of SEQ ID NO: 1561917
gggccagguauuuguauca

SEQ ID NO: 1708064 - RNA, 19 nt, Artificial Sequence
  Description of Artificial Sequence: Synthetic oligonucleotide
  Antisense strand to SEQ ID NO: 1708063
ugauacaaauaccuggccc

SEQ ID NO: 1708065 - RNA, 19 nt, Artificial Sequence
  Description of Artificial Sequence: Synthetic oligonucleotide
  Sense strand starting at position 3476 of SEQ ID NO: 1561917
agguauuuguaucaaauca

SEQ ID NO: 1708066 - RNA, 19 nt, Artificial Sequence
  Description of Artificial Sequence: Synthetic oligonucleotide
  Antisense strand to SEQ ID NO: 1708065
ugauuugauacaaauaccu

SEQ ID NO: 1708067 - RNA, 19 nt, Artificial Sequence
  Description of Artificial Sequence: Synthetic oligonucleotide
  Sense strand starting at position 3572 of SEQ ID NO: 1561917
guuuguauauacuucccau

SEQ ID NO: 1708068 - RNA, 19 nt, Artificial Sequence
  Description of Artificial Sequence: Synthetic oligonucleotide
  Antisense strand to SEQ ID NO: 1708067
augggaaguauauacaaac

SEQ ID NO: 1708069 - RNA, 19 nt, Artificial Sequence
  Description of Artificial Sequence: Synthetic oligonucleotide
  Sense strand starting at position 3607 of SEQ ID NO: 1561917
ugcauuucuugaguaccua

SEQ ID NO: 1708070 - RNA, 19 nt, Artificial Sequence
  Description of Artificial Sequence: Synthetic oligonucleotide
  Antisense strand to SEQ ID NO: 1708069
uagguacucaagaaaugca

SEQ ID NO: 1708071 - RNA, 19 nt, Artificial Sequence
  Description of Artificial Sequence: Synthetic oligonucleotide
  Sense strand starting at position 3624 of SEQ ID NO: 1561917
uaauuugugcuaggccaua

SEQ ID NO: 1708072 - RNA, 19 nt, Artificial Sequence
  Description of Artificial Sequence: Synthetic oligonucleotide
  Antisense strand to SEQ ID NO: 1708071
uauggccuagcacaaauua

SEQ ID NO: 1708073 - RNA, 19 nt, Artificial Sequence
  Description of Artificial Sequence: Synthetic oligonucleotide
  Sense strand starting at position 3629 of SEQ ID NO: 1561917
ugugcuaggccauaaggau

SEQ ID NO: 1708074 - RNA, 19 nt, Artificial Sequence
  Description of Artificial Sequence: Synthetic oligonucleotide
  Antisense strand to SEQ ID NO: 1708073
auccuuauggccuagcaca

SEQ ID NO: 1708075 - RNA, 19 nt, Artificial Sequence
  Description of Artificial Sequence: Synthetic oligonucleotide
  Sense strand starting at position 3704 of SEQ ID NO: 1561917
gacaucuacuagguugaga

SEQ ID NO: 1708076 - RNA, 19 nt, Artificial Sequence
  Description of Artificial Sequence: Synthetic oligonucleotide
  Antisense strand to SEQ ID NO: 1708075
ucucaaccuaguagauguc

SEQ ID NO: 1708077 - RNA, 19 nt, Artificial Sequence
  Description of Artificial Sequence: Synthetic oligonucleotide
  Sense strand starting at position 3706 of SEQ ID NO: 1561917
caucuacuagguugagaca

SEQ ID NO: 1708078 - RNA, 19 nt, Artificial Sequence
  Description of Artificial Sequence: Synthetic oligonucleotide
  Antisense strand to SEQ ID NO: 1708077
ugucucaaccuaguagaug

SEQ ID NO: 1708079 - RNA, 19 nt, Artificial Sequence
  Description of Artificial Sequence: Synthetic oligonucleotide
  Sense strand starting at position 3751 of SEQ ID NO: 1561917
acugcuagacuguauaaac

SEQ ID NO: 1708080 - RNA, 19 nt, Artificial Sequence
  Description of Artificial Sequence: Synthetic oligonucleotide
  Antisense strand to SEQ ID NO: 1708079
guuuauacagucuagcagu

SEQ ID NO: 1708081 - RNA, 19 nt, Artificial Sequence
  Description of Artificial Sequence: Synthetic oligonucleotide
  Sense strand starting at position 3839 of SEQ ID NO: 1561917
guaggaauuaaugguauug

SEQ ID NO: 1708082 - RNA, 19 nt, Artificial Sequence
  Description of Artificial Sequence: Synthetic oligonucleotide
  Antisense strand to SEQ ID NO: 1708081
caauaccauuaauuccuac

SEQ ID NO: 1708083 - RNA, 19 nt, Artificial Sequence
  Description of Artificial Sequence: Synthetic oligonucleotide
  Sense strand starting at position 3886 of SEQ ID NO: 1561917
cgauauuuguaagccaguu

SEQ ID NO: 1708084 - RNA, 19 nt, Artificial Sequence
  Description of Artificial Sequence: Synthetic oligonucleotide
  Antisense strand to SEQ ID NO: 1708083
aacuggcuuacaaauaucg

SEQ ID NO: 1708085 - RNA, 19 nt, Artificial Sequence
  Description of Artificial Sequence: Synthetic oligonucleotide
  Sense strand starting at position 3898 of SEQ ID NO: 1561917
gccaguuggcuagcguuaa

SEQ ID NO: 1708086 - RNA, 19 nt, Artificial Sequence
  Description of Artificial Sequence: Synthetic oligonucleotide
  Antisense strand to SEQ ID NO: 1708085
uuaacgcuagccaacuggc

SEQ ID NO: 1708087 - RNA, 19 nt, Artificial Sequence
  Description of Artificial Sequence: Synthetic oligonucleotide
  Sense strand starting at position 3939 of SEQ ID NO: 1561917
ggccuuguugcuccaaguu

SEQ ID NO: 1708088 - RNA, 19 nt, Artificial Sequence
  Description of Artificial Sequence: Synthetic oligonucleotide
  Antisense strand to SEQ ID NO: 1708087
aacuuggagcaacaaggcc

SEQ ID NO: 1708089 - RNA, 19 nt, Artificial Sequence
  Description of Artificial Sequence: Synthetic oligonucleotide
  Sense strand starting at position 35 of SEQ ID NO: 1561918
aggacuagcuuccucuuaa

SEQ ID NO: 1708090 - RNA, 19 nt, Artificial Sequence
  Description of Artificial Sequence: Synthetic oligonucleotide
  Antisense strand to SEQ ID NO: 1708089
uuaagaggaagcuaguccu

SEQ ID NO: 1708091 - RNA, 19 nt, Artificial Sequence
  Description of Artificial Sequence: Synthetic oligonucleotide
  Sense strand starting at position 85 of SEQ ID NO: 1561918
cagaguugagauugucuag

SEQ ID NO: 1708092 - RNA, 19 nt, Artificial Sequence
  Description of Artificial Sequence: Synthetic oligonucleotide
  Antisense strand to SEQ ID NO: 1708091
cuagacaaucucaacucug

SEQ ID NO: 1708093 - RNA, 19 nt, Artificial Sequence
  Description of Artificial Sequence: Synthetic oligonucleotide
  Sense strand starting at position 114 of SEQ ID NO: 1561918
uuauguuagacauggugaa

SEQ ID NO: 1708094 - RNA, 19 nt, Artificial Sequence
  Description of Artificial Sequence: Synthetic oligonucleotide
  Antisense strand to SEQ ID NO: 1708093
uucaccaugucuaacauaa

SEQ ID NO: 1708095 - RNA, 19 nt, Artificial Sequence
  Description of Artificial Sequence: Synthetic oligonucleotide
  Sense strand starting at position 115 of SEQ ID NO: 1561918
uauguuagacauggugaaa

SEQ ID NO: 1708096 - RNA, 19 nt, Artificial Sequence
  Description of Artificial Sequence: Synthetic oligonucleotide
  Antisense strand to SEQ ID NO: 1708095
uuucaccaugucuaacaua

SEQ ID NO: 1708097 - RNA, 19 nt, Artificial Sequence
  Description of Artificial Sequence: Synthetic oligonucleotide
  Sense strand starting at position 276 of SEQ ID NO: 1561918
uuucuucuaggguauaaac

SEQ ID NO: 1708098 - RNA, 19 nt, Artificial Sequence
  Description of Artificial Sequence: Synthetic oligonucleotide
  Antisense strand to SEQ ID NO: 1708097
guuuauacccuagaagaaa

SEQ ID NO: 1708099 - RNA, 19 nt, Artificial Sequence
  Description of Artificial Sequence: Synthetic oligonucleotide
  Sense strand starting at position 298 of SEQ ID NO: 1561918
ggaaaugcauuacuuuaac

SEQ ID NO: 1708100 - RNA, 19 nt, Artificial Sequence
  Description of Artificial Sequence: Synthetic oligonucleotide
  Antisense strand to SEQ ID NO: 1708099
guuaaaguaaugcauuucc

SEQ ID NO: 1708101 - RNA, 19 nt, Artificial Sequence
  Description of Artificial Sequence: Synthetic oligonucleotide
  Sense strand starting at position 595 of SEQ ID NO: 1561918
ucucuugaggcagauucuu

SEQ ID NO: 1708102 - RNA, 19 nt, Artificial Sequence
  Description of Artificial Sequence: Synthetic oligonucleotide
  Antisense strand to SEQ ID NO: 1708101
aagaaucugccucaagaga

SEQ ID NO: 1708103 - RNA, 19 nt, Artificial Sequence
  Description of Artificial Sequence: Synthetic oligonucleotide
  Sense strand starting at position 600 of SEQ ID NO: 1561918
ugaggcagauucuucuaaa

SEQ ID NO: 1708104 - RNA, 19 nt, Artificial Sequence
  Description of Artificial Sequence: Synthetic oligonucleotide
  Antisense strand to SEQ ID NO: 1708103
uuuagaagaaucugccuca

SEQ ID NO: 1708105 - RNA, 19 nt, Artificial Sequence
  Description of Artificial Sequence: Synthetic oligonucleotide
  Sense strand starting at position 733 of SEQ ID NO: 1561918
aguccucuagguuggaaga

SEQ ID NO: 1708106 - RNA, 19 nt, Artificial Sequence
  Description of Artificial Sequence: Synthetic oligonucleotide
  Antisense strand to SEQ ID NO: 1708105
ucuuccaaccuagaggacu

SEQ ID NO: 1708107 - RNA, 19 nt, Artificial Sequence
  Description of Artificial Sequence: Synthetic oligonucleotide
  Sense strand starting at position 793 of SEQ ID NO: 1561918
ggauaaggucauggguaaa

SEQ ID NO: 1708108 - RNA, 19 nt, Artificial Sequence
  Description of Artificial Sequence: Synthetic oligonucleotide
  Antisense strand to SEQ ID NO: 1708107
uuuacccaugaccuuaucc

SEQ ID NO: 1708109 - RNA, 19 nt, Artificial Sequence
  Description of Artificial Sequence: Synthetic oligonucleotide
  Sense strand starting at position 972 of SEQ ID NO: 1561918
ugaauuggauaauucguau

SEQ ID NO: 1708110 - RNA, 19 nt, Artificial Sequence
  Description of Artificial Sequence: Synthetic oligonucleotide
  Antisense strand to SEQ ID NO: 1708109
auacgaauuauccaauuca

SEQ ID NO: 1708111 - RNA, 19 nt, Artificial Sequence
  Description of Artificial Sequence: Synthetic oligonucleotide
  Sense strand starting at position 1309 of SEQ ID NO: 1561918
cuacgaagacagugaucga

SEQ ID NO: 1708112 - RNA, 19 nt, Artificial Sequence
  Description of Artificial Sequence: Synthetic oligonucleotide
  Antisense strand to SEQ ID NO: 1708111
ucgaucacugucuucguag

SEQ ID NO: 1708113 - RNA, 19 nt, Artificial Sequence
  Description of Artificial Sequence: Synthetic oligonucleotide
  Sense strand starting at position 2298 of SEQ ID NO: 1561918
aggcuaaaucaguaauccu

SEQ ID NO: 1708114 - RNA, 19 nt, Artificial Sequence
  Description of Artificial Sequence: Synthetic oligonucleotide
  Antisense strand to SEQ ID NO: 1708113
aggauuacugauuuagccu

SEQ ID NO: 1708115 - RNA, 19 nt, Artificial Sequence
  Description of Artificial Sequence: Synthetic oligonucleotide
  Sense strand starting at position 2305 of SEQ ID NO: 1561918
aucaguaauccuggaggua

SEQ ID NO: 1708116 - RNA, 19 nt, Artificial Sequence
  Description of Artificial Sequence: Synthetic oligonucleotide
  Antisense strand to SEQ ID NO: 1708115
uaccuccaggauuacugau

SEQ ID NO: 1708117 - RNA, 19 nt, Artificial Sequence
  Description of Artificial Sequence: Synthetic oligonucleotide
  Sense strand starting at position 2306 of SEQ ID NO: 1561918
ucaguaauccuggagguag

SEQ ID NO: 1708118 - RNA, 19 nt, Artificial Sequence
  Description of Artificial Sequence: Synthetic oligonucleotide
  Antisense strand to SEQ ID NO: 1708117
cuaccuccaggauuacuga

SEQ ID NO: 1708119 - RNA, 19 nt, Artificial Sequence
  Description of Artificial Sequence: Synthetic oligonucleotide
  Sense strand starting at position 2308 of SEQ ID NO: 1561918
aguaauccuggagguagaa

SEQ ID NO: 1708120 - RNA, 19 nt, Artificial Sequence
  Description of Artificial Sequence: Synthetic oligonucleotide
  Antisense strand to SEQ ID NO: 1708119
uucuaccuccaggauuacu

SEQ ID NO: 1708121 - RNA, 19 nt, Artificial Sequence
  Description of Artificial Sequence: Synthetic oligonucleotide
  Sense strand starting at position 2613 of SEQ ID NO: 1561918
gugagacauuaggugaagu

SEQ ID NO: 1708122 - RNA, 19 nt, Artificial Sequence
  Description of Artificial Sequence: Synthetic oligonucleotide
  Antisense strand to SEQ ID NO: 1708121
acuucaccuaaugucucac

SEQ ID NO: 1708123 - RNA, 19 nt, Artificial Sequence
  Description of Artificial Sequence: Synthetic oligonucleotide
  Sense strand starting at position 2614 of SEQ ID NO: 1561918
ugagacauuaggugaaguu

SEQ ID NO: 1708124 - RNA, 19 nt, Artificial Sequence
  Description of Artificial Sequence: Synthetic oligonucleotide
  Antisense strand to SEQ ID NO: 1708123
aacuucaccuaaugucuca

SEQ ID NO: 1708125 - RNA, 19 nt, Artificial Sequence
  Description of Artificial Sequence: Synthetic oligonucleotide
  Sense strand starting at position 2809 of SEQ ID NO: 1561918
gccgauuuccuggagugca

SEQ ID NO: 1708126 - RNA, 19 nt, Artificial Sequence
  Description of Artificial Sequence: Synthetic oligonucleotide
  Antisense strand to SEQ ID NO: 1708125
ugcacuccaggaaaucggc

SEQ ID NO: 1708127 - RNA, 19 nt, Artificial Sequence
  Description of Artificial Sequence: Synthetic oligonucleotide
  Sense strand starting at position 2830 of SEQ ID NO: 1561918
gguuuacagcuugaugaga

SEQ ID NO: 1708128 - RNA, 19 nt, Artificial Sequence
  Description of Artificial Sequence: Synthetic oligonucleotide
  Antisense strand to SEQ ID NO: 1708127
ucucaucaagcuguaaacc

SEQ ID NO: 1708129 - RNA, 19 nt, Artificial Sequence
  Description of Artificial Sequence: Synthetic oligonucleotide
  Sense strand starting at position 2886 of SEQ ID NO: 1561918
acgugucaacaaggauaca

SEQ ID NO: 1708130 - RNA, 19 nt, Artificial Sequence
  Description of Artificial Sequence: Synthetic oligonucleotide
  Antisense strand to SEQ ID NO: 1708129
uguauccuuguugacacgu

SEQ ID NO: 1708131 - RNA, 19 nt, Artificial Sequence
  Description of Artificial Sequence: Synthetic oligonucleotide
  Sense strand starting at position 3089 of SEQ ID NO: 1561918
cagauaaguuucucuggag

SEQ ID NO: 1708132 - RNA, 19 nt, Artificial Sequence
  Description of Artificial Sequence: Synthetic oligonucleotide
  Antisense strand to SEQ ID NO: 1708131
cuccagagaaacuuaucug

SEQ ID NO: 1708133 - RNA, 19 nt, Artificial Sequence
  Description of Artificial Sequence: Synthetic oligonucleotide
  Sense strand starting at position 3093 of SEQ ID NO: 1561918
uaaguuucucuggagcaca

SEQ ID NO: 1708134 - RNA, 19 nt, Artificial Sequence
  Description of Artificial Sequence: Synthetic oligonucleotide
  Antisense strand to SEQ ID NO: 1708133
ugugcuccagagaaacuua

SEQ ID NO: 1708135 - RNA, 19 nt, Artificial Sequence
  Description of Artificial Sequence: Synthetic oligonucleotide
  Sense strand starting at position 3111 of SEQ ID NO: 1561918
aggguuccuauaggaaagu

SEQ ID NO: 1708136 - RNA, 19 nt, Artificial Sequence
  Description of Artificial Sequence: Synthetic oligonucleotide
  Antisense strand to SEQ ID NO: 1708135
acuuuccuauaggaacccu

SEQ ID NO: 1708137 - RNA, 19 nt, Artificial Sequence
  Description of Artificial Sequence: Synthetic oligonucleotide
  Sense strand starting at position 3121 of SEQ ID NO: 1561918
uaggaaaguguugggaagu

SEQ ID NO: 1708138 - RNA, 19 nt, Artificial Sequence
  Description of Artificial Sequence: Synthetic oligonucleotide
  Antisense strand to SEQ ID NO: 1708137
acuucccaacacuuuccua

SEQ ID NO: 1708139 - RNA, 19 nt, Artificial Sequence
  Description of Artificial Sequence: Synthetic oligonucleotide
  Sense strand starting at position 3158 of SEQ ID NO: 1561918
cagugaaugcuaggauaau

SEQ ID NO: 1708140 - RNA, 19 nt, Artificial Sequence
  Description of Artificial Sequence: Synthetic oligonucleotide
  Antisense strand to SEQ ID NO: 1708139
auuauccuagcauucacug

SEQ ID NO: 1708141 - RNA, 19 nt, Artificial Sequence
  Description of Artificial Sequence: Synthetic oligonucleotide
  Sense strand starting at position 3209 of SEQ ID NO: 1561918
gaggguggucauuaaaggu

SEQ ID NO: 1708142 - RNA, 19 nt, Artificial Sequence
  Description of Artificial Sequence: Synthetic oligonucleotide
  Antisense strand to SEQ ID NO: 1708141
accuuuaaugaccacccuc

SEQ ID NO: 1708143 - RNA, 19 nt, Artificial Sequence
  Description of Artificial Sequence: Synthetic oligonucleotide
  Sense strand starting at position 3260 of SEQ ID NO: 1561918
guguuuaagcaggaugaug

SEQ ID NO: 1708144 - RNA, 19 nt, Artificial Sequence
  Description of Artificial Sequence: Synthetic oligonucleotide
  Antisense strand to SEQ ID NO: 1708143
caucauccugcuuaaacac

SEQ ID NO: 1708145 - RNA, 19 nt, Artificial Sequence
  Description of Artificial Sequence: Synthetic oligonucleotide
  Sense strand starting at position 3506 of SEQ ID NO: 1561918
ugguuaggagacuagugua

SEQ ID NO: 1708146 - RNA, 19 nt, Artificial Sequence
  Description of Artificial Sequence: Synthetic oligonucleotide
  Antisense strand to SEQ ID NO: 1708145
uacacuagucuccuaacca

SEQ ID NO: 1708147 - RNA, 19 nt, Artificial Sequence
  Description of Artificial Sequence: Synthetic oligonucleotide
  Sense strand starting at position 3511 of SEQ ID NO: 1561918
aggagacuaguguaauagu

SEQ ID NO: 1708148 - RNA, 19 nt, Artificial Sequence
  Description of Artificial Sequence: Synthetic oligonucleotide
  Antisense strand to SEQ ID NO: 1708147
acuauuacacuagucuccu

SEQ ID NO: 1708149 - RNA, 19 nt, Artificial Sequence
  Description of Artificial Sequence: Synthetic oligonucleotide
  Sense strand starting at position 3519 of SEQ ID NO: 1561918
aguguaauagucuaaguau

SEQ ID NO: 1708150 - RNA, 19 nt, Artificial Sequence
  Description of Artificial Sequence: Synthetic oligonucleotide
  Antisense strand to SEQ ID NO: 1708149
auacuuagacuauuacacu

SEQ ID NO: 1708151 - RNA, 19 nt, Artificial Sequence
  Description of Artificial Sequence: Synthetic oligonucleotide
  Sense strand starting at position 3522 of SEQ ID NO: 1561918
guaauagucuaaguauaag

SEQ ID NO: 1708152 - RNA, 19 nt, Artificial Sequence
  Description of Artificial Sequence: Synthetic oligonucleotide
  Antisense strand to SEQ ID NO: 1708151
cuuauacuuagacuauuac

SEQ ID NO: 1708153 - RNA, 19 nt, Artificial Sequence
  Description of Artificial Sequence: Synthetic oligonucleotide
  Sense strand starting at position 3606 of SEQ ID NO: 1561918
agcacuuuccuccacgaua

SEQ ID NO: 1708154 - RNA, 19 nt, Artificial Sequence
  Description of Artificial Sequence: Synthetic oligonucleotide
  Antisense strand to SEQ ID NO: 1708153
uaucguggaggaaagugcu

SEQ ID NO: 1708155 - RNA, 19 nt, Artificial Sequence
  Description of Artificial Sequence: Synthetic oligonucleotide
  Sense strand starting at position 3704 of SEQ ID NO: 1561918
ucugaauaaguuugccaaa

SEQ ID NO: 1708156 - RNA, 19 nt, Artificial Sequence
  Description of Artificial Sequence: Synthetic oligonucleotide
  Antisense strand to SEQ ID NO: 1708155
uuuggcaaacuuauucaga

SEQ ID NO: 1708157 - RNA, 19 nt, Artificial Sequence
  Description of Artificial Sequence: Synthetic oligonucleotide
  Sense strand starting at position 3706 of SEQ ID NO: 1561918
ugaauaaguuugccaaacu

SEQ ID NO: 1708158 - RNA, 19 nt, Artificial Sequence
  Description of Artificial Sequence: Synthetic oligonucleotide
  Antisense strand to SEQ ID NO: 1708157
aguuuggcaaacuuauuca

SEQ ID NO: 1708159 - RNA, 19 nt, Artificial Sequence
  Description of Artificial Sequence: Synthetic oligonucleotide
  Sense strand starting at position 3738 of SEQ ID NO: 1561918
agugauagagcugaaucga

SEQ ID NO: 1708160 - RNA, 19 nt, Artificial Sequence
  Description of Artificial Sequence: Synthetic oligonucleotide
  Antisense strand to SEQ ID NO: 1708159
ucgauucagcucuaucacu

SEQ ID NO: 1708161 - RNA, 19 nt, Artificial Sequence
  Description of Artificial Sequence: Synthetic oligonucleotide
  Sense strand starting at position 3843 of SEQ ID NO: 1561918
ggaguuuggagugauggca

SEQ ID NO: 1708162 - RNA, 19 nt, Artificial Sequence
  Description of Artificial Sequence: Synthetic oligonucleotide
  Antisense strand to SEQ ID NO: 1708161
ugccaucacuccaaacucc

SEQ ID NO: 1708163 - RNA, 19 nt, Artificial Sequence
  Description of Artificial Sequence: Synthetic oligonucleotide
  Sense strand starting at position 3974 of SEQ ID NO: 1561918
accacaagaucugugagau

SEQ ID NO: 1708164 - RNA, 19 nt, Artificial Sequence
  Description of Artificial Sequence: Synthetic oligonucleotide
  Antisense strand to SEQ ID NO: 1708163
aucucacagaucuuguggu

SEQ ID NO: 1708165 - RNA, 19 nt, Artificial Sequence
  Description of Artificial Sequence: Synthetic oligonucleotide
  Sense strand starting at position 3975 of SEQ ID NO: 1561918
ccacaagaucugugagaug

SEQ ID NO: 1708166 - RNA, 19 nt, Artificial Sequence
  Description of Artificial Sequence: Synthetic oligonucleotide
  Antisense strand to SEQ ID NO: 1708165
caucucacagaucuugugg

SEQ ID NO: 1708167 - RNA, 19 nt, Artificial Sequence
  Description of Artificial Sequence: Synthetic oligonucleotide
  Sense strand starting at position 3980 of SEQ ID NO: 1561918
agaucugugagauggguau

SEQ ID NO: 1708168 - RNA, 19 nt, Artificial Sequence
  Description of Artificial Sequence: Synthetic oligonucleotide
  Antisense strand to SEQ ID NO: 1708167
auacccaucucacagaucu

SEQ ID NO: 1708169 - RNA, 19 nt, Artificial Sequence
  Description of Artificial Sequence: Synthetic oligonucleotide
  Sense strand starting at position 20 of SEQ ID NO: 1561919
ccgaguacugcugcgcaga

SEQ ID NO: 1708170 - RNA, 19 nt, Artificial Sequence
  Description of Artificial Sequence: Synthetic oligonucleotide
  Antisense strand to SEQ ID NO: 1708169
ucugcgcagcaguacucgg

SEQ ID NO: 1708171 - RNA, 19 nt, Artificial Sequence
  Description of Artificial Sequence: Synthetic oligonucleotide
  Sense strand starting at position 21 of SEQ ID NO: 1561919
cgaguacugcugcgcagau

SEQ ID NO: 1708172 - RNA, 19 nt, Artificial Sequence
  Description of Artificial Sequence: Synthetic oligonucleotide
  Antisense strand to SEQ ID NO: 1708171
aucugcgcagcaguacucg

SEQ ID NO: 1708173 - RNA, 19 nt, Artificial Sequence
  Description of Artificial Sequence: Synthetic oligonucleotide
  Sense strand starting at position 22 of SEQ ID NO: 1561919
gaguacugcugcgcagauu

SEQ ID NO: 1708174 - RNA, 19 nt, Artificial Sequence
  Description of Artificial Sequence: Synthetic oligonucleotide
  Antisense strand to SEQ ID NO: 1708173
aaucugcgcagcaguacuc

SEQ ID NO: 1708175 - RNA, 19 nt, Artificial Sequence
  Description of Artificial Sequence: Synthetic oligonucleotide
  Sense strand starting at position 53 of SEQ ID NO: 1561919
aggcaagggcuccgaaaua

SEQ ID NO: 1708176 - RNA, 19 nt, Artificial Sequence
  Description of Artificial Sequence: Synthetic oligonucleotide
  Antisense strand to SEQ ID NO: 1708175
uauuucggagcccuugccu

SEQ ID NO: 1708177 - RNA, 19 nt, Artificial Sequence
  Description of Artificial Sequence: Synthetic oligonucleotide
  Sense strand starting at position 66 of SEQ ID NO: 1561919
gaaauaagugcgggcugaa

SEQ ID NO: 1708178 - RNA, 19 nt, Artificial Sequence
  Description of Artificial Sequence: Synthetic oligonucleotide
  Antisense strand to SEQ ID NO: 1708177
uucagcccgcacuuauuuc

SEQ ID NO: 1708179 - RNA, 19 nt, Artificial Sequence
  Description of Artificial Sequence: Synthetic oligonucleotide
  Sense strand starting at position 69 of SEQ ID NO: 1561919
auaagugcgggcugaaauc

SEQ ID NO: 1708180 - RNA, 19 nt, Artificial Sequence
  Description of Artificial Sequence: Synthetic oligonucleotide
  Antisense strand to SEQ ID NO: 1708179
gauuucagcccgcacuuau

SEQ ID NO: 1708181 - RNA, 19 nt, Artificial Sequence
  Description of Artificial Sequence: Synthetic oligonucleotide
  Sense strand starting at position 538 of SEQ ID NO: 1561919
cgcucucaucuauaaauug

SEQ ID NO: 1708182 - RNA, 19 nt, Artificial Sequence
  Description of Artificial Sequence: Synthetic oligonucleotide
  Antisense strand to SEQ ID NO: 1708181
caauuuauagaugagagcg

SEQ ID NO: 1708183 - RNA, 19 nt, Artificial Sequence
  Description of Artificial Sequence: Synthetic oligonucleotide
  Sense strand starting at position 620 of SEQ ID NO: 1561919
gaggacuuggauugcaaga

SEQ ID NO: 1708184 - RNA, 19 nt, Artificial Sequence
  Description of Artificial Sequence: Synthetic oligonucleotide
  Antisense strand to SEQ ID NO: 1708183
ucuugcaauccaaguccuc

SEQ ID NO: 1708185 - RNA, 19 nt, Artificial Sequence
  Description of Artificial Sequence: Synthetic oligonucleotide
  Sense strand starting at position 625 of SEQ ID NO: 1561919
cuuggauugcaagagccau

SEQ ID NO: 1708186 - RNA, 19 nt, Artificial Sequence
  Description of Artificial Sequence: Synthetic oligonucleotide
  Antisense strand to SEQ ID NO: 1708185
auggcucuugcaauccaag

SEQ ID NO: 1708187 - RNA, 19 nt, Artificial Sequence
  Description of Artificial Sequence: Synthetic oligonucleotide
  Sense strand starting at position 1035 of SEQ ID NO: 1561919
cagguauuccuguggauga

SEQ ID NO: 1708188 - RNA, 19 nt, Artificial Sequence
  Description of Artificial Sequence: Synthetic oligonucleotide
  Antisense strand to SEQ ID NO: 1708187
ucauccacaggaauaccug

SEQ ID NO: 1708189 - RNA, 19 nt, Artificial Sequence
  Description of Artificial Sequence: Synthetic oligonucleotide
  Sense strand starting at position 1036 of SEQ ID NO: 1561919
agguauuccuguggaugaa

SEQ ID NO: 1708190 - RNA, 19 nt, Artificial Sequence
  Description of Artificial Sequence: Synthetic oligonucleotide
  Antisense strand to SEQ ID NO: 1708189
uucauccacaggaauaccu

SEQ ID NO: 1708191 - RNA, 19 nt, Artificial Sequence
  Description of Artificial Sequence: Synthetic oligonucleotide
  Sense strand starting at position 1037 of SEQ ID NO: 1561919
gguauuccuguggaugaag

SEQ ID NO: 1708192 - RNA, 19 nt, Artificial Sequence
  Description of Artificial Sequence: Synthetic oligonucleotide
  Antisense strand to SEQ ID NO: 1708191
cuucauccacaggaauacc

SEQ ID NO: 1708193 - RNA, 19 nt, Artificial Sequence
  Description of Artificial Sequence: Synthetic oligonucleotide
  Sense strand starting at position 1259 of SEQ ID NO: 1561919
gugccuggcuauuucuuua

SEQ ID NO: 1708194 - RNA, 19 nt, Artificial Sequence
  Description of Artificial Sequence: Synthetic oligonucleotide
  Antisense strand to SEQ ID NO: 1708193
uaaagaaauagccaggcac

SEQ ID NO: 1708195 - RNA, 19 nt, Artificial Sequence
  Description of Artificial Sequence: Synthetic oligonucleotide
  Sense strand starting at position 2279 of SEQ ID NO: 1561919
gcuugugggaacuguauga

SEQ ID NO: 1708196 - RNA, 19 nt, Artificial Sequence
  Description of Artificial Sequence: Synthetic oligonucleotide
  Antisense strand to SEQ ID NO: 1708195
ucauacaguucccacaagc

SEQ ID NO: 1708197 - RNA, 19 nt, Artificial Sequence
  Description of Artificial Sequence: Synthetic oligonucleotide
  Sense strand starting at position 2331 of SEQ ID NO: 1561919
cccaucccuuggucugaaa

SEQ ID NO: 1708198 - RNA, 19 nt, Artificial Sequence
  Description of Artificial Sequence: Synthetic oligonucleotide
  Antisense strand to SEQ ID NO: 1708197
uuucagaccaagggauggg

SEQ ID NO: 1708199 - RNA, 19 nt, Artificial Sequence
  Description of Artificial Sequence: Synthetic oligonucleotide
  Sense strand starting at position 2367 of SEQ ID NO: 1561919
aagggaaagugauggaaga

SEQ ID NO: 1708200 - RNA, 19 nt, Artificial Sequence
  Description of Artificial Sequence: Synthetic oligonucleotide
  Antisense strand to SEQ ID NO: 1708199
ucuuccaucacuuucccuu

SEQ ID NO: 1708201 - RNA, 19 nt, Artificial Sequence
  Description of Artificial Sequence: Synthetic oligonucleotide
  Sense strand starting at position 2388 of SEQ ID NO: 1561919
cccugagacuucuuucuga

SEQ ID NO: 1708202 - RNA, 19 nt, Artificial Sequence
  Description of Artificial Sequence: Synthetic oligonucleotide
  Antisense strand to SEQ ID NO: 1708201
ucagaaagaagucucaggg

SEQ ID NO: 1708203 - RNA, 19 nt, Artificial Sequence
  Description of Artificial Sequence: Synthetic oligonucleotide
  Sense strand starting at position 2391 of SEQ ID NO: 1561919
ugagacuucuuucugaaac

SEQ ID NO: 1708204 - RNA, 19 nt, Artificial Sequence
  Description of Artificial Sequence: Synthetic oligonucleotide
  Antisense strand to SEQ ID NO: 1708203
guuucagaaagaagucuca

SEQ ID NO: 1708205 - RNA, 19 nt, Artificial Sequence
  Description of Artificial Sequence: Synthetic oligonucleotide
  Sense strand starting at position 2518 of SEQ ID NO: 1561919
cugacagccuucuuugacu

SEQ ID NO: 1708206 - RNA, 19 nt, Artificial Sequence
  Description of Artificial Sequence: Synthetic oligonucleotide
  Antisense strand to SEQ ID NO: 1708205
agucaaagaaggcugucag

SEQ ID NO: 1708207 - RNA, 19 nt, Artificial Sequence
  Description of Artificial Sequence: Synthetic oligonucleotide
  Sense strand starting at position 2633 of SEQ ID NO: 1561919
gcugaaucuucagggcagu

SEQ ID NO: 1708208 - RNA, 19 nt, Artificial Sequence
  Description of Artificial Sequence: Synthetic oligonucleotide
  Antisense strand to SEQ ID NO: 1708207
acugcccugaagauucagc

SEQ ID NO: 1708209 - RNA, 19 nt, Artificial Sequence
  Description of Artificial Sequence: Synthetic oligonucleotide
  Sense strand starting at position 2717 of SEQ ID NO: 1561919
gggcaaaugucuuaccacu

SEQ ID NO: 1708210 - RNA, 19 nt, Artificial Sequence
  Description of Artificial Sequence: Synthetic oligonucleotide
  Antisense strand to SEQ ID NO: 1708209
agugguaagacauuugccc

SEQ ID NO: 1708211 - RNA, 19 nt, Artificial Sequence
  Description of Artificial Sequence: Synthetic oligonucleotide
  Sense strand starting at position 2737 of SEQ ID NO: 1561919
ugaaguguuuccucagcug

SEQ ID NO: 1708212 - RNA, 19 nt, Artificial Sequence
  Description of Artificial Sequence: Synthetic oligonucleotide
  Antisense strand to SEQ ID NO: 1708211
cagcugaggaaacacuuca

SEQ ID NO: 1708213 - RNA, 19 nt, Artificial Sequence
  Description of Artificial Sequence: Synthetic oligonucleotide
  Sense strand starting at position 2740 of SEQ ID NO: 1561919
aguguuuccucagcuguaa

SEQ ID NO: 1708214 - RNA, 19 nt, Artificial Sequence
  Description of Artificial Sequence: Synthetic oligonucleotide
  Antisense strand to SEQ ID NO: 1708213
uuacagcugaggaaacacu

SEQ ID NO: 1708215 - RNA, 19 nt, Artificial Sequence
  Description of Artificial Sequence: Synthetic oligonucleotide
  Sense strand starting at position 2780 of SEQ ID NO: 1561919
ggcucuuugucccuaaauu

SEQ ID NO: 1708216 - RNA, 19 nt, Artificial Sequence
  Description of Artificial Sequence: Synthetic oligonucleotide
  Antisense strand to SEQ ID NO: 1708215
aauuuagggacaaagagcc

SEQ ID NO: 1708217 - RNA, 19 nt, Artificial Sequence
  Description of Artificial Sequence: Synthetic oligonucleotide
  Sense strand starting at position 2781 of SEQ ID NO: 1561919
gcucuuugucccuaaauug

SEQ ID NO: 1708218 - RNA, 19 nt, Artificial Sequence
  Description of Artificial Sequence: Synthetic oligonucleotide
  Antisense strand to SEQ ID NO: 1708217
caauuuagggacaaagagc

SEQ ID NO: 1708219 - RNA, 19 nt, Artificial Sequence
  Description of Artificial Sequence: Synthetic oligonucleotide
  Sense strand starting at position 2791 of SEQ ID NO: 1561919
ccuaaauugaugugaggau

SEQ ID NO: 1708220 - RNA, 19 nt, Artificial Sequence
  Description of Artificial Sequence: Synthetic oligonucleotide
  Antisense strand to SEQ ID NO: 1708219
auccucacaucaauuuagg

SEQ ID NO: 1708221 - RNA, 19 nt, Artificial Sequence
  Description of Artificial Sequence: Synthetic oligonucleotide
  Sense strand starting at position 2792 of SEQ ID NO: 1561919
cuaaauugaugugaggauu

SEQ ID NO: 1708222 - RNA, 19 nt, Artificial Sequence
  Description of Artificial Sequence: Synthetic oligonucleotide
  Antisense strand to SEQ ID NO: 1708221
aauccucacaucaauuuag

SEQ ID NO: 1708223 - RNA, 19 nt, Artificial Sequence
  Description of Artificial Sequence: Synthetic oligonucleotide
  Sense strand starting at position 2850 of SEQ ID NO: 1561919
guuguaaguccgcaacgga

SEQ ID NO: 1708224 - RNA, 19 nt, Artificial Sequence
  Description of Artificial Sequence: Synthetic oligonucleotide
  Antisense strand to SEQ ID NO: 1708223
uccguugcggacuuacaac

SEQ ID NO: 1708225 - RNA, 19 nt, Artificial Sequence
  Description of Artificial Sequence: Synthetic oligonucleotide
  Sense strand starting at position 3073 of SEQ ID NO: 1561919
ugauucuaacuuggaauca

SEQ ID NO: 1708226 - RNA, 19 nt, Artificial Sequence
  Description of Artificial Sequence: Synthetic oligonucleotide
  Antisense strand to SEQ ID NO: 1708225
ugauuccaaguuagaauca

SEQ ID NO: 1708227 - RNA, 19 nt, Artificial Sequence
  Description of Artificial Sequence: Synthetic oligonucleotide
  Sense strand starting at position 3097 of SEQ ID NO: 1561919
ccagguuauugggcucuaa

SEQ ID NO: 1708228 - RNA, 19 nt, Artificial Sequence
  Description of Artificial Sequence: Synthetic oligonucleotide
  Antisense strand to SEQ ID NO: 1708227
uuagagcccaauaaccugg

SEQ ID NO: 1708229 - RNA, 19 nt, Artificial Sequence
  Description of Artificial Sequence: Synthetic oligonucleotide
  Sense strand starting at position 3118 of SEQ ID NO: 1561919
ugcaguguaaccuggagua

SEQ ID NO: 1708230 - RNA, 19 nt, Artificial Sequence
  Description of Artificial Sequence: Synthetic oligonucleotide
  Antisense strand to SEQ ID NO: 1708229
uacuccagguuacacugca

SEQ ID NO: 1708231 - RNA, 19 nt, Artificial Sequence
  Description of Artificial Sequence: Synthetic oligonucleotide
  Sense strand starting at position 3120 of SEQ ID NO: 1561919
caguguaaccuggaguaaa

SEQ ID NO: 1708232 - RNA, 19 nt, Artificial Sequence
  Description of Artificial Sequence: Synthetic oligonucleotide
  Antisense strand to SEQ ID NO: 1708231
uuuacuccagguuacacug

SEQ ID NO: 1708233 - RNA, 19 nt, Artificial Sequence
  Description of Artificial Sequence: Synthetic oligonucleotide
  Sense strand starting at position 3645 of SEQ ID NO: 1561919
uuucgaacuucugacucaa

SEQ ID NO: 1708234 - RNA, 19 nt, Artificial Sequence
  Description of Artificial Sequence: Synthetic oligonucleotide
  Antisense strand to SEQ ID NO: 1708233
uugagucagaaguucgaaa

SEQ ID NO: 1708235 - RNA, 19 nt, Artificial Sequence
  Description of Artificial Sequence: Synthetic oligonucleotide
  Sense strand starting at position 3733 of SEQ ID NO: 1561919
gcuguauuuaaagggccua

SEQ ID NO: 1708236 - RNA, 19 nt, Artificial Sequence
  Description of Artificial Sequence: Synthetic oligonucleotide
  Antisense strand to SEQ ID NO: 1708235
uaggcccuuuaaauacagc

SEQ ID NO: 1708237 - RNA, 19 nt, Artificial Sequence
  Description of Artificial Sequence: Synthetic oligonucleotide
  Sense strand starting at position 3980 of SEQ ID NO: 1561919
gauuuacugugucaagcac

SEQ ID NO: 1708238 - RNA, 19 nt, Artificial Sequence
  Description of Artificial Sequence: Synthetic oligonucleotide
  Antisense strand to SEQ ID NO: 1708237
gugcuugacacaguaaauc

SEQ ID NO: 1708239 - RNA, 19 nt, Artificial Sequence
  Description of Artificial Sequence: Synthetic oligonucleotide
  Sense strand starting at position 1986 of SEQ ID NO: 1561920
ggaaguugucgugaaaggc

SEQ ID NO: 1708240 - RNA, 19 nt, Artificial Sequence
  Description of Artificial Sequence: Synthetic oligonucleotide
  Antisense strand to SEQ ID NO: 1708239
gccuuucacgacaacuucc

SEQ ID NO: 1708241 - RNA, 19 nt, Artificial Sequence
  Description of Artificial Sequence: Synthetic oligonucleotide
  Sense strand starting at position 2017 of SEQ ID NO: 1561920
gucuucugucuccuagcga

SEQ ID NO: 1708242 - RNA, 19 nt, Artificial Sequence
  Description of Artificial Sequence: Synthetic oligonucleotide
  Antisense strand to SEQ ID NO: 1708241
ucgcuaggagacagaagac

SEQ ID NO: 1708243 - RNA, 19 nt, Artificial Sequence
  Description of Artificial Sequence: Synthetic oligonucleotide
  Sense strand starting at position 2025 of SEQ ID NO: 1561920
ucuccuagcgacugggaua

SEQ ID NO: 1708244 - RNA, 19 nt, Artificial Sequence
  Description of Artificial Sequence: Synthetic oligonucleotide
  Antisense strand to SEQ ID NO: 1708243
uaucccagucgcuaggaga

SEQ ID NO: 1708245 - RNA, 19 nt, Artificial Sequence
  Description of Artificial Sequence: Synthetic oligonucleotide
  Sense strand starting at position 2026 of SEQ ID NO: 1561920
cuccuagcgacugggauaa

SEQ ID NO: 1708246 - RNA, 19 nt, Artificial Sequence
  Description of Artificial Sequence: Synthetic oligonucleotide
  Antisense strand to SEQ ID NO: 1708245
uuaucccagucgcuaggag

SEQ ID NO: 1708247 - RNA, 19 nt, Artificial Sequence
  Description of Artificial Sequence: Synthetic oligonucleotide
  Sense strand starting at position 2054 of SEQ ID NO: 1561920
cuuuauggagcuugggaaa

SEQ ID NO: 1708248 - RNA, 19 nt, Artificial Sequence
  Description of Artificial Sequence: Synthetic oligonucleotide
  Antisense strand to SEQ ID NO: 1708247
uuucccaagcuccauaaag

SEQ ID NO: 1708249 - RNA, 19 nt, Artificial Sequence
  Description of Artificial Sequence: Synthetic oligonucleotide
  Sense strand starting at position 2159 of SEQ ID NO: 1561920
acgcaauggcccuagaaga

SEQ ID NO: 1708250 - RNA, 19 nt, Artificial Sequence
  Description of Artificial Sequence: Synthetic oligonucleotide
  Antisense strand to SEQ ID NO: 1708249
ucuucuagggccauugcgu

SEQ ID NO: 1708251 - RNA, 19 nt, Artificial Sequence
  Description of Artificial Sequence: Synthetic oligonucleotide
  Sense strand starting at position 2364 of SEQ ID NO: 1561920
aacaaauauucggugcuuu

SEQ ID NO: 1708252 - RNA, 19 nt, Artificial Sequence
  Description of Artificial Sequence: Synthetic oligonucleotide
  Antisense strand to SEQ ID NO: 1708251
aaagcaccgaauauuuguu

SEQ ID NO: 1708253 - RNA, 19 nt, Artificial Sequence
  Description of Artificial Sequence: Synthetic oligonucleotide
  Sense strand starting at position 2438 of SEQ ID NO: 1561920
aagcuucuccgagagguag

SEQ ID NO: 1708254 - RNA, 19 nt, Artificial Sequence
  Description of Artificial Sequence: Synthetic oligonucleotide
  Antisense strand to SEQ ID NO: 1708253
cuaccucucggagaagcuu

SEQ ID NO: 1708255 - RNA, 19 nt, Artificial Sequence
  Description of Artificial Sequence: Synthetic oligonucleotide
  Sense strand starting at position 2662 of SEQ ID NO: 1561920
uugugagacucucauuuau

SEQ ID NO: 1708256 - RNA, 19 nt, Artificial Sequence
  Description of Artificial Sequence: Synthetic oligonucleotide
  Antisense strand to SEQ ID NO: 1708255
auaaaugagagucucacaa

SEQ ID NO: 1708257 - RNA, 19 nt, Artificial Sequence
  Description of Artificial Sequence: Synthetic oligonucleotide
  Sense strand starting at position 2751 of SEQ ID NO: 1561920
ggcugaaagcgugauccca

SEQ ID NO: 1708258 - RNA, 19 nt, Artificial Sequence
  Description of Artificial Sequence: Synthetic oligonucleotide
  Antisense strand to SEQ ID NO: 1708257
ugggaucacgcuuucagcc

SEQ ID NO: 1708259 - RNA, 19 nt, Artificial Sequence
  Description of Artificial Sequence: Synthetic oligonucleotide
  Sense strand starting at position 2753 of SEQ ID NO: 1561920
cugaaagcgugaucccacu

SEQ ID NO: 1708260 - RNA, 19 nt, Artificial Sequence
  Description of Artificial Sequence: Synthetic oligonucleotide
  Antisense strand to SEQ ID NO: 1708259
agugggaucacgcuuucag

SEQ ID NO: 1708261 - RNA, 19 nt, Artificial Sequence
  Description of Artificial Sequence: Synthetic oligonucleotide
  Sense strand starting at position 2853 of SEQ ID NO: 1561920
cuuacauaagcaugagguu

SEQ ID NO: 1708262 - RNA, 19 nt, Artificial Sequence
  Description of Artificial Sequence: Synthetic oligonucleotide
  Antisense strand to SEQ ID NO: 1708261
aaccucaugcuuauguaag

SEQ ID NO: 1708263 - RNA, 19 nt, Artificial Sequence
  Description of Artificial Sequence: Synthetic oligonucleotide
  Sense strand starting at position 2905 of SEQ ID NO: 1561920
acgauaaccuuucuggaaa

SEQ ID NO: 1708264 - RNA, 19 nt, Artificial Sequence
  Description of Artificial Sequence: Synthetic oligonucleotide
  Antisense strand to SEQ ID NO: 1708263
uuuccagaaagguuaucgu

SEQ ID NO: 1708265 - RNA, 19 nt, Artificial Sequence
  Description of Artificial Sequence: Synthetic oligonucleotide
  Sense strand starting at position 2973 of SEQ ID NO: 1561920
gauuguuagaaccgggaug

SEQ ID NO: 1708266 - RNA, 19 nt, Artificial Sequence
  Description of Artificial Sequence: Synthetic oligonucleotide
  Antisense strand to SEQ ID NO: 1708265
caucccgguucuaacaauc

SEQ ID NO: 1708267 - RNA, 19 nt, Artificial Sequence
  Description of Artificial Sequence: Synthetic oligonucleotide
  Sense strand starting at position 2996 of SEQ ID NO: 1561920
guggguggaguucgaauuu

SEQ ID NO: 1708268 - RNA, 19 nt, Artificial Sequence
  Description of Artificial Sequence: Synthetic oligonucleotide
  Antisense strand to SEQ ID NO: 1708267
aaauucgaacuccacccac

SEQ ID NO: 1708269 - RNA, 19 nt, Artificial Sequence
  Description of Artificial Sequence: Synthetic oligonucleotide
  Sense strand starting at position 3097 of SEQ ID NO: 1561920
gggaucaugcugugaaauc

SEQ ID NO: 1708270 - RNA, 19 nt, Artificial Sequence
  Description of Artificial Sequence: Synthetic oligonucleotide
  Antisense strand to SEQ ID NO: 1708269
gauuucacagcaugauccc

SEQ ID NO: 1708271 - RNA, 19 nt, Artificial Sequence
  Description of Artificial Sequence: Synthetic oligonucleotide
  Sense strand starting at position 3106 of SEQ ID NO: 1561920
cugugaaaucuuugaagac

SEQ ID NO: 1708272 - RNA, 19 nt, Artificial Sequence
  Description of Artificial Sequence: Synthetic oligonucleotide
  Antisense strand to SEQ ID NO: 1708271
gucuucaaagauuucacag

SEQ ID NO: 1708273 - RNA, 19 nt, Artificial Sequence
  Description of Artificial Sequence: Synthetic oligonucleotide
  Sense strand starting at position 3151 of SEQ ID NO: 1561920
auagcaaauuacuuuggaa

SEQ ID NO: 1708274 - RNA, 19 nt, Artificial Sequence
  Description of Artificial Sequence: Synthetic oligonucleotide
  Antisense strand to SEQ ID NO: 1708273
uuccaaaguaauuugcuau

SEQ ID NO: 1708275 - RNA, 19 nt, Artificial Sequence
  Description of Artificial Sequence: Synthetic oligonucleotide
  Sense strand starting at position 3153 of SEQ ID NO: 1561920
agcaaauuacuuuggaagu

SEQ ID NO: 1708276 - RNA, 19 nt, Artificial Sequence
  Description of Artificial Sequence: Synthetic oligonucleotide
  Antisense strand to SEQ ID NO: 1708275
acuuccaaaguaauuugcu

SEQ ID NO: 1708277 - RNA, 19 nt, Artificial Sequence
  Description of Artificial Sequence: Synthetic oligonucleotide
  Sense strand starting at position 3163 of SEQ ID NO: 1561920
uuuggaaguuagguaacau

SEQ ID NO: 1708278 - RNA, 19 nt, Artificial Sequence
  Description of Artificial Sequence: Synthetic oligonucleotide
  Antisense strand to SEQ ID NO: 1708277
auguuaccuaacuuccaaa

SEQ ID NO: 1708279 - RNA, 19 nt, Artificial Sequence
  Description of Artificial Sequence: Synthetic oligonucleotide
  Sense strand starting at position 3174 of SEQ ID NO: 1561920
gguaacauuccauauggcu

SEQ ID NO: 1708280 - RNA, 19 nt, Artificial Sequence
  Description of Artificial Sequence: Synthetic oligonucleotide
  Antisense strand to SEQ ID NO: 1708279
agccauauggaauguuacc

SEQ ID NO: 1708281 - RNA, 19 nt, Artificial Sequence
  Description of Artificial Sequence: Synthetic oligonucleotide
  Sense strand starting at position 3183 of SEQ ID NO: 1561920
ccauauggcuguguuauuu

SEQ ID NO: 1708282 - RNA, 19 nt, Artificial Sequence
  Description of Artificial Sequence: Synthetic oligonucleotide
  Antisense strand to SEQ ID NO: 1708281
aaauaacacagccauaugg

SEQ ID NO: 1708283 - RNA, 19 nt, Artificial Sequence
  Description of Artificial Sequence: Synthetic oligonucleotide
  Sense strand starting at position 3229 of SEQ ID NO: 1561920
gauuauuuccagcgccuuu

SEQ ID NO: 1708284 - RNA, 19 nt, Artificial Sequence
  Description of Artificial Sequence: Synthetic oligonucleotide
  Antisense strand to SEQ ID NO: 1708283
aaaggcgcuggaaauaauc

SEQ ID NO: 1708285 - RNA, 19 nt, Artificial Sequence
  Description of Artificial Sequence: Synthetic oligonucleotide
  Sense strand starting at position 3272 of SEQ ID NO: 1561920
ugcuuugucgaugagaaca

SEQ ID NO: 1708286 - RNA, 19 nt, Artificial Sequence
  Description of Artificial Sequence: Synthetic oligonucleotide
  Antisense strand to SEQ ID NO: 1708285
uguucucaucgacaaagca

SEQ ID NO: 1708287 - RNA, 19 nt, Artificial Sequence
  Description of Artificial Sequence: Synthetic oligonucleotide
  Sense strand starting at position 3374 of SEQ ID NO: 1561920
ggcagcagacgcguucaua

SEQ ID NO: 1708288 - RNA, 19 nt, Artificial Sequence
  Description of Artificial Sequence: Synthetic oligonucleotide
  Antisense strand to SEQ ID NO: 1708287
uaugaacgcgucugcugcc

SEQ ID NO: 1708289 - RNA, 19 nt, Artificial Sequence
  Description of Artificial Sequence: Synthetic oligonucleotide
  Sense strand starting at position 3398 of SEQ ID NO: 1561920
acuuguguacuagggauaa

SEQ ID NO: 1708290 - RNA, 19 nt, Artificial Sequence
  Description of Artificial Sequence: Synthetic oligonucleotide
  Antisense strand to SEQ ID NO: 1708289
uuaucccuaguacacaagu

SEQ ID NO: 1708291 - RNA, 19 nt, Artificial Sequence
  Description of Artificial Sequence: Synthetic oligonucleotide
  Sense strand starting at position 3410 of SEQ ID NO: 1561920
gggauaaauucuucgaggu

SEQ ID NO: 1708292 - RNA, 19 nt, Artificial Sequence
  Description of Artificial Sequence: Synthetic oligonucleotide
  Antisense strand to SEQ ID NO: 1708291
accucgaagaauuuauccc

SEQ ID NO: 1708293 - RNA, 19 nt, Artificial Sequence
  Description of Artificial Sequence: Synthetic oligonucleotide
  Sense strand starting at position 3411 of SEQ ID NO: 1561920
ggauaaauucuucgaggua

SEQ ID NO: 1708294 - RNA, 19 nt, Artificial Sequence
  Description of Artificial Sequence: Synthetic oligonucleotide
  Antisense strand to SEQ ID NO: 1708293
uaccucgaagaauuuaucc

SEQ ID NO: 1708295 - RNA, 19 nt, Artificial Sequence
  Description of Artificial Sequence: Synthetic oligonucleotide
  Sense strand starting at position 3414 of SEQ ID NO: 1561920
uaaauucuucgagguagga

SEQ ID NO: 1708296 - RNA, 19 nt, Artificial Sequence
  Description of Artificial Sequence: Synthetic oligonucleotide
  Antisense strand to SEQ ID NO: 1708295
uccuaccucgaagaauuua

SEQ ID NO: 1708297 - RNA, 19 nt, Artificial Sequence
  Description of Artificial Sequence: Synthetic oligonucleotide
  Sense strand starting at position 3428 of SEQ ID NO: 1561920
uaggauugcugggucgaca

SEQ ID NO: 1708298 - RNA, 19 nt, Artificial Sequence
  Description of Artificial Sequence: Synthetic oligonucleotide
  Antisense strand to SEQ ID NO: 1708297
ugucgacccagcaauccua

SEQ ID NO: 1708299 - RNA, 19 nt, Artificial Sequence
  Description of Artificial Sequence: Synthetic oligonucleotide
  Sense strand starting at position 3431 of SEQ ID NO: 1561920
gauugcugggucgacagaa

SEQ ID NO: 1708300 - RNA, 19 nt, Artificial Sequence
  Description of Artificial Sequence: Synthetic oligonucleotide
  Antisense strand to SEQ ID NO: 1708299
uucugucgacccagcaauc

SEQ ID NO: 1708301 - RNA, 19 nt, Artificial Sequence
  Description of Artificial Sequence: Synthetic oligonucleotide
  Sense strand starting at position 3441 of SEQ ID NO: 1561920
ucgacagaaaugugcuuaa

SEQ ID NO: 1708302 - RNA, 19 nt, Artificial Sequence
  Description of Artificial Sequence: Synthetic oligonucleotide
  Antisense strand to SEQ ID NO: 1708301
uuaagcacauuucugucga

SEQ ID NO: 1708303 - RNA, 19 nt, Artificial Sequence
  Description of Artificial Sequence: Synthetic oligonucleotide
  Sense strand starting at position 3472 of SEQ ID NO: 1561920
cugccaaauugcucuaaag

SEQ ID NO: 1708304 - RNA, 19 nt, Artificial Sequence
  Description of Artificial Sequence: Synthetic oligonucleotide
  Antisense strand to SEQ ID NO: 1708303
cuuuagagcaauuuggcag

SEQ ID NO: 1708305 - RNA, 19 nt, Artificial Sequence
  Description of Artificial Sequence: Synthetic oligonucleotide
  Sense strand starting at position 3474 of SEQ ID NO: 1561920
gccaaauugcucuaaagaa

SEQ ID NO: 1708306 - RNA, 19 nt, Artificial Sequence
  Description of Artificial Sequence: Synthetic oligonucleotide
  Antisense strand to SEQ ID NO: 1708305
uucuuuagagcaauuuggc

SEQ ID NO: 1708307 - RNA, 19 nt, Artificial Sequence
  Description of Artificial Sequence: Synthetic oligonucleotide
  Sense strand starting at position 3556 of SEQ ID NO: 1561920
ccgccugagcauuagacuu

SEQ ID NO: 1708308 - RNA, 19 nt, Artificial Sequence
  Description of Artificial Sequence: Synthetic oligonucleotide
  Antisense strand to SEQ ID NO: 1708307
aagucuaaugcucaggcgg

SEQ ID NO: 1708309 - RNA, 19 nt, Artificial Sequence
  Description of Artificial Sequence: Synthetic oligonucleotide
  Sense strand starting at position 3568 of SEQ ID NO: 1561920
uagacuuaacauuguugga

SEQ ID NO: 1708310 - RNA, 19 nt, Artificial Sequence
  Description of Artificial Sequence: Synthetic oligonucleotide
  Antisense strand to SEQ ID NO: 1708309
uccaacaauguuaagucua

SEQ ID NO: 1708311 - RNA, 19 nt, Artificial Sequence
  Description of Artificial Sequence: Synthetic oligonucleotide
  Sense strand starting at position 3570 of SEQ ID NO: 1561920
gacuuaacauuguuggaag

SEQ ID NO: 1708312 - RNA, 19 nt, Artificial Sequence
  Description of Artificial Sequence: Synthetic oligonucleotide
  Antisense strand to SEQ ID NO: 1708311
cuuccaacaauguuaaguc

SEQ ID NO: 1708313 - RNA, 19 nt, Artificial Sequence
  Description of Artificial Sequence: Synthetic oligonucleotide
  Sense strand starting at position 3572 of SEQ ID NO: 1561920
cuuaacauuguuggaagua

SEQ ID NO: 1708314 - RNA, 19 nt, Artificial Sequence
  Description of Artificial Sequence: Synthetic oligonucleotide
  Antisense strand to SEQ ID NO: 1708313
uacuuccaacaauguuaag

SEQ ID NO: 1708315 - RNA, 19 nt, Artificial Sequence
  Description of Artificial Sequence: Synthetic oligonucleotide
  Sense strand starting at position 3760 of SEQ ID NO: 1561920
cagggcuuguauucuaauu

SEQ ID NO: 1708316 - RNA, 19 nt, Artificial Sequence
  Description of Artificial Sequence: Synthetic oligonucleotide
  Antisense strand to SEQ ID NO: 1708315
aauuagaauacaagcccug

SEQ ID NO: 1708317 - RNA, 19 nt, Artificial Sequence
  Description of Artificial Sequence: Synthetic oligonucleotide
  Sense strand starting at position 3870 of SEQ ID NO: 1561920
aaugaaguuugauaaagga

SEQ ID NO: 1708318 - RNA, 19 nt, Artificial Sequence
  Description of Artificial Sequence: Synthetic oligonucleotide
  Antisense strand to SEQ ID NO: 1708317
uccuuuaucaaacuucauu

SEQ ID NO: 1708319 - RNA, 19 nt, Artificial Sequence
  Description of Artificial Sequence: Synthetic oligonucleotide
  Sense strand starting at position 209 of SEQ ID NO: 1561921
gcagucucaccaugagacu

SEQ ID NO: 1708320 - RNA, 19 nt, Artificial Sequence
  Description of Artificial Sequence: Synthetic oligonucleotide
  Antisense strand to SEQ ID NO: 1708319
agucucauggugagacugc

SEQ ID NO: 1708321 - RNA, 19 nt, Artificial Sequence
  Description of Artificial Sequence: Synthetic oligonucleotide
  Sense strand starting at position 428 of SEQ ID NO: 1561921
agaccuaugucauacugau

SEQ ID NO: 1708322 - RNA, 19 nt, Artificial Sequence
  Description of Artificial Sequence: Synthetic oligonucleotide
  Antisense strand to SEQ ID NO: 1708321
aucaguaugacauaggucu

SEQ ID NO: 1708323 - RNA, 19 nt, Artificial Sequence
  Description of Artificial Sequence: Synthetic oligonucleotide
  Sense strand starting at position 708 of SEQ ID NO: 1561921
uugucugacucccacagaa

SEQ ID NO: 1708324 - RNA, 19 nt, Artificial Sequence
  Description of Artificial Sequence: Synthetic oligonucleotide
  Antisense strand to SEQ ID NO: 1708323
uucugugggagucagacaa

SEQ ID NO: 1708325 - RNA, 19 nt, Artificial Sequence
  Description of Artificial Sequence: Synthetic oligonucleotide
  Sense strand starting at position 710 of SEQ ID NO: 1561921
gucugacucccacagaagu

SEQ ID NO: 1708326 - RNA, 19 nt, Artificial Sequence
  Description of Artificial Sequence: Synthetic oligonucleotide
  Antisense strand to SEQ ID NO: 1708325
acuucugugggagucagac

SEQ ID NO: 1708327 - RNA, 19 nt, Artificial Sequence
  Description of Artificial Sequence: Synthetic oligonucleotide
  Sense strand starting at position 741 of SEQ ID NO: 1561921
cuuggugugacucagauag

SEQ ID NO: 1708328 - RNA, 19 nt, Artificial Sequence
  Description of Artificial Sequence: Synthetic oligonucleotide
  Antisense strand to SEQ ID NO: 1708327
cuaucugagucacaccaag

SEQ ID NO: 1708329 - RNA, 19 nt, Artificial Sequence
  Description of Artificial Sequence: Synthetic oligonucleotide
  Sense strand starting at position 926 of SEQ ID NO: 1561921
cuguguuugugcuuuccau

SEQ ID NO: 1708330 - RNA, 19 nt, Artificial Sequence
  Description of Artificial Sequence: Synthetic oligonucleotide
  Antisense strand to SEQ ID NO: 1708329
auggaaagcacaaacacag

SEQ ID NO: 1708331 - RNA, 19 nt, Artificial Sequence
  Description of Artificial Sequence: Synthetic oligonucleotide
  Sense strand starting at position 930 of SEQ ID NO: 1561921
guuugugcuuuccaugaca

SEQ ID NO: 1708332 - RNA, 19 nt, Artificial Sequence
  Description of Artificial Sequence: Synthetic oligonucleotide
  Antisense strand to SEQ ID NO: 1708331
ugucauggaaagcacaaac

SEQ ID NO: 1708333 - RNA, 19 nt, Artificial Sequence
  Description of Artificial Sequence: Synthetic oligonucleotide
  Sense strand starting at position 2135 of SEQ ID NO: 1561921
acguguuccucuuuaaagc

SEQ ID NO: 1708334 - RNA, 19 nt, Artificial Sequence
  Description of Artificial Sequence: Synthetic oligonucleotide
  Antisense strand to SEQ ID NO: 1708333
gcuuuaaagaggaacacgu

SEQ ID NO: 1708335 - RNA, 19 nt, Artificial Sequence
  Description of Artificial Sequence: Synthetic oligonucleotide
  Sense strand starting at position 2136 of SEQ ID NO: 1561921
cguguuccucuuuaaagca

SEQ ID NO: 1708336 - RNA, 19 nt, Artificial Sequence
  Description of Artificial Sequence: Synthetic oligonucleotide
  Antisense strand to SEQ ID NO: 1708335
ugcuuuaaagaggaacacg

SEQ ID NO: 1708337 - RNA, 19 nt, Artificial Sequence
  Description of Artificial Sequence: Synthetic oligonucleotide
  Sense strand starting at position 2277 of SEQ ID NO: 1561921
uuccuuguagaagguauaa

SEQ ID NO: 1708338 - RNA, 19 nt, Artificial Sequence
  Description of Artificial Sequence: Synthetic oligonucleotide
  Antisense strand to SEQ ID NO: 1708337
uuauaccuucuacaaggaa

SEQ ID NO: 1708339 - RNA, 19 nt, Artificial Sequence
  Description of Artificial Sequence: Synthetic oligonucleotide
  Sense strand starting at position 2342 of SEQ ID NO: 1561921
ggcuaaggauuuggauaca

SEQ ID NO: 1708340 - RNA, 19 nt, Artificial Sequence
  Description of Artificial Sequence: Synthetic oligonucleotide
  Antisense strand to SEQ ID NO: 1708339
uguauccaaauccuuagcc

SEQ ID NO: 1708341 - RNA, 19 nt, Artificial Sequence
  Description of Artificial Sequence: Synthetic oligonucleotide
  Sense strand starting at position 2887 of SEQ ID NO: 1561921
ggaaccgucucccuaggaa

SEQ ID NO: 1708342 - RNA, 19 nt, Artificial Sequence
  Description of Artificial Sequence: Synthetic oligonucleotide
  Antisense strand to SEQ ID NO: 1708341
uuccuagggagacgguucc

SEQ ID NO: 1708343 - RNA, 19 nt, Artificial Sequence
  Description of Artificial Sequence: Synthetic oligonucleotide
  Sense strand starting at position 3105 of SEQ ID NO: 1561921
agacgaaagucagagaauu

SEQ ID NO: 1708344 - RNA, 19 nt, Artificial Sequence
  Description of Artificial Sequence: Synthetic oligonucleotide
  Antisense strand to SEQ ID NO: 1708343
aauucucugacuuucgucu

SEQ ID NO: 1708345 - RNA, 19 nt, Artificial Sequence
  Description of Artificial Sequence: Synthetic oligonucleotide
  Sense strand starting at position 3177 of SEQ ID NO: 1561921
gcaacuccauaggaauaga

SEQ ID NO: 1708346 - RNA, 19 nt, Artificial Sequence
  Description of Artificial Sequence: Synthetic oligonucleotide
  Antisense strand to SEQ ID NO: 1708345
ucuauuccuauggaguugc

SEQ ID NO: 1708347 - RNA, 19 nt, Artificial Sequence
  Description of Artificial Sequence: Synthetic oligonucleotide
  Sense strand starting at position 3586 of SEQ ID NO: 1561921
ggugaaaugcucuggaauu

SEQ ID NO: 1708348 - RNA, 19 nt, Artificial Sequence
  Description of Artificial Sequence: Synthetic oligonucleotide
  Antisense strand to SEQ ID NO: 1708347
aauuccagagcauuucacc

SEQ ID NO: 1708349 - RNA, 19 nt, Artificial Sequence
  Description of Artificial Sequence: Synthetic oligonucleotide
  Sense strand starting at position 3587 of SEQ ID NO: 1561921
gugaaaugcucuggaauua

SEQ ID NO: 1708350 - RNA, 19 nt, Artificial Sequence
  Description of Artificial Sequence: Synthetic oligonucleotide
  Antisense strand to SEQ ID NO: 1708349
uaauuccagagcauuucac

SEQ ID NO: 1708351 - RNA, 19 nt, Artificial Sequence
  Description of Artificial Sequence: Synthetic oligonucleotide
  Sense strand starting at position 3615 of SEQ ID NO: 1561921
cacgguugcucgcaacaaa

SEQ ID NO: 1708352 - RNA, 19 nt, Artificial Sequence
  Description of Artificial Sequence: Synthetic oligonucleotide
  Antisense strand to SEQ ID NO: 1708351
uuuguugcgagcaaccgug

SEQ ID NO: 1708353 - RNA, 19 nt, Artificial Sequence
  Description of Artificial Sequence: Synthetic oligonucleotide
  Sense strand starting at position 3638 of SEQ ID NO: 1561921
caccgaaucgugcgcuuua

SEQ ID NO: 1708354 - RNA, 19 nt, Artificial Sequence
  Description of Artificial Sequence: Synthetic oligonucleotide
  Antisense strand to SEQ ID NO: 1708353
uaaagcgcacgauucggug

SEQ ID NO: 1708355 - RNA, 19 nt, Artificial Sequence
  Description of Artificial Sequence: Synthetic oligonucleotide
  Sense strand starting at position 3639 of SEQ ID NO: 1561921
accgaaucgugcgcuuuaa

SEQ ID NO: 1708356 - RNA, 19 nt, Artificial Sequence
  Description of Artificial Sequence: Synthetic oligonucleotide
  Antisense strand to SEQ ID NO: 1708355
uuaaagcgcacgauucggu

SEQ ID NO: 1708357 - RNA, 19 nt, Artificial Sequence
  Description of Artificial Sequence: Synthetic oligonucleotide
  Sense strand starting at position 3640 of SEQ ID NO: 1561921
ccgaaucgugcgcuuuaag

SEQ ID NO: 1708358 - RNA, 19 nt, Artificial Sequence
  Description of Artificial Sequence: Synthetic oligonucleotide
  Antisense strand to SEQ ID NO: 1708357
cuuaaagcgcacgauucgg

SEQ ID NO: 1708359 - RNA, 19 nt, Artificial Sequence
  Description of Artificial Sequence: Synthetic oligonucleotide
  Sense strand starting at position 3651 of SEQ ID NO: 1561921
gcuuuaagcgggugaacuu

SEQ ID NO: 1708360 - RNA, 19 nt, Artificial Sequence
  Description of Artificial Sequence: Synthetic oligonucleotide
  Antisense strand to SEQ ID NO: 1708359
aaguucacccgcuuaaagc

SEQ ID NO: 1708361 - RNA, 19 nt, Artificial Sequence
  Description of Artificial Sequence: Synthetic oligonucleotide
  Sense strand starting at position 3666 of SEQ ID NO: 1561921
acuuaacggucucaauaaa

SEQ ID NO: 1708362 - RNA, 19 nt, Artificial Sequence
  Description of Artificial Sequence: Synthetic oligonucleotide
  Antisense strand to SEQ ID NO: 1708361
uuuauugagaccguuaagu

SEQ ID NO: 1708363 - RNA, 19 nt, Artificial Sequence
  Description of Artificial Sequence: Synthetic oligonucleotide
  Sense strand starting at position 3715 of SEQ ID NO: 1561921
ccacaauuacugcaggcau

SEQ ID NO: 1708364 - RNA, 19 nt, Artificial Sequence
  Description of Artificial Sequence: Synthetic oligonucleotide
  Antisense strand to SEQ ID NO: 1708363
augccugcaguaauugugg

SEQ ID NO: 1708365 - RNA, 19 nt, Artificial Sequence
  Description of Artificial Sequence: Synthetic oligonucleotide
  Sense strand starting at position 32 of SEQ ID NO: 1561922
ucuuauucuugagcuggga

SEQ ID NO: 1708366 - RNA, 19 nt, Artificial Sequence
  Description of Artificial Sequence: Synthetic oligonucleotide
  Antisense strand to SEQ ID NO: 1708365
ucccagcucaagaauaaga

SEQ ID NO: 1708367 - RNA, 19 nt, Artificial Sequence
  Description of Artificial Sequence: Synthetic oligonucleotide
  Sense strand starting at position 34 of SEQ ID NO: 1561922
uuauucuugagcugggaga

SEQ ID NO: 1708368 - RNA, 19 nt, Artificial Sequence
  Description of Artificial Sequence: Synthetic oligonucleotide
  Antisense strand to SEQ ID NO: 1708367
ucucccagcucaagaauaa

SEQ ID NO: 1708369 - RNA, 19 nt, Artificial Sequence
  Description of Artificial Sequence: Synthetic oligonucleotide
  Sense strand starting at position 35 of SEQ ID NO: 1561922
uauucuugagcugggagaa

SEQ ID NO: 1708370 - RNA, 19 nt, Artificial Sequence
  Description of Artificial Sequence: Synthetic oligonucleotide
  Antisense strand to SEQ ID NO: 1708369
uucucccagcucaagaaua

SEQ ID NO: 1708371 - RNA, 19 nt, Artificial Sequence
  Description of Artificial Sequence: Synthetic oligonucleotide
  Sense strand starting at position 36 of SEQ ID NO: 1561922
auucuugagcugggagaau

SEQ ID NO: 1708372 - RNA, 19 nt, Artificial Sequence
  Description of Artificial Sequence: Synthetic oligonucleotide
  Antisense strand to SEQ ID NO: 1708371
auucucccagcucaagaau

SEQ ID NO: 1708373 - RNA, 19 nt, Artificial Sequence
  Description of Artificial Sequence: Synthetic oligonucleotide
  Sense strand starting at position 45 of SEQ ID NO: 1561922
cugggagaauucuuuauau

SEQ ID NO: 1708374 - RNA, 19 nt, Artificial Sequence
  Description of Artificial Sequence: Synthetic oligonucleotide
  Antisense strand to SEQ ID NO: 1708373
auauaaagaauucucccag

SEQ ID NO: 1708375 - RNA, 19 nt, Artificial Sequence
  Description of Artificial Sequence: Synthetic oligonucleotide
  Sense strand starting at position 135 of SEQ ID NO: 1561922
ucugauauccacuaguuau

SEQ ID NO: 1708376 - RNA, 19 nt, Artificial Sequence
  Description of Artificial Sequence: Synthetic oligonucleotide
  Antisense strand to SEQ ID NO: 1708375
auaacuaguggauaucaga

SEQ ID NO: 1708377 - RNA, 19 nt, Artificial Sequence
  Description of Artificial Sequence: Synthetic oligonucleotide
  Sense strand starting at position 258 of SEQ ID NO: 1561922
aaggcuaguggcuaucaua

SEQ ID NO: 1708378 - RNA, 19 nt, Artificial Sequence
  Description of Artificial Sequence: Synthetic oligonucleotide
  Antisense strand to SEQ ID NO: 1708377
uaugauagccacuagccuu

SEQ ID NO: 1708379 - RNA, 19 nt, Artificial Sequence
  Description of Artificial Sequence: Synthetic oligonucleotide
  Sense strand starting at position 302 of SEQ ID NO: 1561922
ucccaugcgggauaacauu

SEQ ID NO: 1708380 - RNA, 19 nt, Artificial Sequence
  Description of Artificial Sequence: Synthetic oligonucleotide
  Antisense strand to SEQ ID NO: 1708379
aauguuaucccgcauggga

SEQ ID NO: 1708381 - RNA, 19 nt, Artificial Sequence
  Description of Artificial Sequence: Synthetic oligonucleotide
  Sense strand starting at position 310 of SEQ ID NO: 1561922
gggauaacauuugggacaa

SEQ ID NO: 1708382 - RNA, 19 nt, Artificial Sequence
  Description of Artificial Sequence: Synthetic oligonucleotide
  Antisense strand to SEQ ID NO: 1708381
uugucccaaauguuauccc

SEQ ID NO: 1708383 - RNA, 19 nt, Artificial Sequence
  Description of Artificial Sequence: Synthetic oligonucleotide
  Sense strand starting at position 311 of SEQ ID NO: 1561922
ggauaacauuugggacaau

SEQ ID NO: 1708384 - RNA, 19 nt, Artificial Sequence
  Description of Artificial Sequence: Synthetic oligonucleotide
  Antisense strand to SEQ ID NO: 1708383
auugucccaaauguuaucc

SEQ ID NO: 1708385 - RNA, 19 nt, Artificial Sequence
  Description of Artificial Sequence: Synthetic oligonucleotide
  Sense strand starting at position 345 of SEQ ID NO: 1561922
aguuauauugugcauacuu

SEQ ID NO: 1708386 - RNA, 19 nt, Artificial Sequence
  Description of Artificial Sequence: Synthetic oligonucleotide
  Antisense strand to SEQ ID NO: 1708385
aaguaugcacaauauaacu

SEQ ID NO: 1708387 - RNA, 19 nt, Artificial Sequence
  Description of Artificial Sequence: Synthetic oligonucleotide
  Sense strand starting at position 445 of SEQ ID NO: 1561922
augggauuagccuguaauc

SEQ ID NO: 1708388 - RNA, 19 nt, Artificial Sequence
  Description of Artificial Sequence: Synthetic oligonucleotide
  Antisense strand to SEQ ID NO: 1708387
gauuacaggcuaaucccau

SEQ ID NO: 1708389 - RNA, 19 nt, Artificial Sequence
  Description of Artificial Sequence: Synthetic oligonucleotide
  Sense strand starting at position 447 of SEQ ID NO: 1561922
gggauuagccuguaaucuc

SEQ ID NO: 1708390 - RNA, 19 nt, Artificial Sequence
  Description of Artificial Sequence: Synthetic oligonucleotide
  Antisense strand to SEQ ID NO: 1708389
gagauuacaggcuaauccc

SEQ ID NO: 1708391 - RNA, 19 nt, Artificial Sequence
  Description of Artificial Sequence: Synthetic oligonucleotide
  Sense strand starting at position 740 of SEQ ID NO: 1561922
agaaauaaugcuuguagag

SEQ ID NO: 1708392 - RNA, 19 nt, Artificial Sequence
  Description of Artificial Sequence: Synthetic oligonucleotide
  Antisense strand to SEQ ID NO: 1708391
cucuacaagcauuauuucu

SEQ ID NO: 1708393 - RNA, 19 nt, Artificial Sequence
  Description of Artificial Sequence: Synthetic oligonucleotide
  Sense strand starting at position 774 of SEQ ID NO: 1561922
cggguuauacuguaaacau

SEQ ID NO: 1708394 - RNA, 19 nt, Artificial Sequence
  Description of Artificial Sequence: Synthetic oligonucleotide
  Antisense strand to SEQ ID NO: 1708393
auguuuacaguauaacccg

SEQ ID NO: 1708395 - RNA, 19 nt, Artificial Sequence
  Description of Artificial Sequence: Synthetic oligonucleotide
  Sense strand starting at position 866 of SEQ ID NO: 1561922
cuaauauguucucuaugag

SEQ ID NO: 1708396 - RNA, 19 nt, Artificial Sequence
  Description of Artificial Sequence: Synthetic oligonucleotide
  Antisense strand to SEQ ID NO: 1708395
cucauagagaacauauuag

SEQ ID NO: 1708397 - RNA, 19 nt, Artificial Sequence
  Description of Artificial Sequence: Synthetic oligonucleotide
  Sense strand starting at position 869 of SEQ ID NO: 1561922
auauguucucuaugaguca

SEQ ID NO: 1708398 - RNA, 19 nt, Artificial Sequence
  Description of Artificial Sequence: Synthetic oligonucleotide
  Antisense strand to SEQ ID NO: 1708397
ugacucauagagaacauau

SEQ ID NO: 1708399 - RNA, 19 nt, Artificial Sequence
  Description of Artificial Sequence: Synthetic oligonucleotide
  Sense strand starting at position 923 of SEQ ID NO: 1561922
guaggucaguuauuaacaa

SEQ ID NO: 1708400 - RNA, 19 nt, Artificial Sequence
  Description of Artificial Sequence: Synthetic oligonucleotide
  Antisense strand to SEQ ID NO: 1708399
uuguuaauaacugaccuac

SEQ ID NO: 1708401 - RNA, 19 nt, Artificial Sequence
  Description of Artificial Sequence: Synthetic oligonucleotide
  Sense strand starting at position 2238 of SEQ ID NO: 1561922
gagcauaaguucucaagug

SEQ ID NO: 1708402 - RNA, 19 nt, Artificial Sequence
  Description of Artificial Sequence: Synthetic oligonucleotide
  Antisense strand to SEQ ID NO: 1708401
cacuugagaacuuaugcuc

SEQ ID NO: 1708403 - RNA, 19 nt, Artificial Sequence
  Description of Artificial Sequence: Synthetic oligonucleotide
  Sense strand starting at position 2254 of SEQ ID NO: 1561922
gugacacucuaggugcaaa

SEQ ID NO: 1708404 - RNA, 19 nt, Artificial Sequence
  Description of Artificial Sequence: Synthetic oligonucleotide
  Antisense strand to SEQ ID NO: 1708403
uuugcaccuagagugucac

SEQ ID NO: 1708405 - RNA, 19 nt, Artificial Sequence
  Description of Artificial Sequence: Synthetic oligonucleotide
  Sense strand starting at position 2360 of SEQ ID NO: 1561922
agucaaauuagucacguua

SEQ ID NO: 1708406 - RNA, 19 nt, Artificial Sequence
  Description of Artificial Sequence: Synthetic oligonucleotide
  Antisense strand to SEQ ID NO: 1708405
uaacgugacuaauuugacu

SEQ ID NO: 1708407 - RNA, 19 nt, Artificial Sequence
  Description of Artificial Sequence: Synthetic oligonucleotide
  Sense strand starting at position 2373 of SEQ ID NO: 1561922
acguuaucugccucguuga

SEQ ID NO: 1708408 - RNA, 19 nt, Artificial Sequence
  Description of Artificial Sequence: Synthetic oligonucleotide
  Antisense strand to SEQ ID NO: 1708407
ucaacgaggcagauaacgu

SEQ ID NO: 1708409 - RNA, 19 nt, Artificial Sequence
  Description of Artificial Sequence: Synthetic oligonucleotide
  Sense strand starting at position 2375 of SEQ ID NO: 1561922
guuaucugccucguugagu

SEQ ID NO: 1708410 - RNA, 19 nt, Artificial Sequence
  Description of Artificial Sequence: Synthetic oligonucleotide
  Antisense strand to SEQ ID NO: 1708409
acucaacgaggcagauaac

SEQ ID NO: 1708411 - RNA, 19 nt, Artificial Sequence
  Description of Artificial Sequence: Synthetic oligonucleotide
  Sense strand starting at position 2457 of SEQ ID NO: 1561922
cuaaguuaacugcauugga

SEQ ID NO: 1708412 - RNA, 19 nt, Artificial Sequence
  Description of Artificial Sequence: Synthetic oligonucleotide
  Antisense strand to SEQ ID NO: 1708411
uccaaugcaguuaacuuag

SEQ ID NO: 1708413 - RNA, 19 nt, Artificial Sequence
  Description of Artificial Sequence: Synthetic oligonucleotide
  Sense strand starting at position 2460 of SEQ ID NO: 1561922
aguuaacugcauuggaagu

SEQ ID NO: 1708414 - RNA, 19 nt, Artificial Sequence
  Description of Artificial Sequence: Synthetic oligonucleotide
  Antisense strand to SEQ ID NO: 1708413
acuuccaaugcaguuaacu

SEQ ID NO: 1708415 - RNA, 19 nt, Artificial Sequence
  Description of Artificial Sequence: Synthetic oligonucleotide
  Sense strand starting at position 2659 of SEQ ID NO: 1561922
aggauaguaaagugguuaa

SEQ ID NO: 1708416 - RNA, 19 nt, Artificial Sequence
  Description of Artificial Sequence: Synthetic oligonucleotide
  Antisense strand to SEQ ID NO: 1708415
uuaaccacuuuacuauccu

SEQ ID NO: 1708417 - RNA, 19 nt, Artificial Sequence
  Description of Artificial Sequence: Synthetic oligonucleotide
  Sense strand starting at position 2764 of SEQ ID NO: 1561922
uggucugugaaaugcagaa

SEQ ID NO: 1708418 - RNA, 19 nt, Artificial Sequence
  Description of Artificial Sequence: Synthetic oligonucleotide
  Antisense strand to SEQ ID NO: 1708417
uucugcauuucacagacca

SEQ ID NO: 1708419 - RNA, 19 nt, Artificial Sequence
  Description of Artificial Sequence: Synthetic oligonucleotide
  Sense strand starting at position 2816 of SEQ ID NO: 1561922
aaugauuuggugugugcaa

SEQ ID NO: 1708420 - RNA, 19 nt, Artificial Sequence
  Description of Artificial Sequence: Synthetic oligonucleotide
  Antisense strand to SEQ ID NO: 1708419
uugcacacaccaaaucauu

SEQ ID NO: 1708421 - RNA, 19 nt, Artificial Sequence
  Description of Artificial Sequence: Synthetic oligonucleotide
  Sense strand starting at position 2901 of SEQ ID NO: 1561922
ucucguuaacauggaguga

SEQ ID NO: 1708422 - RNA, 19 nt, Artificial Sequence
  Description of Artificial Sequence: Synthetic oligonucleotide
  Antisense strand to SEQ ID NO: 1708421
ucacuccauguuaacgaga

SEQ ID NO: 1708423 - RNA, 19 nt, Artificial Sequence
  Description of Artificial Sequence: Synthetic oligonucleotide
  Sense strand starting at position 3104 of SEQ ID NO: 1561922
ucugauaggcuuugacuuu

SEQ ID NO: 1708424 - RNA, 19 nt, Artificial Sequence
  Description of Artificial Sequence: Synthetic oligonucleotide
  Antisense strand to SEQ ID NO: 1708423
aaagucaaagccuaucaga

SEQ ID NO: 1708425 - RNA, 19 nt, Artificial Sequence
  Description of Artificial Sequence: Synthetic oligonucleotide
  Sense strand starting at position 3110 of SEQ ID NO: 1561922
aggcuuugacuuugaauuc

SEQ ID NO: 1708426 - RNA, 19 nt, Artificial Sequence
  Description of Artificial Sequence: Synthetic oligonucleotide
  Antisense strand to SEQ ID NO: 1708425
gaauucaaagucaaagccu

SEQ ID NO: 1708427 - RNA, 19 nt, Artificial Sequence
  Description of Artificial Sequence: Synthetic oligonucleotide
  Sense strand starting at position 3120 of SEQ ID NO: 1561922
uuugaauucuagccagacu

SEQ ID NO: 1708428 - RNA, 19 nt, Artificial Sequence
  Description of Artificial Sequence: Synthetic oligonucleotide
  Antisense strand to SEQ ID NO: 1708427
agucuggcuagaauucaaa

SEQ ID NO: 1708429 - RNA, 19 nt, Artificial Sequence
  Description of Artificial Sequence: Synthetic oligonucleotide
  Sense strand starting at position 3194 of SEQ ID NO: 1561922
caucuucuggcuuggauua

SEQ ID NO: 1708430 - RNA, 19 nt, Artificial Sequence
  Description of Artificial Sequence: Synthetic oligonucleotide
  Antisense strand to SEQ ID NO: 1708429
uaauccaagccagaagaug

SEQ ID NO: 1708431 - RNA, 19 nt, Artificial Sequence
  Description of Artificial Sequence: Synthetic oligonucleotide
  Sense strand starting at position 3195 of SEQ ID NO: 1561922
aucuucuggcuuggauuau

SEQ ID NO: 1708432 - RNA, 19 nt, Artificial Sequence
  Description of Artificial Sequence: Synthetic oligonucleotide
  Antisense strand to SEQ ID NO: 1708431
auaauccaagccagaagau

SEQ ID NO: 1708433 - RNA, 19 nt, Artificial Sequence
  Description of Artificial Sequence: Synthetic oligonucleotide
  Sense strand starting at position 3264 of SEQ ID NO: 1561922
gucuguucuccacacagua

SEQ ID NO: 1708434 - RNA, 19 nt, Artificial Sequence
  Description of Artificial Sequence: Synthetic oligonucleotide
  Antisense strand to SEQ ID NO: 1708433
uacuguguggagaacagac

SEQ ID NO: 1708435 - RNA, 19 nt, Artificial Sequence
  Description of Artificial Sequence: Synthetic oligonucleotide
  Sense strand starting at position 3279 of SEQ ID NO: 1561922
aguauuguuuauucucaac

SEQ ID NO: 1708436 - RNA, 19 nt, Artificial Sequence
  Description of Artificial Sequence: Synthetic oligonucleotide
  Antisense strand to SEQ ID NO: 1708435
guugagaauaaacaauacu

SEQ ID NO: 1708437 - RNA, 19 nt, Artificial Sequence
  Description of Artificial Sequence: Synthetic oligonucleotide
  Sense strand starting at position 3304 of SEQ ID NO: 1561922
auaccauuagaguguaagu

SEQ ID NO: 1708438 - RNA, 19 nt, Artificial Sequence
  Description of Artificial Sequence: Synthetic oligonucleotide
  Antisense strand to SEQ ID NO: 1708437
acuuacacucuaaugguau

SEQ ID NO: 1708439 - RNA, 19 nt, Artificial Sequence
  Description of Artificial Sequence: Synthetic oligonucleotide
  Sense strand starting at position 3306 of SEQ ID NO: 1561922
accauuagaguguaaguca

SEQ ID NO: 1708440 - RNA, 19 nt, Artificial Sequence
  Description of Artificial Sequence: Synthetic oligonucleotide
  Antisense strand to SEQ ID NO: 1708439
ugacuuacacucuaauggu

SEQ ID NO: 1708441 - RNA, 19 nt, Artificial Sequence
  Description of Artificial Sequence: Synthetic oligonucleotide
  Sense strand starting at position 3309 of SEQ ID NO: 1561922
auuagaguguaagucaaau

SEQ ID NO: 1708442 - RNA, 19 nt, Artificial Sequence
  Description of Artificial Sequence: Synthetic oligonucleotide
  Antisense strand to SEQ ID NO: 1708441
auuugacuuacacucuaau

SEQ ID NO: 1708443 - RNA, 19 nt, Artificial Sequence
  Description of Artificial Sequence: Synthetic oligonucleotide
  Sense strand starting at position 3695 of SEQ ID NO: 1561922
cuggauuuguccucugcua

SEQ ID NO: 1708444 - RNA, 19 nt, Artificial Sequence
  Description of Artificial Sequence: Synthetic oligonucleotide
  Antisense strand to SEQ ID NO: 1708443
uagcagaggacaaauccag

SEQ ID NO: 1708445 - RNA, 19 nt, Artificial Sequence
  Description of Artificial Sequence: Synthetic oligonucleotide
  Sense strand starting at position 288 of SEQ ID NO: 1561923
accucuuccuaucgggaga

SEQ ID NO: 1708446 - RNA, 19 nt, Artificial Sequence
  Description of Artificial Sequence: Synthetic oligonucleotide
  Antisense strand to SEQ ID NO: 1708445
ucucccgauaggaagaggu

SEQ ID NO: 1708447 - RNA, 19 nt, Artificial Sequence
  Description of Artificial Sequence: Synthetic oligonucleotide
  Sense strand starting at position 420 of SEQ ID NO: 1561923
gaacccagguccuauuuga

SEQ ID NO: 1708448 - RNA, 19 nt, Artificial Sequence
  Description of Artificial Sequence: Synthetic oligonucleotide
  Antisense strand to SEQ ID NO: 1708447
ucaaauaggaccuggguuc

SEQ ID NO: 1708449 - RNA, 19 nt, Artificial Sequence
  Description of Artificial Sequence: Synthetic oligonucleotide
  Sense strand starting at position 452 of SEQ ID NO: 1561923
cucccaguggagugauauc

SEQ ID NO: 1708450 - RNA, 19 nt, Artificial Sequence
  Description of Artificial Sequence: Synthetic oligonucleotide
  Antisense strand to SEQ ID NO: 1708449
gauaucacuccacugggag

SEQ ID NO: 1708451 - RNA, 19 nt, Artificial Sequence
  Description of Artificial Sequence: Synthetic oligonucleotide
  Sense strand starting at position 519 of SEQ ID NO: 1561923
ccgagugccagcuaugaaa

SEQ ID NO: 1708452 - RNA, 19 nt, Artificial Sequence
  Description of Artificial Sequence: Synthetic oligonucleotide
  Antisense strand to SEQ ID NO: 1708451
uuucauagcuggcacucgg

SEQ ID NO: 1708453 - RNA, 19 nt, Artificial Sequence
  Description of Artificial Sequence: Synthetic oligonucleotide
  Sense strand starting at position 543 of SEQ ID NO: 1561923
acguccugguaggugaaau

SEQ ID NO: 1708454 - RNA, 19 nt, Artificial Sequence
  Description of Artificial Sequence: Synthetic oligonucleotide
  Antisense strand to SEQ ID NO: 1708453
auuucaccuaccaggacgu

SEQ ID NO: 1708455 - RNA, 19 nt, Artificial Sequence
  Description of Artificial Sequence: Synthetic oligonucleotide
  Sense strand starting at position 544 of SEQ ID NO: 1561923
cguccugguaggugaaauc

SEQ ID NO: 1708456 - RNA, 19 nt, Artificial Sequence
  Description of Artificial Sequence: Synthetic oligonucleotide
  Antisense strand to SEQ ID NO: 1708455
gauuucaccuaccaggacg

SEQ ID NO: 1708457 - RNA, 19 nt, Artificial Sequence
  Description of Artificial Sequence: Synthetic oligonucleotide
  Sense strand starting at position 755 of SEQ ID NO: 1561923
cugcgauuacuggcgcaca

SEQ ID NO: 1708458 - RNA, 19 nt, Artificial Sequence
  Description of Artificial Sequence: Synthetic oligonucleotide
  Antisense strand to SEQ ID NO: 1708457
ugugcgccaguaaucgcag

SEQ ID NO: 1708459 - RNA, 19 nt, Artificial Sequence
  Description of Artificial Sequence: Synthetic oligonucleotide
  Sense strand starting at position 994 of SEQ ID NO: 1561923
ugcuaauccuagccugaaa

SEQ ID NO: 1708460 - RNA, 19 nt, Artificial Sequence
  Description of Artificial Sequence: Synthetic oligonucleotide
  Antisense strand to SEQ ID NO: 1708459
uuucaggcuaggauuagca

SEQ ID NO: 1708461 - RNA, 19 nt, Artificial Sequence
  Description of Artificial Sequence: Synthetic oligonucleotide
  Sense strand starting at position 1183 of SEQ ID NO: 1561923
acuguaagucucugcacau

SEQ ID NO: 1708462 - RNA, 19 nt, Artificial Sequence
  Description of Artificial Sequence: Synthetic oligonucleotide
  Antisense strand to SEQ ID NO: 1708461
augugcagagacuuacagu

SEQ ID NO: 1708463 - RNA, 19 nt, Artificial Sequence
  Description of Artificial Sequence: Synthetic oligonucleotide
  Sense strand starting at position 1184 of SEQ ID NO: 1561923
cuguaagucucugcacaua

SEQ ID NO: 1708464 - RNA, 19 nt, Artificial Sequence
  Description of Artificial Sequence: Synthetic oligonucleotide
  Antisense strand to SEQ ID NO: 1708463
uaugugcagagacuuacag

SEQ ID NO: 1708465 - RNA, 19 nt, Artificial Sequence
  Description of Artificial Sequence: Synthetic oligonucleotide
  Sense strand starting at position 1408 of SEQ ID NO: 1561923
cucgcuauccugugagggu

SEQ ID NO: 1708466 - RNA, 19 nt, Artificial Sequence
  Description of Artificial Sequence: Synthetic oligonucleotide
  Antisense strand to SEQ ID NO: 1708465
acccucacaggauagcgag

SEQ ID NO: 1708467 - RNA, 19 nt, Artificial Sequence
  Description of Artificial Sequence: Synthetic oligonucleotide
  Sense strand starting at position 1412 of SEQ ID NO: 1561923
cuauccugugagggucaaa

SEQ ID NO: 1708468 - RNA, 19 nt, Artificial Sequence
  Description of Artificial Sequence: Synthetic oligonucleotide
  Antisense strand to SEQ ID NO: 1708467
uuugacccucacaggauag

SEQ ID NO: 1708469 - RNA, 19 nt, Artificial Sequence
  Description of Artificial Sequence: Synthetic oligonucleotide
  Sense strand starting at position 2071 of SEQ ID NO: 1561923
ggccguguggccucuggaa

SEQ ID NO: 1708470 - RNA, 19 nt, Artificial Sequence
  Description of Artificial Sequence: Synthetic oligonucleotide
  Antisense strand to SEQ ID NO: 1708469
uuccagaggccacacggcc

SEQ ID NO: 1708471 - RNA, 19 nt, Artificial Sequence
  Description of Artificial Sequence: Synthetic oligonucleotide
  Sense strand starting at position 2262 of SEQ ID NO: 1561923
gacagaacucgacgcaaca

SEQ ID NO: 1708472 - RNA, 19 nt, Artificial Sequence
  Description of Artificial Sequence: Synthetic oligonucleotide
  Antisense strand to SEQ ID NO: 1708471
uguugcgucgaguucuguc

SEQ ID NO: 1708473 - RNA, 19 nt, Artificial Sequence
  Description of Artificial Sequence: Synthetic oligonucleotide
  Sense strand starting at position 2362 of SEQ ID NO: 1561923
gcggucaugucucaggaca

SEQ ID NO: 1708474 - RNA, 19 nt, Artificial Sequence
  Description of Artificial Sequence: Synthetic oligonucleotide
  Antisense strand to SEQ ID NO: 1708473
uguccugagacaugaccgc

SEQ ID NO: 1708475 - RNA, 19 nt, Artificial Sequence
  Description of Artificial Sequence: Synthetic oligonucleotide
  Sense strand starting at position 2364 of SEQ ID NO: 1561923
ggucaugucucaggacacu

SEQ ID NO: 1708476 - RNA, 19 nt, Artificial Sequence
  Description of Artificial Sequence: Synthetic oligonucleotide
  Antisense strand to SEQ ID NO: 1708475
aguguccugagacaugacc

SEQ ID NO: 1708477 - RNA, 19 nt, Artificial Sequence
  Description of Artificial Sequence: Synthetic oligonucleotide
  Sense strand starting at position 2479 of SEQ ID NO: 1561923
cccguagaagccugaggau

SEQ ID NO: 1708478 - RNA, 19 nt, Artificial Sequence
  Description of Artificial Sequence: Synthetic oligonucleotide
  Antisense strand to SEQ ID NO: 1708477
auccucaggcuucuacggg

SEQ ID NO: 1708479 - RNA, 19 nt, Artificial Sequence
  Description of Artificial Sequence: Synthetic oligonucleotide
  Sense strand starting at position 2587 of SEQ ID NO: 1561923
cacaaaucaggcgguaaga

SEQ ID NO: 1708480 - RNA, 19 nt, Artificial Sequence
  Description of Artificial Sequence: Synthetic oligonucleotide
  Antisense strand to SEQ ID NO: 1708479
ucuuaccgccugauuugug

SEQ ID NO: 1708481 - RNA, 19 nt, Artificial Sequence
  Description of Artificial Sequence: Synthetic oligonucleotide
  Sense strand starting at position 2597 of SEQ ID NO: 1561923
gcgguaagacauugccuca

SEQ ID NO: 1708482 - RNA, 19 nt, Artificial Sequence
  Description of Artificial Sequence: Synthetic oligonucleotide
  Antisense strand to SEQ ID NO: 1708481
ugaggcaaugucuuaccgc

SEQ ID NO: 1708483 - RNA, 19 nt, Artificial Sequence
  Description of Artificial Sequence: Synthetic oligonucleotide
  Sense strand starting at position 2600 of SEQ ID NO: 1561923
guaagacauugccucauag

SEQ ID NO: 1708484 - RNA, 19 nt, Artificial Sequence
  Description of Artificial Sequence: Synthetic oligonucleotide
  Antisense strand to SEQ ID NO: 1708483
cuaugaggcaaugucuuac

SEQ ID NO: 1708485 - RNA, 19 nt, Artificial Sequence
  Description of Artificial Sequence: Synthetic oligonucleotide
  Sense strand starting at position 2654 of SEQ ID NO: 1561923
ccugaugcacuguaaaugu

SEQ ID NO: 1708486 - RNA, 19 nt, Artificial Sequence
  Description of Artificial Sequence: Synthetic oligonucleotide
  Antisense strand to SEQ ID NO: 1708485
acauuuacagugcaucagg

SEQ ID NO: 1708487 - RNA, 19 nt, Artificial Sequence
  Description of Artificial Sequence: Synthetic oligonucleotide
  Sense strand starting at position 2737 of SEQ ID NO: 1561923
ucugcagucccugagaugu

SEQ ID NO: 1708488 - RNA, 19 nt, Artificial Sequence
  Description of Artificial Sequence: Synthetic oligonucleotide
  Antisense strand to SEQ ID NO: 1708487
acaucucagggacugcaga

SEQ ID NO: 1708489 - RNA, 19 nt, Artificial Sequence
  Description of Artificial Sequence: Synthetic oligonucleotide
  Sense strand starting at position 2747 of SEQ ID NO: 1561923
cugagauguuccuagugca

SEQ ID NO: 1708490 - RNA, 19 nt, Artificial Sequence
  Description of Artificial Sequence: Synthetic oligonucleotide
  Antisense strand to SEQ ID NO: 1708489
ugcacuaggaacaucucag

SEQ ID NO: 1708491 - RNA, 19 nt, Artificial Sequence
  Description of Artificial Sequence: Synthetic oligonucleotide
  Sense strand starting at position 2750 of SEQ ID NO: 1561923
agauguuccuagugcacau

SEQ ID NO: 1708492 - RNA, 19 nt, Artificial Sequence
  Description of Artificial Sequence: Synthetic oligonucleotide
  Antisense strand to SEQ ID NO: 1708491
augugcacuaggaacaucu

SEQ ID NO: 1708493 - RNA, 19 nt, Artificial Sequence
  Description of Artificial Sequence: Synthetic oligonucleotide
  Sense strand starting at position 2792 of SEQ ID NO: 1561923
ggcccuguugucuguuuga

SEQ ID NO: 1708494 - RNA, 19 nt, Artificial Sequence
  Description of Artificial Sequence: Synthetic oligonucleotide
  Antisense strand to SEQ ID NO: 1708493
ucaaacagacaacagggcc

SEQ ID NO: 1708495 - RNA, 19 nt, Artificial Sequence
  Description of Artificial Sequence: Synthetic oligonucleotide
  Sense strand starting at position 2860 of SEQ ID NO: 1561923
ucaagacagucauuggcuu

SEQ ID NO: 1708496 - RNA, 19 nt, Artificial Sequence
  Description of Artificial Sequence: Synthetic oligonucleotide
  Antisense strand to SEQ ID NO: 1708495
aagccaaugacugucuuga

SEQ ID NO: 1708497 - RNA, 19 nt, Artificial Sequence
  Description of Artificial Sequence: Synthetic oligonucleotide
  Sense strand starting at position 2864 of SEQ ID NO: 1561923
gacagucauuggcuuguca

SEQ ID NO: 1708498 - RNA, 19 nt, Artificial Sequence
  Description of Artificial Sequence: Synthetic oligonucleotide
  Antisense strand to SEQ ID NO: 1708497
ugacaagccaaugacuguc

SEQ ID NO: 1708499 - RNA, 19 nt, Artificial Sequence
  Description of Artificial Sequence: Synthetic oligonucleotide
  Sense strand starting at position 2868 of SEQ ID NO: 1561923
gucauuggcuugucaggau

SEQ ID NO: 1708500 - RNA, 19 nt, Artificial Sequence
  Description of Artificial Sequence: Synthetic oligonucleotide
  Antisense strand to SEQ ID NO: 1708499
auccugacaagccaaugac

SEQ ID NO: 1708501 - RNA, 19 nt, Artificial Sequence
  Description of Artificial Sequence: Synthetic oligonucleotide
  Sense strand starting at position 2880 of SEQ ID NO: 1561923
ucaggaugccugugggauc

SEQ ID NO: 1708502 - RNA, 19 nt, Artificial Sequence
  Description of Artificial Sequence: Synthetic oligonucleotide
  Antisense strand to SEQ ID NO: 1708501
gaucccacaggcauccuga

SEQ ID NO: 1708503 - RNA, 19 nt, Artificial Sequence
  Description of Artificial Sequence: Synthetic oligonucleotide
  Sense strand starting at position 2937 of SEQ ID NO: 1561923
cuagucuacuagugacuuu

SEQ ID NO: 1708504 - RNA, 19 nt, Artificial Sequence
  Description of Artificial Sequence: Synthetic oligonucleotide
  Antisense strand to SEQ ID NO: 1708503
aaagucacuaguagacuag

SEQ ID NO: 1708505 - RNA, 19 nt, Artificial Sequence
  Description of Artificial Sequence: Synthetic oligonucleotide
  Sense strand starting at position 2944 of SEQ ID NO: 1561923
acuagugacuuuggucuuu

SEQ ID NO: 1708506 - RNA, 19 nt, Artificial Sequence
  Description of Artificial Sequence: Synthetic oligonucleotide
  Antisense strand to SEQ ID NO: 1708505
aaagaccaaagucacuagu

SEQ ID NO: 1708507 - RNA, 19 nt, Artificial Sequence
  Description of Artificial Sequence: Synthetic oligonucleotide
  Sense strand starting at position 2946 of SEQ ID NO: 1561923
uagugacuuuggucuuuaa

SEQ ID NO: 1708508 - RNA, 19 nt, Artificial Sequence
  Description of Artificial Sequence: Synthetic oligonucleotide
  Antisense strand to SEQ ID NO: 1708507
uuaaagaccaaagucacua

SEQ ID NO: 1708509 - RNA, 19 nt, Artificial Sequence
  Description of Artificial Sequence: Synthetic oligonucleotide
  Sense strand starting at position 2964 of SEQ ID NO: 1561923
acccaagugcuuuguaaau

SEQ ID NO: 1708510 - RNA, 19 nt, Artificial Sequence
  Description of Artificial Sequence: Synthetic oligonucleotide
  Antisense strand to SEQ ID NO: 1708509
auuuacaaagcacuugggu

SEQ ID NO: 1708511 - RNA, 19 nt, Artificial Sequence
  Description of Artificial Sequence: Synthetic oligonucleotide
  Sense strand starting at position 2966 of SEQ ID NO: 1561923
ccaagugcuuuguaaauug

SEQ ID NO: 1708512 - RNA, 19 nt, Artificial Sequence
  Description of Artificial Sequence: Synthetic oligonucleotide
  Antisense strand to SEQ ID NO: 1708511
caauuuacaaagcacuugg

SEQ ID NO: 1708513 - RNA, 19 nt, Artificial Sequence
  Description of Artificial Sequence: Synthetic oligonucleotide
  Sense strand starting at position 2975 of SEQ ID NO: 1561923
uuguaaauugucuagaauc

SEQ ID NO: 1708514 - RNA, 19 nt, Artificial Sequence
  Description of Artificial Sequence: Synthetic oligonucleotide
  Antisense strand to SEQ ID NO: 1708513
gauucuagacaauuuacaa

SEQ ID NO: 1708515 - RNA, 19 nt, Artificial Sequence
  Description of Artificial Sequence: Synthetic oligonucleotide
  Sense strand starting at position 2977 of SEQ ID NO: 1561923
guaaauugucuagaauccu

SEQ ID NO: 1708516 - RNA, 19 nt, Artificial Sequence
  Description of Artificial Sequence: Synthetic oligonucleotide
  Antisense strand to SEQ ID NO: 1708515
aggauucuagacaauuuac

SEQ ID NO: 1708517 - RNA, 19 nt, Artificial Sequence
  Description of Artificial Sequence: Synthetic oligonucleotide
  Sense strand starting at position 2986 of SEQ ID NO: 1561923
cuagaauccuccugggaaa

SEQ ID NO: 1708518 - RNA, 19 nt, Artificial Sequence
  Description of Artificial Sequence: Synthetic oligonucleotide
  Antisense strand to SEQ ID NO: 1708517
uuucccaggaggauucuag

SEQ ID NO: 1708519 - RNA, 19 nt, Artificial Sequence
  Description of Artificial Sequence: Synthetic oligonucleotide
  Sense strand starting at position 2989 of SEQ ID NO: 1561923
gaauccuccugggaaauag

SEQ ID NO: 1708520 - RNA, 19 nt, Artificial Sequence
  Description of Artificial Sequence: Synthetic oligonucleotide
  Antisense strand to SEQ ID NO: 1708519
cuauuucccaggaggauuc

SEQ ID NO: 1708521 - RNA, 19 nt, Artificial Sequence
  Description of Artificial Sequence: Synthetic oligonucleotide
  Sense strand starting at position 3079 of SEQ ID NO: 1561923
gggcaucucagugguguuu

SEQ ID NO: 1708522 - RNA, 19 nt, Artificial Sequence
  Description of Artificial Sequence: Synthetic oligonucleotide
  Antisense strand to SEQ ID NO: 1708521
aaacaccacugagaugccc

SEQ ID NO: 1708523 - RNA, 19 nt, Artificial Sequence
  Description of Artificial Sequence: Synthetic oligonucleotide
  Sense strand starting at position 3610 of SEQ ID NO: 1561923
ggccauggcugcucuaaug

SEQ ID NO: 1708524 - RNA, 19 nt, Artificial Sequence
  Description of Artificial Sequence: Synthetic oligonucleotide
  Antisense strand to SEQ ID NO: 1708523
cauuagagcagccauggcc

SEQ ID NO: 1708525 - RNA, 19 nt, Artificial Sequence
  Description of Artificial Sequence: Synthetic oligonucleotide
  Sense strand starting at position 212 of SEQ ID NO: 1561924
uuaaauguauuccuaacga

SEQ ID NO: 1708526 - RNA, 19 nt, Artificial Sequence
  Description of Artificial Sequence: Synthetic oligonucleotide
  Antisense strand to SEQ ID NO: 1708525
ucguuaggaauacauuuaa

SEQ ID NO: 1708527 - RNA, 19 nt, Artificial Sequence
  Description of Artificial Sequence: Synthetic oligonucleotide
  Sense strand starting at position 216 of SEQ ID NO: 1561924
auguauuccuaacgauaau

SEQ ID NO: 1708528 - RNA, 19 nt, Artificial Sequence
  Description of Artificial Sequence: Synthetic oligonucleotide
  Antisense strand to SEQ ID NO: 1708527
auuaucguuaggaauacau

SEQ ID NO: 1708529 - RNA, 19 nt, Artificial Sequence
  Description of Artificial Sequence: Synthetic oligonucleotide
  Sense strand starting at position 538 of SEQ ID NO: 1561924
ccaccaguuccaggcuaaa

SEQ ID NO: 1708530 - RNA, 19 nt, Artificial Sequence
  Description of Artificial Sequence: Synthetic oligonucleotide
  Antisense strand to SEQ ID NO: 1708529
uuuagccuggaacuggugg

SEQ ID NO: 1708531 - RNA, 19 nt, Artificial Sequence
  Description of Artificial Sequence: Synthetic oligonucleotide
  Sense strand starting at position 589 of SEQ ID NO: 1561924
ugcaaacggucccuuuaua

SEQ ID NO: 1708532 - RNA, 19 nt, Artificial Sequence
  Description of Artificial Sequence: Synthetic oligonucleotide
  Antisense strand to SEQ ID NO: 1708531
uauaaagggaccguuugca

SEQ ID NO: 1708533 - RNA, 19 nt, Artificial Sequence
  Description of Artificial Sequence: Synthetic oligonucleotide
  Sense strand starting at position 621 of SEQ ID NO: 1561924
uccuccugugagcaugaaa

SEQ ID NO: 1708534 - RNA, 19 nt, Artificial Sequence
  Description of Artificial Sequence: Synthetic oligonucleotide
  Antisense strand to SEQ ID NO: 1708533
uuucaugcucacaggagga

SEQ ID NO: 1708535 - RNA, 19 nt, Artificial Sequence
  Description of Artificial Sequence: Synthetic oligonucleotide
  Sense strand starting at position 947 of SEQ ID NO: 1561924
gcggaaaccugauucuuga

SEQ ID NO: 1708536 - RNA, 19 nt, Artificial Sequence
  Description of Artificial Sequence: Synthetic oligonucleotide
  Antisense strand to SEQ ID NO: 1708535
ucaagaaucagguuuccgc

SEQ ID NO: 1708537 - RNA, 19 nt, Artificial Sequence
  Description of Artificial Sequence: Synthetic oligonucleotide
  Sense strand starting at position 1093 of SEQ ID NO: 1561924
ggaaucuucucacugaggu

SEQ ID NO: 1708538 - RNA, 19 nt, Artificial Sequence
  Description of Artificial Sequence: Synthetic oligonucleotide
  Antisense strand to SEQ ID NO: 1708537
accucagugagaagauucc

SEQ ID NO: 1708539 - RNA, 19 nt, Artificial Sequence
  Description of Artificial Sequence: Synthetic oligonucleotide
  Sense strand starting at position 1094 of SEQ ID NO: 1561924
gaaucuucucacugagguu

SEQ ID NO: 1708540 - RNA, 19 nt, Artificial Sequence
  Description of Artificial Sequence: Synthetic oligonucleotide
  Antisense strand to SEQ ID NO: 1708539
aaccucagugagaagauuc

SEQ ID NO: 1708541 - RNA, 19 nt, Artificial Sequence
  Description of Artificial Sequence: Synthetic oligonucleotide
  Sense strand starting at position 1173 of SEQ ID NO: 1561924
gcccaaguuucgcuacguu

SEQ ID NO: 1708542 - RNA, 19 nt, Artificial Sequence
  Description of Artificial Sequence: Synthetic oligonucleotide
  Antisense strand to SEQ ID NO: 1708541
aacguagcgaaacuugggc

SEQ ID NO: 1708543 - RNA, 19 nt, Artificial Sequence
  Description of Artificial Sequence: Synthetic oligonucleotide
  Sense strand starting at position 1185 of SEQ ID NO: 1561924
cuacguucucucugcuaaa

SEQ ID NO: 1708544 - RNA, 19 nt, Artificial Sequence
  Description of Artificial Sequence: Synthetic oligonucleotide
  Antisense strand to SEQ ID NO: 1708543
uuuagcagagagaacguag

SEQ ID NO: 1708545 - RNA, 19 nt, Artificial Sequence
  Description of Artificial Sequence: Synthetic oligonucleotide
  Sense strand starting at position 1218 of SEQ ID NO: 1561924
ggacgaaccugcguuuaaa

SEQ ID NO: 1708546 - RNA, 19 nt, Artificial Sequence
  Description of Artificial Sequence: Synthetic oligonucleotide
  Antisense strand to SEQ ID NO: 1708545
uuuaaacgcagguucgucc

SEQ ID NO: 1708547 - RNA, 19 nt, Artificial Sequence
  Description of Artificial Sequence: Synthetic oligonucleotide
  Sense strand starting at position 1300 of SEQ ID NO: 1561924
guauuucucuagugacacu

SEQ ID NO: 1708548 - RNA, 19 nt, Artificial Sequence
  Description of Artificial Sequence: Synthetic oligonucleotide
  Antisense strand to SEQ ID NO: 1708547
agugucacuagagaaauac

SEQ ID NO: 1708549 - RNA, 19 nt, Artificial Sequence
  Description of Artificial Sequence: Synthetic oligonucleotide
  Sense strand starting at position 1343 of SEQ ID NO: 1561924
ccuacaggucugugugaac

SEQ ID NO: 1708550 - RNA, 19 nt, Artificial Sequence
  Description of Artificial Sequence: Synthetic oligonucleotide
  Antisense strand to SEQ ID NO: 1708549
guucacacagaccuguagg

SEQ ID NO: 1708551 - RNA, 19 nt, Artificial Sequence
  Description of Artificial Sequence: Synthetic oligonucleotide
  Sense strand starting at position 1389 of SEQ ID NO: 1561924
gaacguaaaugggaauaga

SEQ ID NO: 1708552 - RNA, 19 nt, Artificial Sequence
  Description of Artificial Sequence: Synthetic oligonucleotide
  Antisense strand to SEQ ID NO: 1708551
ucuauucccauuuacguuc

SEQ ID NO: 1708553 - RNA, 19 nt, Artificial Sequence
  Description of Artificial Sequence: Synthetic oligonucleotide
  Sense strand starting at position 1450 of SEQ ID NO: 1561924
gugaauuaucuggaaaugc

SEQ ID NO: 1708554 - RNA, 19 nt, Artificial Sequence
  Description of Artificial Sequence: Synthetic oligonucleotide
  Antisense strand to SEQ ID NO: 1708553
gcauuuccagauaauucac

SEQ ID NO: 1708555 - RNA, 19 nt, Artificial Sequence
  Description of Artificial Sequence: Synthetic oligonucleotide
  Sense strand starting at position 1473 of SEQ ID NO: 1561924
cccugaggcgcguuuacaa

SEQ ID NO: 1708556 - RNA, 19 nt, Artificial Sequence
  Description of Artificial Sequence: Synthetic oligonucleotide
  Antisense strand to SEQ ID NO: 1708555
uuguaaacgcgccucaggg

SEQ ID NO: 1708557 - RNA, 19 nt, Artificial Sequence
  Description of Artificial Sequence: Synthetic oligonucleotide
  Sense strand starting at position 1515 of SEQ ID NO: 1561924
ucauccaaauguguauaua

SEQ ID NO: 1708558 - RNA, 19 nt, Artificial Sequence
  Description of Artificial Sequence: Synthetic oligonucleotide
  Antisense strand to SEQ ID NO: 1708557
uauauacacauuuggauga

SEQ ID NO: 1708559 - RNA, 19 nt, Artificial Sequence
  Description of Artificial Sequence: Synthetic oligonucleotide
  Sense strand starting at position 1549 of SEQ ID NO: 1561924
gcaacuguauacugccaau

SEQ ID NO: 1708560 - RNA, 19 nt, Artificial Sequence
  Description of Artificial Sequence: Synthetic oligonucleotide
  Antisense strand to SEQ ID NO: 1708559
auuggcaguauacaguugc

SEQ ID NO: 1708561 - RNA, 19 nt, Artificial Sequence
  Description of Artificial Sequence: Synthetic oligonucleotide
  Sense strand starting at position 1588 of SEQ ID NO: 1561924
uacuuagagcgcuggauca

SEQ ID NO: 1708562 - RNA, 19 nt, Artificial Sequence
  Description of Artificial Sequence: Synthetic oligonucleotide
  Antisense strand to SEQ ID NO: 1708561
ugauccagcgcucuaagua

SEQ ID NO: 1708563 - RNA, 19 nt, Artificial Sequence
  Description of Artificial Sequence: Synthetic oligonucleotide
  Sense strand starting at position 1646 of SEQ ID NO: 1561924
gcacccaucccgugacaga

SEQ ID NO: 1708564 - RNA, 19 nt, Artificial Sequence
  Description of Artificial Sequence: Synthetic oligonucleotide
  Antisense strand to SEQ ID NO: 1708563
ucugucacgggaugggugc

SEQ ID NO: 1708565 - RNA, 19 nt, Artificial Sequence
  Description of Artificial Sequence: Synthetic oligonucleotide
  Sense strand starting at position 1703 of SEQ ID NO: 1561924
acgcgguucugcggagaga

SEQ ID NO: 1708566 - RNA, 19 nt, Artificial Sequence
  Description of Artificial Sequence: Synthetic oligonucleotide
  Antisense strand to SEQ ID NO: 1708565
ucucuccgcagaaccgcgu

SEQ ID NO: 1708567 - RNA, 19 nt, Artificial Sequence
  Description of Artificial Sequence: Synthetic oligonucleotide
  Sense strand starting at position 1705 of SEQ ID NO: 1561924
gcgguucugcggagagagu

SEQ ID NO: 1708568 - RNA, 19 nt, Artificial Sequence
  Description of Artificial Sequence: Synthetic oligonucleotide
  Antisense strand to SEQ ID NO: 1708567
acucucuccgcagaaccgc

SEQ ID NO: 1708569 - RNA, 19 nt, Artificial Sequence
  Description of Artificial Sequence: Synthetic oligonucleotide
  Sense strand starting at position 2459 of SEQ ID NO: 1561924
ucuaccuggucucgguaau

SEQ ID NO: 1708570 - RNA, 19 nt, Artificial Sequence
  Description of Artificial Sequence: Synthetic oligonucleotide
  Antisense strand to SEQ ID NO: 1708569
auuaccgagaccagguaga

SEQ ID NO: 1708571 - RNA, 19 nt, Artificial Sequence
  Description of Artificial Sequence: Synthetic oligonucleotide
  Sense strand starting at position 2460 of SEQ ID NO: 1561924
cuaccuggucucgguaaua

SEQ ID NO: 1708572 - RNA, 19 nt, Artificial Sequence
  Description of Artificial Sequence: Synthetic oligonucleotide
  Antisense strand to SEQ ID NO: 1708571
uauuaccgagaccagguag

SEQ ID NO: 1708573 - RNA, 19 nt, Artificial Sequence
  Description of Artificial Sequence: Synthetic oligonucleotide
  Sense strand starting at position 2465 of SEQ ID NO: 1561924
uggucucgguaauaaguau

SEQ ID NO: 1708574 - RNA, 19 nt, Artificial Sequence
  Description of Artificial Sequence: Synthetic oligonucleotide
  Antisense strand to SEQ ID NO: 1708573
auacuuauuaccgagacca

SEQ ID NO: 1708575 - RNA, 19 nt, Artificial Sequence
  Description of Artificial Sequence: Synthetic oligonucleotide
  Sense strand starting at position 60 of SEQ ID NO: 1561925
guauguguaaguuaaauga

SEQ ID NO: 1708576 - RNA, 19 nt, Artificial Sequence
  Description of Artificial Sequence: Synthetic oligonucleotide
  Antisense strand to SEQ ID NO: 1708575
ucauuuaacuuacacauac

SEQ ID NO: 1708577 - RNA, 19 nt, Artificial Sequence
  Description of Artificial Sequence: Synthetic oligonucleotide
  Sense strand starting at position 91 of SEQ ID NO: 1561925
uagaacugauagcuggaua

SEQ ID NO: 1708578 - RNA, 19 nt, Artificial Sequence
  Description of Artificial Sequence: Synthetic oligonucleotide
  Antisense strand to SEQ ID NO: 1708577
uauccagcuaucaguucua

SEQ ID NO: 1708579 - RNA, 19 nt, Artificial Sequence
  Description of Artificial Sequence: Synthetic oligonucleotide
  Sense strand starting at position 149 of SEQ ID NO: 1561925
gcucauagugcgcugauua

SEQ ID NO: 1708580 - RNA, 19 nt, Artificial Sequence
  Description of Artificial Sequence: Synthetic oligonucleotide
  Antisense strand to SEQ ID NO: 1708579
uaaucagcgcacuaugagc

SEQ ID NO: 1708581 - RNA, 19 nt, Artificial Sequence
  Description of Artificial Sequence: Synthetic oligonucleotide
  Sense strand starting at position 159 of SEQ ID NO: 1561925
cgcugauuagugcauauuu

SEQ ID NO: 1708582 - RNA, 19 nt, Artificial Sequence
  Description of Artificial Sequence: Synthetic oligonucleotide
  Antisense strand to SEQ ID NO: 1708581
aaauaugcacuaaucagcg

SEQ ID NO: 1708583 - RNA, 19 nt, Artificial Sequence
  Description of Artificial Sequence: Synthetic oligonucleotide
  Sense strand starting at position 665 of SEQ ID NO: 1561925
cugggauggcaucaucuau

SEQ ID NO: 1708584 - RNA, 19 nt, Artificial Sequence
  Description of Artificial Sequence: Synthetic oligonucleotide
  Antisense strand to SEQ ID NO: 1708583
auagaugaugccaucccag

SEQ ID NO: 1708585 - RNA, 19 nt, Artificial Sequence
  Description of Artificial Sequence: Synthetic oligonucleotide
  Sense strand starting at position 738 of SEQ ID NO: 1561925
gaggaauguuaaguaggua

SEQ ID NO: 1708586 - RNA, 19 nt, Artificial Sequence
  Description of Artificial Sequence: Synthetic oligonucleotide
  Antisense strand to SEQ ID NO: 1708585
uaccuacuuaacauuccuc

SEQ ID NO: 1708587 - RNA, 19 nt, Artificial Sequence
  Description of Artificial Sequence: Synthetic oligonucleotide
  Sense strand starting at position 741 of SEQ ID NO: 1561925
gaauguuaaguagguagaa

SEQ ID NO: 1708588 - RNA, 19 nt, Artificial Sequence
  Description of Artificial Sequence: Synthetic oligonucleotide
  Antisense strand to SEQ ID NO: 1708587
uucuaccuacuuaacauuc

SEQ ID NO: 1708589 - RNA, 19 nt, Artificial Sequence
  Description of Artificial Sequence: Synthetic oligonucleotide
  Sense strand starting at position 742 of SEQ ID NO: 1561925
aauguuaaguagguagaaa

SEQ ID NO: 1708590 - RNA, 19 nt, Artificial Sequence
  Description of Artificial Sequence: Synthetic oligonucleotide
  Antisense strand to SEQ ID NO: 1708589
uuucuaccuacuuaacauu

SEQ ID NO: 1708591 - RNA, 19 nt, Artificial Sequence
  Description of Artificial Sequence: Synthetic oligonucleotide
  Sense strand starting at position 879 of SEQ ID NO: 1561925
cucuauugucgauauggac

SEQ ID NO: 1708592 - RNA, 19 nt, Artificial Sequence
  Description of Artificial Sequence: Synthetic oligonucleotide
  Antisense strand to SEQ ID NO: 1708591
guccauaucgacaauagag

SEQ ID NO: 1708593 - RNA, 19 nt, Artificial Sequence
  Description of Artificial Sequence: Synthetic oligonucleotide
  Sense strand starting at position 888 of SEQ ID NO: 1561925
cgauauggacucuaguaua

SEQ ID NO: 1708594 - RNA, 19 nt, Artificial Sequence
  Description of Artificial Sequence: Synthetic oligonucleotide
  Antisense strand to SEQ ID NO: 1708593
uauacuagaguccauaucg

SEQ ID NO: 1708595 - RNA, 19 nt, Artificial Sequence
  Description of Artificial Sequence: Synthetic oligonucleotide
  Sense strand starting at position 999 of SEQ ID NO: 1561925
uuguuaggagguugaauua

SEQ ID NO: 1708596 - RNA, 19 nt, Artificial Sequence
  Description of Artificial Sequence: Synthetic oligonucleotide
  Antisense strand to SEQ ID NO: 1708595
uaauucaaccuccuaacaa

SEQ ID NO: 1708597 - RNA, 19 nt, Artificial Sequence
  Description of Artificial Sequence: Synthetic oligonucleotide
  Sense strand starting at position 1108 of SEQ ID NO: 1561925
auuaaagcuccauaagguu

SEQ ID NO: 1708598 - RNA, 19 nt, Artificial Sequence
  Description of Artificial Sequence: Synthetic oligonucleotide
  Antisense strand to SEQ ID NO: 1708597
aaccuuauggagcuuuaau

SEQ ID NO: 1708599 - RNA, 19 nt, Artificial Sequence
  Description of Artificial Sequence: Synthetic oligonucleotide
  Sense strand starting at position 1275 of SEQ ID NO: 1561925
accacagcuguugaauaua

SEQ ID NO: 1708600 - RNA, 19 nt, Artificial Sequence
  Description of Artificial Sequence: Synthetic oligonucleotide
  Antisense strand to SEQ ID NO: 1708599
uauauucaacagcuguggu

SEQ ID NO: 1708601 - RNA, 19 nt, Artificial Sequence
  Description of Artificial Sequence: Synthetic oligonucleotide
  Sense strand starting at position 1422 of SEQ ID NO: 1561925
ggguuaacagugcaaauaa

SEQ ID NO: 1708602 - RNA, 19 nt, Artificial Sequence
  Description of Artificial Sequence: Synthetic oligonucleotide
  Antisense strand to SEQ ID NO: 1708601
uuauuugcacuguuaaccc

SEQ ID NO: 1708603 - RNA, 19 nt, Artificial Sequence
  Description of Artificial Sequence: Synthetic oligonucleotide
  Sense strand starting at position 1464 of SEQ ID NO: 1561925
uuaauauugggauguuaac

SEQ ID NO: 1708604 - RNA, 19 nt, Artificial Sequence
  Description of Artificial Sequence: Synthetic oligonucleotide
  Antisense strand to SEQ ID NO: 1708603
guuaacaucccaauauuaa

SEQ ID NO: 1708605 - RNA, 19 nt, Artificial Sequence
  Description of Artificial Sequence: Synthetic oligonucleotide
  Sense strand starting at position 1602 of SEQ ID NO: 1561925
ucaguagacugguuagaau

SEQ ID NO: 1708606 - RNA, 19 nt, Artificial Sequence
  Description of Artificial Sequence: Synthetic oligonucleotide
  Antisense strand to SEQ ID NO: 1708605
auucuaaccagucuacuga

SEQ ID NO: 1708607 - RNA, 19 nt, Artificial Sequence
  Description of Artificial Sequence: Synthetic oligonucleotide
  Sense strand starting at position 1629 of SEQ ID NO: 1561925
guuagauauugagcuuaaa

SEQ ID NO: 1708608 - RNA, 19 nt, Artificial Sequence
  Description of Artificial Sequence: Synthetic oligonucleotide
  Antisense strand to SEQ ID NO: 1708607
uuuaagcucaauaucuaac

SEQ ID NO: 1708609 - RNA, 19 nt, Artificial Sequence
  Description of Artificial Sequence: Synthetic oligonucleotide
  Sense strand starting at position 1733 of SEQ ID NO: 1561925
gucucucuagacuaacagu

SEQ ID NO: 1708610 - RNA, 19 nt, Artificial Sequence
  Description of Artificial Sequence: Synthetic oligonucleotide
  Antisense strand to SEQ ID NO: 1708609
acuguuagucuagagagac

SEQ ID NO: 1708611 - RNA, 19 nt, Artificial Sequence
  Description of Artificial Sequence: Synthetic oligonucleotide
  Sense strand starting at position 1750 of SEQ ID NO: 1561925
guuaaacuuacagggaguu

SEQ ID NO: 1708612 - RNA, 19 nt, Artificial Sequence
  Description of Artificial Sequence: Synthetic oligonucleotide
  Antisense strand to SEQ ID NO: 1708611
aacucccuguaaguuuaac

SEQ ID NO: 1708613 - RNA, 19 nt, Artificial Sequence
  Description of Artificial Sequence: Synthetic oligonucleotide
  Sense strand starting at position 1760 of SEQ ID NO: 1561925
cagggaguuuaaguaauuc

SEQ ID NO: 1708614 - RNA, 19 nt, Artificial Sequence
  Description of Artificial Sequence: Synthetic oligonucleotide
  Antisense strand to SEQ ID NO: 1708613
gaauuacuuaaacucccug

SEQ ID NO: 1708615 - RNA, 19 nt, Artificial Sequence
  Description of Artificial Sequence: Synthetic oligonucleotide
  Sense strand starting at position 1966 of SEQ ID NO: 1561925
augcauuaugcagaaggua

SEQ ID NO: 1708616 - RNA, 19 nt, Artificial Sequence
  Description of Artificial Sequence: Synthetic oligonucleotide
  Antisense strand to SEQ ID NO: 1708615
uaccuucugcauaaugcau

SEQ ID NO: 1708617 - RNA, 19 nt, Artificial Sequence
  Description of Artificial Sequence: Synthetic oligonucleotide
  Sense strand starting at position 2004 of SEQ ID NO: 1561925
uuuaguccucaauacaguu

SEQ ID NO: 1708618 - RNA, 19 nt, Artificial Sequence
  Description of Artificial Sequence: Synthetic oligonucleotide
  Antisense strand to SEQ ID NO: 1708617
aacuguauugaggacuaaa

SEQ ID NO: 1708619 - RNA, 19 nt, Artificial Sequence
  Description of Artificial Sequence: Synthetic oligonucleotide
  Sense strand starting at position 2048 of SEQ ID NO: 1561925
ugucuauugccagaaauau

SEQ ID NO: 1708620 - RNA, 19 nt, Artificial Sequence
  Description of Artificial Sequence: Synthetic oligonucleotide
  Antisense strand to SEQ ID NO: 1708619
auauuucuggcaauagaca

SEQ ID NO: 1708621 - RNA, 19 nt, Artificial Sequence
  Description of Artificial Sequence: Synthetic oligonucleotide
  Sense strand starting at position 2168 of SEQ ID NO: 1561925
gucugaguggucaggucau

SEQ ID NO: 1708622 - RNA, 19 nt, Artificial Sequence
  Description of Artificial Sequence: Synthetic oligonucleotide
  Antisense strand to SEQ ID NO: 1708621
augaccugaccacucagac

SEQ ID NO: 1708623 - RNA, 19 nt, Artificial Sequence
  Description of Artificial Sequence: Synthetic oligonucleotide
  Sense strand starting at position 2328 of SEQ ID NO: 1561925
uagaguaguauucgaggaa

SEQ ID NO: 1708624 - RNA, 19 nt, Artificial Sequence
  Description of Artificial Sequence: Synthetic oligonucleotide
  Antisense strand to SEQ ID NO: 1708623
uuccucgaauacuacucua

SEQ ID NO: 1708625 - RNA, 19 nt, Artificial Sequence
  Description of Artificial Sequence: Synthetic oligonucleotide
  Sense strand starting at position 2332 of SEQ ID NO: 1561925
guaguauucgaggaaggug

SEQ ID NO: 1708626 - RNA, 19 nt, Artificial Sequence
  Description of Artificial Sequence: Synthetic oligonucleotide
  Antisense strand to SEQ ID NO: 1708625
caccuuccucgaauacuac

SEQ ID NO: 1708627 - RNA, 19 nt, Artificial Sequence
  Description of Artificial Sequence: Synthetic oligonucleotide
  Sense strand starting at position 2692 of SEQ ID NO: 1561925
gcuuguaguacucuggcga

SEQ ID NO: 1708628 - RNA, 19 nt, Artificial Sequence
  Description of Artificial Sequence: Synthetic oligonucleotide
  Antisense strand to SEQ ID NO: 1708627
ucgccagaguacuacaagc

SEQ ID NO: 1708629 - RNA, 19 nt, Artificial Sequence
  Description of Artificial Sequence: Synthetic oligonucleotide
  Sense strand starting at position 2809 of SEQ ID NO: 1561925
gcuacuuucguaguauguu

SEQ ID NO: 1708630 - RNA, 19 nt, Artificial Sequence
  Description of Artificial Sequence: Synthetic oligonucleotide
  Antisense strand to SEQ ID NO: 1708629
aacauacuacgaaaguagc

SEQ ID NO: 1708631 - RNA, 19 nt, Artificial Sequence
  Description of Artificial Sequence: Synthetic oligonucleotide
  Sense strand starting at position 3075 of SEQ ID NO: 1561925
gggugaucuagaggacauu

SEQ ID NO: 1708632 - RNA, 19 nt, Artificial Sequence
  Description of Artificial Sequence: Synthetic oligonucleotide
  Antisense strand to SEQ ID NO: 1708631
aauguccucuagaucaccc

SEQ ID NO: 1708633 - RNA, 19 nt, Artificial Sequence
  Description of Artificial Sequence: Synthetic oligonucleotide
  Sense strand starting at position 3223 of SEQ ID NO: 1561925
cuacauuaacuguguagaa

SEQ ID NO: 1708634 - RNA, 19 nt, Artificial Sequence
  Description of Artificial Sequence: Synthetic oligonucleotide
  Antisense strand to SEQ ID NO: 1708633
uucuacacaguuaauguag

SEQ ID NO: 1708635 - RNA, 19 nt, Artificial Sequence
  Description of Artificial Sequence: Synthetic oligonucleotide
  Sense strand starting at position 3308 of SEQ ID NO: 1561925
cuuacaguucuggaaauuc

SEQ ID NO: 1708636 - RNA, 19 nt, Artificial Sequence
  Description of Artificial Sequence: Synthetic oligonucleotide
  Antisense strand to SEQ ID NO: 1708635
gaauuuccagaacuguaag

SEQ ID NO: 1708637 - RNA, 19 nt, Artificial Sequence
  Description of Artificial Sequence: Synthetic oligonucleotide
  Sense strand starting at position 3358 of SEQ ID NO: 1561925
ggcugagaggguuauucau

SEQ ID NO: 1708638 - RNA, 19 nt, Artificial Sequence
  Description of Artificial Sequence: Synthetic oligonucleotide
  Antisense strand to SEQ ID NO: 1708637
augaauaacccucucagcc

SEQ ID NO: 1708639 - RNA, 19 nt, Artificial Sequence
  Description of Artificial Sequence: Synthetic oligonucleotide
  Sense strand starting at position 3373 of SEQ ID NO: 1561925
ucauaauuagaguaugguu

SEQ ID NO: 1708640 - RNA, 19 nt, Artificial Sequence
  Description of Artificial Sequence: Synthetic oligonucleotide
  Antisense strand to SEQ ID NO: 1708639
aaccauacucuaauuauga

SEQ ID NO: 1708641 - RNA, 19 nt, Artificial Sequence
  Description of Artificial Sequence: Synthetic oligonucleotide
  Sense strand starting at position 3375 of SEQ ID NO: 1561925
auaauuagaguaugguuga

SEQ ID NO: 1708642 - RNA, 19 nt, Artificial Sequence
  Description of Artificial Sequence: Synthetic oligonucleotide
  Antisense strand to SEQ ID NO: 1708641
ucaaccauacucuaauuau

SEQ ID NO: 1708643 - RNA, 19 nt, Artificial Sequence
  Description of Artificial Sequence: Synthetic oligonucleotide
  Sense strand starting at position 3428 of SEQ ID NO: 1561925
gaggguuaugcucaaggua

SEQ ID NO: 1708644 - RNA, 19 nt, Artificial Sequence
  Description of Artificial Sequence: Synthetic oligonucleotide
  Antisense strand to SEQ ID NO: 1708643
uaccuugagcauaacccuc

SEQ ID NO: 1708645 - RNA, 19 nt, Artificial Sequence
  Description of Artificial Sequence: Synthetic oligonucleotide
  Sense strand starting at position 3452 of SEQ ID NO: 1561925
ucaguauuagggcagaagu

SEQ ID NO: 1708646 - RNA, 19 nt, Artificial Sequence
  Description of Artificial Sequence: Synthetic oligonucleotide
  Antisense strand to SEQ ID NO: 1708645
acuucugcccuaauacuga

SEQ ID NO: 1708647 - RNA, 19 nt, Artificial Sequence
  Description of Artificial Sequence: Synthetic oligonucleotide
  Sense strand starting at position 3454 of SEQ ID NO: 1561925
aguauuagggcagaaguuu

SEQ ID NO: 1708648 - RNA, 19 nt, Artificial Sequence
  Description of Artificial Sequence: Synthetic oligonucleotide
  Antisense strand to SEQ ID NO: 1708647
aaacuucugcccuaauacu

SEQ ID NO: 1708649 - RNA, 19 nt, Artificial Sequence
  Description of Artificial Sequence: Synthetic oligonucleotide
  Sense strand starting at position 3460 of SEQ ID NO: 1561925
agggcagaaguuuaguuaa

SEQ ID NO: 1708650 - RNA, 19 nt, Artificial Sequence
  Description of Artificial Sequence: Synthetic oligonucleotide
  Antisense strand to SEQ ID NO: 1708649
uuaacuaaacuucugcccu

SEQ ID NO: 1708651 - RNA, 19 nt, Artificial Sequence
  Description of Artificial Sequence: Synthetic oligonucleotide
  Sense strand starting at position 3931 of SEQ ID NO: 1561925
uagggugguagugauuaau

SEQ ID NO: 1708652 - RNA, 19 nt, Artificial Sequence
  Description of Artificial Sequence: Synthetic oligonucleotide
  Antisense strand to SEQ ID NO: 1708651
auuaaucacuaccacccua

SEQ ID NO: 1708653 - RNA, 19 nt, Artificial Sequence
  Description of Artificial Sequence: Synthetic oligonucleotide
  Sense strand starting at position 3934 of SEQ ID NO: 1561925
ggugguagugauuaaucca

SEQ ID NO: 1708654 - RNA, 19 nt, Artificial Sequence
  Description of Artificial Sequence: Synthetic oligonucleotide
  Antisense strand to SEQ ID NO: 1708653
uggauuaaucacuaccacc

SEQ ID NO: 1708655 - RNA, 19 nt, Artificial Sequence
  Description of Artificial Sequence: Synthetic oligonucleotide
  Sense strand starting at position 123 of SEQ ID NO: 1561926
guggcucugucuccuaaau

SEQ ID NO: 1708656 - RNA, 19 nt, Artificial Sequence
  Description of Artificial Sequence: Synthetic oligonucleotide
  Antisense strand to SEQ ID NO: 1708655
auuuaggagacagagccac

SEQ ID NO: 1708657 - RNA, 19 nt, Artificial Sequence
  Description of Artificial Sequence: Synthetic oligonucleotide
  Sense strand starting at position 125 of SEQ ID NO: 1561926
ggcucugucuccuaaauaa

SEQ ID NO: 1708658 - RNA, 19 nt, Artificial Sequence
  Description of Artificial Sequence: Synthetic oligonucleotide
  Antisense strand to SEQ ID NO: 1708657
uuauuuaggagacagagcc

SEQ ID NO: 1708659 - RNA, 19 nt, Artificial Sequence
  Description of Artificial Sequence: Synthetic oligonucleotide
  Sense strand starting at position 377 of SEQ ID NO: 1561926
uggacauuggccugggaaa

SEQ ID NO: 1708660 - RNA, 19 nt, Artificial Sequence
  Description of Artificial Sequence: Synthetic oligonucleotide
  Antisense strand to SEQ ID NO: 1708659
uuucccaggccaaugucca

SEQ ID NO: 1708661 - RNA, 19 nt, Artificial Sequence
  Description of Artificial Sequence: Synthetic oligonucleotide
  Sense strand starting at position 378 of SEQ ID NO: 1561926
ggacauuggccugggaaag

SEQ ID NO: 1708662 - RNA, 19 nt, Artificial Sequence
  Description of Artificial Sequence: Synthetic oligonucleotide
  Antisense strand to SEQ ID NO: 1708661
cuuucccaggccaaugucc

SEQ ID NO: 1708663 - RNA, 19 nt, Artificial Sequence
  Description of Artificial Sequence: Synthetic oligonucleotide
  Sense strand starting at position 379 of SEQ ID NO: 1561926
gacauuggccugggaaagu

SEQ ID NO: 1708664 - RNA, 19 nt, Artificial Sequence
  Description of Artificial Sequence: Synthetic oligonucleotide
  Antisense strand to SEQ ID NO: 1708663
acuuucccaggccaauguc

SEQ ID NO: 1708665 - RNA, 19 nt, Artificial Sequence
  Description of Artificial Sequence: Synthetic oligonucleotide
  Sense strand starting at position 478 of SEQ ID NO: 1561926
ucaucuuuagaugaggcua

SEQ ID NO: 1708666 - RNA, 19 nt, Artificial Sequence
  Description of Artificial Sequence: Synthetic oligonucleotide
  Antisense strand to SEQ ID NO: 1708665
uagccucaucuaaagauga

SEQ ID NO: 1708667 - RNA, 19 nt, Artificial Sequence
  Description of Artificial Sequence: Synthetic oligonucleotide
  Sense strand starting at position 490 of SEQ ID NO: 1561926
gaggcuaucgucuaaagag

SEQ ID NO: 1708668 - RNA, 19 nt, Artificial Sequence
  Description of Artificial Sequence: Synthetic oligonucleotide
  Antisense strand to SEQ ID NO: 1708667
cucuuuagacgauagccuc

SEQ ID NO: 1708669 - RNA, 19 nt, Artificial Sequence
  Description of Artificial Sequence: Synthetic oligonucleotide
  Sense strand starting at position 1410 of SEQ ID NO: 1561926
cgcaauuaggcgggagaca

SEQ ID NO: 1708670 - RNA, 19 nt, Artificial Sequence
  Description of Artificial Sequence: Synthetic oligonucleotide
  Antisense strand to SEQ ID NO: 1708669
ugucucccgccuaauugcg

SEQ ID NO: 1708671 - RNA, 19 nt, Artificial Sequence
  Description of Artificial Sequence: Synthetic oligonucleotide
  Sense strand starting at position 1411 of SEQ ID NO: 1561926
gcaauuaggcgggagacaa

SEQ ID NO: 1708672 - RNA, 19 nt, Artificial Sequence
  Description of Artificial Sequence: Synthetic oligonucleotide
  Antisense strand to SEQ ID NO: 1708671
uugucucccgccuaauugc

SEQ ID NO: 1708673 - RNA, 19 nt, Artificial Sequence
  Description of Artificial Sequence: Synthetic oligonucleotide
  Sense strand starting at position 1570 of SEQ ID NO: 1561926
cgcagcauuuccgcggaaa

SEQ ID NO: 1708674 - RNA, 19 nt, Artificial Sequence
  Description of Artificial Sequence: Synthetic oligonucleotide
  Antisense strand to SEQ ID NO: 1708673
uuuccgcggaaaugcugcg

SEQ ID NO: 1708675 - RNA, 19 nt, Artificial Sequence
  Description of Artificial Sequence: Synthetic oligonucleotide
  Sense strand starting at position 1571 of SEQ ID NO: 1561926
gcagcauuuccgcggaaac

SEQ ID NO: 1708676 - RNA, 19 nt, Artificial Sequence
  Description of Artificial Sequence: Synthetic oligonucleotide
  Antisense strand to SEQ ID NO: 1708675
guuuccgcggaaaugcugc

SEQ ID NO: 1708677 - RNA, 19 nt, Artificial Sequence
  Description of Artificial Sequence: Synthetic oligonucleotide
  Sense strand starting at position 1572 of SEQ ID NO: 1561926
cagcauuuccgcggaaaca

SEQ ID NO: 1708678 - RNA, 19 nt, Artificial Sequence
  Description of Artificial Sequence: Synthetic oligonucleotide
  Antisense strand to SEQ ID NO: 1708677
uguuuccgcggaaaugcug

SEQ ID NO: 1708679 - RNA, 19 nt, Artificial Sequence
  Description of Artificial Sequence: Synthetic oligonucleotide
  Sense strand starting at position 2165 of SEQ ID NO: 1561926
ccaggaguaucccacauag

SEQ ID NO: 1708680 - RNA, 19 nt, Artificial Sequence
  Description of Artificial Sequence: Synthetic oligonucleotide
  Antisense strand to SEQ ID NO: 1708679
cuaugugggauacuccugg

SEQ ID NO: 1708681 - RNA, 19 nt, Artificial Sequence
  Description of Artificial Sequence: Synthetic oligonucleotide
  Sense strand starting at position 2435 of SEQ ID NO: 1561926
gcaguuucgcgaucauagc

SEQ ID NO: 1708682 - RNA, 19 nt, Artificial Sequence
  Description of Artificial Sequence: Synthetic oligonucleotide
  Antisense strand to SEQ ID NO: 1708681
gcuaugaucgcgaaacugc

SEQ ID NO: 1708683 - RNA, 19 nt, Artificial Sequence
  Description of Artificial Sequence: Synthetic oligonucleotide
  Sense strand starting at position 2948 of SEQ ID NO: 1561926
gccgcuuuguccucccaaa

SEQ ID NO: 1708684 - RNA, 19 nt, Artificial Sequence
  Description of Artificial Sequence: Synthetic oligonucleotide
  Antisense strand to SEQ ID NO: 1708683
uuugggaggacaaagcggc

SEQ ID NO: 1708685 - RNA, 19 nt, Artificial Sequence
  Description of Artificial Sequence: Synthetic oligonucleotide
  Sense strand starting at position 2984 of SEQ ID NO: 1561926
gugagcucuuuccagaauu

SEQ ID NO: 1708686 - RNA, 19 nt, Artificial Sequence
  Description of Artificial Sequence: Synthetic oligonucleotide
  Antisense strand to SEQ ID NO: 1708685
aauucuggaaagagcucac

SEQ ID NO: 1708687 - RNA, 19 nt, Artificial Sequence
  Description of Artificial Sequence: Synthetic oligonucleotide
  Sense strand starting at position 3026 of SEQ ID NO: 1561926
ggguaaauuccuuacucca

SEQ ID NO: 1708688 - RNA, 19 nt, Artificial Sequence
  Description of Artificial Sequence: Synthetic oligonucleotide
  Antisense strand to SEQ ID NO: 1708687
uggaguaaggaauuuaccc

SEQ ID NO: 1708689 - RNA, 19 nt, Artificial Sequence
  Description of Artificial Sequence: Synthetic oligonucleotide
  Sense strand starting at position 3108 of SEQ ID NO: 1561926
gccuuugccugagccauua

SEQ ID NO: 1708690 - RNA, 19 nt, Artificial Sequence
  Description of Artificial Sequence: Synthetic oligonucleotide
  Antisense strand to SEQ ID NO: 1708689
uaauggcucaggcaaaggc

SEQ ID NO: 1708691 - RNA, 19 nt, Artificial Sequence
  Description of Artificial Sequence: Synthetic oligonucleotide
  Sense strand starting at position 3158 of SEQ ID NO: 1561926
cguggcugauuccuauuua

SEQ ID NO: 1708692 - RNA, 19 nt, Artificial Sequence
  Description of Artificial Sequence: Synthetic oligonucleotide
  Antisense strand to SEQ ID NO: 1708691
uaaauaggaaucagccacg

SEQ ID NO: 1708693 - RNA, 19 nt, Artificial Sequence
  Description of Artificial Sequence: Synthetic oligonucleotide
  Sense strand starting at position 3159 of SEQ ID NO: 1561926
guggcugauuccuauuuaa

SEQ ID NO: 1708694 - RNA, 19 nt, Artificial Sequence
  Description of Artificial Sequence: Synthetic oligonucleotide
  Antisense strand to SEQ ID NO: 1708693
uuaaauaggaaucagccac

SEQ ID NO: 1708695 - RNA, 19 nt, Artificial Sequence
  Description of Artificial Sequence: Synthetic oligonucleotide
  Sense strand starting at position 3192 of SEQ ID NO: 1561926
cccacaaucugccuguaga

SEQ ID NO: 1708696 - RNA, 19 nt, Artificial Sequence
  Description of Artificial Sequence: Synthetic oligonucleotide
  Antisense strand to SEQ ID NO: 1708695
ucuacaggcagauuguggg

SEQ ID NO: 1708697 - RNA, 19 nt, Artificial Sequence
  Description of Artificial Sequence: Synthetic oligonucleotide
  Sense strand starting at position 3193 of SEQ ID NO: 1561926
ccacaaucugccuguagac

SEQ ID NO: 1708698 - RNA, 19 nt, Artificial Sequence
  Description of Artificial Sequence: Synthetic oligonucleotide
  Antisense strand to SEQ ID NO: 1708697
gucuacaggcagauugugg

SEQ ID NO: 1708699 - RNA, 19 nt, Artificial Sequence
  Description of Artificial Sequence: Synthetic oligonucleotide
  Sense strand starting at position 3195 of SEQ ID NO: 1561926
acaaucugccuguagacuu

SEQ ID NO: 1708700 - RNA, 19 nt, Artificial Sequence
  Description of Artificial Sequence: Synthetic oligonucleotide
  Antisense strand to SEQ ID NO: 1708699
aagucuacaggcagauugu

SEQ ID NO: 1708701 - RNA, 19 nt, Artificial Sequence
  Description of Artificial Sequence: Synthetic oligonucleotide
  Sense strand starting at position 3203 of SEQ ID NO: 1561926
ccuguagacuucugcauuu

SEQ ID NO: 1708702 - RNA, 19 nt, Artificial Sequence
  Description of Artificial Sequence: Synthetic oligonucleotide
  Antisense strand to SEQ ID NO: 1708701
aaaugcagaagucuacagg

SEQ ID NO: 1708703 - RNA, 19 nt, Artificial Sequence
  Description of Artificial Sequence: Synthetic oligonucleotide
  Sense strand starting at position 3318 of SEQ ID NO: 1561926
aggcaaagguuuguugcau

SEQ ID NO: 1708704 - RNA, 19 nt, Artificial Sequence
  Description of Artificial Sequence: Synthetic oligonucleotide
  Antisense strand to SEQ ID NO: 1708703
augcaacaaaccuuugccu

SEQ ID NO: 1708705 - RNA, 19 nt, Artificial Sequence
  Description of Artificial Sequence: Synthetic oligonucleotide
  Sense strand starting at position 3319 of SEQ ID NO: 1561926
ggcaaagguuuguugcauu

SEQ ID NO: 1708706 - RNA, 19 nt, Artificial Sequence
  Description of Artificial Sequence: Synthetic oligonucleotide
  Antisense strand to SEQ ID NO: 1708705
aaugcaacaaaccuuugcc

SEQ ID NO: 1708707 - RNA, 19 nt, Artificial Sequence
  Description of Artificial Sequence: Synthetic oligonucleotide
  Sense strand starting at position 3322 of SEQ ID NO: 1561926
aaagguuuguugcauugaa

SEQ ID NO: 1708708 - RNA, 19 nt, Artificial Sequence
  Description of Artificial Sequence: Synthetic oligonucleotide
  Antisense strand to SEQ ID NO: 1708707
uucaaugcaacaaaccuuu

SEQ ID NO: 1708709 - RNA, 19 nt, Artificial Sequence
  Description of Artificial Sequence: Synthetic oligonucleotide
  Sense strand starting at position 3326 of SEQ ID NO: 1561926
guuuguugcauugaauugu

SEQ ID NO: 1708710 - RNA, 19 nt, Artificial Sequence
  Description of Artificial Sequence: Synthetic oligonucleotide
  Antisense strand to SEQ ID NO: 1708709
acaauucaaugcaacaaac

SEQ ID NO: 1708711 - RNA, 19 nt, Artificial Sequence
  Description of Artificial Sequence: Synthetic oligonucleotide
  Sense strand starting at position 3339 of SEQ ID NO: 1561926
aauuguuuaccuuggguuu

SEQ ID NO: 1708712 - RNA, 19 nt, Artificial Sequence
  Description of Artificial Sequence: Synthetic oligonucleotide
  Antisense strand to SEQ ID NO: 1708711
aaacccaagguaaacaauu

SEQ ID NO: 1708713 - RNA, 19 nt, Artificial Sequence
  Description of Artificial Sequence: Synthetic oligonucleotide
  Sense strand starting at position 3340 of SEQ ID NO: 1561926
auuguuuaccuuggguuua

SEQ ID NO: 1708714 - RNA, 19 nt, Artificial Sequence
  Description of Artificial Sequence: Synthetic oligonucleotide
  Antisense strand to SEQ ID NO: 1708713
uaaacccaagguaaacaau

SEQ ID NO: 1708715 - RNA, 19 nt, Artificial Sequence
  Description of Artificial Sequence: Synthetic oligonucleotide
  Sense strand starting at position 3342 of SEQ ID NO: 1561926
uguuuaccuuggguuuaaa

SEQ ID NO: 1708716 - RNA, 19 nt, Artificial Sequence
  Description of Artificial Sequence: Synthetic oligonucleotide
  Antisense strand to SEQ ID NO: 1708715
uuuaaacccaagguaaaca

SEQ ID NO: 1708717 - RNA, 19 nt, Artificial Sequence
  Description of Artificial Sequence: Synthetic oligonucleotide
  Sense strand starting at position 3353 of SEQ ID NO: 1561926
gguuuaaacucccagagau

SEQ ID NO: 1708718 - RNA, 19 nt, Artificial Sequence
  Description of Artificial Sequence: Synthetic oligonucleotide
  Antisense strand to SEQ ID NO: 1708717
aucucugggaguuuaaacc

SEQ ID NO: 1708719 - RNA, 19 nt, Artificial Sequence
  Description of Artificial Sequence: Synthetic oligonucleotide
  Sense strand starting at position 3363 of SEQ ID NO: 1561926
cccagagauuagcccagau

SEQ ID NO: 1708720 - RNA, 19 nt, Artificial Sequence
  Description of Artificial Sequence: Synthetic oligonucleotide
  Antisense strand to SEQ ID NO: 1708719
aucugggcuaaucucuggg

SEQ ID NO: 1708721 - RNA, 19 nt, Artificial Sequence
  Description of Artificial Sequence: Synthetic oligonucleotide
  Sense strand starting at position 3593 of SEQ ID NO: 1561926
ggcucaagcccuugucauc

SEQ ID NO: 1708722 - RNA, 19 nt, Artificial Sequence
  Description of Artificial Sequence: Synthetic oligonucleotide
  Antisense strand to SEQ ID NO: 1708721
gaugacaagggcuugagcc

SEQ ID NO: 1708723 - RNA, 19 nt, Artificial Sequence
  Description of Artificial Sequence: Synthetic oligonucleotide
  Sense strand starting at position 3648 of SEQ ID NO: 1561926
gacugucuuuccuugagau

SEQ ID NO: 1708724 - RNA, 19 nt, Artificial Sequence
  Description of Artificial Sequence: Synthetic oligonucleotide
  Antisense strand to SEQ ID NO: 1708723
aucucaaggaaagacaguc

SEQ ID NO: 1708725 - RNA, 19 nt, Artificial Sequence
  Description of Artificial Sequence: Synthetic oligonucleotide
  Sense strand starting at position 3649 of SEQ ID NO: 1561926
acugucuuuccuugagauu

SEQ ID NO: 1708726 - RNA, 19 nt, Artificial Sequence
  Description of Artificial Sequence: Synthetic oligonucleotide
  Antisense strand to SEQ ID NO: 1708725
aaucucaaggaaagacagu

SEQ ID NO: 1708727 - RNA, 19 nt, Artificial Sequence
  Description of Artificial Sequence: Synthetic oligonucleotide
  Sense strand starting at position 3652 of SEQ ID NO: 1561926
gucuuuccuugagauuuag

SEQ ID NO: 1708728 - RNA, 19 nt, Artificial Sequence
  Description of Artificial Sequence: Synthetic oligonucleotide
  Antisense strand to SEQ ID NO: 1708727
cuaaaucucaaggaaagac

SEQ ID NO: 1708729 - RNA, 19 nt, Artificial Sequence
  Description of Artificial Sequence: Synthetic oligonucleotide
  Sense strand starting at position 3757 of SEQ ID NO: 1561926
auaaaugagcucugagaca

SEQ ID NO: 1708730 - RNA, 19 nt, Artificial Sequence
  Description of Artificial Sequence: Synthetic oligonucleotide
  Antisense strand to SEQ ID NO: 1708729
ugucucagagcucauuuau

SEQ ID NO: 1708731 - RNA, 19 nt, Artificial Sequence
  Description of Artificial Sequence: Synthetic oligonucleotide
  Sense strand starting at position 3924 of SEQ ID NO: 1561926
ucuuaagugcuagaagcuu

SEQ ID NO: 1708732 - RNA, 19 nt, Artificial Sequence
  Description of Artificial Sequence: Synthetic oligonucleotide
  Antisense strand to SEQ ID NO: 1708731
aagcuucuagcacuuaaga

SEQ ID NO: 1708733 - RNA, 19 nt, Artificial Sequence
  Description of Artificial Sequence: Synthetic oligonucleotide
  Sense strand starting at position 3932 of SEQ ID NO: 1561926
gcuagaagcuuccacauca

SEQ ID NO: 1708734 - RNA, 19 nt, Artificial Sequence
  Description of Artificial Sequence: Synthetic oligonucleotide
  Antisense strand to SEQ ID NO: 1708733
ugauguggaagcuucuagc

SEQ ID NO: 1708735 - RNA, 19 nt, Artificial Sequence
  Description of Artificial Sequence: Synthetic oligonucleotide
  Sense strand starting at position 2 of SEQ ID NO: 1561927
ccuguagucagauaaugua

SEQ ID NO: 1708736 - RNA, 19 nt, Artificial Sequence
  Description of Artificial Sequence: Synthetic oligonucleotide
  Antisense strand to SEQ ID NO: 1708735
uacauuaucugacuacagg

SEQ ID NO: 1708737 - RNA, 19 nt, Artificial Sequence
  Description of Artificial Sequence: Synthetic oligonucleotide
  Sense strand starting at position 12 of SEQ ID NO: 1561927
gauaauguacaugguuuau

SEQ ID NO: 1708738 - RNA, 19 nt, Artificial Sequence
  Description of Artificial Sequence: Synthetic oligonucleotide
  Antisense strand to SEQ ID NO: 1708737
auaaaccauguacauuauc

SEQ ID NO: 1708739 - RNA, 19 nt, Artificial Sequence
  Description of Artificial Sequence: Synthetic oligonucleotide
  Sense strand starting at position 658 of SEQ ID NO: 1561927
cgccuaaguccuguugcaa

SEQ ID NO: 1708740 - RNA, 19 nt, Artificial Sequence
  Description of Artificial Sequence: Synthetic oligonucleotide
  Antisense strand to SEQ ID NO: 1708739
uugcaacaggacuuaggcg

SEQ ID NO: 1708741 - RNA, 19 nt, Artificial Sequence
  Description of Artificial Sequence: Synthetic oligonucleotide
  Sense strand starting at position 732 of SEQ ID NO: 1561927
ccgagcaacccucagaauu

SEQ ID NO: 1708742 - RNA, 19 nt, Artificial Sequence
  Description of Artificial Sequence: Synthetic oligonucleotide
  Antisense strand to SEQ ID NO: 1708741
aauucugaggguugcucgg

SEQ ID NO: 1708743 - RNA, 19 nt, Artificial Sequence
  Description of Artificial Sequence: Synthetic oligonucleotide
  Sense strand starting at position 1256 of SEQ ID NO: 1561927
augguuaauucccuagaag

SEQ ID NO: 1708744 - RNA, 19 nt, Artificial Sequence
  Description of Artificial Sequence: Synthetic oligonucleotide
  Antisense strand to SEQ ID NO: 1708743
cuucuagggaauuaaccau

SEQ ID NO: 1708745 - RNA, 19 nt, Artificial Sequence
  Description of Artificial Sequence: Synthetic oligonucleotide
  Sense strand starting at position 1257 of SEQ ID NO: 1561927
ugguuaauucccuagaagc

SEQ ID NO: 1708746 - RNA, 19 nt, Artificial Sequence
  Description of Artificial Sequence: Synthetic oligonucleotide
  Antisense strand to SEQ ID NO: 1708745
gcuucuagggaauuaacca

SEQ ID NO: 1708747 - RNA, 19 nt, Artificial Sequence
  Description of Artificial Sequence: Synthetic oligonucleotide
  Sense strand starting at position 1443 of SEQ ID NO: 1561927
uccugauguaaacgguaca

SEQ ID NO: 1708748 - RNA, 19 nt, Artificial Sequence
  Description of Artificial Sequence: Synthetic oligonucleotide
  Antisense strand to SEQ ID NO: 1708747
uguaccguuuacaucagga

SEQ ID NO: 1708749 - RNA, 19 nt, Artificial Sequence
  Description of Artificial Sequence: Synthetic oligonucleotide
  Sense strand starting at position 1444 of SEQ ID NO: 1561927
ccugauguaaacgguacaa

SEQ ID NO: 1708750 - RNA, 19 nt, Artificial Sequence
  Description of Artificial Sequence: Synthetic oligonucleotide
  Antisense strand to SEQ ID NO: 1708749
uuguaccguuuacaucagg

SEQ ID NO: 1708751 - RNA, 19 nt, Artificial Sequence
  Description of Artificial Sequence: Synthetic oligonucleotide
  Sense strand starting at position 1628 of SEQ ID NO: 1561927
gaaacaagccuggguucua

SEQ ID NO: 1708752 - RNA, 19 nt, Artificial Sequence
  Description of Artificial Sequence: Synthetic oligonucleotide
  Antisense strand to SEQ ID NO: 1708751
uagaacccaggcuuguuuc

SEQ ID NO: 1708753 - RNA, 19 nt, Artificial Sequence
  Description of Artificial Sequence: Synthetic oligonucleotide
  Sense strand starting at position 1757 of SEQ ID NO: 1561927
ccgcucugagcauuaguuu

SEQ ID NO: 1708754 - RNA, 19 nt, Artificial Sequence
  Description of Artificial Sequence: Synthetic oligonucleotide
  Antisense strand to SEQ ID NO: 1708753
aaacuaaugcucagagcgg

SEQ ID NO: 1708755 - RNA, 19 nt, Artificial Sequence
  Description of Artificial Sequence: Synthetic oligonucleotide
  Sense strand starting at position 2180 of SEQ ID NO: 1561927
cuggcaagagauuggaauu

SEQ ID NO: 1708756 - RNA, 19 nt, Artificial Sequence
  Description of Artificial Sequence: Synthetic oligonucleotide
  Antisense strand to SEQ ID NO: 1708755
aauuccaaucucuugccag

SEQ ID NO: 1708757 - RNA, 19 nt, Artificial Sequence
  Description of Artificial Sequence: Synthetic oligonucleotide
  Sense strand starting at position 2335 of SEQ ID NO: 1561927
cauguaggccagugagacu

SEQ ID NO: 1708758 - RNA, 19 nt, Artificial Sequence
  Description of Artificial Sequence: Synthetic oligonucleotide
  Antisense strand to SEQ ID NO: 1708757
agucucacuggccuacaug

SEQ ID NO: 1708759 - RNA, 19 nt, Artificial Sequence
  Description of Artificial Sequence: Synthetic oligonucleotide
  Sense strand starting at position 2379 of SEQ ID NO: 1561927
agcgauuagggccaaacuu

SEQ ID NO: 1708760 - RNA, 19 nt, Artificial Sequence
  Description of Artificial Sequence: Synthetic oligonucleotide
  Antisense strand to SEQ ID NO: 1708759
aaguuuggcccuaaucgcu

SEQ ID NO: 1708761 - RNA, 19 nt, Artificial Sequence
  Description of Artificial Sequence: Synthetic oligonucleotide
  Sense strand starting at position 2392 of SEQ ID NO: 1561927
aaacuuuguccagggugga

SEQ ID NO: 1708762 - RNA, 19 nt, Artificial Sequence
  Description of Artificial Sequence: Synthetic oligonucleotide
  Antisense strand to SEQ ID NO: 1708761
uccacccuggacaaaguuu

SEQ ID NO: 1708763 - RNA, 19 nt, Artificial Sequence
  Description of Artificial Sequence: Synthetic oligonucleotide
  Sense strand starting at position 2393 of SEQ ID NO: 1561927
aacuuuguccaggguggaa

SEQ ID NO: 1708764 - RNA, 19 nt, Artificial Sequence
  Description of Artificial Sequence: Synthetic oligonucleotide
  Antisense strand to SEQ ID NO: 1708763
uuccacccuggacaaaguu

SEQ ID NO: 1708765 - RNA, 19 nt, Artificial Sequence
  Description of Artificial Sequence: Synthetic oligonucleotide
  Sense strand starting at position 2488 of SEQ ID NO: 1561927
cuaaguccuggcgauaaag

SEQ ID NO: 1708766 - RNA, 19 nt, Artificial Sequence
  Description of Artificial Sequence: Synthetic oligonucleotide
  Antisense strand to SEQ ID NO: 1708765
cuuuaucgccaggacuuag

SEQ ID NO: 1708767 - RNA, 19 nt, Artificial Sequence
  Description of Artificial Sequence: Synthetic oligonucleotide
  Sense strand starting at position 2534 of SEQ ID NO: 1561927
gaggcuuucggugaucuga

SEQ ID NO: 1708768 - RNA, 19 nt, Artificial Sequence
  Description of Artificial Sequence: Synthetic oligonucleotide
  Antisense strand to SEQ ID NO: 1708767
ucagaucaccgaaagccuc

SEQ ID NO: 1708769 - RNA, 19 nt, Artificial Sequence
  Description of Artificial Sequence: Synthetic oligonucleotide
  Sense strand starting at position 2580 of SEQ ID NO: 1561927
ucaugugaugaaugaauac

SEQ ID NO: 1708770 - RNA, 19 nt, Artificial Sequence
  Description of Artificial Sequence: Synthetic oligonucleotide
  Antisense strand to SEQ ID NO: 1708769
guauucauucaucacauga

SEQ ID NO: 1708771 - RNA, 19 nt, Artificial Sequence
  Description of Artificial Sequence: Synthetic oligonucleotide
  Sense strand starting at position 2600 of SEQ ID NO: 1561927
guacuaagcgcggcuaauu

SEQ ID NO: 1708772 - RNA, 19 nt, Artificial Sequence
  Description of Artificial Sequence: Synthetic oligonucleotide
  Antisense strand to SEQ ID NO: 1708771
aauuagccgcgcuuaguac

SEQ ID NO: 1708773 - RNA, 19 nt, Artificial Sequence
  Description of Artificial Sequence: Synthetic oligonucleotide
  Sense strand starting at position 2611 of SEQ ID NO: 1561927
ggcuaauuacuagguagag

SEQ ID NO: 1708774 - RNA, 19 nt, Artificial Sequence
  Description of Artificial Sequence: Synthetic oligonucleotide
  Antisense strand to SEQ ID NO: 1708773
cucuaccuaguaauuagcc

SEQ ID NO: 1708775 - RNA, 19 nt, Artificial Sequence
  Description of Artificial Sequence: Synthetic oligonucleotide
  Sense strand starting at position 2612 of SEQ ID NO: 1561927
gcuaauuacuagguagaga

SEQ ID NO: 1708776 - RNA, 19 nt, Artificial Sequence
  Description of Artificial Sequence: Synthetic oligonucleotide
  Antisense strand to SEQ ID NO: 1708775
ucucuaccuaguaauuagc

SEQ ID NO: 1708777 - RNA, 19 nt, Artificial Sequence
  Description of Artificial Sequence: Synthetic oligonucleotide
  Sense strand starting at position 2670 of SEQ ID NO: 1561927
agugaugggcuguagaaug

SEQ ID NO: 1708778 - RNA, 19 nt, Artificial Sequence
  Description of Artificial Sequence: Synthetic oligonucleotide
  Antisense strand to SEQ ID NO: 1708777
cauucuacagcccaucacu

SEQ ID NO: 1708779 - RNA, 19 nt, Artificial Sequence
  Description of Artificial Sequence: Synthetic oligonucleotide
  Sense strand starting at position 2675 of SEQ ID NO: 1561927
ugggcuguagaauguagaa

SEQ ID NO: 1708780 - RNA, 19 nt, Artificial Sequence
  Description of Artificial Sequence: Synthetic oligonucleotide
  Antisense strand to SEQ ID NO: 1708779
uucuacauucuacagccca

SEQ ID NO: 1708781 - RNA, 19 nt, Artificial Sequence
  Description of Artificial Sequence: Synthetic oligonucleotide
  Sense strand starting at position 2817 of SEQ ID NO: 1561927
auauccuggucacugaaga

SEQ ID NO: 1708782 - RNA, 19 nt, Artificial Sequence
  Description of Artificial Sequence: Synthetic oligonucleotide
  Antisense strand to SEQ ID NO: 1708781
ucuucagugaccaggauau

SEQ ID NO: 1708783 - RNA, 19 nt, Artificial Sequence
  Description of Artificial Sequence: Synthetic oligonucleotide
  Sense strand starting at position 2892 of SEQ ID NO: 1561927
ggcuacaaacucuggaaau

SEQ ID NO: 1708784 - RNA, 19 nt, Artificial Sequence
  Description of Artificial Sequence: Synthetic oligonucleotide
  Antisense strand to SEQ ID NO: 1708783
auuuccagaguuuguagcc

SEQ ID NO: 1708785 - RNA, 19 nt, Artificial Sequence
  Description of Artificial Sequence: Synthetic oligonucleotide
  Sense strand starting at position 3036 of SEQ ID NO: 1561927
gaagcagauuugugggaga

SEQ ID NO: 1708786 - RNA, 19 nt, Artificial Sequence
  Description of Artificial Sequence: Synthetic oligonucleotide
  Antisense strand to SEQ ID NO: 1708785
ucucccacaaaucugcuuc

SEQ ID NO: 1708787 - RNA, 19 nt, Artificial Sequence
  Description of Artificial Sequence: Synthetic oligonucleotide
  Sense strand starting at position 3039 of SEQ ID NO: 1561927
gcagauuugugggagacaa

SEQ ID NO: 1708788 - RNA, 19 nt, Artificial Sequence
  Description of Artificial Sequence: Synthetic oligonucleotide
  Antisense strand to SEQ ID NO: 1708787
uugucucccacaaaucugc

SEQ ID NO: 1708789 - RNA, 19 nt, Artificial Sequence
  Description of Artificial Sequence: Synthetic oligonucleotide
  Sense strand starting at position 3064 of SEQ ID NO: 1561927
auucuauucugguuguaug

SEQ ID NO: 1708790 - RNA, 19 nt, Artificial Sequence
  Description of Artificial Sequence: Synthetic oligonucleotide
  Antisense strand to SEQ ID NO: 1708789
cauacaaccagaauagaau

SEQ ID NO: 1708791 - RNA, 19 nt, Artificial Sequence
  Description of Artificial Sequence: Synthetic oligonucleotide
  Sense strand starting at position 3102 of SEQ ID NO: 1561927
uggauauucuaguuugaag

SEQ ID NO: 1708792 - RNA, 19 nt, Artificial Sequence
  Description of Artificial Sequence: Synthetic oligonucleotide
  Antisense strand to SEQ ID NO: 1708791
cuucaaacuagaauaucca

SEQ ID NO: 1708793 - RNA, 19 nt, Artificial Sequence
  Description of Artificial Sequence: Synthetic oligonucleotide
  Sense strand starting at position 3104 of SEQ ID NO: 1561927
gauauucuaguuugaaggu

SEQ ID NO: 1708794 - RNA, 19 nt, Artificial Sequence
  Description of Artificial Sequence: Synthetic oligonucleotide
  Antisense strand to SEQ ID NO: 1708793
accuucaaacuagaauauc

SEQ ID NO: 1708795 - RNA, 19 nt, Artificial Sequence
  Description of Artificial Sequence: Synthetic oligonucleotide
  Sense strand starting at position 3123 of SEQ ID NO: 1561927
aggaaaguauugcugugaa

SEQ ID NO: 1708796 - RNA, 19 nt, Artificial Sequence
  Description of Artificial Sequence: Synthetic oligonucleotide
  Antisense strand to SEQ ID NO: 1708795
uucacagcaauacuuuccu

SEQ ID NO: 1708797 - RNA, 19 nt, Artificial Sequence
  Description of Artificial Sequence: Synthetic oligonucleotide
  Sense strand starting at position 3126 of SEQ ID NO: 1561927
aaaguauugcugugaagau

SEQ ID NO: 1708798 - RNA, 19 nt, Artificial Sequence
  Description of Artificial Sequence: Synthetic oligonucleotide
  Antisense strand to SEQ ID NO: 1708797
aucuucacagcaauacuuu

SEQ ID NO: 1708799 - RNA, 19 nt, Artificial Sequence
  Description of Artificial Sequence: Synthetic oligonucleotide
  Sense strand starting at position 3150 of SEQ ID NO: 1561927
uuugaaugucaucagcaaa

SEQ ID NO: 1708800 - RNA, 19 nt, Artificial Sequence
  Description of Artificial Sequence: Synthetic oligonucleotide
  Antisense strand to SEQ ID NO: 1708799
uuugcugaugacauucaaa

SEQ ID NO: 1708801 - RNA, 19 nt, Artificial Sequence
  Description of Artificial Sequence: Synthetic oligonucleotide
  Sense strand starting at position 3187 of SEQ ID NO: 1561927
gaggguugaggcuguagaa

SEQ ID NO: 1708802 - RNA, 19 nt, Artificial Sequence
  Description of Artificial Sequence: Synthetic oligonucleotide
  Antisense strand to SEQ ID NO: 1708801
uucuacagccucaacccuc

SEQ ID NO: 1708803 - RNA, 19 nt, Artificial Sequence
  Description of Artificial Sequence: Synthetic oligonucleotide
  Sense strand starting at position 3560 of SEQ ID NO: 1561927
ggcccauggugauuaucuu

SEQ ID NO: 1708804 - RNA, 19 nt, Artificial Sequence
  Description of Artificial Sequence: Synthetic oligonucleotide
  Antisense strand to SEQ ID NO: 1708803
aagauaaucaccaugggcc

SEQ ID NO: 1708805 - RNA, 19 nt, Artificial Sequence
  Description of Artificial Sequence: Synthetic oligonucleotide
  Sense strand starting at position 3561 of SEQ ID NO: 1561927
gcccauggugauuaucuuu

SEQ ID NO: 1708806 - RNA, 19 nt, Artificial Sequence
  Description of Artificial Sequence: Synthetic oligonucleotide
  Antisense strand to SEQ ID NO: 1708805
aaagauaaucaccaugggc

SEQ ID NO: 1708807 - RNA, 19 nt, Artificial Sequence
  Description of Artificial Sequence: Synthetic oligonucleotide
  Sense strand starting at position 3566 of SEQ ID NO: 1561927
uggugauuaucuuuauguc

SEQ ID NO: 1708808 - RNA, 19 nt, Artificial Sequence
  Description of Artificial Sequence: Synthetic oligonucleotide
  Antisense strand to SEQ ID NO: 1708807
gacauaaagauaaucacca

SEQ ID NO: 1708809 - RNA, 19 nt, Artificial Sequence
  Description of Artificial Sequence: Synthetic oligonucleotide
  Sense strand starting at position 3567 of SEQ ID NO: 1561927
ggugauuaucuuuaugucu

SEQ ID NO: 1708810 - RNA, 19 nt, Artificial Sequence
  Description of Artificial Sequence: Synthetic oligonucleotide
  Antisense strand to SEQ ID NO: 1708809
agacauaaagauaaucacc

SEQ ID NO: 1708811 - RNA, 19 nt, Artificial Sequence
  Description of Artificial Sequence: Synthetic oligonucleotide
  Sense strand starting at position 3689 of SEQ ID NO: 1561927
uucagaguuguggaacgau

SEQ ID NO: 1708812 - RNA, 19 nt, Artificial Sequence
  Description of Artificial Sequence: Synthetic oligonucleotide
  Antisense strand to SEQ ID NO: 1708811
aucguuccacaacucugaa

SEQ ID NO: 1708813 - RNA, 19 nt, Artificial Sequence
  Description of Artificial Sequence: Synthetic oligonucleotide
  Sense strand starting at position 3732 of SEQ ID NO: 1561927
cucuaaugucaagguaaug

SEQ ID NO: 1708814 - RNA, 19 nt, Artificial Sequence
  Description of Artificial Sequence: Synthetic oligonucleotide
  Antisense strand to SEQ ID NO: 1708813
cauuaccuugacauuagag

SEQ ID NO: 1708815 - RNA, 19 nt, Artificial Sequence
  Description of Artificial Sequence: Synthetic oligonucleotide
  Sense strand starting at position 81 of SEQ ID NO: 1561928
agcugugugguugcaacuu

SEQ ID NO: 1708816 - RNA, 19 nt, Artificial Sequence
  Description of Artificial Sequence: Synthetic oligonucleotide
  Antisense strand to SEQ ID NO: 1708815
aaguugcaaccacacagcu

SEQ ID NO: 1708817 - RNA, 19 nt, Artificial Sequence
  Description of Artificial Sequence: Synthetic oligonucleotide
  Sense strand starting at position 119 of SEQ ID NO: 1561928
cucccaugacucuguugaa

SEQ ID NO: 1708818 - RNA, 19 nt, Artificial Sequence
  Description of Artificial Sequence: Synthetic oligonucleotide
  Antisense strand to SEQ ID NO: 1708817
uucaacagagucaugggag

SEQ ID NO: 1708819 - RNA, 19 nt, Artificial Sequence
  Description of Artificial Sequence: Synthetic oligonucleotide
  Sense strand starting at position 120 of SEQ ID NO: 1561928
ucccaugacucuguugaag

SEQ ID NO: 1708820 - RNA, 19 nt, Artificial Sequence
  Description of Artificial Sequence: Synthetic oligonucleotide
  Antisense strand to SEQ ID NO: 1708819
cuucaacagagucauggga

SEQ ID NO: 1708821 - RNA, 19 nt, Artificial Sequence
  Description of Artificial Sequence: Synthetic oligonucleotide
  Sense strand starting at position 135 of SEQ ID NO: 1561928
gaagucauucucgguccuu

SEQ ID NO: 1708822 - RNA, 19 nt, Artificial Sequence
  Description of Artificial Sequence: Synthetic oligonucleotide
  Antisense strand to SEQ ID NO: 1708821
aaggaccgagaaugacuuc

SEQ ID NO: 1708823 - RNA, 19 nt, Artificial Sequence
  Description of Artificial Sequence: Synthetic oligonucleotide
  Sense strand starting at position 148 of SEQ ID NO: 1561928
guccuuggccuuugagauc

SEQ ID NO: 1708824 - RNA, 19 nt, Artificial Sequence
  Description of Artificial Sequence: Synthetic oligonucleotide
  Antisense strand to SEQ ID NO: 1708823
gaucucaaaggccaaggac

SEQ ID NO: 1708825 - RNA, 19 nt, Artificial Sequence
  Description of Artificial Sequence: Synthetic oligonucleotide
  Sense strand starting at position 154 of SEQ ID NO: 1561928
ggccuuugagaucaucaac

SEQ ID NO: 1708826 - RNA, 19 nt, Artificial Sequence
  Description of Artificial Sequence: Synthetic oligonucleotide
  Antisense strand to SEQ ID NO: 1708825
guugaugaucucaaaggcc

SEQ ID NO: 1708827 - RNA, 19 nt, Artificial Sequence
  Description of Artificial Sequence: Synthetic oligonucleotide
  Sense strand starting at position 219 of SEQ ID NO: 1561928
acugccuguagucaugaga

SEQ ID NO: 1708828 - RNA, 19 nt, Artificial Sequence
  Description of Artificial Sequence: Synthetic oligonucleotide
  Antisense strand to SEQ ID NO: 1708827
ucucaugacuacaggcagu

SEQ ID NO: 1708829 - RNA, 19 nt, Artificial Sequence
  Description of Artificial Sequence: Synthetic oligonucleotide
  Sense strand starting at position 222 of SEQ ID NO: 1561928
gccuguagucaugagacag

SEQ ID NO: 1708830 - RNA, 19 nt, Artificial Sequence
  Description of Artificial Sequence: Synthetic oligonucleotide
  Antisense strand to SEQ ID NO: 1708829
cugucucaugacuacaggc

SEQ ID NO: 1708831 - RNA, 19 nt, Artificial Sequence
  Description of Artificial Sequence: Synthetic oligonucleotide
  Sense strand starting at position 409 of SEQ ID NO: 1561928
aguccaguguucucgggaa

SEQ ID NO: 1708832 - RNA, 19 nt, Artificial Sequence
  Description of Artificial Sequence: Synthetic oligonucleotide
  Antisense strand to SEQ ID NO: 1708831
uucccgagaacacuggacu

SEQ ID NO: 1708833 - RNA, 19 nt, Artificial Sequence
  Description of Artificial Sequence: Synthetic oligonucleotide
  Sense strand starting at position 411 of SEQ ID NO: 1561928
uccaguguucucgggaacu

SEQ ID NO: 1708834 - RNA, 19 nt, Artificial Sequence
  Description of Artificial Sequence: Synthetic oligonucleotide
  Antisense strand to SEQ ID NO: 1708833
aguucccgagaacacugga

SEQ ID NO: 1708835 - RNA, 19 nt, Artificial Sequence
  Description of Artificial Sequence: Synthetic oligonucleotide
  Sense strand starting at position 413 of SEQ ID NO: 1561928
caguguucucgggaacuuu

SEQ ID NO: 1708836 - RNA, 19 nt, Artificial Sequence
  Description of Artificial Sequence: Synthetic oligonucleotide
  Antisense strand to SEQ ID NO: 1708835
aaaguucccgagaacacug

SEQ ID NO: 1708837 - RNA, 19 nt, Artificial Sequence
  Description of Artificial Sequence: Synthetic oligonucleotide
  Sense strand starting at position 490 of SEQ ID NO: 1561928
ggcugugauggccaucacu

SEQ ID NO: 1708838 - RNA, 19 nt, Artificial Sequence
  Description of Artificial Sequence: Synthetic oligonucleotide
  Antisense strand to SEQ ID NO: 1708837
agugauggccaucacagcc

SEQ ID NO: 1708839 - RNA, 19 nt, Artificial Sequence
  Description of Artificial Sequence: Synthetic oligonucleotide
  Sense strand starting at position 633 of SEQ ID NO: 1561928
cugggagcacuguacuuaa

SEQ ID NO: 1708840 - RNA, 19 nt, Artificial Sequence
  Description of Artificial Sequence: Synthetic oligonucleotide
  Antisense strand to SEQ ID NO: 1708839
uuaaguacagugcucccag

SEQ ID NO: 1708841 - RNA, 19 nt, Artificial Sequence
  Description of Artificial Sequence: Synthetic oligonucleotide
  Sense strand starting at position 812 of SEQ ID NO: 1561928
agguuugggucaguggaga

SEQ ID NO: 1708842 - RNA, 19 nt, Artificial Sequence
  Description of Artificial Sequence: Synthetic oligonucleotide
  Antisense strand to SEQ ID NO: 1708841
ucuccacugacccaaaccu

SEQ ID NO: 1708843 - RNA, 19 nt, Artificial Sequence
  Description of Artificial Sequence: Synthetic oligonucleotide
  Sense strand starting at position 849 of SEQ ID NO: 1561928
gcccucgaggcuugaacaa

SEQ ID NO: 1708844 - RNA, 19 nt, Artificial Sequence
  Description of Artificial Sequence: Synthetic oligonucleotide
  Antisense strand to SEQ ID NO: 1708843
uuguucaagccucgagggc

SEQ ID NO: 1708845 - RNA, 19 nt, Artificial Sequence
  Description of Artificial Sequence: Synthetic oligonucleotide
  Sense strand starting at position 911 of SEQ ID NO: 1561928
gggaaagggcucuguguau

SEQ ID NO: 1708846 - RNA, 19 nt, Artificial Sequence
  Description of Artificial Sequence: Synthetic oligonucleotide
  Antisense strand to SEQ ID NO: 1708845
auacacagagcccuuuccc

SEQ ID NO: 1708847 - RNA, 19 nt, Artificial Sequence
  Description of Artificial Sequence: Synthetic oligonucleotide
  Sense strand starting at position 1041 of SEQ ID NO: 1561928
acugauacuuggccuggau

SEQ ID NO: 1708848 - RNA, 19 nt, Artificial Sequence
  Description of Artificial Sequence: Synthetic oligonucleotide
  Antisense strand to SEQ ID NO: 1708847
auccaggccaaguaucagu

SEQ ID NO: 1708849 - RNA, 19 nt, Artificial Sequence
  Description of Artificial Sequence: Synthetic oligonucleotide
  Sense strand starting at position 1043 of SEQ ID NO: 1561928
ugauacuuggccuggaugu

SEQ ID NO: 1708850 - RNA, 19 nt, Artificial Sequence
  Description of Artificial Sequence: Synthetic oligonucleotide
  Antisense strand to SEQ ID NO: 1708849
acauccaggccaaguauca

SEQ ID NO: 1708851 - RNA, 19 nt, Artificial Sequence
  Description of Artificial Sequence: Synthetic oligonucleotide
  Sense strand starting at position 1080 of SEQ ID NO: 1561928
ccauccugguguccagauu

SEQ ID NO: 1708852 - RNA, 19 nt, Artificial Sequence
  Description of Artificial Sequence: Synthetic oligonucleotide
  Antisense strand to SEQ ID NO: 1708851
aaucuggacaccaggaugg

SEQ ID NO: 1708853 - RNA, 19 nt, Artificial Sequence
  Description of Artificial Sequence: Synthetic oligonucleotide
  Sense strand starting at position 1210 of SEQ ID NO: 1561928
gagucuccuccuuagagca

SEQ ID NO: 1708854 - RNA, 19 nt, Artificial Sequence
  Description of Artificial Sequence: Synthetic oligonucleotide
  Antisense strand to SEQ ID NO: 1708853
ugcucuaaggaggagacuc

SEQ ID NO: 1708855 - RNA, 19 nt, Artificial Sequence
  Description of Artificial Sequence: Synthetic oligonucleotide
  Sense strand starting at position 1500 of SEQ ID NO: 1561928
uuucuccaucugugacaca

SEQ ID NO: 1708856 - RNA, 19 nt, Artificial Sequence
  Description of Artificial Sequence: Synthetic oligonucleotide
  Antisense strand to SEQ ID NO: 1708855
ugugucacagauggagaaa

SEQ ID NO: 1708857 - RNA, 19 nt, Artificial Sequence
  Description of Artificial Sequence: Synthetic oligonucleotide
  Sense strand starting at position 2092 of SEQ ID NO: 1561928
cuuauuuggccucgaccca

SEQ ID NO: 1708858 - RNA, 19 nt, Artificial Sequence
  Description of Artificial Sequence: Synthetic oligonucleotide
  Antisense strand to SEQ ID NO: 1708857
ugggucgaggccaaauaag

SEQ ID NO: 1708859 - RNA, 19 nt, Artificial Sequence
  Description of Artificial Sequence: Synthetic oligonucleotide
  Sense strand starting at position 2485 of SEQ ID NO: 1561928
acugguuucguggagggaa

SEQ ID NO: 1708860 - RNA, 19 nt, Artificial Sequence
  Description of Artificial Sequence: Synthetic oligonucleotide
  Antisense strand to SEQ ID NO: 1708859
uucccuccacgaaaccagu

SEQ ID NO: 1708861 - RNA, 19 nt, Artificial Sequence
  Description of Artificial Sequence: Synthetic oligonucleotide
  Sense strand starting at position 2486 of SEQ ID NO: 1561928
cugguuucguggagggaaa

SEQ ID NO: 1708862 - RNA, 19 nt, Artificial Sequence
  Description of Artificial Sequence: Synthetic oligonucleotide
  Antisense strand to SEQ ID NO: 1708861
uuucccuccacgaaaccag

SEQ ID NO: 1708863 - RNA, 19 nt, Artificial Sequence
  Description of Artificial Sequence: Synthetic oligonucleotide
  Sense strand starting at position 2802 of SEQ ID NO: 1561928
ggaauccuucugggugaug

SEQ ID NO: 1708864 - RNA, 19 nt, Artificial Sequence
  Description of Artificial Sequence: Synthetic oligonucleotide
  Antisense strand to SEQ ID NO: 1708863
caucacccagaaggauucc

SEQ ID NO: 1708865 - RNA, 19 nt, Artificial Sequence
  Description of Artificial Sequence: Synthetic oligonucleotide
  Sense strand starting at position 2803 of SEQ ID NO: 1561928
gaauccuucugggugaugu

SEQ ID NO: 1708866 - RNA, 19 nt, Artificial Sequence
  Description of Artificial Sequence: Synthetic oligonucleotide
  Antisense strand to SEQ ID NO: 1708865
acaucacccagaaggauuc

SEQ ID NO: 1708867 - RNA, 19 nt, Artificial Sequence
  Description of Artificial Sequence: Synthetic oligonucleotide
  Sense strand starting at position 2975 of SEQ ID NO: 1561928
gggaaugggugugaaagaa

SEQ ID NO: 1708868 - RNA, 19 nt, Artificial Sequence
  Description of Artificial Sequence: Synthetic oligonucleotide
  Antisense strand to SEQ ID NO: 1708867
uucuuucacacccauuccc

SEQ ID NO: 1708869 - RNA, 19 nt, Artificial Sequence
  Description of Artificial Sequence: Synthetic oligonucleotide
  Sense strand starting at position 3021 of SEQ ID NO: 1561928
ugaugugagcaacgagaaa

SEQ ID NO: 1708870 - RNA, 19 nt, Artificial Sequence
  Description of Artificial Sequence: Synthetic oligonucleotide
  Antisense strand to SEQ ID NO: 1708869
uuucucguugcucacauca

SEQ ID NO: 1708871 - RNA, 19 nt, Artificial Sequence
  Description of Artificial Sequence: Synthetic oligonucleotide
  Sense strand starting at position 3032 of SEQ ID NO: 1561928
acgagaaagagcugccauu

SEQ ID NO: 1708872 - RNA, 19 nt, Artificial Sequence
  Description of Artificial Sequence: Synthetic oligonucleotide
  Antisense strand to SEQ ID NO: 1708871
aauggcagcucuuucucgu

SEQ ID NO: 1708873 - RNA, 19 nt, Artificial Sequence
  Description of Artificial Sequence: Synthetic oligonucleotide
  Sense strand starting at position 3160 of SEQ ID NO: 1561928
uuagaagaacugugcaaag

SEQ ID NO: 1708874 - RNA, 19 nt, Artificial Sequence
  Description of Artificial Sequence: Synthetic oligonucleotide
  Antisense strand to SEQ ID NO: 1708873
cuuugcacaguucuucuaa

SEQ ID NO: 1708875 - RNA, 19 nt, Artificial Sequence
  Description of Artificial Sequence: Synthetic oligonucleotide
  Sense strand starting at position 3322 of SEQ ID NO: 1561928
gaguuucuugcauacguau

SEQ ID NO: 1708876 - RNA, 19 nt, Artificial Sequence
  Description of Artificial Sequence: Synthetic oligonucleotide
  Antisense strand to SEQ ID NO: 1708875
auacguaugcaagaaacuc

SEQ ID NO: 1708877 - RNA, 19 nt, Artificial Sequence
  Description of Artificial Sequence: Synthetic oligonucleotide
  Sense strand starting at position 3342 of SEQ ID NO: 1561928
uccuguuaucucuacaugu

SEQ ID NO: 1708878 - RNA, 19 nt, Artificial Sequence
  Description of Artificial Sequence: Synthetic oligonucleotide
  Antisense strand to SEQ ID NO: 1708877
acauguagagauaacagga

SEQ ID NO: 1708879 - RNA, 19 nt, Artificial Sequence
  Description of Artificial Sequence: Synthetic oligonucleotide
  Sense strand starting at position 3344 of SEQ ID NO: 1561928
cuguuaucucuacauguuu

SEQ ID NO: 1708880 - RNA, 19 nt, Artificial Sequence
  Description of Artificial Sequence: Synthetic oligonucleotide
  Antisense strand to SEQ ID NO: 1708879
aaacauguagagauaacag

SEQ ID NO: 1708881 - RNA, 19 nt, Artificial Sequence
  Description of Artificial Sequence: Synthetic oligonucleotide
  Sense strand starting at position 3382 of SEQ ID NO: 1561928
aggagauucucuuaaauau

SEQ ID NO: 1708882 - RNA, 19 nt, Artificial Sequence
  Description of Artificial Sequence: Synthetic oligonucleotide
  Antisense strand to SEQ ID NO: 1708881
auauuuaagagaaucuccu

SEQ ID NO: 1708883 - RNA, 19 nt, Artificial Sequence
  Description of Artificial Sequence: Synthetic oligonucleotide
  Sense strand starting at position 3400 of SEQ ID NO: 1561928
ugcauaguacaaugauaaa

SEQ ID NO: 1708884 - RNA, 19 nt, Artificial Sequence
  Description of Artificial Sequence: Synthetic oligonucleotide
  Antisense strand to SEQ ID NO: 1708883
uuuaucauuguacuaugca

SEQ ID NO: 1708885 - RNA, 19 nt, Artificial Sequence
  Description of Artificial Sequence: Synthetic oligonucleotide
  Sense strand starting at position 3472 of SEQ ID NO: 1561928
gguugugccaguuauccca

SEQ ID NO: 1708886 - RNA, 19 nt, Artificial Sequence
  Description of Artificial Sequence: Synthetic oligonucleotide
  Antisense strand to SEQ ID NO: 1708885
ugggauaacuggcacaacc

SEQ ID NO: 1708887 - RNA, 19 nt, Artificial Sequence
  Description of Artificial Sequence: Synthetic oligonucleotide
  Sense strand starting at position 3475 of SEQ ID NO: 1561928
ugugccaguuaucccaaua

SEQ ID NO: 1708888 - RNA, 19 nt, Artificial Sequence
  Description of Artificial Sequence: Synthetic oligonucleotide
  Antisense strand to SEQ ID NO: 1708887
uauugggauaacuggcaca

SEQ ID NO: 1708889 - RNA, 19 nt, Artificial Sequence
  Description of Artificial Sequence: Synthetic oligonucleotide
  Sense strand starting at position 3835 of SEQ ID NO: 1561928
ucaucuuccucagccgaaa

SEQ ID NO: 1708890 - RNA, 19 nt, Artificial Sequence
  Description of Artificial Sequence: Synthetic oligonucleotide
  Antisense strand to SEQ ID NO: 1708889
uuucggcugaggaagauga

SEQ ID NO: 1708891 - RNA, 19 nt, Artificial Sequence
  Description of Artificial Sequence: Synthetic oligonucleotide
  Sense strand starting at position 3932 of SEQ ID NO: 1561928
cugugaguuuaucuacuua

SEQ ID NO: 1708892 - RNA, 19 nt, Artificial Sequence
  Description of Artificial Sequence: Synthetic oligonucleotide
  Antisense strand to SEQ ID NO: 1708891
uaaguagauaaacucacag

SEQ ID NO: 1708893 - RNA, 19 nt, Artificial Sequence
  Description of Artificial Sequence: Synthetic oligonucleotide
  Sense strand starting at position 3936 of SEQ ID NO: 1561928
gaguuuaucuacuuauugg

SEQ ID NO: 1708894 - RNA, 19 nt, Artificial Sequence
  Description of Artificial Sequence: Synthetic oligonucleotide
  Antisense strand to SEQ ID NO: 1708893
ccaauaaguagauaaacuc

SEQ ID NO: 1708895 - RNA, 19 nt, Artificial Sequence
  Description of Artificial Sequence: Synthetic oligonucleotide
  Sense strand starting at position 4 of SEQ ID NO: 1561929
augcaaucugcagagcuaa

SEQ ID NO: 1708896 - RNA, 19 nt, Artificial Sequence
  Description of Artificial Sequence: Synthetic oligonucleotide
  Antisense strand to SEQ ID NO: 1708895
uuagcucugcagauugcau

SEQ ID NO: 1708897 - RNA, 19 nt, Artificial Sequence
  Description of Artificial Sequence: Synthetic oligonucleotide
  Sense strand starting at position 37 of SEQ ID NO: 1561929
aaaugcaugguguaauaca

SEQ ID NO: 1708898 - RNA, 19 nt, Artificial Sequence
  Description of Artificial Sequence: Synthetic oligonucleotide
  Antisense strand to SEQ ID NO: 1708897
uguauuacaccaugcauuu

SEQ ID NO: 1708899 - RNA, 19 nt, Artificial Sequence
  Description of Artificial Sequence: Synthetic oligonucleotide
  Sense strand starting at position 155 of SEQ ID NO: 1561929
uguugauaugguuaaucau

SEQ ID NO: 1708900 - RNA, 19 nt, Artificial Sequence
  Description of Artificial Sequence: Synthetic oligonucleotide
  Antisense strand to SEQ ID NO: 1708899
augauuaaccauaucaaca

SEQ ID NO: 1708901 - RNA, 19 nt, Artificial Sequence
  Description of Artificial Sequence: Synthetic oligonucleotide
  Sense strand starting at position 158 of SEQ ID NO: 1561929
ugauaugguuaaucaucau

SEQ ID NO: 1708902 - RNA, 19 nt, Artificial Sequence
  Description of Artificial Sequence: Synthetic oligonucleotide
  Antisense strand to SEQ ID NO: 1708901
augaugauuaaccauauca

SEQ ID NO: 1708903 - RNA, 19 nt, Artificial Sequence
  Description of Artificial Sequence: Synthetic oligonucleotide
  Sense strand starting at position 188 of SEQ ID NO: 1561929
uagggaguuauguagcucu

SEQ ID NO: 1708904 - RNA, 19 nt, Artificial Sequence
  Description of Artificial Sequence: Synthetic oligonucleotide
  Antisense strand to SEQ ID NO: 1708903
agagcuacauaacucccua

SEQ ID NO: 1708905 - RNA, 19 nt, Artificial Sequence
  Description of Artificial Sequence: Synthetic oligonucleotide
  Sense strand starting at position 191 of SEQ ID NO: 1561929
ggaguuauguagcucuuga

SEQ ID NO: 1708906 - RNA, 19 nt, Artificial Sequence
  Description of Artificial Sequence: Synthetic oligonucleotide
  Antisense strand to SEQ ID NO: 1708905
ucaagagcuacauaacucc

SEQ ID NO: 1708907 - RNA, 19 nt, Artificial Sequence
  Description of Artificial Sequence: Synthetic oligonucleotide
  Sense strand starting at position 259 of SEQ ID NO: 1561929
ugguaaauguucuuauugu

SEQ ID NO: 1708908 - RNA, 19 nt, Artificial Sequence
  Description of Artificial Sequence: Synthetic oligonucleotide
  Antisense strand to SEQ ID NO: 1708907
acaauaagaacauuuacca

SEQ ID NO: 1708909 - RNA, 19 nt, Artificial Sequence
  Description of Artificial Sequence: Synthetic oligonucleotide
  Sense strand starting at position 268 of SEQ ID NO: 1561929
uucuuauuguggcuuacaa

SEQ ID NO: 1708910 - RNA, 19 nt, Artificial Sequence
  Description of Artificial Sequence: Synthetic oligonucleotide
  Antisense strand to SEQ ID NO: 1708909
uuguaagccacaauaagaa

SEQ ID NO: 1708911 - RNA, 19 nt, Artificial Sequence
  Description of Artificial Sequence: Synthetic oligonucleotide
  Sense strand starting at position 270 of SEQ ID NO: 1561929
cuuauuguggcuuacaaua

SEQ ID NO: 1708912 - RNA, 19 nt, Artificial Sequence
  Description of Artificial Sequence: Synthetic oligonucleotide
  Antisense strand to SEQ ID NO: 1708911
uauuguaagccacaauaag

SEQ ID NO: 1708913 - RNA, 19 nt, Artificial Sequence
  Description of Artificial Sequence: Synthetic oligonucleotide
  Sense strand starting at position 275 of SEQ ID NO: 1561929
uguggcuuacaauauauca

SEQ ID NO: 1708914 - RNA, 19 nt, Artificial Sequence
  Description of Artificial Sequence: Synthetic oligonucleotide
  Antisense strand to SEQ ID NO: 1708913
ugauauauuguaagccaca

SEQ ID NO: 1708915 - RNA, 19 nt, Artificial Sequence
  Description of Artificial Sequence: Synthetic oligonucleotide
  Sense strand starting at position 317 of SEQ ID NO: 1561929
guaaguauaacugauggca

SEQ ID NO: 1708916 - RNA, 19 nt, Artificial Sequence
  Description of Artificial Sequence: Synthetic oligonucleotide
  Antisense strand to SEQ ID NO: 1708915
ugccaucaguuauacuuac

SEQ ID NO: 1708917 - RNA, 19 nt, Artificial Sequence
  Description of Artificial Sequence: Synthetic oligonucleotide
  Sense strand starting at position 320 of SEQ ID NO: 1561929
aguauaacugauggcauca

SEQ ID NO: 1708918 - RNA, 19 nt, Artificial Sequence
  Description of Artificial Sequence: Synthetic oligonucleotide
  Antisense strand to SEQ ID NO: 1708917
ugaugccaucaguuauacu

SEQ ID NO: 1708919 - RNA, 19 nt, Artificial Sequence
  Description of Artificial Sequence: Synthetic oligonucleotide
  Sense strand starting at position 338 of SEQ ID NO: 1561929
acacaugugcuauauuaug

SEQ ID NO: 1708920 - RNA, 19 nt, Artificial Sequence
  Description of Artificial Sequence: Synthetic oligonucleotide
  Antisense strand to SEQ ID NO: 1708919
cauaauauagcacaugugu

SEQ ID NO: 1708921 - RNA, 19 nt, Artificial Sequence
  Description of Artificial Sequence: Synthetic oligonucleotide
  Sense strand starting at position 346 of SEQ ID NO: 1561929
gcuauauuaugguuaugaa

SEQ ID NO: 1708922 - RNA, 19 nt, Artificial Sequence
  Description of Artificial Sequence: Synthetic oligonucleotide
  Antisense strand to SEQ ID NO: 1708921
uucauaaccauaauauagc

SEQ ID NO: 1708923 - RNA, 19 nt, Artificial Sequence
  Description of Artificial Sequence: Synthetic oligonucleotide
  Sense strand starting at position 380 of SEQ ID NO: 1561929
ccuccaaucugguuauuag

SEQ ID NO: 1708924 - RNA, 19 nt, Artificial Sequence
  Description of Artificial Sequence: Synthetic oligonucleotide
  Antisense strand to SEQ ID NO: 1708923
cuaauaaccagauuggagg

SEQ ID NO: 1708925 - RNA, 19 nt, Artificial Sequence
  Description of Artificial Sequence: Synthetic oligonucleotide
  Sense strand starting at position 381 of SEQ ID NO: 1561929
cuccaaucugguuauuagu

SEQ ID NO: 1708926 - RNA, 19 nt, Artificial Sequence
  Description of Artificial Sequence: Synthetic oligonucleotide
  Antisense strand to SEQ ID NO: 1708925
acuaauaaccagauuggag

SEQ ID NO: 1708927 - RNA, 19 nt, Artificial Sequence
  Description of Artificial Sequence: Synthetic oligonucleotide
  Sense strand starting at position 383 of SEQ ID NO: 1561929
ccaaucugguuauuaguca

SEQ ID NO: 1708928 - RNA, 19 nt, Artificial Sequence
  Description of Artificial Sequence: Synthetic oligonucleotide
  Antisense strand to SEQ ID NO: 1708927
ugacuaauaaccagauugg

SEQ ID NO: 1708929 - RNA, 19 nt, Artificial Sequence
  Description of Artificial Sequence: Synthetic oligonucleotide
  Sense strand starting at position 387 of SEQ ID NO: 1561929
ucugguuauuagucaucuu

SEQ ID NO: 1708930 - RNA, 19 nt, Artificial Sequence
  Description of Artificial Sequence: Synthetic oligonucleotide
  Antisense strand to SEQ ID NO: 1708929
aagaugacuaauaaccaga

SEQ ID NO: 1708931 - RNA, 19 nt, Artificial Sequence
  Description of Artificial Sequence: Synthetic oligonucleotide
  Sense strand starting at position 449 of SEQ ID NO: 1561929
cuggauguccuaggaaaua

SEQ ID NO: 1708932 - RNA, 19 nt, Artificial Sequence
  Description of Artificial Sequence: Synthetic oligonucleotide
  Antisense strand to SEQ ID NO: 1708931
uauuuccuaggacauccag

SEQ ID NO: 1708933 - RNA, 19 nt, Artificial Sequence
  Description of Artificial Sequence: Synthetic oligonucleotide
  Sense strand starting at position 621 of SEQ ID NO: 1561929
uccagucuuguaugaauug

SEQ ID NO: 1708934 - RNA, 19 nt, Artificial Sequence
  Description of Artificial Sequence: Synthetic oligonucleotide
  Antisense strand to SEQ ID NO: 1708933
caauucauacaagacugga

SEQ ID NO: 1708935 - RNA, 19 nt, Artificial Sequence
  Description of Artificial Sequence: Synthetic oligonucleotide
  Sense strand starting at position 737 of SEQ ID NO: 1561929
ugaugauaaccaugccuaa

SEQ ID NO: 1708936 - RNA, 19 nt, Artificial Sequence
  Description of Artificial Sequence: Synthetic oligonucleotide
  Antisense strand to SEQ ID NO: 1708935
uuaggcaugguuaucauca

SEQ ID NO: 1708937 - RNA, 19 nt, Artificial Sequence
  Description of Artificial Sequence: Synthetic oligonucleotide
  Sense strand starting at position 1242 of SEQ ID NO: 1561929
gugccuugucugcagagga

SEQ ID NO: 1708938 - RNA, 19 nt, Artificial Sequence
  Description of Artificial Sequence: Synthetic oligonucleotide
  Antisense strand to SEQ ID NO: 1708937
uccucugcagacaaggcac

SEQ ID NO: 1708939 - RNA, 19 nt, Artificial Sequence
  Description of Artificial Sequence: Synthetic oligonucleotide
  Sense strand starting at position 1597 of SEQ ID NO: 1561929
gccagagauuccucugauu

SEQ ID NO: 1708940 - RNA, 19 nt, Artificial Sequence
  Description of Artificial Sequence: Synthetic oligonucleotide
  Antisense strand to SEQ ID NO: 1708939
aaucagaggaaucucuggc

SEQ ID NO: 1708941 - RNA, 19 nt, Artificial Sequence
  Description of Artificial Sequence: Synthetic oligonucleotide
  Sense strand starting at position 1600 of SEQ ID NO: 1561929
agagauuccucugauuucu

SEQ ID NO: 1708942 - RNA, 19 nt, Artificial Sequence
  Description of Artificial Sequence: Synthetic oligonucleotide
  Antisense strand to SEQ ID NO: 1708941
agaaaucagaggaaucucu

SEQ ID NO: 1708943 - RNA, 19 nt, Artificial Sequence
  Description of Artificial Sequence: Synthetic oligonucleotide
  Sense strand starting at position 1865 of SEQ ID NO: 1561929
gugucaggcuguccaauuu

SEQ ID NO: 1708944 - RNA, 19 nt, Artificial Sequence
  Description of Artificial Sequence: Synthetic oligonucleotide
  Antisense strand to SEQ ID NO: 1708943
aaauuggacagccugacac

SEQ ID NO: 1708945 - RNA, 19 nt, Artificial Sequence
  Description of Artificial Sequence: Synthetic oligonucleotide
  Sense strand starting at position 2433 of SEQ ID NO: 1561929
ggauaaucucccugacccu

SEQ ID NO: 1708946 - RNA, 19 nt, Artificial Sequence
  Description of Artificial Sequence: Synthetic oligonucleotide
  Antisense strand to SEQ ID NO: 1708945
agggucagggagauuaucc

SEQ ID NO: 1708947 - RNA, 19 nt, Artificial Sequence
  Description of Artificial Sequence: Synthetic oligonucleotide
  Sense strand starting at position 2458 of SEQ ID NO: 1561929
uagcucugugccucgacau

SEQ ID NO: 1708948 - RNA, 19 nt, Artificial Sequence
  Description of Artificial Sequence: Synthetic oligonucleotide
  Antisense strand to SEQ ID NO: 1708947
augucgaggcacagagcua

SEQ ID NO: 1708949 - RNA, 19 nt, Artificial Sequence
  Description of Artificial Sequence: Synthetic oligonucleotide
  Sense strand starting at position 2490 of SEQ ID NO: 1561929
cgucaccuuuggguaagaa

SEQ ID NO: 1708950 - RNA, 19 nt, Artificial Sequence
  Description of Artificial Sequence: Synthetic oligonucleotide
  Antisense strand to SEQ ID NO: 1708949
uucuuacccaaaggugacg

SEQ ID NO: 1708951 - RNA, 19 nt, Artificial Sequence
  Description of Artificial Sequence: Synthetic oligonucleotide
  Sense strand starting at position 2607 of SEQ ID NO: 1561929
cugaguagccaugggagau

SEQ ID NO: 1708952 - RNA, 19 nt, Artificial Sequence
  Description of Artificial Sequence: Synthetic oligonucleotide
  Antisense strand to SEQ ID NO: 1708951
aucucccauggcuacucag

SEQ ID NO: 1708953 - RNA, 19 nt, Artificial Sequence
  Description of Artificial Sequence: Synthetic oligonucleotide
  Sense strand starting at position 2756 of SEQ ID NO: 1561929
ugagguguucgagauagga

SEQ ID NO: 1708954 - RNA, 19 nt, Artificial Sequence
  Description of Artificial Sequence: Synthetic oligonucleotide
  Antisense strand to SEQ ID NO: 1708953
uccuaucucgaacaccuca

SEQ ID NO: 1708955 - RNA, 19 nt, Artificial Sequence
  Description of Artificial Sequence: Synthetic oligonucleotide
  Sense strand starting at position 2758 of SEQ ID NO: 1561929
agguguucgagauaggaug

SEQ ID NO: 1708956 - RNA, 19 nt, Artificial Sequence
  Description of Artificial Sequence: Synthetic oligonucleotide
  Antisense strand to SEQ ID NO: 1708955
cauccuaucucgaacaccu

SEQ ID NO: 1708957 - RNA, 19 nt, Artificial Sequence
  Description of Artificial Sequence: Synthetic oligonucleotide
  Sense strand starting at position 3029 of SEQ ID NO: 1561929
uagagugguuauccagguu

SEQ ID NO: 1708958 - RNA, 19 nt, Artificial Sequence
  Description of Artificial Sequence: Synthetic oligonucleotide
  Antisense strand to SEQ ID NO: 1708957
aaccuggauaaccacucua

SEQ ID NO: 1708959 - RNA, 19 nt, Artificial Sequence
  Description of Artificial Sequence: Synthetic oligonucleotide
  Sense strand starting at position 3285 of SEQ ID NO: 1561929
ugcuauccauuugugcaaa

SEQ ID NO: 1708960 - RNA, 19 nt, Artificial Sequence
  Description of Artificial Sequence: Synthetic oligonucleotide
  Antisense strand to SEQ ID NO: 1708959
uuugcacaaauggauagca

SEQ ID NO: 1708961 - RNA, 19 nt, Artificial Sequence
  Description of Artificial Sequence: Synthetic oligonucleotide
  Sense strand starting at position 3309 of SEQ ID NO: 1561929
aagggagaauaauauauga

SEQ ID NO: 1708962 - RNA, 19 nt, Artificial Sequence
  Description of Artificial Sequence: Synthetic oligonucleotide
  Antisense strand to SEQ ID NO: 1708961
ucauauauuauucucccuu

SEQ ID NO: 1708963 - RNA, 19 nt, Artificial Sequence
  Description of Artificial Sequence: Synthetic oligonucleotide
  Sense strand starting at position 3404 of SEQ ID NO: 1561929
aggagacaucacuguauau

SEQ ID NO: 1708964 - RNA, 19 nt, Artificial Sequence
  Description of Artificial Sequence: Synthetic oligonucleotide
  Antisense strand to SEQ ID NO: 1708963
auauacagugaugucuccu

SEQ ID NO: 1708965 - RNA, 19 nt, Artificial Sequence
  Description of Artificial Sequence: Synthetic oligonucleotide
  Sense strand starting at position 3435 of SEQ ID NO: 1561929
cuguuugaaccaugaacua

SEQ ID NO: 1708966 - RNA, 19 nt, Artificial Sequence
  Description of Artificial Sequence: Synthetic oligonucleotide
  Antisense strand to SEQ ID NO: 1708965
uaguucaugguucaaacag

SEQ ID NO: 1708967 - RNA, 19 nt, Artificial Sequence
  Description of Artificial Sequence: Synthetic oligonucleotide
  Sense strand starting at position 3453 of SEQ ID NO: 1561929
augugaacaggcuacuauu

SEQ ID NO: 1708968 - RNA, 19 nt, Artificial Sequence
  Description of Artificial Sequence: Synthetic oligonucleotide
  Antisense strand to SEQ ID NO: 1708967
aauaguagccuguucacau

SEQ ID NO: 1708969 - RNA, 19 nt, Artificial Sequence
  Description of Artificial Sequence: Synthetic oligonucleotide
  Sense strand starting at position 3517 of SEQ ID NO: 1561929
uuugguauaagcugguaaa

SEQ ID NO: 1708970 - RNA, 19 nt, Artificial Sequence
  Description of Artificial Sequence: Synthetic oligonucleotide
  Antisense strand to SEQ ID NO: 1708969
uuuaccagcuuauaccaaa

SEQ ID NO: 1708971 - RNA, 19 nt, Artificial Sequence
  Description of Artificial Sequence: Synthetic oligonucleotide
  Sense strand starting at position 3627 of SEQ ID NO: 1561929
uucuuuaagguccaguuaa

SEQ ID NO: 1708972 - RNA, 19 nt, Artificial Sequence
  Description of Artificial Sequence: Synthetic oligonucleotide
  Antisense strand to SEQ ID NO: 1708971
uuaacuggaccuuaaagaa

SEQ ID NO: 1708973 - RNA, 19 nt, Artificial Sequence
  Description of Artificial Sequence: Synthetic oligonucleotide
  Sense strand starting at position 3677 of SEQ ID NO: 1561929
agcugaugccuauacggua

SEQ ID NO: 1708974 - RNA, 19 nt, Artificial Sequence
  Description of Artificial Sequence: Synthetic oligonucleotide
  Antisense strand to SEQ ID NO: 1708973
uaccguauaggcaucagcu

SEQ ID NO: 1708975 - RNA, 19 nt, Artificial Sequence
  Description of Artificial Sequence: Synthetic oligonucleotide
  Sense strand starting at position 64 of SEQ ID NO: 1561930
ugggaaguucggcaaacgu

SEQ ID NO: 1708976 - RNA, 19 nt, Artificial Sequence
  Description of Artificial Sequence: Synthetic oligonucleotide
  Antisense strand to SEQ ID NO: 1708975
acguuugccgaacuuccca

SEQ ID NO: 1708977 - RNA, 19 nt, Artificial Sequence
  Description of Artificial Sequence: Synthetic oligonucleotide
  Sense strand starting at position 242 of SEQ ID NO: 1561930
ggguccugccucuacugau

SEQ ID NO: 1708978 - RNA, 19 nt, Artificial Sequence
  Description of Artificial Sequence: Synthetic oligonucleotide
  Antisense strand to SEQ ID NO: 1708977
aucaguagaggcaggaccc

SEQ ID NO: 1708979 - RNA, 19 nt, Artificial Sequence
  Description of Artificial Sequence: Synthetic oligonucleotide
  Sense strand starting at position 778 of SEQ ID NO: 1561930
gcaaauguuugguuuccaa

SEQ ID NO: 1708980 - RNA, 19 nt, Artificial Sequence
  Description of Artificial Sequence: Synthetic oligonucleotide
  Antisense strand to SEQ ID NO: 1708979
uuggaaaccaaacauuugc

SEQ ID NO: 1708981 - RNA, 19 nt, Artificial Sequence
  Description of Artificial Sequence: Synthetic oligonucleotide
  Sense strand starting at position 819 of SEQ ID NO: 1561930
gccaaugguguccacugau

SEQ ID NO: 1708982 - RNA, 19 nt, Artificial Sequence
  Description of Artificial Sequence: Synthetic oligonucleotide
  Antisense strand to SEQ ID NO: 1708981
aucaguggacaccauuggc

SEQ ID NO: 1708983 - RNA, 19 nt, Artificial Sequence
  Description of Artificial Sequence: Synthetic oligonucleotide
  Sense strand starting at position 1005 of SEQ ID NO: 1561930
auggcauuaggguguucaa

SEQ ID NO: 1708984 - RNA, 19 nt, Artificial Sequence
  Description of Artificial Sequence: Synthetic oligonucleotide
  Antisense strand to SEQ ID NO: 1708983
uugaacacccuaaugccau

SEQ ID NO: 1708985 - RNA, 19 nt, Artificial Sequence
  Description of Artificial Sequence: Synthetic oligonucleotide
  Sense strand starting at position 1143 of SEQ ID NO: 1561930
gccgauauuuacuucugca

SEQ ID NO: 1708986 - RNA, 19 nt, Artificial Sequence
  Description of Artificial Sequence: Synthetic oligonucleotide
  Antisense strand to SEQ ID NO: 1708985
ugcagaaguaaauaucggc

SEQ ID NO: 1708987 - RNA, 19 nt, Artificial Sequence
  Description of Artificial Sequence: Synthetic oligonucleotide
  Sense strand starting at position 1176 of SEQ ID NO: 1561930
acgcaugcacccuagauau

SEQ ID NO: 1708988 - RNA, 19 nt, Artificial Sequence
  Description of Artificial Sequence: Synthetic oligonucleotide
  Antisense strand to SEQ ID NO: 1708987
auaucuagggugcaugcgu

SEQ ID NO: 1708989 - RNA, 19 nt, Artificial Sequence
  Description of Artificial Sequence: Synthetic oligonucleotide
  Sense strand starting at position 1189 of SEQ ID NO: 1561930
agauauugauccuuaaguu

SEQ ID NO: 1708990 - RNA, 19 nt, Artificial Sequence
  Description of Artificial Sequence: Synthetic oligonucleotide
  Antisense strand to SEQ ID NO: 1708989
aacuuaaggaucaauaucu

SEQ ID NO: 1708991 - RNA, 19 nt, Artificial Sequence
  Description of Artificial Sequence: Synthetic oligonucleotide
  Sense strand starting at position 1193 of SEQ ID NO: 1561930
auugauccuuaaguugaga

SEQ ID NO: 1708992 - RNA, 19 nt, Artificial Sequence
  Description of Artificial Sequence: Synthetic oligonucleotide
  Antisense strand to SEQ ID NO: 1708991
ucucaacuuaaggaucaau

SEQ ID NO: 1708993 - RNA, 19 nt, Artificial Sequence
  Description of Artificial Sequence: Synthetic oligonucleotide
  Sense strand starting at position 1206 of SEQ ID NO: 1561930
uugagaaaugcaugacaug

SEQ ID NO: 1708994 - RNA, 19 nt, Artificial Sequence
  Description of Artificial Sequence: Synthetic oligonucleotide
  Antisense strand to SEQ ID NO: 1708993
caugucaugcauuucucaa

SEQ ID NO: 1708995 - RNA, 19 nt, Artificial Sequence
  Description of Artificial Sequence: Synthetic oligonucleotide
  Sense strand starting at position 1400 of SEQ ID NO: 1561930
uccagaaaugcgcauaaag

SEQ ID NO: 1708996 - RNA, 19 nt, Artificial Sequence
  Description of Artificial Sequence: Synthetic oligonucleotide
  Antisense strand to SEQ ID NO: 1708995
cuuuaugcgcauuucugga

SEQ ID NO: 1708997 - RNA, 19 nt, Artificial Sequence
  Description of Artificial Sequence: Synthetic oligonucleotide
  Sense strand starting at position 1402 of SEQ ID NO: 1561930
cagaaaugcgcauaaaguu

SEQ ID NO: 1708998 - RNA, 19 nt, Artificial Sequence
  Description of Artificial Sequence: Synthetic oligonucleotide
  Antisense strand to SEQ ID NO: 1708997
aacuuuaugcgcauuucug

SEQ ID NO: 1708999 - RNA, 19 nt, Artificial Sequence
  Description of Artificial Sequence: Synthetic oligonucleotide
  Sense strand starting at position 1485 of SEQ ID NO: 1561930
uggaaucucagaggagcau

SEQ ID NO: 1709000 - RNA, 19 nt, Artificial Sequence
  Description of Artificial Sequence: Synthetic oligonucleotide
  Antisense strand to SEQ ID NO: 1708999
augcuccucugagauucca

SEQ ID NO: 1709001 - RNA, 19 nt, Artificial Sequence
  Description of Artificial Sequence: Synthetic oligonucleotide
  Sense strand starting at position 1705 of SEQ ID NO: 1561930
cuuugucagaaagaacgua

SEQ ID NO: 1709002 - RNA, 19 nt, Artificial Sequence
  Description of Artificial Sequence: Synthetic oligonucleotide
  Antisense strand to SEQ ID NO: 1709001
uacguucuuucugacaaag

SEQ ID NO: 1709003 - RNA, 19 nt, Artificial Sequence
  Description of Artificial Sequence: Synthetic oligonucleotide
  Sense strand starting at position 1710 of SEQ ID NO: 1561930
ucagaaagaacguaacguu

SEQ ID NO: 1709004 - RNA, 19 nt, Artificial Sequence
  Description of Artificial Sequence: Synthetic oligonucleotide
  Antisense strand to SEQ ID NO: 1709003
aacguuacguucuuucuga

SEQ ID NO: 1709005 - RNA, 19 nt, Artificial Sequence
  Description of Artificial Sequence: Synthetic oligonucleotide
  Sense strand starting at position 1998 of SEQ ID NO: 1561930
ggaggaggcuccuuuguaa

SEQ ID NO: 1709006 - RNA, 19 nt, Artificial Sequence
  Description of Artificial Sequence: Synthetic oligonucleotide
  Antisense strand to SEQ ID NO: 1709005
uuacaaaggagccuccucc

SEQ ID NO: 1709007 - RNA, 19 nt, Artificial Sequence
  Description of Artificial Sequence: Synthetic oligonucleotide
  Sense strand starting at position 2001 of SEQ ID NO: 1561930
ggaggcuccuuuguaaaua

SEQ ID NO: 1709008 - RNA, 19 nt, Artificial Sequence
  Description of Artificial Sequence: Synthetic oligonucleotide
  Antisense strand to SEQ ID NO: 1709007
uauuuacaaaggagccucc

SEQ ID NO: 1709009 - RNA, 19 nt, Artificial Sequence
  Description of Artificial Sequence: Synthetic oligonucleotide
  Sense strand starting at position 2049 of SEQ ID NO: 1561930
auaucuguuuacucucuga

SEQ ID NO: 1709010 - RNA, 19 nt, Artificial Sequence
  Description of Artificial Sequence: Synthetic oligonucleotide
  Antisense strand to SEQ ID NO: 1709009
ucagagaguaaacagauau

SEQ ID NO: 1709011 - RNA, 19 nt, Artificial Sequence
  Description of Artificial Sequence: Synthetic oligonucleotide
  Sense strand starting at position 2090 of SEQ ID NO: 1561930
gcaucagaaagauggaucu

SEQ ID NO: 1709012 - RNA, 19 nt, Artificial Sequence
  Description of Artificial Sequence: Synthetic oligonucleotide
  Antisense strand to SEQ ID NO: 1709011
agauccaucuuucugaugc

SEQ ID NO: 1709013 - RNA, 19 nt, Artificial Sequence
  Description of Artificial Sequence: Synthetic oligonucleotide
  Sense strand starting at position 2097 of SEQ ID NO: 1561930
aaagauggaucugcugaau

SEQ ID NO: 1709014 - RNA, 19 nt, Artificial Sequence
  Description of Artificial Sequence: Synthetic oligonucleotide
  Antisense strand to SEQ ID NO: 1709013
auucagcagauccaucuuu

SEQ ID NO: 1709015 - RNA, 19 nt, Artificial Sequence
  Description of Artificial Sequence: Synthetic oligonucleotide
  Sense strand starting at position 2175 of SEQ ID NO: 1561930
acagaaggugccuauguuu

SEQ ID NO: 1709016 - RNA, 19 nt, Artificial Sequence
  Description of Artificial Sequence: Synthetic oligonucleotide
  Antisense strand to SEQ ID NO: 1709015
aaacauaggcaccuucugu

SEQ ID NO: 1709017 - RNA, 19 nt, Artificial Sequence
  Description of Artificial Sequence: Synthetic oligonucleotide
  Sense strand starting at position 2211 of SEQ ID NO: 1561930
cucaaugugcagcaugauu

SEQ ID NO: 1709018 - RNA, 19 nt, Artificial Sequence
  Description of Artificial Sequence: Synthetic oligonucleotide
  Antisense strand to SEQ ID NO: 1709017
aaucaugcugcacauugag

SEQ ID NO: 1709019 - RNA, 19 nt, Artificial Sequence
  Description of Artificial Sequence: Synthetic oligonucleotide
  Sense strand starting at position 2213 of SEQ ID NO: 1561930
caaugugcagcaugauuga

SEQ ID NO: 1709020 - RNA, 19 nt, Artificial Sequence
  Description of Artificial Sequence: Synthetic oligonucleotide
  Antisense strand to SEQ ID NO: 1709019
ucaaucaugcugcacauug

SEQ ID NO: 1709021 - RNA, 19 nt, Artificial Sequence
  Description of Artificial Sequence: Synthetic oligonucleotide
  Sense strand starting at position 2379 of SEQ ID NO: 1561930
cagcgaaaguacuuuacaa

SEQ ID NO: 1709022 - RNA, 19 nt, Artificial Sequence
  Description of Artificial Sequence: Synthetic oligonucleotide
  Antisense strand to SEQ ID NO: 1709021
uuguaaaguacuuucgcug

SEQ ID NO: 1709023 - RNA, 19 nt, Artificial Sequence
  Description of Artificial Sequence: Synthetic oligonucleotide
  Sense strand starting at position 2381 of SEQ ID NO: 1561930
gcgaaaguacuuuacaaua

SEQ ID NO: 1709024 - RNA, 19 nt, Artificial Sequence
  Description of Artificial Sequence: Synthetic oligonucleotide
  Antisense strand to SEQ ID NO: 1709023
uauuguaaaguacuuucgc

SEQ ID NO: 1709025 - RNA, 19 nt, Artificial Sequence
  Description of Artificial Sequence: Synthetic oligonucleotide
  Sense strand starting at position 2400 of SEQ ID NO: 1561930
uuuauugguggugaggaau

SEQ ID NO: 1709026 - RNA, 19 nt, Artificial Sequence
  Description of Artificial Sequence: Synthetic oligonucleotide
  Antisense strand to SEQ ID NO: 1709025
auuccucaccaccaauaaa

SEQ ID NO: 1709027 - RNA, 19 nt, Artificial Sequence
  Description of Artificial Sequence: Synthetic oligonucleotide
  Sense strand starting at position 2719 of SEQ ID NO: 1561930
agacuaaguuuauugcaac

SEQ ID NO: 1709028 - RNA, 19 nt, Artificial Sequence
  Description of Artificial Sequence: Synthetic oligonucleotide
  Antisense strand to SEQ ID NO: 1709027
guugcaauaaacuuagucu

SEQ ID NO: 1709029 - RNA, 19 nt, Artificial Sequence
  Description of Artificial Sequence: Synthetic oligonucleotide
  Sense strand starting at position 2963 of SEQ ID NO: 1561930
acucaagagccagaguauu

SEQ ID NO: 1709030 - RNA, 19 nt, Artificial Sequence
  Description of Artificial Sequence: Synthetic oligonucleotide
  Antisense strand to SEQ ID NO: 1709029
aauacucuggcucuugagu

SEQ ID NO: 1709031 - RNA, 19 nt, Artificial Sequence
  Description of Artificial Sequence: Synthetic oligonucleotide
  Sense strand starting at position 2981 of SEQ ID NO: 1561930
ucuuguuugcggcccaaau

SEQ ID NO: 1709032 - RNA, 19 nt, Artificial Sequence
  Description of Artificial Sequence: Synthetic oligonucleotide
  Antisense strand to SEQ ID NO: 1709031
auuugggccgcaaacaaga

SEQ ID NO: 1709033 - RNA, 19 nt, Artificial Sequence
  Description of Artificial Sequence: Synthetic oligonucleotide
  Sense strand starting at position 3021 of SEQ ID NO: 1561930
caggcaaacgauuguccau

SEQ ID NO: 1709034 - RNA, 19 nt, Artificial Sequence
  Description of Artificial Sequence: Synthetic oligonucleotide
  Antisense strand to SEQ ID NO: 1709033
auggacaaucguuugccug

SEQ ID NO: 1709035 - RNA, 19 nt, Artificial Sequence
  Description of Artificial Sequence: Synthetic oligonucleotide
  Sense strand starting at position 3023 of SEQ ID NO: 1561930
ggcaaacgauuguccauua

SEQ ID NO: 1709036 - RNA, 19 nt, Artificial Sequence
  Description of Artificial Sequence: Synthetic oligonucleotide
  Antisense strand to SEQ ID NO: 1709035
uaauggacaaucguuugcc

SEQ ID NO: 1709037 - RNA, 19 nt, Artificial Sequence
  Description of Artificial Sequence: Synthetic oligonucleotide
  Sense strand starting at position 3024 of SEQ ID NO: 1561930
gcaaacgauuguccauuau

SEQ ID NO: 1709038 - RNA, 19 nt, Artificial Sequence
  Description of Artificial Sequence: Synthetic oligonucleotide
  Antisense strand to SEQ ID NO: 1709037
auaauggacaaucguuugc

SEQ ID NO: 1709039 - RNA, 19 nt, Artificial Sequence
  Description of Artificial Sequence: Synthetic oligonucleotide
  Sense strand starting at position 3028 of SEQ ID NO: 1561930
acgauuguccauuaucaua

SEQ ID NO: 1709040 - RNA, 19 nt, Artificial Sequence
  Description of Artificial Sequence: Synthetic oligonucleotide
  Antisense strand to SEQ ID NO: 1709039
uaugauaauggacaaucgu

SEQ ID NO: 1709041 - RNA, 19 nt, Artificial Sequence
  Description of Artificial Sequence: Synthetic oligonucleotide
  Sense strand starting at position 3042 of SEQ ID NO: 1561930
ucauaaucaggauguuaga

SEQ ID NO: 1709042 - RNA, 19 nt, Artificial Sequence
  Description of Artificial Sequence: Synthetic oligonucleotide
  Antisense strand to SEQ ID NO: 1709041
ucuaacauccugauuauga

SEQ ID NO: 1709043 - RNA, 19 nt, Artificial Sequence
  Description of Artificial Sequence: Synthetic oligonucleotide
  Sense strand starting at position 3096 of SEQ ID NO: 1561930
gugagacgccugcaaagau

SEQ ID NO: 1709044 - RNA, 19 nt, Artificial Sequence
  Description of Artificial Sequence: Synthetic oligonucleotide
  Antisense strand to SEQ ID NO: 1709043
aucuuugcaggcgucucac

SEQ ID NO: 1709045 - RNA, 19 nt, Artificial Sequence
  Description of Artificial Sequence: Synthetic oligonucleotide
  Sense strand starting at position 3159 of SEQ ID NO: 1561930
agaaguucagugcagagau

SEQ ID NO: 1709046 - RNA, 19 nt, Artificial Sequence
  Description of Artificial Sequence: Synthetic oligonucleotide
  Antisense strand to SEQ ID NO: 1709045
aucucugcacugaacuucu

SEQ ID NO: 1709047 - RNA, 19 nt, Artificial Sequence
  Description of Artificial Sequence: Synthetic oligonucleotide
  Sense strand starting at position 3299 of SEQ ID NO: 1561930
ucucuaagagagcauguuu

SEQ ID NO: 1709048 - RNA, 19 nt, Artificial Sequence
  Description of Artificial Sequence: Synthetic oligonucleotide
  Antisense strand to SEQ ID NO: 1709047
aaacaugcucucuuagaga

SEQ ID NO: 1709049 - RNA, 19 nt, Artificial Sequence
  Description of Artificial Sequence: Synthetic oligonucleotide
  Sense strand starting at position 3542 of SEQ ID NO: 1561930
augagaacaguucgagguu

SEQ ID NO: 1709050 - RNA, 19 nt, Artificial Sequence
  Description of Artificial Sequence: Synthetic oligonucleotide
  Antisense strand to SEQ ID NO: 1709049
aaccucgaacuguucucau

SEQ ID NO: 1709051 - RNA, 19 nt, Artificial Sequence
  Description of Artificial Sequence: Synthetic oligonucleotide
  Sense strand starting at position 3775 of SEQ ID NO: 1561930
gccauuguuccaugaugaa

SEQ ID NO: 1709052 - RNA, 19 nt, Artificial Sequence
  Description of Artificial Sequence: Synthetic oligonucleotide
  Antisense strand to SEQ ID NO: 1709051
uucaucauggaacaauggc

SEQ ID NO: 1709053 - RNA, 19 nt, Artificial Sequence
  Description of Artificial Sequence: Synthetic oligonucleotide
  Sense strand starting at position 3928 of SEQ ID NO: 1561930
gagagaugaaccugcgcaa

SEQ ID NO: 1709054 - RNA, 19 nt, Artificial Sequence
  Description of Artificial Sequence: Synthetic oligonucleotide
  Antisense strand to SEQ ID NO: 1709053
uugcgcagguucaucucuc

SEQ ID NO: 1709055 - RNA, 19 nt, Artificial Sequence
  Description of Artificial Sequence: Synthetic oligonucleotide
  Sense strand starting at position 26 of SEQ ID NO: 1561931
cacagagcucagugguuaa

SEQ ID NO: 1709056 - RNA, 19 nt, Artificial Sequence
  Description of Artificial Sequence: Synthetic oligonucleotide
  Antisense strand to SEQ ID NO: 1709055
uuaaccacugagcucugug

SEQ ID NO: 1709057 - RNA, 19 nt, Artificial Sequence
  Description of Artificial Sequence: Synthetic oligonucleotide
  Sense strand starting at position 29 of SEQ ID NO: 1561931
agagcucagugguuaagaa

SEQ ID NO: 1709058 - RNA, 19 nt, Artificial Sequence
  Description of Artificial Sequence: Synthetic oligonucleotide
  Antisense strand to SEQ ID NO: 1709057
uucuuaaccacugagcucu

SEQ ID NO: 1709059 - RNA, 19 nt, Artificial Sequence
  Description of Artificial Sequence: Synthetic oligonucleotide
  Sense strand starting at position 30 of SEQ ID NO: 1561931
gagcucagugguuaagaau

SEQ ID NO: 1709060 - RNA, 19 nt, Artificial Sequence
  Description of Artificial Sequence: Synthetic oligonucleotide
  Antisense strand to SEQ ID NO: 1709059
auucuuaaccacugagcuc

SEQ ID NO: 1709061 - RNA, 19 nt, Artificial Sequence
  Description of Artificial Sequence: Synthetic oligonucleotide
  Sense strand starting at position 39 of SEQ ID NO: 1561931
gguuaagaauuugaaucca

SEQ ID NO: 1709062 - RNA, 19 nt, Artificial Sequence
  Description of Artificial Sequence: Synthetic oligonucleotide
  Antisense strand to SEQ ID NO: 1709061
uggauucaaauucuuaacc

SEQ ID NO: 1709063 - RNA, 19 nt, Artificial Sequence
  Description of Artificial Sequence: Synthetic oligonucleotide
  Sense strand starting at position 63 of SEQ ID NO: 1561931
uggauucuacagugaacac

SEQ ID NO: 1709064 - RNA, 19 nt, Artificial Sequence
  Description of Artificial Sequence: Synthetic oligonucleotide
  Antisense strand to SEQ ID NO: 1709063
guguucacuguagaaucca

SEQ ID NO: 1709065 - RNA, 19 nt, Artificial Sequence
  Description of Artificial Sequence: Synthetic oligonucleotide
  Sense strand starting at position 379 of SEQ ID NO: 1561931
agccaauauccuuggauga

SEQ ID NO: 1709066 - RNA, 19 nt, Artificial Sequence
  Description of Artificial Sequence: Synthetic oligonucleotide
  Antisense strand to SEQ ID NO: 1709065
ucauccaaggauauuggcu

SEQ ID NO: 1709067 - RNA, 19 nt, Artificial Sequence
  Description of Artificial Sequence: Synthetic oligonucleotide
  Sense strand starting at position 380 of SEQ ID NO: 1561931
gccaauauccuuggaugaa

SEQ ID NO: 1709068 - RNA, 19 nt, Artificial Sequence
  Description of Artificial Sequence: Synthetic oligonucleotide
  Antisense strand to SEQ ID NO: 1709067
uucauccaaggauauuggc

SEQ ID NO: 1709069 - RNA, 19 nt, Artificial Sequence
  Description of Artificial Sequence: Synthetic oligonucleotide
  Sense strand starting at position 383 of SEQ ID NO: 1561931
aauauccuuggaugaaguu

SEQ ID NO: 1709070 - RNA, 19 nt, Artificial Sequence
  Description of Artificial Sequence: Synthetic oligonucleotide
  Antisense strand to SEQ ID NO: 1709069
aacuucauccaaggauauu

SEQ ID NO: 1709071 - RNA, 19 nt, Artificial Sequence
  Description of Artificial Sequence: Synthetic oligonucleotide
  Sense strand starting at position 513 of SEQ ID NO: 1561931
ggauuauuacgugggcacu

SEQ ID NO: 1709072 - RNA, 19 nt, Artificial Sequence
  Description of Artificial Sequence: Synthetic oligonucleotide
  Antisense strand to SEQ ID NO: 1709071
agugcccacguaauaaucc

SEQ ID NO: 1709073 - RNA, 19 nt, Artificial Sequence
  Description of Artificial Sequence: Synthetic oligonucleotide
  Sense strand starting at position 765 of SEQ ID NO: 1561931
cucacuuaccaauguguua

SEQ ID NO: 1709074 - RNA, 19 nt, Artificial Sequence
  Description of Artificial Sequence: Synthetic oligonucleotide
  Antisense strand to SEQ ID NO: 1709073
uaacacauugguaagugag

SEQ ID NO: 1709075 - RNA, 19 nt, Artificial Sequence
  Description of Artificial Sequence: Synthetic oligonucleotide
  Sense strand starting at position 772 of SEQ ID NO: 1561931
accaauguguuauccaucu

SEQ ID NO: 1709076 - RNA, 19 nt, Artificial Sequence
  Description of Artificial Sequence: Synthetic oligonucleotide
  Antisense strand to SEQ ID NO: 1709075
agauggauaacacauuggu

SEQ ID NO: 1709077 - RNA, 19 nt, Artificial Sequence
  Description of Artificial Sequence: Synthetic oligonucleotide
  Sense strand starting at position 808 of SEQ ID NO: 1561931
uuugaaauguucccagcca

SEQ ID NO: 1709078 - RNA, 19 nt, Artificial Sequence
  Description of Artificial Sequence: Synthetic oligonucleotide
  Antisense strand to SEQ ID NO: 1709077
uggcugggaacauuucaaa

SEQ ID NO: 1709079 - RNA, 19 nt, Artificial Sequence
  Description of Artificial Sequence: Synthetic oligonucleotide
  Sense strand starting at position 871 of SEQ ID NO: 1561931
accacuuuguccuuaguuu

SEQ ID NO: 1709080 - RNA, 19 nt, Artificial Sequence
  Description of Artificial Sequence: Synthetic oligonucleotide
  Antisense strand to SEQ ID NO: 1709079
aaacuaaggacaaaguggu

SEQ ID NO: 1709081 - RNA, 19 nt, Artificial Sequence
  Description of Artificial Sequence: Synthetic oligonucleotide
  Sense strand starting at position 949 of SEQ ID NO: 1561931
gagagauaccagcguagca

SEQ ID NO: 1709082 - RNA, 19 nt, Artificial Sequence
  Description of Artificial Sequence: Synthetic oligonucleotide
  Antisense strand to SEQ ID NO: 1709081
ugcuacgcugguaucucuc

SEQ ID NO: 1709083 - RNA, 19 nt, Artificial Sequence
  Description of Artificial Sequence: Synthetic oligonucleotide
  Sense strand starting at position 951 of SEQ ID NO: 1561931
gagauaccagcguagcaaa

SEQ ID NO: 1709084 - RNA, 19 nt, Artificial Sequence
  Description of Artificial Sequence: Synthetic oligonucleotide
  Antisense strand to SEQ ID NO: 1709083
uuugcuacgcugguaucuc

SEQ ID NO: 1709085 - RNA, 19 nt, Artificial Sequence
  Description of Artificial Sequence: Synthetic oligonucleotide
  Sense strand starting at position 1012 of SEQ ID NO: 1561931
uggugaaauuccuccaacu

SEQ ID NO: 1709086 - RNA, 19 nt, Artificial Sequence
  Description of Artificial Sequence: Synthetic oligonucleotide
  Antisense strand to SEQ ID NO: 1709085
aguuggaggaauuucacca

SEQ ID NO: 1709087 - RNA, 19 nt, Artificial Sequence
  Description of Artificial Sequence: Synthetic oligonucleotide
  Sense strand starting at position 1031 of SEQ ID NO: 1561931
uuucuaaaugugugggaau

SEQ ID NO: 1709088 - RNA, 19 nt, Artificial Sequence
  Description of Artificial Sequence: Synthetic oligonucleotide
  Antisense strand to SEQ ID NO: 1709087
auucccacacauuuagaaa

SEQ ID NO: 1709089 - RNA, 19 nt, Artificial Sequence
  Description of Artificial Sequence: Synthetic oligonucleotide
  Sense strand starting at position 1033 of SEQ ID NO: 1561931
ucuaaaugugugggaaucu

SEQ ID NO: 1709090 - RNA, 19 nt, Artificial Sequence
  Description of Artificial Sequence: Synthetic oligonucleotide
  Antisense strand to SEQ ID NO: 1709089
agauucccacacauuuaga

SEQ ID NO: 1709091 - RNA, 19 nt, Artificial Sequence
  Description of Artificial Sequence: Synthetic oligonucleotide
  Sense strand starting at position 1095 of SEQ ID NO: 1561931
aaaucagaggucuggccuu

SEQ ID NO: 1709092 - RNA, 19 nt, Artificial Sequence
  Description of Artificial Sequence: Synthetic oligonucleotide
  Antisense strand to SEQ ID NO: 1709091
aaggccagaccucugauuu

SEQ ID NO: 1709093 - RNA, 19 nt, Artificial Sequence
  Description of Artificial Sequence: Synthetic oligonucleotide
  Sense strand starting at position 2285 of SEQ ID NO: 1561931
caguguugcgaguugcaga

SEQ ID NO: 1709094 - RNA, 19 nt, Artificial Sequence
  Description of Artificial Sequence: Synthetic oligonucleotide
  Antisense strand to SEQ ID NO: 1709093
ucugcaacucgcaacacug

SEQ ID NO: 1709095 - RNA, 19 nt, Artificial Sequence
  Description of Artificial Sequence: Synthetic oligonucleotide
  Sense strand starting at position 2316 of SEQ ID NO: 1561931
augucaauaccacguuuaa

SEQ ID NO: 1709096 - RNA, 19 nt, Artificial Sequence
  Description of Artificial Sequence: Synthetic oligonucleotide
  Antisense strand to SEQ ID NO: 1709095
uuaaacgugguauugacau

SEQ ID NO: 1709097 - RNA, 19 nt, Artificial Sequence
  Description of Artificial Sequence: Synthetic oligonucleotide
  Sense strand starting at position 2832 of SEQ ID NO: 1561931
aggaaugugauauguuaca

SEQ ID NO: 1709098 - RNA, 19 nt, Artificial Sequence
  Description of Artificial Sequence: Synthetic oligonucleotide
  Antisense strand to SEQ ID NO: 1709097
uguaacauaucacauuccu

SEQ ID NO: 1709099 - RNA, 19 nt, Artificial Sequence
  Description of Artificial Sequence: Synthetic oligonucleotide
  Sense strand starting at position 2858 of SEQ ID NO: 1561931
uugcaaagacuuugaaauc

SEQ ID NO: 1709100 - RNA, 19 nt, Artificial Sequence
  Description of Artificial Sequence: Synthetic oligonucleotide
  Antisense strand to SEQ ID NO: 1709099
gauuucaaagucuuugcaa

SEQ ID NO: 1709101 - RNA, 19 nt, Artificial Sequence
  Description of Artificial Sequence: Synthetic oligonucleotide
  Sense strand starting at position 2931 of SEQ ID NO: 1561931
ggaaaugcuuguucucuau

SEQ ID NO: 1709102 - RNA, 19 nt, Artificial Sequence
  Description of Artificial Sequence: Synthetic oligonucleotide
  Antisense strand to SEQ ID NO: 1709101
auagagaacaagcauuucc

SEQ ID NO: 1709103 - RNA, 19 nt, Artificial Sequence
  Description of Artificial Sequence: Synthetic oligonucleotide
  Sense strand starting at position 3167 of SEQ ID NO: 1561931
gguagagguugcucugaga

SEQ ID NO: 1709104 - RNA, 19 nt, Artificial Sequence
  Description of Artificial Sequence: Synthetic oligonucleotide
  Antisense strand to SEQ ID NO: 1709103
ucucagagcaaccucuacc

SEQ ID NO: 1709105 - RNA, 19 nt, Artificial Sequence
  Description of Artificial Sequence: Synthetic oligonucleotide
  Sense strand starting at position 3174 of SEQ ID NO: 1561931
guugcucugagacaugauu

SEQ ID NO: 1709106 - RNA, 19 nt, Artificial Sequence
  Description of Artificial Sequence: Synthetic oligonucleotide
  Antisense strand to SEQ ID NO: 1709105
aaucaugucucagagcaac

SEQ ID NO: 1709107 - RNA, 19 nt, Artificial Sequence
  Description of Artificial Sequence: Synthetic oligonucleotide
  Sense strand starting at position 3296 of SEQ ID NO: 1561931
uuuacacaugaguguuaaa

SEQ ID NO: 1709108 - RNA, 19 nt, Artificial Sequence
  Description of Artificial Sequence: Synthetic oligonucleotide
  Antisense strand to SEQ ID NO: 1709107
uuuaacacucauguguaaa

SEQ ID NO: 1709109 - RNA, 19 nt, Artificial Sequence
  Description of Artificial Sequence: Synthetic oligonucleotide
  Sense strand starting at position 3307 of SEQ ID NO: 1561931
guguuaaacuggucaauau

SEQ ID NO: 1709110 - RNA, 19 nt, Artificial Sequence
  Description of Artificial Sequence: Synthetic oligonucleotide
  Antisense strand to SEQ ID NO: 1709109
auauugaccaguuuaacac

SEQ ID NO: 1709111 - RNA, 19 nt, Artificial Sequence
  Description of Artificial Sequence: Synthetic oligonucleotide
  Sense strand starting at position 3308 of SEQ ID NO: 1561931
uguuaaacuggucaauauc

SEQ ID NO: 1709112 - RNA, 19 nt, Artificial Sequence
  Description of Artificial Sequence: Synthetic oligonucleotide
  Antisense strand to SEQ ID NO: 1709111
gauauugaccaguuuaaca

SEQ ID NO: 1709113 - RNA, 19 nt, Artificial Sequence
  Description of Artificial Sequence: Synthetic oligonucleotide
  Sense strand starting at position 3317 of SEQ ID NO: 1561931
ggucaauauccacagagcu

SEQ ID NO: 1709114 - RNA, 19 nt, Artificial Sequence
  Description of Artificial Sequence: Synthetic oligonucleotide
  Antisense strand to SEQ ID NO: 1709113
agcucuguggauauugacc

SEQ ID NO: 1709115 - RNA, 19 nt, Artificial Sequence
  Description of Artificial Sequence: Synthetic oligonucleotide
  Sense strand starting at position 3479 of SEQ ID NO: 1561931
ccuggaaacguguacuaaa

SEQ ID NO: 1709116 - RNA, 19 nt, Artificial Sequence
  Description of Artificial Sequence: Synthetic oligonucleotide
  Antisense strand to SEQ ID NO: 1709115
uuuaguacacguuuccagg

SEQ ID NO: 1709117 - RNA, 19 nt, Artificial Sequence
  Description of Artificial Sequence: Synthetic oligonucleotide
  Sense strand starting at position 3489 of SEQ ID NO: 1561931
uguacuaaacaguaaucuu

SEQ ID NO: 1709118 - RNA, 19 nt, Artificial Sequence
  Description of Artificial Sequence: Synthetic oligonucleotide
  Antisense strand to SEQ ID NO: 1709117
aagauuacuguuuaguaca

SEQ ID NO: 1709119 - RNA, 19 nt, Artificial Sequence
  Description of Artificial Sequence: Synthetic oligonucleotide
  Sense strand starting at position 3581 of SEQ ID NO: 1561931
uuaugaaguagugaagguu

SEQ ID NO: 1709120 - RNA, 19 nt, Artificial Sequence
  Description of Artificial Sequence: Synthetic oligonucleotide
  Antisense strand to SEQ ID NO: 1709119
aaccuucacuacuucauaa

SEQ ID NO: 1709121 - RNA, 19 nt, Artificial Sequence
  Description of Artificial Sequence: Synthetic oligonucleotide
  Sense strand starting at position 3638 of SEQ ID NO: 1561931
acauuagaaguuuauagcu

SEQ ID NO: 1709122 - RNA, 19 nt, Artificial Sequence
  Description of Artificial Sequence: Synthetic oligonucleotide
  Antisense strand to SEQ ID NO: 1709121
agcuauaaacuucuaaugu

SEQ ID NO: 1709123 - RNA, 19 nt, Artificial Sequence
  Description of Artificial Sequence: Synthetic oligonucleotide
  Sense strand starting at position 3643 of SEQ ID NO: 1561931
agaaguuuauagcuacuuu

SEQ ID NO: 1709124 - RNA, 19 nt, Artificial Sequence
  Description of Artificial Sequence: Synthetic oligonucleotide
  Antisense strand to SEQ ID NO: 1709123
aaaguagcuauaaacuucu

SEQ ID NO: 1709125 - RNA, 19 nt, Artificial Sequence
  Description of Artificial Sequence: Synthetic oligonucleotide
  Sense strand starting at position 3665 of SEQ ID NO: 1561931
uuuguaucuagguaauggu

SEQ ID NO: 1709126 - RNA, 19 nt, Artificial Sequence
  Description of Artificial Sequence: Synthetic oligonucleotide
  Antisense strand to SEQ ID NO: 1709125
accauuaccuagauacaaa

SEQ ID NO: 1709127 - RNA, 19 nt, Artificial Sequence
  Description of Artificial Sequence: Synthetic oligonucleotide
  Sense strand starting at position 3672 of SEQ ID NO: 1561931
cuagguaaugguggaauaa

SEQ ID NO: 1709128 - RNA, 19 nt, Artificial Sequence
  Description of Artificial Sequence: Synthetic oligonucleotide
  Antisense strand to SEQ ID NO: 1709127
uuauuccaccauuaccuag

SEQ ID NO: 1709129 - RNA, 19 nt, Artificial Sequence
  Description of Artificial Sequence: Synthetic oligonucleotide
  Sense strand starting at position 3721 of SEQ ID NO: 1561931
guggguuuaacacaaaggu

SEQ ID NO: 1709130 - RNA, 19 nt, Artificial Sequence
  Description of Artificial Sequence: Synthetic oligonucleotide
  Antisense strand to SEQ ID NO: 1709129
accuuuguguuaaacccac

SEQ ID NO: 1709131 - RNA, 19 nt, Artificial Sequence
  Description of Artificial Sequence: Synthetic oligonucleotide
  Sense strand starting at position 3797 of SEQ ID NO: 1561931
acgaauuauuauuccgauu

SEQ ID NO: 1709132 - RNA, 19 nt, Artificial Sequence
  Description of Artificial Sequence: Synthetic oligonucleotide
  Antisense strand to SEQ ID NO: 1709131
aaucggaauaauaauucgu

SEQ ID NO: 1709133 - RNA, 19 nt, Artificial Sequence
  Description of Artificial Sequence: Synthetic oligonucleotide
  Sense strand starting at position 3966 of SEQ ID NO: 1561931
aucaguuuccauugcugau

SEQ ID NO: 1709134 - RNA, 19 nt, Artificial Sequence
  Description of Artificial Sequence: Synthetic oligonucleotide
  Antisense strand to SEQ ID NO: 1709133
aucagcaauggaaacugau

SEQ ID NO: 1709135 - RNA, 19 nt, Artificial Sequence
  Description of Artificial Sequence: Synthetic oligonucleotide
  Sense strand starting at position 130 of SEQ ID NO: 1561932
acuaaagcgaccuaggauu

SEQ ID NO: 1709136 - RNA, 19 nt, Artificial Sequence
  Description of Artificial Sequence: Synthetic oligonucleotide
  Antisense strand to SEQ ID NO: 1709135
aauccuaggucgcuuuagu

SEQ ID NO: 1709137 - RNA, 19 nt, Artificial Sequence
  Description of Artificial Sequence: Synthetic oligonucleotide
  Sense strand starting at position 252 of SEQ ID NO: 1561932
gccacaugauucucugaaa

SEQ ID NO: 1709138 - RNA, 19 nt, Artificial Sequence
  Description of Artificial Sequence: Synthetic oligonucleotide
  Antisense strand to SEQ ID NO: 1709137
uuucagagaaucauguggc

SEQ ID NO: 1709139 - RNA, 19 nt, Artificial Sequence
  Description of Artificial Sequence: Synthetic oligonucleotide
  Sense strand starting at position 285 of SEQ ID NO: 1561932
gcaaguguuccuguguauu

SEQ ID NO: 1709140 - RNA, 19 nt, Artificial Sequence
  Description of Artificial Sequence: Synthetic oligonucleotide
  Antisense strand to SEQ ID NO: 1709139
aauacacaggaacacuugc

SEQ ID NO: 1709141 - RNA, 19 nt, Artificial Sequence
  Description of Artificial Sequence: Synthetic oligonucleotide
  Sense strand starting at position 360 of SEQ ID NO: 1561932
acugauucuccaugaggcu

SEQ ID NO: 1709142 - RNA, 19 nt, Artificial Sequence
  Description of Artificial Sequence: Synthetic oligonucleotide
  Antisense strand to SEQ ID NO: 1709141
agccucauggagaaucagu

SEQ ID NO: 1709143 - RNA, 19 nt, Artificial Sequence
  Description of Artificial Sequence: Synthetic oligonucleotide
  Sense strand starting at position 435 of SEQ ID NO: 1561932
acugaagccucugucaagu

SEQ ID NO: 1709144 - RNA, 19 nt, Artificial Sequence
  Description of Artificial Sequence: Synthetic oligonucleotide
  Antisense strand to SEQ ID NO: 1709143
acuugacagaggcuucagu

SEQ ID NO: 1709145 - RNA, 19 nt, Artificial Sequence
  Description of Artificial Sequence: Synthetic oligonucleotide
  Sense strand starting at position 489 of SEQ ID NO: 1561932
ggcuuaccugcccaguuua

SEQ ID NO: 1709146 - RNA, 19 nt, Artificial Sequence
  Description of Artificial Sequence: Synthetic oligonucleotide
  Antisense strand to SEQ ID NO: 1709145
uaaacugggcagguaagcc

SEQ ID NO: 1709147 - RNA, 19 nt, Artificial Sequence
  Description of Artificial Sequence: Synthetic oligonucleotide
  Sense strand starting at position 531 of SEQ ID NO: 1561932
cacagagcucagugguuaa

SEQ ID NO: 1709148 - RNA, 19 nt, Artificial Sequence
  Description of Artificial Sequence: Synthetic oligonucleotide
  Antisense strand to SEQ ID NO: 1709147
uuaaccacugagcucugug

SEQ ID NO: 1709149 - RNA, 19 nt, Artificial Sequence
  Description of Artificial Sequence: Synthetic oligonucleotide
  Sense strand starting at position 534 of SEQ ID NO: 1561932
agagcucagugguuaagaa

SEQ ID NO: 1709150 - RNA, 19 nt, Artificial Sequence
  Description of Artificial Sequence: Synthetic oligonucleotide
  Antisense strand to SEQ ID NO: 1709149
uucuuaaccacugagcucu

SEQ ID NO: 1709151 - RNA, 19 nt, Artificial Sequence
  Description of Artificial Sequence: Synthetic oligonucleotide
  Sense strand starting at position 535 of SEQ ID NO: 1561932
gagcucagugguuaagaau

SEQ ID NO: 1709152 - RNA, 19 nt, Artificial Sequence
  Description of Artificial Sequence: Synthetic oligonucleotide
  Antisense strand to SEQ ID NO: 1709151
auucuuaaccacugagcuc

SEQ ID NO: 1709153 - RNA, 19 nt, Artificial Sequence
  Description of Artificial Sequence: Synthetic oligonucleotide
  Sense strand starting at position 544 of SEQ ID NO: 1561932
gguuaagaauuugaaucca

SEQ ID NO: 1709154 - RNA, 19 nt, Artificial Sequence
  Description of Artificial Sequence: Synthetic oligonucleotide
  Antisense strand to SEQ ID NO: 1709153
uggauucaaauucuuaacc

SEQ ID NO: 1709155 - RNA, 19 nt, Artificial Sequence
  Description of Artificial Sequence: Synthetic oligonucleotide
  Sense strand starting at position 568 of SEQ ID NO: 1561932
uggauucuacagugaacac

SEQ ID NO: 1709156 - RNA, 19 nt, Artificial Sequence
  Description of Artificial Sequence: Synthetic oligonucleotide
  Antisense strand to SEQ ID NO: 1709155
guguucacuguagaaucca

SEQ ID NO: 1709157 - RNA, 19 nt, Artificial Sequence
  Description of Artificial Sequence: Synthetic oligonucleotide
  Sense strand starting at position 884 of SEQ ID NO: 1561932
agccaauauccuuggauga

SEQ ID NO: 1709158 - RNA, 19 nt, Artificial Sequence
  Description of Artificial Sequence: Synthetic oligonucleotide
  Antisense strand to SEQ ID NO: 1709157
ucauccaaggauauuggcu

SEQ ID NO: 1709159 - RNA, 19 nt, Artificial Sequence
  Description of Artificial Sequence: Synthetic oligonucleotide
  Sense strand starting at position 885 of SEQ ID NO: 1561932
gccaauauccuuggaugaa

SEQ ID NO: 1709160 - RNA, 19 nt, Artificial Sequence
  Description of Artificial Sequence: Synthetic oligonucleotide
  Antisense strand to SEQ ID NO: 1709159
uucauccaaggauauuggc

SEQ ID NO: 1709161 - RNA, 19 nt, Artificial Sequence
  Description of Artificial Sequence: Synthetic oligonucleotide
  Sense strand starting at position 888 of SEQ ID NO: 1561932
aauauccuuggaugaaguu

SEQ ID NO: 1709162 - RNA, 19 nt, Artificial Sequence
  Description of Artificial Sequence: Synthetic oligonucleotide
  Antisense strand to SEQ ID NO: 1709161
aacuucauccaaggauauu

SEQ ID NO: 1709163 - RNA, 19 nt, Artificial Sequence
  Description of Artificial Sequence: Synthetic oligonucleotide
  Sense strand starting at position 898 of SEQ ID NO: 1561932
gaugaaguuccucgcuuua

SEQ ID NO: 1709164 - RNA, 19 nt, Artificial Sequence
  Description of Artificial Sequence: Synthetic oligonucleotide
  Antisense strand to SEQ ID NO: 1709163
uaaagcgaggaacuucauc

SEQ ID NO: 1709165 - RNA, 19 nt, Artificial Sequence
  Description of Artificial Sequence: Synthetic oligonucleotide
  Sense strand starting at position 1018 of SEQ ID NO: 1561932
ggauuauuacgugggcacu

SEQ ID NO: 1709166 - RNA, 19 nt, Artificial Sequence
  Description of Artificial Sequence: Synthetic oligonucleotide
  Antisense strand to SEQ ID NO: 1709165
agugcccacguaauaaucc

SEQ ID NO: 1709167 - RNA, 19 nt, Artificial Sequence
  Description of Artificial Sequence: Synthetic oligonucleotide
  Sense strand starting at position 1270 of SEQ ID NO: 1561932
cucacuuaccaauguguua

SEQ ID NO: 1709168 - RNA, 19 nt, Artificial Sequence
  Description of Artificial Sequence: Synthetic oligonucleotide
  Antisense strand to SEQ ID NO: 1709167
uaacacauugguaagugag

SEQ ID NO: 1709169 - RNA, 19 nt, Artificial Sequence
  Description of Artificial Sequence: Synthetic oligonucleotide
  Sense strand starting at position 1277 of SEQ ID NO: 1561932
accaauguguuauccaucu

SEQ ID NO: 1709170 - RNA, 19 nt, Artificial Sequence
  Description of Artificial Sequence: Synthetic oligonucleotide
  Antisense strand to SEQ ID NO: 1709169
agauggauaacacauuggu

SEQ ID NO: 1709171 - RNA, 19 nt, Artificial Sequence
  Description of Artificial Sequence: Synthetic oligonucleotide
  Sense strand starting at position 1313 of SEQ ID NO: 1561932
uuugaaauguucccagcca

SEQ ID NO: 1709172 - RNA, 19 nt, Artificial Sequence
  Description of Artificial Sequence: Synthetic oligonucleotide
  Antisense strand to SEQ ID NO: 1709171
uggcugggaacauuucaaa

SEQ ID NO: 1709173 - RNA, 19 nt, Artificial Sequence
  Description of Artificial Sequence: Synthetic oligonucleotide
  Sense strand starting at position 1376 of SEQ ID NO: 1561932
accacuuuguccuuaguuu

SEQ ID NO: 1709174 - RNA, 19 nt, Artificial Sequence
  Description of Artificial Sequence: Synthetic oligonucleotide
  Antisense strand to SEQ ID NO: 1709173
aaacuaaggacaaaguggu

SEQ ID NO: 1709175 - RNA, 19 nt, Artificial Sequence
  Description of Artificial Sequence: Synthetic oligonucleotide
  Sense strand starting at position 1454 of SEQ ID NO: 1561932
gagagauaccagcguagca

SEQ ID NO: 1709176 - RNA, 19 nt, Artificial Sequence
  Description of Artificial Sequence: Synthetic oligonucleotide
  Antisense strand to SEQ ID NO: 1709175
ugcuacgcugguaucucuc

SEQ ID NO: 1709177 - RNA, 19 nt, Artificial Sequence
  Description of Artificial Sequence: Synthetic oligonucleotide
  Sense strand starting at position 1456 of SEQ ID NO: 1561932
gagauaccagcguagcaaa

SEQ ID NO: 1709178 - RNA, 19 nt, Artificial Sequence
  Description of Artificial Sequence: Synthetic oligonucleotide
  Antisense strand to SEQ ID NO: 1709177
uuugcuacgcugguaucuc

SEQ ID NO: 1709179 - RNA, 19 nt, Artificial Sequence
  Description of Artificial Sequence: Synthetic oligonucleotide
  Sense strand starting at position 1517 of SEQ ID NO: 1561932
uggugaaauuccuccaacu

SEQ ID NO: 1709180 - RNA, 19 nt, Artificial Sequence
  Description of Artificial Sequence: Synthetic oligonucleotide
  Antisense strand to SEQ ID NO: 1709179
aguuggaggaauuucacca

SEQ ID NO: 1709181 - RNA, 19 nt, Artificial Sequence
  Description of Artificial Sequence: Synthetic oligonucleotide
  Sense strand starting at position 1536 of SEQ ID NO: 1561932
uuucuaaaugugugggaau

SEQ ID NO: 1709182 - RNA, 19 nt, Artificial Sequence
  Description of Artificial Sequence: Synthetic oligonucleotide
  Antisense strand to SEQ ID NO: 1709181
auucccacacauuuagaaa

SEQ ID NO: 1709183 - RNA, 19 nt, Artificial Sequence
  Description of Artificial Sequence: Synthetic oligonucleotide
  Sense strand starting at position 1538 of SEQ ID NO: 1561932
ucuaaaugugugggaaucu

SEQ ID NO: 1709184 - RNA, 19 nt, Artificial Sequence
  Description of Artificial Sequence: Synthetic oligonucleotide
  Antisense strand to SEQ ID NO: 1709183
agauucccacacauuuaga

SEQ ID NO: 1709185 - RNA, 19 nt, Artificial Sequence
  Description of Artificial Sequence: Synthetic oligonucleotide
  Sense strand starting at position 1600 of SEQ ID NO: 1561932
aaaucagaggucuggccuu

SEQ ID NO: 1709186 - RNA, 19 nt, Artificial Sequence
  Description of Artificial Sequence: Synthetic oligonucleotide
  Antisense strand to SEQ ID NO: 1709185
aaggccagaccucugauuu

SEQ ID NO: 1709187 - RNA, 19 nt, Artificial Sequence
  Description of Artificial Sequence: Synthetic oligonucleotide
  Sense strand starting at position 1679 of SEQ ID NO: 1561932
ugccgugacuccucacaga

SEQ ID NO: 1709188 - RNA, 19 nt, Artificial Sequence
  Description of Artificial Sequence: Synthetic oligonucleotide
  Antisense strand to SEQ ID NO: 1709187
ucugugaggagucacggca

SEQ ID NO: 1709189 - RNA, 19 nt, Artificial Sequence
  Description of Artificial Sequence: Synthetic oligonucleotide
  Sense strand starting at position 2732 of SEQ ID NO: 1561932
cccggugcugcagaguaaa

SEQ ID NO: 1709190 - RNA, 19 nt, Artificial Sequence
  Description of Artificial Sequence: Synthetic oligonucleotide
  Antisense strand to SEQ ID NO: 1709189
uuuacucugcagcaccggg

SEQ ID NO: 1709191 - RNA, 19 nt, Artificial Sequence
  Description of Artificial Sequence: Synthetic oligonucleotide
  Sense strand starting at position 2790 of SEQ ID NO: 1561932
caguguugcgaguugcaga

SEQ ID NO: 1709192 - RNA, 19 nt, Artificial Sequence
  Description of Artificial Sequence: Synthetic oligonucleotide
  Antisense strand to SEQ ID NO: 1709191
ucugcaacucgcaacacug

SEQ ID NO: 1709193 - RNA, 19 nt, Artificial Sequence
  Description of Artificial Sequence: Synthetic oligonucleotide
  Sense strand starting at position 2821 of SEQ ID NO: 1561932
augucaauaccacguuuaa

SEQ ID NO: 1709194 - RNA, 19 nt, Artificial Sequence
  Description of Artificial Sequence: Synthetic oligonucleotide
  Antisense strand to SEQ ID NO: 1709193
uuaaacgugguauugacau

SEQ ID NO: 1709195 - RNA, 19 nt, Artificial Sequence
  Description of Artificial Sequence: Synthetic oligonucleotide
  Sense strand starting at position 3337 of SEQ ID NO: 1561932
aggaaugugauauguuaca

SEQ ID NO: 1709196 - RNA, 19 nt, Artificial Sequence
  Description of Artificial Sequence: Synthetic oligonucleotide
  Antisense strand to SEQ ID NO: 1709195
uguaacauaucacauuccu

SEQ ID NO: 1709197 - RNA, 19 nt, Artificial Sequence
  Description of Artificial Sequence: Synthetic oligonucleotide
  Sense strand starting at position 3363 of SEQ ID NO: 1561932
uugcaaagacuuugaaauc

SEQ ID NO: 1709198 - RNA, 19 nt, Artificial Sequence
  Description of Artificial Sequence: Synthetic oligonucleotide
  Antisense strand to SEQ ID NO: 1709197
gauuucaaagucuuugcaa

SEQ ID NO: 1709199 - RNA, 19 nt, Artificial Sequence
  Description of Artificial Sequence: Synthetic oligonucleotide
  Sense strand starting at position 3435 of SEQ ID NO: 1561932
cggaaaugcuuguucucua

SEQ ID NO: 1709200 - RNA, 19 nt, Artificial Sequence
  Description of Artificial Sequence: Synthetic oligonucleotide
  Antisense strand to SEQ ID NO: 1709199
uagagaacaagcauuuccg

SEQ ID NO: 1709201 - RNA, 19 nt, Artificial Sequence
  Description of Artificial Sequence: Synthetic oligonucleotide
  Sense strand starting at position 3436 of SEQ ID NO: 1561932
ggaaaugcuuguucucuau

SEQ ID NO: 1709202 - RNA, 19 nt, Artificial Sequence
  Description of Artificial Sequence: Synthetic oligonucleotide
  Antisense strand to SEQ ID NO: 1709201
auagagaacaagcauuucc

SEQ ID NO: 1709203 - RNA, 19 nt, Artificial Sequence
  Description of Artificial Sequence: Synthetic oligonucleotide
  Sense strand starting at position 3672 of SEQ ID NO: 1561932
gguagagguugcucugaga

SEQ ID NO: 1709204 - RNA, 19 nt, Artificial Sequence
  Description of Artificial Sequence: Synthetic oligonucleotide
  Antisense strand to SEQ ID NO: 1709203
ucucagagcaaccucuacc

SEQ ID NO: 1709205 - RNA, 19 nt, Artificial Sequence
  Description of Artificial Sequence: Synthetic oligonucleotide
  Sense strand starting at position 3679 of SEQ ID NO: 1561932
guugcucugagacaugauu

SEQ ID NO: 1709206 - RNA, 19 nt, Artificial Sequence
  Description of Artificial Sequence: Synthetic oligonucleotide
  Antisense strand to SEQ ID NO: 1709205
aaucaugucucagagcaac

SEQ ID NO: 1709207 - RNA, 19 nt, Artificial Sequence
  Description of Artificial Sequence: Synthetic oligonucleotide
  Sense strand starting at position 3801 of SEQ ID NO: 1561932
uuuacacaugaguguuaaa

SEQ ID NO: 1709208 - RNA, 19 nt, Artificial Sequence
  Description of Artificial Sequence: Synthetic oligonucleotide
  Antisense strand to SEQ ID NO: 1709207
uuuaacacucauguguaaa

SEQ ID NO: 1709209 - RNA, 19 nt, Artificial Sequence
  Description of Artificial Sequence: Synthetic oligonucleotide
  Sense strand starting at position 3812 of SEQ ID NO: 1561932
guguuaaacuggucaauau

SEQ ID NO: 1709210 - RNA, 19 nt, Artificial Sequence
  Description of Artificial Sequence: Synthetic oligonucleotide
  Antisense strand to SEQ ID NO: 1709209
auauugaccaguuuaacac

SEQ ID NO: 1709211 - RNA, 19 nt, Artificial Sequence
  Description of Artificial Sequence: Synthetic oligonucleotide
  Sense strand starting at position 3813 of SEQ ID NO: 1561932
uguuaaacuggucaauauc

SEQ ID NO: 1709212 - RNA, 19 nt, Artificial Sequence
  Description of Artificial Sequence: Synthetic oligonucleotide
  Antisense strand to SEQ ID NO: 1709211
gauauugaccaguuuaaca

SEQ ID NO: 1709213 - RNA, 19 nt, Artificial Sequence
  Description of Artificial Sequence: Synthetic oligonucleotide
  Sense strand starting at position 3822 of SEQ ID NO: 1561932
ggucaauauccacagagcu

SEQ ID NO: 1709214 - RNA, 19 nt, Artificial Sequence
  Description of Artificial Sequence: Synthetic oligonucleotide
  Antisense strand to SEQ ID NO: 1709213
agcucuguggauauugacc

SEQ ID NO: 1709215 - RNA, 19 nt, Artificial Sequence
  Description of Artificial Sequence: Synthetic oligonucleotide
  Sense strand starting at position 91 of SEQ ID NO: 1561933
acuauaagugaggguguaa

SEQ ID NO: 1709216 - RNA, 19 nt, Artificial Sequence
  Description of Artificial Sequence: Synthetic oligonucleotide
  Antisense strand to SEQ ID NO: 1709215
uuacacccucacuuauagu

SEQ ID NO: 1709217 - RNA, 19 nt, Artificial Sequence
  Description of Artificial Sequence: Synthetic oligonucleotide
  Sense strand starting at position 184 of SEQ ID NO: 1561933
ugugguaaaccuggagaca

SEQ ID NO: 1709218 - RNA, 19 nt, Artificial Sequence
  Description of Artificial Sequence: Synthetic oligonucleotide
  Antisense strand to SEQ ID NO: 1709217
ugucuccagguuuaccaca

SEQ ID NO: 1709219 - RNA, 19 nt, Artificial Sequence
  Description of Artificial Sequence: Synthetic oligonucleotide
  Sense strand starting at position 344 of SEQ ID NO: 1561933
caaguauuacaggguuauu

SEQ ID NO: 1709220 - RNA, 19 nt, Artificial Sequence
  Description of Artificial Sequence: Synthetic oligonucleotide
  Antisense strand to SEQ ID NO: 1709219
aauaacccuguaauacuug

SEQ ID NO: 1709221 - RNA, 19 nt, Artificial Sequence
  Description of Artificial Sequence: Synthetic oligonucleotide
  Sense strand starting at position 347 of SEQ ID NO: 1561933
guauuacaggguuauugag

SEQ ID NO: 1709222 - RNA, 19 nt, Artificial Sequence
  Description of Artificial Sequence: Synthetic oligonucleotide
  Antisense strand to SEQ ID NO: 1709221
cucaauaacccuguaauac

SEQ ID NO: 1709223 - RNA, 19 nt, Artificial Sequence
  Description of Artificial Sequence: Synthetic oligonucleotide
  Sense strand starting at position 408 of SEQ ID NO: 1561933
ugguuaauuccuugaggca

SEQ ID NO: 1709224 - RNA, 19 nt, Artificial Sequence
  Description of Artificial Sequence: Synthetic oligonucleotide
  Antisense strand to SEQ ID NO: 1709223
ugccucaaggaauuaacca

SEQ ID NO: 1709225 - RNA, 19 nt, Artificial Sequence
  Description of Artificial Sequence: Synthetic oligonucleotide
  Sense strand starting at position 409 of SEQ ID NO: 1561933
gguuaauuccuugaggcac

SEQ ID NO: 1709226 - RNA, 19 nt, Artificial Sequence
  Description of Artificial Sequence: Synthetic oligonucleotide
  Antisense strand to SEQ ID NO: 1709225
gugccucaaggaauuaacc

SEQ ID NO: 1709227 - RNA, 19 nt, Artificial Sequence
  Description of Artificial Sequence: Synthetic oligonucleotide
  Sense strand starting at position 441 of SEQ ID NO: 1561933
uugggagagcugugauuca

SEQ ID NO: 1709228 - RNA, 19 nt, Artificial Sequence
  Description of Artificial Sequence: Synthetic oligonucleotide
  Antisense strand to SEQ ID NO: 1709227
ugaaucacagcucucccaa

SEQ ID NO: 1709229 - RNA, 19 nt, Artificial Sequence
  Description of Artificial Sequence: Synthetic oligonucleotide
  Sense strand starting at position 543 of SEQ ID NO: 1561933
ggacucagcuuacuaauaa

SEQ ID NO: 1709230 - RNA, 19 nt, Artificial Sequence
  Description of Artificial Sequence: Synthetic oligonucleotide
  Antisense strand to SEQ ID NO: 1709229
uuauuaguaagcugagucc

SEQ ID NO: 1709231 - RNA, 19 nt, Artificial Sequence
  Description of Artificial Sequence: Synthetic oligonucleotide
  Sense strand starting at position 565 of SEQ ID NO: 1561933
acagguaaauauguaacau

SEQ ID NO: 1709232 - RNA, 19 nt, Artificial Sequence
  Description of Artificial Sequence: Synthetic oligonucleotide
  Antisense strand to SEQ ID NO: 1709231
auguuacauauuuaccugu

SEQ ID NO: 1709233 - RNA, 19 nt, Artificial Sequence
  Description of Artificial Sequence: Synthetic oligonucleotide
  Sense strand starting at position 578 of SEQ ID NO: 1561933
uaacaucugcagcgagaga

SEQ ID NO: 1709234 - RNA, 19 nt, Artificial Sequence
  Description of Artificial Sequence: Synthetic oligonucleotide
  Antisense strand to SEQ ID NO: 1709233
ucucucgcugcagauguua

SEQ ID NO: 1709235 - RNA, 19 nt, Artificial Sequence
  Description of Artificial Sequence: Synthetic oligonucleotide
  Sense strand starting at position 656 of SEQ ID NO: 1561933
uguggaaugccucaguaaa

SEQ ID NO: 1709236 - RNA, 19 nt, Artificial Sequence
  Description of Artificial Sequence: Synthetic oligonucleotide
  Antisense strand to SEQ ID NO: 1709235
uuuacugaggcauuccaca

SEQ ID NO: 1709237 - RNA, 19 nt, Artificial Sequence
  Description of Artificial Sequence: Synthetic oligonucleotide
  Sense strand starting at position 658 of SEQ ID NO: 1561933
uggaaugccucaguaaagu

SEQ ID NO: 1709238 - RNA, 19 nt, Artificial Sequence
  Description of Artificial Sequence: Synthetic oligonucleotide
  Antisense strand to SEQ ID NO: 1709237
acuuuacugaggcauucca

SEQ ID NO: 1709239 - RNA, 19 nt, Artificial Sequence
  Description of Artificial Sequence: Synthetic oligonucleotide
  Sense strand starting at position 725 of SEQ ID NO: 1561933
ugccuagugauccagcaag

SEQ ID NO: 1709240 - RNA, 19 nt, Artificial Sequence
  Description of Artificial Sequence: Synthetic oligonucleotide
  Antisense strand to SEQ ID NO: 1709239
cuugcuggaucacuaggca

SEQ ID NO: 1709241 - RNA, 19 nt, Artificial Sequence
  Description of Artificial Sequence: Synthetic oligonucleotide
  Sense strand starting at position 751 of SEQ ID NO: 1561933
cagucuagcggugaagaua

SEQ ID NO: 1709242 - RNA, 19 nt, Artificial Sequence
  Description of Artificial Sequence: Synthetic oligonucleotide
  Antisense strand to SEQ ID NO: 1709241
uaucuucaccgcuagacug

SEQ ID NO: 1709243 - RNA, 19 nt, Artificial Sequence
  Description of Artificial Sequence: Synthetic oligonucleotide
  Sense strand starting at position 1327 of SEQ ID NO: 1561933
gcgacaauucucuaaagca

SEQ ID NO: 1709244 - RNA, 19 nt, Artificial Sequence
  Description of Artificial Sequence: Synthetic oligonucleotide
  Antisense strand to SEQ ID NO: 1709243
ugcuuuagagaauugucgc

SEQ ID NO: 1709245 - RNA, 19 nt, Artificial Sequence
  Description of Artificial Sequence: Synthetic oligonucleotide
  Sense strand starting at position 1627 of SEQ ID NO: 1561933
gcucgagauugggugacaa

SEQ ID NO: 1709246 - RNA, 19 nt, Artificial Sequence
  Description of Artificial Sequence: Synthetic oligonucleotide
  Antisense strand to SEQ ID NO: 1709245
uugucacccaaucucgagc

SEQ ID NO: 1709247 - RNA, 19 nt, Artificial Sequence
  Description of Artificial Sequence: Synthetic oligonucleotide
  Sense strand starting at position 1838 of SEQ ID NO: 1561933
ggacguuaccuccaacaug

SEQ ID NO: 1709248 - RNA, 19 nt, Artificial Sequence
  Description of Artificial Sequence: Synthetic oligonucleotide
  Antisense strand to SEQ ID NO: 1709247
cauguuggagguaacgucc

SEQ ID NO: 1709249 - RNA, 19 nt, Artificial Sequence
  Description of Artificial Sequence: Synthetic oligonucleotide
  Sense strand starting at position 1886 of SEQ ID NO: 1561933
gagaguguuguccaaguca

SEQ ID NO: 1709250 - RNA, 19 nt, Artificial Sequence
  Description of Artificial Sequence: Synthetic oligonucleotide
  Antisense strand to SEQ ID NO: 1709249
ugacuuggacaacacucuc

SEQ ID NO: 1709251 - RNA, 19 nt, Artificial Sequence
  Description of Artificial Sequence: Synthetic oligonucleotide
  Sense strand starting at position 2062 of SEQ ID NO: 1561933
ucccgcgaucugucucauu

SEQ ID NO: 1709252 - RNA, 19 nt, Artificial Sequence
  Description of Artificial Sequence: Synthetic oligonucleotide
  Antisense strand to SEQ ID NO: 1709251
aaugagacagaucgcggga

SEQ ID NO: 1709253 - RNA, 19 nt, Artificial Sequence
  Description of Artificial Sequence: Synthetic oligonucleotide
  Sense strand starting at position 2121 of SEQ ID NO: 1561933
aggguauggucucucaaga

SEQ ID NO: 1709254 - RNA, 19 nt, Artificial Sequence
  Description of Artificial Sequence: Synthetic oligonucleotide
  Antisense strand to SEQ ID NO: 1709253
ucuugagagaccauacccu

SEQ ID NO: 1709255 - RNA, 19 nt, Artificial Sequence
  Description of Artificial Sequence: Synthetic oligonucleotide
  Sense strand starting at position 2537 of SEQ ID NO: 1561933
acguuucugaaggauguga

SEQ ID NO: 1709256 - RNA, 19 nt, Artificial Sequence
  Description of Artificial Sequence: Synthetic oligonucleotide
  Antisense strand to SEQ ID NO: 1709255
ucacauccuucagaaacgu

SEQ ID NO: 1709257 - RNA, 19 nt, Artificial Sequence
  Description of Artificial Sequence: Synthetic oligonucleotide
  Sense strand starting at position 2539 of SEQ ID NO: 1561933
guuucugaaggaugugacu

SEQ ID NO: 1709258 - RNA, 19 nt, Artificial Sequence
  Description of Artificial Sequence: Synthetic oligonucleotide
  Antisense strand to SEQ ID NO: 1709257
agucacauccuucagaaac

SEQ ID NO: 1709259 - RNA, 19 nt, Artificial Sequence
  Description of Artificial Sequence: Synthetic oligonucleotide
  Sense strand starting at position 2553 of SEQ ID NO: 1561933
ugacuugggucucuuacaa

SEQ ID NO: 1709260 - RNA, 19 nt, Artificial Sequence
  Description of Artificial Sequence: Synthetic oligonucleotide
  Antisense strand to SEQ ID NO: 1709259
uuguaagagacccaaguca

SEQ ID NO: 1709261 - RNA, 19 nt, Artificial Sequence
  Description of Artificial Sequence: Synthetic oligonucleotide
  Sense strand starting at position 2825 of SEQ ID NO: 1561933
uggguaccuuuacuguaau

SEQ ID NO: 1709262 - RNA, 19 nt, Artificial Sequence
  Description of Artificial Sequence: Synthetic oligonucleotide
  Antisense strand to SEQ ID NO: 1709261
auuacaguaaagguaccca

SEQ ID NO: 1709263 - RNA, 19 nt, Artificial Sequence
  Description of Artificial Sequence: Synthetic oligonucleotide
  Sense strand starting at position 2844 of SEQ ID NO: 1561933
uuggauauguggucaucau

SEQ ID NO: 1709264 - RNA, 19 nt, Artificial Sequence
  Description of Artificial Sequence: Synthetic oligonucleotide
  Antisense strand to SEQ ID NO: 1709263
augaugaccacauauccaa

SEQ ID NO: 1709265 - RNA, 19 nt, Artificial Sequence
  Description of Artificial Sequence: Synthetic oligonucleotide
  Sense strand starting at position 2845 of SEQ ID NO: 1561933
uggauauguggucaucauu

SEQ ID NO: 1709266 - RNA, 19 nt, Artificial Sequence
  Description of Artificial Sequence: Synthetic oligonucleotide
  Antisense strand to SEQ ID NO: 1709265
aaugaugaccacauaucca

SEQ ID NO: 1709267 - RNA, 19 nt, Artificial Sequence
  Description of Artificial Sequence: Synthetic oligonucleotide
  Sense strand starting at position 2848 of SEQ ID NO: 1561933
auauguggucaucauuagu

SEQ ID NO: 1709268 - RNA, 19 nt, Artificial Sequence
  Description of Artificial Sequence: Synthetic oligonucleotide
  Antisense strand to SEQ ID NO: 1709267
acuaaugaugaccacauau

SEQ ID NO: 1709269 - RNA, 19 nt, Artificial Sequence
  Description of Artificial Sequence: Synthetic oligonucleotide
  Sense strand starting at position 3408 of SEQ ID NO: 1561933
agcagacagaguugaguaa

SEQ ID NO: 1709270 - RNA, 19 nt, Artificial Sequence
  Description of Artificial Sequence: Synthetic oligonucleotide
  Antisense strand to SEQ ID NO: 1709269
uuacucaacucugucugcu

SEQ ID NO: 1709271 - RNA, 19 nt, Artificial Sequence
  Description of Artificial Sequence: Synthetic oligonucleotide
  Sense strand starting at position 3409 of SEQ ID NO: 1561933
gcagacagaguugaguaau

SEQ ID NO: 1709272 - RNA, 19 nt, Artificial Sequence
  Description of Artificial Sequence: Synthetic oligonucleotide
  Antisense strand to SEQ ID NO: 1709271
auuacucaacucugucugc

SEQ ID NO: 1709273 - RNA, 19 nt, Artificial Sequence
  Description of Artificial Sequence: Synthetic oligonucleotide
  Sense strand starting at position 3415 of SEQ ID NO: 1561933
agaguugaguaauuguaag

SEQ ID NO: 1709274 - RNA, 19 nt, Artificial Sequence
  Description of Artificial Sequence: Synthetic oligonucleotide
  Antisense strand to SEQ ID NO: 1709273
cuuacaauuacucaacucu

SEQ ID NO: 1709275 - RNA, 19 nt, Artificial Sequence
  Description of Artificial Sequence: Synthetic oligonucleotide
  Sense strand starting at position 3421 of SEQ ID NO: 1561933
gaguaauuguaagcgagac

SEQ ID NO: 1709276 - RNA, 19 nt, Artificial Sequence
  Description of Artificial Sequence: Synthetic oligonucleotide
  Antisense strand to SEQ ID NO: 1709275
gucucgcuuacaauuacuc

SEQ ID NO: 1709277 - RNA, 19 nt, Artificial Sequence
  Description of Artificial Sequence: Synthetic oligonucleotide
  Sense strand starting at position 3423 of SEQ ID NO: 1561933
guaauuguaagcgagacca

SEQ ID NO: 1709278 - RNA, 19 nt, Artificial Sequence
  Description of Artificial Sequence: Synthetic oligonucleotide
  Antisense strand to SEQ ID NO: 1709277
uggucucgcuuacaauuac

SEQ ID NO: 1709279 - RNA, 19 nt, Artificial Sequence
  Description of Artificial Sequence: Synthetic oligonucleotide
  Sense strand starting at position 3525 of SEQ ID NO: 1561933
uuaacagaccacugauguu

SEQ ID NO: 1709280 - RNA, 19 nt, Artificial Sequence
  Description of Artificial Sequence: Synthetic oligonucleotide
  Antisense strand to SEQ ID NO: 1709279
aacaucaguggucuguuaa

SEQ ID NO: 1709281 - RNA, 19 nt, Artificial Sequence
  Description of Artificial Sequence: Synthetic oligonucleotide
  Sense strand starting at position 3548 of SEQ ID NO: 1561933
agguuagauuaauugguuu

SEQ ID NO: 1709282 - RNA, 19 nt, Artificial Sequence
  Description of Artificial Sequence: Synthetic oligonucleotide
  Antisense strand to SEQ ID NO: 1709281
aaaccaauuaaucuaaccu

SEQ ID NO: 1709283 - RNA, 19 nt, Artificial Sequence
  Description of Artificial Sequence: Synthetic oligonucleotide
  Sense strand starting at position 3579 of SEQ ID NO: 1561933
auaggaguuucuucugcag

SEQ ID NO: 1709284 - RNA, 19 nt, Artificial Sequence
  Description of Artificial Sequence: Synthetic oligonucleotide
  Antisense strand to SEQ ID NO: 1709283
cugcagaagaaacuccuau

SEQ ID NO: 1709285 - RNA, 19 nt, Artificial Sequence
  Description of Artificial Sequence: Synthetic oligonucleotide
  Sense strand starting at position 3644 of SEQ ID NO: 1561933
uugacaucucauugcuaug

SEQ ID NO: 1709286 - RNA, 19 nt, Artificial Sequence
  Description of Artificial Sequence: Synthetic oligonucleotide
  Antisense strand to SEQ ID NO: 1709285
cauagcaaugagaugucaa

SEQ ID NO: 1709287 - RNA, 19 nt, Artificial Sequence
  Description of Artificial Sequence: Synthetic oligonucleotide
  Sense strand starting at position 3649 of SEQ ID NO: 1561933
aucucauugcuauggugga

SEQ ID NO: 1709288 - RNA, 19 nt, Artificial Sequence
  Description of Artificial Sequence: Synthetic oligonucleotide
  Antisense strand to SEQ ID NO: 1709287
uccaccauagcaaugagau

SEQ ID NO: 1709289 - RNA, 19 nt, Artificial Sequence
  Description of Artificial Sequence: Synthetic oligonucleotide
  Sense strand starting at position 3653 of SEQ ID NO: 1561933
cauugcuaugguggagaau

SEQ ID NO: 1709290 - RNA, 19 nt, Artificial Sequence
  Description of Artificial Sequence: Synthetic oligonucleotide
  Antisense strand to SEQ ID NO: 1709289
auucuccaccauagcaaug

SEQ ID NO: 1709291 - RNA, 19 nt, Artificial Sequence
  Description of Artificial Sequence: Synthetic oligonucleotide
  Sense strand starting at position 3782 of SEQ ID NO: 1561933
uggugaauuaauuggaguu

SEQ ID NO: 1709292 - RNA, 19 nt, Artificial Sequence
  Description of Artificial Sequence: Synthetic oligonucleotide
  Antisense strand to SEQ ID NO: 1709291
aacuccaauuaauucacca

SEQ ID NO: 1709293 - RNA, 19 nt, Artificial Sequence
  Description of Artificial Sequence: Synthetic oligonucleotide
  Sense strand starting at position 3783 of SEQ ID NO: 1561933
ggugaauuaauuggaguua

SEQ ID NO: 1709294 - RNA, 19 nt, Artificial Sequence
  Description of Artificial Sequence: Synthetic oligonucleotide
  Antisense strand to SEQ ID NO: 1709293
uaacuccaauuaauucacc

SEQ ID NO: 1709295 - RNA, 19 nt, Artificial Sequence
  Description of Artificial Sequence: Synthetic oligonucleotide
  Sense strand starting at position 20 of SEQ ID NO: 1561934
agcacuuccugacuugaaa

SEQ ID NO: 1709296 - RNA, 19 nt, Artificial Sequence
  Description of Artificial Sequence: Synthetic oligonucleotide
  Antisense strand to SEQ ID NO: 1709295
uuucaagucaggaagugcu

SEQ ID NO: 1709297 - RNA, 19 nt, Artificial Sequence
  Description of Artificial Sequence: Synthetic oligonucleotide
  Sense strand starting at position 242 of SEQ ID NO: 1561934
agaaaccagcugugauaaa

SEQ ID NO: 1709298 - RNA, 19 nt, Artificial Sequence
  Description of Artificial Sequence: Synthetic oligonucleotide
  Antisense strand to SEQ ID NO: 1709297
uuuaucacagcugguuucu

SEQ ID NO: 1709299 - RNA, 19 nt, Artificial Sequence
  Description of Artificial Sequence: Synthetic oligonucleotide
  Sense strand starting at position 254 of SEQ ID NO: 1561934
ugauaaacguccucugaga

SEQ ID NO: 1709300 - RNA, 19 nt, Artificial Sequence
  Description of Artificial Sequence: Synthetic oligonucleotide
  Antisense strand to SEQ ID NO: 1709299
ucucagaggacguuuauca

SEQ ID NO: 1709301 - RNA, 19 nt, Artificial Sequence
  Description of Artificial Sequence: Synthetic oligonucleotide
  Sense strand starting at position 319 of SEQ ID NO: 1561934
uuaugcauuucugcaguua

SEQ ID NO: 1709302 - RNA, 19 nt, Artificial Sequence
  Description of Artificial Sequence: Synthetic oligonucleotide
  Antisense strand to SEQ ID NO: 1709301
uaacugcagaaaugcauaa

SEQ ID NO: 1709303 - RNA, 19 nt, Artificial Sequence
  Description of Artificial Sequence: Synthetic oligonucleotide
  Sense strand starting at position 350 of SEQ ID NO: 1561934
gcaacuuguccuuaagcau

SEQ ID NO: 1709304 - RNA, 19 nt, Artificial Sequence
  Description of Artificial Sequence: Synthetic oligonucleotide
  Antisense strand to SEQ ID NO: 1709303
augcuuaaggacaaguugc

SEQ ID NO: 1709305 - RNA, 19 nt, Artificial Sequence
  Description of Artificial Sequence: Synthetic oligonucleotide
  Sense strand starting at position 381 of SEQ ID NO: 1561934
uaucaauagcgguaaagua

SEQ ID NO: 1709306 - RNA, 19 nt, Artificial Sequence
  Description of Artificial Sequence: Synthetic oligonucleotide
  Antisense strand to SEQ ID NO: 1709305
uacuuuaccgcuauugaua

SEQ ID NO: 1709307 - RNA, 19 nt, Artificial Sequence
  Description of Artificial Sequence: Synthetic oligonucleotide
  Sense strand starting at position 451 of SEQ ID NO: 1561934
uuaugucugucuucugaaa

SEQ ID NO: 1709308 - RNA, 19 nt, Artificial Sequence
  Description of Artificial Sequence: Synthetic oligonucleotide
  Antisense strand to SEQ ID NO: 1709307
uuucagaagacagacauaa

SEQ ID NO: 1709309 - RNA, 19 nt, Artificial Sequence
  Description of Artificial Sequence: Synthetic oligonucleotide
  Sense strand starting at position 477 of SEQ ID NO: 1561934
ugaacugaauguguacaga

SEQ ID NO: 1709310 - RNA, 19 nt, Artificial Sequence
  Description of Artificial Sequence: Synthetic oligonucleotide
  Antisense strand to SEQ ID NO: 1709309
ucuguacacauucaguuca

SEQ ID NO: 1709311 - RNA, 19 nt, Artificial Sequence
  Description of Artificial Sequence: Synthetic oligonucleotide
  Sense strand starting at position 509 of SEQ ID NO: 1561934
cuagucaugcaauggguua

SEQ ID NO: 1709312 - RNA, 19 nt, Artificial Sequence
  Description of Artificial Sequence: Synthetic oligonucleotide
  Antisense strand to SEQ ID NO: 1709311
uaacccauugcaugacuag

SEQ ID NO: 1709313 - RNA, 19 nt, Artificial Sequence
  Description of Artificial Sequence: Synthetic oligonucleotide
  Sense strand starting at position 514 of SEQ ID NO: 1561934
caugcaauggguuaaguau

SEQ ID NO: 1709314 - RNA, 19 nt, Artificial Sequence
  Description of Artificial Sequence: Synthetic oligonucleotide
  Antisense strand to SEQ ID NO: 1709313
auacuuaacccauugcaug

SEQ ID NO: 1709315 - RNA, 19 nt, Artificial Sequence
  Description of Artificial Sequence: Synthetic oligonucleotide
  Sense strand starting at position 725 of SEQ ID NO: 1561934
acggaagaauuacaggaaa

SEQ ID NO: 1709316 - RNA, 19 nt, Artificial Sequence
  Description of Artificial Sequence: Synthetic oligonucleotide
  Antisense strand to SEQ ID NO: 1709315
uuuccuguaauucuuccgu

SEQ ID NO: 1709317 - RNA, 19 nt, Artificial Sequence
  Description of Artificial Sequence: Synthetic oligonucleotide
  Sense strand starting at position 805 of SEQ ID NO: 1561934
ggaggcucuggcuaucaau

SEQ ID NO: 1709318 - RNA, 19 nt, Artificial Sequence
  Description of Artificial Sequence: Synthetic oligonucleotide
  Antisense strand to SEQ ID NO: 1709317
auugauagccagagccucc

SEQ ID NO: 1709319 - RNA, 19 nt, Artificial Sequence
  Description of Artificial Sequence: Synthetic oligonucleotide
  Sense strand starting at position 819 of SEQ ID NO: 1561934
ucaaucaaucuccggagaa

SEQ ID NO: 1709320 - RNA, 19 nt, Artificial Sequence
  Description of Artificial Sequence: Synthetic oligonucleotide
  Antisense strand to SEQ ID NO: 1709319
uucuccggagauugauuga

SEQ ID NO: 1709321 - RNA, 19 nt, Artificial Sequence
  Description of Artificial Sequence: Synthetic oligonucleotide
  Sense strand starting at position 877 of SEQ ID NO: 1561934
ucaaguauuuacuaaaggu

SEQ ID NO: 1709322 - RNA, 19 nt, Artificial Sequence
  Description of Artificial Sequence: Synthetic oligonucleotide
  Antisense strand to SEQ ID NO: 1709321
accuuuaguaaauacuuga

SEQ ID NO: 1709323 - RNA, 19 nt, Artificial Sequence
  Description of Artificial Sequence: Synthetic oligonucleotide
  Sense strand starting at position 1099 of SEQ ID NO: 1561934
ggcuucagcguggcgaaau

SEQ ID NO: 1709324 - RNA, 19 nt, Artificial Sequence
  Description of Artificial Sequence: Synthetic oligonucleotide
  Antisense strand to SEQ ID NO: 1709323
auuucgccacgcugaagcc

SEQ ID NO: 1709325 - RNA, 19 nt, Artificial Sequence
  Description of Artificial Sequence: Synthetic oligonucleotide
  Sense strand starting at position 1992 of SEQ ID NO: 1561934
aggccuuucgggagcugua

SEQ ID NO: 1709326 - RNA, 19 nt, Artificial Sequence
  Description of Artificial Sequence: Synthetic oligonucleotide
  Antisense strand to SEQ ID NO: 1709325
uacagcucccgaaaggccu

SEQ ID NO: 1709327 - RNA, 19 nt, Artificial Sequence
  Description of Artificial Sequence: Synthetic oligonucleotide
  Sense strand starting at position 2208 of SEQ ID NO: 1561934
auccguggccucuaguaaa

SEQ ID NO: 1709328 - RNA, 19 nt, Artificial Sequence
  Description of Artificial Sequence: Synthetic oligonucleotide
  Antisense strand to SEQ ID NO: 1709327
uuuacuagaggccacggau

SEQ ID NO: 1709329 - RNA, 19 nt, Artificial Sequence
  Description of Artificial Sequence: Synthetic oligonucleotide
  Sense strand starting at position 2501 of SEQ ID NO: 1561934
gguuauaaaugaguugcau

SEQ ID NO: 1709330 - RNA, 19 nt, Artificial Sequence
  Description of Artificial Sequence: Synthetic oligonucleotide
  Antisense strand to SEQ ID NO: 1709329
augcaacucauuuauaacc

SEQ ID NO: 1709331 - RNA, 19 nt, Artificial Sequence
  Description of Artificial Sequence: Synthetic oligonucleotide
  Sense strand starting at position 2600 of SEQ ID NO: 1561934
acauaauacuggccauagu

SEQ ID NO: 1709332 - RNA, 19 nt, Artificial Sequence
  Description of Artificial Sequence: Synthetic oligonucleotide
  Antisense strand to SEQ ID NO: 1709331
acuauggccaguauuaugu

SEQ ID NO: 1709333 - RNA, 19 nt, Artificial Sequence
  Description of Artificial Sequence: Synthetic oligonucleotide
  Sense strand starting at position 2698 of SEQ ID NO: 1561934
gauccugugccagagacuu

SEQ ID NO: 1709334 - RNA, 19 nt, Artificial Sequence
  Description of Artificial Sequence: Synthetic oligonucleotide
  Antisense strand to SEQ ID NO: 1709333
aagucucuggcacaggauc

SEQ ID NO: 1709335 - RNA, 19 nt, Artificial Sequence
  Description of Artificial Sequence: Synthetic oligonucleotide
  Sense strand starting at position 2815 of SEQ ID NO: 1561934
acugccaagugagauuuau

SEQ ID NO: 1709336 - RNA, 19 nt, Artificial Sequence
  Description of Artificial Sequence: Synthetic oligonucleotide
  Antisense strand to SEQ ID NO: 1709335
auaaaucucacuuggcagu

SEQ ID NO: 1709337 - RNA, 19 nt, Artificial Sequence
  Description of Artificial Sequence: Synthetic oligonucleotide
  Sense strand starting at position 2824 of SEQ ID NO: 1561934
ugagauuuaugacaguuuc

SEQ ID NO: 1709338 - RNA, 19 nt, Artificial Sequence
  Description of Artificial Sequence: Synthetic oligonucleotide
  Antisense strand to SEQ ID NO: 1709337
gaaacugucauaaaucuca

SEQ ID NO: 1709339 - RNA, 19 nt, Artificial Sequence
  Description of Artificial Sequence: Synthetic oligonucleotide
  Sense strand starting at position 2891 of SEQ ID NO: 1561934
aaugaagacugucuguaga

SEQ ID NO: 1709340 - RNA, 19 nt, Artificial Sequence
  Description of Artificial Sequence: Synthetic oligonucleotide
  Antisense strand to SEQ ID NO: 1709339
ucuacagacagucuucauu

SEQ ID NO: 1709341 - RNA, 19 nt, Artificial Sequence
  Description of Artificial Sequence: Synthetic oligonucleotide
  Sense strand starting at position 3013 of SEQ ID NO: 1561934
gcucuucgugcaguuuauu

SEQ ID NO: 1709342 - RNA, 19 nt, Artificial Sequence
  Description of Artificial Sequence: Synthetic oligonucleotide
  Antisense strand to SEQ ID NO: 1709341
aauaaacugcacgaagagc

SEQ ID NO: 1709343 - RNA, 19 nt, Artificial Sequence
  Description of Artificial Sequence: Synthetic oligonucleotide
  Sense strand starting at position 3019 of SEQ ID NO: 1561934
cgugcaguuuauuuacgau

SEQ ID NO: 1709344 - RNA, 19 nt, Artificial Sequence
  Description of Artificial Sequence: Synthetic oligonucleotide
  Antisense strand to SEQ ID NO: 1709343
aucguaaauaaacugcacg

SEQ ID NO: 1709345 - RNA, 19 nt, Artificial Sequence
  Description of Artificial Sequence: Synthetic oligonucleotide
  Sense strand starting at position 3031 of SEQ ID NO: 1561934
uuacgauuacuacaugcau

SEQ ID NO: 1709346 - RNA, 19 nt, Artificial Sequence
  Description of Artificial Sequence: Synthetic oligonucleotide
  Antisense strand to SEQ ID NO: 1709345
augcauguaguaaucguaa

SEQ ID NO: 1709347 - RNA, 19 nt, Artificial Sequence
  Description of Artificial Sequence: Synthetic oligonucleotide
  Sense strand starting at position 3106 of SEQ ID NO: 1561934
auuggaggugaccguaaau

SEQ ID NO: 1709348 - RNA, 19 nt, Artificial Sequence
  Description of Artificial Sequence: Synthetic oligonucleotide
  Antisense strand to SEQ ID NO: 1709347
auuuacggucaccuccaau

SEQ ID NO: 1709349 - RNA, 19 nt, Artificial Sequence
  Description of Artificial Sequence: Synthetic oligonucleotide
  Sense strand starting at position 3193 of SEQ ID NO: 1561934
ggcuuaauggagugaggcu

SEQ ID NO: 1709350 - RNA, 19 nt, Artificial Sequence
  Description of Artificial Sequence: Synthetic oligonucleotide
  Antisense strand to SEQ ID NO: 1709349
agccucacuccauuaagcc

SEQ ID NO: 1709351 - RNA, 19 nt, Artificial Sequence
  Description of Artificial Sequence: Synthetic oligonucleotide
  Sense strand starting at position 3194 of SEQ ID NO: 1561934
gcuuaauggagugaggcua

SEQ ID NO: 1709352 - RNA, 19 nt, Artificial Sequence
  Description of Artificial Sequence: Synthetic oligonucleotide
  Antisense strand to SEQ ID NO: 1709351
uagccucacuccauuaagc

SEQ ID NO: 1709353 - RNA, 19 nt, Artificial Sequence
  Description of Artificial Sequence: Synthetic oligonucleotide
  Sense strand starting at position 3226 of SEQ ID NO: 1561934
uaaguaaaucaguguguug

SEQ ID NO: 1709354 - RNA, 19 nt, Artificial Sequence
  Description of Artificial Sequence: Synthetic oligonucleotide
  Antisense strand to SEQ ID NO: 1709353
caacacacugauuuacuua

SEQ ID NO: 1709355 - RNA, 19 nt, Artificial Sequence
  Description of Artificial Sequence: Synthetic oligonucleotide
  Sense strand starting at position 3240 of SEQ ID NO: 1561934
uguugauuaaaucaguugu

SEQ ID NO: 1709356 - RNA, 19 nt, Artificial Sequence
  Description of Artificial Sequence: Synthetic oligonucleotide
  Antisense strand to SEQ ID NO: 1709355
acaacugauuuaaucaaca

SEQ ID NO: 1709357 - RNA, 19 nt, Artificial Sequence
  Description of Artificial Sequence: Synthetic oligonucleotide
  Sense strand starting at position 3246 of SEQ ID NO: 1561934
uuaaaucaguuguucccua

SEQ ID NO: 1709358 - RNA, 19 nt, Artificial Sequence
  Description of Artificial Sequence: Synthetic oligonucleotide
  Antisense strand to SEQ ID NO: 1709357
uagggaacaacugauuuaa

SEQ ID NO: 1709359 - RNA, 19 nt, Artificial Sequence
  Description of Artificial Sequence: Synthetic oligonucleotide
  Sense strand starting at position 3410 of SEQ ID NO: 1561934
aguucuagauucucauauc

SEQ ID NO: 1709360 - RNA, 19 nt, Artificial Sequence
  Description of Artificial Sequence: Synthetic oligonucleotide
  Antisense strand to SEQ ID NO: 1709359
gauaugagaaucuagaacu

SEQ ID NO: 1709361 - RNA, 19 nt, Artificial Sequence
  Description of Artificial Sequence: Synthetic oligonucleotide
  Sense strand starting at position 3418 of SEQ ID NO: 1561934
auucucauaucuguaguca

SEQ ID NO: 1709362 - RNA, 19 nt, Artificial Sequence
  Description of Artificial Sequence: Synthetic oligonucleotide
  Antisense strand to SEQ ID NO: 1709361
ugacuacagauaugagaau

SEQ ID NO: 1709363 - RNA, 19 nt, Artificial Sequence
  Description of Artificial Sequence: Synthetic oligonucleotide
  Sense strand starting at position 3506 of SEQ ID NO: 1561934
gguuucuaguaauuuccuu

SEQ ID NO: 1709364 - RNA, 19 nt, Artificial Sequence
  Description of Artificial Sequence: Synthetic oligonucleotide
  Antisense strand to SEQ ID NO: 1709363
aaggaaauuacuagaaacc

SEQ ID NO: 1709365 - RNA, 19 nt, Artificial Sequence
  Description of Artificial Sequence: Synthetic oligonucleotide
  Sense strand starting at position 3607 of SEQ ID NO: 1561934
ccuuaauuacuggguagag

SEQ ID NO: 1709366 - RNA, 19 nt, Artificial Sequence
  Description of Artificial Sequence: Synthetic oligonucleotide
  Antisense strand to SEQ ID NO: 1709365
cucuacccaguaauuaagg

SEQ ID NO: 1709367 - RNA, 19 nt, Artificial Sequence
  Description of Artificial Sequence: Synthetic oligonucleotide
  Sense strand starting at position 3677 of SEQ ID NO: 1561934
agaugaaccucacagaaua

SEQ ID NO: 1709368 - RNA, 19 nt, Artificial Sequence
  Description of Artificial Sequence: Synthetic oligonucleotide
  Antisense strand to SEQ ID NO: 1709367
uauucugugagguucaucu

SEQ ID NO: 1709369 - RNA, 19 nt, Artificial Sequence
  Description of Artificial Sequence: Synthetic oligonucleotide
  Sense strand starting at position 3906 of SEQ ID NO: 1561934
guuccauuucuuggcugua

SEQ ID NO: 1709370 - RNA, 19 nt, Artificial Sequence
  Description of Artificial Sequence: Synthetic oligonucleotide
  Antisense strand to SEQ ID NO: 1709369
uacagccaagaaauggaac

SEQ ID NO: 1709371 - RNA, 19 nt, Artificial Sequence
  Description of Artificial Sequence: Synthetic oligonucleotide
  Sense strand starting at position 3909 of SEQ ID NO: 1561934
ccauuucuuggcuguacua

SEQ ID NO: 1709372 - RNA, 19 nt, Artificial Sequence
  Description of Artificial Sequence: Synthetic oligonucleotide
  Antisense strand to SEQ ID NO: 1709371
uaguacagccaagaaaugg

SEQ ID NO: 1709373 - RNA, 19 nt, Artificial Sequence
  Description of Artificial Sequence: Synthetic oligonucleotide
  Sense strand starting at position 3965 of SEQ ID NO: 1561934
uggcuacugaaagaguuau

SEQ ID NO: 1709374 - RNA, 19 nt, Artificial Sequence
  Description of Artificial Sequence: Synthetic oligonucleotide
  Antisense strand to SEQ ID NO: 1709373
auaacucuuucaguagcca

SEQ ID NO: 1709375 - RNA, 19 nt, Artificial Sequence
  Description of Artificial Sequence: Synthetic oligonucleotide
  Sense strand starting at position 113 of SEQ ID NO: 1561935
ggcagaguucuuuauccua

SEQ ID NO: 1709376 - RNA, 19 nt, Artificial Sequence
  Description of Artificial Sequence: Synthetic oligonucleotide
  Antisense strand to SEQ ID NO: 1709375
uaggauaaagaacucugcc

SEQ ID NO: 1709377 - RNA, 19 nt, Artificial Sequence
  Description of Artificial Sequence: Synthetic oligonucleotide
  Sense strand starting at position 116 of SEQ ID NO: 1561935
agaguucuuuauccuaaag

SEQ ID NO: 1709378 - RNA, 19 nt, Artificial Sequence
  Description of Artificial Sequence: Synthetic oligonucleotide
  Antisense strand to SEQ ID NO: 1709377
cuuuaggauaaagaacucu

SEQ ID NO: 1709379 - RNA, 19 nt, Artificial Sequence
  Description of Artificial Sequence: Synthetic oligonucleotide
  Sense strand starting at position 184 of SEQ ID NO: 1561935
guaaguucugaagagcuuu

SEQ ID NO: 1709380 - RNA, 19 nt, Artificial Sequence
  Description of Artificial Sequence: Synthetic oligonucleotide
  Antisense strand to SEQ ID NO: 1709379
aaagcucuucagaacuuac

SEQ ID NO: 1709381 - RNA, 19 nt, Artificial Sequence
  Description of Artificial Sequence: Synthetic oligonucleotide
  Sense strand starting at position 290 of SEQ ID NO: 1561935
uuugguauccaacagaagu

SEQ ID NO: 1709382 - RNA, 19 nt, Artificial Sequence
  Description of Artificial Sequence: Synthetic oligonucleotide
  Antisense strand to SEQ ID NO: 1709381
acuucuguuggauaccaaa

SEQ ID NO: 1709383 - RNA, 19 nt, Artificial Sequence
  Description of Artificial Sequence: Synthetic oligonucleotide
  Sense strand starting at position 373 of SEQ ID NO: 1561935
agucuuugccucugagaag

SEQ ID NO: 1709384 - RNA, 19 nt, Artificial Sequence
  Description of Artificial Sequence: Synthetic oligonucleotide
  Antisense strand to SEQ ID NO: 1709383
cuucucagaggcaaagacu

SEQ ID NO: 1709385 - RNA, 19 nt, Artificial Sequence
  Description of Artificial Sequence: Synthetic oligonucleotide
  Sense strand starting at position 402 of SEQ ID NO: 1561935
aggguuuggcgugaaagag

SEQ ID NO: 1709386 - RNA, 19 nt, Artificial Sequence
  Description of Artificial Sequence: Synthetic oligonucleotide
  Antisense strand to SEQ ID NO: 1709385
cucuuucacgccaaacccu

SEQ ID NO: 1709387 - RNA, 19 nt, Artificial Sequence
  Description of Artificial Sequence: Synthetic oligonucleotide
  Sense strand starting at position 455 of SEQ ID NO: 1561935
uuggauaucauucgguaga

SEQ ID NO: 1709388 - RNA, 19 nt, Artificial Sequence
  Description of Artificial Sequence: Synthetic oligonucleotide
  Antisense strand to SEQ ID NO: 1709387
ucuaccgaaugauauccaa

SEQ ID NO: 1709389 - RNA, 19 nt, Artificial Sequence
  Description of Artificial Sequence: Synthetic oligonucleotide
  Sense strand starting at position 457 of SEQ ID NO: 1561935
ggauaucauucgguagaac

SEQ ID NO: 1709390 - RNA, 19 nt, Artificial Sequence
  Description of Artificial Sequence: Synthetic oligonucleotide
  Antisense strand to SEQ ID NO: 1709389
guucuaccgaaugauaucc

SEQ ID NO: 1709391 - RNA, 19 nt, Artificial Sequence
  Description of Artificial Sequence: Synthetic oligonucleotide
  Sense strand starting at position 458 of SEQ ID NO: 1561935
gauaucauucgguagaacc

SEQ ID NO: 1709392 - RNA, 19 nt, Artificial Sequence
  Description of Artificial Sequence: Synthetic oligonucleotide
  Antisense strand to SEQ ID NO: 1709391
gguucuaccgaaugauauc

SEQ ID NO: 1709393 - RNA, 19 nt, Artificial Sequence
  Description of Artificial Sequence: Synthetic oligonucleotide
  Sense strand starting at position 460 of SEQ ID NO: 1561935
uaucauucgguagaaccau

SEQ ID NO: 1709394 - RNA, 19 nt, Artificial Sequence
  Description of Artificial Sequence: Synthetic oligonucleotide
  Antisense strand to SEQ ID NO: 1709393
augguucuaccgaaugaua

SEQ ID NO: 1709395 - RNA, 19 nt, Artificial Sequence
  Description of Artificial Sequence: Synthetic oligonucleotide
  Sense strand starting at position 466 of SEQ ID NO: 1561935
ucgguagaaccauauucua

SEQ ID NO: 1709396 - RNA, 19 nt, Artificial Sequence
  Description of Artificial Sequence: Synthetic oligonucleotide
  Antisense strand to SEQ ID NO: 1709395
uagaauaugguucuaccga

SEQ ID NO: 1709397 - RNA, 19 nt, Artificial Sequence
  Description of Artificial Sequence: Synthetic oligonucleotide
  Sense strand starting at position 836 of SEQ ID NO: 1561935
ugaagcccugcucaaauau

SEQ ID NO: 1709398 - RNA, 19 nt, Artificial Sequence
  Description of Artificial Sequence: Synthetic oligonucleotide
  Antisense strand to SEQ ID NO: 1709397
auauuugagcagggcuuca

SEQ ID NO: 1709399 - RNA, 19 nt, Artificial Sequence
  Description of Artificial Sequence: Synthetic oligonucleotide
  Sense strand starting at position 892 of SEQ ID NO: 1561935
aaguuucgacuucgagaga

SEQ ID NO: 1709400 - RNA, 19 nt, Artificial Sequence
  Description of Artificial Sequence: Synthetic oligonucleotide
  Antisense strand to SEQ ID NO: 1709399
ucucucgaagucgaaacuu

SEQ ID NO: 1709401 - RNA, 19 nt, Artificial Sequence
  Description of Artificial Sequence: Synthetic oligonucleotide
  Sense strand starting at position 895 of SEQ ID NO: 1561935
uuucgacuucgagagaauc

SEQ ID NO: 1709402 - RNA, 19 nt, Artificial Sequence
  Description of Artificial Sequence: Synthetic oligonucleotide
  Antisense strand to SEQ ID NO: 1709401
gauucucucgaagucgaaa

SEQ ID NO: 1709403 - RNA, 19 nt, Artificial Sequence
  Description of Artificial Sequence: Synthetic oligonucleotide
  Sense strand starting at position 948 of SEQ ID NO: 1561935
agauccugccagugaggua

SEQ ID NO: 1709404 - RNA, 19 nt, Artificial Sequence
  Description of Artificial Sequence: Synthetic oligonucleotide
  Antisense strand to SEQ ID NO: 1709403
uaccucacuggcaggaucu

SEQ ID NO: 1709405 - RNA, 19 nt, Artificial Sequence
  Description of Artificial Sequence: Synthetic oligonucleotide
  Sense strand starting at position 972 of SEQ ID NO: 1561935
ucgcucucucgguuaacuu

SEQ ID NO: 1709406 - RNA, 19 nt, Artificial Sequence
  Description of Artificial Sequence: Synthetic oligonucleotide
  Antisense strand to SEQ ID NO: 1709405
aaguuaaccgagagagcga

SEQ ID NO: 1709407 - RNA, 19 nt, Artificial Sequence
  Description of Artificial Sequence: Synthetic oligonucleotide
  Sense strand starting at position 1104 of SEQ ID NO: 1561935
cugggucgauguucauaaa

SEQ ID NO: 1709408 - RNA, 19 nt, Artificial Sequence
  Description of Artificial Sequence: Synthetic oligonucleotide
  Antisense strand to SEQ ID NO: 1709407
uuuaugaacaucgacccag

SEQ ID NO: 1709409 - RNA, 19 nt, Artificial Sequence
  Description of Artificial Sequence: Synthetic oligonucleotide
  Sense strand starting at position 2294 of SEQ ID NO: 1561935
ggaccaugaucauccucau

SEQ ID NO: 1709410 - RNA, 19 nt, Artificial Sequence
  Description of Artificial Sequence: Synthetic oligonucleotide
  Antisense strand to SEQ ID NO: 1709409
augaggaugaucauggucc

SEQ ID NO: 1709411 - RNA, 19 nt, Artificial Sequence
  Description of Artificial Sequence: Synthetic oligonucleotide
  Sense strand starting at position 2370 of SEQ ID NO: 1561935
gcuaaagucacugggugaa

SEQ ID NO: 1709412 - RNA, 19 nt, Artificial Sequence
  Description of Artificial Sequence: Synthetic oligonucleotide
  Antisense strand to SEQ ID NO: 1709411
uucacccagugacuuuagc

SEQ ID NO: 1709413 - RNA, 19 nt, Artificial Sequence
  Description of Artificial Sequence: Synthetic oligonucleotide
  Sense strand starting at position 2372 of SEQ ID NO: 1561935
uaaagucacugggugaaau

SEQ ID NO: 1709414 - RNA, 19 nt, Artificial Sequence
  Description of Artificial Sequence: Synthetic oligonucleotide
  Antisense strand to SEQ ID NO: 1709413
auuucacccagugacuuua

SEQ ID NO: 1709415 - RNA, 19 nt, Artificial Sequence
  Description of Artificial Sequence: Synthetic oligonucleotide
  Sense strand starting at position 2427 of SEQ ID NO: 1561935
cccgaaguaucaucccaca

SEQ ID NO: 1709416 - RNA, 19 nt, Artificial Sequence
  Description of Artificial Sequence: Synthetic oligonucleotide
  Antisense strand to SEQ ID NO: 1709415
ugugggaugauacuucggg

SEQ ID NO: 1709417 - RNA, 19 nt, Artificial Sequence
  Description of Artificial Sequence: Synthetic oligonucleotide
  Sense strand starting at position 2468 of SEQ ID NO: 1561935
agaacagcuugcuuuacaa

SEQ ID NO: 1709418 - RNA, 19 nt, Artificial Sequence
  Description of Artificial Sequence: Synthetic oligonucleotide
  Antisense strand to SEQ ID NO: 1709417
uuguaaagcaagcuguucu

SEQ ID NO: 1709419 - RNA, 19 nt, Artificial Sequence
  Description of Artificial Sequence: Synthetic oligonucleotide
  Sense strand starting at position 2475 of SEQ ID NO: 1561935
cuugcuuuacaauggaaag

SEQ ID NO: 1709420 - RNA, 19 nt, Artificial Sequence
  Description of Artificial Sequence: Synthetic oligonucleotide
  Antisense strand to SEQ ID NO: 1709419
cuuuccauuguaaagcaag

SEQ ID NO: 1709421 - RNA, 19 nt, Artificial Sequence
  Description of Artificial Sequence: Synthetic oligonucleotide
  Sense strand starting at position 2511 of SEQ ID NO: 1561935
uuaccaagugaucgaacuu

SEQ ID NO: 1709422 - RNA, 19 nt, Artificial Sequence
  Description of Artificial Sequence: Synthetic oligonucleotide
  Antisense strand to SEQ ID NO: 1709421
aaguucgaucacuugguaa

SEQ ID NO: 1709423 - RNA, 19 nt, Artificial Sequence
  Description of Artificial Sequence: Synthetic oligonucleotide
  Sense strand starting at position 2598 of SEQ ID NO: 1561935
uugcuaccucugucguauu

SEQ ID NO: 1709424 - RNA, 19 nt, Artificial Sequence
  Description of Artificial Sequence: Synthetic oligonucleotide
  Antisense strand to SEQ ID NO: 1709423
aauacgacagagguagcaa

SEQ ID NO: 1709425 - RNA, 19 nt, Artificial Sequence
  Description of Artificial Sequence: Synthetic oligonucleotide
  Sense strand starting at position 2612 of SEQ ID NO: 1561935
guauucuugccacauacac

SEQ ID NO: 1709426 - RNA, 19 nt, Artificial Sequence
  Description of Artificial Sequence: Synthetic oligonucleotide
  Antisense strand to SEQ ID NO: 1709425
guguauguggcaagaauac

SEQ ID NO: 1709427 - RNA, 19 nt, Artificial Sequence
  Description of Artificial Sequence: Synthetic oligonucleotide
  Sense strand starting at position 2656 of SEQ ID NO: 1561935
acgaauucagaauguggga

SEQ ID NO: 1709428 - RNA, 19 nt, Artificial Sequence
  Description of Artificial Sequence: Synthetic oligonucleotide
  Antisense strand to SEQ ID NO: 1709427
ucccacauucugaauucgu

SEQ ID NO: 1709429 - RNA, 19 nt, Artificial Sequence
  Description of Artificial Sequence: Synthetic oligonucleotide
  Sense strand starting at position 2749 of SEQ ID NO: 1561935
gugagacuugauuggauuc

SEQ ID NO: 1709430 - RNA, 19 nt, Artificial Sequence
  Description of Artificial Sequence: Synthetic oligonucleotide
  Antisense strand to SEQ ID NO: 1709429
gaauccaaucaagucucac

SEQ ID NO: 1709431 - RNA, 19 nt, Artificial Sequence
  Description of Artificial Sequence: Synthetic oligonucleotide
  Sense strand starting at position 2809 of SEQ ID NO: 1561935
caauguggacuguauguua

SEQ ID NO: 1709432 - RNA, 19 nt, Artificial Sequence
  Description of Artificial Sequence: Synthetic oligonucleotide
  Antisense strand to SEQ ID NO: 1709431
uaacauacaguccacauug

SEQ ID NO: 1709433 - RNA, 19 nt, Artificial Sequence
  Description of Artificial Sequence: Synthetic oligonucleotide
  Sense strand starting at position 2812 of SEQ ID NO: 1561935
uguggacuguauguuagau

SEQ ID NO: 1709434 - RNA, 19 nt, Artificial Sequence
  Description of Artificial Sequence: Synthetic oligonucleotide
  Antisense strand to SEQ ID NO: 1709433
aucuaacauacaguccaca

SEQ ID NO: 1709435 - RNA, 19 nt, Artificial Sequence
  Description of Artificial Sequence: Synthetic oligonucleotide
  Sense strand starting at position 2827 of SEQ ID NO: 1561935
agauaauauugagucagua

SEQ ID NO: 1709436 - RNA, 19 nt, Artificial Sequence
  Description of Artificial Sequence: Synthetic oligonucleotide
  Antisense strand to SEQ ID NO: 1709435
uacugacucaauauuaucu

SEQ ID NO: 1709437 - RNA, 19 nt, Artificial Sequence
  Description of Artificial Sequence: Synthetic oligonucleotide
  Sense strand starting at position 2831 of SEQ ID NO: 1561935
aauauugagucaguauuag

SEQ ID NO: 1709438 - RNA, 19 nt, Artificial Sequence
  Description of Artificial Sequence: Synthetic oligonucleotide
  Antisense strand to SEQ ID NO: 1709437
cuaauacugacucaauauu

SEQ ID NO: 1709439 - RNA, 19 nt, Artificial Sequence
  Description of Artificial Sequence: Synthetic oligonucleotide
  Sense strand starting at position 2841 of SEQ ID NO: 1561935
caguauuagauguguugag

SEQ ID NO: 1709440 - RNA, 19 nt, Artificial Sequence
  Description of Artificial Sequence: Synthetic oligonucleotide
  Antisense strand to SEQ ID NO: 1709439
cucaacacaucuaauacug

SEQ ID NO: 1709441 - RNA, 19 nt, Artificial Sequence
  Description of Artificial Sequence: Synthetic oligonucleotide
  Sense strand starting at position 2845 of SEQ ID NO: 1561935
auuagauguguugagugua

SEQ ID NO: 1709442 - RNA, 19 nt, Artificial Sequence
  Description of Artificial Sequence: Synthetic oligonucleotide
  Antisense strand to SEQ ID NO: 1709441
uacacucaacacaucuaau

SEQ ID NO: 1709443 - RNA, 19 nt, Artificial Sequence
  Description of Artificial Sequence: Synthetic oligonucleotide
  Sense strand starting at position 2850 of SEQ ID NO: 1561935
auguguugaguguaaauaa

SEQ ID NO: 1709444 - RNA, 19 nt, Artificial Sequence
  Description of Artificial Sequence: Synthetic oligonucleotide
  Antisense strand to SEQ ID NO: 1709443
uuauuuacacucaacacau

SEQ ID NO: 1709445 - RNA, 19 nt, Artificial Sequence
  Description of Artificial Sequence: Synthetic oligonucleotide
  Sense strand starting at position 3185 of SEQ ID NO: 1561935
agcacacucuggccuuaaa

SEQ ID NO: 1709446 - RNA, 19 nt, Artificial Sequence
  Description of Artificial Sequence: Synthetic oligonucleotide
  Antisense strand to SEQ ID NO: 1709445
uuuaaggccagagugugcu

SEQ ID NO: 1709447 - RNA, 19 nt, Artificial Sequence
  Description of Artificial Sequence: Synthetic oligonucleotide
  Sense strand starting at position 3188 of SEQ ID NO: 1561935
acacucuggccuuaaagau

SEQ ID NO: 1709448 - RNA, 19 nt, Artificial Sequence
  Description of Artificial Sequence: Synthetic oligonucleotide
  Antisense strand to SEQ ID NO: 1709447
aucuuuaaggccagagugu

SEQ ID NO: 1709449 - RNA, 19 nt, Artificial Sequence
  Description of Artificial Sequence: Synthetic oligonucleotide
  Sense strand starting at position 3282 of SEQ ID NO: 1561935
auggucauuguccaaaugu

SEQ ID NO: 1709450 - RNA, 19 nt, Artificial Sequence
  Description of Artificial Sequence: Synthetic oligonucleotide
  Antisense strand to SEQ ID NO: 1709449
acauuuggacaaugaccau

SEQ ID NO: 1709451 - RNA, 19 nt, Artificial Sequence
  Description of Artificial Sequence: Synthetic oligonucleotide
  Sense strand starting at position 3291 of SEQ ID NO: 1561935
guccaaaugucacuuauuc

SEQ ID NO: 1709452 - RNA, 19 nt, Artificial Sequence
  Description of Artificial Sequence: Synthetic oligonucleotide
  Antisense strand to SEQ ID NO: 1709451
gaauaagugacauuuggac

SEQ ID NO: 1709453 - RNA, 19 nt, Artificial Sequence
  Description of Artificial Sequence: Synthetic oligonucleotide
  Sense strand starting at position 3480 of SEQ ID NO: 1561935
gugacucacgaauguaauc

SEQ ID NO: 1709454 - RNA, 19 nt, Artificial Sequence
  Description of Artificial Sequence: Synthetic oligonucleotide
  Antisense strand to SEQ ID NO: 1709453
gauuacauucgugagucac

SEQ ID NO: 1709455 - RNA, 19 nt, Artificial Sequence
  Description of Artificial Sequence: Synthetic oligonucleotide
  Sense strand starting at position 99 of SEQ ID NO: 1561936
cuugaauaagccugaacug

SEQ ID NO: 1709456 - RNA, 19 nt, Artificial Sequence
  Description of Artificial Sequence: Synthetic oligonucleotide
  Antisense strand to SEQ ID NO: 1709455
caguucaggcuuauucaag

SEQ ID NO: 1709457 - RNA, 19 nt, Artificial Sequence
  Description of Artificial Sequence: Synthetic oligonucleotide
  Sense strand starting at position 297 of SEQ ID NO: 1561936
ugagccuugcaauauggau

SEQ ID NO: 1709458 - RNA, 19 nt, Artificial Sequence
  Description of Artificial Sequence: Synthetic oligonucleotide
  Antisense strand to SEQ ID NO: 1709457
auccauauugcaaggcuca

SEQ ID NO: 1709459 - RNA, 19 nt, Artificial Sequence
  Description of Artificial Sequence: Synthetic oligonucleotide
  Sense strand starting at position 309 of SEQ ID NO: 1561936
uauggauucgcugggacau

SEQ ID NO: 1709460 - RNA, 19 nt, Artificial Sequence
  Description of Artificial Sequence: Synthetic oligonucleotide
  Antisense strand to SEQ ID NO: 1709459
augucccagcgaauccaua

SEQ ID NO: 1709461 - RNA, 19 nt, Artificial Sequence
  Description of Artificial Sequence: Synthetic oligonucleotide
  Sense strand starting at position 310 of SEQ ID NO: 1561936
auggauucgcugggacauu

SEQ ID NO: 1709462 - RNA, 19 nt, Artificial Sequence
  Description of Artificial Sequence: Synthetic oligonucleotide
  Antisense strand to SEQ ID NO: 1709461
aaugucccagcgaauccau

SEQ ID NO: 1709463 - RNA, 19 nt, Artificial Sequence
  Description of Artificial Sequence: Synthetic oligonucleotide
  Sense strand starting at position 360 of SEQ ID NO: 1561936
gguuaagagaagugucaga

SEQ ID NO: 1709464 - RNA, 19 nt, Artificial Sequence
  Description of Artificial Sequence: Synthetic oligonucleotide
  Antisense strand to SEQ ID NO: 1709463
ucugacacuucucuuaacc

SEQ ID NO: 1709465 - RNA, 19 nt, Artificial Sequence
  Description of Artificial Sequence: Synthetic oligonucleotide
  Sense strand starting at position 400 of SEQ ID NO: 1561936
agugacagaugagcucaaa

SEQ ID NO: 1709466 - RNA, 19 nt, Artificial Sequence
  Description of Artificial Sequence: Synthetic oligonucleotide
  Antisense strand to SEQ ID NO: 1709465
uuugagcucaucugucacu

SEQ ID NO: 1709467 - RNA, 19 nt, Artificial Sequence
  Description of Artificial Sequence: Synthetic oligonucleotide
  Sense strand starting at position 654 of SEQ ID NO: 1561936
acaucacaacgcuguaaga

SEQ ID NO: 1709468 - RNA, 19 nt, Artificial Sequence
  Description of Artificial Sequence: Synthetic oligonucleotide
  Antisense strand to SEQ ID NO: 1709467
ucuuacagcguugugaugu

SEQ ID NO: 1709469 - RNA, 19 nt, Artificial Sequence
  Description of Artificial Sequence: Synthetic oligonucleotide
  Sense strand starting at position 656 of SEQ ID NO: 1561936
aucacaacgcuguaagaaa

SEQ ID NO: 1709470 - RNA, 19 nt, Artificial Sequence
  Description of Artificial Sequence: Synthetic oligonucleotide
  Antisense strand to SEQ ID NO: 1709469
uuucuuacagcguugugau

SEQ ID NO: 1709471 - RNA, 19 nt, Artificial Sequence
  Description of Artificial Sequence: Synthetic oligonucleotide
  Sense strand starting at position 773 of SEQ ID NO: 1561936
guuacauuaucccugaaga

SEQ ID NO: 1709472 - RNA, 19 nt, Artificial Sequence
  Description of Artificial Sequence: Synthetic oligonucleotide
  Antisense strand to SEQ ID NO: 1709471
ucuucagggauaauguaac

SEQ ID NO: 1709473 - RNA, 19 nt, Artificial Sequence
  Description of Artificial Sequence: Synthetic oligonucleotide
  Sense strand starting at position 774 of SEQ ID NO: 1561936
uuacauuaucccugaagag

SEQ ID NO: 1709474 - RNA, 19 nt, Artificial Sequence
  Description of Artificial Sequence: Synthetic oligonucleotide
  Antisense strand to SEQ ID NO: 1709473
cucuucagggauaauguaa

SEQ ID NO: 1709475 - RNA, 19 nt, Artificial Sequence
  Description of Artificial Sequence: Synthetic oligonucleotide
  Sense strand starting at position 899 of SEQ ID NO: 1561936
aaguguggaacgcagaaua

SEQ ID NO: 1709476 - RNA, 19 nt, Artificial Sequence
  Description of Artificial Sequence: Synthetic oligonucleotide
  Antisense strand to SEQ ID NO: 1709475
uauucugcguuccacacuu

SEQ ID NO: 1709477 - RNA, 19 nt, Artificial Sequence
  Description of Artificial Sequence: Synthetic oligonucleotide
  Sense strand starting at position 1085 of SEQ ID NO: 1561936
uguaacauuugguaaauag

SEQ ID NO: 1709478 - RNA, 19 nt, Artificial Sequence
  Description of Artificial Sequence: Synthetic oligonucleotide
  Antisense strand to SEQ ID NO: 1709477
cuauuuaccaaauguuaca

SEQ ID NO: 1709479 - RNA, 19 nt, Artificial Sequence
  Description of Artificial Sequence: Synthetic oligonucleotide
  Sense strand starting at position 1108 of SEQ ID NO: 1561936
acagaugguccacggacau

SEQ ID NO: 1709480 - RNA, 19 nt, Artificial Sequence
  Description of Artificial Sequence: Synthetic oligonucleotide
  Antisense strand to SEQ ID NO: 1709479
auguccguggaccaucugu

SEQ ID NO: 1709481 - RNA, 19 nt, Artificial Sequence
  Description of Artificial Sequence: Synthetic oligonucleotide
  Sense strand starting at position 1262 of SEQ ID NO: 1561936
ugguaaacccgggaacagu

SEQ ID NO: 1709482 - RNA, 19 nt, Artificial Sequence
  Description of Artificial Sequence: Synthetic oligonucleotide
  Antisense strand to SEQ ID NO: 1709481
acuguucccggguuuacca

SEQ ID NO: 1709483 - RNA, 19 nt, Artificial Sequence
  Description of Artificial Sequence: Synthetic oligonucleotide
  Sense strand starting at position 2369 of SEQ ID NO: 1561936
guguguauuggagaauaua

SEQ ID NO: 1709484 - RNA, 19 nt, Artificial Sequence
  Description of Artificial Sequence: Synthetic oligonucleotide
  Antisense strand to SEQ ID NO: 1709483
uauauucuccaauacacac

SEQ ID NO: 1709485 - RNA, 19 nt, Artificial Sequence
  Description of Artificial Sequence: Synthetic oligonucleotide
  Sense strand starting at position 2511 of SEQ ID NO: 1561936
gguuucuggagauauaguc

SEQ ID NO: 1709486 - RNA, 19 nt, Artificial Sequence
  Description of Artificial Sequence: Synthetic oligonucleotide
  Antisense strand to SEQ ID NO: 1709485
gacuauaucuccagaaacc

SEQ ID NO: 1709487 - RNA, 19 nt, Artificial Sequence
  Description of Artificial Sequence: Synthetic oligonucleotide
  Sense strand starting at position 2531 of SEQ ID NO: 1561936
cagguucuucuugaguuau

SEQ ID NO: 1709488 - RNA, 19 nt, Artificial Sequence
  Description of Artificial Sequence: Synthetic oligonucleotide
  Antisense strand to SEQ ID NO: 1709487
auaacucaagaagaaccug

SEQ ID NO: 1709489 - RNA, 19 nt, Artificial Sequence
  Description of Artificial Sequence: Synthetic oligonucleotide
  Sense strand starting at position 2533 of SEQ ID NO: 1561936
gguucuucuugaguuauuu

SEQ ID NO: 1709490 - RNA, 19 nt, Artificial Sequence
  Description of Artificial Sequence: Synthetic oligonucleotide
  Antisense strand to SEQ ID NO: 1709489
aaauaacucaagaagaacc

SEQ ID NO: 1709491 - RNA, 19 nt, Artificial Sequence
  Description of Artificial Sequence: Synthetic oligonucleotide
  Sense strand starting at position 2648 of SEQ ID NO: 1561936
auacauuugucacagggaa

SEQ ID NO: 1709492 - RNA, 19 nt, Artificial Sequence
  Description of Artificial Sequence: Synthetic oligonucleotide
  Antisense strand to SEQ ID NO: 1709491
uucccugugacaaauguau

SEQ ID NO: 1709493 - RNA, 19 nt, Artificial Sequence
  Description of Artificial Sequence: Synthetic oligonucleotide
  Sense strand starting at position 2668 of SEQ ID NO: 1561936
gggauuugcucacacaaua

SEQ ID NO: 1709494 - RNA, 19 nt, Artificial Sequence
  Description of Artificial Sequence: Synthetic oligonucleotide
  Antisense strand to SEQ ID NO: 1709493
uauugugugagcaaauccc

SEQ ID NO: 1709495 - RNA, 19 nt, Artificial Sequence
  Description of Artificial Sequence: Synthetic oligonucleotide
  Sense strand starting at position 2789 of SEQ ID NO: 1561936
gcgaauauugccuacuaag

SEQ ID NO: 1709496 - RNA, 19 nt, Artificial Sequence
  Description of Artificial Sequence: Synthetic oligonucleotide
  Antisense strand to SEQ ID NO: 1709495
cuuaguaggcaauauucgc

SEQ ID NO: 1709497 - RNA, 19 nt, Artificial Sequence
  Description of Artificial Sequence: Synthetic oligonucleotide
  Sense strand starting at position 2946 of SEQ ID NO: 1561936
gcuuguuaggcgcuguuau

SEQ ID NO: 1709498 - RNA, 19 nt, Artificial Sequence
  Description of Artificial Sequence: Synthetic oligonucleotide
  Antisense strand to SEQ ID NO: 1709497
auaacagcgccuaacaagc

SEQ ID NO: 1709499 - RNA, 19 nt, Artificial Sequence
  Description of Artificial Sequence: Synthetic oligonucleotide
  Sense strand starting at position 2948 of SEQ ID NO: 1561936
uuguuaggcgcuguuauga

SEQ ID NO: 1709500 - RNA, 19 nt, Artificial Sequence
  Description of Artificial Sequence: Synthetic oligonucleotide
  Antisense strand to SEQ ID NO: 1709499
ucauaacagcgccuaacaa

SEQ ID NO: 1709501 - RNA, 19 nt, Artificial Sequence
  Description of Artificial Sequence: Synthetic oligonucleotide
  Sense strand starting at position 2996 of SEQ ID NO: 1561936
gagauuacagucuggugaa

SEQ ID NO: 1709502 - RNA, 19 nt, Artificial Sequence
  Description of Artificial Sequence: Synthetic oligonucleotide
  Antisense strand to SEQ ID NO: 1709501
uucaccagacuguaaucuc

SEQ ID NO: 1709503 - RNA, 19 nt, Artificial Sequence
  Description of Artificial Sequence: Synthetic oligonucleotide
  Sense strand starting at position 3008 of SEQ ID NO: 1561936
uggugaaagcauuagacga

SEQ ID NO: 1709504 - RNA, 19 nt, Artificial Sequence
  Description of Artificial Sequence: Synthetic oligonucleotide
  Antisense strand to SEQ ID NO: 1709503
ucgucuaaugcuuucacca

SEQ ID NO: 1709505 - RNA, 19 nt, Artificial Sequence
  Description of Artificial Sequence: Synthetic oligonucleotide
  Sense strand starting at position 3016 of SEQ ID NO: 1561936
gcauuagacgaauaaucac

SEQ ID NO: 1709506 - RNA, 19 nt, Artificial Sequence
  Description of Artificial Sequence: Synthetic oligonucleotide
  Antisense strand to SEQ ID NO: 1709505
gugauuauucgucuaaugc

SEQ ID NO: 1709507 - RNA, 19 nt, Artificial Sequence
  Description of Artificial Sequence: Synthetic oligonucleotide
  Sense strand starting at position 3057 of SEQ ID NO: 1561936
ugagauaaacgcugugaug

SEQ ID NO: 1709508 - RNA, 19 nt, Artificial Sequence
  Description of Artificial Sequence: Synthetic oligonucleotide
  Antisense strand to SEQ ID NO: 1709507
caucacagcguuuaucuca

SEQ ID NO: 1709509 - RNA, 19 nt, Artificial Sequence
  Description of Artificial Sequence: Synthetic oligonucleotide
  Sense strand starting at position 3085 of SEQ ID NO: 1561936
agggauucucaaugguugu

SEQ ID NO: 1709510 - RNA, 19 nt, Artificial Sequence
  Description of Artificial Sequence: Synthetic oligonucleotide
  Antisense strand to SEQ ID NO: 1709509
acaaccauugagaaucccu

SEQ ID NO: 1709511 - RNA, 19 nt, Artificial Sequence
  Description of Artificial Sequence: Synthetic oligonucleotide
  Sense strand starting at position 3086 of SEQ ID NO: 1561936
gggauucucaaugguugua

SEQ ID NO: 1709512 - RNA, 19 nt, Artificial Sequence
  Description of Artificial Sequence: Synthetic oligonucleotide
  Antisense strand to SEQ ID NO: 1709511
uacaaccauugagaauccc

SEQ ID NO: 1709513 - RNA, 19 nt, Artificial Sequence
  Description of Artificial Sequence: Synthetic oligonucleotide
  Sense strand starting at position 3088 of SEQ ID NO: 1561936
gauucucaaugguuguaac

SEQ ID NO: 1709514 - RNA, 19 nt, Artificial Sequence
  Description of Artificial Sequence: Synthetic oligonucleotide
  Antisense strand to SEQ ID NO: 1709513
guuacaaccauugagaauc

SEQ ID NO: 1709515 - RNA, 19 nt, Artificial Sequence
  Description of Artificial Sequence: Synthetic oligonucleotide
  Sense strand starting at position 3128 of SEQ ID NO: 1561936
ggcaaaguggguuauucca

SEQ ID NO: 1709516 - RNA, 19 nt, Artificial Sequence
  Description of Artificial Sequence: Synthetic oligonucleotide
  Antisense strand to SEQ ID NO: 1709515
uggaauaacccacuuugcc

SEQ ID NO: 1709517 - RNA, 19 nt, Artificial Sequence
  Description of Artificial Sequence: Synthetic oligonucleotide
  Sense strand starting at position 3130 of SEQ ID NO: 1561936
caaaguggguuauuccaau

SEQ ID NO: 1709518 - RNA, 19 nt, Artificial Sequence
  Description of Artificial Sequence: Synthetic oligonucleotide
  Antisense strand to SEQ ID NO: 1709517
auuggaauaacccacuuug

SEQ ID NO: 1709519 - RNA, 19 nt, Artificial Sequence
  Description of Artificial Sequence: Synthetic oligonucleotide
  Sense strand starting at position 3153 of SEQ ID NO: 1561936
acuuuauaagacuguauga

SEQ ID NO: 1709520 - RNA, 19 nt, Artificial Sequence
  Description of Artificial Sequence: Synthetic oligonucleotide
  Antisense strand to SEQ ID NO: 1709519
ucauacagucuuauaaagu

SEQ ID NO: 1709521 - RNA, 19 nt, Artificial Sequence
  Description of Artificial Sequence: Synthetic oligonucleotide
  Sense strand starting at position 3184 of SEQ ID NO: 1561936
agacauaaagucugucaaa

SEQ ID NO: 1709522 - RNA, 19 nt, Artificial Sequence
  Description of Artificial Sequence: Synthetic oligonucleotide
  Antisense strand to SEQ ID NO: 1709521
uuugacagacuuuaugucu

SEQ ID NO: 1709523 - RNA, 19 nt, Artificial Sequence
  Description of Artificial Sequence: Synthetic oligonucleotide
  Sense strand starting at position 3360 of SEQ ID NO: 1561936
gguaguggacuuuagccaa

SEQ ID NO: 1709524 - RNA, 19 nt, Artificial Sequence
  Description of Artificial Sequence: Synthetic oligonucleotide
  Antisense strand to SEQ ID NO: 1709523
uuggcuaaaguccacuacc

SEQ ID NO: 1709525 - RNA, 19 nt, Artificial Sequence
  Description of Artificial Sequence: Synthetic oligonucleotide
  Sense strand starting at position 3389 of SEQ ID NO: 1561936
cagugacuuguguauuaag

SEQ ID NO: 1709526 - RNA, 19 nt, Artificial Sequence
  Description of Artificial Sequence: Synthetic oligonucleotide
  Antisense strand to SEQ ID NO: 1709525
cuuaauacacaagucacug

SEQ ID NO: 1709527 - RNA, 19 nt, Artificial Sequence
  Description of Artificial Sequence: Synthetic oligonucleotide
  Sense strand starting at position 3400 of SEQ ID NO: 1561936
guauuaaguguuuaaugag

SEQ ID NO: 1709528 - RNA, 19 nt, Artificial Sequence
  Description of Artificial Sequence: Synthetic oligonucleotide
  Antisense strand to SEQ ID NO: 1709527
cucauuaaacacuuaauac

SEQ ID NO: 1709529 - RNA, 19 nt, Artificial Sequence
  Description of Artificial Sequence: Synthetic oligonucleotide
  Sense strand starting at position 3467 of SEQ ID NO: 1561936
aaauccuugugcuuaggga

SEQ ID NO: 1709530 - RNA, 19 nt, Artificial Sequence
  Description of Artificial Sequence: Synthetic oligonucleotide
  Antisense strand to SEQ ID NO: 1709529
ucccuaagcacaaggauuu

SEQ ID NO: 1709531 - RNA, 19 nt, Artificial Sequence
  Description of Artificial Sequence: Synthetic oligonucleotide
  Sense strand starting at position 3610 of SEQ ID NO: 1561936
aggacuuggugacuucuua

SEQ ID NO: 1709532 - RNA, 19 nt, Artificial Sequence
  Description of Artificial Sequence: Synthetic oligonucleotide
  Antisense strand to SEQ ID NO: 1709531
uaagaagucaccaaguccu

SEQ ID NO: 1709533 - RNA, 19 nt, Artificial Sequence
  Description of Artificial Sequence: Synthetic oligonucleotide
  Sense strand starting at position 3632 of SEQ ID NO: 1561936
agauguuugcuuuacauaa

SEQ ID NO: 1709534 - RNA, 19 nt, Artificial Sequence
  Description of Artificial Sequence: Synthetic oligonucleotide
  Antisense strand to SEQ ID NO: 1709533
uuauguaaagcaaacaucu

SEQ ID NO: 1709535 - RNA, 19 nt, Artificial Sequence
  Description of Artificial Sequence: Synthetic oligonucleotide
  Sense strand starting at position 25 of SEQ ID NO: 1561937
uuguguuccuuugugguaa

SEQ ID NO: 1709536 - RNA, 19 nt, Artificial Sequence
  Description of Artificial Sequence: Synthetic oligonucleotide
  Antisense strand to SEQ ID NO: 1709535
uuaccacaaaggaacacaa

SEQ ID NO: 1709537 - RNA, 19 nt, Artificial Sequence
  Description of Artificial Sequence: Synthetic oligonucleotide
  Sense strand starting at position 29 of SEQ ID NO: 1561937
guuccuuugugguaaacac

SEQ ID NO: 1709538 - RNA, 19 nt, Artificial Sequence
  Description of Artificial Sequence: Synthetic oligonucleotide
  Antisense strand to SEQ ID NO: 1709537
guguuuaccacaaaggaac

SEQ ID NO: 1709539 - RNA, 19 nt, Artificial Sequence
  Description of Artificial Sequence: Synthetic oligonucleotide
  Sense strand starting at position 113 of SEQ ID NO: 1561937
gcaggaaugucauggaaug

SEQ ID NO: 1709540 - RNA, 19 nt, Artificial Sequence
  Description of Artificial Sequence: Synthetic oligonucleotide
  Antisense strand to SEQ ID NO: 1709539
cauuccaugacauuccugc

SEQ ID NO: 1709541 - RNA, 19 nt, Artificial Sequence
  Description of Artificial Sequence: Synthetic oligonucleotide
  Sense strand starting at position 379 of SEQ ID NO: 1561937
guuagaaggucucaaagau

SEQ ID NO: 1709542 - RNA, 19 nt, Artificial Sequence
  Description of Artificial Sequence: Synthetic oligonucleotide
  Antisense strand to SEQ ID NO: 1709541
aucuuugagaccuucuaac

SEQ ID NO: 1709543 - RNA, 19 nt, Artificial Sequence
  Description of Artificial Sequence: Synthetic oligonucleotide
  Sense strand starting at position 477 of SEQ ID NO: 1561937
uuuguauugccacacucau

SEQ ID NO: 1709544 - RNA, 19 nt, Artificial Sequence
  Description of Artificial Sequence: Synthetic oligonucleotide
  Antisense strand to SEQ ID NO: 1709543
augaguguggcaauacaaa

SEQ ID NO: 1709545 - RNA, 19 nt, Artificial Sequence
  Description of Artificial Sequence: Synthetic oligonucleotide
  Sense strand starting at position 517 of SEQ ID NO: 1561937
auaguuaucugguauauac

SEQ ID NO: 1709546 - RNA, 19 nt, Artificial Sequence
  Description of Artificial Sequence: Synthetic oligonucleotide
  Antisense strand to SEQ ID NO: 1709545
guauauaccagauaacuau

SEQ ID NO: 1709547 - RNA, 19 nt, Artificial Sequence
  Description of Artificial Sequence: Synthetic oligonucleotide
  Sense strand starting at position 584 of SEQ ID NO: 1561937
ucacaagaauguuaugcuu

SEQ ID NO: 1709548 - RNA, 19 nt, Artificial Sequence
  Description of Artificial Sequence: Synthetic oligonucleotide
  Antisense strand to SEQ ID NO: 1709547
aagcauaacauucuuguga

SEQ ID NO: 1709549 - RNA, 19 nt, Artificial Sequence
  Description of Artificial Sequence: Synthetic oligonucleotide
  Sense strand starting at position 629 of SEQ ID NO: 1561937
agcaaauuccuuuaaggca

SEQ ID NO: 1709550 - RNA, 19 nt, Artificial Sequence
  Description of Artificial Sequence: Synthetic oligonucleotide
  Antisense strand to SEQ ID NO: 1709549
ugccuuaaaggaauuugcu

SEQ ID NO: 1709551 - RNA, 19 nt, Artificial Sequence
  Description of Artificial Sequence: Synthetic oligonucleotide
  Sense strand starting at position 637 of SEQ ID NO: 1561937
ccuuuaaggcaauguguuu

SEQ ID NO: 1709552 - RNA, 19 nt, Artificial Sequence
  Description of Artificial Sequence: Synthetic oligonucleotide
  Antisense strand to SEQ ID NO: 1709551
aaacacauugccuuaaagg

SEQ ID NO: 1709553 - RNA, 19 nt, Artificial Sequence
  Description of Artificial Sequence: Synthetic oligonucleotide
  Sense strand starting at position 642 of SEQ ID NO: 1561937
aaggcaauguguuuaguga

SEQ ID NO: 1709554 - RNA, 19 nt, Artificial Sequence
  Description of Artificial Sequence: Synthetic oligonucleotide
  Antisense strand to SEQ ID NO: 1709553
ucacuaaacacauugccuu

SEQ ID NO: 1709555 - RNA, 19 nt, Artificial Sequence
  Description of Artificial Sequence: Synthetic oligonucleotide
  Sense strand starting at position 646 of SEQ ID NO: 1561937
caauguguuuagugaggaa

SEQ ID NO: 1709556 - RNA, 19 nt, Artificial Sequence
  Description of Artificial Sequence: Synthetic oligonucleotide
  Antisense strand to SEQ ID NO: 1709555
uuccucacuaaacacauug

SEQ ID NO: 1709557 - RNA, 19 nt, Artificial Sequence
  Description of Artificial Sequence: Synthetic oligonucleotide
  Sense strand starting at position 692 of SEQ ID NO: 1561937
gccacuaacuuguaagauc

SEQ ID NO: 1709558 - RNA, 19 nt, Artificial Sequence
  Description of Artificial Sequence: Synthetic oligonucleotide
  Antisense strand to SEQ ID NO: 1709557
gaucuuacaaguuaguggc

SEQ ID NO: 1709559 - RNA, 19 nt, Artificial Sequence
  Description of Artificial Sequence: Synthetic oligonucleotide
  Sense strand starting at position 861 of SEQ ID NO: 1561937
ccaggugacucugcucuua

SEQ ID NO: 1709560 - RNA, 19 nt, Artificial Sequence
  Description of Artificial Sequence: Synthetic oligonucleotide
  Antisense strand to SEQ ID NO: 1709559
uaagagcagagucaccugg

SEQ ID NO: 1709561 - RNA, 19 nt, Artificial Sequence
  Description of Artificial Sequence: Synthetic oligonucleotide
  Sense strand starting at position 863 of SEQ ID NO: 1561937
aggugacucugcucuuaag

SEQ ID NO: 1709562 - RNA, 19 nt, Artificial Sequence
  Description of Artificial Sequence: Synthetic oligonucleotide
  Antisense strand to SEQ ID NO: 1709561
cuuaagagcagagucaccu

SEQ ID NO: 1709563 - RNA, 19 nt, Artificial Sequence
  Description of Artificial Sequence: Synthetic oligonucleotide
  Sense strand starting at position 966 of SEQ ID NO: 1561937
ucccuaaguugauaaaggu

SEQ ID NO: 1709564 - RNA, 19 nt, Artificial Sequence
  Description of Artificial Sequence: Synthetic oligonucleotide
  Antisense strand to SEQ ID NO: 1709563
accuuuaucaacuuaggga

SEQ ID NO: 1709565 - RNA, 19 nt, Artificial Sequence
  Description of Artificial Sequence: Synthetic oligonucleotide
  Sense strand starting at position 975 of SEQ ID NO: 1561937
ugauaaagguucucuccuu

SEQ ID NO: 1709566 - RNA, 19 nt, Artificial Sequence
  Description of Artificial Sequence: Synthetic oligonucleotide
  Antisense strand to SEQ ID NO: 1709565
aaggagagaaccuuuauca

SEQ ID NO: 1709567 - RNA, 19 nt, Artificial Sequence
  Description of Artificial Sequence: Synthetic oligonucleotide
  Sense strand starting at position 1126 of SEQ ID NO: 1561937
ggaggaugcuugggacaua

SEQ ID NO: 1709568 - RNA, 19 nt, Artificial Sequence
  Description of Artificial Sequence: Synthetic oligonucleotide
  Antisense strand to SEQ ID NO: 1709567
uaugucccaagcauccucc

SEQ ID NO: 1709569 - RNA, 19 nt, Artificial Sequence
  Description of Artificial Sequence: Synthetic oligonucleotide
  Sense strand starting at position 1127 of SEQ ID NO: 1561937
gaggaugcuugggacauaa

SEQ ID NO: 1709570 - RNA, 19 nt, Artificial Sequence
  Description of Artificial Sequence: Synthetic oligonucleotide
  Antisense strand to SEQ ID NO: 1709569
uuaugucccaagcauccuc

SEQ ID NO: 1709571 - RNA, 19 nt, Artificial Sequence
  Description of Artificial Sequence: Synthetic oligonucleotide
  Sense strand starting at position 1129 of SEQ ID NO: 1561937
ggaugcuugggacauaagu

SEQ ID NO: 1709572 - RNA, 19 nt, Artificial Sequence
  Description of Artificial Sequence: Synthetic oligonucleotide
  Antisense strand to SEQ ID NO: 1709571
acuuaugucccaagcaucc

SEQ ID NO: 1709573 - RNA, 19 nt, Artificial Sequence
  Description of Artificial Sequence: Synthetic oligonucleotide
  Sense strand starting at position 1147 of SEQ ID NO: 1561937
ucuucagagccuugggagu

SEQ ID NO: 1709574 - RNA, 19 nt, Artificial Sequence
  Description of Artificial Sequence: Synthetic oligonucleotide
  Antisense strand to SEQ ID NO: 1709573
acucccaaggcucugaaga

SEQ ID NO: 1709575 - RNA, 19 nt, Artificial Sequence
  Description of Artificial Sequence: Synthetic oligonucleotide
  Sense strand starting at position 1158 of SEQ ID NO: 1561937
uugggaguuauacagcuuu

SEQ ID NO: 1709576 - RNA, 19 nt, Artificial Sequence
  Description of Artificial Sequence: Synthetic oligonucleotide
  Antisense strand to SEQ ID NO: 1709575
aaagcuguauaacucccaa

SEQ ID NO: 1709577 - RNA, 19 nt, Artificial Sequence
  Description of Artificial Sequence: Synthetic oligonucleotide
  Sense strand starting at position 1164 of SEQ ID NO: 1561937
guuauacagcuuugcaauu

SEQ ID NO: 1709578 - RNA, 19 nt, Artificial Sequence
  Description of Artificial Sequence: Synthetic oligonucleotide
  Antisense strand to SEQ ID NO: 1709577
aauugcaaagcuguauaac

SEQ ID NO: 1709579 - RNA, 19 nt, Artificial Sequence
  Description of Artificial Sequence: Synthetic oligonucleotide
  Sense strand starting at position 2177 of SEQ ID NO: 1561937
gugcuuagugcugggaucu

SEQ ID NO: 1709580 - RNA, 19 nt, Artificial Sequence
  Description of Artificial Sequence: Synthetic oligonucleotide
  Antisense strand to SEQ ID NO: 1709579
agaucccagcacuaagcac

SEQ ID NO: 1709581 - RNA, 19 nt, Artificial Sequence
  Description of Artificial Sequence: Synthetic oligonucleotide
  Sense strand starting at position 2208 of SEQ ID NO: 1561937
ucggcuuuccagggcuauu

SEQ ID NO: 1709582 - RNA, 19 nt, Artificial Sequence
  Description of Artificial Sequence: Synthetic oligonucleotide
  Antisense strand to SEQ ID NO: 1709581
aauagcccuggaaagccga

SEQ ID NO: 1709583 - RNA, 19 nt, Artificial Sequence
  Description of Artificial Sequence: Synthetic oligonucleotide
  Sense strand starting at position 2221 of SEQ ID NO: 1561937
gcuauucucucgccaguga

SEQ ID NO: 1709584 - RNA, 19 nt, Artificial Sequence
  Description of Artificial Sequence: Synthetic oligonucleotide
  Antisense strand to SEQ ID NO: 1709583
ucacuggcgagagaauagc

SEQ ID NO: 1709585 - RNA, 19 nt, Artificial Sequence
  Description of Artificial Sequence: Synthetic oligonucleotide
  Sense strand starting at position 2273 of SEQ ID NO: 1561937
uugcgagcgcucugaguau

SEQ ID NO: 1709586 - RNA, 19 nt, Artificial Sequence
  Description of Artificial Sequence: Synthetic oligonucleotide
  Antisense strand to SEQ ID NO: 1709585
auacucagagcgcucgcaa

SEQ ID NO: 1709587 - RNA, 19 nt, Artificial Sequence
  Description of Artificial Sequence: Synthetic oligonucleotide
  Sense strand starting at position 2277 of SEQ ID NO: 1561937
gagcgcucugaguauccuu

SEQ ID NO: 1709588 - RNA, 19 nt, Artificial Sequence
  Description of Artificial Sequence: Synthetic oligonucleotide
  Antisense strand to SEQ ID NO: 1709587
aaggauacucagagcgcuc

SEQ ID NO: 1709589 - RNA, 19 nt, Artificial Sequence
  Description of Artificial Sequence: Synthetic oligonucleotide
  Sense strand starting at position 2282 of SEQ ID NO: 1561937
cucugaguauccuuggaca

SEQ ID NO: 1709590 - RNA, 19 nt, Artificial Sequence
  Description of Artificial Sequence: Synthetic oligonucleotide
  Antisense strand to SEQ ID NO: 1709589
uguccaaggauacucagag

SEQ ID NO: 1709591 - RNA, 19 nt, Artificial Sequence
  Description of Artificial Sequence: Synthetic oligonucleotide
  Sense strand starting at position 2343 of SEQ ID NO: 1561937
aaaucauagugcuugugaa

SEQ ID NO: 1709592 - RNA, 19 nt, Artificial Sequence
  Description of Artificial Sequence: Synthetic oligonucleotide
  Antisense strand to SEQ ID NO: 1709591
uucacaagcacuaugauuu

SEQ ID NO: 1709593 - RNA, 19 nt, Artificial Sequence
  Description of Artificial Sequence: Synthetic oligonucleotide
  Sense strand starting at position 2344 of SEQ ID NO: 1561937
aaucauagugcuugugaag

SEQ ID NO: 1709594 - RNA, 19 nt, Artificial Sequence
  Description of Artificial Sequence: Synthetic oligonucleotide
  Antisense strand to SEQ ID NO: 1709593
cuucacaagcacuaugauu

SEQ ID NO: 1709595 - RNA, 19 nt, Artificial Sequence
  Description of Artificial Sequence: Synthetic oligonucleotide
  Sense strand starting at position 2350 of SEQ ID NO: 1561937
agugcuugugaagagcaaa

SEQ ID NO: 1709596 - RNA, 19 nt, Artificial Sequence
  Description of Artificial Sequence: Synthetic oligonucleotide
  Antisense strand to SEQ ID NO: 1709595
uuugcucuucacaagcacu

SEQ ID NO: 1709597 - RNA, 19 nt, Artificial Sequence
  Description of Artificial Sequence: Synthetic oligonucleotide
  Sense strand starting at position 2531 of SEQ ID NO: 1561937
agaauuauugaucgaacga

SEQ ID NO: 1709598 - RNA, 19 nt, Artificial Sequence
  Description of Artificial Sequence: Synthetic oligonucleotide
  Antisense strand to SEQ ID NO: 1709597
ucguucgaucaauaauucu

SEQ ID NO: 1709599 - RNA, 19 nt, Artificial Sequence
  Description of Artificial Sequence: Synthetic oligonucleotide
  Sense strand starting at position 2674 of SEQ ID NO: 1561937
acacuacacugauguauuu

SEQ ID NO: 1709600 - RNA, 19 nt, Artificial Sequence
  Description of Artificial Sequence: Synthetic oligonucleotide
  Antisense strand to SEQ ID NO: 1709599
aaauacaucaguguagugu

SEQ ID NO: 1709601 - RNA, 19 nt, Artificial Sequence
  Description of Artificial Sequence: Synthetic oligonucleotide
  Sense strand starting at position 2708 of SEQ ID NO: 1561937
guacguaguaggugaauau

SEQ ID NO: 1709602 - RNA, 19 nt, Artificial Sequence
  Description of Artificial Sequence: Synthetic oligonucleotide
  Antisense strand to SEQ ID NO: 1709601
auauucaccuacuacguac

SEQ ID NO: 1709603 - RNA, 19 nt, Artificial Sequence
  Description of Artificial Sequence: Synthetic oligonucleotide
  Sense strand starting at position 2709 of SEQ ID NO: 1561937
uacguaguaggugaauaua

SEQ ID NO: 1709604 - RNA, 19 nt, Artificial Sequence
  Description of Artificial Sequence: Synthetic oligonucleotide
  Antisense strand to SEQ ID NO: 1709603
uauauucaccuacuacgua

SEQ ID NO: 1709605 - RNA, 19 nt, Artificial Sequence
  Description of Artificial Sequence: Synthetic oligonucleotide
  Sense strand starting at position 2755 of SEQ ID NO: 1561937
aggcaugcgauguguaauc

SEQ ID NO: 1709606 - RNA, 19 nt, Artificial Sequence
  Description of Artificial Sequence: Synthetic oligonucleotide
  Antisense strand to SEQ ID NO: 1709605
gauuacacaucgcaugccu

SEQ ID NO: 1709607 - RNA, 19 nt, Artificial Sequence
  Description of Artificial Sequence: Synthetic oligonucleotide
  Sense strand starting at position 2760 of SEQ ID NO: 1561937
ugcgauguguaaucacauc

SEQ ID NO: 1709608 - RNA, 19 nt, Artificial Sequence
  Description of Artificial Sequence: Synthetic oligonucleotide
  Antisense strand to SEQ ID NO: 1709607
gaugugauuacacaucgca

SEQ ID NO: 1709609 - RNA, 19 nt, Artificial Sequence
  Description of Artificial Sequence: Synthetic oligonucleotide
  Sense strand starting at position 2766 of SEQ ID NO: 1561937
guguaaucacaucauggua

SEQ ID NO: 1709610 - RNA, 19 nt, Artificial Sequence
  Description of Artificial Sequence: Synthetic oligonucleotide
  Antisense strand to SEQ ID NO: 1709609
uaccaugaugugauuacac

SEQ ID NO: 1709611 - RNA, 19 nt, Artificial Sequence
  Description of Artificial Sequence: Synthetic oligonucleotide
  Sense strand starting at position 3975 of SEQ ID NO: 1561937
cuuucuuuccgguguauac

SEQ ID NO: 1709612 - RNA, 19 nt, Artificial Sequence
  Description of Artificial Sequence: Synthetic oligonucleotide
  Antisense strand to SEQ ID NO: 1709611
guauacaccggaaagaaag

SEQ ID NO: 1709613 - RNA, 19 nt, Artificial Sequence
  Description of Artificial Sequence: Synthetic oligonucleotide
  Sense strand starting at position 3982 of SEQ ID NO: 1561937
uccgguguauaccuaagaa

SEQ ID NO: 1709614 - RNA, 19 nt, Artificial Sequence
  Description of Artificial Sequence: Synthetic oligonucleotide
  Antisense strand to SEQ ID NO: 1709613
uucuuagguauacaccgga

SEQ ID NO: 1709615 - RNA, 19 nt, Artificial Sequence
  Description of Artificial Sequence: Synthetic oligonucleotide
  Sense strand starting at position 83 of SEQ ID NO: 1561938
gcaagacucuuaucugcaa

SEQ ID NO: 1709616 - RNA, 19 nt, Artificial Sequence
  Description of Artificial Sequence: Synthetic oligonucleotide
  Antisense strand to SEQ ID NO: 1709615
uugcagauaagagucuugc

SEQ ID NO: 1709617 - RNA, 19 nt, Artificial Sequence
  Description of Artificial Sequence: Synthetic oligonucleotide
  Sense strand starting at position 86 of SEQ ID NO: 1561938
agacucuuaucugcaaguu

SEQ ID NO: 1709618 - RNA, 19 nt, Artificial Sequence
  Description of Artificial Sequence: Synthetic oligonucleotide
  Antisense strand to SEQ ID NO: 1709617
aacuugcagauaagagucu

SEQ ID NO: 1709619 - RNA, 19 nt, Artificial Sequence
  Description of Artificial Sequence: Synthetic oligonucleotide
  Sense strand starting at position 126 of SEQ ID NO: 1561938
ggaggccuuugagugguaa

SEQ ID NO: 1709620 - RNA, 19 nt, Artificial Sequence
  Description of Artificial Sequence: Synthetic oligonucleotide
  Antisense strand to SEQ ID NO: 1709619
uuaccacucaaaggccucc

SEQ ID NO: 1709621 - RNA, 19 nt, Artificial Sequence
  Description of Artificial Sequence: Synthetic oligonucleotide
  Sense strand starting at position 127 of SEQ ID NO: 1561938
gaggccuuugagugguaaa

SEQ ID NO: 1709622 - RNA, 19 nt, Artificial Sequence
  Description of Artificial Sequence: Synthetic oligonucleotide
  Antisense strand to SEQ ID NO: 1709621
uuuaccacucaaaggccuc

SEQ ID NO: 1709623 - RNA, 19 nt, Artificial Sequence
  Description of Artificial Sequence: Synthetic oligonucleotide
  Sense strand starting at position 128 of SEQ ID NO: 1561938
aggccuuugagugguaaau

SEQ ID NO: 1709624 - RNA, 19 nt, Artificial Sequence
  Description of Artificial Sequence: Synthetic oligonucleotide
  Antisense strand to SEQ ID NO: 1709623
auuuaccacucaaaggccu

SEQ ID NO: 1709625 - RNA, 19 nt, Artificial Sequence
  Description of Artificial Sequence: Synthetic oligonucleotide
  Sense strand starting at position 134 of SEQ ID NO: 1561938
uugagugguaaauggugau

SEQ ID NO: 1709626 - RNA, 19 nt, Artificial Sequence
  Description of Artificial Sequence: Synthetic oligonucleotide
  Antisense strand to SEQ ID NO: 1709625
aucaccauuuaccacucaa

SEQ ID NO: 1709627 - RNA, 19 nt, Artificial Sequence
  Description of Artificial Sequence: Synthetic oligonucleotide
  Sense strand starting at position 138 of SEQ ID NO: 1561938
gugguaaauggugaugaca

SEQ ID NO: 1709628 - RNA, 19 nt, Artificial Sequence
  Description of Artificial Sequence: Synthetic oligonucleotide
  Antisense strand to SEQ ID NO: 1709627
ugucaucaccauuuaccac

SEQ ID NO: 1709629 - RNA, 19 nt, Artificial Sequence
  Description of Artificial Sequence: Synthetic oligonucleotide
  Sense strand starting at position 141 of SEQ ID NO: 1561938
guaaauggugaugacaagu

SEQ ID NO: 1709630 - RNA, 19 nt, Artificial Sequence
  Description of Artificial Sequence: Synthetic oligonucleotide
  Antisense strand to SEQ ID NO: 1709629
acuugucaucaccauuuac

SEQ ID NO: 1709631 - RNA, 19 nt, Artificial Sequence
  Description of Artificial Sequence: Synthetic oligonucleotide
  Sense strand starting at position 152 of SEQ ID NO: 1561938
ugacaaguuuaaucugaag

SEQ ID NO: 1709632 - RNA, 19 nt, Artificial Sequence
  Description of Artificial Sequence: Synthetic oligonucleotide
  Antisense strand to SEQ ID NO: 1709631
cuucagauuaaacuuguca

SEQ ID NO: 1709633 - RNA, 19 nt, Artificial Sequence
  Description of Artificial Sequence: Synthetic oligonucleotide
  Sense strand starting at position 234 of SEQ ID NO: 1561938
ccacgcuuugaguaaugaa

SEQ ID NO: 1709634 - RNA, 19 nt, Artificial Sequence
  Description of Artificial Sequence: Synthetic oligonucleotide
  Antisense strand to SEQ ID NO: 1709633
uucauuacucaaagcgugg

SEQ ID NO: 1709635 - RNA, 19 nt, Artificial Sequence
  Description of Artificial Sequence: Synthetic oligonucleotide
  Sense strand starting at position 275 of SEQ ID NO: 1561938
aguccuuaccaaggaucua

SEQ ID NO: 1709636 - RNA, 19 nt, Artificial Sequence
  Description of Artificial Sequence: Synthetic oligonucleotide
  Antisense strand to SEQ ID NO: 1709635
uagauccuugguaaggacu

SEQ ID NO: 1709637 - RNA, 19 nt, Artificial Sequence
  Description of Artificial Sequence: Synthetic oligonucleotide
  Sense strand starting at position 392 of SEQ ID NO: 1561938
guguaauucuaauugggaa

SEQ ID NO: 1709638 - RNA, 19 nt, Artificial Sequence
  Description of Artificial Sequence: Synthetic oligonucleotide
  Antisense strand to SEQ ID NO: 1709637
uucccaauuagaauuacac

SEQ ID NO: 1709639 - RNA, 19 nt, Artificial Sequence
  Description of Artificial Sequence: Synthetic oligonucleotide
  Sense strand starting at position 441 of SEQ ID NO: 1561938
uggugauuuaguggagccu

SEQ ID NO: 1709640 - RNA, 19 nt, Artificial Sequence
  Description of Artificial Sequence: Synthetic oligonucleotide
  Antisense strand to SEQ ID NO: 1709639
aggcuccacuaaaucacca

SEQ ID NO: 1709641 - RNA, 19 nt, Artificial Sequence
  Description of Artificial Sequence: Synthetic oligonucleotide
  Sense strand starting at position 474 of SEQ ID NO: 1561938
aggauuugcuaagggagaa

SEQ ID NO: 1709642 - RNA, 19 nt, Artificial Sequence
  Description of Artificial Sequence: Synthetic oligonucleotide
  Antisense strand to SEQ ID NO: 1709641
uucucccuuagcaaauccu

SEQ ID NO: 1709643 - RNA, 19 nt, Artificial Sequence
  Description of Artificial Sequence: Synthetic oligonucleotide
  Sense strand starting at position 562 of SEQ ID NO: 1561938
cuuuaaaucaugggaggcu

SEQ ID NO: 1709644 - RNA, 19 nt, Artificial Sequence
  Description of Artificial Sequence: Synthetic oligonucleotide
  Antisense strand to SEQ ID NO: 1709643
agccucccaugauuuaaag

SEQ ID NO: 1709645 - RNA, 19 nt, Artificial Sequence
  Description of Artificial Sequence: Synthetic oligonucleotide
  Sense strand starting at position 571 of SEQ ID NO: 1561938
augggaggcuucuuaaauu

SEQ ID NO: 1709646 - RNA, 19 nt, Artificial Sequence
  Description of Artificial Sequence: Synthetic oligonucleotide
  Antisense strand to SEQ ID NO: 1709645
aauuuaagaagccucccau

SEQ ID NO: 1709647 - RNA, 19 nt, Artificial Sequence
  Description of Artificial Sequence: Synthetic oligonucleotide
  Sense strand starting at position 672 of SEQ ID NO: 1561938
gcagaaagccucggacaga

SEQ ID NO: 1709648 - RNA, 19 nt, Artificial Sequence
  Description of Artificial Sequence: Synthetic oligonucleotide
  Antisense strand to SEQ ID NO: 1709647
ucuguccgaggcuuucugc

SEQ ID NO: 1709649 - RNA, 19 nt, Artificial Sequence
  Description of Artificial Sequence: Synthetic oligonucleotide
  Sense strand starting at position 966 of SEQ ID NO: 1561938
ccagcucugcaggaagaaa

SEQ ID NO: 1709650 - RNA, 19 nt, Artificial Sequence
  Description of Artificial Sequence: Synthetic oligonucleotide
  Antisense strand to SEQ ID NO: 1709649
uuucuuccugcagagcugg

SEQ ID NO: 1709651 - RNA, 19 nt, Artificial Sequence
  Description of Artificial Sequence: Synthetic oligonucleotide
  Sense strand starting at position 1037 of SEQ ID NO: 1561938
ggugguuaugcgagguuau

SEQ ID NO: 1709652 - RNA, 19 nt, Artificial Sequence
  Description of Artificial Sequence: Synthetic oligonucleotide
  Antisense strand to SEQ ID NO: 1709651
auaaccucgcauaaccacc

SEQ ID NO: 1709653 - RNA, 19 nt, Artificial Sequence
  Description of Artificial Sequence: Synthetic oligonucleotide
  Sense strand starting at position 1100 of SEQ ID NO: 1561938
ggaagaacguuagcucuua

SEQ ID NO: 1709654 - RNA, 19 nt, Artificial Sequence
  Description of Artificial Sequence: Synthetic oligonucleotide
  Antisense strand to SEQ ID NO: 1709653
uaagagcuaacguucuucc

SEQ ID NO: 1709655 - RNA, 19 nt, Artificial Sequence
  Description of Artificial Sequence: Synthetic oligonucleotide
  Sense strand starting at position 1141 of SEQ ID NO: 1561938
acaguaacaccucaauugu

SEQ ID NO: 1709656 - RNA, 19 nt, Artificial Sequence
  Description of Artificial Sequence: Synthetic oligonucleotide
  Antisense strand to SEQ ID NO: 1709655
acaauugagguguuacugu

SEQ ID NO: 1709657 - RNA, 19 nt, Artificial Sequence
  Description of Artificial Sequence: Synthetic oligonucleotide
  Sense strand starting at position 1150 of SEQ ID NO: 1561938
ccucaauuguacuccgaca

SEQ ID NO: 1709658 - RNA, 19 nt, Artificial Sequence
  Description of Artificial Sequence: Synthetic oligonucleotide
  Antisense strand to SEQ ID NO: 1709657
ugucggaguacaauugagg

SEQ ID NO: 1709659 - RNA, 19 nt, Artificial Sequence
  Description of Artificial Sequence: Synthetic oligonucleotide
  Sense strand starting at position 1152 of SEQ ID NO: 1561938
ucaauuguacuccgacaac

SEQ ID NO: 1709660 - RNA, 19 nt, Artificial Sequence
  Description of Artificial Sequence: Synthetic oligonucleotide
  Antisense strand to SEQ ID NO: 1709659
guugucggaguacaauuga

SEQ ID NO: 1709661 - RNA, 19 nt, Artificial Sequence
  Description of Artificial Sequence: Synthetic oligonucleotide
  Sense strand starting at position 1293 of SEQ ID NO: 1561938
ccgagacccugaguugaga

SEQ ID NO: 1709662 - RNA, 19 nt, Artificial Sequence
  Description of Artificial Sequence: Synthetic oligonucleotide
  Antisense strand to SEQ ID NO: 1709661
ucucaacucagggucucgg

SEQ ID NO: 1709663 - RNA, 19 nt, Artificial Sequence
  Description of Artificial Sequence: Synthetic oligonucleotide
  Sense strand starting at position 1427 of SEQ ID NO: 1561938
guagggucccguuagagga

SEQ ID NO: 1709664 - RNA, 19 nt, Artificial Sequence
  Description of Artificial Sequence: Synthetic oligonucleotide
  Antisense strand to SEQ ID NO: 1709663
uccucuaacgggacccuac

SEQ ID NO: 1709665 - RNA, 19 nt, Artificial Sequence
  Description of Artificial Sequence: Synthetic oligonucleotide
  Sense strand starting at position 1644 of SEQ ID NO: 1561938
gagggaggcucucuugcua

SEQ ID NO: 1709666 - RNA, 19 nt, Artificial Sequence
  Description of Artificial Sequence: Synthetic oligonucleotide
  Antisense strand to SEQ ID NO: 1709665
uagcaagagagccucccuc

SEQ ID NO: 1709667 - RNA, 19 nt, Artificial Sequence
  Description of Artificial Sequence: Synthetic oligonucleotide
  Sense strand starting at position 2407 of SEQ ID NO: 1561938
gacucagggcuccgaauua

SEQ ID NO: 1709668 - RNA, 19 nt, Artificial Sequence
  Description of Artificial Sequence: Synthetic oligonucleotide
  Antisense strand to SEQ ID NO: 1709667
uaauucggagcccugaguc

SEQ ID NO: 1709669 - RNA, 19 nt, Artificial Sequence
  Description of Artificial Sequence: Synthetic oligonucleotide
  Sense strand starting at position 2423 of SEQ ID NO: 1561938
uuaccaguccuccauugua

SEQ ID NO: 1709670 - RNA, 19 nt, Artificial Sequence
  Description of Artificial Sequence: Synthetic oligonucleotide
  Antisense strand to SEQ ID NO: 1709669
uacaauggaggacugguaa

SEQ ID NO: 1709671 - RNA, 19 nt, Artificial Sequence
  Description of Artificial Sequence: Synthetic oligonucleotide
  Sense strand starting at position 3240 of SEQ ID NO: 1561938
cucagagggcagcaauaau

SEQ ID NO: 1709672 - RNA, 19 nt, Artificial Sequence
  Description of Artificial Sequence: Synthetic oligonucleotide
  Antisense strand to SEQ ID NO: 1709671
auuauugcugcccucugag

SEQ ID NO: 1709673 - RNA, 19 nt, Artificial Sequence
  Description of Artificial Sequence: Synthetic oligonucleotide
  Sense strand starting at position 3289 of SEQ ID NO: 1561938
ugaauuuaguuggaaggaa

SEQ ID NO: 1709674 - RNA, 19 nt, Artificial Sequence
  Description of Artificial Sequence: Synthetic oligonucleotide
  Antisense strand to SEQ ID NO: 1709673
uuccuuccaacuaaauuca

SEQ ID NO: 1709675 - RNA, 19 nt, Artificial Sequence
  Description of Artificial Sequence: Synthetic oligonucleotide
  Sense strand starting at position 3407 of SEQ ID NO: 1561938
cuauguccuugguuagaca

SEQ ID NO: 1709676 - RNA, 19 nt, Artificial Sequence
  Description of Artificial Sequence: Synthetic oligonucleotide
  Antisense strand to SEQ ID NO: 1709675
ugucuaaccaaggacauag

SEQ ID NO: 1709677 - RNA, 19 nt, Artificial Sequence
  Description of Artificial Sequence: Synthetic oligonucleotide
  Sense strand starting at position 3408 of SEQ ID NO: 1561938
uauguccuugguuagacaa

SEQ ID NO: 1709678 - RNA, 19 nt, Artificial Sequence
  Description of Artificial Sequence: Synthetic oligonucleotide
  Antisense strand to SEQ ID NO: 1709677
uugucuaaccaaggacaua

SEQ ID NO: 1709679 - RNA, 19 nt, Artificial Sequence
  Description of Artificial Sequence: Synthetic oligonucleotide
  Sense strand starting at position 3451 of SEQ ID NO: 1561938
gcccgaauuccucaucuau

SEQ ID NO: 1709680 - RNA, 19 nt, Artificial Sequence
  Description of Artificial Sequence: Synthetic oligonucleotide
  Antisense strand to SEQ ID NO: 1709679
auagaugaggaauucgggc

SEQ ID NO: 1709681 - RNA, 19 nt, Artificial Sequence
  Description of Artificial Sequence: Synthetic oligonucleotide
  Sense strand starting at position 3514 of SEQ ID NO: 1561938
gaaugauaauaugcaugua

SEQ ID NO: 1709682 - RNA, 19 nt, Artificial Sequence
  Description of Artificial Sequence: Synthetic oligonucleotide
  Antisense strand to SEQ ID NO: 1709681
uacaugcauauuaucauuc

SEQ ID NO: 1709683 - RNA, 19 nt, Artificial Sequence
  Description of Artificial Sequence: Synthetic oligonucleotide
  Sense strand starting at position 3535 of SEQ ID NO: 1561938
augcuuagagcucaguaag

SEQ ID NO: 1709684 - RNA, 19 nt, Artificial Sequence
  Description of Artificial Sequence: Synthetic oligonucleotide
  Antisense strand to SEQ ID NO: 1709683
cuuacugagcucuaagcau

SEQ ID NO: 1709685 - RNA, 19 nt, Artificial Sequence
  Description of Artificial Sequence: Synthetic oligonucleotide
  Sense strand starting at position 3538 of SEQ ID NO: 1561938
cuuagagcucaguaaguau

SEQ ID NO: 1709686 - RNA, 19 nt, Artificial Sequence
  Description of Artificial Sequence: Synthetic oligonucleotide
  Antisense strand to SEQ ID NO: 1709685
auacuuacugagcucuaag

SEQ ID NO: 1709687 - RNA, 19 nt, Artificial Sequence
  Description of Artificial Sequence: Synthetic oligonucleotide
  Sense strand starting at position 3541 of SEQ ID NO: 1561938
agagcucaguaaguauuau

SEQ ID NO: 1709688 - RNA, 19 nt, Artificial Sequence
  Description of Artificial Sequence: Synthetic oligonucleotide
  Antisense strand to SEQ ID NO: 1709687
auaauacuuacugagcucu

SEQ ID NO: 1709689 - RNA, 19 nt, Artificial Sequence
  Description of Artificial Sequence: Synthetic oligonucleotide
  Sense strand starting at position 3604 of SEQ ID NO: 1561938
acuucuugaguuugaagaa

SEQ ID NO: 1709690 - RNA, 19 nt, Artificial Sequence
  Description of Artificial Sequence: Synthetic oligonucleotide
  Antisense strand to SEQ ID NO: 1709689
uucuucaaacucaagaagu

SEQ ID NO: 1709691 - RNA, 19 nt, Artificial Sequence
  Description of Artificial Sequence: Synthetic oligonucleotide
  Sense strand starting at position 3671 of SEQ ID NO: 1561938
aggguauaaucaucuuuag

SEQ ID NO: 1709692 - RNA, 19 nt, Artificial Sequence
  Description of Artificial Sequence: Synthetic oligonucleotide
  Antisense strand to SEQ ID NO: 1709691
cuaaagaugauuauacccu

SEQ ID NO: 1709693 - RNA, 19 nt, Artificial Sequence
  Description of Artificial Sequence: Synthetic oligonucleotide
  Sense strand starting at position 3674 of SEQ ID NO: 1561938
guauaaucaucuuuagaga

SEQ ID NO: 1709694 - RNA, 19 nt, Artificial Sequence
  Description of Artificial Sequence: Synthetic oligonucleotide
  Antisense strand to SEQ ID NO: 1709693
ucucuaaagaugauuauac

SEQ ID NO: 1709695 - RNA, 19 nt, Artificial Sequence
  Description of Artificial Sequence: Synthetic oligonucleotide
  Sense strand starting at position 34 of SEQ ID NO: 1561939
cacauuacuguccacggau

SEQ ID NO: 1709696 - RNA, 19 nt, Artificial Sequence
  Description of Artificial Sequence: Synthetic oligonucleotide
  Antisense strand to SEQ ID NO: 1709695
auccguggacaguaaugug

SEQ ID NO: 1709697 - RNA, 19 nt, Artificial Sequence
  Description of Artificial Sequence: Synthetic oligonucleotide
  Sense strand starting at position 36 of SEQ ID NO: 1561939
cauuacuguccacggauau

SEQ ID NO: 1709698 - RNA, 19 nt, Artificial Sequence
  Description of Artificial Sequence: Synthetic oligonucleotide
  Antisense strand to SEQ ID NO: 1709697
auauccguggacaguaaug

SEQ ID NO: 1709699 - RNA, 19 nt, Artificial Sequence
  Description of Artificial Sequence: Synthetic oligonucleotide
  Sense strand starting at position 37 of SEQ ID NO: 1561939
auuacuguccacggauauu

SEQ ID NO: 1709700 - RNA, 19 nt, Artificial Sequence
  Description of Artificial Sequence: Synthetic oligonucleotide
  Antisense strand to SEQ ID NO: 1709699
aauauccguggacaguaau

SEQ ID NO: 1709701 - RNA, 19 nt, Artificial Sequence
  Description of Artificial Sequence: Synthetic oligonucleotide
  Sense strand starting at position 48 of SEQ ID NO: 1561939
cggauauuagcaugaggua

SEQ ID NO: 1709702 - RNA, 19 nt, Artificial Sequence
  Description of Artificial Sequence: Synthetic oligonucleotide
  Antisense strand to SEQ ID NO: 1709701
uaccucaugcuaauauccg

SEQ ID NO: 1709703 - RNA, 19 nt, Artificial Sequence
  Description of Artificial Sequence: Synthetic oligonucleotide
  Sense strand starting at position 92 of SEQ ID NO: 1561939
ggguuuauuguagaugagu

SEQ ID NO: 1709704 - RNA, 19 nt, Artificial Sequence
  Description of Artificial Sequence: Synthetic oligonucleotide
  Antisense strand to SEQ ID NO: 1709703
acucaucuacaauaaaccc

SEQ ID NO: 1709705 - RNA, 19 nt, Artificial Sequence
  Description of Artificial Sequence: Synthetic oligonucleotide
  Sense strand starting at position 97 of SEQ ID NO: 1561939
uauuguagaugaguaugua

SEQ ID NO: 1709706 - RNA, 19 nt, Artificial Sequence
  Description of Artificial Sequence: Synthetic oligonucleotide
  Antisense strand to SEQ ID NO: 1709705
uacauacucaucuacaaua

SEQ ID NO: 1709707 - RNA, 19 nt, Artificial Sequence
  Description of Artificial Sequence: Synthetic oligonucleotide
  Sense strand starting at position 110 of SEQ ID NO: 1561939
uauguaaguggucacuuaa

SEQ ID NO: 1709708 - RNA, 19 nt, Artificial Sequence
  Description of Artificial Sequence: Synthetic oligonucleotide
  Antisense strand to SEQ ID NO: 1709707
uuaagugaccacuuacaua

SEQ ID NO: 1709709 - RNA, 19 nt, Artificial Sequence
  Description of Artificial Sequence: Synthetic oligonucleotide
  Sense strand starting at position 262 of SEQ ID NO: 1561939
auuuaagagucauaaggua

SEQ ID NO: 1709710 - RNA, 19 nt, Artificial Sequence
  Description of Artificial Sequence: Synthetic oligonucleotide
  Antisense strand to SEQ ID NO: 1709709
uaccuuaugacucuuaaau

SEQ ID NO: 1709711 - RNA, 19 nt, Artificial Sequence
  Description of Artificial Sequence: Synthetic oligonucleotide
  Sense strand starting at position 316 of SEQ ID NO: 1561939
gcaauaaagacgugggagu

SEQ ID NO: 1709712 - RNA, 19 nt, Artificial Sequence
  Description of Artificial Sequence: Synthetic oligonucleotide
  Antisense strand to SEQ ID NO: 1709711
acucccacgucuuuauugc

SEQ ID NO: 1709713 - RNA, 19 nt, Artificial Sequence
  Description of Artificial Sequence: Synthetic oligonucleotide
  Sense strand starting at position 707 of SEQ ID NO: 1561939
guaguaaacuuccuauaau

SEQ ID NO: 1709714 - RNA, 19 nt, Artificial Sequence
  Description of Artificial Sequence: Synthetic oligonucleotide
  Antisense strand to SEQ ID NO: 1709713
auuauaggaaguuuacuac

SEQ ID NO: 1709715 - RNA, 19 nt, Artificial Sequence
  Description of Artificial Sequence: Synthetic oligonucleotide
  Sense strand starting at position 737 of SEQ ID NO: 1561939
gccuaagacuuccugagaa

SEQ ID NO: 1709716 - RNA, 19 nt, Artificial Sequence
  Description of Artificial Sequence: Synthetic oligonucleotide
  Antisense strand to SEQ ID NO: 1709715
uucucaggaagucuuaggc

SEQ ID NO: 1709717 - RNA, 19 nt, Artificial Sequence
  Description of Artificial Sequence: Synthetic oligonucleotide
  Sense strand starting at position 878 of SEQ ID NO: 1561939
uuuacugaggccugaacuu

SEQ ID NO: 1709718 - RNA, 19 nt, Artificial Sequence
  Description of Artificial Sequence: Synthetic oligonucleotide
  Antisense strand to SEQ ID NO: 1709717
aaguucaggccucaguaaa

SEQ ID NO: 1709719 - RNA, 19 nt, Artificial Sequence
  Description of Artificial Sequence: Synthetic oligonucleotide
  Sense strand starting at position 951 of SEQ ID NO: 1561939
gagaaagguuucucaaacg

SEQ ID NO: 1709720 - RNA, 19 nt, Artificial Sequence
  Description of Artificial Sequence: Synthetic oligonucleotide
  Antisense strand to SEQ ID NO: 1709719
cguuugagaaaccuuucuc

SEQ ID NO: 1709721 - RNA, 19 nt, Artificial Sequence
  Description of Artificial Sequence: Synthetic oligonucleotide
  Sense strand starting at position 1080 of SEQ ID NO: 1561939
ucaugagagccacauaugu

SEQ ID NO: 1709722 - RNA, 19 nt, Artificial Sequence
  Description of Artificial Sequence: Synthetic oligonucleotide
  Antisense strand to SEQ ID NO: 1709721
acauauguggcucucauga

SEQ ID NO: 1709723 - RNA, 19 nt, Artificial Sequence
  Description of Artificial Sequence: Synthetic oligonucleotide
  Sense strand starting at position 1284 of SEQ ID NO: 1561939
acuauacucguguguauuu

SEQ ID NO: 1709724 - RNA, 19 nt, Artificial Sequence
  Description of Artificial Sequence: Synthetic oligonucleotide
  Antisense strand to SEQ ID NO: 1709723
aaauacacacgaguauagu

SEQ ID NO: 1709725 - RNA, 19 nt, Artificial Sequence
  Description of Artificial Sequence: Synthetic oligonucleotide
  Sense strand starting at position 1421 of SEQ ID NO: 1561939
cugcaaggcccugaugauu

SEQ ID NO: 1709726 - RNA, 19 nt, Artificial Sequence
  Description of Artificial Sequence: Synthetic oligonucleotide
  Antisense strand to SEQ ID NO: 1709725
aaucaucagggccuugcag

SEQ ID NO: 1709727 - RNA, 19 nt, Artificial Sequence
  Description of Artificial Sequence: Synthetic oligonucleotide
  Sense strand starting at position 1527 of SEQ ID NO: 1561939
ugccgaaaugaaugcauga

SEQ ID NO: 1709728 - RNA, 19 nt, Artificial Sequence
  Description of Artificial Sequence: Synthetic oligonucleotide
  Antisense strand to SEQ ID NO: 1709727
ucaugcauucauuucggca

SEQ ID NO: 1709729 - RNA, 19 nt, Artificial Sequence
  Description of Artificial Sequence: Synthetic oligonucleotide
  Sense strand starting at position 2015 of SEQ ID NO: 1561939
uugugucuacuccaaagau

SEQ ID NO: 1709730 - RNA, 19 nt, Artificial Sequence
  Description of Artificial Sequence: Synthetic oligonucleotide
  Antisense strand to SEQ ID NO: 1709729
aucuuuggaguagacacaa

SEQ ID NO: 1709731 - RNA, 19 nt, Artificial Sequence
  Description of Artificial Sequence: Synthetic oligonucleotide
  Sense strand starting at position 2061 of SEQ ID NO: 1561939
ggccuaguucgcuugccau

SEQ ID NO: 1709732 - RNA, 19 nt, Artificial Sequence
  Description of Artificial Sequence: Synthetic oligonucleotide
  Antisense strand to SEQ ID NO: 1709731
auggcaagcgaacuaggcc

SEQ ID NO: 1709733 - RNA, 19 nt, Artificial Sequence
  Description of Artificial Sequence: Synthetic oligonucleotide
  Sense strand starting at position 2063 of SEQ ID NO: 1561939
ccuaguucgcuugccauua

SEQ ID NO: 1709734 - RNA, 19 nt, Artificial Sequence
  Description of Artificial Sequence: Synthetic oligonucleotide
  Antisense strand to SEQ ID NO: 1709733
uaauggcaagcgaacuagg

SEQ ID NO: 1709735 - RNA, 19 nt, Artificial Sequence
  Description of Artificial Sequence: Synthetic oligonucleotide
  Sense strand starting at position 2167 of SEQ ID NO: 1561939
aguugaagagcucgagaug

SEQ ID NO: 1709736 - RNA, 19 nt, Artificial Sequence
  Description of Artificial Sequence: Synthetic oligonucleotide
  Antisense strand to SEQ ID NO: 1709735
caucucgagcucuucaacu

SEQ ID NO: 1709737 - RNA, 19 nt, Artificial Sequence
  Description of Artificial Sequence: Synthetic oligonucleotide
  Sense strand starting at position 2168 of SEQ ID NO: 1561939
guugaagagcucgagauga

SEQ ID NO: 1709738 - RNA, 19 nt, Artificial Sequence
  Description of Artificial Sequence: Synthetic oligonucleotide
  Antisense strand to SEQ ID NO: 1709737
ucaucucgagcucuucaac

SEQ ID NO: 1709739 - RNA, 19 nt, Artificial Sequence
  Description of Artificial Sequence: Synthetic oligonucleotide
  Sense strand starting at position 2515 of SEQ ID NO: 1561939
gacauauaaugagugcuuu

SEQ ID NO: 1709740 - RNA, 19 nt, Artificial Sequence
  Description of Artificial Sequence: Synthetic oligonucleotide
  Antisense strand to SEQ ID NO: 1709739
aaagcacucauuauauguc

SEQ ID NO: 1709741 - RNA, 19 nt, Artificial Sequence
  Description of Artificial Sequence: Synthetic oligonucleotide
  Sense strand starting at position 2590 of SEQ ID NO: 1561939
ucguaagauugcucagaga

SEQ ID NO: 1709742 - RNA, 19 nt, Artificial Sequence
  Description of Artificial Sequence: Synthetic oligonucleotide
  Antisense strand to SEQ ID NO: 1709741
ucucugagcaaucuuacga

SEQ ID NO: 1709743 - RNA, 19 nt, Artificial Sequence
  Description of Artificial Sequence: Synthetic oligonucleotide
  Sense strand starting at position 2608 of SEQ ID NO: 1561939
aguuaagugcuguaauaca

SEQ ID NO: 1709744 - RNA, 19 nt, Artificial Sequence
  Description of Artificial Sequence: Synthetic oligonucleotide
  Antisense strand to SEQ ID NO: 1709743
uguauuacagcacuuaacu

SEQ ID NO: 1709745 - RNA, 19 nt, Artificial Sequence
  Description of Artificial Sequence: Synthetic oligonucleotide
  Sense strand starting at position 2613 of SEQ ID NO: 1561939
agugcuguaauacaucgaa

SEQ ID NO: 1709746 - RNA, 19 nt, Artificial Sequence
  Description of Artificial Sequence: Synthetic oligonucleotide
  Antisense strand to SEQ ID NO: 1709745
uucgauguauuacagcacu

SEQ ID NO: 1709747 - RNA, 19 nt, Artificial Sequence
  Description of Artificial Sequence: Synthetic oligonucleotide
  Sense strand starting at position 2937 of SEQ ID NO: 1561939
uauuaacuggugugagacu

SEQ ID NO: 1709748 - RNA, 19 nt, Artificial Sequence
  Description of Artificial Sequence: Synthetic oligonucleotide
  Antisense strand to SEQ ID NO: 1709747
agucucacaccaguuaaua

SEQ ID NO: 1709749 - RNA, 19 nt, Artificial Sequence
  Description of Artificial Sequence: Synthetic oligonucleotide
  Sense strand starting at position 2948 of SEQ ID NO: 1561939
gugagacuuuaccuggaga

SEQ ID NO: 1709750 - RNA, 19 nt, Artificial Sequence
  Description of Artificial Sequence: Synthetic oligonucleotide
  Antisense strand to SEQ ID NO: 1709749
ucuccagguaaagucucac

SEQ ID NO: 1709751 - RNA, 19 nt, Artificial Sequence
  Description of Artificial Sequence: Synthetic oligonucleotide
  Sense strand starting at position 3004 of SEQ ID NO: 1561939
uuugaaggaugaucgaauu

SEQ ID NO: 1709752 - RNA, 19 nt, Artificial Sequence
  Description of Artificial Sequence: Synthetic oligonucleotide
  Antisense strand to SEQ ID NO: 1709751
aauucgaucauccuucaaa

SEQ ID NO: 1709753 - RNA, 19 nt, Artificial Sequence
  Description of Artificial Sequence: Synthetic oligonucleotide
  Sense strand starting at position 3039 of SEQ ID NO: 1561939
uuagcuaaaccugaguuga

SEQ ID NO: 1709754 - RNA, 19 nt, Artificial Sequence
  Description of Artificial Sequence: Synthetic oligonucleotide
  Antisense strand to SEQ ID NO: 1709753
ucaacucagguuuagcuaa

SEQ ID NO: 1709755 - RNA, 19 nt, Artificial Sequence
  Description of Artificial Sequence: Synthetic oligonucleotide
  Sense strand starting at position 3041 of SEQ ID NO: 1561939
agcuaaaccugaguugauu

SEQ ID NO: 1709756 - RNA, 19 nt, Artificial Sequence
  Description of Artificial Sequence: Synthetic oligonucleotide
  Antisense strand to SEQ ID NO: 1709755
aaucaacucagguuuagcu

SEQ ID NO: 1709757 - RNA, 19 nt, Artificial Sequence
  Description of Artificial Sequence: Synthetic oligonucleotide
  Sense strand starting at position 3073 of SEQ ID NO: 1561939
uuagaaugcuagucuuaca

SEQ ID NO: 1709758 - RNA, 19 nt, Artificial Sequence
  Description of Artificial Sequence: Synthetic oligonucleotide
  Antisense strand to SEQ ID NO: 1709757
uguaagacuagcauucuaa

SEQ ID NO: 1709759 - RNA, 19 nt, Artificial Sequence
  Description of Artificial Sequence: Synthetic oligonucleotide
  Sense strand starting at position 3184 of SEQ ID NO: 1561939
agggaaucuuucuuucuua

SEQ ID NO: 1709760 - RNA, 19 nt, Artificial Sequence
  Description of Artificial Sequence: Synthetic oligonucleotide
  Antisense strand to SEQ ID NO: 1709759
uaagaaagaaagauucccu

SEQ ID NO: 1709761 - RNA, 19 nt, Artificial Sequence
  Description of Artificial Sequence: Synthetic oligonucleotide
  Sense strand starting at position 3185 of SEQ ID NO: 1561939
gggaaucuuucuuucuuac

SEQ ID NO: 1709762 - RNA, 19 nt, Artificial Sequence
  Description of Artificial Sequence: Synthetic oligonucleotide
  Antisense strand to SEQ ID NO: 1709761
guaagaaagaaagauuccc

SEQ ID NO: 1709763 - RNA, 19 nt, Artificial Sequence
  Description of Artificial Sequence: Synthetic oligonucleotide
  Sense strand starting at position 3578 of SEQ ID NO: 1561939
uccauaaagcccugggauu

SEQ ID NO: 1709764 - RNA, 19 nt, Artificial Sequence
  Description of Artificial Sequence: Synthetic oligonucleotide
  Antisense strand to SEQ ID NO: 1709763
aaucccagggcuuuaugga

SEQ ID NO: 1709765 - RNA, 19 nt, Artificial Sequence
  Description of Artificial Sequence: Synthetic oligonucleotide
  Sense strand starting at position 3600 of SEQ ID NO: 1561939
cuuugucuaccuuaaguuu

SEQ ID NO: 1709766 - RNA, 19 nt, Artificial Sequence
  Description of Artificial Sequence: Synthetic oligonucleotide
  Antisense strand to SEQ ID NO: 1709765
aaacuuaagguagacaaag

SEQ ID NO: 1709767 - RNA, 19 nt, Artificial Sequence
  Description of Artificial Sequence: Synthetic oligonucleotide
  Sense strand starting at position 3685 of SEQ ID NO: 1561939
ccagaauacguuggagaga

SEQ ID NO: 1709768 - RNA, 19 nt, Artificial Sequence
  Description of Artificial Sequence: Synthetic oligonucleotide
  Antisense strand to SEQ ID NO: 1709767
ucucuccaacguauucugg

SEQ ID NO: 1709769 - RNA, 19 nt, Artificial Sequence
  Description of Artificial Sequence: Synthetic oligonucleotide
  Sense strand starting at position 3687 of SEQ ID NO: 1561939
agaauacguuggagagaug

SEQ ID NO: 1709770 - RNA, 19 nt, Artificial Sequence
  Description of Artificial Sequence: Synthetic oligonucleotide
  Antisense strand to SEQ ID NO: 1709769
caucucuccaacguauucu

SEQ ID NO: 1709771 - RNA, 19 nt, Artificial Sequence
  Description of Artificial Sequence: Synthetic oligonucleotide
  Sense strand starting at position 3709 of SEQ ID NO: 1561939
uuagacuuguuaccucuau

SEQ ID NO: 1709772 - RNA, 19 nt, Artificial Sequence
  Description of Artificial Sequence: Synthetic oligonucleotide
  Antisense strand to SEQ ID NO: 1709771
auagagguaacaagucuaa

SEQ ID NO: 1709773 - RNA, 19 nt, Artificial Sequence
  Description of Artificial Sequence: Synthetic oligonucleotide
  Sense strand starting at position 3933 of SEQ ID NO: 1561939
uugcaaaggacccgagauu

SEQ ID NO: 1709774 - RNA, 19 nt, Artificial Sequence
  Description of Artificial Sequence: Synthetic oligonucleotide
  Antisense strand to SEQ ID NO: 1709773
aaucucggguccuuugcaa

SEQ ID NO: 1709775 - RNA, 19 nt, Artificial Sequence
  Description of Artificial Sequence: Synthetic oligonucleotide
  Sense strand starting at position 267 of SEQ ID NO: 1561940
aguucuaucugauacauca

SEQ ID NO: 1709776 - RNA, 19 nt, Artificial Sequence
  Description of Artificial Sequence: Synthetic oligonucleotide
  Antisense strand to SEQ ID NO: 1709775
ugauguaucagauagaacu

SEQ ID NO: 1709777 - RNA, 19 nt, Artificial Sequence
  Description of Artificial Sequence: Synthetic oligonucleotide
  Sense strand starting at position 295 of SEQ ID NO: 1561940
acaguuccagcuugaggaa

SEQ ID NO: 1709778 - RNA, 19 nt, Artificial Sequence
  Description of Artificial Sequence: Synthetic oligonucleotide
  Antisense strand to SEQ ID NO: 1709777
uuccucaagcuggaacugu

SEQ ID NO: 1709779 - RNA, 19 nt, Artificial Sequence
  Description of Artificial Sequence: Synthetic oligonucleotide
  Sense strand starting at position 307 of SEQ ID NO: 1561940
ugaggaagguugaggagau

SEQ ID NO: 1709780 - RNA, 19 nt, Artificial Sequence
  Description of Artificial Sequence: Synthetic oligonucleotide
  Antisense strand to SEQ ID NO: 1709779
aucuccucaaccuuccuca

SEQ ID NO: 1709781 - RNA, 19 nt, Artificial Sequence
  Description of Artificial Sequence: Synthetic oligonucleotide
  Sense strand starting at position 330 of SEQ ID NO: 1561940
cagguuguggcccaggaau

SEQ ID NO: 1709782 - RNA, 19 nt, Artificial Sequence
  Description of Artificial Sequence: Synthetic oligonucleotide
  Antisense strand to SEQ ID NO: 1709781
auuccugggccacaaccug

SEQ ID NO: 1709783 - RNA, 19 nt, Artificial Sequence
  Description of Artificial Sequence: Synthetic oligonucleotide
  Sense strand starting at position 428 of SEQ ID NO: 1561940
uuccuugcgugcuguugaa

SEQ ID NO: 1709784 - RNA, 19 nt, Artificial Sequence
  Description of Artificial Sequence: Synthetic oligonucleotide
  Antisense strand to SEQ ID NO: 1709783
uucaacagcacgcaaggaa

SEQ ID NO: 1709785 - RNA, 19 nt, Artificial Sequence
  Description of Artificial Sequence: Synthetic oligonucleotide
  Sense strand starting at position 488 of SEQ ID NO: 1561940
ugaguuacccacuagcaaa

SEQ ID NO: 1709786 - RNA, 19 nt, Artificial Sequence
  Description of Artificial Sequence: Synthetic oligonucleotide
  Antisense strand to SEQ ID NO: 1709785
uuugcuaguggguaacuca

SEQ ID NO: 1709787 - RNA, 19 nt, Artificial Sequence
  Description of Artificial Sequence: Synthetic oligonucleotide
  Sense strand starting at position 628 of SEQ ID NO: 1561940
aaggcaaguucggcagauu

SEQ ID NO: 1709788 - RNA, 19 nt, Artificial Sequence
  Description of Artificial Sequence: Synthetic oligonucleotide
  Antisense strand to SEQ ID NO: 1709787
aaucugccgaacuugccuu

SEQ ID NO: 1709789 - RNA, 19 nt, Artificial Sequence
  Description of Artificial Sequence: Synthetic oligonucleotide
  Sense strand starting at position 1241 of SEQ ID NO: 1561940
gcggugaacgguggagaaa

SEQ ID NO: 1709790 - RNA, 19 nt, Artificial Sequence
  Description of Artificial Sequence: Synthetic oligonucleotide
  Antisense strand to SEQ ID NO: 1709789
uuucuccaccguucaccgc

SEQ ID NO: 1709791 - RNA, 19 nt, Artificial Sequence
  Description of Artificial Sequence: Synthetic oligonucleotide
  Sense strand starting at position 1758 of SEQ ID NO: 1561940
ccacucacguccuggaaga

SEQ ID NO: 1709792 - RNA, 19 nt, Artificial Sequence
  Description of Artificial Sequence: Synthetic oligonucleotide
  Antisense strand to SEQ ID NO: 1709791
ucuuccaggacgugagugg

SEQ ID NO: 1709793 - RNA, 19 nt, Artificial Sequence
  Description of Artificial Sequence: Synthetic oligonucleotide
  Sense strand starting at position 2258 of SEQ ID NO: 1561940
gcgucuguauccucaucua

SEQ ID NO: 1709794 - RNA, 19 nt, Artificial Sequence
  Description of Artificial Sequence: Synthetic oligonucleotide
  Antisense strand to SEQ ID NO: 1709793
uagaugaggauacagacgc

SEQ ID NO: 1709795 - RNA, 19 nt, Artificial Sequence
  Description of Artificial Sequence: Synthetic oligonucleotide
  Sense strand starting at position 2291 of SEQ ID NO: 1561940
gcagacacccuaugcaauu

SEQ ID NO: 1709796 - RNA, 19 nt, Artificial Sequence
  Description of Artificial Sequence: Synthetic oligonucleotide
  Antisense strand to SEQ ID NO: 1709795
aauugcauagggugucugc

SEQ ID NO: 1709797 - RNA, 19 nt, Artificial Sequence
  Description of Artificial Sequence: Synthetic oligonucleotide
  Sense strand starting at position 2302 of SEQ ID NO: 1561940
augcaauuguugggacuca

SEQ ID NO: 1709798 - RNA, 19 nt, Artificial Sequence
  Description of Artificial Sequence: Synthetic oligonucleotide
  Antisense strand to SEQ ID NO: 1709797
ugagucccaacaauugcau

SEQ ID NO: 1709799 - RNA, 19 nt, Artificial Sequence
  Description of Artificial Sequence: Synthetic oligonucleotide
  Sense strand starting at position 2303 of SEQ ID NO: 1561940
ugcaauuguugggacucau

SEQ ID NO: 1709800 - RNA, 19 nt, Artificial Sequence
  Description of Artificial Sequence: Synthetic oligonucleotide
  Antisense strand to SEQ ID NO: 1709799
augagucccaacaauugca

SEQ ID NO: 1709801 - RNA, 19 nt, Artificial Sequence
  Description of Artificial Sequence: Synthetic oligonucleotide
  Sense strand starting at position 2881 of SEQ ID NO: 1561940
cacuguauuuguuacaugu

SEQ ID NO: 1709802 - RNA, 19 nt, Artificial Sequence
  Description of Artificial Sequence: Synthetic oligonucleotide
  Antisense strand to SEQ ID NO: 1709801
acauguaacaaauacagug

SEQ ID NO: 1709803 - RNA, 19 nt, Artificial Sequence
  Description of Artificial Sequence: Synthetic oligonucleotide
  Sense strand starting at position 2883 of SEQ ID NO: 1561940
cuguauuuguuacauguuu

SEQ ID NO: 1709804 - RNA, 19 nt, Artificial Sequence
  Description of Artificial Sequence: Synthetic oligonucleotide
  Antisense strand to SEQ ID NO: 1709803
aaacauguaacaaauacag

SEQ ID NO: 1709805 - RNA, 19 nt, Artificial Sequence
  Description of Artificial Sequence: Synthetic oligonucleotide
  Sense strand starting at position 2891 of SEQ ID NO: 1561940
guuacauguuuacuaaugu

SEQ ID NO: 1709806 - RNA, 19 nt, Artificial Sequence
  Description of Artificial Sequence: Synthetic oligonucleotide
  Antisense strand to SEQ ID NO: 1709805
acauuaguaaacauguaac

SEQ ID NO: 1709807 - RNA, 19 nt, Artificial Sequence
  Description of Artificial Sequence: Synthetic oligonucleotide
  Sense strand starting at position 2898 of SEQ ID NO: 1561940
guuuacuaauguccagaaa

SEQ ID NO: 1709808 - RNA, 19 nt, Artificial Sequence
  Description of Artificial Sequence: Synthetic oligonucleotide
  Antisense strand to SEQ ID NO: 1709807
uuucuggacauuaguaaac

SEQ ID NO: 1709809 - RNA, 19 nt, Artificial Sequence
  Description of Artificial Sequence: Synthetic oligonucleotide
  Sense strand starting at position 2901 of SEQ ID NO: 1561940
uacuaauguccagaaacgu

SEQ ID NO: 1709810 - RNA, 19 nt, Artificial Sequence
  Description of Artificial Sequence: Synthetic oligonucleotide
  Antisense strand to SEQ ID NO: 1709809
acguuucuggacauuagua

SEQ ID NO: 1709811 - RNA, 19 nt, Artificial Sequence
  Description of Artificial Sequence: Synthetic oligonucleotide
  Sense strand starting at position 2910 of SEQ ID NO: 1561940
ccagaaacgucuggaagga

SEQ ID NO: 1709812 - RNA, 19 nt, Artificial Sequence
  Description of Artificial Sequence: Synthetic oligonucleotide
  Antisense strand to SEQ ID NO: 1709811
uccuuccagacguuucugg

SEQ ID NO: 1709813 - RNA, 19 nt, Artificial Sequence
  Description of Artificial Sequence: Synthetic oligonucleotide
  Sense strand starting at position 3084 of SEQ ID NO: 1561940
gcugaccuuucuucgaguu

SEQ ID NO: 1709814 - RNA, 19 nt, Artificial Sequence
  Description of Artificial Sequence: Synthetic oligonucleotide
  Antisense strand to SEQ ID NO: 1709813
aacucgaagaaaggucagc

SEQ ID NO: 1709815 - RNA, 19 nt, Artificial Sequence
  Description of Artificial Sequence: Synthetic oligonucleotide
  Sense strand starting at position 3085 of SEQ ID NO: 1561940
cugaccuuucuucgaguua

SEQ ID NO: 1709816 - RNA, 19 nt, Artificial Sequence
  Description of Artificial Sequence: Synthetic oligonucleotide
  Antisense strand to SEQ ID NO: 1709815
uaacucgaagaaaggucag

SEQ ID NO: 1709817 - RNA, 19 nt, Artificial Sequence
  Description of Artificial Sequence: Synthetic oligonucleotide
  Sense strand starting at position 3086 of SEQ ID NO: 1561940
ugaccuuucuucgaguuau

SEQ ID NO: 1709818 - RNA, 19 nt, Artificial Sequence
  Description of Artificial Sequence: Synthetic oligonucleotide
  Antisense strand to SEQ ID NO: 1709817
auaacucgaagaaagguca

SEQ ID NO: 1709819 - RNA, 19 nt, Artificial Sequence
  Description of Artificial Sequence: Synthetic oligonucleotide
  Sense strand starting at position 3090 of SEQ ID NO: 1561940
cuuucuucgaguuaugagg

SEQ ID NO: 1709820 - RNA, 19 nt, Artificial Sequence
  Description of Artificial Sequence: Synthetic oligonucleotide
  Antisense strand to SEQ ID NO: 1709819
ccucauaacucgaagaaag

SEQ ID NO: 1709821 - RNA, 19 nt, Artificial Sequence
  Description of Artificial Sequence: Synthetic oligonucleotide
  Sense strand starting at position 3099 of SEQ ID NO: 1561940
aguuaugaggcucaaauca

SEQ ID NO: 1709822 - RNA, 19 nt, Artificial Sequence
  Description of Artificial Sequence: Synthetic oligonucleotide
  Antisense strand to SEQ ID NO: 1709821
ugauuugagccucauaacu

SEQ ID NO: 1709823 - RNA, 19 nt, Artificial Sequence
  Description of Artificial Sequence: Synthetic oligonucleotide
  Sense strand starting at position 3188 of SEQ ID NO: 1561940
ccgaaauguucccaacaga

SEQ ID NO: 1709824 - RNA, 19 nt, Artificial Sequence
  Description of Artificial Sequence: Synthetic oligonucleotide
  Antisense strand to SEQ ID NO: 1709823
ucuguugggaacauuucgg

SEQ ID NO: 1709825 - RNA, 19 nt, Artificial Sequence
  Description of Artificial Sequence: Synthetic oligonucleotide
  Sense strand starting at position 3614 of SEQ ID NO: 1561940
gcccuugcucaaggguaga

SEQ ID NO: 1709826 - RNA, 19 nt, Artificial Sequence
  Description of Artificial Sequence: Synthetic oligonucleotide
  Antisense strand to SEQ ID NO: 1709825
ucuacccuugagcaagggc

SEQ ID NO: 1709827 - RNA, 19 nt, Artificial Sequence
  Description of Artificial Sequence: Synthetic oligonucleotide
  Sense strand starting at position 3876 of SEQ ID NO: 1561940
ggccgaaagugcaguuaga

SEQ ID NO: 1709828 - RNA, 19 nt, Artificial Sequence
  Description of Artificial Sequence: Synthetic oligonucleotide
  Antisense strand to SEQ ID NO: 1709827
ucuaacugcacuuucggcc

SEQ ID NO: 1709829 - RNA, 19 nt, Artificial Sequence
  Description of Artificial Sequence: Synthetic oligonucleotide
  Sense strand starting at position 150 of SEQ ID NO: 1561941
ccacuuugguagucagcaa

SEQ ID NO: 1709830 - RNA, 19 nt, Artificial Sequence
  Description of Artificial Sequence: Synthetic oligonucleotide
  Antisense strand to SEQ ID NO: 1709829
uugcugacuaccaaagugg

SEQ ID NO: 1709831 - RNA, 19 nt, Artificial Sequence
  Description of Artificial Sequence: Synthetic oligonucleotide
  Sense strand starting at position 285 of SEQ ID NO: 1561941
ccagauaaguaggguaaca

SEQ ID NO: 1709832 - RNA, 19 nt, Artificial Sequence
  Description of Artificial Sequence: Synthetic oligonucleotide
  Antisense strand to SEQ ID NO: 1709831
uguuacccuacuuaucugg

SEQ ID NO: 1709833 - RNA, 19 nt, Artificial Sequence
  Description of Artificial Sequence: Synthetic oligonucleotide
  Sense strand starting at position 369 of SEQ ID NO: 1561941
agcuaagucugacucuauc

SEQ ID NO: 1709834 - RNA, 19 nt, Artificial Sequence
  Description of Artificial Sequence: Synthetic oligonucleotide
  Antisense strand to SEQ ID NO: 1709833
gauagagucagacuuagcu

SEQ ID NO: 1709835 - RNA, 19 nt, Artificial Sequence
  Description of Artificial Sequence: Synthetic oligonucleotide
  Sense strand starting at position 402 of SEQ ID NO: 1561941
ccuccaacacugugaaaug

SEQ ID NO: 1709836 - RNA, 19 nt, Artificial Sequence
  Description of Artificial Sequence: Synthetic oligonucleotide
  Antisense strand to SEQ ID NO: 1709835
cauuucacaguguuggagg

SEQ ID NO: 1709837 - RNA, 19 nt, Artificial Sequence
  Description of Artificial Sequence: Synthetic oligonucleotide
  Sense strand starting at position 403 of SEQ ID NO: 1561941
cuccaacacugugaaauga

SEQ ID NO: 1709838 - RNA, 19 nt, Artificial Sequence
  Description of Artificial Sequence: Synthetic oligonucleotide
  Antisense strand to SEQ ID NO: 1709837
ucauuucacaguguuggag

SEQ ID NO: 1709839 - RNA, 19 nt, Artificial Sequence
  Description of Artificial Sequence: Synthetic oligonucleotide
  Sense strand starting at position 486 of SEQ ID NO: 1561941
gcagcucuccaaggaucuu

SEQ ID NO: 1709840 - RNA, 19 nt, Artificial Sequence
  Description of Artificial Sequence: Synthetic oligonucleotide
  Antisense strand to SEQ ID NO: 1709839
aagauccuuggagagcugc

SEQ ID NO: 1709841 - RNA, 19 nt, Artificial Sequence
  Description of Artificial Sequence: Synthetic oligonucleotide
  Sense strand starting at position 1154 of SEQ ID NO: 1561941
ucaguugggucuuuagagu

SEQ ID NO: 1709842 - RNA, 19 nt, Artificial Sequence
  Description of Artificial Sequence: Synthetic oligonucleotide
  Antisense strand to SEQ ID NO: 1709841
acucuaaagacccaacuga

SEQ ID NO: 1709843 - RNA, 19 nt, Artificial Sequence
  Description of Artificial Sequence: Synthetic oligonucleotide
  Sense strand starting at position 1160 of SEQ ID NO: 1561941
gggucuuuagaguaaggug

SEQ ID NO: 1709844 - RNA, 19 nt, Artificial Sequence
  Description of Artificial Sequence: Synthetic oligonucleotide
  Antisense strand to SEQ ID NO: 1709843
caccuuacucuaaagaccc

SEQ ID NO: 1709845 - RNA, 19 nt, Artificial Sequence
  Description of Artificial Sequence: Synthetic oligonucleotide
  Sense strand starting at position 1342 of SEQ ID NO: 1561941
ugcugaagaguacaguuua

SEQ ID NO: 1709846 - RNA, 19 nt, Artificial Sequence
  Description of Artificial Sequence: Synthetic oligonucleotide
  Antisense strand to SEQ ID NO: 1709845
uaaacuguacucuucagca

SEQ ID NO: 1709847 - RNA, 19 nt, Artificial Sequence
  Description of Artificial Sequence: Synthetic oligonucleotide
  Sense strand starting at position 1379 of SEQ ID NO: 1561941
guaggaaugcccuaaguuc

SEQ ID NO: 1709848 - RNA, 19 nt, Artificial Sequence
  Description of Artificial Sequence: Synthetic oligonucleotide
  Antisense strand to SEQ ID NO: 1709847
gaacuuagggcauuccuac

SEQ ID NO: 1709849 - RNA, 19 nt, Artificial Sequence
  Description of Artificial Sequence: Synthetic oligonucleotide
  Sense strand starting at position 1800 of SEQ ID NO: 1561941
gaacgauucucucuagggu

SEQ ID NO: 1709850 - RNA, 19 nt, Artificial Sequence
  Description of Artificial Sequence: Synthetic oligonucleotide
  Antisense strand to SEQ ID NO: 1709849
acccuagagagaaucguuc

SEQ ID NO: 1709851 - RNA, 19 nt, Artificial Sequence
  Description of Artificial Sequence: Synthetic oligonucleotide
  Sense strand starting at position 2159 of SEQ ID NO: 1561941
gagguuucccacuggauuc

SEQ ID NO: 1709852 - RNA, 19 nt, Artificial Sequence
  Description of Artificial Sequence: Synthetic oligonucleotide
  Antisense strand to SEQ ID NO: 1709851
gaauccagugggaaaccuc

SEQ ID NO: 1709853 - RNA, 19 nt, Artificial Sequence
  Description of Artificial Sequence: Synthetic oligonucleotide
  Sense strand starting at position 2244 of SEQ ID NO: 1561941
caaauccuuccggaagugu

SEQ ID NO: 1709854 - RNA, 19 nt, Artificial Sequence
  Description of Artificial Sequence: Synthetic oligonucleotide
  Antisense strand to SEQ ID NO: 1709853
acacuuccggaaggauuug

SEQ ID NO: 1709855 - RNA, 19 nt, Artificial Sequence
  Description of Artificial Sequence: Synthetic oligonucleotide
  Sense strand starting at position 2991 of SEQ ID NO: 1561941
acugaaugcaguggaaagu

SEQ ID NO: 1709856 - RNA, 19 nt, Artificial Sequence
  Description of Artificial Sequence: Synthetic oligonucleotide
  Antisense strand to SEQ ID NO: 1709855
acuuuccacugcauucagu

SEQ ID NO: 1709857 - RNA, 19 nt, Artificial Sequence
  Description of Artificial Sequence: Synthetic oligonucleotide
  Sense strand starting at position 3094 of SEQ ID NO: 1561941
cucucuggucguugccaaa

SEQ ID NO: 1709858 - RNA, 19 nt, Artificial Sequence
  Description of Artificial Sequence: Synthetic oligonucleotide
  Antisense strand to SEQ ID NO: 1709857
uuuggcaacgaccagagag

SEQ ID NO: 1709859 - RNA, 19 nt, Artificial Sequence
  Description of Artificial Sequence: Synthetic oligonucleotide
  Sense strand starting at position 3117 of SEQ ID NO: 1561941
gcagcugacgcuguuguaa

SEQ ID NO: 1709860 - RNA, 19 nt, Artificial Sequence
  Description of Artificial Sequence: Synthetic oligonucleotide
  Antisense strand to SEQ ID NO: 1709859
uuacaacagcgucagcugc

SEQ ID NO: 1709861 - RNA, 19 nt, Artificial Sequence
  Description of Artificial Sequence: Synthetic oligonucleotide
  Sense strand starting at position 3144 of SEQ ID NO: 1561941
gcucgauucccagcgugaa

SEQ ID NO: 1709862 - RNA, 19 nt, Artificial Sequence
  Description of Artificial Sequence: Synthetic oligonucleotide
  Antisense strand to SEQ ID NO: 1709861
uucacgcugggaaucgagc

SEQ ID NO: 1709863 - RNA, 19 nt, Artificial Sequence
  Description of Artificial Sequence: Synthetic oligonucleotide
  Sense strand starting at position 3145 of SEQ ID NO: 1561941
cucgauucccagcgugaag

SEQ ID NO: 1709864 - RNA, 19 nt, Artificial Sequence
  Description of Artificial Sequence: Synthetic oligonucleotide
  Antisense strand to SEQ ID NO: 1709863
cuucacgcugggaaucgag

SEQ ID NO: 1709865 - RNA, 19 nt, Artificial Sequence
  Description of Artificial Sequence: Synthetic oligonucleotide
  Sense strand starting at position 3147 of SEQ ID NO: 1561941
cgauucccagcgugaagua

SEQ ID NO: 1709866 - RNA, 19 nt, Artificial Sequence
  Description of Artificial Sequence: Synthetic oligonucleotide
  Antisense strand to SEQ ID NO: 1709865
uacuucacgcugggaaucg

SEQ ID NO: 1709867 - RNA, 19 nt, Artificial Sequence
  Description of Artificial Sequence: Synthetic oligonucleotide
  Sense strand starting at position 3278 of SEQ ID NO: 1561941
gguauauugcgugaugcuu

SEQ ID NO: 1709868 - RNA, 19 nt, Artificial Sequence
  Description of Artificial Sequence: Synthetic oligonucleotide
  Antisense strand to SEQ ID NO: 1709867
aagcaucacgcaauauacc

SEQ ID NO: 1709869 - RNA, 19 nt, Artificial Sequence
  Description of Artificial Sequence: Synthetic oligonucleotide
  Sense strand starting at position 3284 of SEQ ID NO: 1561941
uugcgugaugcuucuaauc

SEQ ID NO: 1709870 - RNA, 19 nt, Artificial Sequence
  Description of Artificial Sequence: Synthetic oligonucleotide
  Antisense strand to SEQ ID NO: 1709869
gauuagaagcaucacgcaa

SEQ ID NO: 1709871 - RNA, 19 nt, Artificial Sequence
  Description of Artificial Sequence: Synthetic oligonucleotide
  Sense strand starting at position 3297 of SEQ ID NO: 1561941
cuaauccuuucggcaacuu

SEQ ID NO: 1709872 - RNA, 19 nt, Artificial Sequence
  Description of Artificial Sequence: Synthetic oligonucleotide
  Antisense strand to SEQ ID NO: 1709871
aaguugccgaaaggauuag

SEQ ID NO: 1709873 - RNA, 19 nt, Artificial Sequence
  Description of Artificial Sequence: Synthetic oligonucleotide
  Sense strand starting at position 3374 of SEQ ID NO: 1561941
ucccaucuuuguguccaaa

SEQ ID NO: 1709874 - RNA, 19 nt, Artificial Sequence
  Description of Artificial Sequence: Synthetic oligonucleotide
  Antisense strand to SEQ ID NO: 1709873
uuuggacacaaagauggga

SEQ ID NO: 1709875 - RNA, 19 nt, Artificial Sequence
  Description of Artificial Sequence: Synthetic oligonucleotide
  Sense strand starting at position 3376 of SEQ ID NO: 1561941
ccaucuuuguguccaaauc

SEQ ID NO: 1709876 - RNA, 19 nt, Artificial Sequence
  Description of Artificial Sequence: Synthetic oligonucleotide
  Antisense strand to SEQ ID NO: 1709875
gauuuggacacaaagaugg

SEQ ID NO: 1709877 - RNA, 19 nt, Artificial Sequence
  Description of Artificial Sequence: Synthetic oligonucleotide
  Sense strand starting at position 3754 of SEQ ID NO: 1561941
aaagguaaugcccauguca

SEQ ID NO: 1709878 - RNA, 19 nt, Artificial Sequence
  Description of Artificial Sequence: Synthetic oligonucleotide
  Antisense strand to SEQ ID NO: 1709877
ugacaugggcauuaccuuu

SEQ ID NO: 1709879 - RNA, 19 nt, Artificial Sequence
  Description of Artificial Sequence: Synthetic oligonucleotide
  Sense strand starting at position 3756 of SEQ ID NO: 1561941
agguaaugcccaugucagu

SEQ ID NO: 1709880 - RNA, 19 nt, Artificial Sequence
  Description of Artificial Sequence: Synthetic oligonucleotide
  Antisense strand to SEQ ID NO: 1709879
acugacaugggcauuaccu

SEQ ID NO: 1709881 - RNA, 19 nt, Artificial Sequence
  Description of Artificial Sequence: Synthetic oligonucleotide
  Sense strand starting at position 3762 of SEQ ID NO: 1561941
ugcccaugucaguaaggaa

SEQ ID NO: 1709882 - RNA, 19 nt, Artificial Sequence
  Description of Artificial Sequence: Synthetic oligonucleotide
  Antisense strand to SEQ ID NO: 1709881
uuccuuacugacaugggca

SEQ ID NO: 1709883 - RNA, 19 nt, Artificial Sequence
  Description of Artificial Sequence: Synthetic oligonucleotide
  Sense strand starting at position 3776 of SEQ ID NO: 1561941
aggaaagaguauuagagaa

SEQ ID NO: 1709884 - RNA, 19 nt, Artificial Sequence
  Description of Artificial Sequence: Synthetic oligonucleotide
  Antisense strand to SEQ ID NO: 1709883
uucucuaauacucuuuccu

SEQ ID NO: 1709885 - RNA, 19 nt, Artificial Sequence
  Description of Artificial Sequence: Synthetic oligonucleotide
  Sense strand starting at position 3799 of SEQ ID NO: 1561941
gcuccagaagauugauaau

SEQ ID NO: 1709886 - RNA, 19 nt, Artificial Sequence
  Description of Artificial Sequence: Synthetic oligonucleotide
  Antisense strand to SEQ ID NO: 1709885
auuaucaaucuucuggagc

SEQ ID NO: 1709887 - RNA, 19 nt, Artificial Sequence
  Description of Artificial Sequence: Synthetic oligonucleotide
  Sense strand starting at position 3802 of SEQ ID NO: 1561941
ccagaagauugauaauagu

SEQ ID NO: 1709888 - RNA, 19 nt, Artificial Sequence
  Description of Artificial Sequence: Synthetic oligonucleotide
  Antisense strand to SEQ ID NO: 1709887
acuauuaucaaucuucugg

SEQ ID NO: 1709889 - RNA, 19 nt, Artificial Sequence
  Description of Artificial Sequence: Synthetic oligonucleotide
  Sense strand starting at position 3808 of SEQ ID NO: 1561941
gauugauaauagugacuac

SEQ ID NO: 1709890 - RNA, 19 nt, Artificial Sequence
  Description of Artificial Sequence: Synthetic oligonucleotide
  Antisense strand to SEQ ID NO: 1709889
guagucacuauuaucaauc

SEQ ID NO: 1709891 - RNA, 19 nt, Artificial Sequence
  Description of Artificial Sequence: Synthetic oligonucleotide
  Sense strand starting at position 3811 of SEQ ID NO: 1561941
ugauaauagugacuacuuu

SEQ ID NO: 1709892 - RNA, 19 nt, Artificial Sequence
  Description of Artificial Sequence: Synthetic oligonucleotide
  Antisense strand to SEQ ID NO: 1709891
aaaguagucacuauuauca

SEQ ID NO: 1709893 - RNA, 19 nt, Artificial Sequence
  Description of Artificial Sequence: Synthetic oligonucleotide
  Sense strand starting at position 3830 of SEQ ID NO: 1561941
uggagaacuuaucagggaa

SEQ ID NO: 1709894 - RNA, 19 nt, Artificial Sequence
  Description of Artificial Sequence: Synthetic oligonucleotide
  Antisense strand to SEQ ID NO: 1709893
uucccugauaaguucucca

SEQ ID NO: 1709895 - RNA, 19 nt, Artificial Sequence
  Description of Artificial Sequence: Synthetic oligonucleotide
  Sense strand starting at position 3832 of SEQ ID NO: 1561941
gagaacuuaucagggaaua

SEQ ID NO: 1709896 - RNA, 19 nt, Artificial Sequence
  Description of Artificial Sequence: Synthetic oligonucleotide
  Antisense strand to SEQ ID NO: 1709895
uauucccugauaaguucuc

SEQ ID NO: 1709897 - RNA, 19 nt, Artificial Sequence
  Description of Artificial Sequence: Synthetic oligonucleotide
  Sense strand starting at position 3874 of SEQ ID NO: 1561941
uuuauugaguguucccuaa

SEQ ID NO: 1709898 - RNA, 19 nt, Artificial Sequence
  Description of Artificial Sequence: Synthetic oligonucleotide
  Antisense strand to SEQ ID NO: 1709897
uuagggaacacucaauaaa

SEQ ID NO: 1709899 - RNA, 19 nt, Artificial Sequence
  Description of Artificial Sequence: Synthetic oligonucleotide
  Sense strand starting at position 3876 of SEQ ID NO: 1561941
uauugaguguucccuaagu

SEQ ID NO: 1709900 - RNA, 19 nt, Artificial Sequence
  Description of Artificial Sequence: Synthetic oligonucleotide
  Antisense strand to SEQ ID NO: 1709899
acuuagggaacacucaaua

SEQ ID NO: 1709901 - RNA, 19 nt, Artificial Sequence
  Description of Artificial Sequence: Synthetic oligonucleotide
  Sense strand starting at position 3878 of SEQ ID NO: 1561941
uugaguguucccuaagugc

SEQ ID NO: 1709902 - RNA, 19 nt, Artificial Sequence
  Description of Artificial Sequence: Synthetic oligonucleotide
  Antisense strand to SEQ ID NO: 1709901
gcacuuagggaacacucaa

SEQ ID NO: 1709903 - RNA, 19 nt, Artificial Sequence
  Description of Artificial Sequence: Synthetic oligonucleotide
  Sense strand starting at position 3914 of SEQ ID NO: 1561941
ccuggagcucggugaacaa

SEQ ID NO: 1709904 - RNA, 19 nt, Artificial Sequence
  Description of Artificial Sequence: Synthetic oligonucleotide
  Antisense strand to SEQ ID NO: 1709903
uuguucaccgagcuccagg

SEQ ID NO: 1709905 - RNA, 19 nt, Artificial Sequence
  Description of Artificial Sequence: Synthetic oligonucleotide
  Sense strand starting at position 3942 of SEQ ID NO: 1561941
gauccuuguccggguagag

SEQ ID NO: 1709906 - RNA, 19 nt, Artificial Sequence
  Description of Artificial Sequence: Synthetic oligonucleotide
  Antisense strand to SEQ ID NO: 1709905
cucuacccggacaaggauc

SEQ ID NO: 1709907 - RNA, 19 nt, Artificial Sequence
  Description of Artificial Sequence: Synthetic oligonucleotide
  Sense strand starting at position 3961 of SEQ ID NO: 1561941
ccuacauucuacugaagga

SEQ ID NO: 1709908 - RNA, 19 nt, Artificial Sequence
  Description of Artificial Sequence: Synthetic oligonucleotide
  Antisense strand to SEQ ID NO: 1709907
uccuucaguagaauguagg

SEQ ID NO: 1709909 - RNA, 19 nt, Artificial Sequence
  Description of Artificial Sequence: Synthetic oligonucleotide
  Sense strand starting at position 3 of SEQ ID NO: 1561942
guuuguuaugccucgaagc

SEQ ID NO: 1709910 - RNA, 19 nt, Artificial Sequence
  Description of Artificial Sequence: Synthetic oligonucleotide
  Antisense strand to SEQ ID NO: 1709909
gcuucgaggcauaacaaac

SEQ ID NO: 1709911 - RNA, 19 nt, Artificial Sequence
  Description of Artificial Sequence: Synthetic oligonucleotide
  Sense strand starting at position 5 of SEQ ID NO: 1561942
uuguuaugccucgaagcca

SEQ ID NO: 1709912 - RNA, 19 nt, Artificial Sequence
  Description of Artificial Sequence: Synthetic oligonucleotide
  Antisense strand to SEQ ID NO: 1709911
uggcuucgaggcauaacaa

SEQ ID NO: 1709913 - RNA, 19 nt, Artificial Sequence
  Description of Artificial Sequence: Synthetic oligonucleotide
  Sense strand starting at position 34 of SEQ ID NO: 1561942
ugcccaagucuaugagcau

SEQ ID NO: 1709914 - RNA, 19 nt, Artificial Sequence
  Description of Artificial Sequence: Synthetic oligonucleotide
  Antisense strand to SEQ ID NO: 1709913
augcucauagacuugggca

SEQ ID NO: 1709915 - RNA, 19 nt, Artificial Sequence
  Description of Artificial Sequence: Synthetic oligonucleotide
  Sense strand starting at position 40 of SEQ ID NO: 1561942
agucuaugagcauguuucu

SEQ ID NO: 1709916 - RNA, 19 nt, Artificial Sequence
  Description of Artificial Sequence: Synthetic oligonucleotide
  Antisense strand to SEQ ID NO: 1709915
agaaacaugcucauagacu

SEQ ID NO: 1709917 - RNA, 19 nt, Artificial Sequence
  Description of Artificial Sequence: Synthetic oligonucleotide
  Sense strand starting at position 122 of SEQ ID NO: 1561942
aagugcagugcucagugaa

SEQ ID NO: 1709918 - RNA, 19 nt, Artificial Sequence
  Description of Artificial Sequence: Synthetic oligonucleotide
  Antisense strand to SEQ ID NO: 1709917
uucacugagcacugcacuu

SEQ ID NO: 1709919 - RNA, 19 nt, Artificial Sequence
  Description of Artificial Sequence: Synthetic oligonucleotide
  Sense strand starting at position 125 of SEQ ID NO: 1561942
ugcagugcucagugaacug

SEQ ID NO: 1709920 - RNA, 19 nt, Artificial Sequence
  Description of Artificial Sequence: Synthetic oligonucleotide
  Antisense strand to SEQ ID NO: 1709919
caguucacugagcacugca

SEQ ID NO: 1709921 - RNA, 19 nt, Artificial Sequence
  Description of Artificial Sequence: Synthetic oligonucleotide
  Sense strand starting at position 623 of SEQ ID NO: 1561942
ggccaagcauguuucuaag

SEQ ID NO: 1709922 - RNA, 19 nt, Artificial Sequence
  Description of Artificial Sequence: Synthetic oligonucleotide
  Antisense strand to SEQ ID NO: 1709921
cuuagaaacaugcuuggcc

SEQ ID NO: 1709923 - RNA, 19 nt, Artificial Sequence
  Description of Artificial Sequence: Synthetic oligonucleotide
  Sense strand starting at position 625 of SEQ ID NO: 1561942
ccaagcauguuucuaagaa

SEQ ID NO: 1709924 - RNA, 19 nt, Artificial Sequence
  Description of Artificial Sequence: Synthetic oligonucleotide
  Antisense strand to SEQ ID NO: 1709923
uucuuagaaacaugcuugg

SEQ ID NO: 1709925 - RNA, 19 nt, Artificial Sequence
  Description of Artificial Sequence: Synthetic oligonucleotide
  Sense strand starting at position 740 of SEQ ID NO: 1561942
gaacuuguagggcaucuua

SEQ ID NO: 1709926 - RNA, 19 nt, Artificial Sequence
  Description of Artificial Sequence: Synthetic oligonucleotide
  Antisense strand to SEQ ID NO: 1709925
uaagaugcccuacaaguuc

SEQ ID NO: 1709927 - RNA, 19 nt, Artificial Sequence
  Description of Artificial Sequence: Synthetic oligonucleotide
  Sense strand starting at position 794 of SEQ ID NO: 1561942
cauguagaggcuugugcaa

SEQ ID NO: 1709928 - RNA, 19 nt, Artificial Sequence
  Description of Artificial Sequence: Synthetic oligonucleotide
  Antisense strand to SEQ ID NO: 1709927
uugcacaagccucuacaug

SEQ ID NO: 1709929 - RNA, 19 nt, Artificial Sequence
  Description of Artificial Sequence: Synthetic oligonucleotide
  Sense strand starting at position 796 of SEQ ID NO: 1561942
uguagaggcuugugcaaga

SEQ ID NO: 1709930 - RNA, 19 nt, Artificial Sequence
  Description of Artificial Sequence: Synthetic oligonucleotide
  Antisense strand to SEQ ID NO: 1709929
ucuugcacaagccucuaca

SEQ ID NO: 1709931 - RNA, 19 nt, Artificial Sequence
  Description of Artificial Sequence: Synthetic oligonucleotide
  Sense strand starting at position 857 of SEQ ID NO: 1561942
uaaacuagugccggacaga

SEQ ID NO: 1709932 - RNA, 19 nt, Artificial Sequence
  Description of Artificial Sequence: Synthetic oligonucleotide
  Antisense strand to SEQ ID NO: 1709931
ucuguccggcacuaguuua

SEQ ID NO: 1709933 - RNA, 19 nt, Artificial Sequence
  Description of Artificial Sequence: Synthetic oligonucleotide
  Sense strand starting at position 1068 of SEQ ID NO: 1561942
uguccucgccguugaugau

SEQ ID NO: 1709934 - RNA, 19 nt, Artificial Sequence
  Description of Artificial Sequence: Synthetic oligonucleotide
  Antisense strand to SEQ ID NO: 1709933
aucaucaacggcgaggaca

SEQ ID NO: 1709935 - RNA, 19 nt, Artificial Sequence
  Description of Artificial Sequence: Synthetic oligonucleotide
  Sense strand starting at position 1173 of SEQ ID NO: 1561942
gcucauagagcugguccaa

SEQ ID NO: 1709936 - RNA, 19 nt, Artificial Sequence
  Description of Artificial Sequence: Synthetic oligonucleotide
  Antisense strand to SEQ ID NO: 1709935
uuggaccagcucuaugagc

SEQ ID NO: 1709937 - RNA, 19 nt, Artificial Sequence
  Description of Artificial Sequence: Synthetic oligonucleotide
  Sense strand starting at position 1252 of SEQ ID NO: 1561942
cugcucaaugcgcagauau

SEQ ID NO: 1709938 - RNA, 19 nt, Artificial Sequence
  Description of Artificial Sequence: Synthetic oligonucleotide
  Antisense strand to SEQ ID NO: 1709937
auaucugcgcauugagcag

SEQ ID NO: 1709939 - RNA, 19 nt, Artificial Sequence
  Description of Artificial Sequence: Synthetic oligonucleotide
  Sense strand starting at position 2834 of SEQ ID NO: 1561942
cuucuaagccucgggauuu

SEQ ID NO: 1709940 - RNA, 19 nt, Artificial Sequence
  Description of Artificial Sequence: Synthetic oligonucleotide
  Antisense strand to SEQ ID NO: 1709939
aaaucccgaggcuuagaag

SEQ ID NO: 1709941 - RNA, 19 nt, Artificial Sequence
  Description of Artificial Sequence: Synthetic oligonucleotide
  Sense strand starting at position 2876 of SEQ ID NO: 1561942
gccuguaccucucagaggu

SEQ ID NO: 1709942 - RNA, 19 nt, Artificial Sequence
  Description of Artificial Sequence: Synthetic oligonucleotide
  Antisense strand to SEQ ID NO: 1709941
accucugagagguacaggc

SEQ ID NO: 1709943 - RNA, 19 nt, Artificial Sequence
  Description of Artificial Sequence: Synthetic oligonucleotide
  Sense strand starting at position 2878 of SEQ ID NO: 1561942
cuguaccucucagagguuu

SEQ ID NO: 1709944 - RNA, 19 nt, Artificial Sequence
  Description of Artificial Sequence: Synthetic oligonucleotide
  Antisense strand to SEQ ID NO: 1709943
aaaccucugagagguacag

SEQ ID NO: 1709945 - RNA, 19 nt, Artificial Sequence
  Description of Artificial Sequence: Synthetic oligonucleotide
  Sense strand starting at position 2954 of SEQ ID NO: 1561942
gggacuuacucagccaucu

SEQ ID NO: 1709946 - RNA, 19 nt, Artificial Sequence
  Description of Artificial Sequence: Synthetic oligonucleotide
  Antisense strand to SEQ ID NO: 1709945
agauggcugaguaaguccc

SEQ ID NO: 1709947 - RNA, 19 nt, Artificial Sequence
  Description of Artificial Sequence: Synthetic oligonucleotide
  Sense strand starting at position 3026 of SEQ ID NO: 1561942
cuuggaaucugguauagcu

SEQ ID NO: 1709948 - RNA, 19 nt, Artificial Sequence
  Description of Artificial Sequence: Synthetic oligonucleotide
  Antisense strand to SEQ ID NO: 1709947
agcuauaccagauuccaag

SEQ ID NO: 1709949 - RNA, 19 nt, Artificial Sequence
  Description of Artificial Sequence: Synthetic oligonucleotide
  Sense strand starting at position 3107 of SEQ ID NO: 1561942
cuagauugccaauguguua

SEQ ID NO: 1709950 - RNA, 19 nt, Artificial Sequence
  Description of Artificial Sequence: Synthetic oligonucleotide
  Antisense strand to SEQ ID NO: 1709949
uaacacauuggcaaucuag

SEQ ID NO: 1709951 - RNA, 19 nt, Artificial Sequence
  Description of Artificial Sequence: Synthetic oligonucleotide
  Sense strand starting at position 3291 of SEQ ID NO: 1561942
uucgcucugucauaugcua

SEQ ID NO: 1709952 - RNA, 19 nt, Artificial Sequence
  Description of Artificial Sequence: Synthetic oligonucleotide
  Antisense strand to SEQ ID NO: 1709951
uagcauaugacagagcgaa

SEQ ID NO: 1709953 - RNA, 19 nt, Artificial Sequence
  Description of Artificial Sequence: Synthetic oligonucleotide
  Sense strand starting at position 3299 of SEQ ID NO: 1561942
gucauaugcuauuguggua

SEQ ID NO: 1709954 - RNA, 19 nt, Artificial Sequence
  Description of Artificial Sequence: Synthetic oligonucleotide
  Antisense strand to SEQ ID NO: 1709953
uaccacaauagcauaugac

SEQ ID NO: 1709955 - RNA, 19 nt, Artificial Sequence
  Description of Artificial Sequence: Synthetic oligonucleotide
  Sense strand starting at position 3312 of SEQ ID NO: 1561942
gugguaugguggccaguca

SEQ ID NO: 1709956 - RNA, 19 nt, Artificial Sequence
  Description of Artificial Sequence: Synthetic oligonucleotide
  Antisense strand to SEQ ID NO: 1709955
ugacuggccaccauaccac

SEQ ID NO: 1709957 - RNA, 19 nt, Artificial Sequence
  Description of Artificial Sequence: Synthetic oligonucleotide
  Sense strand starting at position 3340 of SEQ ID NO: 1561942
gcacaaauaggguggguua

SEQ ID NO: 1709958 - RNA, 19 nt, Artificial Sequence
  Description of Artificial Sequence: Synthetic oligonucleotide
  Antisense strand to SEQ ID NO: 1709957
uaacccacccuauuugugc

SEQ ID NO: 1709959 - RNA, 19 nt, Artificial Sequence
  Description of Artificial Sequence: Synthetic oligonucleotide
  Sense strand starting at position 3342 of SEQ ID NO: 1561942
acaaauaggguggguuaau

SEQ ID NO: 1709960 - RNA, 19 nt, Artificial Sequence
  Description of Artificial Sequence: Synthetic oligonucleotide
  Antisense strand to SEQ ID NO: 1709959
auuaacccacccuauuugu

SEQ ID NO: 1709961 - RNA, 19 nt, Artificial Sequence
  Description of Artificial Sequence: Synthetic oligonucleotide
  Sense strand starting at position 3351 of SEQ ID NO: 1561942
guggguuaaugucauuauc

SEQ ID NO: 1709962 - RNA, 19 nt, Artificial Sequence
  Description of Artificial Sequence: Synthetic oligonucleotide
  Antisense strand to SEQ ID NO: 1709961
gauaaugacauuaacccac

SEQ ID NO: 1709963 - RNA, 19 nt, Artificial Sequence
  Description of Artificial Sequence: Synthetic oligonucleotide
  Sense strand starting at position 3353 of SEQ ID NO: 1561942
ggguuaaugucauuaucuc

SEQ ID NO: 1709964 - RNA, 19 nt, Artificial Sequence
  Description of Artificial Sequence: Synthetic oligonucleotide
  Antisense strand to SEQ ID NO: 1709963
gagauaaugacauuaaccc

SEQ ID NO: 1709965 - RNA, 19 nt, Artificial Sequence
  Description of Artificial Sequence: Synthetic oligonucleotide
  Sense strand starting at position 3354 of SEQ ID NO: 1561942
gguuaaugucauuaucucu

SEQ ID NO: 1709966 - RNA, 19 nt, Artificial Sequence
  Description of Artificial Sequence: Synthetic oligonucleotide
  Antisense strand to SEQ ID NO: 1709965
agagauaaugacauuaacc

SEQ ID NO: 1709967 - RNA, 19 nt, Artificial Sequence
  Description of Artificial Sequence: Synthetic oligonucleotide
  Sense strand starting at position 3359 of SEQ ID NO: 1561942
augucauuaucucugaagu

SEQ ID NO: 1709968 - RNA, 19 nt, Artificial Sequence
  Description of Artificial Sequence: Synthetic oligonucleotide
  Antisense strand to SEQ ID NO: 1709967
acuucagagauaaugacau

SEQ ID NO: 1709969 - RNA, 19 nt, Artificial Sequence
  Description of Artificial Sequence: Synthetic oligonucleotide
  Sense strand starting at position 3360 of SEQ ID NO: 1561942
ugucauuaucucugaaguu

SEQ ID NO: 1709970 - RNA, 19 nt, Artificial Sequence
  Description of Artificial Sequence: Synthetic oligonucleotide
  Antisense strand to SEQ ID NO: 1709969
aacuucagagauaaugaca

SEQ ID NO: 1709971 - RNA, 19 nt, Artificial Sequence
  Description of Artificial Sequence: Synthetic oligonucleotide
  Sense strand starting at position 3361 of SEQ ID NO: 1561942
gucauuaucucugaaguuc

SEQ ID NO: 1709972 - RNA, 19 nt, Artificial Sequence
  Description of Artificial Sequence: Synthetic oligonucleotide
  Antisense strand to SEQ ID NO: 1709971
gaacuucagagauaaugac

SEQ ID NO: 1709973 - RNA, 19 nt, Artificial Sequence
  Description of Artificial Sequence: Synthetic oligonucleotide
  Sense strand starting at position 3369 of SEQ ID NO: 1561942
cucugaaguucuuuccagu

SEQ ID NO: 1709974 - RNA, 19 nt, Artificial Sequence
  Description of Artificial Sequence: Synthetic oligonucleotide
  Antisense strand to SEQ ID NO: 1709973
acuggaaagaacuucagag

SEQ ID NO: 1709975 - RNA, 19 nt, Artificial Sequence
  Description of Artificial Sequence: Synthetic oligonucleotide
  Sense strand starting at position 3434 of SEQ ID NO: 1561942
ccaggucgcccagagcaau

SEQ ID NO: 1709976 - RNA, 19 nt, Artificial Sequence
  Description of Artificial Sequence: Synthetic oligonucleotide
  Antisense strand to SEQ ID NO: 1709975
auugcucugggcgaccugg

SEQ ID NO: 1709977 - RNA, 19 nt, Artificial Sequence
  Description of Artificial Sequence: Synthetic oligonucleotide
  Sense strand starting at position 3643 of SEQ ID NO: 1561942
uacaguuagcaaggucaga

SEQ ID NO: 1709978 - RNA, 19 nt, Artificial Sequence
  Description of Artificial Sequence: Synthetic oligonucleotide
  Antisense strand to SEQ ID NO: 1709977
ucugaccuugcuaacugua

SEQ ID NO: 1709979 - RNA, 19 nt, Artificial Sequence
  Description of Artificial Sequence: Synthetic oligonucleotide
  Sense strand starting at position 3656 of SEQ ID NO: 1561942
gucagacugacuggucaau

SEQ ID NO: 1709980 - RNA, 19 nt, Artificial Sequence
  Description of Artificial Sequence: Synthetic oligonucleotide
  Antisense strand to SEQ ID NO: 1709979
auugaccagucagucugac

SEQ ID NO: 1709981 - RNA, 19 nt, Artificial Sequence
  Description of Artificial Sequence: Synthetic oligonucleotide
  Sense strand starting at position 3658 of SEQ ID NO: 1561942
cagacugacuggucaaugu

SEQ ID NO: 1709982 - RNA, 19 nt, Artificial Sequence
  Description of Artificial Sequence: Synthetic oligonucleotide
  Antisense strand to SEQ ID NO: 1709981
acauugaccagucagucug

SEQ ID NO: 1709983 - RNA, 19 nt, Artificial Sequence
  Description of Artificial Sequence: Synthetic oligonucleotide
  Sense strand starting at position 3852 of SEQ ID NO: 1561942
gcugaaggucuggguggua

SEQ ID NO: 1709984 - RNA, 19 nt, Artificial Sequence
  Description of Artificial Sequence: Synthetic oligonucleotide
  Antisense strand to SEQ ID NO: 1709983
uaccacccagaccuucagc

SEQ ID NO: 1709985 - RNA, 19 nt, Artificial Sequence
  Description of Artificial Sequence: Synthetic oligonucleotide
  Sense strand starting at position 322 of SEQ ID NO: 1561943
aggcuugaccacuagcaga

SEQ ID NO: 1709986 - RNA, 19 nt, Artificial Sequence
  Description of Artificial Sequence: Synthetic oligonucleotide
  Antisense strand to SEQ ID NO: 1709985
ucugcuaguggucaagccu

SEQ ID NO: 1709987 - RNA, 19 nt, Artificial Sequence
  Description of Artificial Sequence: Synthetic oligonucleotide
  Sense strand starting at position 418 of SEQ ID NO: 1561943
aacuaugugucauugaggu

SEQ ID NO: 1709988 - RNA, 19 nt, Artificial Sequence
  Description of Artificial Sequence: Synthetic oligonucleotide
  Antisense strand to SEQ ID NO: 1709987
accucaaugacacauaguu

SEQ ID NO: 1709989 - RNA, 19 nt, Artificial Sequence
  Description of Artificial Sequence: Synthetic oligonucleotide
  Sense strand starting at position 420 of SEQ ID NO: 1561943
cuaugugucauugaggucu

SEQ ID NO: 1709990 - RNA, 19 nt, Artificial Sequence
  Description of Artificial Sequence: Synthetic oligonucleotide
  Antisense strand to SEQ ID NO: 1709989
agaccucaaugacacauag

SEQ ID NO: 1709991 - RNA, 19 nt, Artificial Sequence
  Description of Artificial Sequence: Synthetic oligonucleotide
  Sense strand starting at position 825 of SEQ ID NO: 1561943
acuccuccuccgcgaauuu

SEQ ID NO: 1709992 - RNA, 19 nt, Artificial Sequence
  Description of Artificial Sequence: Synthetic oligonucleotide
  Antisense strand to SEQ ID NO: 1709991
aaauucgcggaggaggagu

SEQ ID NO: 1709993 - RNA, 19 nt, Artificial Sequence
  Description of Artificial Sequence: Synthetic oligonucleotide
  Sense strand starting at position 826 of SEQ ID NO: 1561943
cuccuccuccgcgaauuua

SEQ ID NO: 1709994 - RNA, 19 nt, Artificial Sequence
  Description of Artificial Sequence: Synthetic oligonucleotide
  Antisense strand to SEQ ID NO: 1709993
uaaauucgcggaggaggag

SEQ ID NO: 1709995 - RNA, 19 nt, Artificial Sequence
  Description of Artificial Sequence: Synthetic oligonucleotide
  Sense strand starting at position 1017 of SEQ ID NO: 1561943
ucuuaugcuccuuauaguu

SEQ ID NO: 1709996 - RNA, 19 nt, Artificial Sequence
  Description of Artificial Sequence: Synthetic oligonucleotide
  Antisense strand to SEQ ID NO: 1709995
aacuauaaggagcauaaga

SEQ ID NO: 1709997 - RNA, 19 nt, Artificial Sequence
  Description of Artificial Sequence: Synthetic oligonucleotide
  Sense strand starting at position 1110 of SEQ ID NO: 1561943
gggaaaguacaguguaauc

SEQ ID NO: 1709998 - RNA, 19 nt, Artificial Sequence
  Description of Artificial Sequence: Synthetic oligonucleotide
  Antisense strand to SEQ ID NO: 1709997
gauuacacuguacuuuccc

SEQ ID NO: 1709999 - RNA, 19 nt, Artificial Sequence
  Description of Artificial Sequence: Synthetic oligonucleotide
  Sense strand starting at position 1115 of SEQ ID NO: 1561943
aguacaguguaaucagauc

SEQ ID NO: 1710000 - RNA, 19 nt, Artificial Sequence
  Description of Artificial Sequence: Synthetic oligonucleotide
  Antisense strand to SEQ ID NO: 1709999
gaucugauuacacuguacu

SEQ ID NO: 1710001 - RNA, 19 nt, Artificial Sequence
  Description of Artificial Sequence: Synthetic oligonucleotide
  Sense strand starting at position 1223 of SEQ ID NO: 1561943
uuaaaugucccagagcauc

SEQ ID NO: 1710002 - RNA, 19 nt, Artificial Sequence
  Description of Artificial Sequence: Synthetic oligonucleotide
  Antisense strand to SEQ ID NO: 1710001
gaugcucugggacauuuaa

SEQ ID NO: 1710003 - RNA, 19 nt, Artificial Sequence
  Description of Artificial Sequence: Synthetic oligonucleotide
  Sense strand starting at position 1281 of SEQ ID NO: 1561943
cuauacuugcuguauagua

SEQ ID NO: 1710004 - RNA, 19 nt, Artificial Sequence
  Description of Artificial Sequence: Synthetic oligonucleotide
  Antisense strand to SEQ ID NO: 1710003
uacuauacagcaaguauag

SEQ ID NO: 1710005 - RNA, 19 nt, Artificial Sequence
  Description of Artificial Sequence: Synthetic oligonucleotide
  Sense strand starting at position 1283 of SEQ ID NO: 1561943
auacuugcuguauaguaaa

SEQ ID NO: 1710006 - RNA, 19 nt, Artificial Sequence
  Description of Artificial Sequence: Synthetic oligonucleotide
  Antisense strand to SEQ ID NO: 1710005
uuuacuauacagcaaguau

SEQ ID NO: 1710007 - RNA, 19 nt, Artificial Sequence
  Description of Artificial Sequence: Synthetic oligonucleotide
  Sense strand starting at position 1381 of SEQ ID NO: 1561943
gagugcugaaacgguuaaa

SEQ ID NO: 1710008 - RNA, 19 nt, Artificial Sequence
  Description of Artificial Sequence: Synthetic oligonucleotide
  Antisense strand to SEQ ID NO: 1710007
uuuaaccguuucagcacuc

SEQ ID NO: 1710009 - RNA, 19 nt, Artificial Sequence
  Description of Artificial Sequence: Synthetic oligonucleotide
  Sense strand starting at position 1504 of SEQ ID NO: 1561943
ccgcguaaaguuguccaaa

SEQ ID NO: 1710010 - RNA, 19 nt, Artificial Sequence
  Description of Artificial Sequence: Synthetic oligonucleotide
  Antisense strand to SEQ ID NO: 1710009
uuuggacaacuuuacgcgg

SEQ ID NO: 1710011 - RNA, 19 nt, Artificial Sequence
  Description of Artificial Sequence: Synthetic oligonucleotide
  Sense strand starting at position 1721 of SEQ ID NO: 1561943
ucaguuaccuugguccaca

SEQ ID NO: 1710012 - RNA, 19 nt, Artificial Sequence
  Description of Artificial Sequence: Synthetic oligonucleotide
  Antisense strand to SEQ ID NO: 1710011
uguggaccaagguaacuga

SEQ ID NO: 1710013 - RNA, 19 nt, Artificial Sequence
  Description of Artificial Sequence: Synthetic oligonucleotide
  Sense strand starting at position 1987 of SEQ ID NO: 1561943
cggcuuacuccagaggcaa

SEQ ID NO: 1710014 - RNA, 19 nt, Artificial Sequence
  Description of Artificial Sequence: Synthetic oligonucleotide
  Antisense strand to SEQ ID NO: 1710013
uugccucuggaguaagccg

SEQ ID NO: 1710015 - RNA, 19 nt, Artificial Sequence
  Description of Artificial Sequence: Synthetic oligonucleotide
  Sense strand starting at position 2082 of SEQ ID NO: 1561943
ccuguuuauccagcgccau

SEQ ID NO: 1710016 - RNA, 19 nt, Artificial Sequence
  Description of Artificial Sequence: Synthetic oligonucleotide
  Antisense strand to SEQ ID NO: 1710015
auggcgcuggauaaacagg

SEQ ID NO: 1710017 - RNA, 19 nt, Artificial Sequence
  Description of Artificial Sequence: Synthetic oligonucleotide
  Sense strand starting at position 2135 of SEQ ID NO: 1561943
agggcuuuccugcaaacuu

SEQ ID NO: 1710018 - RNA, 19 nt, Artificial Sequence
  Description of Artificial Sequence: Synthetic oligonucleotide
  Antisense strand to SEQ ID NO: 1710017
aaguuugcaggaaagcccu

SEQ ID NO: 1710019 - RNA, 19 nt, Artificial Sequence
  Description of Artificial Sequence: Synthetic oligonucleotide
  Sense strand starting at position 2221 of SEQ ID NO: 1561943
gcacaagucccugauuguu

SEQ ID NO: 1710020 - RNA, 19 nt, Artificial Sequence
  Description of Artificial Sequence: Synthetic oligonucleotide
  Antisense strand to SEQ ID NO: 1710019
aacaaucagggacuugugc

SEQ ID NO: 1710021 - RNA, 19 nt, Artificial Sequence
  Description of Artificial Sequence: Synthetic oligonucleotide
  Sense strand starting at position 2448 of SEQ ID NO: 1561943
gagaaagcugcccaggguu

SEQ ID NO: 1710022 - RNA, 19 nt, Artificial Sequence
  Description of Artificial Sequence: Synthetic oligonucleotide
  Antisense strand to SEQ ID NO: 1710021
aacccugggcagcuuucuc

SEQ ID NO: 1710023 - RNA, 19 nt, Artificial Sequence
  Description of Artificial Sequence: Synthetic oligonucleotide
  Sense strand starting at position 2635 of SEQ ID NO: 1561943
acucuccaacuucgagaau

SEQ ID NO: 1710024 - RNA, 19 nt, Artificial Sequence
  Description of Artificial Sequence: Synthetic oligonucleotide
  Antisense strand to SEQ ID NO: 1710023
auucucgaaguuggagagu

SEQ ID NO: 1710025 - RNA, 19 nt, Artificial Sequence
  Description of Artificial Sequence: Synthetic oligonucleotide
  Sense strand starting at position 2772 of SEQ ID NO: 1561943
guuuacacaugcucugaau

SEQ ID NO: 1710026 - RNA, 19 nt, Artificial Sequence
  Description of Artificial Sequence: Synthetic oligonucleotide
  Antisense strand to SEQ ID NO: 1710025
auucagagcauguguaaac

SEQ ID NO: 1710027 - RNA, 19 nt, Artificial Sequence
  Description of Artificial Sequence: Synthetic oligonucleotide
  Sense strand starting at position 2806 of SEQ ID NO: 1561943
gagaaaggauaucaugaac

SEQ ID NO: 1710028 - RNA, 19 nt, Artificial Sequence
  Description of Artificial Sequence: Synthetic oligonucleotide
  Antisense strand to SEQ ID NO: 1710027
guucaugauauccuuucuc

SEQ ID NO: 1710029 - RNA, 19 nt, Artificial Sequence
  Description of Artificial Sequence: Synthetic oligonucleotide
  Sense strand starting at position 2839 of SEQ ID NO: 1561943
agaagaaaguccuugcgau

SEQ ID NO: 1710030 - RNA, 19 nt, Artificial Sequence
  Description of Artificial Sequence: Synthetic oligonucleotide
  Antisense strand to SEQ ID NO: 1710029
aucgcaaggacuuucuucu

SEQ ID NO: 1710031 - RNA, 19 nt, Artificial Sequence
  Description of Artificial Sequence: Synthetic oligonucleotide
  Sense strand starting at position 2840 of SEQ ID NO: 1561943
gaagaaaguccuugcgaug

SEQ ID NO: 1710032 - RNA, 19 nt, Artificial Sequence
  Description of Artificial Sequence: Synthetic oligonucleotide
  Antisense strand to SEQ ID NO: 1710031
caucgcaaggacuuucuuc

SEQ ID NO: 1710033 - RNA, 19 nt, Artificial Sequence
  Description of Artificial Sequence: Synthetic oligonucleotide
  Sense strand starting at position 2992 of SEQ ID NO: 1561943
gggaaauucugagcccaaa

SEQ ID NO: 1710034 - RNA, 19 nt, Artificial Sequence
  Description of Artificial Sequence: Synthetic oligonucleotide
  Antisense strand to SEQ ID NO: 1710033
uuugggcucagaauuuccc

SEQ ID NO: 1710035 - RNA, 19 nt, Artificial Sequence
  Description of Artificial Sequence: Synthetic oligonucleotide
  Sense strand starting at position 3010 of SEQ ID NO: 1561943
agauaaagcuggcuuugaa

SEQ ID NO: 1710036 - RNA, 19 nt, Artificial Sequence
  Description of Artificial Sequence: Synthetic oligonucleotide
  Antisense strand to SEQ ID NO: 1710035
uucaaagccagcuuuaucu

SEQ ID NO: 1710037 - RNA, 19 nt, Artificial Sequence
  Description of Artificial Sequence: Synthetic oligonucleotide
  Sense strand starting at position 3083 of SEQ ID NO: 1561943
gcuggugacucaucacaua

SEQ ID NO: 1710038 - RNA, 19 nt, Artificial Sequence
  Description of Artificial Sequence: Synthetic oligonucleotide
  Antisense strand to SEQ ID NO: 1710037
uaugugaugagucaccagc

SEQ ID NO: 1710039 - RNA, 19 nt, Artificial Sequence
  Description of Artificial Sequence: Synthetic oligonucleotide
  Sense strand starting at position 3123 of SEQ ID NO: 1561943
cgcucuuacagagagacuu

SEQ ID NO: 1710040 - RNA, 19 nt, Artificial Sequence
  Description of Artificial Sequence: Synthetic oligonucleotide
  Antisense strand to SEQ ID NO: 1710039
aagucucucuguaagagcg

SEQ ID NO: 1710041 - RNA, 19 nt, Artificial Sequence
  Description of Artificial Sequence: Synthetic oligonucleotide
  Sense strand starting at position 3198 of SEQ ID NO: 1561943
ccaguacuggcccacaaua

SEQ ID NO: 1710042 - RNA, 19 nt, Artificial Sequence
  Description of Artificial Sequence: Synthetic oligonucleotide
  Antisense strand to SEQ ID NO: 1710041
uauugugggccaguacugg

SEQ ID NO: 1710043 - RNA, 19 nt, Artificial Sequence
  Description of Artificial Sequence: Synthetic oligonucleotide
  Sense strand starting at position 3243 of SEQ ID NO: 1561943
accacuccugcuggagaua

SEQ ID NO: 1710044 - RNA, 19 nt, Artificial Sequence
  Description of Artificial Sequence: Synthetic oligonucleotide
  Antisense strand to SEQ ID NO: 1710043
uaucuccagcaggaguggu

SEQ ID NO: 1710045 - RNA, 19 nt, Artificial Sequence
  Description of Artificial Sequence: Synthetic oligonucleotide
  Sense strand starting at position 3285 of SEQ ID NO: 1561943
uggaacugcgccugagaaa

SEQ ID NO: 1710046 - RNA, 19 nt, Artificial Sequence
  Description of Artificial Sequence: Synthetic oligonucleotide
  Antisense strand to SEQ ID NO: 1710045
uuucucaggcgcaguucca

SEQ ID NO: 1710047 - RNA, 19 nt, Artificial Sequence
  Description of Artificial Sequence: Synthetic oligonucleotide
  Sense strand starting at position 3398 of SEQ ID NO: 1561943
gagagcagccauuaucugu

SEQ ID NO: 1710048 - RNA, 19 nt, Artificial Sequence
  Description of Artificial Sequence: Synthetic oligonucleotide
  Antisense strand to SEQ ID NO: 1710047
acagauaauggcugcucuc

SEQ ID NO: 1710049 - RNA, 19 nt, Artificial Sequence
  Description of Artificial Sequence: Synthetic oligonucleotide
  Sense strand starting at position 3447 of SEQ ID NO: 1561943
agggaagucucacugacuc

SEQ ID NO: 1710050 - RNA, 19 nt, Artificial Sequence
  Description of Artificial Sequence: Synthetic oligonucleotide
  Antisense strand to SEQ ID NO: 1710049
gagucagugagacuucccu

SEQ ID NO: 1710051 - RNA, 19 nt, Artificial Sequence
  Description of Artificial Sequence: Synthetic oligonucleotide
  Sense strand starting at position 3459 of SEQ ID NO: 1561943
cugacucucgaguaacuca

SEQ ID NO: 1710052 - RNA, 19 nt, Artificial Sequence
  Description of Artificial Sequence: Synthetic oligonucleotide
  Antisense strand to SEQ ID NO: 1710051
ugaguuacucgagagucag

SEQ ID NO: 1710053 - RNA, 19 nt, Artificial Sequence
  Description of Artificial Sequence: Synthetic oligonucleotide
  Sense strand starting at position 3574 of SEQ ID NO: 1561943
gguggcuugccuguugauu

SEQ ID NO: 1710054 - RNA, 19 nt, Artificial Sequence
  Description of Artificial Sequence: Synthetic oligonucleotide
  Antisense strand to SEQ ID NO: 1710053
aaucaacaggcaagccacc

SEQ ID NO: 1710055 - RNA, 19 nt, Artificial Sequence
  Description of Artificial Sequence: Synthetic oligonucleotide
  Sense strand starting at position 3665 of SEQ ID NO: 1561943
gacucauucccugaggccu

SEQ ID NO: 1710056 - RNA, 19 nt, Artificial Sequence
  Description of Artificial Sequence: Synthetic oligonucleotide
  Antisense strand to SEQ ID NO: 1710055
aggccucagggaaugaguc

SEQ ID NO: 1710057 - RNA, 19 nt, Artificial Sequence
  Description of Artificial Sequence: Synthetic oligonucleotide
  Sense strand starting at position 3727 of SEQ ID NO: 1561943
cugguuugccugggauuga

SEQ ID NO: 1710058 - RNA, 19 nt, Artificial Sequence
  Description of Artificial Sequence: Synthetic oligonucleotide
  Antisense strand to SEQ ID NO: 1710057
ucaaucccaggcaaaccag

SEQ ID NO: 1710059 - RNA, 19 nt, Artificial Sequence
  Description of Artificial Sequence: Synthetic oligonucleotide
  Sense strand starting at position 3748 of SEQ ID NO: 1561943
gggcuccuagaauguaaga

SEQ ID NO: 1710060 - RNA, 19 nt, Artificial Sequence
  Description of Artificial Sequence: Synthetic oligonucleotide
  Antisense strand to SEQ ID NO: 1710059
ucuuacauucuaggagccc

SEQ ID NO: 1710061 - RNA, 19 nt, Artificial Sequence
  Description of Artificial Sequence: Synthetic oligonucleotide
  Sense strand starting at position 3977 of SEQ ID NO: 1561943
ggcccugagcuagagucau

SEQ ID NO: 1710062 - RNA, 19 nt, Artificial Sequence
  Description of Artificial Sequence: Synthetic oligonucleotide
  Antisense strand to SEQ ID NO: 1710061
augacucuagcucagggcc

SEQ ID NO: 1710063 - RNA, 19 nt, Artificial Sequence
  Description of Artificial Sequence: Synthetic oligonucleotide
  Sense strand starting at position 3983 of SEQ ID NO: 1561943
gagcuagagucaucuauaa

SEQ ID NO: 1710064 - RNA, 19 nt, Artificial Sequence
  Description of Artificial Sequence: Synthetic oligonucleotide
  Antisense strand to SEQ ID NO: 1710063
uuauagaugacucuagcuc

SEQ ID NO: 1710065 - RNA, 19 nt, Artificial Sequence
  Description of Artificial Sequence: Synthetic oligonucleotide
  Sense strand starting at position 55 of SEQ ID NO: 1561944
agauuuggcuuggaaacua

SEQ ID NO: 1710066 - RNA, 19 nt, Artificial Sequence
  Description of Artificial Sequence: Synthetic oligonucleotide
  Antisense strand to SEQ ID NO: 1710065
uaguuuccaagccaaaucu

SEQ ID NO: 1710067 - RNA, 19 nt, Artificial Sequence
  Description of Artificial Sequence: Synthetic oligonucleotide
  Sense strand starting at position 144 of SEQ ID NO: 1561944
gaguauucguucccugaaa

SEQ ID NO: 1710068 - RNA, 19 nt, Artificial Sequence
  Description of Artificial Sequence: Synthetic oligonucleotide
  Antisense strand to SEQ ID NO: 1710067
uuucagggaacgaauacuc

SEQ ID NO: 1710069 - RNA, 19 nt, Artificial Sequence
  Description of Artificial Sequence: Synthetic oligonucleotide
  Sense strand starting at position 199 of SEQ ID NO: 1561944
gauauuagugcggaucguu

SEQ ID NO: 1710070 - RNA, 19 nt, Artificial Sequence
  Description of Artificial Sequence: Synthetic oligonucleotide
  Antisense strand to SEQ ID NO: 1710069
aacgauccgcacuaauauc

SEQ ID NO: 1710071 - RNA, 19 nt, Artificial Sequence
  Description of Artificial Sequence: Synthetic oligonucleotide
  Sense strand starting at position 207 of SEQ ID NO: 1561944
ugcggaucguuugcagauu

SEQ ID NO: 1710072 - RNA, 19 nt, Artificial Sequence
  Description of Artificial Sequence: Synthetic oligonucleotide
  Antisense strand to SEQ ID NO: 1710071
aaucugcaaacgauccgca

SEQ ID NO: 1710073 - RNA, 19 nt, Artificial Sequence
  Description of Artificial Sequence: Synthetic oligonucleotide
  Sense strand starting at position 219 of SEQ ID NO: 1561944
gcagauucuuaauuguauc

SEQ ID NO: 1710074 - RNA, 19 nt, Artificial Sequence
  Description of Artificial Sequence: Synthetic oligonucleotide
  Antisense strand to SEQ ID NO: 1710073
gauacaauuaagaaucugc

SEQ ID NO: 1710075 - RNA, 19 nt, Artificial Sequence
  Description of Artificial Sequence: Synthetic oligonucleotide
  Sense strand starting at position 251 of SEQ ID NO: 1561944
agauguccuccagauugca

SEQ ID NO: 1710076 - RNA, 19 nt, Artificial Sequence
  Description of Artificial Sequence: Synthetic oligonucleotide
  Antisense strand to SEQ ID NO: 1710075
ugcaaucuggaggacaucu

SEQ ID NO: 1710077 - RNA, 19 nt, Artificial Sequence
  Description of Artificial Sequence: Synthetic oligonucleotide
  Sense strand starting at position 284 of SEQ ID NO: 1561944
gucucuucuguuggcuaau

SEQ ID NO: 1710078 - RNA, 19 nt, Artificial Sequence
  Description of Artificial Sequence: Synthetic oligonucleotide
  Antisense strand to SEQ ID NO: 1710077
auuagccaacagaagagac

SEQ ID NO: 1710079 - RNA, 19 nt, Artificial Sequence
  Description of Artificial Sequence: Synthetic oligonucleotide
  Sense strand starting at position 296 of SEQ ID NO: 1561944
ggcuaauuguuuccaucuc

SEQ ID NO: 1710080 - RNA, 19 nt, Artificial Sequence
  Description of Artificial Sequence: Synthetic oligonucleotide
  Antisense strand to SEQ ID NO: 1710079
gagauggaaacaauuagcc

SEQ ID NO: 1710081 - RNA, 19 nt, Artificial Sequence
  Description of Artificial Sequence: Synthetic oligonucleotide
  Sense strand starting at position 451 of SEQ ID NO: 1561944
aacacaguguuugugggaa

SEQ ID NO: 1710082 - RNA, 19 nt, Artificial Sequence
  Description of Artificial Sequence: Synthetic oligonucleotide
  Antisense strand to SEQ ID NO: 1710081
uucccacaaacacuguguu

SEQ ID NO: 1710083 - RNA, 19 nt, Artificial Sequence
  Description of Artificial Sequence: Synthetic oligonucleotide
  Sense strand starting at position 687 of SEQ ID NO: 1561944
agaaauacacagugagguu

SEQ ID NO: 1710084 - RNA, 19 nt, Artificial Sequence
  Description of Artificial Sequence: Synthetic oligonucleotide
  Antisense strand to SEQ ID NO: 1710083
aaccucacuguguauuucu

SEQ ID NO: 1710085 - RNA, 19 nt, Artificial Sequence
  Description of Artificial Sequence: Synthetic oligonucleotide
  Sense strand starting at position 757 of SEQ ID NO: 1561944
cuguuaaacacgugaagug

SEQ ID NO: 1710086 - RNA, 19 nt, Artificial Sequence
  Description of Artificial Sequence: Synthetic oligonucleotide
  Antisense strand to SEQ ID NO: 1710085
cacuucacguguuuaacag

SEQ ID NO: 1710087 - RNA, 19 nt, Artificial Sequence
  Description of Artificial Sequence: Synthetic oligonucleotide
  Sense strand starting at position 758 of SEQ ID NO: 1561944
uguuaaacacgugaaguga

SEQ ID NO: 1710088 - RNA, 19 nt, Artificial Sequence
  Description of Artificial Sequence: Synthetic oligonucleotide
  Antisense strand to SEQ ID NO: 1710087
ucacuucacguguuuaaca

SEQ ID NO: 1710089 - RNA, 19 nt, Artificial Sequence
  Description of Artificial Sequence: Synthetic oligonucleotide
  Sense strand starting at position 868 of SEQ ID NO: 1561944
gagccuguguccuucugaa

SEQ ID NO: 1710090 - RNA, 19 nt, Artificial Sequence
  Description of Artificial Sequence: Synthetic oligonucleotide
  Antisense strand to SEQ ID NO: 1710089
uucagaaggacacaggcuc

SEQ ID NO: 1710091 - RNA, 19 nt, Artificial Sequence
  Description of Artificial Sequence: Synthetic oligonucleotide
  Sense strand starting at position 936 of SEQ ID NO: 1561944
ggacuaagcguagaagauc

SEQ ID NO: 1710092 - RNA, 19 nt, Artificial Sequence
  Description of Artificial Sequence: Synthetic oligonucleotide
  Antisense strand to SEQ ID NO: 1710091
gaucuucuacgcuuagucc

SEQ ID NO: 1710093 - RNA, 19 nt, Artificial Sequence
  Description of Artificial Sequence: Synthetic oligonucleotide
  Sense strand starting at position 942 of SEQ ID NO: 1561944
agcguagaagaucacuuaa

SEQ ID NO: 1710094 - RNA, 19 nt, Artificial Sequence
  Description of Artificial Sequence: Synthetic oligonucleotide
  Antisense strand to SEQ ID NO: 1710093
uuaagugaucuucuacgcu

SEQ ID NO: 1710095 - RNA, 19 nt, Artificial Sequence
  Description of Artificial Sequence: Synthetic oligonucleotide
  Sense strand starting at position 944 of SEQ ID NO: 1561944
cguagaagaucacuuaaua

SEQ ID NO: 1710096 - RNA, 19 nt, Artificial Sequence
  Description of Artificial Sequence: Synthetic oligonucleotide
  Antisense strand to SEQ ID NO: 1710095
uauuaagugaucuucuacg

SEQ ID NO: 1710097 - RNA, 19 nt, Artificial Sequence
  Description of Artificial Sequence: Synthetic oligonucleotide
  Sense strand starting at position 975 of SEQ ID NO: 1561944
auccucuugugagugguaa

SEQ ID NO: 1710098 - RNA, 19 nt, Artificial Sequence
  Description of Artificial Sequence: Synthetic oligonucleotide
  Antisense strand to SEQ ID NO: 1710097
uuaccacucacaagaggau

SEQ ID NO: 1710099 - RNA, 19 nt, Artificial Sequence
  Description of Artificial Sequence: Synthetic oligonucleotide
  Sense strand starting at position 976 of SEQ ID NO: 1561944
uccucuugugagugguaag

SEQ ID NO: 1710100 - RNA, 19 nt, Artificial Sequence
  Description of Artificial Sequence: Synthetic oligonucleotide
  Antisense strand to SEQ ID NO: 1710099
cuuaccacucacaagagga

SEQ ID NO: 1710101 - RNA, 19 nt, Artificial Sequence
  Description of Artificial Sequence: Synthetic oligonucleotide
  Sense strand starting at position 977 of SEQ ID NO: 1561944
ccucuugugagugguaagu

SEQ ID NO: 1710102 - RNA, 19 nt, Artificial Sequence
  Description of Artificial Sequence: Synthetic oligonucleotide
  Antisense strand to SEQ ID NO: 1710101
acuuaccacucacaagagg

SEQ ID NO: 1710103 - RNA, 19 nt, Artificial Sequence
  Description of Artificial Sequence: Synthetic oligonucleotide
  Sense strand starting at position 987 of SEQ ID NO: 1561944
gugguaagugauggguuca

SEQ ID NO: 1710104 - RNA, 19 nt, Artificial Sequence
  Description of Artificial Sequence: Synthetic oligonucleotide
  Antisense strand to SEQ ID NO: 1710103
ugaacccaucacuuaccac

SEQ ID NO: 1710105 - RNA, 19 nt, Artificial Sequence
  Description of Artificial Sequence: Synthetic oligonucleotide
  Sense strand starting at position 1027 of SEQ ID NO: 1561944
augggccggccuuauaaua

SEQ ID NO: 1710106 - RNA, 19 nt, Artificial Sequence
  Description of Artificial Sequence: Synthetic oligonucleotide
  Antisense strand to SEQ ID NO: 1710105
uauuauaaggccggcccau

SEQ ID NO: 1710107 - RNA, 19 nt, Artificial Sequence
  Description of Artificial Sequence: Synthetic oligonucleotide
  Sense strand starting at position 1665 of SEQ ID NO: 1561944
aaauacucauagucgaaga

SEQ ID NO: 1710108 - RNA, 19 nt, Artificial Sequence
  Description of Artificial Sequence: Synthetic oligonucleotide
  Antisense strand to SEQ ID NO: 1710107
ucuucgacuaugaguauuu

SEQ ID NO: 1710109 - RNA, 19 nt, Artificial Sequence
  Description of Artificial Sequence: Synthetic oligonucleotide
  Sense strand starting at position 2789 of SEQ ID NO: 1561944
guguguucuggcagugaga

SEQ ID NO: 1710110 - RNA, 19 nt, Artificial Sequence
  Description of Artificial Sequence: Synthetic oligonucleotide
  Antisense strand to SEQ ID NO: 1710109
ucucacugccagaacacac

SEQ ID NO: 1710111 - RNA, 19 nt, Artificial Sequence
  Description of Artificial Sequence: Synthetic oligonucleotide
  Sense strand starting at position 2791 of SEQ ID NO: 1561944
guguucuggcagugagaac

SEQ ID NO: 1710112 - RNA, 19 nt, Artificial Sequence
  Description of Artificial Sequence: Synthetic oligonucleotide
  Antisense strand to SEQ ID NO: 1710111
guucucacugccagaacac

SEQ ID NO: 1710113 - RNA, 19 nt, Artificial Sequence
  Description of Artificial Sequence: Synthetic oligonucleotide
  Sense strand starting at position 2881 of SEQ ID NO: 1561944
gcgguuggcaagugacaaa

SEQ ID NO: 1710114 - RNA, 19 nt, Artificial Sequence
  Description of Artificial Sequence: Synthetic oligonucleotide
  Antisense strand to SEQ ID NO: 1710113
uuugucacuugccaaccgc

SEQ ID NO: 1710115 - RNA, 19 nt, Artificial Sequence
  Description of Artificial Sequence: Synthetic oligonucleotide
  Sense strand starting at position 2944 of SEQ ID NO: 1561944
uggagcuucugauuccaua

SEQ ID NO: 1710116 - RNA, 19 nt, Artificial Sequence
  Description of Artificial Sequence: Synthetic oligonucleotide
  Antisense strand to SEQ ID NO: 1710115
uauggaaucagaagcucca

SEQ ID NO: 1710117 - RNA, 19 nt, Artificial Sequence
  Description of Artificial Sequence: Synthetic oligonucleotide
  Sense strand starting at position 2952 of SEQ ID NO: 1561944
cugauuccauaagucugaa

SEQ ID NO: 1710118 - RNA, 19 nt, Artificial Sequence
  Description of Artificial Sequence: Synthetic oligonucleotide
  Antisense strand to SEQ ID NO: 1710117
uucagacuuauggaaucag

SEQ ID NO: 1710119 - RNA, 19 nt, Artificial Sequence
  Description of Artificial Sequence: Synthetic oligonucleotide
  Sense strand starting at position 2967 of SEQ ID NO: 1561944
ugaauacagacucgugaau

SEQ ID NO: 1710120 - RNA, 19 nt, Artificial Sequence
  Description of Artificial Sequence: Synthetic oligonucleotide
  Antisense strand to SEQ ID NO: 1710119
auucacgagucuguauuca

SEQ ID NO: 1710121 - RNA, 19 nt, Artificial Sequence
  Description of Artificial Sequence: Synthetic oligonucleotide
  Sense strand starting at position 2973 of SEQ ID NO: 1561944
cagacucgugaauguguau

SEQ ID NO: 1710122 - RNA, 19 nt, Artificial Sequence
  Description of Artificial Sequence: Synthetic oligonucleotide
  Antisense strand to SEQ ID NO: 1710121
auacacauucacgagucug

SEQ ID NO: 1710123 - RNA, 19 nt, Artificial Sequence
  Description of Artificial Sequence: Synthetic oligonucleotide
  Sense strand starting at position 3004 of SEQ ID NO: 1561944
acccaacgugagcauuaau

SEQ ID NO: 1710124 - RNA, 19 nt, Artificial Sequence
  Description of Artificial Sequence: Synthetic oligonucleotide
  Antisense strand to SEQ ID NO: 1710123
auuaaugcucacguugggu

SEQ ID NO: 1710125 - RNA, 19 nt, Artificial Sequence
  Description of Artificial Sequence: Synthetic oligonucleotide
  Sense strand starting at position 3007 of SEQ ID NO: 1561944
caacgugagcauuaaugaa

SEQ ID NO: 1710126 - RNA, 19 nt, Artificial Sequence
  Description of Artificial Sequence: Synthetic oligonucleotide
  Antisense strand to SEQ ID NO: 1710125
uucauuaaugcucacguug

SEQ ID NO: 1710127 - RNA, 19 nt, Artificial Sequence
  Description of Artificial Sequence: Synthetic oligonucleotide
  Sense strand starting at position 3606 of SEQ ID NO: 1561944
gccaguguugaggaugaga

SEQ ID NO: 1710128 - RNA, 19 nt, Artificial Sequence
  Description of Artificial Sequence: Synthetic oligonucleotide
  Antisense strand to SEQ ID NO: 1710127
ucucauccucaacacuggc

SEQ ID NO: 1710129 - RNA, 19 nt, Artificial Sequence
  Description of Artificial Sequence: Synthetic oligonucleotide
  Sense strand starting at position 3611 of SEQ ID NO: 1561944
uguugaggaugagaagauu

SEQ ID NO: 1710130 - RNA, 19 nt, Artificial Sequence
  Description of Artificial Sequence: Synthetic oligonucleotide
  Antisense strand to SEQ ID NO: 1710129
aaucuucucauccucaaca

SEQ ID NO: 1710131 - RNA, 19 nt, Artificial Sequence
  Description of Artificial Sequence: Synthetic oligonucleotide
  Sense strand starting at position 3641 of SEQ ID NO: 1561944
gucuuaagauccucgugag

SEQ ID NO: 1710132 - RNA, 19 nt, Artificial Sequence
  Description of Artificial Sequence: Synthetic oligonucleotide
  Antisense strand to SEQ ID NO: 1710131
cucacgaggaucuuaagac

SEQ ID NO: 1710133 - RNA, 19 nt, Artificial Sequence
  Description of Artificial Sequence: Synthetic oligonucleotide
  Sense strand starting at position 3642 of SEQ ID NO: 1561944
ucuuaagauccucgugaga

SEQ ID NO: 1710134 - RNA, 19 nt, Artificial Sequence
  Description of Artificial Sequence: Synthetic oligonucleotide
  Antisense strand to SEQ ID NO: 1710133
ucucacgaggaucuuaaga

SEQ ID NO: 1710135 - RNA, 19 nt, Artificial Sequence
  Description of Artificial Sequence: Synthetic oligonucleotide
  Sense strand starting at position 3664 of SEQ ID NO: 1561944
acagcuugaccucaaguga

SEQ ID NO: 1710136 - RNA, 19 nt, Artificial Sequence
  Description of Artificial Sequence: Synthetic oligonucleotide
  Antisense strand to SEQ ID NO: 1710135
ucacuugaggucaagcugu

SEQ ID NO: 1710137 - RNA, 19 nt, Artificial Sequence
  Description of Artificial Sequence: Synthetic oligonucleotide
  Sense strand starting at position 3872 of SEQ ID NO: 1561944
augcuuaugcccugaaagc

SEQ ID NO: 1710138 - RNA, 19 nt, Artificial Sequence
  Description of Artificial Sequence: Synthetic oligonucleotide
  Antisense strand to SEQ ID NO: 1710137
gcuuucagggcauaagcau

SEQ ID NO: 1710139 - RNA, 19 nt, Artificial Sequence
  Description of Artificial Sequence: Synthetic oligonucleotide
  Sense strand starting at position 3873 of SEQ ID NO: 1561944
ugcuuaugcccugaaagca

SEQ ID NO: 1710140 - RNA, 19 nt, Artificial Sequence
  Description of Artificial Sequence: Synthetic oligonucleotide
  Antisense strand to SEQ ID NO: 1710139
ugcuuucagggcauaagca

SEQ ID NO: 1710141 - RNA, 19 nt, Artificial Sequence
  Description of Artificial Sequence: Synthetic oligonucleotide
  Sense strand starting at position 3888 of SEQ ID NO: 1561944
agcaaaguagcacaguuau

SEQ ID NO: 1710142 - RNA, 19 nt, Artificial Sequence
  Description of Artificial Sequence: Synthetic oligonucleotide
  Antisense strand to SEQ ID NO: 1710141
auaacugugcuacuuugcu

SEQ ID NO: 1710143 - RNA, 19 nt, Artificial Sequence
  Description of Artificial Sequence: Synthetic oligonucleotide
  Sense strand starting at position 3930 of SEQ ID NO: 1561944
ucagaccagugguucuuaa

SEQ ID NO: 1710144 - RNA, 19 nt, Artificial Sequence
  Description of Artificial Sequence: Synthetic oligonucleotide
  Antisense strand to SEQ ID NO: 1710143
uuaagaaccacuggucuga

SEQ ID NO: 1710145 - RNA, 19 nt, Artificial Sequence
  Description of Artificial Sequence: Synthetic oligonucleotide
  Sense strand starting at position 43 of SEQ ID NO: 1561945
ccaguaacccuacagagua

SEQ ID NO: 1710146 - RNA, 19 nt, Artificial Sequence
  Description of Artificial Sequence: Synthetic oligonucleotide
  Antisense strand to SEQ ID NO: 1710145
uacucuguaggguuacugg

SEQ ID NO: 1710147 - RNA, 19 nt, Artificial Sequence
  Description of Artificial Sequence: Synthetic oligonucleotide
  Sense strand starting at position 114 of SEQ ID NO: 1561945
agauaacuugcccaaguca

SEQ ID NO: 1710148 - RNA, 19 nt, Artificial Sequence
  Description of Artificial Sequence: Synthetic oligonucleotide
  Antisense strand to SEQ ID NO: 1710147
ugacuugggcaaguuaucu

SEQ ID NO: 1710149 - RNA, 19 nt, Artificial Sequence
  Description of Artificial Sequence: Synthetic oligonucleotide
  Sense strand starting at position 139 of SEQ ID NO: 1561945
caggaaauaugggaaccaa

SEQ ID NO: 1710150 - RNA, 19 nt, Artificial Sequence
  Description of Artificial Sequence: Synthetic oligonucleotide
  Antisense strand to SEQ ID NO: 1710149
uugguucccauauuuccug

SEQ ID NO: 1710151 - RNA, 19 nt, Artificial Sequence
  Description of Artificial Sequence: Synthetic oligonucleotide
  Sense strand starting at position 157 of SEQ ID NO: 1561945
aucaaaugccugcagucaa

SEQ ID NO: 1710152 - RNA, 19 nt, Artificial Sequence
  Description of Artificial Sequence: Synthetic oligonucleotide
  Antisense strand to SEQ ID NO: 1710151
uugacugcaggcauuugau

SEQ ID NO: 1710153 - RNA, 19 nt, Artificial Sequence
  Description of Artificial Sequence: Synthetic oligonucleotide
  Sense strand starting at position 299 of SEQ ID NO: 1561945
cuagacuccuguguacuaa

SEQ ID NO: 1710154 - RNA, 19 nt, Artificial Sequence
  Description of Artificial Sequence: Synthetic oligonucleotide
  Antisense strand to SEQ ID NO: 1710153
uuaguacacaggagucuag

SEQ ID NO: 1710155 - RNA, 19 nt, Artificial Sequence
  Description of Artificial Sequence: Synthetic oligonucleotide
  Sense strand starting at position 383 of SEQ ID NO: 1561945
uucccauaguaguugauua

SEQ ID NO: 1710156 - RNA, 19 nt, Artificial Sequence
  Description of Artificial Sequence: Synthetic oligonucleotide
  Antisense strand to SEQ ID NO: 1710155
uaaucaacuacuaugggaa

SEQ ID NO: 1710157 - RNA, 19 nt, Artificial Sequence
  Description of Artificial Sequence: Synthetic oligonucleotide
  Sense strand starting at position 387 of SEQ ID NO: 1561945
cauaguaguugauuaggua

SEQ ID NO: 1710158 - RNA, 19 nt, Artificial Sequence
  Description of Artificial Sequence: Synthetic oligonucleotide
  Antisense strand to SEQ ID NO: 1710157
uaccuaaucaacuacuaug

SEQ ID NO: 1710159 - RNA, 19 nt, Artificial Sequence
  Description of Artificial Sequence: Synthetic oligonucleotide
  Sense strand starting at position 388 of SEQ ID NO: 1561945
auaguaguugauuagguaa

SEQ ID NO: 1710160 - RNA, 19 nt, Artificial Sequence
  Description of Artificial Sequence: Synthetic oligonucleotide
  Antisense strand to SEQ ID NO: 1710159
uuaccuaaucaacuacuau

SEQ ID NO: 1710161 - RNA, 19 nt, Artificial Sequence
  Description of Artificial Sequence: Synthetic oligonucleotide
  Sense strand starting at position 722 of SEQ ID NO: 1561945
cagguaaugugaucuauaa

SEQ ID NO: 1710162 - RNA, 19 nt, Artificial Sequence
  Description of Artificial Sequence: Synthetic oligonucleotide
  Antisense strand to SEQ ID NO: 1710161
uuauagaucacauuaccug

SEQ ID NO: 1710163 - RNA, 19 nt, Artificial Sequence
  Description of Artificial Sequence: Synthetic oligonucleotide
  Sense strand starting at position 777 of SEQ ID NO: 1561945
uggucacacauuggugaaa

SEQ ID NO: 1710164 - RNA, 19 nt, Artificial Sequence
  Description of Artificial Sequence: Synthetic oligonucleotide
  Antisense strand to SEQ ID NO: 1710163
uuucaccaaugugugacca

SEQ ID NO: 1710165 - RNA, 19 nt, Artificial Sequence
  Description of Artificial Sequence: Synthetic oligonucleotide
  Sense strand starting at position 908 of SEQ ID NO: 1561945
gcugaagugaucugaccaa

SEQ ID NO: 1710166 - RNA, 19 nt, Artificial Sequence
  Description of Artificial Sequence: Synthetic oligonucleotide
  Antisense strand to SEQ ID NO: 1710165
uuggucagaucacuucagc

SEQ ID NO: 1710167 - RNA, 19 nt, Artificial Sequence
  Description of Artificial Sequence: Synthetic oligonucleotide
  Sense strand starting at position 915 of SEQ ID NO: 1561945
ugaucugaccaaggucaau

SEQ ID NO: 1710168 - RNA, 19 nt, Artificial Sequence
  Description of Artificial Sequence: Synthetic oligonucleotide
  Antisense strand to SEQ ID NO: 1710167
auugaccuuggucagauca

SEQ ID NO: 1710169 - RNA, 19 nt, Artificial Sequence
  Description of Artificial Sequence: Synthetic oligonucleotide
  Sense strand starting at position 932 of SEQ ID NO: 1561945
auugcuagugaguaguaaa

SEQ ID NO: 1710170 - RNA, 19 nt, Artificial Sequence
  Description of Artificial Sequence: Synthetic oligonucleotide
  Antisense strand to SEQ ID NO: 1710169
uuuacuacucacuagcaau

SEQ ID NO: 1710171 - RNA, 19 nt, Artificial Sequence
  Description of Artificial Sequence: Synthetic oligonucleotide
  Sense strand starting at position 957 of SEQ ID NO: 1561945
gccaguggccucgaauuua

SEQ ID NO: 1710172 - RNA, 19 nt, Artificial Sequence
  Description of Artificial Sequence: Synthetic oligonucleotide
  Antisense strand to SEQ ID NO: 1710171
uaaauucgaggccacuggc

SEQ ID NO: 1710173 - RNA, 19 nt, Artificial Sequence
  Description of Artificial Sequence: Synthetic oligonucleotide
  Sense strand starting at position 1023 of SEQ ID NO: 1561945
cucucacuucuccagggau

SEQ ID NO: 1710174 - RNA, 19 nt, Artificial Sequence
  Description of Artificial Sequence: Synthetic oligonucleotide
  Antisense strand to SEQ ID NO: 1710173
aucccuggagaagugagag

SEQ ID NO: 1710175 - RNA, 19 nt, Artificial Sequence
  Description of Artificial Sequence: Synthetic oligonucleotide
  Sense strand starting at position 1025 of SEQ ID NO: 1561945
cucacuucuccagggauuc

SEQ ID NO: 1710176 - RNA, 19 nt, Artificial Sequence
  Description of Artificial Sequence: Synthetic oligonucleotide
  Antisense strand to SEQ ID NO: 1710175
gaaucccuggagaagugag

SEQ ID NO: 1710177 - RNA, 19 nt, Artificial Sequence
  Description of Artificial Sequence: Synthetic oligonucleotide
  Sense strand starting at position 1046 of SEQ ID NO: 1561945
ccauuucuuugcgugauca

SEQ ID NO: 1710178 - RNA, 19 nt, Artificial Sequence
  Description of Artificial Sequence: Synthetic oligonucleotide
  Antisense strand to SEQ ID NO: 1710177
ugaucacgcaaagaaaugg

SEQ ID NO: 1710179 - RNA, 19 nt, Artificial Sequence
  Description of Artificial Sequence: Synthetic oligonucleotide
  Sense strand starting at position 1047 of SEQ ID NO: 1561945
cauuucuuugcgugaucac

SEQ ID NO: 1710180 - RNA, 19 nt, Artificial Sequence
  Description of Artificial Sequence: Synthetic oligonucleotide
  Antisense strand to SEQ ID NO: 1710179
gugaucacgcaaagaaaug

SEQ ID NO: 1710181 - RNA, 19 nt, Artificial Sequence
  Description of Artificial Sequence: Synthetic oligonucleotide
  Sense strand starting at position 1056 of SEQ ID NO: 1561945
gcgugaucacgcccaucau

SEQ ID NO: 1710182 - RNA, 19 nt, Artificial Sequence
  Description of Artificial Sequence: Synthetic oligonucleotide
  Antisense strand to SEQ ID NO: 1710181
augaugggcgugaucacgc

SEQ ID NO: 1710183 - RNA, 19 nt, Artificial Sequence
  Description of Artificial Sequence: Synthetic oligonucleotide
  Sense strand starting at position 1323 of SEQ ID NO: 1561945
auaaguguaagggaugcua

SEQ ID NO: 1710184 - RNA, 19 nt, Artificial Sequence
  Description of Artificial Sequence: Synthetic oligonucleotide
  Antisense strand to SEQ ID NO: 1710183
uagcaucccuuacacuuau

SEQ ID NO: 1710185 - RNA, 19 nt, Artificial Sequence
  Description of Artificial Sequence: Synthetic oligonucleotide
  Sense strand starting at position 1344 of SEQ ID NO: 1561945
gucgaaucucaauggaaag

SEQ ID NO: 1710186 - RNA, 19 nt, Artificial Sequence
  Description of Artificial Sequence: Synthetic oligonucleotide
  Antisense strand to SEQ ID NO: 1710185
cuuuccauugagauucgac

SEQ ID NO: 1710187 - RNA, 19 nt, Artificial Sequence
  Description of Artificial Sequence: Synthetic oligonucleotide
  Sense strand starting at position 1431 of SEQ ID NO: 1561945
ggguguugaguugauauuc

SEQ ID NO: 1710188 - RNA, 19 nt, Artificial Sequence
  Description of Artificial Sequence: Synthetic oligonucleotide
  Antisense strand to SEQ ID NO: 1710187
gaauaucaacucaacaccc

SEQ ID NO: 1710189 - RNA, 19 nt, Artificial Sequence
  Description of Artificial Sequence: Synthetic oligonucleotide
  Sense strand starting at position 1451 of SEQ ID NO: 1561945
aaugguaucguaggaagga

SEQ ID NO: 1710190 - RNA, 19 nt, Artificial Sequence
  Description of Artificial Sequence: Synthetic oligonucleotide
  Antisense strand to SEQ ID NO: 1710189
uccuuccuacgauaccauu

SEQ ID NO: 1710191 - RNA, 19 nt, Artificial Sequence
  Description of Artificial Sequence: Synthetic oligonucleotide
  Sense strand starting at position 1524 of SEQ ID NO: 1561945
ucccuucugaccgaaggua

SEQ ID NO: 1710192 - RNA, 19 nt, Artificial Sequence
  Description of Artificial Sequence: Synthetic oligonucleotide
  Antisense strand to SEQ ID NO: 1710191
uaccuucggucagaaggga

SEQ ID NO: 1710193 - RNA, 19 nt, Artificial Sequence
  Description of Artificial Sequence: Synthetic oligonucleotide
  Sense strand starting at position 1684 of SEQ ID NO: 1561945
gaaaguuugagggaugugu

SEQ ID NO: 1710194 - RNA, 19 nt, Artificial Sequence
  Description of Artificial Sequence: Synthetic oligonucleotide
  Antisense strand to SEQ ID NO: 1710193
acacaucccucaaacuuuc

SEQ ID NO: 1710195 - RNA, 19 nt, Artificial Sequence
  Description of Artificial Sequence: Synthetic oligonucleotide
  Sense strand starting at position 1686 of SEQ ID NO: 1561945
aaguuugagggauguguca

SEQ ID NO: 1710196 - RNA, 19 nt, Artificial Sequence
  Description of Artificial Sequence: Synthetic oligonucleotide
  Antisense strand to SEQ ID NO: 1710195
ugacacaucccucaaacuu

SEQ ID NO: 1710197 - RNA, 19 nt, Artificial Sequence
  Description of Artificial Sequence: Synthetic oligonucleotide
  Sense strand starting at position 1743 of SEQ ID NO: 1561945
acaggaaggcuccggaaua

SEQ ID NO: 1710198 - RNA, 19 nt, Artificial Sequence
  Description of Artificial Sequence: Synthetic oligonucleotide
  Antisense strand to SEQ ID NO: 1710197
uauuccggagccuuccugu

SEQ ID NO: 1710199 - RNA, 19 nt, Artificial Sequence
  Description of Artificial Sequence: Synthetic oligonucleotide
  Sense strand starting at position 2415 of SEQ ID NO: 1561945
gugaucucugggcaggaca

SEQ ID NO: 1710200 - RNA, 19 nt, Artificial Sequence
  Description of Artificial Sequence: Synthetic oligonucleotide
  Antisense strand to SEQ ID NO: 1710199
uguccugcccagagaucac

SEQ ID NO: 1710201 - RNA, 19 nt, Artificial Sequence
  Description of Artificial Sequence: Synthetic oligonucleotide
  Sense strand starting at position 2658 of SEQ ID NO: 1561945
uuuccuuaaguguagaaug

SEQ ID NO: 1710202 - RNA, 19 nt, Artificial Sequence
  Description of Artificial Sequence: Synthetic oligonucleotide
  Antisense strand to SEQ ID NO: 1710201
cauucuacacuuaaggaaa

SEQ ID NO: 1710203 - RNA, 19 nt, Artificial Sequence
  Description of Artificial Sequence: Synthetic oligonucleotide
  Sense strand starting at position 2745 of SEQ ID NO: 1561945
auauuaagugcucaguaac

SEQ ID NO: 1710204 - RNA, 19 nt, Artificial Sequence
  Description of Artificial Sequence: Synthetic oligonucleotide
  Antisense strand to SEQ ID NO: 1710203
guuacugagcacuuaauau

SEQ ID NO: 1710205 - RNA, 19 nt, Artificial Sequence
  Description of Artificial Sequence: Synthetic oligonucleotide
  Sense strand starting at position 2748 of SEQ ID NO: 1561945
uuaagugcucaguaacuag

SEQ ID NO: 1710206 - RNA, 19 nt, Artificial Sequence
  Description of Artificial Sequence: Synthetic oligonucleotide
  Antisense strand to SEQ ID NO: 1710205
cuaguuacugagcacuuaa

SEQ ID NO: 1710207 - RNA, 19 nt, Artificial Sequence
  Description of Artificial Sequence: Synthetic oligonucleotide
  Sense strand starting at position 2793 of SEQ ID NO: 1561945
uccaauugcgcauaaggaa

SEQ ID NO: 1710208 - RNA, 19 nt, Artificial Sequence
  Description of Artificial Sequence: Synthetic oligonucleotide
  Antisense strand to SEQ ID NO: 1710207
uuccuuaugcgcaauugga

SEQ ID NO: 1710209 - RNA, 19 nt, Artificial Sequence
  Description of Artificial Sequence: Synthetic oligonucleotide
  Sense strand starting at position 2913 of SEQ ID NO: 1561945
uugccauaucccuagauug

SEQ ID NO: 1710210 - RNA, 19 nt, Artificial Sequence
  Description of Artificial Sequence: Synthetic oligonucleotide
  Antisense strand to SEQ ID NO: 1710209
caaucuagggauauggcaa

SEQ ID NO: 1710211 - RNA, 19 nt, Artificial Sequence
  Description of Artificial Sequence: Synthetic oligonucleotide
  Sense strand starting at position 2915 of SEQ ID NO: 1561945
gccauaucccuagauugua

SEQ ID NO: 1710212 - RNA, 19 nt, Artificial Sequence
  Description of Artificial Sequence: Synthetic oligonucleotide
  Antisense strand to SEQ ID NO: 1710211
uacaaucuagggauauggc

SEQ ID NO: 1710213 - RNA, 19 nt, Artificial Sequence
  Description of Artificial Sequence: Synthetic oligonucleotide
  Sense strand starting at position 3030 of SEQ ID NO: 1561945
acuugacacuauguguaaa

SEQ ID NO: 1710214 - RNA, 19 nt, Artificial Sequence
  Description of Artificial Sequence: Synthetic oligonucleotide
  Antisense strand to SEQ ID NO: 1710213
uuuacacauagugucaagu

SEQ ID NO: 1710215 - RNA, 19 nt, Artificial Sequence
  Description of Artificial Sequence: Synthetic oligonucleotide
  Sense strand starting at position 3032 of SEQ ID NO: 1561945
uugacacuauguguaaauu

SEQ ID NO: 1710216 - RNA, 19 nt, Artificial Sequence
  Description of Artificial Sequence: Synthetic oligonucleotide
  Antisense strand to SEQ ID NO: 1710215
aauuuacacauagugucaa

SEQ ID NO: 1710217 - RNA, 19 nt, Artificial Sequence
  Description of Artificial Sequence: Synthetic oligonucleotide
  Sense strand starting at position 3042 of SEQ ID NO: 1561945
guguaaauuguagagcuga

SEQ ID NO: 1710218 - RNA, 19 nt, Artificial Sequence
  Description of Artificial Sequence: Synthetic oligonucleotide
  Antisense strand to SEQ ID NO: 1710217
ucagcucuacaauuuacac

SEQ ID NO: 1710219 - RNA, 19 nt, Artificial Sequence
  Description of Artificial Sequence: Synthetic oligonucleotide
  Sense strand starting at position 3162 of SEQ ID NO: 1561945
cugguuucucuauguauuu

SEQ ID NO: 1710220 - RNA, 19 nt, Artificial Sequence
  Description of Artificial Sequence: Synthetic oligonucleotide
  Antisense strand to SEQ ID NO: 1710219
aaauacauagagaaaccag

SEQ ID NO: 1710221 - RNA, 19 nt, Artificial Sequence
  Description of Artificial Sequence: Synthetic oligonucleotide
  Sense strand starting at position 3601 of SEQ ID NO: 1561945
gaaagucuuugaguaguca

SEQ ID NO: 1710222 - RNA, 19 nt, Artificial Sequence
  Description of Artificial Sequence: Synthetic oligonucleotide
  Antisense strand to SEQ ID NO: 1710221
ugacuacucaaagacuuuc

SEQ ID NO: 1710223 - RNA, 19 nt, Artificial Sequence
  Description of Artificial Sequence: Synthetic oligonucleotide
  Sense strand starting at position 3888 of SEQ ID NO: 1561945
gccgaaauuuccucaaggu

SEQ ID NO: 1710224 - RNA, 19 nt, Artificial Sequence
  Description of Artificial Sequence: Synthetic oligonucleotide
  Antisense strand to SEQ ID NO: 1710223
accuugaggaaauuucggc

SEQ ID NO: 1710225 - RNA, 19 nt, Artificial Sequence
  Description of Artificial Sequence: Synthetic oligonucleotide
  Sense strand starting at position 147 of SEQ ID NO: 1561946
cacauaaacguguauguuu

SEQ ID NO: 1710226 - RNA, 19 nt, Artificial Sequence
  Description of Artificial Sequence: Synthetic oligonucleotide
  Antisense strand to SEQ ID NO: 1710225
aaacauacacguuuaugug

SEQ ID NO: 1710227 - RNA, 19 nt, Artificial Sequence
  Description of Artificial Sequence: Synthetic oligonucleotide
  Sense strand starting at position 592 of SEQ ID NO: 1561946
accagaacguucugcacau

SEQ ID NO: 1710228 - RNA, 19 nt, Artificial Sequence
  Description of Artificial Sequence: Synthetic oligonucleotide
  Antisense strand to SEQ ID NO: 1710227
augugcagaacguucuggu

SEQ ID NO: 1710229 - RNA, 19 nt, Artificial Sequence
  Description of Artificial Sequence: Synthetic oligonucleotide
  Sense strand starting at position 1173 of SEQ ID NO: 1561946
gccuaagucucacagagca

SEQ ID NO: 1710230 - RNA, 19 nt, Artificial Sequence
  Description of Artificial Sequence: Synthetic oligonucleotide
  Antisense strand to SEQ ID NO: 1710229
ugcucugugagacuuaggc

SEQ ID NO: 1710231 - RNA, 19 nt, Artificial Sequence
  Description of Artificial Sequence: Synthetic oligonucleotide
  Sense strand starting at position 1215 of SEQ ID NO: 1561946
ucacgugaguccugugcaa

SEQ ID NO: 1710232 - RNA, 19 nt, Artificial Sequence
  Description of Artificial Sequence: Synthetic oligonucleotide
  Antisense strand to SEQ ID NO: 1710231
uugcacaggacucacguga

SEQ ID NO: 1710233 - RNA, 19 nt, Artificial Sequence
  Description of Artificial Sequence: Synthetic oligonucleotide
  Sense strand starting at position 1217 of SEQ ID NO: 1561946
acgugaguccugugcaaac

SEQ ID NO: 1710234 - RNA, 19 nt, Artificial Sequence
  Description of Artificial Sequence: Synthetic oligonucleotide
  Antisense strand to SEQ ID NO: 1710233
guuugcacaggacucacgu

SEQ ID NO: 1710235 - RNA, 19 nt, Artificial Sequence
  Description of Artificial Sequence: Synthetic oligonucleotide
  Sense strand starting at position 1219 of SEQ ID NO: 1561946
gugaguccugugcaaacau

SEQ ID NO: 1710236 - RNA, 19 nt, Artificial Sequence
  Description of Artificial Sequence: Synthetic oligonucleotide
  Antisense strand to SEQ ID NO: 1710235
auguuugcacaggacucac

SEQ ID NO: 1710237 - RNA, 19 nt, Artificial Sequence
  Description of Artificial Sequence: Synthetic oligonucleotide
  Sense strand starting at position 1278 of SEQ ID NO: 1561946
ccaggcacgaucgaugauu

SEQ ID NO: 1710238 - RNA, 19 nt, Artificial Sequence
  Description of Artificial Sequence: Synthetic oligonucleotide
  Antisense strand to SEQ ID NO: 1710237
aaucaucgaucgugccugg

SEQ ID NO: 1710239 - RNA, 19 nt, Artificial Sequence
  Description of Artificial Sequence: Synthetic oligonucleotide
  Sense strand starting at position 1280 of SEQ ID NO: 1561946
aggcacgaucgaugauuau

SEQ ID NO: 1710240 - RNA, 19 nt, Artificial Sequence
  Description of Artificial Sequence: Synthetic oligonucleotide
  Antisense strand to SEQ ID NO: 1710239
auaaucaucgaucgugccu

SEQ ID NO: 1710241 - RNA, 19 nt, Artificial Sequence
  Description of Artificial Sequence: Synthetic oligonucleotide
  Sense strand starting at position 1283 of SEQ ID NO: 1561946
cacgaucgaugauuaugaa

SEQ ID NO: 1710242 - RNA, 19 nt, Artificial Sequence
  Description of Artificial Sequence: Synthetic oligonucleotide
  Antisense strand to SEQ ID NO: 1710241
uucauaaucaucgaucgug

SEQ ID NO: 1710243 - RNA, 19 nt, Artificial Sequence
  Description of Artificial Sequence: Synthetic oligonucleotide
  Sense strand starting at position 2286 of SEQ ID NO: 1561946
gguagcaucuucuggaaac

SEQ ID NO: 1710244 - RNA, 19 nt, Artificial Sequence
  Description of Artificial Sequence: Synthetic oligonucleotide
  Antisense strand to SEQ ID NO: 1710243
guuuccagaagaugcuacc

SEQ ID NO: 1710245 - RNA, 19 nt, Artificial Sequence
  Description of Artificial Sequence: Synthetic oligonucleotide
  Sense strand starting at position 2287 of SEQ ID NO: 1561946
guagcaucuucuggaaaca

SEQ ID NO: 1710246 - RNA, 19 nt, Artificial Sequence
  Description of Artificial Sequence: Synthetic oligonucleotide
  Antisense strand to SEQ ID NO: 1710245
uguuuccagaagaugcuac

SEQ ID NO: 1710247 - RNA, 19 nt, Artificial Sequence
  Description of Artificial Sequence: Synthetic oligonucleotide
  Sense strand starting at position 2351 of SEQ ID NO: 1561946
ugaggaaaccgcgacuuaa

SEQ ID NO: 1710248 - RNA, 19 nt, Artificial Sequence
  Description of Artificial Sequence: Synthetic oligonucleotide
  Antisense strand to SEQ ID NO: 1710247
uuaagucgcgguuuccuca

SEQ ID NO: 1710249 - RNA, 19 nt, Artificial Sequence
  Description of Artificial Sequence: Synthetic oligonucleotide
  Sense strand starting at position 2381 of SEQ ID NO: 1561946
ucacguuuccaccgcauau

SEQ ID NO: 1710250 - RNA, 19 nt, Artificial Sequence
  Description of Artificial Sequence: Synthetic oligonucleotide
  Antisense strand to SEQ ID NO: 1710249
auaugcgguggaaacguga

SEQ ID NO: 1710251 - RNA, 19 nt, Artificial Sequence
  Description of Artificial Sequence: Synthetic oligonucleotide
  Sense strand starting at position 2383 of SEQ ID NO: 1561946
acguuuccaccgcauauua

SEQ ID NO: 1710252 - RNA, 19 nt, Artificial Sequence
  Description of Artificial Sequence: Synthetic oligonucleotide
  Antisense strand to SEQ ID NO: 1710251
uaauaugcgguggaaacgu

SEQ ID NO: 1710253 - RNA, 19 nt, Artificial Sequence
  Description of Artificial Sequence: Synthetic oligonucleotide
  Sense strand starting at position 2385 of SEQ ID NO: 1561946
guuuccaccgcauauuaaa

SEQ ID NO: 1710254 - RNA, 19 nt, Artificial Sequence
  Description of Artificial Sequence: Synthetic oligonucleotide
  Antisense strand to SEQ ID NO: 1710253
uuuaauaugcgguggaaac

SEQ ID NO: 1710255 - RNA, 19 nt, Artificial Sequence
  Description of Artificial Sequence: Synthetic oligonucleotide
  Sense strand starting at position 2686 of SEQ ID NO: 1561946
gccaccauguccgcuaauu

SEQ ID NO: 1710256 - RNA, 19 nt, Artificial Sequence
  Description of Artificial Sequence: Synthetic oligonucleotide
  Antisense strand to SEQ ID NO: 1710255
aauuagcggacaugguggc

SEQ ID NO: 1710257 - RNA, 19 nt, Artificial Sequence
  Description of Artificial Sequence: Synthetic oligonucleotide
  Sense strand starting at position 3058 of SEQ ID NO: 1561946
gugccaagcaucucgguua

SEQ ID NO: 1710258 - RNA, 19 nt, Artificial Sequence
  Description of Artificial Sequence: Synthetic oligonucleotide
  Antisense strand to SEQ ID NO: 1710257
uaaccgagaugcuuggcac

SEQ ID NO: 1710259 - RNA, 19 nt, Artificial Sequence
  Description of Artificial Sequence: Synthetic oligonucleotide
  Sense strand starting at position 3059 of SEQ ID NO: 1561946
ugccaagcaucucgguuaa

SEQ ID NO: 1710260 - RNA, 19 nt, Artificial Sequence
  Description of Artificial Sequence: Synthetic oligonucleotide
  Antisense strand to SEQ ID NO: 1710259
uuaaccgagaugcuuggca

SEQ ID NO: 1710261 - RNA, 19 nt, Artificial Sequence
  Description of Artificial Sequence: Synthetic oligonucleotide
  Sense strand starting at position 3063 of SEQ ID NO: 1561946
aagcaucucgguuaaggga

SEQ ID NO: 1710262 - RNA, 19 nt, Artificial Sequence
  Description of Artificial Sequence: Synthetic oligonucleotide
  Antisense strand to SEQ ID NO: 1710261
ucccuuaaccgagaugcuu

SEQ ID NO: 1710263 - RNA, 19 nt, Artificial Sequence
  Description of Artificial Sequence: Synthetic oligonucleotide
  Sense strand starting at position 3092 of SEQ ID NO: 1561946
guauauauuuaucgaacac

SEQ ID NO: 1710264 - RNA, 19 nt, Artificial Sequence
  Description of Artificial Sequence: Synthetic oligonucleotide
  Antisense strand to SEQ ID NO: 1710263
guguucgauaaauauauac

SEQ ID NO: 1710265 - RNA, 19 nt, Artificial Sequence
  Description of Artificial Sequence: Synthetic oligonucleotide
  Sense strand starting at position 3427 of SEQ ID NO: 1561946
ggagguugugguuaucaag

SEQ ID NO: 1710266 - RNA, 19 nt, Artificial Sequence
  Description of Artificial Sequence: Synthetic oligonucleotide
  Antisense strand to SEQ ID NO: 1710265
cuugauaaccacaaccucc

SEQ ID NO: 1710267 - RNA, 19 nt, Artificial Sequence
  Description of Artificial Sequence: Synthetic oligonucleotide
  Sense strand starting at position 3430 of SEQ ID NO: 1561946
gguugugguuaucaagcca

SEQ ID NO: 1710268 - RNA, 19 nt, Artificial Sequence
  Description of Artificial Sequence: Synthetic oligonucleotide
  Antisense strand to SEQ ID NO: 1710267
uggcuugauaaccacaacc

SEQ ID NO: 1710269 - RNA, 19 nt, Artificial Sequence
  Description of Artificial Sequence: Synthetic oligonucleotide
  Sense strand starting at position 3621 of SEQ ID NO: 1561946
cccagugucuacugaaaca

SEQ ID NO: 1710270 - RNA, 19 nt, Artificial Sequence
  Description of Artificial Sequence: Synthetic oligonucleotide
  Antisense strand to SEQ ID NO: 1710269
uguuucaguagacacuggg

SEQ ID NO: 1710271 - RNA, 19 nt, Artificial Sequence
  Description of Artificial Sequence: Synthetic oligonucleotide
  Sense strand starting at position 3834 of SEQ ID NO: 1561946
gucagagaguuauaucaga

SEQ ID NO: 1710272 - RNA, 19 nt, Artificial Sequence
  Description of Artificial Sequence: Synthetic oligonucleotide
  Antisense strand to SEQ ID NO: 1710271
ucugauauaacucucugac

SEQ ID NO: 1710273 - RNA, 19 nt, Artificial Sequence
  Description of Artificial Sequence: Synthetic oligonucleotide
  Sense strand starting at position 3839 of SEQ ID NO: 1561946
agaguuauaucagaauuac

SEQ ID NO: 1710274 - RNA, 19 nt, Artificial Sequence
  Description of Artificial Sequence: Synthetic oligonucleotide
  Antisense strand to SEQ ID NO: 1710273
guaauucugauauaacucu

SEQ ID NO: 1710275 - RNA, 19 nt, Artificial Sequence
  Description of Artificial Sequence: Synthetic oligonucleotide
  Sense strand starting at position 3872 of SEQ ID NO: 1561946
uacacuguagcaugagaaa

SEQ ID NO: 1710276 - RNA, 19 nt, Artificial Sequence
  Description of Artificial Sequence: Synthetic oligonucleotide
  Antisense strand to SEQ ID NO: 1710275
uuucucaugcuacagugua

SEQ ID NO: 1710277 - RNA, 19 nt, Artificial Sequence
  Description of Artificial Sequence: Synthetic oligonucleotide
  Sense strand starting at position 3881 of SEQ ID NO: 1561946
gcaugagaaaggugcauau

SEQ ID NO: 1710278 - RNA, 19 nt, Artificial Sequence
  Description of Artificial Sequence: Synthetic oligonucleotide
  Antisense strand to SEQ ID NO: 1710277
auaugcaccuuucucaugc

SEQ ID NO: 1710279 - RNA, 19 nt, Artificial Sequence
  Description of Artificial Sequence: Synthetic oligonucleotide
  Sense strand starting at position 3892 of SEQ ID NO: 1561946
gugcauauacuuuguagga

SEQ ID NO: 1710280 - RNA, 19 nt, Artificial Sequence
  Description of Artificial Sequence: Synthetic oligonucleotide
  Antisense strand to SEQ ID NO: 1710279
uccuacaaaguauaugcac

SEQ ID NO: 1710281 - RNA, 19 nt, Artificial Sequence
  Description of Artificial Sequence: Synthetic oligonucleotide
  Sense strand starting at position 3893 of SEQ ID NO: 1561946
ugcauauacuuuguaggaa

SEQ ID NO: 1710282 - RNA, 19 nt, Artificial Sequence
  Description of Artificial Sequence: Synthetic oligonucleotide
  Antisense strand to SEQ ID NO: 1710281
uuccuacaaaguauaugca

SEQ ID NO: 1710283 - RNA, 19 nt, Artificial Sequence
  Description of Artificial Sequence: Synthetic oligonucleotide
  Sense strand starting at position 3894 of SEQ ID NO: 1561946
gcauauacuuuguaggaac

SEQ ID NO: 1710284 - RNA, 19 nt, Artificial Sequence
  Description of Artificial Sequence: Synthetic oligonucleotide
  Antisense strand to SEQ ID NO: 1710283
guuccuacaaaguauaugc

SEQ ID NO: 1710285 - RNA, 19 nt, Artificial Sequence
  Description of Artificial Sequence: Synthetic oligonucleotide
  Sense strand starting at position 198 of SEQ ID NO: 1561947
ggaugacucuuucccucuu

SEQ ID NO: 1710286 - RNA, 19 nt, Artificial Sequence
  Description of Artificial Sequence: Synthetic oligonucleotide
  Antisense strand to SEQ ID NO: 1710285
aagagggaaagagucaucc

SEQ ID NO: 1710287 - RNA, 19 nt, Artificial Sequence
  Description of Artificial Sequence: Synthetic oligonucleotide
  Sense strand starting at position 438 of SEQ ID NO: 1561947
gauggaaaccaaugucacu

SEQ ID NO: 1710288 - RNA, 19 nt, Artificial Sequence
  Description of Artificial Sequence: Synthetic oligonucleotide
  Antisense strand to SEQ ID NO: 1710287
agugacauugguuuccauc

SEQ ID NO: 1710289 - RNA, 19 nt, Artificial Sequence
  Description of Artificial Sequence: Synthetic oligonucleotide
  Sense strand starting at position 634 of SEQ ID NO: 1561947
ccaccagucuccuaaggga

SEQ ID NO: 1710290 - RNA, 19 nt, Artificial Sequence
  Description of Artificial Sequence: Synthetic oligonucleotide
  Antisense strand to SEQ ID NO: 1710289
ucccuuaggagacuggugg

SEQ ID NO: 1710291 - RNA, 19 nt, Artificial Sequence
  Description of Artificial Sequence: Synthetic oligonucleotide
  Sense strand starting at position 666 of SEQ ID NO: 1561947
ggagccacucacugaaaga

SEQ ID NO: 1710292 - RNA, 19 nt, Artificial Sequence
  Description of Artificial Sequence: Synthetic oligonucleotide
  Antisense strand to SEQ ID NO: 1710291
ucuuucagugaguggcucc

SEQ ID NO: 1710293 - RNA, 19 nt, Artificial Sequence
  Description of Artificial Sequence: Synthetic oligonucleotide
  Sense strand starting at position 1038 of SEQ ID NO: 1561947
gccaauuagcaucgaagca

SEQ ID NO: 1710294 - RNA, 19 nt, Artificial Sequence
  Description of Artificial Sequence: Synthetic oligonucleotide
  Antisense strand to SEQ ID NO: 1710293
ugcuucgaugcuaauuggc

SEQ ID NO: 1710295 - RNA, 19 nt, Artificial Sequence
  Description of Artificial Sequence: Synthetic oligonucleotide
  Sense strand starting at position 1079 of SEQ ID NO: 1561947
aggcgaggccuuuguuuag

SEQ ID NO: 1710296 - RNA, 19 nt, Artificial Sequence
  Description of Artificial Sequence: Synthetic oligonucleotide
  Antisense strand to SEQ ID NO: 1710295
cuaaacaaaggccucgccu

SEQ ID NO: 1710297 - RNA, 19 nt, Artificial Sequence
  Description of Artificial Sequence: Synthetic oligonucleotide
  Sense strand starting at position 59 of SEQ ID NO: 1561948
ggcuuugagcgcgugacau

SEQ ID NO: 1710298 - RNA, 19 nt, Artificial Sequence
  Description of Artificial Sequence: Synthetic oligonucleotide
  Antisense strand to SEQ ID NO: 1710297
augucacgcgcucaaagcc

SEQ ID NO: 1710299 - RNA, 19 nt, Artificial Sequence
  Description of Artificial Sequence: Synthetic oligonucleotide
  Sense strand starting at position 133 of SEQ ID NO: 1561948
gcgucaccuccauaccuuu

SEQ ID NO: 1710300 - RNA, 19 nt, Artificial Sequence
  Description of Artificial Sequence: Synthetic oligonucleotide
  Antisense strand to SEQ ID NO: 1710299
aaagguauggaggugacgc

SEQ ID NO: 1710301 - RNA, 19 nt, Artificial Sequence
  Description of Artificial Sequence: Synthetic oligonucleotide
  Sense strand starting at position 298 of SEQ ID NO: 1561948
aggucugcgccuuggagaa

SEQ ID NO: 1710302 - RNA, 19 nt, Artificial Sequence
  Description of Artificial Sequence: Synthetic oligonucleotide
  Antisense strand to SEQ ID NO: 1710301
uucuccaaggcgcagaccu

SEQ ID NO: 1710303 - RNA, 19 nt, Artificial Sequence
  Description of Artificial Sequence: Synthetic oligonucleotide
  Sense strand starting at position 698 of SEQ ID NO: 1561948
ucacauagugugggugaga

SEQ ID NO: 1710304 - RNA, 19 nt, Artificial Sequence
  Description of Artificial Sequence: Synthetic oligonucleotide
  Antisense strand to SEQ ID NO: 1710303
ucucacccacacuauguga

SEQ ID NO: 1710305 - RNA, 19 nt, Artificial Sequence
  Description of Artificial Sequence: Synthetic oligonucleotide
  Sense strand starting at position 699 of SEQ ID NO: 1561948
cacauagugugggugagaa

SEQ ID NO: 1710306 - RNA, 19 nt, Artificial Sequence
  Description of Artificial Sequence: Synthetic oligonucleotide
  Antisense strand to SEQ ID NO: 1710305
uucucacccacacuaugug

SEQ ID NO: 1710307 - RNA, 19 nt, Artificial Sequence
  Description of Artificial Sequence: Synthetic oligonucleotide
  Sense strand starting at position 701 of SEQ ID NO: 1561948
cauagugugggugagaauu

SEQ ID NO: 1710308 - RNA, 19 nt, Artificial Sequence
  Description of Artificial Sequence: Synthetic oligonucleotide
  Antisense strand to SEQ ID NO: 1710307
aauucucacccacacuaug

SEQ ID NO: 1710309 - RNA, 19 nt, Artificial Sequence
  Description of Artificial Sequence: Synthetic oligonucleotide
  Sense strand starting at position 739 of SEQ ID NO: 1561948
gaagaucaucgcggguuaa

SEQ ID NO: 1710310 - RNA, 19 nt, Artificial Sequence
  Description of Artificial Sequence: Synthetic oligonucleotide
  Antisense strand to SEQ ID NO: 1710309
uuaacccgcgaugaucuuc

SEQ ID NO: 1710311 - RNA, 19 nt, Artificial Sequence
  Description of Artificial Sequence: Synthetic oligonucleotide
  Sense strand starting at position 740 of SEQ ID NO: 1561948
aagaucaucgcggguuaag

SEQ ID NO: 1710312 - RNA, 19 nt, Artificial Sequence
  Description of Artificial Sequence: Synthetic oligonucleotide
  Antisense strand to SEQ ID NO: 1710311
cuuaacccgcgaugaucuu

SEQ ID NO: 1710313 - RNA, 19 nt, Artificial Sequence
  Description of Artificial Sequence: Synthetic oligonucleotide
  Sense strand starting at position 791 of SEQ ID NO: 1561948
gcgagacgugggcagauuu

SEQ ID NO: 1710314 - RNA, 19 nt, Artificial Sequence
  Description of Artificial Sequence: Synthetic oligonucleotide
  Antisense strand to SEQ ID NO: 1710313
aaaucugcccacgucucgc

SEQ ID NO: 1710315 - RNA, 19 nt, Artificial Sequence
  Description of Artificial Sequence: Synthetic oligonucleotide
  Sense strand starting at position 920 of SEQ ID NO: 1561948
caaagcguccucuaugauc

SEQ ID NO: 1710316 - RNA, 19 nt, Artificial Sequence
  Description of Artificial Sequence: Synthetic oligonucleotide
  Antisense strand to SEQ ID NO: 1710315
gaucauagaggacgcuuug

SEQ ID NO: 1710317 - RNA, 19 nt, Artificial Sequence
  Description of Artificial Sequence: Synthetic oligonucleotide
  Sense strand starting at position 957 of SEQ ID NO: 1561948
gcuauuuauacccgggcca

SEQ ID NO: 1710318 - RNA, 19 nt, Artificial Sequence
  Description of Artificial Sequence: Synthetic oligonucleotide
  Antisense strand to SEQ ID NO: 1710317
uggcccggguauaaauagc

SEQ ID NO: 1710319 - RNA, 19 nt, Artificial Sequence
  Description of Artificial Sequence: Synthetic oligonucleotide
  Sense strand starting at position 1093 of SEQ ID NO: 1561948
ccggguugacaucauauac

SEQ ID NO: 1710320 - RNA, 19 nt, Artificial Sequence
  Description of Artificial Sequence: Synthetic oligonucleotide
  Antisense strand to SEQ ID NO: 1710319
guauaugaugucaacccgg

SEQ ID NO: 1710321 - RNA, 19 nt, Artificial Sequence
  Description of Artificial Sequence: Synthetic oligonucleotide
  Sense strand starting at position 1184 of SEQ ID NO: 1561948
aaguucuuucccggaacua

SEQ ID NO: 1710322 - RNA, 19 nt, Artificial Sequence
  Description of Artificial Sequence: Synthetic oligonucleotide
  Antisense strand to SEQ ID NO: 1710321
uaguuccgggaaagaacuu

SEQ ID NO: 1710323 - RNA, 19 nt, Artificial Sequence
  Description of Artificial Sequence: Synthetic oligonucleotide
  Sense strand starting at position 1185 of SEQ ID NO: 1561948
aguucuuucccggaacuaa

SEQ ID NO: 1710324 - RNA, 19 nt, Artificial Sequence
  Description of Artificial Sequence: Synthetic oligonucleotide
  Antisense strand to SEQ ID NO: 1710323
uuaguuccgggaaagaacu

SEQ ID NO: 1710325 - RNA, 19 nt, Artificial Sequence
  Description of Artificial Sequence: Synthetic oligonucleotide
  Sense strand starting at position 1589 of SEQ ID NO: 1561948
gcaggucuaagauguccuu

SEQ ID NO: 1710326 - RNA, 19 nt, Artificial Sequence
  Description of Artificial Sequence: Synthetic oligonucleotide
  Antisense strand to SEQ ID NO: 1710325
aaggacaucuuagaccugc

SEQ ID NO: 1710327 - RNA, 19 nt, Artificial Sequence
  Description of Artificial Sequence: Synthetic oligonucleotide
  Sense strand starting at position 1592 of SEQ ID NO: 1561948
ggucuaagauguccuugac

SEQ ID NO: 1710328 - RNA, 19 nt, Artificial Sequence
  Description of Artificial Sequence: Synthetic oligonucleotide
  Antisense strand to SEQ ID NO: 1710327
gucaaggacaucuuagacc

SEQ ID NO: 1710329 - RNA, 19 nt, Artificial Sequence
  Description of Artificial Sequence: Synthetic oligonucleotide
  Sense strand starting at position 1595 of SEQ ID NO: 1561948
cuaagauguccuugaccga

SEQ ID NO: 1710330 - RNA, 19 nt, Artificial Sequence
  Description of Artificial Sequence: Synthetic oligonucleotide
  Antisense strand to SEQ ID NO: 1710329
ucggucaaggacaucuuag

SEQ ID NO: 1710331 - RNA, 19 nt, Artificial Sequence
  Description of Artificial Sequence: Synthetic oligonucleotide
  Sense strand starting at position 1596 of SEQ ID NO: 1561948
uaagauguccuugaccgaa

SEQ ID NO: 1710332 - RNA, 19 nt, Artificial Sequence
  Description of Artificial Sequence: Synthetic oligonucleotide
  Antisense strand to SEQ ID NO: 1710331
uucggucaaggacaucuua

SEQ ID NO: 1710333 - RNA, 19 nt, Artificial Sequence
  Description of Artificial Sequence: Synthetic oligonucleotide
  Sense strand starting at position 1658 of SEQ ID NO: 1561948
aaauuuaugucgcaaaguu

SEQ ID NO: 1710334 - RNA, 19 nt, Artificial Sequence
  Description of Artificial Sequence: Synthetic oligonucleotide
  Antisense strand to SEQ ID NO: 1710333
aacuuugcgacauaaauuu

SEQ ID NO: 1710335 - RNA, 19 nt, Artificial Sequence
  Description of Artificial Sequence: Synthetic oligonucleotide
  Sense strand starting at position 1772 of SEQ ID NO: 1561948
uggcuuuaauuauugggau

SEQ ID NO: 1710336 - RNA, 19 nt, Artificial Sequence
  Description of Artificial Sequence: Synthetic oligonucleotide
  Antisense strand to SEQ ID NO: 1710335
aucccaauaauuaaagcca

SEQ ID NO: 1710337 - RNA, 19 nt, Artificial Sequence
  Description of Artificial Sequence: Synthetic oligonucleotide
  Sense strand starting at position 1873 of SEQ ID NO: 1561948
uuugaaagcacgcggaaau

SEQ ID NO: 1710338 - RNA, 19 nt, Artificial Sequence
  Description of Artificial Sequence: Synthetic oligonucleotide
  Antisense strand to SEQ ID NO: 1710337
auuuccgcgugcuuucaaa

SEQ ID NO: 1710339 - RNA, 19 nt, Artificial Sequence
  Description of Artificial Sequence: Synthetic oligonucleotide
  Sense strand starting at position 2037 of SEQ ID NO: 1561948
gggccauugcccgagcgau

SEQ ID NO: 1710340 - RNA, 19 nt, Artificial Sequence
  Description of Artificial Sequence: Synthetic oligonucleotide
  Antisense strand to SEQ ID NO: 1710339
aucgcucgggcaauggccc

SEQ ID NO: 1710341 - RNA, 19 nt, Artificial Sequence
  Description of Artificial Sequence: Synthetic oligonucleotide
  Sense strand starting at position 2049 of SEQ ID NO: 1561948
gagcgaucaguccauauaa

SEQ ID NO: 1710342 - RNA, 19 nt, Artificial Sequence
  Description of Artificial Sequence: Synthetic oligonucleotide
  Antisense strand to SEQ ID NO: 1710341
uuauauggacugaucgcuc

SEQ ID NO: 1710343 - RNA, 19 nt, Artificial Sequence
  Description of Artificial Sequence: Synthetic oligonucleotide
  Sense strand starting at position 2051 of SEQ ID NO: 1561948
gcgaucaguccauauaagg

SEQ ID NO: 1710344 - RNA, 19 nt, Artificial Sequence
  Description of Artificial Sequence: Synthetic oligonucleotide
  Antisense strand to SEQ ID NO: 1710343
ccuuauauggacugaucgc

SEQ ID NO: 1710345 - RNA, 19 nt, Artificial Sequence
  Description of Artificial Sequence: Synthetic oligonucleotide
  Sense strand starting at position 2333 of SEQ ID NO: 1561948
agagguguaacgugucaau

SEQ ID NO: 1710346 - RNA, 19 nt, Artificial Sequence
  Description of Artificial Sequence: Synthetic oligonucleotide
  Antisense strand to SEQ ID NO: 1710345
auugacacguuacaccucu

SEQ ID NO: 1710347 - RNA, 19 nt, Artificial Sequence
  Description of Artificial Sequence: Synthetic oligonucleotide
  Sense strand starting at position 2343 of SEQ ID NO: 1561948
cgugucaauuaauugcaaa

SEQ ID NO: 1710348 - RNA, 19 nt, Artificial Sequence
  Description of Artificial Sequence: Synthetic oligonucleotide
  Antisense strand to SEQ ID NO: 1710347
uuugcaauuaauugacacg

SEQ ID NO: 1710349 - RNA, 19 nt, Artificial Sequence
  Description of Artificial Sequence: Synthetic oligonucleotide
  Sense strand starting at position 2675 of SEQ ID NO: 1561948
guuggugguugccuaaaca

SEQ ID NO: 1710350 - RNA, 19 nt, Artificial Sequence
  Description of Artificial Sequence: Synthetic oligonucleotide
  Antisense strand to SEQ ID NO: 1710349
uguuuaggcaaccaccaac

SEQ ID NO: 1710351 - RNA, 19 nt, Artificial Sequence
  Description of Artificial Sequence: Synthetic oligonucleotide
  Sense strand starting at position 2727 of SEQ ID NO: 1561948
guaagccuccuaggucaau

SEQ ID NO: 1710352 - RNA, 19 nt, Artificial Sequence
  Description of Artificial Sequence: Synthetic oligonucleotide
  Antisense strand to SEQ ID NO: 1710351
auugaccuaggaggcuuac

SEQ ID NO: 1710353 - RNA, 19 nt, Artificial Sequence
  Description of Artificial Sequence: Synthetic oligonucleotide
  Sense strand starting at position 2730 of SEQ ID NO: 1561948
agccuccuaggucaauauu

SEQ ID NO: 1710354 - RNA, 19 nt, Artificial Sequence
  Description of Artificial Sequence: Synthetic oligonucleotide
  Antisense strand to SEQ ID NO: 1710353
aauauugaccuaggaggcu

SEQ ID NO: 1710355 - RNA, 19 nt, Artificial Sequence
  Description of Artificial Sequence: Synthetic oligonucleotide
  Sense strand starting at position 2749 of SEQ ID NO: 1561948
uugguugaggcuuaaggau

SEQ ID NO: 1710356 - RNA, 19 nt, Artificial Sequence
  Description of Artificial Sequence: Synthetic oligonucleotide
  Antisense strand to SEQ ID NO: 1710355
auccuuaagccucaaccaa

SEQ ID NO: 1710357 - RNA, 19 nt, Artificial Sequence
  Description of Artificial Sequence: Synthetic oligonucleotide
  Sense strand starting at position 2751 of SEQ ID NO: 1561948
gguugaggcuuaaggauga

SEQ ID NO: 1710358 - RNA, 19 nt, Artificial Sequence
  Description of Artificial Sequence: Synthetic oligonucleotide
  Antisense strand to SEQ ID NO: 1710357
ucauccuuaagccucaacc

SEQ ID NO: 1710359 - RNA, 19 nt, Artificial Sequence
  Description of Artificial Sequence: Synthetic oligonucleotide
  Sense strand starting at position 2762 of SEQ ID NO: 1561948
aaggaugagugcuagaaau

SEQ ID NO: 1710360 - RNA, 19 nt, Artificial Sequence
  Description of Artificial Sequence: Synthetic oligonucleotide
  Antisense strand to SEQ ID NO: 1710359
auuucuagcacucauccuu

SEQ ID NO: 1710361 - RNA, 19 nt, Artificial Sequence
  Description of Artificial Sequence: Synthetic oligonucleotide
  Sense strand starting at position 2787 of SEQ ID NO: 1561948
gcaaguaauugauuccagu

SEQ ID NO: 1710362 - RNA, 19 nt, Artificial Sequence
  Description of Artificial Sequence: Synthetic oligonucleotide
  Antisense strand to SEQ ID NO: 1710361
acuggaaucaauuacuugc

SEQ ID NO: 1710363 - RNA, 19 nt, Artificial Sequence
  Description of Artificial Sequence: Synthetic oligonucleotide
  Sense strand starting at position 2800 of SEQ ID NO: 1561948
uccaguuaaccgcgagaga

SEQ ID NO: 1710364 - RNA, 19 nt, Artificial Sequence
  Description of Artificial Sequence: Synthetic oligonucleotide
  Antisense strand to SEQ ID NO: 1710363
ucucucgcgguuaacugga

SEQ ID NO: 1710365 - RNA, 19 nt, Artificial Sequence
  Description of Artificial Sequence: Synthetic oligonucleotide
  Sense strand starting at position 3365 of SEQ ID NO: 1561948
ucuuuaguguggucucuuu

SEQ ID NO: 1710366 - RNA, 19 nt, Artificial Sequence
  Description of Artificial Sequence: Synthetic oligonucleotide
  Antisense strand to SEQ ID NO: 1710365
aaagagaccacacuaaaga

SEQ ID NO: 1710367 - RNA, 19 nt, Artificial Sequence
  Description of Artificial Sequence: Synthetic oligonucleotide
  Sense strand starting at position 3477 of SEQ ID NO: 1561948
cugaacuuucccgggacuu

SEQ ID NO: 1710368 - RNA, 19 nt, Artificial Sequence
  Description of Artificial Sequence: Synthetic oligonucleotide
  Antisense strand to SEQ ID NO: 1710367
aagucccgggaaaguucag

SEQ ID NO: 1710369 - RNA, 19 nt, Artificial Sequence
  Description of Artificial Sequence: Synthetic oligonucleotide
  Sense strand starting at position 3692 of SEQ ID NO: 1561948
ggucuagucuucccacaac

SEQ ID NO: 1710370 - RNA, 19 nt, Artificial Sequence
  Description of Artificial Sequence: Synthetic oligonucleotide
  Antisense strand to SEQ ID NO: 1710369
guugugggaagacuagacc

SEQ ID NO: 1710371 - RNA, 19 nt, Artificial Sequence
  Description of Artificial Sequence: Synthetic oligonucleotide
  Sense strand starting at position 3885 of SEQ ID NO: 1561948
augugacgugggugacaau

SEQ ID NO: 1710372 - RNA, 19 nt, Artificial Sequence
  Description of Artificial Sequence: Synthetic oligonucleotide
  Antisense strand to SEQ ID NO: 1710371
auugucacccacgucacau

SEQ ID NO: 1710373 - RNA, 19 nt, Artificial Sequence
  Description of Artificial Sequence: Synthetic oligonucleotide
  Sense strand starting at position 3896 of SEQ ID NO: 1561948
gugacaauggcccagguua

SEQ ID NO: 1710374 - RNA, 19 nt, Artificial Sequence
  Description of Artificial Sequence: Synthetic oligonucleotide
  Antisense strand to SEQ ID NO: 1710373
uaaccugggccauugucac

SEQ ID NO: 1710375 - RNA, 19 nt, Artificial Sequence
  Description of Artificial Sequence: Synthetic oligonucleotide
  Sense strand starting at position 3898 of SEQ ID NO: 1561948
gacaauggcccagguuaga

SEQ ID NO: 1710376 - RNA, 19 nt, Artificial Sequence
  Description of Artificial Sequence: Synthetic oligonucleotide
  Antisense strand to SEQ ID NO: 1710375
ucuaaccugggccauuguc

SEQ ID NO: 1710377 - RNA, 19 nt, Artificial Sequence
  Description of Artificial Sequence: Synthetic oligonucleotide
  Sense strand starting at position 14 of SEQ ID NO: 1561949
uugcuauguguaugaucca

SEQ ID NO: 1710378 - RNA, 19 nt, Artificial Sequence
  Description of Artificial Sequence: Synthetic oligonucleotide
  Antisense strand to SEQ ID NO: 1710377
uggaucauacacauagcaa

SEQ ID NO: 1710379 - RNA, 19 nt, Artificial Sequence
  Description of Artificial Sequence: Synthetic oligonucleotide
  Sense strand starting at position 142 of SEQ ID NO: 1561949
uuguuaaagcuggguugau

SEQ ID NO: 1710380 - RNA, 19 nt, Artificial Sequence
  Description of Artificial Sequence: Synthetic oligonucleotide
  Antisense strand to SEQ ID NO: 1710379
aucaacccagcuuuaacaa

SEQ ID NO: 1710381 - RNA, 19 nt, Artificial Sequence
  Description of Artificial Sequence: Synthetic oligonucleotide
  Sense strand starting at position 143 of SEQ ID NO: 1561949
uguuaaagcuggguugauu

SEQ ID NO: 1710382 - RNA, 19 nt, Artificial Sequence
  Description of Artificial Sequence: Synthetic oligonucleotide
  Antisense strand to SEQ ID NO: 1710381
aaucaacccagcuuuaaca

SEQ ID NO: 1710383 - RNA, 19 nt, Artificial Sequence
  Description of Artificial Sequence: Synthetic oligonucleotide
  Sense strand starting at position 194 of SEQ ID NO: 1561949
cuuugagagcuguaguuaa

SEQ ID NO: 1710384 - RNA, 19 nt, Artificial Sequence
  Description of Artificial Sequence: Synthetic oligonucleotide
  Antisense strand to SEQ ID NO: 1710383
uuaacuacagcucucaaag

SEQ ID NO: 1710385 - RNA, 19 nt, Artificial Sequence
  Description of Artificial Sequence: Synthetic oligonucleotide
  Sense strand starting at position 209 of SEQ ID NO: 1561949
uuaagaaugccgugugaac

SEQ ID NO: 1710386 - RNA, 19 nt, Artificial Sequence
  Description of Artificial Sequence: Synthetic oligonucleotide
  Antisense strand to SEQ ID NO: 1710385
guucacacggcauucuuaa

SEQ ID NO: 1710387 - RNA, 19 nt, Artificial Sequence
  Description of Artificial Sequence: Synthetic oligonucleotide
  Sense strand starting at position 211 of SEQ ID NO: 1561949
aagaaugccgugugaacuu

SEQ ID NO: 1710388 - RNA, 19 nt, Artificial Sequence
  Description of Artificial Sequence: Synthetic oligonucleotide
  Antisense strand to SEQ ID NO: 1710387
aaguucacacggcauucuu

SEQ ID NO: 1710389 - RNA, 19 nt, Artificial Sequence
  Description of Artificial Sequence: Synthetic oligonucleotide
  Sense strand starting at position 220 of SEQ ID NO: 1561949
gugugaacuucuccaccuu

SEQ ID NO: 1710390 - RNA, 19 nt, Artificial Sequence
  Description of Artificial Sequence: Synthetic oligonucleotide
  Antisense strand to SEQ ID NO: 1710389
aagguggagaaguucacac

SEQ ID NO: 1710391 - RNA, 19 nt, Artificial Sequence
  Description of Artificial Sequence: Synthetic oligonucleotide
  Sense strand starting at position 238 of SEQ ID NO: 1561949
uuucgcgucauuuaagaac

SEQ ID NO: 1710392 - RNA, 19 nt, Artificial Sequence
  Description of Artificial Sequence: Synthetic oligonucleotide
  Antisense strand to SEQ ID NO: 1710391
guucuuaaaugacgcgaaa

SEQ ID NO: 1710393 - RNA, 19 nt, Artificial Sequence
  Description of Artificial Sequence: Synthetic oligonucleotide
  Sense strand starting at position 251 of SEQ ID NO: 1561949
aagaacuucuaggaggaga

SEQ ID NO: 1710394 - RNA, 19 nt, Artificial Sequence
  Description of Artificial Sequence: Synthetic oligonucleotide
  Antisense strand to SEQ ID NO: 1710393
ucuccuccuagaaguucuu

SEQ ID NO: 1710395 - RNA, 19 nt, Artificial Sequence
  Description of Artificial Sequence: Synthetic oligonucleotide
  Sense strand starting at position 2197 of SEQ ID NO: 1561949
cgagcaaacaauggucauu

SEQ ID NO: 1710396 - RNA, 19 nt, Artificial Sequence
  Description of Artificial Sequence: Synthetic oligonucleotide
  Antisense strand to SEQ ID NO: 1710395
aaugaccauuguuugcucg

SEQ ID NO: 1710397 - RNA, 19 nt, Artificial Sequence
  Description of Artificial Sequence: Synthetic oligonucleotide
  Sense strand starting at position 2479 of SEQ ID NO: 1561949
uaaagugacuucgcaccaa

SEQ ID NO: 1710398 - RNA, 19 nt, Artificial Sequence
  Description of Artificial Sequence: Synthetic oligonucleotide
  Antisense strand to SEQ ID NO: 1710397
uuggugcgaagucacuuua

SEQ ID NO: 1710399 - RNA, 19 nt, Artificial Sequence
  Description of Artificial Sequence: Synthetic oligonucleotide
  Sense strand starting at position 2493 of SEQ ID NO: 1561949
accaaaguccgguauaauu

SEQ ID NO: 1710400 - RNA, 19 nt, Artificial Sequence
  Description of Artificial Sequence: Synthetic oligonucleotide
  Antisense strand to SEQ ID NO: 1710399
aauuauaccggacuuuggu

SEQ ID NO: 1710401 - RNA, 19 nt, Artificial Sequence
  Description of Artificial Sequence: Synthetic oligonucleotide
  Sense strand starting at position 2565 of SEQ ID NO: 1561949
cuucguccucuccaguuau

SEQ ID NO: 1710402 - RNA, 19 nt, Artificial Sequence
  Description of Artificial Sequence: Synthetic oligonucleotide
  Antisense strand to SEQ ID NO: 1710401
auaacuggagaggacgaag

SEQ ID NO: 1710403 - RNA, 19 nt, Artificial Sequence
  Description of Artificial Sequence: Synthetic oligonucleotide
  Sense strand starting at position 2819 of SEQ ID NO: 1561949
gauaaauacgcagaugcua

SEQ ID NO: 1710404 - RNA, 19 nt, Artificial Sequence
  Description of Artificial Sequence: Synthetic oligonucleotide
  Antisense strand to SEQ ID NO: 1710403
uagcaucugcguauuuauc

SEQ ID NO: 1710405 - RNA, 19 nt, Artificial Sequence
  Description of Artificial Sequence: Synthetic oligonucleotide
  Sense strand starting at position 2827 of SEQ ID NO: 1561949
cgcagaugcuaacuuguaa

SEQ ID NO: 1710406 - RNA, 19 nt, Artificial Sequence
  Description of Artificial Sequence: Synthetic oligonucleotide
  Antisense strand to SEQ ID NO: 1710405
uuacaaguuagcaucugcg

SEQ ID NO: 1710407 - RNA, 19 nt, Artificial Sequence
  Description of Artificial Sequence: Synthetic oligonucleotide
  Sense strand starting at position 2838 of SEQ ID NO: 1561949
acuuguaaguauucuguuu

SEQ ID NO: 1710408 - RNA, 19 nt, Artificial Sequence
  Description of Artificial Sequence: Synthetic oligonucleotide
  Antisense strand to SEQ ID NO: 1710407
aaacagaauacuuacaagu

SEQ ID NO: 1710409 - RNA, 19 nt, Artificial Sequence
  Description of Artificial Sequence: Synthetic oligonucleotide
  Sense strand starting at position 2928 of SEQ ID NO: 1561949
ugaguuugcacuuguaaag

SEQ ID NO: 1710410 - RNA, 19 nt, Artificial Sequence
  Description of Artificial Sequence: Synthetic oligonucleotide
  Antisense strand to SEQ ID NO: 1710409
cuuuacaagugcaaacuca

SEQ ID NO: 1710411 - RNA, 19 nt, Artificial Sequence
  Description of Artificial Sequence: Synthetic oligonucleotide
  Sense strand starting at position 3026 of SEQ ID NO: 1561949
ccaucacuaccgugaucaa

SEQ ID NO: 1710412 - RNA, 19 nt, Artificial Sequence
  Description of Artificial Sequence: Synthetic oligonucleotide
  Antisense strand to SEQ ID NO: 1710411
uugaucacgguagugaugg

SEQ ID NO: 1710413 - RNA, 19 nt, Artificial Sequence
  Description of Artificial Sequence: Synthetic oligonucleotide
  Sense strand starting at position 3074 of SEQ ID NO: 1561949
uccaaauauuucuaguugu

SEQ ID NO: 1710414 - RNA, 19 nt, Artificial Sequence
  Description of Artificial Sequence: Synthetic oligonucleotide
  Antisense strand to SEQ ID NO: 1710413
acaacuagaaauauuugga

SEQ ID NO: 1710415 - RNA, 19 nt, Artificial Sequence
  Description of Artificial Sequence: Synthetic oligonucleotide
  Sense strand starting at position 3080 of SEQ ID NO: 1561949
uauuucuaguuguucgcaa

SEQ ID NO: 1710416 - RNA, 19 nt, Artificial Sequence
  Description of Artificial Sequence: Synthetic oligonucleotide
  Antisense strand to SEQ ID NO: 1710415
uugcgaacaacuagaaaua

SEQ ID NO: 1710417 - RNA, 19 nt, Artificial Sequence
  Description of Artificial Sequence: Synthetic oligonucleotide
  Sense strand starting at position 3173 of SEQ ID NO: 1561949
aauuguaguuucuuuggaa

SEQ ID NO: 1710418 - RNA, 19 nt, Artificial Sequence
  Description of Artificial Sequence: Synthetic oligonucleotide
  Antisense strand to SEQ ID NO: 1710417
uuccaaagaaacuacaauu

SEQ ID NO: 1710419 - RNA, 19 nt, Artificial Sequence
  Description of Artificial Sequence: Synthetic oligonucleotide
  Sense strand starting at position 3174 of SEQ ID NO: 1561949
auuguaguuucuuuggaaa

SEQ ID NO: 1710420 - RNA, 19 nt, Artificial Sequence
  Description of Artificial Sequence: Synthetic oligonucleotide
  Antisense strand to SEQ ID NO: 1710419
uuuccaaagaaacuacaau

SEQ ID NO: 1710421 - RNA, 19 nt, Artificial Sequence
  Description of Artificial Sequence: Synthetic oligonucleotide
  Sense strand starting at position 3321 of SEQ ID NO: 1561949
gugugcaaagcauauugau

SEQ ID NO: 1710422 - RNA, 19 nt, Artificial Sequence
  Description of Artificial Sequence: Synthetic oligonucleotide
  Antisense strand to SEQ ID NO: 1710421
aucaauaugcuuugcacac

SEQ ID NO: 1710423 - RNA, 19 nt, Artificial Sequence
  Description of Artificial Sequence: Synthetic oligonucleotide
  Sense strand starting at position 3439 of SEQ ID NO: 1561949
caaggagagugcuuucuua

SEQ ID NO: 1710424 - RNA, 19 nt, Artificial Sequence
  Description of Artificial Sequence: Synthetic oligonucleotide
  Antisense strand to SEQ ID NO: 1710423
uaagaaagcacucuccuug

SEQ ID NO: 1710425 - RNA, 19 nt, Artificial Sequence
  Description of Artificial Sequence: Synthetic oligonucleotide
  Sense strand starting at position 3443 of SEQ ID NO: 1561949
gagagugcuuucuuaagca

SEQ ID NO: 1710426 - RNA, 19 nt, Artificial Sequence
  Description of Artificial Sequence: Synthetic oligonucleotide
  Antisense strand to SEQ ID NO: 1710425
ugcuuaagaaagcacucuc

SEQ ID NO: 1710427 - RNA, 19 nt, Artificial Sequence
  Description of Artificial Sequence: Synthetic oligonucleotide
  Sense strand starting at position 3447 of SEQ ID NO: 1561949
gugcuuucuuaagcaauau

SEQ ID NO: 1710428 - RNA, 19 nt, Artificial Sequence
  Description of Artificial Sequence: Synthetic oligonucleotide
  Antisense strand to SEQ ID NO: 1710427
auauugcuuaagaaagcac

SEQ ID NO: 1710429 - RNA, 19 nt, Artificial Sequence
  Description of Artificial Sequence: Synthetic oligonucleotide
  Sense strand starting at position 3521 of SEQ ID NO: 1561949
gacaguacaugucuugaag

SEQ ID NO: 1710430 - RNA, 19 nt, Artificial Sequence
  Description of Artificial Sequence: Synthetic oligonucleotide
  Antisense strand to SEQ ID NO: 1710429
cuucaagacauguacuguc

SEQ ID NO: 1710431 - RNA, 19 nt, Artificial Sequence
  Description of Artificial Sequence: Synthetic oligonucleotide
  Sense strand starting at position 3524 of SEQ ID NO: 1561949
aguacaugucuugaaggca

SEQ ID NO: 1710432 - RNA, 19 nt, Artificial Sequence
  Description of Artificial Sequence: Synthetic oligonucleotide
  Antisense strand to SEQ ID NO: 1710431
ugccuucaagacauguacu

SEQ ID NO: 1710433 - RNA, 19 nt, Artificial Sequence
  Description of Artificial Sequence: Synthetic oligonucleotide
  Sense strand starting at position 3538 of SEQ ID NO: 1561949
aggcaagaacaguguuaca

SEQ ID NO: 1710434 - RNA, 19 nt, Artificial Sequence
  Description of Artificial Sequence: Synthetic oligonucleotide
  Antisense strand to SEQ ID NO: 1710433
uguaacacuguucuugccu

SEQ ID NO: 1710435 - RNA, 19 nt, Artificial Sequence
  Description of Artificial Sequence: Synthetic oligonucleotide
  Sense strand starting at position 3580 of SEQ ID NO: 1561949
agcccuuugguggaaaugu

SEQ ID NO: 1710436 - RNA, 19 nt, Artificial Sequence
  Description of Artificial Sequence: Synthetic oligonucleotide
  Antisense strand to SEQ ID NO: 1710435
acauuuccaccaaagggcu

SEQ ID NO: 1710437 - RNA, 19 nt, Artificial Sequence
  Description of Artificial Sequence: Synthetic oligonucleotide
  Sense strand starting at position 3590 of SEQ ID NO: 1561949
uggaaauguucuccauggu

SEQ ID NO: 1710438 - RNA, 19 nt, Artificial Sequence
  Description of Artificial Sequence: Synthetic oligonucleotide
  Antisense strand to SEQ ID NO: 1710437
accauggagaacauuucca

SEQ ID NO: 1710439 - RNA, 19 nt, Artificial Sequence
  Description of Artificial Sequence: Synthetic oligonucleotide
  Sense strand starting at position 3591 of SEQ ID NO: 1561949
ggaaauguucuccaugguu

SEQ ID NO: 1710440 - RNA, 19 nt, Artificial Sequence
  Description of Artificial Sequence: Synthetic oligonucleotide
  Antisense strand to SEQ ID NO: 1710439
aaccauggagaacauuucc

SEQ ID NO: 1710441 - RNA, 19 nt, Artificial Sequence
  Description of Artificial Sequence: Synthetic oligonucleotide
  Sense strand starting at position 3715 of SEQ ID NO: 1561949
gugacagacgaauguuaag

SEQ ID NO: 1710442 - RNA, 19 nt, Artificial Sequence
  Description of Artificial Sequence: Synthetic oligonucleotide
  Antisense strand to SEQ ID NO: 1710441
cuuaacauucgucugucac

SEQ ID NO: 1710443 - RNA, 19 nt, Artificial Sequence
  Description of Artificial Sequence: Synthetic oligonucleotide
  Sense strand starting at position 3724 of SEQ ID NO: 1561949
gaauguuaagaguaauguu

SEQ ID NO: 1710444 - RNA, 19 nt, Artificial Sequence
  Description of Artificial Sequence: Synthetic oligonucleotide
  Antisense strand to SEQ ID NO: 1710443
aacauuacucuuaacauuc

SEQ ID NO: 1710445 - RNA, 19 nt, Artificial Sequence
  Description of Artificial Sequence: Synthetic oligonucleotide
  Sense strand starting at position 3783 of SEQ ID NO: 1561949
guuuacaaacaucaguauu

SEQ ID NO: 1710446 - RNA, 19 nt, Artificial Sequence
  Description of Artificial Sequence: Synthetic oligonucleotide
  Antisense strand to SEQ ID NO: 1710445
aauacugauguuuguaaac

SEQ ID NO: 1710447 - RNA, 19 nt, Artificial Sequence
  Description of Artificial Sequence: Synthetic oligonucleotide
  Sense strand starting at position 3796 of SEQ ID NO: 1561949
aguauugacuuagcaagau

SEQ ID NO: 1710448 - RNA, 19 nt, Artificial Sequence
  Description of Artificial Sequence: Synthetic oligonucleotide
  Antisense strand to SEQ ID NO: 1710447
aucuugcuaagucaauacu

SEQ ID NO: 1710449 - RNA, 19 nt, Artificial Sequence
  Description of Artificial Sequence: Synthetic oligonucleotide
  Sense strand starting at position 3811 of SEQ ID NO: 1561949
agauuaauauugcuacagu

SEQ ID NO: 1710450 - RNA, 19 nt, Artificial Sequence
  Description of Artificial Sequence: Synthetic oligonucleotide
  Antisense strand to SEQ ID NO: 1710449
acuguagcaauauuaaucu

SEQ ID NO: 1710451 - RNA, 19 nt, Artificial Sequence
  Description of Artificial Sequence: Synthetic oligonucleotide
  Sense strand starting at position 3946 of SEQ ID NO: 1561949
agaagcacuuauguaugua

SEQ ID NO: 1710452 - RNA, 19 nt, Artificial Sequence
  Description of Artificial Sequence: Synthetic oligonucleotide
  Antisense strand to SEQ ID NO: 1710451
uacauacauaagugcuucu

SEQ ID NO: 1710453 - RNA, 19 nt, Artificial Sequence
  Description of Artificial Sequence: Synthetic oligonucleotide
  Sense strand starting at position 3949 of SEQ ID NO: 1561949
agcacuuauguauguauuu

SEQ ID NO: 1710454 - RNA, 19 nt, Artificial Sequence
  Description of Artificial Sequence: Synthetic oligonucleotide
  Antisense strand to SEQ ID NO: 1710453
aaauacauacauaagugcu

SEQ ID NO: 1710455 - RNA, 19 nt, Artificial Sequence
  Description of Artificial Sequence: Synthetic oligonucleotide
  Sense strand starting at position 3950 of SEQ ID NO: 1561949
gcacuuauguauguauuua

SEQ ID NO: 1710456 - RNA, 19 nt, Artificial Sequence
  Description of Artificial Sequence: Synthetic oligonucleotide
  Antisense strand to SEQ ID NO: 1710455
uaaauacauacauaagugc

SEQ ID NO: 1710457 - RNA, 19 nt, Artificial Sequence
  Description of Artificial Sequence: Synthetic oligonucleotide
  Sense strand starting at position 674 of SEQ ID NO: 1561950
gcagcuuguccacgaguca

SEQ ID NO: 1710458 - RNA, 19 nt, Artificial Sequence
  Description of Artificial Sequence: Synthetic oligonucleotide
  Antisense strand to SEQ ID NO: 1710457
ugacucguggacaagcugc

SEQ ID NO: 1710459 - RNA, 19 nt, Artificial Sequence
  Description of Artificial Sequence: Synthetic oligonucleotide
  Sense strand starting at position 859 of SEQ ID NO: 1561950
auaugcgauuccuuuggca

SEQ ID NO: 1710460 - RNA, 19 nt, Artificial Sequence
  Description of Artificial Sequence: Synthetic oligonucleotide
  Antisense strand to SEQ ID NO: 1710459
ugccaaaggaaucgcauau

SEQ ID NO: 1710461 - RNA, 19 nt, Artificial Sequence
  Description of Artificial Sequence: Synthetic oligonucleotide
  Sense strand starting at position 880 of SEQ ID NO: 1561950
ggauuccuuuagcagggaa

SEQ ID NO: 1710462 - RNA, 19 nt, Artificial Sequence
  Description of Artificial Sequence: Synthetic oligonucleotide
  Antisense strand to SEQ ID NO: 1710461
uucccugcuaaaggaaucc

SEQ ID NO: 1710463 - RNA, 19 nt, Artificial Sequence
  Description of Artificial Sequence: Synthetic oligonucleotide
  Sense strand starting at position 882 of SEQ ID NO: 1561950
auuccuuuagcagggaauu

SEQ ID NO: 1710464 - RNA, 19 nt, Artificial Sequence
  Description of Artificial Sequence: Synthetic oligonucleotide
  Antisense strand to SEQ ID NO: 1710463
aauucccugcuaaaggaau

SEQ ID NO: 1710465 - RNA, 19 nt, Artificial Sequence
  Description of Artificial Sequence: Synthetic oligonucleotide
  Sense strand starting at position 893 of SEQ ID NO: 1561950
agggaauucuuccugcaaa

SEQ ID NO: 1710466 - RNA, 19 nt, Artificial Sequence
  Description of Artificial Sequence: Synthetic oligonucleotide
  Antisense strand to SEQ ID NO: 1710465
uuugcaggaagaauucccu

SEQ ID NO: 1710467 - RNA, 19 nt, Artificial Sequence
  Description of Artificial Sequence: Synthetic oligonucleotide
  Sense strand starting at position 1139 of SEQ ID NO: 1561950
ccguuagcucccuugucua

SEQ ID NO: 1710468 - RNA, 19 nt, Artificial Sequence
  Description of Artificial Sequence: Synthetic oligonucleotide
  Antisense strand to SEQ ID NO: 1710467
uagacaagggagcuaacgg

SEQ ID NO: 1710469 - RNA, 19 nt, Artificial Sequence
  Description of Artificial Sequence: Synthetic oligonucleotide
  Sense strand starting at position 1527 of SEQ ID NO: 1561950
cgcuaaaugccugggugau

SEQ ID NO: 1710470 - RNA, 19 nt, Artificial Sequence
  Description of Artificial Sequence: Synthetic oligonucleotide
  Antisense strand to SEQ ID NO: 1710469
aucacccaggcauuuagcg

SEQ ID NO: 1710471 - RNA, 19 nt, Artificial Sequence
  Description of Artificial Sequence: Synthetic oligonucleotide
  Sense strand starting at position 1528 of SEQ ID NO: 1561950
gcuaaaugccugggugauc

SEQ ID NO: 1710472 - RNA, 19 nt, Artificial Sequence
  Description of Artificial Sequence: Synthetic oligonucleotide
  Antisense strand to SEQ ID NO: 1710471
gaucacccaggcauuuagc

SEQ ID NO: 1710473 - RNA, 19 nt, Artificial Sequence
  Description of Artificial Sequence: Synthetic oligonucleotide
  Sense strand starting at position 1574 of SEQ ID NO: 1561950
gagucuuuguucccuggca

SEQ ID NO: 1710474 - RNA, 19 nt, Artificial Sequence
  Description of Artificial Sequence: Synthetic oligonucleotide
  Antisense strand to SEQ ID NO: 1710473
ugccagggaacaaagacuc

SEQ ID NO: 1710475 - RNA, 19 nt, Artificial Sequence
  Description of Artificial Sequence: Synthetic oligonucleotide
  Sense strand starting at position 2194 of SEQ ID NO: 1561950
ccacgacucuggguagagu

SEQ ID NO: 1710476 - RNA, 19 nt, Artificial Sequence
  Description of Artificial Sequence: Synthetic oligonucleotide
  Antisense strand to SEQ ID NO: 1710475
acucuacccagagucgugg

SEQ ID NO: 1710477 - RNA, 19 nt, Artificial Sequence
  Description of Artificial Sequence: Synthetic oligonucleotide
  Sense strand starting at position 2195 of SEQ ID NO: 1561950
cacgacucuggguagagua

SEQ ID NO: 1710478 - RNA, 19 nt, Artificial Sequence
  Description of Artificial Sequence: Synthetic oligonucleotide
  Antisense strand to SEQ ID NO: 1710477
uacucuacccagagucgug

SEQ ID NO: 1710479 - RNA, 19 nt, Artificial Sequence
  Description of Artificial Sequence: Synthetic oligonucleotide
  Sense strand starting at position 2229 of SEQ ID NO: 1561950
ggugcaggucucuuagugu

SEQ ID NO: 1710480 - RNA, 19 nt, Artificial Sequence
  Description of Artificial Sequence: Synthetic oligonucleotide
  Antisense strand to SEQ ID NO: 1710479
acacuaagagaccugcacc

SEQ ID NO: 1710481 - RNA, 19 nt, Artificial Sequence
  Description of Artificial Sequence: Synthetic oligonucleotide
  Sense strand starting at position 2264 of SEQ ID NO: 1561950
gucccuggccugcaaauuu

SEQ ID NO: 1710482 - RNA, 19 nt, Artificial Sequence
  Description of Artificial Sequence: Synthetic oligonucleotide
  Antisense strand to SEQ ID NO: 1710481
aaauuugcaggccagggac

SEQ ID NO: 1710483 - RNA, 19 nt, Artificial Sequence
  Description of Artificial Sequence: Synthetic oligonucleotide
  Sense strand starting at position 2273 of SEQ ID NO: 1561950
cugcaaauuugagcucagu

SEQ ID NO: 1710484 - RNA, 19 nt, Artificial Sequence
  Description of Artificial Sequence: Synthetic oligonucleotide
  Antisense strand to SEQ ID NO: 1710483
acugagcucaaauuugcag

SEQ ID NO: 1710485 - RNA, 19 nt, Artificial Sequence
  Description of Artificial Sequence: Synthetic oligonucleotide
  Sense strand starting at position 2431 of SEQ ID NO: 1561950
ccugauacugaaugaguuu

SEQ ID NO: 1710486 - RNA, 19 nt, Artificial Sequence
  Description of Artificial Sequence: Synthetic oligonucleotide
  Antisense strand to SEQ ID NO: 1710485
aaacucauucaguaucagg

SEQ ID NO: 1710487 - RNA, 19 nt, Artificial Sequence
  Description of Artificial Sequence: Synthetic oligonucleotide
  Sense strand starting at position 2485 of SEQ ID NO: 1561950
gcgcguaacccgucugauu

SEQ ID NO: 1710488 - RNA, 19 nt, Artificial Sequence
  Description of Artificial Sequence: Synthetic oligonucleotide
  Antisense strand to SEQ ID NO: 1710487
aaucagacggguuacgcgc

SEQ ID NO: 1710489 - RNA, 19 nt, Artificial Sequence
  Description of Artificial Sequence: Synthetic oligonucleotide
  Sense strand starting at position 2486 of SEQ ID NO: 1561950
cgcguaacccgucugauuc

SEQ ID NO: 1710490 - RNA, 19 nt, Artificial Sequence
  Description of Artificial Sequence: Synthetic oligonucleotide
  Antisense strand to SEQ ID NO: 1710489
gaaucagacggguuacgcg

SEQ ID NO: 1710491 - RNA, 19 nt, Artificial Sequence
  Description of Artificial Sequence: Synthetic oligonucleotide
  Sense strand starting at position 2493 of SEQ ID NO: 1561950
cccgucugauucuuuacau

SEQ ID NO: 1710492 - RNA, 19 nt, Artificial Sequence
  Description of Artificial Sequence: Synthetic oligonucleotide
  Antisense strand to SEQ ID NO: 1710491
auguaaagaaucagacggg

SEQ ID NO: 1710493 - RNA, 19 nt, Artificial Sequence
  Description of Artificial Sequence: Synthetic oligonucleotide
  Sense strand starting at position 2494 of SEQ ID NO: 1561950
ccgucugauucuuuacauc

SEQ ID NO: 1710494 - RNA, 19 nt, Artificial Sequence
  Description of Artificial Sequence: Synthetic oligonucleotide
  Antisense strand to SEQ ID NO: 1710493
gauguaaagaaucagacgg

SEQ ID NO: 1710495 - RNA, 19 nt, Artificial Sequence
  Description of Artificial Sequence: Synthetic oligonucleotide
  Sense strand starting at position 2545 of SEQ ID NO: 1561950
gguggaggucgcuacugua

SEQ ID NO: 1710496 - RNA, 19 nt, Artificial Sequence
  Description of Artificial Sequence: Synthetic oligonucleotide
  Antisense strand to SEQ ID NO: 1710495
uacaguagcgaccuccacc

SEQ ID NO: 1710497 - RNA, 19 nt, Artificial Sequence
  Description of Artificial Sequence: Synthetic oligonucleotide
  Sense strand starting at position 2601 of SEQ ID NO: 1561950
gcaguagucacccgguauc

SEQ ID NO: 1710498 - RNA, 19 nt, Artificial Sequence
  Description of Artificial Sequence: Synthetic oligonucleotide
  Antisense strand to SEQ ID NO: 1710497
gauaccgggugacuacugc

SEQ ID NO: 1710499 - RNA, 19 nt, Artificial Sequence
  Description of Artificial Sequence: Synthetic oligonucleotide
  Sense strand starting at position 2604 of SEQ ID NO: 1561950
guagucacccgguaucugu

SEQ ID NO: 1710500 - RNA, 19 nt, Artificial Sequence
  Description of Artificial Sequence: Synthetic oligonucleotide
  Antisense strand to SEQ ID NO: 1710499
acagauaccgggugacuac

SEQ ID NO: 1710501 - RNA, 19 nt, Artificial Sequence
  Description of Artificial Sequence: Synthetic oligonucleotide
  Sense strand starting at position 2612 of SEQ ID NO: 1561950
ccgguaucuguaggaggga

SEQ ID NO: 1710502 - RNA, 19 nt, Artificial Sequence
  Description of Artificial Sequence: Synthetic oligonucleotide
  Antisense strand to SEQ ID NO: 1710501
ucccuccuacagauaccgg

SEQ ID NO: 1710503 - RNA, 19 nt, Artificial Sequence
  Description of Artificial Sequence: Synthetic oligonucleotide
  Sense strand starting at position 2667 of SEQ ID NO: 1561950
gaaugagcucuacggagaa

SEQ ID NO: 1710504 - RNA, 19 nt, Artificial Sequence
  Description of Artificial Sequence: Synthetic oligonucleotide
  Antisense strand to SEQ ID NO: 1710503
uucuccguagagcucauuc

SEQ ID NO: 1710505 - RNA, 19 nt, Artificial Sequence
  Description of Artificial Sequence: Synthetic oligonucleotide
  Sense strand starting at position 2669 of SEQ ID NO: 1561950
augagcucuacggagaagu

SEQ ID NO: 1710506 - RNA, 19 nt, Artificial Sequence
  Description of Artificial Sequence: Synthetic oligonucleotide
  Antisense strand to SEQ ID NO: 1710505
acuucuccguagagcucau

SEQ ID NO: 1710507 - RNA, 19 nt, Artificial Sequence
  Description of Artificial Sequence: Synthetic oligonucleotide
  Sense strand starting at position 2679 of SEQ ID NO: 1561950
cggagaagugguuggaaua

SEQ ID NO: 1710508 - RNA, 19 nt, Artificial Sequence
  Description of Artificial Sequence: Synthetic oligonucleotide
  Antisense strand to SEQ ID NO: 1710507
uauuccaaccacuucuccg

SEQ ID NO: 1710509 - RNA, 19 nt, Artificial Sequence
  Description of Artificial Sequence: Synthetic oligonucleotide
  Sense strand starting at position 2680 of SEQ ID NO: 1561950
ggagaagugguuggaauau

SEQ ID NO: 1710510 - RNA, 19 nt, Artificial Sequence
  Description of Artificial Sequence: Synthetic oligonucleotide
  Antisense strand to SEQ ID NO: 1710509
auauuccaaccacuucucc

SEQ ID NO: 1710511 - RNA, 19 nt, Artificial Sequence
  Description of Artificial Sequence: Synthetic oligonucleotide
  Sense strand starting at position 3124 of SEQ ID NO: 1561950
agcagauggagguguaaug

SEQ ID NO: 1710512 - RNA, 19 nt, Artificial Sequence
  Description of Artificial Sequence: Synthetic oligonucleotide
  Antisense strand to SEQ ID NO: 1710511
cauuacaccuccaucugcu

SEQ ID NO: 1710513 - RNA, 19 nt, Artificial Sequence
  Description of Artificial Sequence: Synthetic oligonucleotide
  Sense strand starting at position 3134 of SEQ ID NO: 1561950
gguguaaugauccaaacga

SEQ ID NO: 1710514 - RNA, 19 nt, Artificial Sequence
  Description of Artificial Sequence: Synthetic oligonucleotide
  Antisense strand to SEQ ID NO: 1710513
ucguuuggaucauuacacc

SEQ ID NO: 1710515 - RNA, 19 nt, Artificial Sequence
  Description of Artificial Sequence: Synthetic oligonucleotide
  Sense strand starting at position 3149 of SEQ ID NO: 1561950
acgaguucaguuuggacaa

SEQ ID NO: 1710516 - RNA, 19 nt, Artificial Sequence
  Description of Artificial Sequence: Synthetic oligonucleotide
  Antisense strand to SEQ ID NO: 1710515
uuguccaaacugaacucgu

SEQ ID NO: 1710517 - RNA, 19 nt, Artificial Sequence
  Description of Artificial Sequence: Synthetic oligonucleotide
  Sense strand starting at position 3194 of SEQ ID NO: 1561950
uugacuuucggagaaguug

SEQ ID NO: 1710518 - RNA, 19 nt, Artificial Sequence
  Description of Artificial Sequence: Synthetic oligonucleotide
  Antisense strand to SEQ ID NO: 1710517
caacuucuccgaaagucaa

SEQ ID NO: 1710519 - RNA, 19 nt, Artificial Sequence
  Description of Artificial Sequence: Synthetic oligonucleotide
  Sense strand starting at position 3376 of SEQ ID NO: 1561950
agcaccuauggcugugaga

SEQ ID NO: 1710520 - RNA, 19 nt, Artificial Sequence
  Description of Artificial Sequence: Synthetic oligonucleotide
  Antisense strand to SEQ ID NO: 1710519
ucucacagccauaggugcu

SEQ ID NO: 1710521 - RNA, 19 nt, Artificial Sequence
  Description of Artificial Sequence: Synthetic oligonucleotide
  Sense strand starting at position 3378 of SEQ ID NO: 1561950
caccuauggcugugagaga

SEQ ID NO: 1710522 - RNA, 19 nt, Artificial Sequence
  Description of Artificial Sequence: Synthetic oligonucleotide
  Antisense strand to SEQ ID NO: 1710521
ucucucacagccauaggug

SEQ ID NO: 1710523 - RNA, 19 nt, Artificial Sequence
  Description of Artificial Sequence: Synthetic oligonucleotide
  Sense strand starting at position 3383 of SEQ ID NO: 1561950
auggcugugagagaugcua

SEQ ID NO: 1710524 - RNA, 19 nt, Artificial Sequence
  Description of Artificial Sequence: Synthetic oligonucleotide
  Antisense strand to SEQ ID NO: 1710523
uagcaucucucacagccau

SEQ ID NO: 1710525 - RNA, 19 nt, Artificial Sequence
  Description of Artificial Sequence: Synthetic oligonucleotide
  Sense strand starting at position 3385 of SEQ ID NO: 1561950
ggcugugagagaugcuaga

SEQ ID NO: 1710526 - RNA, 19 nt, Artificial Sequence
  Description of Artificial Sequence: Synthetic oligonucleotide
  Antisense strand to SEQ ID NO: 1710525
ucuagcaucucucacagcc

SEQ ID NO: 1710527 - RNA, 19 nt, Artificial Sequence
  Description of Artificial Sequence: Synthetic oligonucleotide
  Sense strand starting at position 3624 of SEQ ID NO: 1561950
ggagacaucccaggaagcu

SEQ ID NO: 1710528 - RNA, 19 nt, Artificial Sequence
  Description of Artificial Sequence: Synthetic oligonucleotide
  Antisense strand to SEQ ID NO: 1710527
agcuuccugggaugucucc

SEQ ID NO: 1710529 - RNA, 19 nt, Artificial Sequence
  Description of Artificial Sequence: Synthetic oligonucleotide
  Sense strand starting at position 3633 of SEQ ID NO: 1561950
ccaggaagcuucccgaauu

SEQ ID NO: 1710530 - RNA, 19 nt, Artificial Sequence
  Description of Artificial Sequence: Synthetic oligonucleotide
  Antisense strand to SEQ ID NO: 1710529
aauucgggaagcuuccugg

SEQ ID NO: 1710531 - RNA, 19 nt, Artificial Sequence
  Description of Artificial Sequence: Synthetic oligonucleotide
  Sense strand starting at position 3713 of SEQ ID NO: 1561950
ugcuguuguuaaccaugau

SEQ ID NO: 1710532 - RNA, 19 nt, Artificial Sequence
  Description of Artificial Sequence: Synthetic oligonucleotide
  Antisense strand to SEQ ID NO: 1710531
aucaugguuaacaacagca

SEQ ID NO: 1710533 - RNA, 19 nt, Artificial Sequence
  Description of Artificial Sequence: Synthetic oligonucleotide
  Sense strand starting at position 3716 of SEQ ID NO: 1561950
uguuguuaaccaugaucca

SEQ ID NO: 1710534 - RNA, 19 nt, Artificial Sequence
  Description of Artificial Sequence: Synthetic oligonucleotide
  Antisense strand to SEQ ID NO: 1710533
uggaucaugguuaacaaca

SEQ ID NO: 1710535 - RNA, 19 nt, Artificial Sequence
  Description of Artificial Sequence: Synthetic oligonucleotide
  Sense strand starting at position 3717 of SEQ ID NO: 1561950
guuguuaaccaugauccau

SEQ ID NO: 1710536 - RNA, 19 nt, Artificial Sequence
  Description of Artificial Sequence: Synthetic oligonucleotide
  Antisense strand to SEQ ID NO: 1710535
auggaucaugguuaacaac

SEQ ID NO: 1710537 - RNA, 19 nt, Artificial Sequence
  Description of Artificial Sequence: Synthetic oligonucleotide
  Sense strand starting at position 294 of SEQ ID NO: 1561951
gaccgaaucaauugugugu

SEQ ID NO: 1710538 - RNA, 19 nt, Artificial Sequence
  Description of Artificial Sequence: Synthetic oligonucleotide
  Antisense strand to SEQ ID NO: 1710537
acacacaauugauucgguc

SEQ ID NO: 1710539 - RNA, 19 nt, Artificial Sequence
  Description of Artificial Sequence: Synthetic oligonucleotide
  Sense strand starting at position 1658 of SEQ ID NO: 1561951
cggcgauccgcugguauuu

SEQ ID NO: 1710540 - RNA, 19 nt, Artificial Sequence
  Description of Artificial Sequence: Synthetic oligonucleotide
  Antisense strand to SEQ ID NO: 1710539
aaauaccagcggaucgccg

SEQ ID NO: 1710541 - RNA, 19 nt, Artificial Sequence
  Description of Artificial Sequence: Synthetic oligonucleotide
  Sense strand starting at position 1669 of SEQ ID NO: 1561951
ugguauuugcugcguguca

SEQ ID NO: 1710542 - RNA, 19 nt, Artificial Sequence
  Description of Artificial Sequence: Synthetic oligonucleotide
  Antisense strand to SEQ ID NO: 1710541
ugacacgcagcaaauacca

SEQ ID NO: 1710543 - RNA, 19 nt, Artificial Sequence
  Description of Artificial Sequence: Synthetic oligonucleotide
  Sense strand starting at position 2333 of SEQ ID NO: 1561951
cgggaucccaccuguuaga

SEQ ID NO: 1710544 - RNA, 19 nt, Artificial Sequence
  Description of Artificial Sequence: Synthetic oligonucleotide
  Antisense strand to SEQ ID NO: 1710543
ucuaacaggugggaucccg

SEQ ID NO: 1710545 - RNA, 19 nt, Artificial Sequence
  Description of Artificial Sequence: Synthetic oligonucleotide
  Sense strand starting at position 2965 of SEQ ID NO: 1561951
cugagugcgccuugaccua

SEQ ID NO: 1710546 - RNA, 19 nt, Artificial Sequence
  Description of Artificial Sequence: Synthetic oligonucleotide
  Antisense strand to SEQ ID NO: 1710545
uaggucaaggcgcacucag

SEQ ID NO: 1710547 - RNA, 19 nt, Artificial Sequence
  Description of Artificial Sequence: Synthetic oligonucleotide
  Sense strand starting at position 2980 of SEQ ID NO: 1561951
ccuagaaucucuugcugag

SEQ ID NO: 1710548 - RNA, 19 nt, Artificial Sequence
  Description of Artificial Sequence: Synthetic oligonucleotide
  Antisense strand to SEQ ID NO: 1710547
cucagcaagagauucuagg

SEQ ID NO: 1710549 - RNA, 19 nt, Artificial Sequence
  Description of Artificial Sequence: Synthetic oligonucleotide
  Sense strand starting at position 2982 of SEQ ID NO: 1561951
uagaaucucuugcugagua

SEQ ID NO: 1710550 - RNA, 19 nt, Artificial Sequence
  Description of Artificial Sequence: Synthetic oligonucleotide
  Antisense strand to SEQ ID NO: 1710549
uacucagcaagagauucua

SEQ ID NO: 1710551 - RNA, 19 nt, Artificial Sequence
  Description of Artificial Sequence: Synthetic oligonucleotide
  Sense strand starting at position 2983 of SEQ ID NO: 1561951
agaaucucuugcugaguaa

SEQ ID NO: 1710552 - RNA, 19 nt, Artificial Sequence
  Description of Artificial Sequence: Synthetic oligonucleotide
  Antisense strand to SEQ ID NO: 1710551
uuacucagcaagagauucu

SEQ ID NO: 1710553 - RNA, 19 nt, Artificial Sequence
  Description of Artificial Sequence: Synthetic oligonucleotide
  Sense strand starting at position 2984 of SEQ ID NO: 1561951
gaaucucuugcugaguaaa

SEQ ID NO: 1710554 - RNA, 19 nt, Artificial Sequence
  Description of Artificial Sequence: Synthetic oligonucleotide
  Antisense strand to SEQ ID NO: 1710553
uuuacucagcaagagauuc

SEQ ID NO: 1710555 - RNA, 19 nt, Artificial Sequence
  Description of Artificial Sequence: Synthetic oligonucleotide
  Sense strand starting at position 2986 of SEQ ID NO: 1561951
aucucuugcugaguaaacu

SEQ ID NO: 1710556 - RNA, 19 nt, Artificial Sequence
  Description of Artificial Sequence: Synthetic oligonucleotide
  Antisense strand to SEQ ID NO: 1710555
aguuuacucagcaagagau

SEQ ID NO: 1710557 - RNA, 19 nt, Artificial Sequence
  Description of Artificial Sequence: Synthetic oligonucleotide
  Sense strand starting at position 3038 of SEQ ID NO: 1561951
agaucugaccuuggguaga

SEQ ID NO: 1710558 - RNA, 19 nt, Artificial Sequence
  Description of Artificial Sequence: Synthetic oligonucleotide
  Antisense strand to SEQ ID NO: 1710557
ucuacccaaggucagaucu

SEQ ID NO: 1710559 - RNA, 19 nt, Artificial Sequence
  Description of Artificial Sequence: Synthetic oligonucleotide
  Sense strand starting at position 3150 of SEQ ID NO: 1561951
cuuaacaggucaugaggaa

SEQ ID NO: 1710560 - RNA, 19 nt, Artificial Sequence
  Description of Artificial Sequence: Synthetic oligonucleotide
  Antisense strand to SEQ ID NO: 1710559
uuccucaugaccuguuaag

SEQ ID NO: 1710561 - RNA, 19 nt, Artificial Sequence
  Description of Artificial Sequence: Synthetic oligonucleotide
  Sense strand starting at position 3163 of SEQ ID NO: 1561951
gaggaauugcugcacuucu

SEQ ID NO: 1710562 - RNA, 19 nt, Artificial Sequence
  Description of Artificial Sequence: Synthetic oligonucleotide
  Antisense strand to SEQ ID NO: 1710561
agaagugcagcaauuccuc

SEQ ID NO: 1710563 - RNA, 19 nt, Artificial Sequence
  Description of Artificial Sequence: Synthetic oligonucleotide
  Sense strand starting at position 3259 of SEQ ID NO: 1561951
ccagacuuugucuagugca

SEQ ID NO: 1710564 - RNA, 19 nt, Artificial Sequence
  Description of Artificial Sequence: Synthetic oligonucleotide
  Antisense strand to SEQ ID NO: 1710563
ugcacuagacaaagucugg

SEQ ID NO: 1710565 - RNA, 19 nt, Artificial Sequence
  Description of Artificial Sequence: Synthetic oligonucleotide
  Sense strand starting at position 3262 of SEQ ID NO: 1561951
gacuuugucuagugcagga

SEQ ID NO: 1710566 - RNA, 19 nt, Artificial Sequence
  Description of Artificial Sequence: Synthetic oligonucleotide
  Antisense strand to SEQ ID NO: 1710565
uccugcacuagacaaaguc

SEQ ID NO: 1710567 - RNA, 19 nt, Artificial Sequence
  Description of Artificial Sequence: Synthetic oligonucleotide
  Sense strand starting at position 3279 of SEQ ID NO: 1561951
gaccguuuccugcguagga

SEQ ID NO: 1710568 - RNA, 19 nt, Artificial Sequence
  Description of Artificial Sequence: Synthetic oligonucleotide
  Antisense strand to SEQ ID NO: 1710567
uccuacgcaggaaacgguc

SEQ ID NO: 1710569 - RNA, 19 nt, Artificial Sequence
  Description of Artificial Sequence: Synthetic oligonucleotide
  Sense strand starting at position 3280 of SEQ ID NO: 1561951
accguuuccugcguaggaa

SEQ ID NO: 1710570 - RNA, 19 nt, Artificial Sequence
  Description of Artificial Sequence: Synthetic oligonucleotide
  Antisense strand to SEQ ID NO: 1710569
uuccuacgcaggaaacggu

SEQ ID NO: 1710571 - RNA, 19 nt, Artificial Sequence
  Description of Artificial Sequence: Synthetic oligonucleotide
  Sense strand starting at position 3346 of SEQ ID NO: 1561951
gugccauguccuggcaacu

SEQ ID NO: 1710572 - RNA, 19 nt, Artificial Sequence
  Description of Artificial Sequence: Synthetic oligonucleotide
  Antisense strand to SEQ ID NO: 1710571
aguugccaggacauggcac

SEQ ID NO: 1710573 - RNA, 19 nt, Artificial Sequence
  Description of Artificial Sequence: Synthetic oligonucleotide
  Sense strand starting at position 3548 of SEQ ID NO: 1561951
guguauaccuggcucacuu

SEQ ID NO: 1710574 - RNA, 19 nt, Artificial Sequence
  Description of Artificial Sequence: Synthetic oligonucleotide
  Antisense strand to SEQ ID NO: 1710573
aagugagccagguauacac

SEQ ID NO: 1710575 - RNA, 19 nt, Artificial Sequence
  Description of Artificial Sequence: Synthetic oligonucleotide
  Sense strand starting at position 3651 of SEQ ID NO: 1561951
cacaguaggugccaguaaa

SEQ ID NO: 1710576 - RNA, 19 nt, Artificial Sequence
  Description of Artificial Sequence: Synthetic oligonucleotide
  Antisense strand to SEQ ID NO: 1710575
uuuacuggcaccuacugug

SEQ ID NO: 1710577 - RNA, 19 nt, Artificial Sequence
  Description of Artificial Sequence: Synthetic oligonucleotide
  Sense strand starting at position 3661 of SEQ ID NO: 1561951
gccaguaaaugcugaaaga

SEQ ID NO: 1710578 - RNA, 19 nt, Artificial Sequence
  Description of Artificial Sequence: Synthetic oligonucleotide
  Antisense strand to SEQ ID NO: 1710577
ucuuucagcauuuacuggc

SEQ ID NO: 1710579 - RNA, 19 nt, Artificial Sequence
  Description of Artificial Sequence: Synthetic oligonucleotide
  Sense strand starting at position 3824 of SEQ ID NO: 1561951
gaucuaugcugguaugcau

SEQ ID NO: 1710580 - RNA, 19 nt, Artificial Sequence
  Description of Artificial Sequence: Synthetic oligonucleotide
  Antisense strand to SEQ ID NO: 1710579
augcauaccagcauagauc

SEQ ID NO: 1710581 - RNA, 19 nt, Artificial Sequence
  Description of Artificial Sequence: Synthetic oligonucleotide
  Sense strand starting at position 3912 of SEQ ID NO: 1561951
gggcuucugugauuaagaa

SEQ ID NO: 1710582 - RNA, 19 nt, Artificial Sequence
  Description of Artificial Sequence: Synthetic oligonucleotide
  Antisense strand to SEQ ID NO: 1710581
uucuuaaucacagaagccc

SEQ ID NO: 1710583 - RNA, 19 nt, Artificial Sequence
  Description of Artificial Sequence: Synthetic oligonucleotide
  Sense strand starting at position 3913 of SEQ ID NO: 1561951
ggcuucugugauuaagaag

SEQ ID NO: 1710584 - RNA, 19 nt, Artificial Sequence
  Description of Artificial Sequence: Synthetic oligonucleotide
  Antisense strand to SEQ ID NO: 1710583
cuucuuaaucacagaagcc

SEQ ID NO: 1710585 - RNA, 19 nt, Artificial Sequence
  Description of Artificial Sequence: Synthetic oligonucleotide
  Sense strand starting at position 3950 of SEQ ID NO: 1561951
ccaugugucccuugacggu

SEQ ID NO: 1710586 - RNA, 19 nt, Artificial Sequence
  Description of Artificial Sequence: Synthetic oligonucleotide
  Antisense strand to SEQ ID NO: 1710585
accgucaagggacacaugg

SEQ ID NO: 1710587 - RNA, 19 nt, Artificial Sequence
  Description of Artificial Sequence: Synthetic oligonucleotide
  Sense strand starting at position 3965 of SEQ ID NO: 1561951
cgguuauccuuccagcaca

SEQ ID NO: 1710588 - RNA, 19 nt, Artificial Sequence
  Description of Artificial Sequence: Synthetic oligonucleotide
  Antisense strand to SEQ ID NO: 1710587
ugugcuggaaggauaaccg

SEQ ID NO: 1710589 - RNA, 19 nt, Artificial Sequence
  Description of Artificial Sequence: Synthetic oligonucleotide
  Sense strand starting at position 106 of SEQ ID NO: 1561952
uagacaggagcuugauauu

SEQ ID NO: 1710590 - RNA, 19 nt, Artificial Sequence
  Description of Artificial Sequence: Synthetic oligonucleotide
  Antisense strand to SEQ ID NO: 1710589
aauaucaagcuccugucua

SEQ ID NO: 1710591 - RNA, 19 nt, Artificial Sequence
  Description of Artificial Sequence: Synthetic oligonucleotide
  Sense strand starting at position 109 of SEQ ID NO: 1561952
acaggagcuugauauuauu

SEQ ID NO: 1710592 - RNA, 19 nt, Artificial Sequence
  Description of Artificial Sequence: Synthetic oligonucleotide
  Antisense strand to SEQ ID NO: 1710591
aauaauaucaagcuccugu

SEQ ID NO: 1710593 - RNA, 19 nt, Artificial Sequence
  Description of Artificial Sequence: Synthetic oligonucleotide
  Sense strand starting at position 145 of SEQ ID NO: 1561952
ccuaauggcuuuccaauga

SEQ ID NO: 1710594 - RNA, 19 nt, Artificial Sequence
  Description of Artificial Sequence: Synthetic oligonucleotide
  Antisense strand to SEQ ID NO: 1710593
ucauuggaaagccauuagg

SEQ ID NO: 1710595 - RNA, 19 nt, Artificial Sequence
  Description of Artificial Sequence: Synthetic oligonucleotide
  Sense strand starting at position 408 of SEQ ID NO: 1561952
gccagcugauucugggaua

SEQ ID NO: 1710596 - RNA, 19 nt, Artificial Sequence
  Description of Artificial Sequence: Synthetic oligonucleotide
  Antisense strand to SEQ ID NO: 1710595
uaucccagaaucagcuggc

SEQ ID NO: 1710597 - RNA, 19 nt, Artificial Sequence
  Description of Artificial Sequence: Synthetic oligonucleotide
  Sense strand starting at position 409 of SEQ ID NO: 1561952
ccagcugauucugggauaa

SEQ ID NO: 1710598 - RNA, 19 nt, Artificial Sequence
  Description of Artificial Sequence: Synthetic oligonucleotide
  Antisense strand to SEQ ID NO: 1710597
uuaucccagaaucagcugg

SEQ ID NO: 1710599 - RNA, 19 nt, Artificial Sequence
  Description of Artificial Sequence: Synthetic oligonucleotide
  Sense strand starting at position 411 of SEQ ID NO: 1561952
agcugauucugggauaagu

SEQ ID NO: 1710600 - RNA, 19 nt, Artificial Sequence
  Description of Artificial Sequence: Synthetic oligonucleotide
  Antisense strand to SEQ ID NO: 1710599
acuuaucccagaaucagcu

SEQ ID NO: 1710601 - RNA, 19 nt, Artificial Sequence
  Description of Artificial Sequence: Synthetic oligonucleotide
  Sense strand starting at position 420 of SEQ ID NO: 1561952
ugggauaaguagggcuuua

SEQ ID NO: 1710602 - RNA, 19 nt, Artificial Sequence
  Description of Artificial Sequence: Synthetic oligonucleotide
  Antisense strand to SEQ ID NO: 1710601
uaaagcccuacuuauccca

SEQ ID NO: 1710603 - RNA, 19 nt, Artificial Sequence
  Description of Artificial Sequence: Synthetic oligonucleotide
  Sense strand starting at position 425 of SEQ ID NO: 1561952
uaaguagggcuuuaucuca

SEQ ID NO: 1710604 - RNA, 19 nt, Artificial Sequence
  Description of Artificial Sequence: Synthetic oligonucleotide
  Antisense strand to SEQ ID NO: 1710603
ugagauaaagcccuacuua

SEQ ID NO: 1710605 - RNA, 19 nt, Artificial Sequence
  Description of Artificial Sequence: Synthetic oligonucleotide
  Sense strand starting at position 430 of SEQ ID NO: 1561952
agggcuuuaucucaaggga

SEQ ID NO: 1710606 - RNA, 19 nt, Artificial Sequence
  Description of Artificial Sequence: Synthetic oligonucleotide
  Antisense strand to SEQ ID NO: 1710605
ucccuugagauaaagcccu

SEQ ID NO: 1710607 - RNA, 19 nt, Artificial Sequence
  Description of Artificial Sequence: Synthetic oligonucleotide
  Sense strand starting at position 433 of SEQ ID NO: 1561952
gcuuuaucucaagggagaa

SEQ ID NO: 1710608 - RNA, 19 nt, Artificial Sequence
  Description of Artificial Sequence: Synthetic oligonucleotide
  Antisense strand to SEQ ID NO: 1710607
uucucccuugagauaaagc

SEQ ID NO: 1710609 - RNA, 19 nt, Artificial Sequence
  Description of Artificial Sequence: Synthetic oligonucleotide
  Sense strand starting at position 517 of SEQ ID NO: 1561952
gugaaaucaggagguuauu

SEQ ID NO: 1710610 - RNA, 19 nt, Artificial Sequence
  Description of Artificial Sequence: Synthetic oligonucleotide
  Antisense strand to SEQ ID NO: 1710609
aauaaccuccugauuucac

SEQ ID NO: 1710611 - RNA, 19 nt, Artificial Sequence
  Description of Artificial Sequence: Synthetic oligonucleotide
  Sense strand starting at position 759 of SEQ ID NO: 1561952
gaauaaugcuaauuagcga

SEQ ID NO: 1710612 - RNA, 19 nt, Artificial Sequence
  Description of Artificial Sequence: Synthetic oligonucleotide
  Antisense strand to SEQ ID NO: 1710611
ucgcuaauuagcauuauuc

SEQ ID NO: 1710613 - RNA, 19 nt, Artificial Sequence
  Description of Artificial Sequence: Synthetic oligonucleotide
  Sense strand starting at position 766 of SEQ ID NO: 1561952
gcuaauuagcgaggcuuaa

SEQ ID NO: 1710614 - RNA, 19 nt, Artificial Sequence
  Description of Artificial Sequence: Synthetic oligonucleotide
  Antisense strand to SEQ ID NO: 1710613
uuaagccucgcuaauuagc

SEQ ID NO: 1710615 - RNA, 19 nt, Artificial Sequence
  Description of Artificial Sequence: Synthetic oligonucleotide
  Sense strand starting at position 776 of SEQ ID NO: 1561952
gaggcuuaaugagaacuuc

SEQ ID NO: 1710616 - RNA, 19 nt, Artificial Sequence
  Description of Artificial Sequence: Synthetic oligonucleotide
  Antisense strand to SEQ ID NO: 1710615
gaaguucucauuaagccuc

SEQ ID NO: 1710617 - RNA, 19 nt, Artificial Sequence
  Description of Artificial Sequence: Synthetic oligonucleotide
  Sense strand starting at position 928 of SEQ ID NO: 1561952
guguccagccuugaagaca

SEQ ID NO: 1710618 - RNA, 19 nt, Artificial Sequence
  Description of Artificial Sequence: Synthetic oligonucleotide
  Antisense strand to SEQ ID NO: 1710617
ugucuucaaggcuggacac

SEQ ID NO: 1710619 - RNA, 19 nt, Artificial Sequence
  Description of Artificial Sequence: Synthetic oligonucleotide
  Sense strand starting at position 2405 of SEQ ID NO: 1561952
gggaucugugccuacccau

SEQ ID NO: 1710620 - RNA, 19 nt, Artificial Sequence
  Description of Artificial Sequence: Synthetic oligonucleotide
  Antisense strand to SEQ ID NO: 1710619
auggguaggcacagauccc

SEQ ID NO: 1710621 - RNA, 19 nt, Artificial Sequence
  Description of Artificial Sequence: Synthetic oligonucleotide
  Sense strand starting at position 2755 of SEQ ID NO: 1561952
cccagugcuugaucaaguu

SEQ ID NO: 1710622 - RNA, 19 nt, Artificial Sequence
  Description of Artificial Sequence: Synthetic oligonucleotide
  Antisense strand to SEQ ID NO: 1710621
aacuugaucaagcacuggg

SEQ ID NO: 1710623 - RNA, 19 nt, Artificial Sequence
  Description of Artificial Sequence: Synthetic oligonucleotide
  Sense strand starting at position 3066 of SEQ ID NO: 1561952
gcgcgagccacaguuguaa

SEQ ID NO: 1710624 - RNA, 19 nt, Artificial Sequence
  Description of Artificial Sequence: Synthetic oligonucleotide
  Antisense strand to SEQ ID NO: 1710623
uuacaacuguggcucgcgc

SEQ ID NO: 1710625 - RNA, 19 nt, Artificial Sequence
  Description of Artificial Sequence: Synthetic oligonucleotide
  Sense strand starting at position 3070 of SEQ ID NO: 1561952
gagccacaguuguaaagua

SEQ ID NO: 1710626 - RNA, 19 nt, Artificial Sequence
  Description of Artificial Sequence: Synthetic oligonucleotide
  Antisense strand to SEQ ID NO: 1710625
uacuuuacaacuguggcuc

SEQ ID NO: 1710627 - RNA, 19 nt, Artificial Sequence
  Description of Artificial Sequence: Synthetic oligonucleotide
  Sense strand starting at position 3078 of SEQ ID NO: 1561952
guuguaaaguaauaggaua

SEQ ID NO: 1710628 - RNA, 19 nt, Artificial Sequence
  Description of Artificial Sequence: Synthetic oligonucleotide
  Antisense strand to SEQ ID NO: 1710627
uauccuauuacuuuacaac

SEQ ID NO: 1710629 - RNA, 19 nt, Artificial Sequence
  Description of Artificial Sequence: Synthetic oligonucleotide
  Sense strand starting at position 3440 of SEQ ID NO: 1561952
gggaacugcccucguggaa

SEQ ID NO: 1710630 - RNA, 19 nt, Artificial Sequence
  Description of Artificial Sequence: Synthetic oligonucleotide
  Antisense strand to SEQ ID NO: 1710629
uuccacgagggcaguuccc

SEQ ID NO: 1710631 - RNA, 19 nt, Artificial Sequence
  Description of Artificial Sequence: Synthetic oligonucleotide
  Sense strand starting at position 3540 of SEQ ID NO: 1561952
ccugauuccucuggucgca

SEQ ID NO: 1710632 - RNA, 19 nt, Artificial Sequence
  Description of Artificial Sequence: Synthetic oligonucleotide
  Antisense strand to SEQ ID NO: 1710631
ugcgaccagaggaaucagg

SEQ ID NO: 1710633 - RNA, 19 nt, Artificial Sequence
  Description of Artificial Sequence: Synthetic oligonucleotide
  Sense strand starting at position 3572 of SEQ ID NO: 1561952
ggcaauuucuacugacucu

SEQ ID NO: 1710634 - RNA, 19 nt, Artificial Sequence
  Description of Artificial Sequence: Synthetic oligonucleotide
  Antisense strand to SEQ ID NO: 1710633
agagucaguagaaauugcc

SEQ ID NO: 1710635 - RNA, 19 nt, Artificial Sequence
  Description of Artificial Sequence: Synthetic oligonucleotide
  Sense strand starting at position 3645 of SEQ ID NO: 1561952
cacagcgauuguuugcaau

SEQ ID NO: 1710636 - RNA, 19 nt, Artificial Sequence
  Description of Artificial Sequence: Synthetic oligonucleotide
  Antisense strand to SEQ ID NO: 1710635
auugcaaacaaucgcugug

SEQ ID NO: 1710637 - RNA, 19 nt, Artificial Sequence
  Description of Artificial Sequence: Synthetic oligonucleotide
  Sense strand starting at position 3647 of SEQ ID NO: 1561952
cagcgauuguuugcaauuu

SEQ ID NO: 1710638 - RNA, 19 nt, Artificial Sequence
  Description of Artificial Sequence: Synthetic oligonucleotide
  Antisense strand to SEQ ID NO: 1710637
aaauugcaaacaaucgcug

SEQ ID NO: 1710639 - RNA, 19 nt, Artificial Sequence
  Description of Artificial Sequence: Synthetic oligonucleotide
  Sense strand starting at position 3727 of SEQ ID NO: 1561952
cucugaaagcuuugcauug

SEQ ID NO: 1710640 - RNA, 19 nt, Artificial Sequence
  Description of Artificial Sequence: Synthetic oligonucleotide
  Antisense strand to SEQ ID NO: 1710639
caaugcaaagcuuucagag

SEQ ID NO: 1710641 - RNA, 19 nt, Artificial Sequence
  Description of Artificial Sequence: Synthetic oligonucleotide
  Sense strand starting at position 3728 of SEQ ID NO: 1561952
ucugaaagcuuugcauugu

SEQ ID NO: 1710642 - RNA, 19 nt, Artificial Sequence
  Description of Artificial Sequence: Synthetic oligonucleotide
  Antisense strand to SEQ ID NO: 1710641
acaaugcaaagcuuucaga

SEQ ID NO: 1710643 - RNA, 19 nt, Artificial Sequence
  Description of Artificial Sequence: Synthetic oligonucleotide
  Sense strand starting at position 3732 of SEQ ID NO: 1561952
aaagcuuugcauugugaac

SEQ ID NO: 1710644 - RNA, 19 nt, Artificial Sequence
  Description of Artificial Sequence: Synthetic oligonucleotide
  Antisense strand to SEQ ID NO: 1710643
guucacaaugcaaagcuuu

SEQ ID NO: 1710645 - RNA, 19 nt, Artificial Sequence
  Description of Artificial Sequence: Synthetic oligonucleotide
  Sense strand starting at position 3734 of SEQ ID NO: 1561952
agcuuugcauugugaacaa

SEQ ID NO: 1710646 - RNA, 19 nt, Artificial Sequence
  Description of Artificial Sequence: Synthetic oligonucleotide
  Antisense strand to SEQ ID NO: 1710645
uuguucacaaugcaaagcu

SEQ ID NO: 1710647 - RNA, 19 nt, Artificial Sequence
  Description of Artificial Sequence: Synthetic oligonucleotide
  Sense strand starting at position 3738 of SEQ ID NO: 1561952
uugcauugugaacaaucca

SEQ ID NO: 1710648 - RNA, 19 nt, Artificial Sequence
  Description of Artificial Sequence: Synthetic oligonucleotide
  Antisense strand to SEQ ID NO: 1710647
uggauuguucacaaugcaa

SEQ ID NO: 1710649 - RNA, 19 nt, Artificial Sequence
  Description of Artificial Sequence: Synthetic oligonucleotide
  Sense strand starting at position 3745 of SEQ ID NO: 1561952
gugaacaauccaugguaaa

SEQ ID NO: 1710650 - RNA, 19 nt, Artificial Sequence
  Description of Artificial Sequence: Synthetic oligonucleotide
  Antisense strand to SEQ ID NO: 1710649
uuuaccauggauuguucac

SEQ ID NO: 1710651 - RNA, 19 nt, Artificial Sequence
  Description of Artificial Sequence: Synthetic oligonucleotide
  Sense strand starting at position 3893 of SEQ ID NO: 1561952
gcucaagacucugcuguca

SEQ ID NO: 1710652 - RNA, 19 nt, Artificial Sequence
  Description of Artificial Sequence: Synthetic oligonucleotide
  Antisense strand to SEQ ID NO: 1710651
ugacagcagagucuugagc

SEQ ID NO: 1710653 - RNA, 19 nt, Artificial Sequence
  Description of Artificial Sequence: Synthetic oligonucleotide
  Sense strand starting at position 3895 of SEQ ID NO: 1561952
ucaagacucugcugucaau

SEQ ID NO: 1710654 - RNA, 19 nt, Artificial Sequence
  Description of Artificial Sequence: Synthetic oligonucleotide
  Antisense strand to SEQ ID NO: 1710653
auugacagcagagucuuga

SEQ ID NO: 1710655 - RNA, 19 nt, Artificial Sequence
  Description of Artificial Sequence: Synthetic oligonucleotide
  Sense strand starting at position 3898 of SEQ ID NO: 1561952
agacucugcugucaauaga

SEQ ID NO: 1710656 - RNA, 19 nt, Artificial Sequence
  Description of Artificial Sequence: Synthetic oligonucleotide
  Antisense strand to SEQ ID NO: 1710655
ucuauugacagcagagucu

SEQ ID NO: 1710657 - RNA, 19 nt, Artificial Sequence
  Description of Artificial Sequence: Synthetic oligonucleotide
  Sense strand starting at position 305 of SEQ ID NO: 1561953
gcaagucaucacugcaaag

SEQ ID NO: 1710658 - RNA, 19 nt, Artificial Sequence
  Description of Artificial Sequence: Synthetic oligonucleotide
  Antisense strand to SEQ ID NO: 1710657
cuuugcagugaugacuugc

SEQ ID NO: 1710659 - RNA, 19 nt, Artificial Sequence
  Description of Artificial Sequence: Synthetic oligonucleotide
  Sense strand starting at position 500 of SEQ ID NO: 1561953
cagacacuugauuguguuu

SEQ ID NO: 1710660 - RNA, 19 nt, Artificial Sequence
  Description of Artificial Sequence: Synthetic oligonucleotide
  Antisense strand to SEQ ID NO: 1710659
aaacacaaucaagugucug

SEQ ID NO: 1710661 - RNA, 19 nt, Artificial Sequence
  Description of Artificial Sequence: Synthetic oligonucleotide
  Sense strand starting at position 506 of SEQ ID NO: 1561953
cuugauuguguuuaggcaa

SEQ ID NO: 1710662 - RNA, 19 nt, Artificial Sequence
  Description of Artificial Sequence: Synthetic oligonucleotide
  Antisense strand to SEQ ID NO: 1710661
uugccuaaacacaaucaag

SEQ ID NO: 1710663 - RNA, 19 nt, Artificial Sequence
  Description of Artificial Sequence: Synthetic oligonucleotide
  Sense strand starting at position 937 of SEQ ID NO: 1561953
uaaacaguuuggucuagca

SEQ ID NO: 1710664 - RNA, 19 nt, Artificial Sequence
  Description of Artificial Sequence: Synthetic oligonucleotide
  Antisense strand to SEQ ID NO: 1710663
ugcuagaccaaacuguuua

SEQ ID NO: 1710665 - RNA, 19 nt, Artificial Sequence
  Description of Artificial Sequence: Synthetic oligonucleotide
  Sense strand starting at position 939 of SEQ ID NO: 1561953
aacaguuuggucuagcaca

SEQ ID NO: 1710666 - RNA, 19 nt, Artificial Sequence
  Description of Artificial Sequence: Synthetic oligonucleotide
  Antisense strand to SEQ ID NO: 1710665
ugugcuagaccaaacuguu

SEQ ID NO: 1710667 - RNA, 19 nt, Artificial Sequence
  Description of Artificial Sequence: Synthetic oligonucleotide
  Sense strand starting at position 965 of SEQ ID NO: 1561953
gaccuugagcucugugaag

SEQ ID NO: 1710668 - RNA, 19 nt, Artificial Sequence
  Description of Artificial Sequence: Synthetic oligonucleotide
  Antisense strand to SEQ ID NO: 1710667
cuucacagagcucaagguc

SEQ ID NO: 1710669 - RNA, 19 nt, Artificial Sequence
  Description of Artificial Sequence: Synthetic oligonucleotide
  Sense strand starting at position 971 of SEQ ID NO: 1561953
gagcucugugaagacaauu

SEQ ID NO: 1710670 - RNA, 19 nt, Artificial Sequence
  Description of Artificial Sequence: Synthetic oligonucleotide
  Antisense strand to SEQ ID NO: 1710669
aauugucuucacagagcuc

SEQ ID NO: 1710671 - RNA, 19 nt, Artificial Sequence
  Description of Artificial Sequence: Synthetic oligonucleotide
  Sense strand starting at position 1101 of SEQ ID NO: 1561953
accacaucucucugugaca

SEQ ID NO: 1710672 - RNA, 19 nt, Artificial Sequence
  Description of Artificial Sequence: Synthetic oligonucleotide
  Antisense strand to SEQ ID NO: 1710671
ugucacagagagauguggu

SEQ ID NO: 1710673 - RNA, 19 nt, Artificial Sequence
  Description of Artificial Sequence: Synthetic oligonucleotide
  Sense strand starting at position 1414 of SEQ ID NO: 1561953
gcuuauuucuaauugcuag

SEQ ID NO: 1710674 - RNA, 19 nt, Artificial Sequence
  Description of Artificial Sequence: Synthetic oligonucleotide
  Antisense strand to SEQ ID NO: 1710673
cuagcaauuagaaauaagc

SEQ ID NO: 1710675 - RNA, 19 nt, Artificial Sequence
  Description of Artificial Sequence: Synthetic oligonucleotide
  Sense strand starting at position 1420 of SEQ ID NO: 1561953
uucuaauugcuagagcgau

SEQ ID NO: 1710676 - RNA, 19 nt, Artificial Sequence
  Description of Artificial Sequence: Synthetic oligonucleotide
  Antisense strand to SEQ ID NO: 1710675
aucgcucuagcaauuagaa

SEQ ID NO: 1710677 - RNA, 19 nt, Artificial Sequence
  Description of Artificial Sequence: Synthetic oligonucleotide
  Sense strand starting at position 1435 of SEQ ID NO: 1561953
cgauucuacccauggguca

SEQ ID NO: 1710678 - RNA, 19 nt, Artificial Sequence
  Description of Artificial Sequence: Synthetic oligonucleotide
  Antisense strand to SEQ ID NO: 1710677
ugacccauggguagaaucg

SEQ ID NO: 1710679 - RNA, 19 nt, Artificial Sequence
  Description of Artificial Sequence: Synthetic oligonucleotide
  Sense strand starting at position 1436 of SEQ ID NO: 1561953
gauucuacccaugggucaa

SEQ ID NO: 1710680 - RNA, 19 nt, Artificial Sequence
  Description of Artificial Sequence: Synthetic oligonucleotide
  Antisense strand to SEQ ID NO: 1710679
uugacccauggguagaauc

SEQ ID NO: 1710681 - RNA, 19 nt, Artificial Sequence
  Description of Artificial Sequence: Synthetic oligonucleotide
  Sense strand starting at position 2205 of SEQ ID NO: 1561953
augaguuacgggcagcaga

SEQ ID NO: 1710682 - RNA, 19 nt, Artificial Sequence
  Description of Artificial Sequence: Synthetic oligonucleotide
  Antisense strand to SEQ ID NO: 1710681
ucugcugcccguaacucau

SEQ ID NO: 1710683 - RNA, 19 nt, Artificial Sequence
  Description of Artificial Sequence: Synthetic oligonucleotide
  Sense strand starting at position 2706 of SEQ ID NO: 1561953
gagugaaucgcagcugcuu

SEQ ID NO: 1710684 - RNA, 19 nt, Artificial Sequence
  Description of Artificial Sequence: Synthetic oligonucleotide
  Antisense strand to SEQ ID NO: 1710683
aagcagcugcgauucacuc

SEQ ID NO: 1710685 - RNA, 19 nt, Artificial Sequence
  Description of Artificial Sequence: Synthetic oligonucleotide
  Sense strand starting at position 2754 of SEQ ID NO: 1561953
ucaggcgacucuuuagaaa

SEQ ID NO: 1710686 - RNA, 19 nt, Artificial Sequence
  Description of Artificial Sequence: Synthetic oligonucleotide
  Antisense strand to SEQ ID NO: 1710685
uuucuaaagagucgccuga

SEQ ID NO: 1710687 - RNA, 19 nt, Artificial Sequence
  Description of Artificial Sequence: Synthetic oligonucleotide
  Sense strand starting at position 2853 of SEQ ID NO: 1561953
uuuaaagagucauucgaag

SEQ ID NO: 1710688 - RNA, 19 nt, Artificial Sequence
  Description of Artificial Sequence: Synthetic oligonucleotide
  Antisense strand to SEQ ID NO: 1710687
cuucgaaugacucuuuaaa

SEQ ID NO: 1710689 - RNA, 19 nt, Artificial Sequence
  Description of Artificial Sequence: Synthetic oligonucleotide
  Sense strand starting at position 2996 of SEQ ID NO: 1561953
accuaaaugugguugguaa

SEQ ID NO: 1710690 - RNA, 19 nt, Artificial Sequence
  Description of Artificial Sequence: Synthetic oligonucleotide
  Antisense strand to SEQ ID NO: 1710689
uuaccaaccacauuuaggu

SEQ ID NO: 1710691 - RNA, 19 nt, Artificial Sequence
  Description of Artificial Sequence: Synthetic oligonucleotide
  Sense strand starting at position 2997 of SEQ ID NO: 1561953
ccuaaaugugguugguaaa

SEQ ID NO: 1710692 - RNA, 19 nt, Artificial Sequence
  Description of Artificial Sequence: Synthetic oligonucleotide
  Antisense strand to SEQ ID NO: 1710691
uuuaccaaccacauuuagg

SEQ ID NO: 1710693 - RNA, 19 nt, Artificial Sequence
  Description of Artificial Sequence: Synthetic oligonucleotide
  Sense strand starting at position 2998 of SEQ ID NO: 1561953
cuaaaugugguugguaaau

SEQ ID NO: 1710694 - RNA, 19 nt, Artificial Sequence
  Description of Artificial Sequence: Synthetic oligonucleotide
  Antisense strand to SEQ ID NO: 1710693
auuuaccaaccacauuuag

SEQ ID NO: 1710695 - RNA, 19 nt, Artificial Sequence
  Description of Artificial Sequence: Synthetic oligonucleotide
  Sense strand starting at position 3037 of SEQ ID NO: 1561953
augguuuacagaugugguu

SEQ ID NO: 1710696 - RNA, 19 nt, Artificial Sequence
  Description of Artificial Sequence: Synthetic oligonucleotide
  Antisense strand to SEQ ID NO: 1710695
aaccacaucuguaaaccau

SEQ ID NO: 1710697 - RNA, 19 nt, Artificial Sequence
  Description of Artificial Sequence: Synthetic oligonucleotide
  Sense strand starting at position 3039 of SEQ ID NO: 1561953
gguuuacagaugugguuga

SEQ ID NO: 1710698 - RNA, 19 nt, Artificial Sequence
  Description of Artificial Sequence: Synthetic oligonucleotide
  Antisense strand to SEQ ID NO: 1710697
ucaaccacaucuguaaacc

SEQ ID NO: 1710699 - RNA, 19 nt, Artificial Sequence
  Description of Artificial Sequence: Synthetic oligonucleotide
  Sense strand starting at position 3043 of SEQ ID NO: 1561953
uacagaugugguugaauuc

SEQ ID NO: 1710700 - RNA, 19 nt, Artificial Sequence
  Description of Artificial Sequence: Synthetic oligonucleotide
  Antisense strand to SEQ ID NO: 1710699
gaauucaaccacaucugua

SEQ ID NO: 1710701 - RNA, 19 nt, Artificial Sequence
  Description of Artificial Sequence: Synthetic oligonucleotide
  Sense strand starting at position 3062 of SEQ ID NO: 1561953
uguuacacaugucuacuua

SEQ ID NO: 1710702 - RNA, 19 nt, Artificial Sequence
  Description of Artificial Sequence: Synthetic oligonucleotide
  Antisense strand to SEQ ID NO: 1710701
uaaguagacauguguaaca

SEQ ID NO: 1710703 - RNA, 19 nt, Artificial Sequence
  Description of Artificial Sequence: Synthetic oligonucleotide
  Sense strand starting at position 3085 of SEQ ID NO: 1561953
ucagaaucguuauuccauu

SEQ ID NO: 1710704 - RNA, 19 nt, Artificial Sequence
  Description of Artificial Sequence: Synthetic oligonucleotide
  Antisense strand to SEQ ID NO: 1710703
aauggaauaacgauucuga

SEQ ID NO: 1710705 - RNA, 19 nt, Artificial Sequence
  Description of Artificial Sequence: Synthetic oligonucleotide
  Sense strand starting at position 3256 of SEQ ID NO: 1561953
uccugaaucuuccuggagu

SEQ ID NO: 1710706 - RNA, 19 nt, Artificial Sequence
  Description of Artificial Sequence: Synthetic oligonucleotide
  Antisense strand to SEQ ID NO: 1710705
acuccaggaagauucagga

SEQ ID NO: 1710707 - RNA, 19 nt, Artificial Sequence
  Description of Artificial Sequence: Synthetic oligonucleotide
  Sense strand starting at position 3259 of SEQ ID NO: 1561953
ugaaucuuccuggaguuac

SEQ ID NO: 1710708 - RNA, 19 nt, Artificial Sequence
  Description of Artificial Sequence: Synthetic oligonucleotide
  Antisense strand to SEQ ID NO: 1710707
guaacuccaggaagauuca

SEQ ID NO: 1710709 - RNA, 19 nt, Artificial Sequence
  Description of Artificial Sequence: Synthetic oligonucleotide
  Sense strand starting at position 3276 of SEQ ID NO: 1561953
acaggugcuuauccacuaa

SEQ ID NO: 1710710 - RNA, 19 nt, Artificial Sequence
  Description of Artificial Sequence: Synthetic oligonucleotide
  Antisense strand to SEQ ID NO: 1710709
uuaguggauaagcaccugu

SEQ ID NO: 1710711 - RNA, 19 nt, Artificial Sequence
  Description of Artificial Sequence: Synthetic oligonucleotide
  Sense strand starting at position 3324 of SEQ ID NO: 1561953
ugcauuaauggacagcauu

SEQ ID NO: 1710712 - RNA, 19 nt, Artificial Sequence
  Description of Artificial Sequence: Synthetic oligonucleotide
  Antisense strand to SEQ ID NO: 1710711
aaugcuguccauuaaugca

SEQ ID NO: 1710713 - RNA, 19 nt, Artificial Sequence
  Description of Artificial Sequence: Synthetic oligonucleotide
  Sense strand starting at position 3351 of SEQ ID NO: 1561953
uaggauugggugggcuaua

SEQ ID NO: 1710714 - RNA, 19 nt, Artificial Sequence
  Description of Artificial Sequence: Synthetic oligonucleotide
  Antisense strand to SEQ ID NO: 1710713
uauagcccacccaauccua

SEQ ID NO: 1710715 - RNA, 19 nt, Artificial Sequence
  Description of Artificial Sequence: Synthetic oligonucleotide
  Sense strand starting at position 3352 of SEQ ID NO: 1561953
aggauugggugggcuauaa

SEQ ID NO: 1710716 - RNA, 19 nt, Artificial Sequence
  Description of Artificial Sequence: Synthetic oligonucleotide
  Antisense strand to SEQ ID NO: 1710715
uuauagcccacccaauccu

SEQ ID NO: 1710717 - RNA, 19 nt, Artificial Sequence
  Description of Artificial Sequence: Synthetic oligonucleotide
  Sense strand starting at position 3644 of SEQ ID NO: 1561953
uagaaauaagaguguguug

SEQ ID NO: 1710718 - RNA, 19 nt, Artificial Sequence
  Description of Artificial Sequence: Synthetic oligonucleotide
  Antisense strand to SEQ ID NO: 1710717
caacacacucuuauuucua

SEQ ID NO: 1710719 - RNA, 19 nt, Artificial Sequence
  Description of Artificial Sequence: Synthetic oligonucleotide
  Sense strand starting at position 3697 of SEQ ID NO: 1561953
gucucagcucuacauacau

SEQ ID NO: 1710720 - RNA, 19 nt, Artificial Sequence
  Description of Artificial Sequence: Synthetic oligonucleotide
  Antisense strand to SEQ ID NO: 1710719
auguauguagagcugagac

SEQ ID NO: 1710721 - RNA, 19 nt, Artificial Sequence
  Description of Artificial Sequence: Synthetic oligonucleotide
  Sense strand starting at position 3861 of SEQ ID NO: 1561953
uggguccucugguuacaaa

SEQ ID NO: 1710722 - RNA, 19 nt, Artificial Sequence
  Description of Artificial Sequence: Synthetic oligonucleotide
  Antisense strand to SEQ ID NO: 1710721
uuuguaaccagaggaccca

SEQ ID NO: 1710723 - RNA, 19 nt, Artificial Sequence
  Description of Artificial Sequence: Synthetic oligonucleotide
  Sense strand starting at position 3942 of SEQ ID NO: 1561953
ugagauaaccaaugcuugu

SEQ ID NO: 1710724 - RNA, 19 nt, Artificial Sequence
  Description of Artificial Sequence: Synthetic oligonucleotide
  Antisense strand to SEQ ID NO: 1710723
acaagcauugguuaucuca

SEQ ID NO: 1710725 - RNA, 19 nt, Artificial Sequence
  Description of Artificial Sequence: Synthetic oligonucleotide
  Sense strand starting at position 3951 of SEQ ID NO: 1561953
caaugcuugugaucagaua

SEQ ID NO: 1710726 - RNA, 19 nt, Artificial Sequence
  Description of Artificial Sequence: Synthetic oligonucleotide
  Antisense strand to SEQ ID NO: 1710725
uaucugaucacaagcauug

SEQ ID NO: 1710727 - RNA, 19 nt, Artificial Sequence
  Description of Artificial Sequence: Synthetic oligonucleotide
  Sense strand starting at position 3952 of SEQ ID NO: 1561953
aaugcuugugaucagauau

SEQ ID NO: 1710728 - RNA, 19 nt, Artificial Sequence
  Description of Artificial Sequence: Synthetic oligonucleotide
  Antisense strand to SEQ ID NO: 1710727
auaucugaucacaagcauu

SEQ ID NO: 1710729 - RNA, 19 nt, Artificial Sequence
  Description of Artificial Sequence: Synthetic oligonucleotide
  Sense strand starting at position 3958 of SEQ ID NO: 1561953
ugugaucagauauggaugu

SEQ ID NO: 1710730 - RNA, 19 nt, Artificial Sequence
  Description of Artificial Sequence: Synthetic oligonucleotide
  Antisense strand to SEQ ID NO: 1710729
acauccauaucugaucaca

SEQ ID NO: 1710731 - RNA, 19 nt, Artificial Sequence
  Description of Artificial Sequence: Synthetic oligonucleotide
  Sense strand starting at position 3962 of SEQ ID NO: 1561953
aucagauauggauguggua

SEQ ID NO: 1710732 - RNA, 19 nt, Artificial Sequence
  Description of Artificial Sequence: Synthetic oligonucleotide
  Antisense strand to SEQ ID NO: 1710731
uaccacauccauaucugau

SEQ ID NO: 1710733 - RNA, 19 nt, Artificial Sequence
  Description of Artificial Sequence: Synthetic oligonucleotide
  Sense strand starting at position 3964 of SEQ ID NO: 1561953
cagauauggaugugguaug

SEQ ID NO: 1710734 - RNA, 19 nt, Artificial Sequence
  Description of Artificial Sequence: Synthetic oligonucleotide
  Antisense strand to SEQ ID NO: 1710733
cauaccacauccauaucug

SEQ ID NO: 1710735 - RNA, 19 nt, Artificial Sequence
  Description of Artificial Sequence: Synthetic oligonucleotide
  Sense strand starting at position 3969 of SEQ ID NO: 1561953
auggaugugguaugaacau

SEQ ID NO: 1710736 - RNA, 19 nt, Artificial Sequence
  Description of Artificial Sequence: Synthetic oligonucleotide
  Antisense strand to SEQ ID NO: 1710735
auguucauaccacauccau

SEQ ID NO: 1710737 - RNA, 19 nt, Artificial Sequence
  Description of Artificial Sequence: Synthetic oligonucleotide
  Sense strand starting at position 376 of SEQ ID NO: 1561954
cgaccacugucauuaggga

SEQ ID NO: 1710738 - RNA, 19 nt, Artificial Sequence
  Description of Artificial Sequence: Synthetic oligonucleotide
  Antisense strand to SEQ ID NO: 1710737
ucccuaaugacaguggucg

SEQ ID NO: 1710739 - RNA, 19 nt, Artificial Sequence
  Description of Artificial Sequence: Synthetic oligonucleotide
  Sense strand starting at position 599 of SEQ ID NO: 1561954
gugucuccuugcguggaga

SEQ ID NO: 1710740 - RNA, 19 nt, Artificial Sequence
  Description of Artificial Sequence: Synthetic oligonucleotide
  Antisense strand to SEQ ID NO: 1710739
ucuccacgcaaggagacac

SEQ ID NO: 1710741 - RNA, 19 nt, Artificial Sequence
  Description of Artificial Sequence: Synthetic oligonucleotide
  Sense strand starting at position 803 of SEQ ID NO: 1561954
gcgugaugguggaugugau

SEQ ID NO: 1710742 - RNA, 19 nt, Artificial Sequence
  Description of Artificial Sequence: Synthetic oligonucleotide
  Antisense strand to SEQ ID NO: 1710741
aucacauccaccaucacgc

SEQ ID NO: 1710743 - RNA, 19 nt, Artificial Sequence
  Description of Artificial Sequence: Synthetic oligonucleotide
  Sense strand starting at position 830 of SEQ ID NO: 1561954
gcaugaugaugggcgugau

SEQ ID NO: 1710744 - RNA, 19 nt, Artificial Sequence
  Description of Artificial Sequence: Synthetic oligonucleotide
  Antisense strand to SEQ ID NO: 1710743
aucacgcccaucaucaugc

SEQ ID NO: 1710745 - RNA, 19 nt, Artificial Sequence
  Description of Artificial Sequence: Synthetic oligonucleotide
  Sense strand starting at position 929 of SEQ ID NO: 1561954
ugaugaugggcgugaugau

SEQ ID NO: 1710746 - RNA, 19 nt, Artificial Sequence
  Description of Artificial Sequence: Synthetic oligonucleotide
  Antisense strand to SEQ ID NO: 1710745
aucaucacgcccaucauca

SEQ ID NO: 1710747 - RNA, 19 nt, Artificial Sequence
  Description of Artificial Sequence: Synthetic oligonucleotide
  Sense strand starting at position 954 of SEQ ID NO: 1561954
gggugaugaugggcaugau

SEQ ID NO: 1710748 - RNA, 19 nt, Artificial Sequence
  Description of Artificial Sequence: Synthetic oligonucleotide
  Antisense strand to SEQ ID NO: 1710747
aucaugcccaucaucaccc

SEQ ID NO: 1710749 - RNA, 19 nt, Artificial Sequence
  Description of Artificial Sequence: Synthetic oligonucleotide
  Sense strand starting at position 957 of SEQ ID NO: 1561954
ugaugaugggcaugaugau

SEQ ID NO: 1710750 - RNA, 19 nt, Artificial Sequence
  Description of Artificial Sequence: Synthetic oligonucleotide
  Antisense strand to SEQ ID NO: 1710749
aucaucaugcccaucauca

SEQ ID NO: 1710751 - RNA, 19 nt, Artificial Sequence
  Description of Artificial Sequence: Synthetic oligonucleotide
  Sense strand starting at position 1006 of SEQ ID NO: 1561954
cgcaauaugcugcggaagu

SEQ ID NO: 1710752 - RNA, 19 nt, Artificial Sequence
  Description of Artificial Sequence: Synthetic oligonucleotide
  Antisense strand to SEQ ID NO: 1710751
acuuccgcagcauauugcg

SEQ ID NO: 1710753 - RNA, 19 nt, Artificial Sequence
  Description of Artificial Sequence: Synthetic oligonucleotide
  Sense strand starting at position 1016 of SEQ ID NO: 1561954
ugcggaaguucuuccggaa

SEQ ID NO: 1710754 - RNA, 19 nt, Artificial Sequence
  Description of Artificial Sequence: Synthetic oligonucleotide
  Antisense strand to SEQ ID NO: 1710753
uuccggaagaacuuccgca

SEQ ID NO: 1710755 - RNA, 19 nt, Artificial Sequence
  Description of Artificial Sequence: Synthetic oligonucleotide
  Sense strand starting at position 1019 of SEQ ID NO: 1561954
ggaaguucuuccggaaguu

SEQ ID NO: 1710756 - RNA, 19 nt, Artificial Sequence
  Description of Artificial Sequence: Synthetic oligonucleotide
  Antisense strand to SEQ ID NO: 1710755
aacuuccggaagaacuucc

SEQ ID NO: 1710757 - RNA, 19 nt, Artificial Sequence
  Description of Artificial Sequence: Synthetic oligonucleotide
  Sense strand starting at position 1020 of SEQ ID NO: 1561954
gaaguucuuccggaaguug

SEQ ID NO: 1710758 - RNA, 19 nt, Artificial Sequence
  Description of Artificial Sequence: Synthetic oligonucleotide
  Antisense strand to SEQ ID NO: 1710757
caacuuccggaagaacuuc

SEQ ID NO: 1710759 - RNA, 19 nt, Artificial Sequence
  Description of Artificial Sequence: Synthetic oligonucleotide
  Sense strand starting at position 1028 of SEQ ID NO: 1561954
uccggaaguugucaucuag

SEQ ID NO: 1710760 - RNA, 19 nt, Artificial Sequence
  Description of Artificial Sequence: Synthetic oligonucleotide
  Antisense strand to SEQ ID NO: 1710759
cuagaugacaacuuccgga

SEQ ID NO: 1710761 - RNA, 19 nt, Artificial Sequence
  Description of Artificial Sequence: Synthetic oligonucleotide
  Sense strand starting at position 1291 of SEQ ID NO: 1561954
cgcaggaggucuguguaga

SEQ ID NO: 1710762 - RNA, 19 nt, Artificial Sequence
  Description of Artificial Sequence: Synthetic oligonucleotide
  Antisense strand to SEQ ID NO: 1710761
ucuacacagaccuccugcg

SEQ ID NO: 1710763 - RNA, 19 nt, Artificial Sequence
  Description of Artificial Sequence: Synthetic oligonucleotide
  Sense strand starting at position 1682 of SEQ ID NO: 1561954
gcaggugcuccgcgauguu

SEQ ID NO: 1710764 - RNA, 19 nt, Artificial Sequence
  Description of Artificial Sequence: Synthetic oligonucleotide
  Antisense strand to SEQ ID NO: 1710763
aacaucgcggagcaccugc

SEQ ID NO: 1710765 - RNA, 19 nt, Artificial Sequence
  Description of Artificial Sequence: Synthetic oligonucleotide
  Sense strand starting at position 1784 of SEQ ID NO: 1561954
cccuuaggauuacaaggau

SEQ ID NO: 1710766 - RNA, 19 nt, Artificial Sequence
  Description of Artificial Sequence: Synthetic oligonucleotide
  Antisense strand to SEQ ID NO: 1710765
auccuuguaauccuaaggg

SEQ ID NO: 1710767 - RNA, 19 nt, Artificial Sequence
  Description of Artificial Sequence: Synthetic oligonucleotide
  Sense strand starting at position 1910 of SEQ ID NO: 1561954
ugccauuguccugagagac

SEQ ID NO: 1710768 - RNA, 19 nt, Artificial Sequence
  Description of Artificial Sequence: Synthetic oligonucleotide
  Antisense strand to SEQ ID NO: 1710767
gucucucaggacaauggca

SEQ ID NO: 1710769 - RNA, 19 nt, Artificial Sequence
  Description of Artificial Sequence: Synthetic oligonucleotide
  Sense strand starting at position 2081 of SEQ ID NO: 1561954
ugggcuggauucuaggaaa

SEQ ID NO: 1710770 - RNA, 19 nt, Artificial Sequence
  Description of Artificial Sequence: Synthetic oligonucleotide
  Antisense strand to SEQ ID NO: 1710769
uuuccuagaauccagccca

SEQ ID NO: 1710771 - RNA, 19 nt, Artificial Sequence
  Description of Artificial Sequence: Synthetic oligonucleotide
  Sense strand starting at position 2084 of SEQ ID NO: 1561954
gcuggauucuaggaaagaa

SEQ ID NO: 1710772 - RNA, 19 nt, Artificial Sequence
  Description of Artificial Sequence: Synthetic oligonucleotide
  Antisense strand to SEQ ID NO: 1710771
uucuuuccuagaauccagc

SEQ ID NO: 1710773 - RNA, 19 nt, Artificial Sequence
  Description of Artificial Sequence: Synthetic oligonucleotide
  Sense strand starting at position 2241 of SEQ ID NO: 1561954
ccgccucuuccuggugaga

SEQ ID NO: 1710774 - RNA, 19 nt, Artificial Sequence
  Description of Artificial Sequence: Synthetic oligonucleotide
  Antisense strand to SEQ ID NO: 1710773
ucucaccaggaagaggcgg

SEQ ID NO: 1710775 - RNA, 19 nt, Artificial Sequence
  Description of Artificial Sequence: Synthetic oligonucleotide
  Sense strand starting at position 2244 of SEQ ID NO: 1561954
ccucuuccuggugagacuu

SEQ ID NO: 1710776 - RNA, 19 nt, Artificial Sequence
  Description of Artificial Sequence: Synthetic oligonucleotide
  Antisense strand to SEQ ID NO: 1710775
aagucucaccaggaagagg

SEQ ID NO: 1710777 - RNA, 19 nt, Artificial Sequence
  Description of Artificial Sequence: Synthetic oligonucleotide
  Sense strand starting at position 2410 of SEQ ID NO: 1561954
aucucuggcucccuugaau

SEQ ID NO: 1710778 - RNA, 19 nt, Artificial Sequence
  Description of Artificial Sequence: Synthetic oligonucleotide
  Antisense strand to SEQ ID NO: 1710777
auucaagggagccagagau

SEQ ID NO: 1710779 - RNA, 19 nt, Artificial Sequence
  Description of Artificial Sequence: Synthetic oligonucleotide
  Sense strand starting at position 2540 of SEQ ID NO: 1561954
gugcuucgaguccagaagu

SEQ ID NO: 1710780 - RNA, 19 nt, Artificial Sequence
  Description of Artificial Sequence: Synthetic oligonucleotide
  Antisense strand to SEQ ID NO: 1710779
acuucuggacucgaagcac

SEQ ID NO: 1710781 - RNA, 19 nt, Artificial Sequence
  Description of Artificial Sequence: Synthetic oligonucleotide
  Sense strand starting at position 2622 of SEQ ID NO: 1561954
ugugguccucacugacaga

SEQ ID NO: 1710782 - RNA, 19 nt, Artificial Sequence
  Description of Artificial Sequence: Synthetic oligonucleotide
  Antisense strand to SEQ ID NO: 1710781
ucugucagugaggaccaca

SEQ ID NO: 1710783 - RNA, 19 nt, Artificial Sequence
  Description of Artificial Sequence: Synthetic oligonucleotide
  Sense strand starting at position 3008 of SEQ ID NO: 1561954
gcacccuuaucugugaaca

SEQ ID NO: 1710784 - RNA, 19 nt, Artificial Sequence
  Description of Artificial Sequence: Synthetic oligonucleotide
  Antisense strand to SEQ ID NO: 1710783
uguucacagauaagggugc

SEQ ID NO: 1710785 - RNA, 19 nt, Artificial Sequence
  Description of Artificial Sequence: Synthetic oligonucleotide
  Sense strand starting at position 3010 of SEQ ID NO: 1561954
acccuuaucugugaacaug

SEQ ID NO: 1710786 - RNA, 19 nt, Artificial Sequence
  Description of Artificial Sequence: Synthetic oligonucleotide
  Antisense strand to SEQ ID NO: 1710785
cauguucacagauaagggu

SEQ ID NO: 1710787 - RNA, 19 nt, Artificial Sequence
  Description of Artificial Sequence: Synthetic oligonucleotide
  Sense strand starting at position 3086 of SEQ ID NO: 1561954
gugugugccaguuaggaca

SEQ ID NO: 1710788 - RNA, 19 nt, Artificial Sequence
  Description of Artificial Sequence: Synthetic oligonucleotide
  Antisense strand to SEQ ID NO: 1710787
uguccuaacuggcacacac

SEQ ID NO: 1710789 - RNA, 19 nt, Artificial Sequence
  Description of Artificial Sequence: Synthetic oligonucleotide
  Sense strand starting at position 3148 of SEQ ID NO: 1561954
gggugagcucugcguugua

SEQ ID NO: 1710790 - RNA, 19 nt, Artificial Sequence
  Description of Artificial Sequence: Synthetic oligonucleotide
  Antisense strand to SEQ ID NO: 1710789
uacaacgcagagcucaccc

SEQ ID NO: 1710791 - RNA, 19 nt, Artificial Sequence
  Description of Artificial Sequence: Synthetic oligonucleotide
  Sense strand starting at position 3150 of SEQ ID NO: 1561954
gugagcucugcguuguauc

SEQ ID NO: 1710792 - RNA, 19 nt, Artificial Sequence
  Description of Artificial Sequence: Synthetic oligonucleotide
  Antisense strand to SEQ ID NO: 1710791
gauacaacgcagagcucac

SEQ ID NO: 1710793 - RNA, 19 nt, Artificial Sequence
  Description of Artificial Sequence: Synthetic oligonucleotide
  Sense strand starting at position 3161 of SEQ ID NO: 1561954
guuguaucugagugggucu

SEQ ID NO: 1710794 - RNA, 19 nt, Artificial Sequence
  Description of Artificial Sequence: Synthetic oligonucleotide
  Antisense strand to SEQ ID NO: 1710793
agacccacucagauacaac

SEQ ID NO: 1710795 - RNA, 19 nt, Artificial Sequence
  Description of Artificial Sequence: Synthetic oligonucleotide
  Sense strand starting at position 3164 of SEQ ID NO: 1561954
guaucugagugggucuaca

SEQ ID NO: 1710796 - RNA, 19 nt, Artificial Sequence
  Description of Artificial Sequence: Synthetic oligonucleotide
  Antisense strand to SEQ ID NO: 1710795
uguagacccacucagauac

SEQ ID NO: 1710797 - RNA, 19 nt, Artificial Sequence
  Description of Artificial Sequence: Synthetic oligonucleotide
  Sense strand starting at position 3177 of SEQ ID NO: 1561954
ucuacauguccuuggcuga

SEQ ID NO: 1710798 - RNA, 19 nt, Artificial Sequence
  Description of Artificial Sequence: Synthetic oligonucleotide
  Antisense strand to SEQ ID NO: 1710797
ucagccaaggacauguaga

SEQ ID NO: 1710799 - RNA, 19 nt, Artificial Sequence
  Description of Artificial Sequence: Synthetic oligonucleotide
  Sense strand starting at position 3235 of SEQ ID NO: 1561954
gcagaacuuguuggccaua

SEQ ID NO: 1710800 - RNA, 19 nt, Artificial Sequence
  Description of Artificial Sequence: Synthetic oligonucleotide
  Antisense strand to SEQ ID NO: 1710799
uauggccaacaaguucugc

SEQ ID NO: 1710801 - RNA, 19 nt, Artificial Sequence
  Description of Artificial Sequence: Synthetic oligonucleotide
  Sense strand starting at position 3240 of SEQ ID NO: 1561954
acuuguuggccauaggcaa

SEQ ID NO: 1710802 - RNA, 19 nt, Artificial Sequence
  Description of Artificial Sequence: Synthetic oligonucleotide
  Antisense strand to SEQ ID NO: 1710801
uugccuauggccaacaagu

SEQ ID NO: 1710803 - RNA, 19 nt, Artificial Sequence
  Description of Artificial Sequence: Synthetic oligonucleotide
  Sense strand starting at position 3396 of SEQ ID NO: 1561954
cuggguuggucuuuaaguc

SEQ ID NO: 1710804 - RNA, 19 nt, Artificial Sequence
  Description of Artificial Sequence: Synthetic oligonucleotide
  Antisense strand to SEQ ID NO: 1710803
gacuuaaagaccaacccag

SEQ ID NO: 1710805 - RNA, 19 nt, Artificial Sequence
  Description of Artificial Sequence: Synthetic oligonucleotide
  Sense strand starting at position 3404 of SEQ ID NO: 1561954
gucuuuaaguccuucccuu

SEQ ID NO: 1710806 - RNA, 19 nt, Artificial Sequence
  Description of Artificial Sequence: Synthetic oligonucleotide
  Antisense strand to SEQ ID NO: 1710805
aagggaaggacuuaaagac

SEQ ID NO: 1710807 - RNA, 19 nt, Artificial Sequence
  Description of Artificial Sequence: Synthetic oligonucleotide
  Sense strand starting at position 3562 of SEQ ID NO: 1561954
ggagacguguugggucaga

SEQ ID NO: 1710808 - RNA, 19 nt, Artificial Sequence
  Description of Artificial Sequence: Synthetic oligonucleotide
  Antisense strand to SEQ ID NO: 1710807
ucugacccaacacgucucc

SEQ ID NO: 1710809 - RNA, 19 nt, Artificial Sequence
  Description of Artificial Sequence: Synthetic oligonucleotide
  Sense strand starting at position 3863 of SEQ ID NO: 1561954
agguuauagccaugaccca

SEQ ID NO: 1710810 - RNA, 19 nt, Artificial Sequence
  Description of Artificial Sequence: Synthetic oligonucleotide
  Antisense strand to SEQ ID NO: 1710809
ugggucauggcuauaaccu

SEQ ID NO: 1710811 - RNA, 19 nt, Artificial Sequence
  Description of Artificial Sequence: Synthetic oligonucleotide
  Sense strand starting at position 3913 of SEQ ID NO: 1561954
gggagaugugucugcccau

SEQ ID NO: 1710812 - RNA, 19 nt, Artificial Sequence
  Description of Artificial Sequence: Synthetic oligonucleotide
  Antisense strand to SEQ ID NO: 1710811
augggcagacacaucuccc

SEQ ID NO: 1710813 - RNA, 19 nt, Artificial Sequence
  Description of Artificial Sequence: Synthetic oligonucleotide
  Sense strand starting at position 3914 of SEQ ID NO: 1561954
ggagaugugucugcccauc

SEQ ID NO: 1710814 - RNA, 19 nt, Artificial Sequence
  Description of Artificial Sequence: Synthetic oligonucleotide
  Antisense strand to SEQ ID NO: 1710813
gaugggcagacacaucucc

SEQ ID NO: 1710815 - RNA, 19 nt, Artificial Sequence
  Description of Artificial Sequence: Synthetic oligonucleotide
  Sense strand starting at position 3916 of SEQ ID NO: 1561954
agaugugucugcccaucga

SEQ ID NO: 1710816 - RNA, 19 nt, Artificial Sequence
  Description of Artificial Sequence: Synthetic oligonucleotide
  Antisense strand to SEQ ID NO: 1710815
ucgaugggcagacacaucu

SEQ ID NO: 1710817 - RNA, 19 nt, Artificial Sequence
  Description of Artificial Sequence: Synthetic oligonucleotide
  Sense strand starting at position 136 of SEQ ID NO: 1561955
cucugaaaccugugugguu

SEQ ID NO: 1710818 - RNA, 19 nt, Artificial Sequence
  Description of Artificial Sequence: Synthetic oligonucleotide
  Antisense strand to SEQ ID NO: 1710817
aaccacacagguuucagag

SEQ ID NO: 1710819 - RNA, 19 nt, Artificial Sequence
  Description of Artificial Sequence: Synthetic oligonucleotide
  Sense strand starting at position 137 of SEQ ID NO: 1561955
ucugaaaccugugugguua

SEQ ID NO: 1710820 - RNA, 19 nt, Artificial Sequence
  Description of Artificial Sequence: Synthetic oligonucleotide
  Antisense strand to SEQ ID NO: 1710819
uaaccacacagguuucaga

SEQ ID NO: 1710821 - RNA, 19 nt, Artificial Sequence
  Description of Artificial Sequence: Synthetic oligonucleotide
  Sense strand starting at position 141 of SEQ ID NO: 1561955
aaaccugugugguuagaac

SEQ ID NO: 1710822 - RNA, 19 nt, Artificial Sequence
  Description of Artificial Sequence: Synthetic oligonucleotide
  Antisense strand to SEQ ID NO: 1710821
guucuaaccacacagguuu

SEQ ID NO: 1710823 - RNA, 19 nt, Artificial Sequence
  Description of Artificial Sequence: Synthetic oligonucleotide
  Sense strand starting at position 149 of SEQ ID NO: 1561955
gugguuagaacagaagguu

SEQ ID NO: 1710824 - RNA, 19 nt, Artificial Sequence
  Description of Artificial Sequence: Synthetic oligonucleotide
  Antisense strand to SEQ ID NO: 1710823
aaccuucuguucuaaccac

SEQ ID NO: 1710825 - RNA, 19 nt, Artificial Sequence
  Description of Artificial Sequence: Synthetic oligonucleotide
  Sense strand starting at position 204 of SEQ ID NO: 1561955
gagccuggcucacucuaua

SEQ ID NO: 1710826 - RNA, 19 nt, Artificial Sequence
  Description of Artificial Sequence: Synthetic oligonucleotide
  Antisense strand to SEQ ID NO: 1710825
uauagagugagccaggcuc

SEQ ID NO: 1710827 - RNA, 19 nt, Artificial Sequence
  Description of Artificial Sequence: Synthetic oligonucleotide
  Sense strand starting at position 207 of SEQ ID NO: 1561955
ccuggcucacucuauagaa

SEQ ID NO: 1710828 - RNA, 19 nt, Artificial Sequence
  Description of Artificial Sequence: Synthetic oligonucleotide
  Antisense strand to SEQ ID NO: 1710827
uucuauagagugagccagg

SEQ ID NO: 1710829 - RNA, 19 nt, Artificial Sequence
  Description of Artificial Sequence: Synthetic oligonucleotide
  Sense strand starting at position 209 of SEQ ID NO: 1561955
uggcucacucuauagaauu

SEQ ID NO: 1710830 - RNA, 19 nt, Artificial Sequence
  Description of Artificial Sequence: Synthetic oligonucleotide
  Antisense strand to SEQ ID NO: 1710829
aauucuauagagugagcca

SEQ ID NO: 1710831 - RNA, 19 nt, Artificial Sequence
  Description of Artificial Sequence: Synthetic oligonucleotide
  Sense strand starting at position 278 of SEQ ID NO: 1561955
agguuuguguacaaggagu

SEQ ID NO: 1710832 - RNA, 19 nt, Artificial Sequence
  Description of Artificial Sequence: Synthetic oligonucleotide
  Antisense strand to SEQ ID NO: 1710831
acuccuuguacacaaaccu

SEQ ID NO: 1710833 - RNA, 19 nt, Artificial Sequence
  Description of Artificial Sequence: Synthetic oligonucleotide
  Sense strand starting at position 306 of SEQ ID NO: 1561955
gauaaacuguugguggaga

SEQ ID NO: 1710834 - RNA, 19 nt, Artificial Sequence
  Description of Artificial Sequence: Synthetic oligonucleotide
  Antisense strand to SEQ ID NO: 1710833
ucuccaccaacaguuuauc

SEQ ID NO: 1710835 - RNA, 19 nt, Artificial Sequence
  Description of Artificial Sequence: Synthetic oligonucleotide
  Sense strand starting at position 376 of SEQ ID NO: 1561955
acugaauaacccugacagu

SEQ ID NO: 1710836 - RNA, 19 nt, Artificial Sequence
  Description of Artificial Sequence: Synthetic oligonucleotide
  Antisense strand to SEQ ID NO: 1710835
acugucaggguuauucagu

SEQ ID NO: 1710837 - RNA, 19 nt, Artificial Sequence
  Description of Artificial Sequence: Synthetic oligonucleotide
  Sense strand starting at position 441 of SEQ ID NO: 1561955
gagcacuuaguguacacaa

SEQ ID NO: 1710838 - RNA, 19 nt, Artificial Sequence
  Description of Artificial Sequence: Synthetic oligonucleotide
  Antisense strand to SEQ ID NO: 1710837
uuguguacacuaagugcuc

SEQ ID NO: 1710839 - RNA, 19 nt, Artificial Sequence
  Description of Artificial Sequence: Synthetic oligonucleotide
  Sense strand starting at position 470 of SEQ ID NO: 1561955
aacguuagaugcuuguuaa

SEQ ID NO: 1710840 - RNA, 19 nt, Artificial Sequence
  Description of Artificial Sequence: Synthetic oligonucleotide
  Antisense strand to SEQ ID NO: 1710839
uuaacaagcaucuaacguu

SEQ ID NO: 1710841 - RNA, 19 nt, Artificial Sequence
  Description of Artificial Sequence: Synthetic oligonucleotide
  Sense strand starting at position 689 of SEQ ID NO: 1561955
gcagcacuuuguuuagaua

SEQ ID NO: 1710842 - RNA, 19 nt, Artificial Sequence
  Description of Artificial Sequence: Synthetic oligonucleotide
  Antisense strand to SEQ ID NO: 1710841
uaucuaaacaaagugcugc

SEQ ID NO: 1710843 - RNA, 19 nt, Artificial Sequence
  Description of Artificial Sequence: Synthetic oligonucleotide
  Sense strand starting at position 720 of SEQ ID NO: 1561955
gguauuaauccauggcuua

SEQ ID NO: 1710844 - RNA, 19 nt, Artificial Sequence
  Description of Artificial Sequence: Synthetic oligonucleotide
  Antisense strand to SEQ ID NO: 1710843
uaagccauggauuaauacc

SEQ ID NO: 1710845 - RNA, 19 nt, Artificial Sequence
  Description of Artificial Sequence: Synthetic oligonucleotide
  Sense strand starting at position 721 of SEQ ID NO: 1561955
guauuaauccauggcuuac

SEQ ID NO: 1710846 - RNA, 19 nt, Artificial Sequence
  Description of Artificial Sequence: Synthetic oligonucleotide
  Antisense strand to SEQ ID NO: 1710845
guaagccauggauuaauac

SEQ ID NO: 1710847 - RNA, 19 nt, Artificial Sequence
  Description of Artificial Sequence: Synthetic oligonucleotide
  Sense strand starting at position 931 of SEQ ID NO: 1561955
ugggacaaaucagaauaaa

SEQ ID NO: 1710848 - RNA, 19 nt, Artificial Sequence
  Description of Artificial Sequence: Synthetic oligonucleotide
  Antisense strand to SEQ ID NO: 1710847
uuuauucugauuuguccca

SEQ ID NO: 1710849 - RNA, 19 nt, Artificial Sequence
  Description of Artificial Sequence: Synthetic oligonucleotide
  Sense strand starting at position 995 of SEQ ID NO: 1561955
aggacacauuucugaaauc

SEQ ID NO: 1710850 - RNA, 19 nt, Artificial Sequence
  Description of Artificial Sequence: Synthetic oligonucleotide
  Antisense strand to SEQ ID NO: 1710849
gauuucagaaauguguccu

SEQ ID NO: 1710851 - RNA, 19 nt, Artificial Sequence
  Description of Artificial Sequence: Synthetic oligonucleotide
  Sense strand starting at position 1021 of SEQ ID NO: 1561955
guaagauggcucuaggugu

SEQ ID NO: 1710852 - RNA, 19 nt, Artificial Sequence
  Description of Artificial Sequence: Synthetic oligonucleotide
  Antisense strand to SEQ ID NO: 1710851
acaccuagagccaucuuac

SEQ ID NO: 1710853 - RNA, 19 nt, Artificial Sequence
  Description of Artificial Sequence: Synthetic oligonucleotide
  Sense strand starting at position 1025 of SEQ ID NO: 1561955
gauggcucuagguguuuga

SEQ ID NO: 1710854 - RNA, 19 nt, Artificial Sequence
  Description of Artificial Sequence: Synthetic oligonucleotide
  Antisense strand to SEQ ID NO: 1710853
ucaaacaccuagagccauc

SEQ ID NO: 1710855 - RNA, 19 nt, Artificial Sequence
  Description of Artificial Sequence: Synthetic oligonucleotide
  Sense strand starting at position 1028 of SEQ ID NO: 1561955
ggcucuagguguuugaaau

SEQ ID NO: 1710856 - RNA, 19 nt, Artificial Sequence
  Description of Artificial Sequence: Synthetic oligonucleotide
  Antisense strand to SEQ ID NO: 1710855
auuucaaacaccuagagcc

SEQ ID NO: 1710857 - RNA, 19 nt, Artificial Sequence
  Description of Artificial Sequence: Synthetic oligonucleotide
  Sense strand starting at position 1029 of SEQ ID NO: 1561955
gcucuagguguuugaaauc

SEQ ID NO: 1710858 - RNA, 19 nt, Artificial Sequence
  Description of Artificial Sequence: Synthetic oligonucleotide
  Antisense strand to SEQ ID NO: 1710857
gauuucaaacaccuagagc

SEQ ID NO: 1710859 - RNA, 19 nt, Artificial Sequence
  Description of Artificial Sequence: Synthetic oligonucleotide
  Sense strand starting at position 1092 of SEQ ID NO: 1561955
ccuaaugccugcuuagacu

SEQ ID NO: 1710860 - RNA, 19 nt, Artificial Sequence
  Description of Artificial Sequence: Synthetic oligonucleotide
  Antisense strand to SEQ ID NO: 1710859
agucuaagcaggcauuagg

SEQ ID NO: 1710861 - RNA, 19 nt, Artificial Sequence
  Description of Artificial Sequence: Synthetic oligonucleotide
  Sense strand starting at position 1101 of SEQ ID NO: 1561955
ugcuuagacucagcugauu

SEQ ID NO: 1710862 - RNA, 19 nt, Artificial Sequence
  Description of Artificial Sequence: Synthetic oligonucleotide
  Antisense strand to SEQ ID NO: 1710861
aaucagcugagucuaagca

SEQ ID NO: 1710863 - RNA, 19 nt, Artificial Sequence
  Description of Artificial Sequence: Synthetic oligonucleotide
  Sense strand starting at position 1161 of SEQ ID NO: 1561955
gaaacauuuccucggugca

SEQ ID NO: 1710864 - RNA, 19 nt, Artificial Sequence
  Description of Artificial Sequence: Synthetic oligonucleotide
  Antisense strand to SEQ ID NO: 1710863
ugcaccgaggaaauguuuc

SEQ ID NO: 1710865 - RNA, 19 nt, Artificial Sequence
  Description of Artificial Sequence: Synthetic oligonucleotide
  Sense strand starting at position 1162 of SEQ ID NO: 1561955
aaacauuuccucggugcau

SEQ ID NO: 1710866 - RNA, 19 nt, Artificial Sequence
  Description of Artificial Sequence: Synthetic oligonucleotide
  Antisense strand to SEQ ID NO: 1710865
augcaccgaggaaauguuu

SEQ ID NO: 1710867 - RNA, 19 nt, Artificial Sequence
  Description of Artificial Sequence: Synthetic oligonucleotide
  Sense strand starting at position 1174 of SEQ ID NO: 1561955
ggugcaucugcuucguauu

SEQ ID NO: 1710868 - RNA, 19 nt, Artificial Sequence
  Description of Artificial Sequence: Synthetic oligonucleotide
  Antisense strand to SEQ ID NO: 1710867
aauacgaagcagaugcacc

SEQ ID NO: 1710869 - RNA, 19 nt, Artificial Sequence
  Description of Artificial Sequence: Synthetic oligonucleotide
  Sense strand starting at position 1232 of SEQ ID NO: 1561955
uguugaacaucaguucuga

SEQ ID NO: 1710870 - RNA, 19 nt, Artificial Sequence
  Description of Artificial Sequence: Synthetic oligonucleotide
  Antisense strand to SEQ ID NO: 1710869
ucagaacugauguucaaca

SEQ ID NO: 1710871 - RNA, 19 nt, Artificial Sequence
  Description of Artificial Sequence: Synthetic oligonucleotide
  Sense strand starting at position 1452 of SEQ ID NO: 1561955
ccuggagggaucgguuaaa

SEQ ID NO: 1710872 - RNA, 19 nt, Artificial Sequence
  Description of Artificial Sequence: Synthetic oligonucleotide
  Antisense strand to SEQ ID NO: 1710871
uuuaaccgaucccuccagg

SEQ ID NO: 1710873 - RNA, 19 nt, Artificial Sequence
  Description of Artificial Sequence: Synthetic oligonucleotide
  Sense strand starting at position 1455 of SEQ ID NO: 1561955
ggagggaucgguuaaagug

SEQ ID NO: 1710874 - RNA, 19 nt, Artificial Sequence
  Description of Artificial Sequence: Synthetic oligonucleotide
  Antisense strand to SEQ ID NO: 1710873
cacuuuaaccgaucccucc

SEQ ID NO: 1710875 - RNA, 19 nt, Artificial Sequence
  Description of Artificial Sequence: Synthetic oligonucleotide
  Sense strand starting at position 1509 of SEQ ID NO: 1561955
caugcaaaggccugaagua

SEQ ID NO: 1710876 - RNA, 19 nt, Artificial Sequence
  Description of Artificial Sequence: Synthetic oligonucleotide
  Antisense strand to SEQ ID NO: 1710875
uacuucaggccuuugcaug

SEQ ID NO: 1710877 - RNA, 19 nt, Artificial Sequence
  Description of Artificial Sequence: Synthetic oligonucleotide
  Sense strand starting at position 1542 of SEQ ID NO: 1561955
ucauucuggcacugucaaa

SEQ ID NO: 1710878 - RNA, 19 nt, Artificial Sequence
  Description of Artificial Sequence: Synthetic oligonucleotide
  Antisense strand to SEQ ID NO: 1710877
uuugacagugccagaauga

SEQ ID NO: 1710879 - RNA, 19 nt, Artificial Sequence
  Description of Artificial Sequence: Synthetic oligonucleotide
  Sense strand starting at position 1878 of SEQ ID NO: 1561955
gcuccugugccagauauaa

SEQ ID NO: 1710880 - RNA, 19 nt, Artificial Sequence
  Description of Artificial Sequence: Synthetic oligonucleotide
  Antisense strand to SEQ ID NO: 1710879
uuauaucuggcacaggagc

SEQ ID NO: 1710881 - RNA, 19 nt, Artificial Sequence
  Description of Artificial Sequence: Synthetic oligonucleotide
  Sense strand starting at position 1889 of SEQ ID NO: 1561955
agauauaaagugcgcauaa

SEQ ID NO: 1710882 - RNA, 19 nt, Artificial Sequence
  Description of Artificial Sequence: Synthetic oligonucleotide
  Antisense strand to SEQ ID NO: 1710881
uuaugcgcacuuuauaucu

SEQ ID NO: 1710883 - RNA, 19 nt, Artificial Sequence
  Description of Artificial Sequence: Synthetic oligonucleotide
  Sense strand starting at position 1890 of SEQ ID NO: 1561955
gauauaaagugcgcauaaa

SEQ ID NO: 1710884 - RNA, 19 nt, Artificial Sequence
  Description of Artificial Sequence: Synthetic oligonucleotide
  Antisense strand to SEQ ID NO: 1710883
uuuaugcgcacuuuauauc

SEQ ID NO: 1710885 - RNA, 19 nt, Artificial Sequence
  Description of Artificial Sequence: Synthetic oligonucleotide
  Sense strand starting at position 2286 of SEQ ID NO: 1561955
aagagaacucguugccaug

SEQ ID NO: 1710886 - RNA, 19 nt, Artificial Sequence
  Description of Artificial Sequence: Synthetic oligonucleotide
  Antisense strand to SEQ ID NO: 1710885
cauggcaacgaguucucuu

SEQ ID NO: 1710887 - RNA, 19 nt, Artificial Sequence
  Description of Artificial Sequence: Synthetic oligonucleotide
  Sense strand starting at position 2288 of SEQ ID NO: 1561955
gagaacucguugccaugaa

SEQ ID NO: 1710888 - RNA, 19 nt, Artificial Sequence
  Description of Artificial Sequence: Synthetic oligonucleotide
  Antisense strand to SEQ ID NO: 1710887
uucauggcaacgaguucuc

SEQ ID NO: 1710889 - RNA, 19 nt, Artificial Sequence
  Description of Artificial Sequence: Synthetic oligonucleotide
  Sense strand starting at position 2646 of SEQ ID NO: 1561955
caggcacaccucggagaua

SEQ ID NO: 1710890 - RNA, 19 nt, Artificial Sequence
  Description of Artificial Sequence: Synthetic oligonucleotide
  Antisense strand to SEQ ID NO: 1710889
uaucuccgaggugugccug

SEQ ID NO: 1710891 - RNA, 19 nt, Artificial Sequence
  Description of Artificial Sequence: Synthetic oligonucleotide
  Sense strand starting at position 2658 of SEQ ID NO: 1561955
ggagauauucuggguucag

SEQ ID NO: 1710892 - RNA, 19 nt, Artificial Sequence
  Description of Artificial Sequence: Synthetic oligonucleotide
  Antisense strand to SEQ ID NO: 1710891
cugaacccagaauaucucc

SEQ ID NO: 1710893 - RNA, 19 nt, Artificial Sequence
  Description of Artificial Sequence: Synthetic oligonucleotide
  Sense strand starting at position 2699 of SEQ ID NO: 1561955
gagguaugccucuauauac

SEQ ID NO: 1710894 - RNA, 19 nt, Artificial Sequence
  Description of Artificial Sequence: Synthetic oligonucleotide
  Antisense strand to SEQ ID NO: 1710893
guauauagaggcauaccuc

SEQ ID NO: 1710895 - RNA, 19 nt, Artificial Sequence
  Description of Artificial Sequence: Synthetic oligonucleotide
  Sense strand starting at position 2843 of SEQ ID NO: 1561955
cucauuguguaucucuuaa

SEQ ID NO: 1710896 - RNA, 19 nt, Artificial Sequence
  Description of Artificial Sequence: Synthetic oligonucleotide
  Antisense strand to SEQ ID NO: 1710895
uuaagagauacacaaugag

SEQ ID NO: 1710897 - RNA, 19 nt, Artificial Sequence
  Description of Artificial Sequence: Synthetic oligonucleotide
  Sense strand starting at position 564 of SEQ ID NO: 1561956
uuggucaugcuccaagaga

SEQ ID NO: 1710898 - RNA, 19 nt, Artificial Sequence
  Description of Artificial Sequence: Synthetic oligonucleotide
  Antisense strand to SEQ ID NO: 1710897
ucucuuggagcaugaccaa

SEQ ID NO: 1710899 - RNA, 19 nt, Artificial Sequence
  Description of Artificial Sequence: Synthetic oligonucleotide
  Sense strand starting at position 663 of SEQ ID NO: 1561956
ucaggaaaucuagguuuga

SEQ ID NO: 1710900 - RNA, 19 nt, Artificial Sequence
  Description of Artificial Sequence: Synthetic oligonucleotide
  Antisense strand to SEQ ID NO: 1710899
ucaaaccuagauuuccuga

SEQ ID NO: 1710901 - RNA, 19 nt, Artificial Sequence
  Description of Artificial Sequence: Synthetic oligonucleotide
  Sense strand starting at position 667 of SEQ ID NO: 1561956
gaaaucuagguuugagucu

SEQ ID NO: 1710902 - RNA, 19 nt, Artificial Sequence
  Description of Artificial Sequence: Synthetic oligonucleotide
  Antisense strand to SEQ ID NO: 1710901
agacucaaaccuagauuuc

SEQ ID NO: 1710903 - RNA, 19 nt, Artificial Sequence
  Description of Artificial Sequence: Synthetic oligonucleotide
  Sense strand starting at position 678 of SEQ ID NO: 1561956
uugagucucugauuugcca

SEQ ID NO: 1710904 - RNA, 19 nt, Artificial Sequence
  Description of Artificial Sequence: Synthetic oligonucleotide
  Antisense strand to SEQ ID NO: 1710903
uggcaaaucagagacucaa

SEQ ID NO: 1710905 - RNA, 19 nt, Artificial Sequence
  Description of Artificial Sequence: Synthetic oligonucleotide
  Sense strand starting at position 682 of SEQ ID NO: 1561956
gucucugauuugccaccaa

SEQ ID NO: 1710906 - RNA, 19 nt, Artificial Sequence
  Description of Artificial Sequence: Synthetic oligonucleotide
  Antisense strand to SEQ ID NO: 1710905
uugguggcaaaucagagac

SEQ ID NO: 1710907 - RNA, 19 nt, Artificial Sequence
  Description of Artificial Sequence: Synthetic oligonucleotide
  Sense strand starting at position 733 of SEQ ID NO: 1561956
ggaccuguuucccugucua

SEQ ID NO: 1710908 - RNA, 19 nt, Artificial Sequence
  Description of Artificial Sequence: Synthetic oligonucleotide
  Antisense strand to SEQ ID NO: 1710907
uagacagggaaacaggucc

SEQ ID NO: 1710909 - RNA, 19 nt, Artificial Sequence
  Description of Artificial Sequence: Synthetic oligonucleotide
  Sense strand starting at position 737 of SEQ ID NO: 1561956
cuguuucccugucuacaga

SEQ ID NO: 1710910 - RNA, 19 nt, Artificial Sequence
  Description of Artificial Sequence: Synthetic oligonucleotide
  Antisense strand to SEQ ID NO: 1710909
ucuguagacagggaaacag

SEQ ID NO: 1710911 - RNA, 19 nt, Artificial Sequence
  Description of Artificial Sequence: Synthetic oligonucleotide
  Sense strand starting at position 1204 of SEQ ID NO: 1561956
uucccauccuuagggagau

SEQ ID NO: 1710912 - RNA, 19 nt, Artificial Sequence
  Description of Artificial Sequence: Synthetic oligonucleotide
  Antisense strand to SEQ ID NO: 1710911
aucucccuaaggaugggaa

SEQ ID NO: 1710913 - RNA, 19 nt, Artificial Sequence
  Description of Artificial Sequence: Synthetic oligonucleotide
  Sense strand starting at position 1217 of SEQ ID NO: 1561956
ggagaugugucgccucucu

SEQ ID NO: 1710914 - RNA, 19 nt, Artificial Sequence
  Description of Artificial Sequence: Synthetic oligonucleotide
  Antisense strand to SEQ ID NO: 1710913
agagaggcgacacaucucc

SEQ ID NO: 1710915 - RNA, 19 nt, Artificial Sequence
  Description of Artificial Sequence: Synthetic oligonucleotide
  Sense strand starting at position 2536 of SEQ ID NO: 1561956
gagguucccuggcguuuau

SEQ ID NO: 1710916 - RNA, 19 nt, Artificial Sequence
  Description of Artificial Sequence: Synthetic oligonucleotide
  Antisense strand to SEQ ID NO: 1710915
auaaacgccagggaaccuc

SEQ ID NO: 1710917 - RNA, 19 nt, Artificial Sequence
  Description of Artificial Sequence: Synthetic oligonucleotide
  Sense strand starting at position 2540 of SEQ ID NO: 1561956
uucccuggcguuuaucaga

SEQ ID NO: 1710918 - RNA, 19 nt, Artificial Sequence
  Description of Artificial Sequence: Synthetic oligonucleotide
  Antisense strand to SEQ ID NO: 1710917
ucugauaaacgccagggaa

SEQ ID NO: 1710919 - RNA, 19 nt, Artificial Sequence
  Description of Artificial Sequence: Synthetic oligonucleotide
  Sense strand starting at position 2707 of SEQ ID NO: 1561956
ggucaucuggcacagucua

SEQ ID NO: 1710920 - RNA, 19 nt, Artificial Sequence
  Description of Artificial Sequence: Synthetic oligonucleotide
  Antisense strand to SEQ ID NO: 1710919
uagacugugccagaugacc

SEQ ID NO: 1710921 - RNA, 19 nt, Artificial Sequence
  Description of Artificial Sequence: Synthetic oligonucleotide
  Sense strand starting at position 2851 of SEQ ID NO: 1561956
gggugagccuugaguggau

SEQ ID NO: 1710922 - RNA, 19 nt, Artificial Sequence
  Description of Artificial Sequence: Synthetic oligonucleotide
  Antisense strand to SEQ ID NO: 1710921
auccacucaaggcucaccc

SEQ ID NO: 1710923 - RNA, 19 nt, Artificial Sequence
  Description of Artificial Sequence: Synthetic oligonucleotide
  Sense strand starting at position 3476 of SEQ ID NO: 1561956
cccucagcuuucccgacau

SEQ ID NO: 1710924 - RNA, 19 nt, Artificial Sequence
  Description of Artificial Sequence: Synthetic oligonucleotide
  Antisense strand to SEQ ID NO: 1710923
augucgggaaagcugaggg

SEQ ID NO: 1710925 - RNA, 19 nt, Artificial Sequence
  Description of Artificial Sequence: Synthetic oligonucleotide
  Sense strand starting at position 3478 of SEQ ID NO: 1561956
cucagcuuucccgacauaa

SEQ ID NO: 1710926 - RNA, 19 nt, Artificial Sequence
  Description of Artificial Sequence: Synthetic oligonucleotide
  Antisense strand to SEQ ID NO: 1710925
uuaugucgggaaagcugag

SEQ ID NO: 1710927 - RNA, 19 nt, Artificial Sequence
  Description of Artificial Sequence: Synthetic oligonucleotide
  Sense strand starting at position 3564 of SEQ ID NO: 1561956
gguaaaggguacuaacagu

SEQ ID NO: 1710928 - RNA, 19 nt, Artificial Sequence
  Description of Artificial Sequence: Synthetic oligonucleotide
  Antisense strand to SEQ ID NO: 1710927
acuguuaguacccuuuacc

SEQ ID NO: 1710929 - RNA, 19 nt, Artificial Sequence
  Description of Artificial Sequence: Synthetic oligonucleotide
  Sense strand starting at position 3570 of SEQ ID NO: 1561956
ggguacuaacaguguguau

SEQ ID NO: 1710930 - RNA, 19 nt, Artificial Sequence
  Description of Artificial Sequence: Synthetic oligonucleotide
  Antisense strand to SEQ ID NO: 1710929
auacacacuguuaguaccc

SEQ ID NO: 1710931 - RNA, 19 nt, Artificial Sequence
  Description of Artificial Sequence: Synthetic oligonucleotide
  Sense strand starting at position 3572 of SEQ ID NO: 1561956
guacuaacaguguguauga

SEQ ID NO: 1710932 - RNA, 19 nt, Artificial Sequence
  Description of Artificial Sequence: Synthetic oligonucleotide
  Antisense strand to SEQ ID NO: 1710931
ucauacacacuguuaguac

SEQ ID NO: 1710933 - RNA, 19 nt, Artificial Sequence
  Description of Artificial Sequence: Synthetic oligonucleotide
  Sense strand starting at position 3573 of SEQ ID NO: 1561956
uacuaacaguguguaugaa

SEQ ID NO: 1710934 - RNA, 19 nt, Artificial Sequence
  Description of Artificial Sequence: Synthetic oligonucleotide
  Antisense strand to SEQ ID NO: 1710933
uucauacacacuguuagua

SEQ ID NO: 1710935 - RNA, 19 nt, Artificial Sequence
  Description of Artificial Sequence: Synthetic oligonucleotide
  Sense strand starting at position 3811 of SEQ ID NO: 1561956
cucugaaaccugugugguu

SEQ ID NO: 1710936 - RNA, 19 nt, Artificial Sequence
  Description of Artificial Sequence: Synthetic oligonucleotide
  Antisense strand to SEQ ID NO: 1710935
aaccacacagguuucagag

SEQ ID NO: 1710937 - RNA, 19 nt, Artificial Sequence
  Description of Artificial Sequence: Synthetic oligonucleotide
  Sense strand starting at position 3812 of SEQ ID NO: 1561956
ucugaaaccugugugguua

SEQ ID NO: 1710938 - RNA, 19 nt, Artificial Sequence
  Description of Artificial Sequence: Synthetic oligonucleotide
  Antisense strand to SEQ ID NO: 1710937
uaaccacacagguuucaga

SEQ ID NO: 1710939 - RNA, 19 nt, Artificial Sequence
  Description of Artificial Sequence: Synthetic oligonucleotide
  Sense strand starting at position 3814 of SEQ ID NO: 1561956
ugaaaccugugugguuaga

SEQ ID NO: 1710940 - RNA, 19 nt, Artificial Sequence
  Description of Artificial Sequence: Synthetic oligonucleotide
  Antisense strand to SEQ ID NO: 1710939
ucuaaccacacagguuuca

SEQ ID NO: 1710941 - RNA, 19 nt, Artificial Sequence
  Description of Artificial Sequence: Synthetic oligonucleotide
  Sense strand starting at position 3816 of SEQ ID NO: 1561956
aaaccugugugguuagaac

SEQ ID NO: 1710942 - RNA, 19 nt, Artificial Sequence
  Description of Artificial Sequence: Synthetic oligonucleotide
  Antisense strand to SEQ ID NO: 1710941
guucuaaccacacagguuu

SEQ ID NO: 1710943 - RNA, 19 nt, Artificial Sequence
  Description of Artificial Sequence: Synthetic oligonucleotide
  Sense strand starting at position 3824 of SEQ ID NO: 1561956
gugguuagaacagaagguu

SEQ ID NO: 1710944 - RNA, 19 nt, Artificial Sequence
  Description of Artificial Sequence: Synthetic oligonucleotide
  Antisense strand to SEQ ID NO: 1710943
aaccuucuguucuaaccac

SEQ ID NO: 1710945 - RNA, 19 nt, Artificial Sequence
  Description of Artificial Sequence: Synthetic oligonucleotide
  Sense strand starting at position 3879 of SEQ ID NO: 1561956
gagccuggcucacucuaua

SEQ ID NO: 1710946 - RNA, 19 nt, Artificial Sequence
  Description of Artificial Sequence: Synthetic oligonucleotide
  Antisense strand to SEQ ID NO: 1710945
uauagagugagccaggcuc

SEQ ID NO: 1710947 - RNA, 19 nt, Artificial Sequence
  Description of Artificial Sequence: Synthetic oligonucleotide
  Sense strand starting at position 3882 of SEQ ID NO: 1561956
ccuggcucacucuauagaa

SEQ ID NO: 1710948 - RNA, 19 nt, Artificial Sequence
  Description of Artificial Sequence: Synthetic oligonucleotide
  Antisense strand to SEQ ID NO: 1710947
uucuauagagugagccagg

SEQ ID NO: 1710949 - RNA, 19 nt, Artificial Sequence
  Description of Artificial Sequence: Synthetic oligonucleotide
  Sense strand starting at position 3884 of SEQ ID NO: 1561956
uggcucacucuauagaauu

SEQ ID NO: 1710950 - RNA, 19 nt, Artificial Sequence
  Description of Artificial Sequence: Synthetic oligonucleotide
  Antisense strand to SEQ ID NO: 1710949
aauucuauagagugagcca

SEQ ID NO: 1710951 - RNA, 19 nt, Artificial Sequence
  Description of Artificial Sequence: Synthetic oligonucleotide
  Sense strand starting at position 3948 of SEQ ID NO: 1561956
cuagcagguuuguguacaa

SEQ ID NO: 1710952 - RNA, 19 nt, Artificial Sequence
  Description of Artificial Sequence: Synthetic oligonucleotide
  Antisense strand to SEQ ID NO: 1710951
uuguacacaaaccugcuag

SEQ ID NO: 1710953 - RNA, 19 nt, Artificial Sequence
  Description of Artificial Sequence: Synthetic oligonucleotide
  Sense strand starting at position 3953 of SEQ ID NO: 1561956
agguuuguguacaaggagu

SEQ ID NO: 1710954 - RNA, 19 nt, Artificial Sequence
  Description of Artificial Sequence: Synthetic oligonucleotide
  Antisense strand to SEQ ID NO: 1710953
acuccuuguacacaaaccu

SEQ ID NO: 1710955 - RNA, 19 nt, Artificial Sequence
  Description of Artificial Sequence: Synthetic oligonucleotide
  Sense strand starting at position 3979 of SEQ ID NO: 1561956
gagauaaacuguuggugga

SEQ ID NO: 1710956 - RNA, 19 nt, Artificial Sequence
  Description of Artificial Sequence: Synthetic oligonucleotide
  Antisense strand to SEQ ID NO: 1710955
uccaccaacaguuuaucuc

SEQ ID NO: 1710957 - RNA, 19 nt, Artificial Sequence
  Description of Artificial Sequence: Synthetic oligonucleotide
  Sense strand starting at position 3981 of SEQ ID NO: 1561956
gauaaacuguugguggaga

SEQ ID NO: 1710958 - RNA, 19 nt, Artificial Sequence
  Description of Artificial Sequence: Synthetic oligonucleotide
  Antisense strand to SEQ ID NO: 1710957
ucuccaccaacaguuuauc

SEQ ID NO: 1710959 - RNA, 19 nt, Artificial Sequence
  Description of Artificial Sequence: Synthetic oligonucleotide
  Sense strand starting at position 35 of SEQ ID NO: 1561957
caaugugcuuguuccaaag

SEQ ID NO: 1710960 - RNA, 19 nt, Artificial Sequence
  Description of Artificial Sequence: Synthetic oligonucleotide
  Antisense strand to SEQ ID NO: 1710959
cuuuggaacaagcacauug

SEQ ID NO: 1710961 - RNA, 19 nt, Artificial Sequence
  Description of Artificial Sequence: Synthetic oligonucleotide
  Sense strand starting at position 41 of SEQ ID NO: 1561957
gcuuguuccaaaggguaag

SEQ ID NO: 1710962 - RNA, 19 nt, Artificial Sequence
  Description of Artificial Sequence: Synthetic oligonucleotide
  Antisense strand to SEQ ID NO: 1710961
cuuacccuuuggaacaagc

SEQ ID NO: 1710963 - RNA, 19 nt, Artificial Sequence
  Description of Artificial Sequence: Synthetic oligonucleotide
  Sense strand starting at position 42 of SEQ ID NO: 1561957
cuuguuccaaaggguaaga

SEQ ID NO: 1710964 - RNA, 19 nt, Artificial Sequence
  Description of Artificial Sequence: Synthetic oligonucleotide
  Antisense strand to SEQ ID NO: 1710963
ucuuacccuuuggaacaag

SEQ ID NO: 1710965 - RNA, 19 nt, Artificial Sequence
  Description of Artificial Sequence: Synthetic oligonucleotide
  Sense strand starting at position 59 of SEQ ID NO: 1561957
gauaaagguccugacagcu

SEQ ID NO: 1710966 - RNA, 19 nt, Artificial Sequence
  Description of Artificial Sequence: Synthetic oligonucleotide
  Antisense strand to SEQ ID NO: 1710965
agcugucaggaccuuuauc

SEQ ID NO: 1710967 - RNA, 19 nt, Artificial Sequence
  Description of Artificial Sequence: Synthetic oligonucleotide
  Sense strand starting at position 273 of SEQ ID NO: 1561957
acacaagauugcugucaag

SEQ ID NO: 1710968 - RNA, 19 nt, Artificial Sequence
  Description of Artificial Sequence: Synthetic oligonucleotide
  Antisense strand to SEQ ID NO: 1710967
cuugacagcaaucuugugu

SEQ ID NO: 1710969 - RNA, 19 nt, Artificial Sequence
  Description of Artificial Sequence: Synthetic oligonucleotide
  Sense strand starting at position 601 of SEQ ID NO: 1561957
ugcggagaccacuguucaa

SEQ ID NO: 1710970 - RNA, 19 nt, Artificial Sequence
  Description of Artificial Sequence: Synthetic oligonucleotide
  Antisense strand to SEQ ID NO: 1710969
uugaacaguggucuccgca

SEQ ID NO: 1710971 - RNA, 19 nt, Artificial Sequence
  Description of Artificial Sequence: Synthetic oligonucleotide
  Sense strand starting at position 1225 of SEQ ID NO: 1561957
gccacucuuccugacagga

SEQ ID NO: 1710972 - RNA, 19 nt, Artificial Sequence
  Description of Artificial Sequence: Synthetic oligonucleotide
  Antisense strand to SEQ ID NO: 1710971
uccugucaggaagaguggc

SEQ ID NO: 1710973 - RNA, 19 nt, Artificial Sequence
  Description of Artificial Sequence: Synthetic oligonucleotide
  Sense strand starting at position 2052 of SEQ ID NO: 1561957
ugccuugagagccgcuaau

SEQ ID NO: 1710974 - RNA, 19 nt, Artificial Sequence
  Description of Artificial Sequence: Synthetic oligonucleotide
  Antisense strand to SEQ ID NO: 1710973
auuagcggcucucaaggca

SEQ ID NO: 1710975 - RNA, 19 nt, Artificial Sequence
  Description of Artificial Sequence: Synthetic oligonucleotide
  Sense strand starting at position 2162 of SEQ ID NO: 1561957
gcccuuguaccuugagaag

SEQ ID NO: 1710976 - RNA, 19 nt, Artificial Sequence
  Description of Artificial Sequence: Synthetic oligonucleotide
  Antisense strand to SEQ ID NO: 1710975
cuucucaagguacaagggc

SEQ ID NO: 1710977 - RNA, 19 nt, Artificial Sequence
  Description of Artificial Sequence: Synthetic oligonucleotide
  Sense strand starting at position 2275 of SEQ ID NO: 1561957
ccaguucugcccugggcaa

SEQ ID NO: 1710978 - RNA, 19 nt, Artificial Sequence
  Description of Artificial Sequence: Synthetic oligonucleotide
  Antisense strand to SEQ ID NO: 1710977
uugcccagggcagaacugg

SEQ ID NO: 1710979 - RNA, 19 nt, Artificial Sequence
  Description of Artificial Sequence: Synthetic oligonucleotide
  Sense strand starting at position 2276 of SEQ ID NO: 1561957
caguucugcccugggcaau

SEQ ID NO: 1710980 - RNA, 19 nt, Artificial Sequence
  Description of Artificial Sequence: Synthetic oligonucleotide
  Antisense strand to SEQ ID NO: 1710979
auugcccagggcagaacug

SEQ ID NO: 1710981 - RNA, 19 nt, Artificial Sequence
  Description of Artificial Sequence: Synthetic oligonucleotide
  Sense strand starting at position 2388 of SEQ ID NO: 1561957
ucccacauuugcuguguga

SEQ ID NO: 1710982 - RNA, 19 nt, Artificial Sequence
  Description of Artificial Sequence: Synthetic oligonucleotide
  Antisense strand to SEQ ID NO: 1710981
ucacacagcaaauguggga

SEQ ID NO: 1710983 - RNA, 19 nt, Artificial Sequence
  Description of Artificial Sequence: Synthetic oligonucleotide
  Sense strand starting at position 2390 of SEQ ID NO: 1561957
ccacauuugcugugugauc

SEQ ID NO: 1710984 - RNA, 19 nt, Artificial Sequence
  Description of Artificial Sequence: Synthetic oligonucleotide
  Antisense strand to SEQ ID NO: 1710983
gaucacacagcaaaugugg

SEQ ID NO: 1710985 - RNA, 19 nt, Artificial Sequence
  Description of Artificial Sequence: Synthetic oligonucleotide
  Sense strand starting at position 2391 of SEQ ID NO: 1561957
cacauuugcugugugaucu

SEQ ID NO: 1710986 - RNA, 19 nt, Artificial Sequence
  Description of Artificial Sequence: Synthetic oligonucleotide
  Antisense strand to SEQ ID NO: 1710985
agaucacacagcaaaugug

SEQ ID NO: 1710987 - RNA, 19 nt, Artificial Sequence
  Description of Artificial Sequence: Synthetic oligonucleotide
  Sense strand starting at position 2456 of SEQ ID NO: 1561957
cagacaugccuuugugucu

SEQ ID NO: 1710988 - RNA, 19 nt, Artificial Sequence
  Description of Artificial Sequence: Synthetic oligonucleotide
  Antisense strand to SEQ ID NO: 1710987
agacacaaaggcaugucug

SEQ ID NO: 1710989 - RNA, 19 nt, Artificial Sequence
  Description of Artificial Sequence: Synthetic oligonucleotide
  Sense strand starting at position 2462 of SEQ ID NO: 1561957
ugccuuugugucuugagca

SEQ ID NO: 1710990 - RNA, 19 nt, Artificial Sequence
  Description of Artificial Sequence: Synthetic oligonucleotide
  Antisense strand to SEQ ID NO: 1710989
ugcucaagacacaaaggca

SEQ ID NO: 1710991 - RNA, 19 nt, Artificial Sequence
  Description of Artificial Sequence: Synthetic oligonucleotide
  Sense strand starting at position 2467 of SEQ ID NO: 1561957
uugugucuugagcaucuau

SEQ ID NO: 1710992 - RNA, 19 nt, Artificial Sequence
  Description of Artificial Sequence: Synthetic oligonucleotide
  Antisense strand to SEQ ID NO: 1710991
auagaugcucaagacacaa

SEQ ID NO: 1710993 - RNA, 19 nt, Artificial Sequence
  Description of Artificial Sequence: Synthetic oligonucleotide
  Sense strand starting at position 2486 of SEQ ID NO: 1561957
ucuguuucuccuugugcua

SEQ ID NO: 1710994 - RNA, 19 nt, Artificial Sequence
  Description of Artificial Sequence: Synthetic oligonucleotide
  Antisense strand to SEQ ID NO: 1710993
uagcacaaggagaaacaga

SEQ ID NO: 1710995 - RNA, 19 nt, Artificial Sequence
  Description of Artificial Sequence: Synthetic oligonucleotide
  Sense strand starting at position 2522 of SEQ ID NO: 1561957
gaagaaugagcucggcaag

SEQ ID NO: 1710996 - RNA, 19 nt, Artificial Sequence
  Description of Artificial Sequence: Synthetic oligonucleotide
  Antisense strand to SEQ ID NO: 1710995
cuugccgagcucauucuuc

SEQ ID NO: 1710997 - RNA, 19 nt, Artificial Sequence
  Description of Artificial Sequence: Synthetic oligonucleotide
  Sense strand starting at position 2525 of SEQ ID NO: 1561957
gaaugagcucggcaagaua

SEQ ID NO: 1710998 - RNA, 19 nt, Artificial Sequence
  Description of Artificial Sequence: Synthetic oligonucleotide
  Antisense strand to SEQ ID NO: 1710997
uaucuugccgagcucauuc

SEQ ID NO: 1710999 - RNA, 19 nt, Artificial Sequence
  Description of Artificial Sequence: Synthetic oligonucleotide
  Sense strand starting at position 2889 of SEQ ID NO: 1561957
ccacauauuucuuguucgu

SEQ ID NO: 1711000 - RNA, 19 nt, Artificial Sequence
  Description of Artificial Sequence: Synthetic oligonucleotide
  Antisense strand to SEQ ID NO: 1710999
acgaacaagaaauaugugg

SEQ ID NO: 1711001 - RNA, 19 nt, Artificial Sequence
  Description of Artificial Sequence: Synthetic oligonucleotide
  Sense strand starting at position 2891 of SEQ ID NO: 1561957
acauauuucuuguucgugu

SEQ ID NO: 1711002 - RNA, 19 nt, Artificial Sequence
  Description of Artificial Sequence: Synthetic oligonucleotide
  Antisense strand to SEQ ID NO: 1711001
acacgaacaagaaauaugu

SEQ ID NO: 1711003 - RNA, 19 nt, Artificial Sequence
  Description of Artificial Sequence: Synthetic oligonucleotide
  Sense strand starting at position 2892 of SEQ ID NO: 1561957
cauauuucuuguucguguu

SEQ ID NO: 1711004 - RNA, 19 nt, Artificial Sequence
  Description of Artificial Sequence: Synthetic oligonucleotide
  Antisense strand to SEQ ID NO: 1711003
aacacgaacaagaaauaug

SEQ ID NO: 1711005 - RNA, 19 nt, Artificial Sequence
  Description of Artificial Sequence: Synthetic oligonucleotide
  Sense strand starting at position 2896 of SEQ ID NO: 1561957
uuucuuguucguguuguau

SEQ ID NO: 1711006 - RNA, 19 nt, Artificial Sequence
  Description of Artificial Sequence: Synthetic oligonucleotide
  Antisense strand to SEQ ID NO: 1711005
auacaacacgaacaagaaa

SEQ ID NO: 1711007 - RNA, 19 nt, Artificial Sequence
  Description of Artificial Sequence: Synthetic oligonucleotide
  Sense strand starting at position 2902 of SEQ ID NO: 1561957
guucguguuguaucuguga

SEQ ID NO: 1711008 - RNA, 19 nt, Artificial Sequence
  Description of Artificial Sequence: Synthetic oligonucleotide
  Antisense strand to SEQ ID NO: 1711007
ucacagauacaacacgaac

SEQ ID NO: 1711009 - RNA, 19 nt, Artificial Sequence
  Description of Artificial Sequence: Synthetic oligonucleotide
  Sense strand starting at position 2946 of SEQ ID NO: 1561957
uaggcagcccaguaaauau

SEQ ID NO: 1711010 - RNA, 19 nt, Artificial Sequence
  Description of Artificial Sequence: Synthetic oligonucleotide
  Antisense strand to SEQ ID NO: 1711009
auauuuacugggcugccua

SEQ ID NO: 1711011 - RNA, 19 nt, Artificial Sequence
  Description of Artificial Sequence: Synthetic oligonucleotide
  Sense strand starting at position 2977 of SEQ ID NO: 1561957
gucuaauaauaguagcaaa

SEQ ID NO: 1711012 - RNA, 19 nt, Artificial Sequence
  Description of Artificial Sequence: Synthetic oligonucleotide
  Antisense strand to SEQ ID NO: 1711011
uuugcuacuauuauuagac

SEQ ID NO: 1711013 - RNA, 19 nt, Artificial Sequence
  Description of Artificial Sequence: Synthetic oligonucleotide
  Sense strand starting at position 2988 of SEQ ID NO: 1561957
guagcaaacuuauuaugcu

SEQ ID NO: 1711014 - RNA, 19 nt, Artificial Sequence
  Description of Artificial Sequence: Synthetic oligonucleotide
  Antisense strand to SEQ ID NO: 1711013
agcauaauaaguuugcuac

SEQ ID NO: 1711015 - RNA, 19 nt, Artificial Sequence
  Description of Artificial Sequence: Synthetic oligonucleotide
  Sense strand starting at position 3013 of SEQ ID NO: 1561957
gugcaaaguguuuaagcgu

SEQ ID NO: 1711016 - RNA, 19 nt, Artificial Sequence
  Description of Artificial Sequence: Synthetic oligonucleotide
  Antisense strand to SEQ ID NO: 1711015
acgcuuaaacacuuugcac

SEQ ID NO: 1711017 - RNA, 19 nt, Artificial Sequence
  Description of Artificial Sequence: Synthetic oligonucleotide
  Sense strand starting at position 3199 of SEQ ID NO: 1561957
agguaaggaguuugagcuu

SEQ ID NO: 1711018 - RNA, 19 nt, Artificial Sequence
  Description of Artificial Sequence: Synthetic oligonucleotide
  Antisense strand to SEQ ID NO: 1711017
aagcucaaacuccuuaccu

SEQ ID NO: 1711019 - RNA, 19 nt, Artificial Sequence
  Description of Artificial Sequence: Synthetic oligonucleotide
  Sense strand starting at position 3300 of SEQ ID NO: 1561957
ggcugcugucaagagaaca

SEQ ID NO: 1711020 - RNA, 19 nt, Artificial Sequence
  Description of Artificial Sequence: Synthetic oligonucleotide
  Antisense strand to SEQ ID NO: 1711019
uguucucuugacagcagcc

SEQ ID NO: 1711021 - RNA, 19 nt, Artificial Sequence
  Description of Artificial Sequence: Synthetic oligonucleotide
  Sense strand starting at position 3319 of SEQ ID NO: 1561957
gcauguugagcacaagagu

SEQ ID NO: 1711022 - RNA, 19 nt, Artificial Sequence
  Description of Artificial Sequence: Synthetic oligonucleotide
  Antisense strand to SEQ ID NO: 1711021
acucuugugcucaacaugc

SEQ ID NO: 1711023 - RNA, 19 nt, Artificial Sequence
  Description of Artificial Sequence: Synthetic oligonucleotide
  Sense strand starting at position 3380 of SEQ ID NO: 1561957
uggccuggugcagagaaau

SEQ ID NO: 1711024 - RNA, 19 nt, Artificial Sequence
  Description of Artificial Sequence: Synthetic oligonucleotide
  Antisense strand to SEQ ID NO: 1711023
auuucucugcaccaggcca

SEQ ID NO: 1711025 - RNA, 19 nt, Artificial Sequence
  Description of Artificial Sequence: Synthetic oligonucleotide
  Sense strand starting at position 3409 of SEQ ID NO: 1561957
aagagauguuagccuguaa

SEQ ID NO: 1711026 - RNA, 19 nt, Artificial Sequence
  Description of Artificial Sequence: Synthetic oligonucleotide
  Antisense strand to SEQ ID NO: 1711025
uuacaggcuaacaucucuu

SEQ ID NO: 1711027 - RNA, 19 nt, Artificial Sequence
  Description of Artificial Sequence: Synthetic oligonucleotide
  Sense strand starting at position 3498 of SEQ ID NO: 1561957
uagcacuccucuguagaga

SEQ ID NO: 1711028 - RNA, 19 nt, Artificial Sequence
  Description of Artificial Sequence: Synthetic oligonucleotide
  Antisense strand to SEQ ID NO: 1711027
ucucuacagaggagugcua

SEQ ID NO: 1711029 - RNA, 19 nt, Artificial Sequence
  Description of Artificial Sequence: Synthetic oligonucleotide
  Sense strand starting at position 3628 of SEQ ID NO: 1561957
ggcaacuucugcuagaacu

SEQ ID NO: 1711030 - RNA, 19 nt, Artificial Sequence
  Description of Artificial Sequence: Synthetic oligonucleotide
  Antisense strand to SEQ ID NO: 1711029
aguucuagcagaaguugcc

SEQ ID NO: 1711031 - RNA, 19 nt, Artificial Sequence
  Description of Artificial Sequence: Synthetic oligonucleotide
  Sense strand starting at position 3683 of SEQ ID NO: 1561957
ggcuccaugucugcuuaga

SEQ ID NO: 1711032 - RNA, 19 nt, Artificial Sequence
  Description of Artificial Sequence: Synthetic oligonucleotide
  Antisense strand to SEQ ID NO: 1711031
ucuaagcagacauggagcc

SEQ ID NO: 1711033 - RNA, 19 nt, Artificial Sequence
  Description of Artificial Sequence: Synthetic oligonucleotide
  Sense strand starting at position 3768 of SEQ ID NO: 1561957
uaagcuuagcuuugaguca

SEQ ID NO: 1711034 - RNA, 19 nt, Artificial Sequence
  Description of Artificial Sequence: Synthetic oligonucleotide
  Antisense strand to SEQ ID NO: 1711033
ugacucaaagcuaagcuua

SEQ ID NO: 1711035 - RNA, 19 nt, Artificial Sequence
  Description of Artificial Sequence: Synthetic oligonucleotide
  Sense strand starting at position 3775 of SEQ ID NO: 1561957
agcuuugagucaucccagu

SEQ ID NO: 1711036 - RNA, 19 nt, Artificial Sequence
  Description of Artificial Sequence: Synthetic oligonucleotide
  Antisense strand to SEQ ID NO: 1711035
acugggaugacucaaagcu

SEQ ID NO: 1711037 - RNA, 19 nt, Artificial Sequence
  Description of Artificial Sequence: Synthetic oligonucleotide
  Sense strand starting at position 3886 of SEQ ID NO: 1561957
gguggauacccugaguuca

SEQ ID NO: 1711038 - RNA, 19 nt, Artificial Sequence
  Description of Artificial Sequence: Synthetic oligonucleotide
  Antisense strand to SEQ ID NO: 1711037
ugaacucaggguauccacc

SEQ ID NO: 1711039 - RNA, 19 nt, Artificial Sequence
  Description of Artificial Sequence: Synthetic oligonucleotide
  Sense strand starting at position 4 of SEQ ID NO: 1561958
gggucuagucuuuaccuca

SEQ ID NO: 1711040 - RNA, 19 nt, Artificial Sequence
  Description of Artificial Sequence: Synthetic oligonucleotide
  Antisense strand to SEQ ID NO: 1711039
ugagguaaagacuagaccc

SEQ ID NO: 1711041 - RNA, 19 nt, Artificial Sequence
  Description of Artificial Sequence: Synthetic oligonucleotide
  Sense strand starting at position 19 of SEQ ID NO: 1561958
cucauaguguugcuaggau

SEQ ID NO: 1711042 - RNA, 19 nt, Artificial Sequence
  Description of Artificial Sequence: Synthetic oligonucleotide
  Antisense strand to SEQ ID NO: 1711041
auccuagcaacacuaugag

SEQ ID NO: 1711043 - RNA, 19 nt, Artificial Sequence
  Description of Artificial Sequence: Synthetic oligonucleotide
  Sense strand starting at position 66 of SEQ ID NO: 1561958
ggcacauggugguuuaaag

SEQ ID NO: 1711044 - RNA, 19 nt, Artificial Sequence
  Description of Artificial Sequence: Synthetic oligonucleotide
  Antisense strand to SEQ ID NO: 1711043
cuuuaaaccaccaugugcc

SEQ ID NO: 1711045 - RNA, 19 nt, Artificial Sequence
  Description of Artificial Sequence: Synthetic oligonucleotide
  Sense strand starting at position 88 of SEQ ID NO: 1561958
gggcucugucugcuugcaa

SEQ ID NO: 1711046 - RNA, 19 nt, Artificial Sequence
  Description of Artificial Sequence: Synthetic oligonucleotide
  Antisense strand to SEQ ID NO: 1711045
uugcaagcagacagagccc

SEQ ID NO: 1711047 - RNA, 19 nt, Artificial Sequence
  Description of Artificial Sequence: Synthetic oligonucleotide
  Sense strand starting at position 304 of SEQ ID NO: 1561958
gacgaagcuggccaagaau

SEQ ID NO: 1711048 - RNA, 19 nt, Artificial Sequence
  Description of Artificial Sequence: Synthetic oligonucleotide
  Antisense strand to SEQ ID NO: 1711047
auucuuggccagcuucguc

SEQ ID NO: 1711049 - RNA, 19 nt, Artificial Sequence
  Description of Artificial Sequence: Synthetic oligonucleotide
  Sense strand starting at position 307 of SEQ ID NO: 1561958
gaagcuggccaagaauauu

SEQ ID NO: 1711050 - RNA, 19 nt, Artificial Sequence
  Description of Artificial Sequence: Synthetic oligonucleotide
  Antisense strand to SEQ ID NO: 1711049
aauauucuuggccagcuuc

SEQ ID NO: 1711051 - RNA, 19 nt, Artificial Sequence
  Description of Artificial Sequence: Synthetic oligonucleotide
  Sense strand starting at position 345 of SEQ ID NO: 1561958
uuaauuaccgaaugcuuau

SEQ ID NO: 1711052 - RNA, 19 nt, Artificial Sequence
  Description of Artificial Sequence: Synthetic oligonucleotide
  Antisense strand to SEQ ID NO: 1711051
auaagcauucgguaauuaa

SEQ ID NO: 1711053 - RNA, 19 nt, Artificial Sequence
  Description of Artificial Sequence: Synthetic oligonucleotide
  Sense strand starting at position 454 of SEQ ID NO: 1561958
agugaauacucaguacgug

SEQ ID NO: 1711054 - RNA, 19 nt, Artificial Sequence
  Description of Artificial Sequence: Synthetic oligonucleotide
  Antisense strand to SEQ ID NO: 1711053
cacguacugaguauucacu

SEQ ID NO: 1711055 - RNA, 19 nt, Artificial Sequence
  Description of Artificial Sequence: Synthetic oligonucleotide
  Sense strand starting at position 571 of SEQ ID NO: 1561958
guauucucccagcaauuag

SEQ ID NO: 1711056 - RNA, 19 nt, Artificial Sequence
  Description of Artificial Sequence: Synthetic oligonucleotide
  Antisense strand to SEQ ID NO: 1711055
cuaauugcugggagaauac

SEQ ID NO: 1711057 - RNA, 19 nt, Artificial Sequence
  Description of Artificial Sequence: Synthetic oligonucleotide
  Sense strand starting at position 620 of SEQ ID NO: 1561958
ggacuucggaaguggaaau

SEQ ID NO: 1711058 - RNA, 19 nt, Artificial Sequence
  Description of Artificial Sequence: Synthetic oligonucleotide
  Antisense strand to SEQ ID NO: 1711057
auuuccacuuccgaagucc

SEQ ID NO: 1711059 - RNA, 19 nt, Artificial Sequence
  Description of Artificial Sequence: Synthetic oligonucleotide
  Sense strand starting at position 1430 of SEQ ID NO: 1561958
ggagucagauucccaguua

SEQ ID NO: 1711060 - RNA, 19 nt, Artificial Sequence
  Description of Artificial Sequence: Synthetic oligonucleotide
  Antisense strand to SEQ ID NO: 1711059
uaacugggaaucugacucc

SEQ ID NO: 1711061 - RNA, 19 nt, Artificial Sequence
  Description of Artificial Sequence: Synthetic oligonucleotide
  Sense strand starting at position 1507 of SEQ ID NO: 1561958
agcauuuacugagagcuau

SEQ ID NO: 1711062 - RNA, 19 nt, Artificial Sequence
  Description of Artificial Sequence: Synthetic oligonucleotide
  Antisense strand to SEQ ID NO: 1711061
auagcucucaguaaaugcu

SEQ ID NO: 1711063 - RNA, 19 nt, Artificial Sequence
  Description of Artificial Sequence: Synthetic oligonucleotide
  Sense strand starting at position 1523 of SEQ ID NO: 1561958
uaucaauggcccgacguuu

SEQ ID NO: 1711064 - RNA, 19 nt, Artificial Sequence
  Description of Artificial Sequence: Synthetic oligonucleotide
  Antisense strand to SEQ ID NO: 1711063
aaacgucgggccauugaua

SEQ ID NO: 1711065 - RNA, 19 nt, Artificial Sequence
  Description of Artificial Sequence: Synthetic oligonucleotide
  Sense strand starting at position 1541 of SEQ ID NO: 1561958
uuucuagggcuguggauau

SEQ ID NO: 1711066 - RNA, 19 nt, Artificial Sequence
  Description of Artificial Sequence: Synthetic oligonucleotide
  Antisense strand to SEQ ID NO: 1711065
auauccacagcccuagaaa

SEQ ID NO: 1711067 - RNA, 19 nt, Artificial Sequence
  Description of Artificial Sequence: Synthetic oligonucleotide
  Sense strand starting at position 1864 of SEQ ID NO: 1561958
gcaccuuucccuuaccgau

SEQ ID NO: 1711068 - RNA, 19 nt, Artificial Sequence
  Description of Artificial Sequence: Synthetic oligonucleotide
  Antisense strand to SEQ ID NO: 1711067
aucgguaagggaaaggugc

SEQ ID NO: 1711069 - RNA, 19 nt, Artificial Sequence
  Description of Artificial Sequence: Synthetic oligonucleotide
  Sense strand starting at position 2131 of SEQ ID NO: 1561958
cuuggauacccucgcuaca

SEQ ID NO: 1711070 - RNA, 19 nt, Artificial Sequence
  Description of Artificial Sequence: Synthetic oligonucleotide
  Antisense strand to SEQ ID NO: 1711069
uguagcgaggguauccaag

SEQ ID NO: 1711071 - RNA, 19 nt, Artificial Sequence
  Description of Artificial Sequence: Synthetic oligonucleotide
  Sense strand starting at position 2133 of SEQ ID NO: 1561958
uggauacccucgcuacaau

SEQ ID NO: 1711072 - RNA, 19 nt, Artificial Sequence
  Description of Artificial Sequence: Synthetic oligonucleotide
  Antisense strand to SEQ ID NO: 1711071
auuguagcgaggguaucca

SEQ ID NO: 1711073 - RNA, 19 nt, Artificial Sequence
  Description of Artificial Sequence: Synthetic oligonucleotide
  Sense strand starting at position 2134 of SEQ ID NO: 1561958
ggauacccucgcuacaauu

SEQ ID NO: 1711074 - RNA, 19 nt, Artificial Sequence
  Description of Artificial Sequence: Synthetic oligonucleotide
  Antisense strand to SEQ ID NO: 1711073
aauuguagcgaggguaucc

SEQ ID NO: 1711075 - RNA, 19 nt, Artificial Sequence
  Description of Artificial Sequence: Synthetic oligonucleotide
  Sense strand starting at position 2239 of SEQ ID NO: 1561958
ucgggauuagcuuagauug

SEQ ID NO: 1711076 - RNA, 19 nt, Artificial Sequence
  Description of Artificial Sequence: Synthetic oligonucleotide
  Antisense strand to SEQ ID NO: 1711075
caaucuaagcuaaucccga

SEQ ID NO: 1711077 - RNA, 19 nt, Artificial Sequence
  Description of Artificial Sequence: Synthetic oligonucleotide
  Sense strand starting at position 2301 of SEQ ID NO: 1561958
gacuaaccgcauuagggau

SEQ ID NO: 1711078 - RNA, 19 nt, Artificial Sequence
  Description of Artificial Sequence: Synthetic oligonucleotide
  Antisense strand to SEQ ID NO: 1711077
aucccuaaugcgguuaguc

SEQ ID NO: 1711079 - RNA, 19 nt, Artificial Sequence
  Description of Artificial Sequence: Synthetic oligonucleotide
  Sense strand starting at position 2345 of SEQ ID NO: 1561958
gugugcuuuccugaagacc

SEQ ID NO: 1711080 - RNA, 19 nt, Artificial Sequence
  Description of Artificial Sequence: Synthetic oligonucleotide
  Antisense strand to SEQ ID NO: 1711079
ggucuucaggaaagcacac

SEQ ID NO: 1711081 - RNA, 19 nt, Artificial Sequence
  Description of Artificial Sequence: Synthetic oligonucleotide
  Sense strand starting at position 2387 of SEQ ID NO: 1561958
gcagaaguaaauuggcuuu

SEQ ID NO: 1711082 - RNA, 19 nt, Artificial Sequence
  Description of Artificial Sequence: Synthetic oligonucleotide
  Antisense strand to SEQ ID NO: 1711081
aaagccaauuuacuucugc

SEQ ID NO: 1711083 - RNA, 19 nt, Artificial Sequence
  Description of Artificial Sequence: Synthetic oligonucleotide
  Sense strand starting at position 2390 of SEQ ID NO: 1561958
gaaguaaauuggcuuugcu

SEQ ID NO: 1711084 - RNA, 19 nt, Artificial Sequence
  Description of Artificial Sequence: Synthetic oligonucleotide
  Antisense strand to SEQ ID NO: 1711083
agcaaagccaauuuacuuc

SEQ ID NO: 1711085 - RNA, 19 nt, Artificial Sequence
  Description of Artificial Sequence: Synthetic oligonucleotide
  Sense strand starting at position 2393 of SEQ ID NO: 1561958
guaaauuggcuuugcugaa

SEQ ID NO: 1711086 - RNA, 19 nt, Artificial Sequence
  Description of Artificial Sequence: Synthetic oligonucleotide
  Antisense strand to SEQ ID NO: 1711085
uucagcaaagccaauuuac

SEQ ID NO: 1711087 - RNA, 19 nt, Artificial Sequence
  Description of Artificial Sequence: Synthetic oligonucleotide
  Sense strand starting at position 2643 of SEQ ID NO: 1561958
auaguugcuuuccuggaaa

SEQ ID NO: 1711088 - RNA, 19 nt, Artificial Sequence
  Description of Artificial Sequence: Synthetic oligonucleotide
  Antisense strand to SEQ ID NO: 1711087
uuuccaggaaagcaacuau

SEQ ID NO: 1711089 - RNA, 19 nt, Artificial Sequence
  Description of Artificial Sequence: Synthetic oligonucleotide
  Sense strand starting at position 2672 of SEQ ID NO: 1561958
uuauuaacacugugcaaga

SEQ ID NO: 1711090 - RNA, 19 nt, Artificial Sequence
  Description of Artificial Sequence: Synthetic oligonucleotide
  Antisense strand to SEQ ID NO: 1711089
ucuugcacaguguuaauaa

SEQ ID NO: 1711091 - RNA, 19 nt, Artificial Sequence
  Description of Artificial Sequence: Synthetic oligonucleotide
  Sense strand starting at position 2734 of SEQ ID NO: 1561958
gguuauuaggagcaugguu

SEQ ID NO: 1711092 - RNA, 19 nt, Artificial Sequence
  Description of Artificial Sequence: Synthetic oligonucleotide
  Antisense strand to SEQ ID NO: 1711091
aaccaugcuccuaauaacc

SEQ ID NO: 1711093 - RNA, 19 nt, Artificial Sequence
  Description of Artificial Sequence: Synthetic oligonucleotide
  Sense strand starting at position 2784 of SEQ ID NO: 1561958
ggaggaggguccuuucuuu

SEQ ID NO: 1711094 - RNA, 19 nt, Artificial Sequence
  Description of Artificial Sequence: Synthetic oligonucleotide
  Antisense strand to SEQ ID NO: 1711093
aaagaaaggacccuccucc

SEQ ID NO: 1711095 - RNA, 19 nt, Artificial Sequence
  Description of Artificial Sequence: Synthetic oligonucleotide
  Sense strand starting at position 2806 of SEQ ID NO: 1561958
gugugagacucuccuuucu

SEQ ID NO: 1711096 - RNA, 19 nt, Artificial Sequence
  Description of Artificial Sequence: Synthetic oligonucleotide
  Antisense strand to SEQ ID NO: 1711095
agaaaggagagucucacac

SEQ ID NO: 1711097 - RNA, 19 nt, Artificial Sequence
  Description of Artificial Sequence: Synthetic oligonucleotide
  Sense strand starting at position 2808 of SEQ ID NO: 1561958
gugagacucuccuuucuau

SEQ ID NO: 1711098 - RNA, 19 nt, Artificial Sequence
  Description of Artificial Sequence: Synthetic oligonucleotide
  Antisense strand to SEQ ID NO: 1711097
auagaaaggagagucucac

SEQ ID NO: 1711099 - RNA, 19 nt, Artificial Sequence
  Description of Artificial Sequence: Synthetic oligonucleotide
  Sense strand starting at position 2965 of SEQ ID NO: 1561958
aggucuuucuacccuggaa

SEQ ID NO: 1711100 - RNA, 19 nt, Artificial Sequence
  Description of Artificial Sequence: Synthetic oligonucleotide
  Antisense strand to SEQ ID NO: 1711099
uuccaggguagaaagaccu

SEQ ID NO: 1711101 - RNA, 19 nt, Artificial Sequence
  Description of Artificial Sequence: Synthetic oligonucleotide
  Sense strand starting at position 2967 of SEQ ID NO: 1561958
gucuuucuacccuggaaac

SEQ ID NO: 1711102 - RNA, 19 nt, Artificial Sequence
  Description of Artificial Sequence: Synthetic oligonucleotide
  Antisense strand to SEQ ID NO: 1711101
guuuccaggguagaaagac

SEQ ID NO: 1711103 - RNA, 19 nt, Artificial Sequence
  Description of Artificial Sequence: Synthetic oligonucleotide
  Sense strand starting at position 3052 of SEQ ID NO: 1561958
ugguauuggagucauugaa

SEQ ID NO: 1711104 - RNA, 19 nt, Artificial Sequence
  Description of Artificial Sequence: Synthetic oligonucleotide
  Antisense strand to SEQ ID NO: 1711103
uucaaugacuccaauacca

SEQ ID NO: 1711105 - RNA, 19 nt, Artificial Sequence
  Description of Artificial Sequence: Synthetic oligonucleotide
  Sense strand starting at position 3163 of SEQ ID NO: 1561958
agggcauccuuucccauaa

SEQ ID NO: 1711106 - RNA, 19 nt, Artificial Sequence
  Description of Artificial Sequence: Synthetic oligonucleotide
  Antisense strand to SEQ ID NO: 1711105
uuaugggaaaggaugcccu

SEQ ID NO: 1711107 - RNA, 19 nt, Artificial Sequence
  Description of Artificial Sequence: Synthetic oligonucleotide
  Sense strand starting at position 3234 of SEQ ID NO: 1561958
ugcaaagagccuuagauac

SEQ ID NO: 1711108 - RNA, 19 nt, Artificial Sequence
  Description of Artificial Sequence: Synthetic oligonucleotide
  Antisense strand to SEQ ID NO: 1711107
guaucuaaggcucuuugca

SEQ ID NO: 1711109 - RNA, 19 nt, Artificial Sequence
  Description of Artificial Sequence: Synthetic oligonucleotide
  Sense strand starting at position 3276 of SEQ ID NO: 1561958
ugaguucuauuguuaucau

SEQ ID NO: 1711110 - RNA, 19 nt, Artificial Sequence
  Description of Artificial Sequence: Synthetic oligonucleotide
  Antisense strand to SEQ ID NO: 1711109
augauaacaauagaacuca

SEQ ID NO: 1711111 - RNA, 19 nt, Artificial Sequence
  Description of Artificial Sequence: Synthetic oligonucleotide
  Sense strand starting at position 3279 of SEQ ID NO: 1561958
guucuauuguuaucauuuc

SEQ ID NO: 1711112 - RNA, 19 nt, Artificial Sequence
  Description of Artificial Sequence: Synthetic oligonucleotide
  Antisense strand to SEQ ID NO: 1711111
gaaaugauaacaauagaac

SEQ ID NO: 1711113 - RNA, 19 nt, Artificial Sequence
  Description of Artificial Sequence: Synthetic oligonucleotide
  Sense strand starting at position 3335 of SEQ ID NO: 1561958
uuugaauccagguauggca

SEQ ID NO: 1711114 - RNA, 19 nt, Artificial Sequence
  Description of Artificial Sequence: Synthetic oligonucleotide
  Antisense strand to SEQ ID NO: 1711113
ugccauaccuggauucaaa

SEQ ID NO: 1711115 - RNA, 19 nt, Artificial Sequence
  Description of Artificial Sequence: Synthetic oligonucleotide
  Sense strand starting at position 3358 of SEQ ID NO: 1561958
uccugagucugcuucuaac

SEQ ID NO: 1711116 - RNA, 19 nt, Artificial Sequence
  Description of Artificial Sequence: Synthetic oligonucleotide
  Antisense strand to SEQ ID NO: 1711115
guuagaagcagacucagga

SEQ ID NO: 1711117 - RNA, 19 nt, Artificial Sequence
  Description of Artificial Sequence: Synthetic oligonucleotide
  Sense strand starting at position 3524 of SEQ ID NO: 1561958
uuaucuaaguguccuuaac

SEQ ID NO: 1711118 - RNA, 19 nt, Artificial Sequence
  Description of Artificial Sequence: Synthetic oligonucleotide
  Antisense strand to SEQ ID NO: 1711117
guuaaggacacuuagauaa

SEQ ID NO: 1711119 - RNA, 19 nt, Artificial Sequence
  Description of Artificial Sequence: Synthetic oligonucleotide
  Sense strand starting at position 34 of SEQ ID NO: 1561959
cugacuuccucccuggaca

SEQ ID NO: 1711120 - RNA, 19 nt, Artificial Sequence
  Description of Artificial Sequence: Synthetic oligonucleotide
  Antisense strand to SEQ ID NO: 1711119
uguccagggaggaagucag

SEQ ID NO: 1711121 - RNA, 19 nt, Artificial Sequence
  Description of Artificial Sequence: Synthetic oligonucleotide
  Sense strand starting at position 250 of SEQ ID NO: 1561959
cgcagauccucacaaccuu

SEQ ID NO: 1711122 - RNA, 19 nt, Artificial Sequence
  Description of Artificial Sequence: Synthetic oligonucleotide
  Antisense strand to SEQ ID NO: 1711121
aagguugugaggaucugcg

SEQ ID NO: 1711123 - RNA, 19 nt, Artificial Sequence
  Description of Artificial Sequence: Synthetic oligonucleotide
  Sense strand starting at position 374 of SEQ ID NO: 1561959
ucuaccuucugaggucaau

SEQ ID NO: 1711124 - RNA, 19 nt, Artificial Sequence
  Description of Artificial Sequence: Synthetic oligonucleotide
  Antisense strand to SEQ ID NO: 1711123
auugaccucagaagguaga

SEQ ID NO: 1711125 - RNA, 19 nt, Artificial Sequence
  Description of Artificial Sequence: Synthetic oligonucleotide
  Sense strand starting at position 380 of SEQ ID NO: 1561959
uucugaggucaaugcuauc

SEQ ID NO: 1711126 - RNA, 19 nt, Artificial Sequence
  Description of Artificial Sequence: Synthetic oligonucleotide
  Antisense strand to SEQ ID NO: 1711125
gauagcauugaccucagaa

SEQ ID NO: 1711127 - RNA, 19 nt, Artificial Sequence
  Description of Artificial Sequence: Synthetic oligonucleotide
  Sense strand starting at position 383 of SEQ ID NO: 1561959
ugaggucaaugcuaucacu

SEQ ID NO: 1711128 - RNA, 19 nt, Artificial Sequence
  Description of Artificial Sequence: Synthetic oligonucleotide
  Antisense strand to SEQ ID NO: 1711127
agugauagcauugaccuca

SEQ ID NO: 1711129 - RNA, 19 nt, Artificial Sequence
  Description of Artificial Sequence: Synthetic oligonucleotide
  Sense strand starting at position 584 of SEQ ID NO: 1561959
agcugaugaaaguguuacu

SEQ ID NO: 1711130 - RNA, 19 nt, Artificial Sequence
  Description of Artificial Sequence: Synthetic oligonucleotide
  Antisense strand to SEQ ID NO: 1711129
aguaacacuuucaucagcu

SEQ ID NO: 1711131 - RNA, 19 nt, Artificial Sequence
  Description of Artificial Sequence: Synthetic oligonucleotide
  Sense strand starting at position 587 of SEQ ID NO: 1561959
ugaugaaaguguuacucuu

SEQ ID NO: 1711132 - RNA, 19 nt, Artificial Sequence
  Description of Artificial Sequence: Synthetic oligonucleotide
  Antisense strand to SEQ ID NO: 1711131
aagaguaacacuuucauca

SEQ ID NO: 1711133 - RNA, 19 nt, Artificial Sequence
  Description of Artificial Sequence: Synthetic oligonucleotide
  Sense strand starting at position 595 of SEQ ID NO: 1561959
guguuacucuuccuuugga

SEQ ID NO: 1711134 - RNA, 19 nt, Artificial Sequence
  Description of Artificial Sequence: Synthetic oligonucleotide
  Antisense strand to SEQ ID NO: 1711133
uccaaaggaagaguaacac

SEQ ID NO: 1711135 - RNA, 19 nt, Artificial Sequence
  Description of Artificial Sequence: Synthetic oligonucleotide
  Sense strand starting at position 631 of SEQ ID NO: 1561959
acauguuuccauuaggcuu

SEQ ID NO: 1711136 - RNA, 19 nt, Artificial Sequence
  Description of Artificial Sequence: Synthetic oligonucleotide
  Antisense strand to SEQ ID NO: 1711135
aagccuaauggaaacaugu

SEQ ID NO: 1711137 - RNA, 19 nt, Artificial Sequence
  Description of Artificial Sequence: Synthetic oligonucleotide
  Sense strand starting at position 807 of SEQ ID NO: 1561959
guagacugucucugugaca

SEQ ID NO: 1711138 - RNA, 19 nt, Artificial Sequence
  Description of Artificial Sequence: Synthetic oligonucleotide
  Antisense strand to SEQ ID NO: 1711137
ugucacagagacagucuac

SEQ ID NO: 1711139 - RNA, 19 nt, Artificial Sequence
  Description of Artificial Sequence: Synthetic oligonucleotide
  Sense strand starting at position 808 of SEQ ID NO: 1561959
uagacugucucugugacau

SEQ ID NO: 1711140 - RNA, 19 nt, Artificial Sequence
  Description of Artificial Sequence: Synthetic oligonucleotide
  Antisense strand to SEQ ID NO: 1711139
augucacagagacagucua

SEQ ID NO: 1711141 - RNA, 19 nt, Artificial Sequence
  Description of Artificial Sequence: Synthetic oligonucleotide
  Sense strand starting at position 810 of SEQ ID NO: 1561959
gacugucucugugacaucu

SEQ ID NO: 1711142 - RNA, 19 nt, Artificial Sequence
  Description of Artificial Sequence: Synthetic oligonucleotide
  Antisense strand to SEQ ID NO: 1711141
agaugucacagagacaguc

SEQ ID NO: 1711143 - RNA, 19 nt, Artificial Sequence
  Description of Artificial Sequence: Synthetic oligonucleotide
  Sense strand starting at position 2322 of SEQ ID NO: 1561959
gcggguaucgugcaccaga

SEQ ID NO: 1711144 - RNA, 19 nt, Artificial Sequence
  Description of Artificial Sequence: Synthetic oligonucleotide
  Antisense strand to SEQ ID NO: 1711143
ucuggugcacgauacccgc

SEQ ID NO: 1711145 - RNA, 19 nt, Artificial Sequence
  Description of Artificial Sequence: Synthetic oligonucleotide
  Sense strand starting at position 2358 of SEQ ID NO: 1561959
uucccuguucuccgcaauu

SEQ ID NO: 1711146 - RNA, 19 nt, Artificial Sequence
  Description of Artificial Sequence: Synthetic oligonucleotide
  Antisense strand to SEQ ID NO: 1711145
aauugcggagaacagggaa

SEQ ID NO: 1711147 - RNA, 19 nt, Artificial Sequence
  Description of Artificial Sequence: Synthetic oligonucleotide
  Sense strand starting at position 2583 of SEQ ID NO: 1561959
agauuacauuucuggugau

SEQ ID NO: 1711148 - RNA, 19 nt, Artificial Sequence
  Description of Artificial Sequence: Synthetic oligonucleotide
  Antisense strand to SEQ ID NO: 1711147
aucaccagaaauguaaucu

SEQ ID NO: 1711149 - RNA, 19 nt, Artificial Sequence
  Description of Artificial Sequence: Synthetic oligonucleotide
  Sense strand starting at position 2584 of SEQ ID NO: 1561959
gauuacauuucuggugauu

SEQ ID NO: 1711150 - RNA, 19 nt, Artificial Sequence
  Description of Artificial Sequence: Synthetic oligonucleotide
  Antisense strand to SEQ ID NO: 1711149
aaucaccagaaauguaauc

SEQ ID NO: 1711151 - RNA, 19 nt, Artificial Sequence
  Description of Artificial Sequence: Synthetic oligonucleotide
  Sense strand starting at position 2630 of SEQ ID NO: 1561959
gcgugccuggucugugaau

SEQ ID NO: 1711152 - RNA, 19 nt, Artificial Sequence
  Description of Artificial Sequence: Synthetic oligonucleotide
  Antisense strand to SEQ ID NO: 1711151
auucacagaccaggcacgc

SEQ ID NO: 1711153 - RNA, 19 nt, Artificial Sequence
  Description of Artificial Sequence: Synthetic oligonucleotide
  Sense strand starting at position 2636 of SEQ ID NO: 1561959
cuggucugugaaugcguau

SEQ ID NO: 1711154 - RNA, 19 nt, Artificial Sequence
  Description of Artificial Sequence: Synthetic oligonucleotide
  Antisense strand to SEQ ID NO: 1711153
auacgcauucacagaccag

SEQ ID NO: 1711155 - RNA, 19 nt, Artificial Sequence
  Description of Artificial Sequence: Synthetic oligonucleotide
  Sense strand starting at position 2647 of SEQ ID NO: 1561959
augcguauuucugggaugu

SEQ ID NO: 1711156 - RNA, 19 nt, Artificial Sequence
  Description of Artificial Sequence: Synthetic oligonucleotide
  Antisense strand to SEQ ID NO: 1711155
acaucccagaaauacgcau

SEQ ID NO: 1711157 - RNA, 19 nt, Artificial Sequence
  Description of Artificial Sequence: Synthetic oligonucleotide
  Sense strand starting at position 2648 of SEQ ID NO: 1561959
ugcguauuucugggaugug

SEQ ID NO: 1711158 - RNA, 19 nt, Artificial Sequence
  Description of Artificial Sequence: Synthetic oligonucleotide
  Antisense strand to SEQ ID NO: 1711157
cacaucccagaaauacgca

SEQ ID NO: 1711159 - RNA, 19 nt, Artificial Sequence
  Description of Artificial Sequence: Synthetic oligonucleotide
  Sense strand starting at position 2660 of SEQ ID NO: 1561959
ggaugugcccaguggaaau

SEQ ID NO: 1711160 - RNA, 19 nt, Artificial Sequence
  Description of Artificial Sequence: Synthetic oligonucleotide
  Antisense strand to SEQ ID NO: 1711159
auuuccacugggcacaucc

SEQ ID NO: 1711161 - RNA, 19 nt, Artificial Sequence
  Description of Artificial Sequence: Synthetic oligonucleotide
  Sense strand starting at position 2684 of SEQ ID NO: 1561959
gggcucagggcauaguuau

SEQ ID NO: 1711162 - RNA, 19 nt, Artificial Sequence
  Description of Artificial Sequence: Synthetic oligonucleotide
  Antisense strand to SEQ ID NO: 1711161
auaacuaugcccugagccc

SEQ ID NO: 1711163 - RNA, 19 nt, Artificial Sequence
  Description of Artificial Sequence: Synthetic oligonucleotide
  Sense strand starting at position 2903 of SEQ ID NO: 1561959
gucucaugacgcuauggga

SEQ ID NO: 1711164 - RNA, 19 nt, Artificial Sequence
  Description of Artificial Sequence: Synthetic oligonucleotide
  Antisense strand to SEQ ID NO: 1711163
ucccauagcgucaugagac

SEQ ID NO: 1711165 - RNA, 19 nt, Artificial Sequence
  Description of Artificial Sequence: Synthetic oligonucleotide
  Sense strand starting at position 2938 of SEQ ID NO: 1561959
ccuuauuacugccuggauu

SEQ ID NO: 1711166 - RNA, 19 nt, Artificial Sequence
  Description of Artificial Sequence: Synthetic oligonucleotide
  Antisense strand to SEQ ID NO: 1711165
aauccaggcaguaauaagg

SEQ ID NO: 1711167 - RNA, 19 nt, Artificial Sequence
  Description of Artificial Sequence: Synthetic oligonucleotide
  Sense strand starting at position 3537 of SEQ ID NO: 1561959
ggacucugugauuauucgu

SEQ ID NO: 1711168 - RNA, 19 nt, Artificial Sequence
  Description of Artificial Sequence: Synthetic oligonucleotide
  Antisense strand to SEQ ID NO: 1711167
acgaauaaucacagagucc

SEQ ID NO: 1711169 - RNA, 19 nt, Artificial Sequence
  Description of Artificial Sequence: Synthetic oligonucleotide
  Sense strand starting at position 3542 of SEQ ID NO: 1561959
cugugauuauucguccguu

SEQ ID NO: 1711170 - RNA, 19 nt, Artificial Sequence
  Description of Artificial Sequence: Synthetic oligonucleotide
  Antisense strand to SEQ ID NO: 1711169
aacggacgaauaaucacag

SEQ ID NO: 1711171 - RNA, 19 nt, Artificial Sequence
  Description of Artificial Sequence: Synthetic oligonucleotide
  Sense strand starting at position 3543 of SEQ ID NO: 1561959
ugugauuauucguccguuc

SEQ ID NO: 1711172 - RNA, 19 nt, Artificial Sequence
  Description of Artificial Sequence: Synthetic oligonucleotide
  Antisense strand to SEQ ID NO: 1711171
gaacggacgaauaaucaca

SEQ ID NO: 1711173 - RNA, 19 nt, Artificial Sequence
  Description of Artificial Sequence: Synthetic oligonucleotide
  Sense strand starting at position 3544 of SEQ ID NO: 1561959
gugauuauucguccguucu

SEQ ID NO: 1711174 - RNA, 19 nt, Artificial Sequence
  Description of Artificial Sequence: Synthetic oligonucleotide
  Antisense strand to SEQ ID NO: 1711173
agaacggacgaauaaucac

SEQ ID NO: 1711175 - RNA, 19 nt, Artificial Sequence
  Description of Artificial Sequence: Synthetic oligonucleotide
  Sense strand starting at position 3545 of SEQ ID NO: 1561959
ugauuauucguccguucuc

SEQ ID NO: 1711176 - RNA, 19 nt, Artificial Sequence
  Description of Artificial Sequence: Synthetic oligonucleotide
  Antisense strand to SEQ ID NO: 1711175
gagaacggacgaauaauca

SEQ ID NO: 1711177 - RNA, 19 nt, Artificial Sequence
  Description of Artificial Sequence: Synthetic oligonucleotide
  Sense strand starting at position 3668 of SEQ ID NO: 1561959
cagugaucccuuugcugga

SEQ ID NO: 1711178 - RNA, 19 nt, Artificial Sequence
  Description of Artificial Sequence: Synthetic oligonucleotide
  Antisense strand to SEQ ID NO: 1711177
uccagcaaagggaucacug

SEQ ID NO: 1711179 - RNA, 19 nt, Artificial Sequence
  Description of Artificial Sequence: Synthetic oligonucleotide
  Sense strand starting at position 3669 of SEQ ID NO: 1561959
agugaucccuuugcuggaa

SEQ ID NO: 1711180 - RNA, 19 nt, Artificial Sequence
  Description of Artificial Sequence: Synthetic oligonucleotide
  Antisense strand to SEQ ID NO: 1711179
uuccagcaaagggaucacu

SEQ ID NO: 1711181 - RNA, 19 nt, Artificial Sequence
  Description of Artificial Sequence: Synthetic oligonucleotide
  Sense strand starting at position 3688 of SEQ ID NO: 1561959
gccaguagauaggauugaa

SEQ ID NO: 1711182 - RNA, 19 nt, Artificial Sequence
  Description of Artificial Sequence: Synthetic oligonucleotide
  Antisense strand to SEQ ID NO: 1711181
uucaauccuaucuacuggc

SEQ ID NO: 1711183 - RNA, 19 nt, Artificial Sequence
  Description of Artificial Sequence: Synthetic oligonucleotide
  Sense strand starting at position 3691 of SEQ ID NO: 1561959
aguagauaggauugaaugu

SEQ ID NO: 1711184 - RNA, 19 nt, Artificial Sequence
  Description of Artificial Sequence: Synthetic oligonucleotide
  Antisense strand to SEQ ID NO: 1711183
acauucaauccuaucuacu

SEQ ID NO: 1711185 - RNA, 19 nt, Artificial Sequence
  Description of Artificial Sequence: Synthetic oligonucleotide
  Sense strand starting at position 3704 of SEQ ID NO: 1561959
gaauguuggcccugcuacu

SEQ ID NO: 1711186 - RNA, 19 nt, Artificial Sequence
  Description of Artificial Sequence: Synthetic oligonucleotide
  Antisense strand to SEQ ID NO: 1711185
aguagcagggccaacauuc

SEQ ID NO: 1711187 - RNA, 19 nt, Artificial Sequence
  Description of Artificial Sequence: Synthetic oligonucleotide
  Sense strand starting at position 3748 of SEQ ID NO: 1561959
gucucugugccucgauuga

SEQ ID NO: 1711188 - RNA, 19 nt, Artificial Sequence
  Description of Artificial Sequence: Synthetic oligonucleotide
  Antisense strand to SEQ ID NO: 1711187
ucaaucgaggcacagagac

SEQ ID NO: 1711189 - RNA, 19 nt, Artificial Sequence
  Description of Artificial Sequence: Synthetic oligonucleotide
  Sense strand starting at position 3757 of SEQ ID NO: 1561959
ccucgauugagucgucugu

SEQ ID NO: 1711190 - RNA, 19 nt, Artificial Sequence
  Description of Artificial Sequence: Synthetic oligonucleotide
  Antisense strand to SEQ ID NO: 1711189
acagacgacucaaucgagg

SEQ ID NO: 1711191 - RNA, 19 nt, Artificial Sequence
  Description of Artificial Sequence: Synthetic oligonucleotide
  Sense strand starting at position 3759 of SEQ ID NO: 1561959
ucgauugagucgucuguaa

SEQ ID NO: 1711192 - RNA, 19 nt, Artificial Sequence
  Description of Artificial Sequence: Synthetic oligonucleotide
  Antisense strand to SEQ ID NO: 1711191
uuacagacgacucaaucga

SEQ ID NO: 1711193 - RNA, 19 nt, Artificial Sequence
  Description of Artificial Sequence: Synthetic oligonucleotide
  Sense strand starting at position 3781 of SEQ ID NO: 1561959
gggaauagcggcugaauga

SEQ ID NO: 1711194 - RNA, 19 nt, Artificial Sequence
  Description of Artificial Sequence: Synthetic oligonucleotide
  Antisense strand to SEQ ID NO: 1711193
ucauucagccgcuauuccc

SEQ ID NO: 1711195 - RNA, 19 nt, Artificial Sequence
  Description of Artificial Sequence: Synthetic oligonucleotide
  Sense strand starting at position 3782 of SEQ ID NO: 1561959
ggaauagcggcugaaugaa

SEQ ID NO: 1711196 - RNA, 19 nt, Artificial Sequence
  Description of Artificial Sequence: Synthetic oligonucleotide
  Antisense strand to SEQ ID NO: 1711195
uucauucagccgcuauucc

SEQ ID NO: 1711197 - RNA, 19 nt, Artificial Sequence
  Description of Artificial Sequence: Synthetic oligonucleotide
  Sense strand starting at position 3885 of SEQ ID NO: 1561959
acuagaauaggcuggagua

SEQ ID NO: 1711198 - RNA, 19 nt, Artificial Sequence
  Description of Artificial Sequence: Synthetic oligonucleotide
  Antisense strand to SEQ ID NO: 1711197
uacuccagccuauucuagu

SEQ ID NO: 1711199 - RNA, 19 nt, Artificial Sequence
  Description of Artificial Sequence: Synthetic oligonucleotide
  Sense strand starting at position 284 of SEQ ID NO: 1561960
uuauaacggcugcaaagau

SEQ ID NO: 1711200 - RNA, 19 nt, Artificial Sequence
  Description of Artificial Sequence: Synthetic oligonucleotide
  Antisense strand to SEQ ID NO: 1711199
aucuuugcagccguuauaa

SEQ ID NO: 1711201 - RNA, 19 nt, Artificial Sequence
  Description of Artificial Sequence: Synthetic oligonucleotide
  Sense strand starting at position 410 of SEQ ID NO: 1561960
auaguuaagccucaacugu

SEQ ID NO: 1711202 - RNA, 19 nt, Artificial Sequence
  Description of Artificial Sequence: Synthetic oligonucleotide
  Antisense strand to SEQ ID NO: 1711201
acaguugaggcuuaacuau

SEQ ID NO: 1711203 - RNA, 19 nt, Artificial Sequence
  Description of Artificial Sequence: Synthetic oligonucleotide
  Sense strand starting at position 427 of SEQ ID NO: 1561960
guacucuggacugaguaca

SEQ ID NO: 1711204 - RNA, 19 nt, Artificial Sequence
  Description of Artificial Sequence: Synthetic oligonucleotide
  Antisense strand to SEQ ID NO: 1711203
uguacucaguccagaguac

SEQ ID NO: 1711205 - RNA, 19 nt, Artificial Sequence
  Description of Artificial Sequence: Synthetic oligonucleotide
  Sense strand starting at position 621 of SEQ ID NO: 1561960
ggauguaaauaguuguuau

SEQ ID NO: 1711206 - RNA, 19 nt, Artificial Sequence
  Description of Artificial Sequence: Synthetic oligonucleotide
  Antisense strand to SEQ ID NO: 1711205
auaacaacuauuuacaucc

SEQ ID NO: 1711207 - RNA, 19 nt, Artificial Sequence
  Description of Artificial Sequence: Synthetic oligonucleotide
  Sense strand starting at position 921 of SEQ ID NO: 1561960
ccugaucuaucguuuacaa

SEQ ID NO: 1711208 - RNA, 19 nt, Artificial Sequence
  Description of Artificial Sequence: Synthetic oligonucleotide
  Antisense strand to SEQ ID NO: 1711207
uuguaaacgauagaucagg

SEQ ID NO: 1711209 - RNA, 19 nt, Artificial Sequence
  Description of Artificial Sequence: Synthetic oligonucleotide
  Sense strand starting at position 923 of SEQ ID NO: 1561960
ugaucuaucguuuacaaga

SEQ ID NO: 1711210 - RNA, 19 nt, Artificial Sequence
  Description of Artificial Sequence: Synthetic oligonucleotide
  Antisense strand to SEQ ID NO: 1711209
ucuuguaaacgauagauca

SEQ ID NO: 1711211 - RNA, 19 nt, Artificial Sequence
  Description of Artificial Sequence: Synthetic oligonucleotide
  Sense strand starting at position 928 of SEQ ID NO: 1561960
uaucguuuacaagacuaga

SEQ ID NO: 1711212 - RNA, 19 nt, Artificial Sequence
  Description of Artificial Sequence: Synthetic oligonucleotide
  Antisense strand to SEQ ID NO: 1711211
ucuagucuuguaaacgaua

SEQ ID NO: 1711213 - RNA, 19 nt, Artificial Sequence
  Description of Artificial Sequence: Synthetic oligonucleotide
  Sense strand starting at position 943 of SEQ ID NO: 1561960
uagacugagggcugaaauu

SEQ ID NO: 1711214 - RNA, 19 nt, Artificial Sequence
  Description of Artificial Sequence: Synthetic oligonucleotide
  Antisense strand to SEQ ID NO: 1711213
aauuucagcccucagucua

SEQ ID NO: 1711215 - RNA, 19 nt, Artificial Sequence
  Description of Artificial Sequence: Synthetic oligonucleotide
  Sense strand starting at position 980 of SEQ ID NO: 1561960
ccuuguacucgcguaagca

SEQ ID NO: 1711216 - RNA, 19 nt, Artificial Sequence
  Description of Artificial Sequence: Synthetic oligonucleotide
  Antisense strand to SEQ ID NO: 1711215
ugcuuacgcgaguacaagg

SEQ ID NO: 1711217 - RNA, 19 nt, Artificial Sequence
  Description of Artificial Sequence: Synthetic oligonucleotide
  Sense strand starting at position 989 of SEQ ID NO: 1561960
cgcguaagcaagucuccau

SEQ ID NO: 1711218 - RNA, 19 nt, Artificial Sequence
  Description of Artificial Sequence: Synthetic oligonucleotide
  Antisense strand to SEQ ID NO: 1711217
auggagacuugcuuacgcg

SEQ ID NO: 1711219 - RNA, 19 nt, Artificial Sequence
  Description of Artificial Sequence: Synthetic oligonucleotide
  Sense strand starting at position 996 of SEQ ID NO: 1561960
gcaagucuccaugagcaca

SEQ ID NO: 1711220 - RNA, 19 nt, Artificial Sequence
  Description of Artificial Sequence: Synthetic oligonucleotide
  Antisense strand to SEQ ID NO: 1711219
ugugcucauggagacuugc

SEQ ID NO: 1711221 - RNA, 19 nt, Artificial Sequence
  Description of Artificial Sequence: Synthetic oligonucleotide
  Sense strand starting at position 1022 of SEQ ID NO: 1561960
gacugcuagagugggaauu

SEQ ID NO: 1711222 - RNA, 19 nt, Artificial Sequence
  Description of Artificial Sequence: Synthetic oligonucleotide
  Antisense strand to SEQ ID NO: 1711221
aauucccacucuagcaguc

SEQ ID NO: 1711223 - RNA, 19 nt, Artificial Sequence
  Description of Artificial Sequence: Synthetic oligonucleotide
  Sense strand starting at position 1291 of SEQ ID NO: 1561960
gaccgugaggacuagagua

SEQ ID NO: 1711224 - RNA, 19 nt, Artificial Sequence
  Description of Artificial Sequence: Synthetic oligonucleotide
  Antisense strand to SEQ ID NO: 1711223
uacucuaguccucacgguc

SEQ ID NO: 1711225 - RNA, 19 nt, Artificial Sequence
  Description of Artificial Sequence: Synthetic oligonucleotide
  Sense strand starting at position 1580 of SEQ ID NO: 1561960
ggcacagccgugucucauu

SEQ ID NO: 1711226 - RNA, 19 nt, Artificial Sequence
  Description of Artificial Sequence: Synthetic oligonucleotide
  Antisense strand to SEQ ID NO: 1711225
aaugagacacggcugugcc

SEQ ID NO: 1711227 - RNA, 19 nt, Artificial Sequence
  Description of Artificial Sequence: Synthetic oligonucleotide
  Sense strand starting at position 1590 of SEQ ID NO: 1561960
ugucucauucucgacaaug

SEQ ID NO: 1711228 - RNA, 19 nt, Artificial Sequence
  Description of Artificial Sequence: Synthetic oligonucleotide
  Antisense strand to SEQ ID NO: 1711227
cauugucgagaaugagaca

SEQ ID NO: 1711229 - RNA, 19 nt, Artificial Sequence
  Description of Artificial Sequence: Synthetic oligonucleotide
  Sense strand starting at position 1592 of SEQ ID NO: 1561960
ucucauucucgacaaugga

SEQ ID NO: 1711230 - RNA, 19 nt, Artificial Sequence
  Description of Artificial Sequence: Synthetic oligonucleotide
  Antisense strand to SEQ ID NO: 1711229
uccauugucgagaaugaga

SEQ ID NO: 1711231 - RNA, 19 nt, Artificial Sequence
  Description of Artificial Sequence: Synthetic oligonucleotide
  Sense strand starting at position 2031 of SEQ ID NO: 1561960
cgcccauguguggcuuaua

SEQ ID NO: 1711232 - RNA, 19 nt, Artificial Sequence
  Description of Artificial Sequence: Synthetic oligonucleotide
  Antisense strand to SEQ ID NO: 1711231
uauaagccacacaugggcg

SEQ ID NO: 1711233 - RNA, 19 nt, Artificial Sequence
  Description of Artificial Sequence: Synthetic oligonucleotide
  Sense strand starting at position 2034 of SEQ ID NO: 1561960
ccauguguggcuuauaaga

SEQ ID NO: 1711234 - RNA, 19 nt, Artificial Sequence
  Description of Artificial Sequence: Synthetic oligonucleotide
  Antisense strand to SEQ ID NO: 1711233
ucuuauaagccacacaugg

SEQ ID NO: 1711235 - RNA, 19 nt, Artificial Sequence
  Description of Artificial Sequence: Synthetic oligonucleotide
  Sense strand starting at position 2057 of SEQ ID NO: 1561960
guagcuuccgggaguguca

SEQ ID NO: 1711236 - RNA, 19 nt, Artificial Sequence
  Description of Artificial Sequence: Synthetic oligonucleotide
  Antisense strand to SEQ ID NO: 1711235
ugacacucccggaagcuac

SEQ ID NO: 1711237 - RNA, 19 nt, Artificial Sequence
  Description of Artificial Sequence: Synthetic oligonucleotide
  Sense strand starting at position 2068 of SEQ ID NO: 1561960
gagugucacuuucccagaa

SEQ ID NO: 1711238 - RNA, 19 nt, Artificial Sequence
  Description of Artificial Sequence: Synthetic oligonucleotide
  Antisense strand to SEQ ID NO: 1711237
uucugggaaagugacacuc

SEQ ID NO: 1711239 - RNA, 19 nt, Artificial Sequence
  Description of Artificial Sequence: Synthetic oligonucleotide
  Sense strand starting at position 2069 of SEQ ID NO: 1561960
agugucacuuucccagaaa

SEQ ID NO: 1711240 - RNA, 19 nt, Artificial Sequence
  Description of Artificial Sequence: Synthetic oligonucleotide
  Antisense strand to SEQ ID NO: 1711239
uuucugggaaagugacacu

SEQ ID NO: 1711241 - RNA, 19 nt, Artificial Sequence
  Description of Artificial Sequence: Synthetic oligonucleotide
  Sense strand starting at position 2080 of SEQ ID NO: 1561960
cccagaaaucccggcaaau

SEQ ID NO: 1711242 - RNA, 19 nt, Artificial Sequence
  Description of Artificial Sequence: Synthetic oligonucleotide
  Antisense strand to SEQ ID NO: 1711241
auuugccgggauuucuggg

SEQ ID NO: 1711243 - RNA, 19 nt, Artificial Sequence
  Description of Artificial Sequence: Synthetic oligonucleotide
  Sense strand starting at position 2163 of SEQ ID NO: 1561960
gccugauugggccaaaccu

SEQ ID NO: 1711244 - RNA, 19 nt, Artificial Sequence
  Description of Artificial Sequence: Synthetic oligonucleotide
  Antisense strand to SEQ ID NO: 1711243
agguuuggcccaaucaggc

SEQ ID NO: 1711245 - RNA, 19 nt, Artificial Sequence
  Description of Artificial Sequence: Synthetic oligonucleotide
  Sense strand starting at position 2343 of SEQ ID NO: 1561960
gugaaacgucaccagugau

SEQ ID NO: 1711246 - RNA, 19 nt, Artificial Sequence
  Description of Artificial Sequence: Synthetic oligonucleotide
  Antisense strand to SEQ ID NO: 1711245
aucacuggugacguuucac

SEQ ID NO: 1711247 - RNA, 19 nt, Artificial Sequence
  Description of Artificial Sequence: Synthetic oligonucleotide
  Sense strand starting at position 2743 of SEQ ID NO: 1561960
gcuguucuggaaugagaac

SEQ ID NO: 1711248 - RNA, 19 nt, Artificial Sequence
  Description of Artificial Sequence: Synthetic oligonucleotide
  Antisense strand to SEQ ID NO: 1711247
guucucauuccagaacagc

SEQ ID NO: 1711249 - RNA, 19 nt, Artificial Sequence
  Description of Artificial Sequence: Synthetic oligonucleotide
  Sense strand starting at position 2824 of SEQ ID NO: 1561960
gagaaacuauagcuuguaa

SEQ ID NO: 1711250 - RNA, 19 nt, Artificial Sequence
  Description of Artificial Sequence: Synthetic oligonucleotide
  Antisense strand to SEQ ID NO: 1711249
uuacaagcuauaguuucuc

SEQ ID NO: 1711251 - RNA, 19 nt, Artificial Sequence
  Description of Artificial Sequence: Synthetic oligonucleotide
  Sense strand starting at position 2892 of SEQ ID NO: 1561960
cuggucugaggcugaauaa

SEQ ID NO: 1711252 - RNA, 19 nt, Artificial Sequence
  Description of Artificial Sequence: Synthetic oligonucleotide
  Antisense strand to SEQ ID NO: 1711251
uuauucagccucagaccag

SEQ ID NO: 1711253 - RNA, 19 nt, Artificial Sequence
  Description of Artificial Sequence: Synthetic oligonucleotide
  Sense strand starting at position 2893 of SEQ ID NO: 1561960
uggucugaggcugaauaau

SEQ ID NO: 1711254 - RNA, 19 nt, Artificial Sequence
  Description of Artificial Sequence: Synthetic oligonucleotide
  Antisense strand to SEQ ID NO: 1711253
auuauucagccucagacca

SEQ ID NO: 1711255 - RNA, 19 nt, Artificial Sequence
  Description of Artificial Sequence: Synthetic oligonucleotide
  Sense strand starting at position 2943 of SEQ ID NO: 1561960
gaugaagugagguaguuua

SEQ ID NO: 1711256 - RNA, 19 nt, Artificial Sequence
  Description of Artificial Sequence: Synthetic oligonucleotide
  Antisense strand to SEQ ID NO: 1711255
uaaacuaccucacuucauc

SEQ ID NO: 1711257 - RNA, 19 nt, Artificial Sequence
  Description of Artificial Sequence: Synthetic oligonucleotide
  Sense strand starting at position 3108 of SEQ ID NO: 1561960
ucaguuaaguagguggaaa

SEQ ID NO: 1711258 - RNA, 19 nt, Artificial Sequence
  Description of Artificial Sequence: Synthetic oligonucleotide
  Antisense strand to SEQ ID NO: 1711257
uuuccaccuacuuaacuga

SEQ ID NO: 1711259 - RNA, 19 nt, Artificial Sequence
  Description of Artificial Sequence: Synthetic oligonucleotide
  Sense strand starting at position 3164 of SEQ ID NO: 1561960
gagagugugaaagagcauu

SEQ ID NO: 1711260 - RNA, 19 nt, Artificial Sequence
  Description of Artificial Sequence: Synthetic oligonucleotide
  Antisense strand to SEQ ID NO: 1711259
aaugcucuuucacacucuc

SEQ ID NO: 1711261 - RNA, 19 nt, Artificial Sequence
  Description of Artificial Sequence: Synthetic oligonucleotide
  Sense strand starting at position 3188 of SEQ ID NO: 1561960
ggcuuugugaacuaacaug

SEQ ID NO: 1711262 - RNA, 19 nt, Artificial Sequence
  Description of Artificial Sequence: Synthetic oligonucleotide
  Antisense strand to SEQ ID NO: 1711261
cauguuaguucacaaagcc

SEQ ID NO: 1711263 - RNA, 19 nt, Artificial Sequence
  Description of Artificial Sequence: Synthetic oligonucleotide
  Sense strand starting at position 3223 of SEQ ID NO: 1561960
ggcagugauacuuggauug

SEQ ID NO: 1711264 - RNA, 19 nt, Artificial Sequence
  Description of Artificial Sequence: Synthetic oligonucleotide
  Antisense strand to SEQ ID NO: 1711263
caauccaaguaucacugcc

SEQ ID NO: 1711265 - RNA, 19 nt, Artificial Sequence
  Description of Artificial Sequence: Synthetic oligonucleotide
  Sense strand starting at position 3228 of SEQ ID NO: 1561960
ugauacuuggauugaucua

SEQ ID NO: 1711266 - RNA, 19 nt, Artificial Sequence
  Description of Artificial Sequence: Synthetic oligonucleotide
  Antisense strand to SEQ ID NO: 1711265
uagaucaauccaaguauca

SEQ ID NO: 1711267 - RNA, 19 nt, Artificial Sequence
  Description of Artificial Sequence: Synthetic oligonucleotide
  Sense strand starting at position 3241 of SEQ ID NO: 1561960
gaucuaaaucagcguggau

SEQ ID NO: 1711268 - RNA, 19 nt, Artificial Sequence
  Description of Artificial Sequence: Synthetic oligonucleotide
  Antisense strand to SEQ ID NO: 1711267
auccacgcugauuuagauc

SEQ ID NO: 1711269 - RNA, 19 nt, Artificial Sequence
  Description of Artificial Sequence: Synthetic oligonucleotide
  Sense strand starting at position 3269 of SEQ ID NO: 1561960
gugggaaugcguugauuua

SEQ ID NO: 1711270 - RNA, 19 nt, Artificial Sequence
  Description of Artificial Sequence: Synthetic oligonucleotide
  Antisense strand to SEQ ID NO: 1711269
uaaaucaacgcauucccac

SEQ ID NO: 1711271 - RNA, 19 nt, Artificial Sequence
  Description of Artificial Sequence: Synthetic oligonucleotide
  Sense strand starting at position 3322 of SEQ ID NO: 1561960
uuguuuccuguauaauaag

SEQ ID NO: 1711272 - RNA, 19 nt, Artificial Sequence
  Description of Artificial Sequence: Synthetic oligonucleotide
  Antisense strand to SEQ ID NO: 1711271
cuuauuauacaggaaacaa

SEQ ID NO: 1711273 - RNA, 19 nt, Artificial Sequence
  Description of Artificial Sequence: Synthetic oligonucleotide
  Sense strand starting at position 3527 of SEQ ID NO: 1561960
agacuuuagcuuugaaagg

SEQ ID NO: 1711274 - RNA, 19 nt, Artificial Sequence
  Description of Artificial Sequence: Synthetic oligonucleotide
  Antisense strand to SEQ ID NO: 1711273
ccuuucaaagcuaaagucu

SEQ ID NO: 1711275 - RNA, 19 nt, Artificial Sequence
  Description of Artificial Sequence: Synthetic oligonucleotide
  Sense strand starting at position 3605 of SEQ ID NO: 1561960
uugugucuccagcauauaa

SEQ ID NO: 1711276 - RNA, 19 nt, Artificial Sequence
  Description of Artificial Sequence: Synthetic oligonucleotide
  Antisense strand to SEQ ID NO: 1711275
uuauaugcuggagacacaa

SEQ ID NO: 1711277 - RNA, 19 nt, Artificial Sequence
  Description of Artificial Sequence: Synthetic oligonucleotide
  Sense strand starting at position 3842 of SEQ ID NO: 1561960
gcuuuauucggccagggaa

SEQ ID NO: 1711278 - RNA, 19 nt, Artificial Sequence
  Description of Artificial Sequence: Synthetic oligonucleotide
  Antisense strand to SEQ ID NO: 1711277
uucccuggccgaauaaagc

SEQ ID NO: 1711279 - RNA, 19 nt, Artificial Sequence
  Description of Artificial Sequence: Synthetic oligonucleotide
  Sense strand starting at position 9 of SEQ ID NO: 1561961
acauaugugcugggcaaca

SEQ ID NO: 1711280 - RNA, 19 nt, Artificial Sequence
  Description of Artificial Sequence: Synthetic oligonucleotide
  Antisense strand to SEQ ID NO: 1711279
uguugcccagcacauaugu

SEQ ID NO: 1711281 - RNA, 19 nt, Artificial Sequence
  Description of Artificial Sequence: Synthetic oligonucleotide
  Sense strand starting at position 56 of SEQ ID NO: 1561961
acauuaucuuaagugagag

SEQ ID NO: 1711282 - RNA, 19 nt, Artificial Sequence
  Description of Artificial Sequence: Synthetic oligonucleotide
  Antisense strand to SEQ ID NO: 1711281
cucucacuuaagauaaugu

SEQ ID NO: 1711283 - RNA, 19 nt, Artificial Sequence
  Description of Artificial Sequence: Synthetic oligonucleotide
  Sense strand starting at position 86 of SEQ ID NO: 1561961
guuauacgggaauaugguu

SEQ ID NO: 1711284 - RNA, 19 nt, Artificial Sequence
  Description of Artificial Sequence: Synthetic oligonucleotide
  Antisense strand to SEQ ID NO: 1711283
aaccauauucccguauaac

SEQ ID NO: 1711285 - RNA, 19 nt, Artificial Sequence
  Description of Artificial Sequence: Synthetic oligonucleotide
  Sense strand starting at position 91 of SEQ ID NO: 1561961
acgggaauaugguuauaaa

SEQ ID NO: 1711286 - RNA, 19 nt, Artificial Sequence
  Description of Artificial Sequence: Synthetic oligonucleotide
  Antisense strand to SEQ ID NO: 1711285
uuuauaaccauauucccgu

SEQ ID NO: 1711287 - RNA, 19 nt, Artificial Sequence
  Description of Artificial Sequence: Synthetic oligonucleotide
  Sense strand starting at position 132 of SEQ ID NO: 1561961
gcugucacuguguugguua

SEQ ID NO: 1711288 - RNA, 19 nt, Artificial Sequence
  Description of Artificial Sequence: Synthetic oligonucleotide
  Antisense strand to SEQ ID NO: 1711287
uaaccaacacagugacagc

SEQ ID NO: 1711289 - RNA, 19 nt, Artificial Sequence
  Description of Artificial Sequence: Synthetic oligonucleotide
  Sense strand starting at position 189 of SEQ ID NO: 1561961
gaaggauaagcaugugacu

SEQ ID NO: 1711290 - RNA, 19 nt, Artificial Sequence
  Description of Artificial Sequence: Synthetic oligonucleotide
  Antisense strand to SEQ ID NO: 1711289
agucacaugcuuauccuuc

SEQ ID NO: 1711291 - RNA, 19 nt, Artificial Sequence
  Description of Artificial Sequence: Synthetic oligonucleotide
  Sense strand starting at position 208 of SEQ ID NO: 1561961
gggucuaguugauccaagu

SEQ ID NO: 1711292 - RNA, 19 nt, Artificial Sequence
  Description of Artificial Sequence: Synthetic oligonucleotide
  Antisense strand to SEQ ID NO: 1711291
acuuggaucaacuagaccc

SEQ ID NO: 1711293 - RNA, 19 nt, Artificial Sequence
  Description of Artificial Sequence: Synthetic oligonucleotide
  Sense strand starting at position 289 of SEQ ID NO: 1561961
uagagcuuuccucaggauu

SEQ ID NO: 1711294 - RNA, 19 nt, Artificial Sequence
  Description of Artificial Sequence: Synthetic oligonucleotide
  Antisense strand to SEQ ID NO: 1711293
aauccugaggaaagcucua

SEQ ID NO: 1711295 - RNA, 19 nt, Artificial Sequence
  Description of Artificial Sequence: Synthetic oligonucleotide
  Sense strand starting at position 709 of SEQ ID NO: 1561961
uguuacucugaugauacuu

SEQ ID NO: 1711296 - RNA, 19 nt, Artificial Sequence
  Description of Artificial Sequence: Synthetic oligonucleotide
  Antisense strand to SEQ ID NO: 1711295
aaguaucaucagaguaaca

SEQ ID NO: 1711297 - RNA, 19 nt, Artificial Sequence
  Description of Artificial Sequence: Synthetic oligonucleotide
  Sense strand starting at position 723 of SEQ ID NO: 1561961
uacuuaugucaacgaugua

SEQ ID NO: 1711298 - RNA, 19 nt, Artificial Sequence
  Description of Artificial Sequence: Synthetic oligonucleotide
  Antisense strand to SEQ ID NO: 1711297
uacaucguugacauaagua

SEQ ID NO: 1711299 - RNA, 19 nt, Artificial Sequence
  Description of Artificial Sequence: Synthetic oligonucleotide
  Sense strand starting at position 726 of SEQ ID NO: 1561961
uuaugucaacgauguaaau

SEQ ID NO: 1711300 - RNA, 19 nt, Artificial Sequence
  Description of Artificial Sequence: Synthetic oligonucleotide
  Antisense strand to SEQ ID NO: 1711299
auuuacaucguugacauaa

SEQ ID NO: 1711301 - RNA, 19 nt, Artificial Sequence
  Description of Artificial Sequence: Synthetic oligonucleotide
  Sense strand starting at position 728 of SEQ ID NO: 1561961
augucaacgauguaaaugu

SEQ ID NO: 1711302 - RNA, 19 nt, Artificial Sequence
  Description of Artificial Sequence: Synthetic oligonucleotide
  Antisense strand to SEQ ID NO: 1711301
acauuuacaucguugacau

SEQ ID NO: 1711303 - RNA, 19 nt, Artificial Sequence
  Description of Artificial Sequence: Synthetic oligonucleotide
  Sense strand starting at position 804 of SEQ ID NO: 1561961
gaauuaaguccugguccca

SEQ ID NO: 1711304 - RNA, 19 nt, Artificial Sequence
  Description of Artificial Sequence: Synthetic oligonucleotide
  Antisense strand to SEQ ID NO: 1711303
ugggaccaggacuuaauuc

SEQ ID NO: 1711305 - RNA, 19 nt, Artificial Sequence
  Description of Artificial Sequence: Synthetic oligonucleotide
  Sense strand starting at position 887 of SEQ ID NO: 1561961
aaagaauucugagcauagu

SEQ ID NO: 1711306 - RNA, 19 nt, Artificial Sequence
  Description of Artificial Sequence: Synthetic oligonucleotide
  Antisense strand to SEQ ID NO: 1711305
acuaugcucagaauucuuu

SEQ ID NO: 1711307 - RNA, 19 nt, Artificial Sequence
  Description of Artificial Sequence: Synthetic oligonucleotide
  Sense strand starting at position 890 of SEQ ID NO: 1561961
gaauucugagcauaguaug

SEQ ID NO: 1711308 - RNA, 19 nt, Artificial Sequence
  Description of Artificial Sequence: Synthetic oligonucleotide
  Antisense strand to SEQ ID NO: 1711307
cauacuaugcucagaauuc

SEQ ID NO: 1711309 - RNA, 19 nt, Artificial Sequence
  Description of Artificial Sequence: Synthetic oligonucleotide
  Sense strand starting at position 1010 of SEQ ID NO: 1561961
ggacaagugucaguuugug

SEQ ID NO: 1711310 - RNA, 19 nt, Artificial Sequence
  Description of Artificial Sequence: Synthetic oligonucleotide
  Antisense strand to SEQ ID NO: 1711309
cacaaacugacacuugucc

SEQ ID NO: 1711311 - RNA, 19 nt, Artificial Sequence
  Description of Artificial Sequence: Synthetic oligonucleotide
  Sense strand starting at position 1018 of SEQ ID NO: 1561961
gucaguuugugggugaaga

SEQ ID NO: 1711312 - RNA, 19 nt, Artificial Sequence
  Description of Artificial Sequence: Synthetic oligonucleotide
  Antisense strand to SEQ ID NO: 1711311
ucuucacccacaaacugac

SEQ ID NO: 1711313 - RNA, 19 nt, Artificial Sequence
  Description of Artificial Sequence: Synthetic oligonucleotide
  Sense strand starting at position 1019 of SEQ ID NO: 1561961
ucaguuugugggugaagaa

SEQ ID NO: 1711314 - RNA, 19 nt, Artificial Sequence
  Description of Artificial Sequence: Synthetic oligonucleotide
  Antisense strand to SEQ ID NO: 1711313
uucuucacccacaaacuga

SEQ ID NO: 1711315 - RNA, 19 nt, Artificial Sequence
  Description of Artificial Sequence: Synthetic oligonucleotide
  Sense strand starting at position 1042 of SEQ ID NO: 1561961
guuggacaucccugacaga

SEQ ID NO: 1711316 - RNA, 19 nt, Artificial Sequence
  Description of Artificial Sequence: Synthetic oligonucleotide
  Antisense strand to SEQ ID NO: 1711315
ucugucagggauguccaac

SEQ ID NO: 1711317 - RNA, 19 nt, Artificial Sequence
  Description of Artificial Sequence: Synthetic oligonucleotide
  Sense strand starting at position 1187 of SEQ ID NO: 1561961
gcccuaaaggcugaaucau

SEQ ID NO: 1711318 - RNA, 19 nt, Artificial Sequence
  Description of Artificial Sequence: Synthetic oligonucleotide
  Antisense strand to SEQ ID NO: 1711317
augauucagccuuuagggc

SEQ ID NO: 1711319 - RNA, 19 nt, Artificial Sequence
  Description of Artificial Sequence: Synthetic oligonucleotide
  Sense strand starting at position 1327 of SEQ ID NO: 1561961
gaagaucuggguuagagcu

SEQ ID NO: 1711320 - RNA, 19 nt, Artificial Sequence
  Description of Artificial Sequence: Synthetic oligonucleotide
  Antisense strand to SEQ ID NO: 1711319
agcucuaacccagaucuuc

SEQ ID NO: 1711321 - RNA, 19 nt, Artificial Sequence
  Description of Artificial Sequence: Synthetic oligonucleotide
  Sense strand starting at position 1417 of SEQ ID NO: 1561961
cugcauccugcugaucaau

SEQ ID NO: 1711322 - RNA, 19 nt, Artificial Sequence
  Description of Artificial Sequence: Synthetic oligonucleotide
  Antisense strand to SEQ ID NO: 1711321
auugaucagcaggaugcag

SEQ ID NO: 1711323 - RNA, 19 nt, Artificial Sequence
  Description of Artificial Sequence: Synthetic oligonucleotide
  Sense strand starting at position 1419 of SEQ ID NO: 1561961
gcauccugcugaucaauga

SEQ ID NO: 1711324 - RNA, 19 nt, Artificial Sequence
  Description of Artificial Sequence: Synthetic oligonucleotide
  Antisense strand to SEQ ID NO: 1711323
ucauugaucagcaggaugc

SEQ ID NO: 1711325 - RNA, 19 nt, Artificial Sequence
  Description of Artificial Sequence: Synthetic oligonucleotide
  Sense strand starting at position 1500 of SEQ ID NO: 1561961
gcauuugaauuugggacua

SEQ ID NO: 1711326 - RNA, 19 nt, Artificial Sequence
  Description of Artificial Sequence: Synthetic oligonucleotide
  Antisense strand to SEQ ID NO: 1711325
uagucccaaauucaaaugc

SEQ ID NO: 1711327 - RNA, 19 nt, Artificial Sequence
  Description of Artificial Sequence: Synthetic oligonucleotide
  Sense strand starting at position 1618 of SEQ ID NO: 1561961
agucauauuggaugacaau

SEQ ID NO: 1711328 - RNA, 19 nt, Artificial Sequence
  Description of Artificial Sequence: Synthetic oligonucleotide
  Antisense strand to SEQ ID NO: 1711327
auugucauccaauaugacu

SEQ ID NO: 1711329 - RNA, 19 nt, Artificial Sequence
  Description of Artificial Sequence: Synthetic oligonucleotide
  Sense strand starting at position 1750 of SEQ ID NO: 1561961
aacagucuuguagauguca

SEQ ID NO: 1711330 - RNA, 19 nt, Artificial Sequence
  Description of Artificial Sequence: Synthetic oligonucleotide
  Antisense strand to SEQ ID NO: 1711329
ugacaucuacaagacuguu

SEQ ID NO: 1711331 - RNA, 19 nt, Artificial Sequence
  Description of Artificial Sequence: Synthetic oligonucleotide
  Sense strand starting at position 1758 of SEQ ID NO: 1561961
uguagaugucauuauuacu

SEQ ID NO: 1711332 - RNA, 19 nt, Artificial Sequence
  Description of Artificial Sequence: Synthetic oligonucleotide
  Antisense strand to SEQ ID NO: 1711331
aguaauaaugacaucuaca

SEQ ID NO: 1711333 - RNA, 19 nt, Artificial Sequence
  Description of Artificial Sequence: Synthetic oligonucleotide
  Sense strand starting at position 2240 of SEQ ID NO: 1561961
aagcgaugucucuaaucuu

SEQ ID NO: 1711334 - RNA, 19 nt, Artificial Sequence
  Description of Artificial Sequence: Synthetic oligonucleotide
  Antisense strand to SEQ ID NO: 1711333
aagauuagagacaucgcuu

SEQ ID NO: 1711335 - RNA, 19 nt, Artificial Sequence
  Description of Artificial Sequence: Synthetic oligonucleotide
  Sense strand starting at position 2260 of SEQ ID NO: 1561961
guagcaggaagguagaauu

SEQ ID NO: 1711336 - RNA, 19 nt, Artificial Sequence
  Description of Artificial Sequence: Synthetic oligonucleotide
  Antisense strand to SEQ ID NO: 1711335
aauucuaccuuccugcuac

SEQ ID NO: 1711337 - RNA, 19 nt, Artificial Sequence
  Description of Artificial Sequence: Synthetic oligonucleotide
  Sense strand starting at position 2385 of SEQ ID NO: 1561961
uugggacucacaggugaua

SEQ ID NO: 1711338 - RNA, 19 nt, Artificial Sequence
  Description of Artificial Sequence: Synthetic oligonucleotide
  Antisense strand to SEQ ID NO: 1711337
uaucaccugugagucccaa

SEQ ID NO: 1711339 - RNA, 19 nt, Artificial Sequence
  Description of Artificial Sequence: Synthetic oligonucleotide
  Sense strand starting at position 2974 of SEQ ID NO: 1561961
ugaacaucccuuuauggua

SEQ ID NO: 1711340 - RNA, 19 nt, Artificial Sequence
  Description of Artificial Sequence: Synthetic oligonucleotide
  Antisense strand to SEQ ID NO: 1711339
uaccauaaagggauguuca

SEQ ID NO: 1711341 - RNA, 19 nt, Artificial Sequence
  Description of Artificial Sequence: Synthetic oligonucleotide
  Sense strand starting at position 3071 of SEQ ID NO: 1561961
augguacugccgugauuuc

SEQ ID NO: 1711342 - RNA, 19 nt, Artificial Sequence
  Description of Artificial Sequence: Synthetic oligonucleotide
  Antisense strand to SEQ ID NO: 1711341
gaaaucacggcaguaccau

SEQ ID NO: 1711343 - RNA, 19 nt, Artificial Sequence
  Description of Artificial Sequence: Synthetic oligonucleotide
  Sense strand starting at position 3158 of SEQ ID NO: 1561961
cacagaccucgugauuacu

SEQ ID NO: 1711344 - RNA, 19 nt, Artificial Sequence
  Description of Artificial Sequence: Synthetic oligonucleotide
  Antisense strand to SEQ ID NO: 1711343
aguaaucacgaggucugug

SEQ ID NO: 1711345 - RNA, 19 nt, Artificial Sequence
  Description of Artificial Sequence: Synthetic oligonucleotide
  Sense strand starting at position 3285 of SEQ ID NO: 1561961
gccaguuccuaccuggaau

SEQ ID NO: 1711346 - RNA, 19 nt, Artificial Sequence
  Description of Artificial Sequence: Synthetic oligonucleotide
  Antisense strand to SEQ ID NO: 1711345
auuccagguaggaacuggc

SEQ ID NO: 1711347 - RNA, 19 nt, Artificial Sequence
  Description of Artificial Sequence: Synthetic oligonucleotide
  Sense strand starting at position 3420 of SEQ ID NO: 1561961
ggacauguugccuggguca

SEQ ID NO: 1711348 - RNA, 19 nt, Artificial Sequence
  Description of Artificial Sequence: Synthetic oligonucleotide
  Antisense strand to SEQ ID NO: 1711347
ugacccaggcaacaugucc

SEQ ID NO: 1711349 - RNA, 19 nt, Artificial Sequence
  Description of Artificial Sequence: Synthetic oligonucleotide
  Sense strand starting at position 3486 of SEQ ID NO: 1561961
acguucuuauaguuacaca

SEQ ID NO: 1711350 - RNA, 19 nt, Artificial Sequence
  Description of Artificial Sequence: Synthetic oligonucleotide
  Antisense strand to SEQ ID NO: 1711349
uguguaacuauaagaacgu

SEQ ID NO: 1711351 - RNA, 19 nt, Artificial Sequence
  Description of Artificial Sequence: Synthetic oligonucleotide
  Sense strand starting at position 3494 of SEQ ID NO: 1561961
auaguuacacagcgauuga

SEQ ID NO: 1711352 - RNA, 19 nt, Artificial Sequence
  Description of Artificial Sequence: Synthetic oligonucleotide
  Antisense strand to SEQ ID NO: 1711351
ucaaucgcuguguaacuau

SEQ ID NO: 1711353 - RNA, 19 nt, Artificial Sequence
  Description of Artificial Sequence: Synthetic oligonucleotide
  Sense strand starting at position 3592 of SEQ ID NO: 1561961
cuaccaggucugcaaagaa

SEQ ID NO: 1711354 - RNA, 19 nt, Artificial Sequence
  Description of Artificial Sequence: Synthetic oligonucleotide
  Antisense strand to SEQ ID NO: 1711353
uucuuugcagaccugguag

SEQ ID NO: 1711355 - RNA, 19 nt, Artificial Sequence
  Description of Artificial Sequence: Synthetic oligonucleotide
  Sense strand starting at position 3667 of SEQ ID NO: 1561961
ugcuuagcucaugaacaaa

SEQ ID NO: 1711356 - RNA, 19 nt, Artificial Sequence
  Description of Artificial Sequence: Synthetic oligonucleotide
  Antisense strand to SEQ ID NO: 1711355
uuuguucaugagcuaagca

SEQ ID NO: 1711357 - RNA, 19 nt, Artificial Sequence
  Description of Artificial Sequence: Synthetic oligonucleotide
  Sense strand starting at position 3763 of SEQ ID NO: 1561961
ucuccaguugagggucaaa

SEQ ID NO: 1711358 - RNA, 19 nt, Artificial Sequence
  Description of Artificial Sequence: Synthetic oligonucleotide
  Antisense strand to SEQ ID NO: 1711357
uuugacccucaacuggaga

SEQ ID NO: 1711359 - RNA, 19 nt, Artificial Sequence
  Description of Artificial Sequence: Synthetic oligonucleotide
  Sense strand starting at position 96 of SEQ ID NO: 1561962
ggcguauuuguccagggca

SEQ ID NO: 1711360 - RNA, 19 nt, Artificial Sequence
  Description of Artificial Sequence: Synthetic oligonucleotide
  Antisense strand to SEQ ID NO: 1711359
ugcccuggacaaauacgcc

SEQ ID NO: 1711361 - RNA, 19 nt, Artificial Sequence
  Description of Artificial Sequence: Synthetic oligonucleotide
  Sense strand starting at position 98 of SEQ ID NO: 1561962
cguauuuguccagggcaac

SEQ ID NO: 1711362 - RNA, 19 nt, Artificial Sequence
  Description of Artificial Sequence: Synthetic oligonucleotide
  Antisense strand to SEQ ID NO: 1711361
guugcccuggacaaauacg

SEQ ID NO: 1711363 - RNA, 19 nt, Artificial Sequence
  Description of Artificial Sequence: Synthetic oligonucleotide
  Sense strand starting at position 614 of SEQ ID NO: 1561962
gccugaucaucaguuucua

SEQ ID NO: 1711364 - RNA, 19 nt, Artificial Sequence
  Description of Artificial Sequence: Synthetic oligonucleotide
  Antisense strand to SEQ ID NO: 1711363
uagaaacugaugaucaggc

SEQ ID NO: 1711365 - RNA, 19 nt, Artificial Sequence
  Description of Artificial Sequence: Synthetic oligonucleotide
  Sense strand starting at position 1144 of SEQ ID NO: 1561962
cgucgaguuccaugcacuu

SEQ ID NO: 1711366 - RNA, 19 nt, Artificial Sequence
  Description of Artificial Sequence: Synthetic oligonucleotide
  Antisense strand to SEQ ID NO: 1711365
aagugcauggaacucgacg

SEQ ID NO: 1711367 - RNA, 19 nt, Artificial Sequence
  Description of Artificial Sequence: Synthetic oligonucleotide
  Sense strand starting at position 2334 of SEQ ID NO: 1561962
ggaugucuucccgacgaug

SEQ ID NO: 1711368 - RNA, 19 nt, Artificial Sequence
  Description of Artificial Sequence: Synthetic oligonucleotide
  Antisense strand to SEQ ID NO: 1711367
caucgucgggaagacaucc

SEQ ID NO: 1711369 - RNA, 19 nt, Artificial Sequence
  Description of Artificial Sequence: Synthetic oligonucleotide
  Sense strand starting at position 2466 of SEQ ID NO: 1561962
gaaugucccuuggaggaua

SEQ ID NO: 1711370 - RNA, 19 nt, Artificial Sequence
  Description of Artificial Sequence: Synthetic oligonucleotide
  Antisense strand to SEQ ID NO: 1711369
uauccuccaagggacauuc

SEQ ID NO: 1711371 - RNA, 19 nt, Artificial Sequence
  Description of Artificial Sequence: Synthetic oligonucleotide
  Sense strand starting at position 2662 of SEQ ID NO: 1561962
gagucuuucucucuagggu

SEQ ID NO: 1711372 - RNA, 19 nt, Artificial Sequence
  Description of Artificial Sequence: Synthetic oligonucleotide
  Antisense strand to SEQ ID NO: 1711371
acccuagagagaaagacuc

SEQ ID NO: 1711373 - RNA, 19 nt, Artificial Sequence
  Description of Artificial Sequence: Synthetic oligonucleotide
  Sense strand starting at position 2678 of SEQ ID NO: 1561962
ggugccgagucuuauauaa

SEQ ID NO: 1711374 - RNA, 19 nt, Artificial Sequence
  Description of Artificial Sequence: Synthetic oligonucleotide
  Antisense strand to SEQ ID NO: 1711373
uuauauaagacucggcacc

SEQ ID NO: 1711375 - RNA, 19 nt, Artificial Sequence
  Description of Artificial Sequence: Synthetic oligonucleotide
  Sense strand starting at position 2680 of SEQ ID NO: 1561962
ugccgagucuuauauaacc

SEQ ID NO: 1711376 - RNA, 19 nt, Artificial Sequence
  Description of Artificial Sequence: Synthetic oligonucleotide
  Antisense strand to SEQ ID NO: 1711375
gguuauauaagacucggca

SEQ ID NO: 1711377 - RNA, 19 nt, Artificial Sequence
  Description of Artificial Sequence: Synthetic oligonucleotide
  Sense strand starting at position 2685 of SEQ ID NO: 1561962
agucuuauauaaccaggau

SEQ ID NO: 1711378 - RNA, 19 nt, Artificial Sequence
  Description of Artificial Sequence: Synthetic oligonucleotide
  Antisense strand to SEQ ID NO: 1711377
auccugguuauauaagacu

SEQ ID NO: 1711379 - RNA, 19 nt, Artificial Sequence
  Description of Artificial Sequence: Synthetic oligonucleotide
  Sense strand starting at position 2738 of SEQ ID NO: 1561962
cgccaucucucaguuguaa

SEQ ID NO: 1711380 - RNA, 19 nt, Artificial Sequence
  Description of Artificial Sequence: Synthetic oligonucleotide
  Antisense strand to SEQ ID NO: 1711379
uuacaacugagagauggcg

SEQ ID NO: 1711381 - RNA, 19 nt, Artificial Sequence
  Description of Artificial Sequence: Synthetic oligonucleotide
  Sense strand starting at position 2742 of SEQ ID NO: 1561962
aucucucaguuguaagaag

SEQ ID NO: 1711382 - RNA, 19 nt, Artificial Sequence
  Description of Artificial Sequence: Synthetic oligonucleotide
  Antisense strand to SEQ ID NO: 1711381
cuucuuacaacugagagau

SEQ ID NO: 1711383 - RNA, 19 nt, Artificial Sequence
  Description of Artificial Sequence: Synthetic oligonucleotide
  Sense strand starting at position 2949 of SEQ ID NO: 1561962
uuugacaucugcuggcaga

SEQ ID NO: 1711384 - RNA, 19 nt, Artificial Sequence
  Description of Artificial Sequence: Synthetic oligonucleotide
  Antisense strand to SEQ ID NO: 1711383
ucugccagcagaugucaaa

SEQ ID NO: 1711385 - RNA, 19 nt, Artificial Sequence
  Description of Artificial Sequence: Synthetic oligonucleotide
  Sense strand starting at position 2950 of SEQ ID NO: 1561962
uugacaucugcuggcagau

SEQ ID NO: 1711386 - RNA, 19 nt, Artificial Sequence
  Description of Artificial Sequence: Synthetic oligonucleotide
  Antisense strand to SEQ ID NO: 1711385
aucugccagcagaugucaa

SEQ ID NO: 1711387 - RNA, 19 nt, Artificial Sequence
  Description of Artificial Sequence: Synthetic oligonucleotide
  Sense strand starting at position 2963 of SEQ ID NO: 1561962
gcagauacauggcaagguu

SEQ ID NO: 1711388 - RNA, 19 nt, Artificial Sequence
  Description of Artificial Sequence: Synthetic oligonucleotide
  Antisense strand to SEQ ID NO: 1711387
aaccuugccauguaucugc

SEQ ID NO: 1711389 - RNA, 19 nt, Artificial Sequence
  Description of Artificial Sequence: Synthetic oligonucleotide
  Sense strand starting at position 3009 of SEQ ID NO: 1561962
guggccacuccagauaaau

SEQ ID NO: 1711390 - RNA, 19 nt, Artificial Sequence
  Description of Artificial Sequence: Synthetic oligonucleotide
  Antisense strand to SEQ ID NO: 1711389
auuuaucuggaguggccac
